United States Patent Application Publication US 2019/0348154 A1 - sequence listing, part 136

SEQ ID NO: 515294 - DNA, 2589 bp, Stenotrophomonas maltophilia
atgaatgccccacccatcaactcaatgccgcgtcaccaccgcctcgctgcggctgtgcttgctgcactgctgcctgtcagcgcgatgggggccccggcactggaattcaatgccgacttcctgcacggtggtgctgaaggtctggatctgagtcgctttcagaatgatggaccattgccgggcatctacagtgcagacgtcgtcgtcaacgacgtcgtcgttggtcggcacgacgtagaggtgcgaactgacagcaacgatgctgtgcgcctctgcctggatccggcattgttcaccctgatgtcgctggacgagtccaagctggacgcataccgtcagaaggaggaaggtcgcgatctgttgcccctgccggagcaggctagctgcgatgcactggagcgcttcattccgtcggccagcatgcgccttgatggcggcgagcagcgcctggaaatctccattccgcaggccttcctgcgctcgaaccgaggtggctgggtgtccccggatcgctgggacacgggaatcaatgcggcgctgatcaactacagcatcaaccatagccgttcggaaagcggtggccgccagagcaaccacaccggcgcgaccatcgacgccggcttgaacctgggcgcttggcgcttccgccacagcggctacttttcccaaaatggcaatggcagtcgcaattacagcgccaaccgcagctatgccgagcgcgaaattcgtgcctggaacgcacagctcaccgtcggtgaagccgcgaccgcaggcgatctattcgattcggtcagctacaccggtgtcaatctgcgcaccgatccgcgcatgctgccggaggtattcggtagctatgcaccggtggtacgcggcatggcacagaccaatgcccgcgtgaccatccgacagcgtgggcaggtggtgtttgaaaccacagttgcgcctggcccattcgagatcgacgacctgcgcaacacctcgggcagcggcgatctggacgttgaagtgaccgaggccgacggccgcgtggagtcctttgtcgtgccgtatgcgtcggtgccgcagctgctgcgccaaggccagcagcgtgccagcttgacggtcggccagttgcgcaatgattcgatcgactcaccggcgttctttgaagcgacactgcgacgaggtgttggcagcgcgttcacagccttcggcggagccaccgtggctgatggctataacgccgtcatcctgggtggtgcgttgaatacccgcatcggcgccttctccggcgacgtcaccttttctgatacgcgcctgccgtcgccgatcgatggcttcggcaagcgcatgcagggccagtcctatcgtttggcctacagccgtagtttcaatacagccaccagcttcaccctggcggcctatcgttactcgacggaaggctatctgtcgttcagcgatgcagcgcgcatgcgctacgacctagccaatggcaattctgcttccaatgtgtcccggcagcgcagccggctcgacctcacggtaaaccagcgtctgccgaagggatcgttgtacctcaatggaagcaccgccgactactggagcgagaatcgccgtaccactaatttctcccttggctacagcgggcagctgggtcgtgcgtcctacagcatcagtgcccgccgcacgctggaatcctcgctgtttaacagcggcagccagaagcagagcactggtgcctatctgagcgtcagcgtaccgctgggccgtgcgccggcagcgccgcgcctgagtgccagtaccagcagtggcagcaagggtggaagccaccgcgcgggcatcaacggcagtttcggtgacggcatgcagggcagctacaacctgtcgtacggccaggccccgggcagcaggaacgtgggtgccaacgtgggttacgccgcgccgatggcaaatctcagtgcgtcctggagccgcagcgacaacagccagcagttgggtctctctgcgtccggcgggctggtcgttcacggtgacggggtgacgttctcgcagcggcttggcgacactgtcggcttggtgcatgttccggaggggccgggtgccggtgtgggtcatcaccgaggcattaagaccaacaagcgtggttacgccgtggttccgtatctgagcgcctaccgcatgaatgaaattgcggtggacccgacggggctgccgatggatgtggagttgaagagtggctcggtcactgctgtaccgaccgccggtgcggtggtaaaggcagtcattcctaccgccagcggtcgcagtgcgctgatcgaagccttggataatcacggccagcccctgccgttcggtttggatgtgtacgacgaaaccgggcaggtggtcggtgttgtcggccagggcagccgcttgtgggtgcgcggcatcaacgacagcggccagttgcaggttcgccccgggggtgatgtggcacaaagctgcacgattgcctacgacctgactagtgcgagcagtgatcagctgtacatcagtgcgtgcctgcgcgcgagcgtagcagagcagcgcgaaggattcgcgcctgctgccgcccccggtgcgcctaactga

SEQ ID NO: 515295 - DNA, 840 bp, Stenotrophomonas maltophilia
atgaacacatacaagaagggtctccccattcttcctcagcgcgtggctattcgcttgatcgccgcgttggcactttccggtattgcaatgccggcgctcgcggatcttcgcgtgaatgcatcccgggtcgtccatgtggaaggatcaggccctgccagagtgaggatccagaacaccggtgagcgggcggccttgatccagacctggattgacgcgggtgactccgcggcctcacccgagcatcagagggcacccctgatcaccacgccgcctttgttccgcctggattcgggcaagcgcacggatatccatgttcgcgccgccgatacggcgagcctgccgcgggatcgtgagtcgcttctatggctgaacatcctggacatcccgacacgcaaggctggacaggaaaagagcgcatttgagtttgcggcacattggcgattgaaggtgttccatcggccagtgggccttcctgggagccaggaggcttcagctgcggcggtgcaatgggatgtcgtcgaagacgaggacgggagcctttcgctgcgcgcacgcaatccctcggcctactacgtcagcctgcgtgagttggagatggcaggacaggtactgccggtggcggcacaccatgcacagattcccccctacggaacctggacccagcgcattcccggcggggtccgtgcttcgaatggtcagctgccactacaggtcaagtggcttgatggccaaggattcgtgcatgcgcttagcacatcagtgctgatcggggaaagaagtgtgccatcgaatgatggcgcaggcgacacacattcatttcaatccaatgccccacgctga

SEQ ID NO: 515296 - DNA, 1038 bp, Stenotrophomonas maltophilia
atgattgcccatgagaaaggtcgaaggattcgataccgtcccggttactggacgcgacgactgacggtgttgttgatgttgctgggaggtgctggcgcagtgtctgcatgcgataggatgcagagtggcaccagcgtcacaggcggtcaccgttttgatgacccctatagcaagggggatgtggtgctggactggcaggatgtaaggcgtgggttctttggaaactgtactgccggagctacagctgaaattaactttacgcctacgctggagtatgcggaagatatcggcggagttccgaccttccatagtccgaacggaggcggcttgggcgtgcagatctacatcgaaggtcatggctctgtaggcgcggggggggcgaaggtttctgcgactgcggaatggcaggcgggacctggcatgtatgcgattgctttcgaagtcagtcacaggattgtcgctttacaaacaatcaacactgatgcatcaacaggctacatggatggcgctctggaggtcgacgacctgacgtttggacatgatatgaataacctggaatttgatggttattcaattacaaagaatacctacacatcctgtggctttacctccaccccgggagatgtgaccttgccctctacgcacatctccgtgctgaggaacgaaggtgacatggggaaggagcaaaccttcagtttcggctggagttgctacattgggaacgcgccaggcgaaagtacaggcggcgatttttacttgtccagcccaaacggcagtggcacggatgggaggctggagacagacggctcagccacgggcgtcgacatgctcgttacgctgacggacaacaagaacaataaggtgccggcgttgtttgatggaacttggtactccggtcagagtgggttctccaagcctggtgagggcgtgggcgtatcaggaacccagcagatgcaagtgcgattcatcaggaactcggatccactgagtgcaggtgacgccactgcggaaatgacggttcatttggacgtttactag

SEQ ID NO: 515297 - DNA, 594 bp, Stenotrophomonas maltophilia
atgaccaagaagcacctcgttccttccaccctgatcgcgctggcggcgatgaccgccgcatcgttctccacgcaggccgcggaccgggagggcttgtacgccttcggcggcgttggcgccaccgtgccaaagggcgaactctccgctgagggcgcatccttcgagcgcagtgacatcgtcaccagctttcaagtcggcgccggctatcggtggaatcggcacctggccatggaggtggaagcgcattcaacgctgggcaaagcggacctgcagggtctcggcaaagtaggcagctacggcgcgcgtgccggtgtgctgggcatcctgccactgggcgatcgcttcgagctggtcggcaaggtgtcgctgggcaacgagcgcagccgctgggccgaaggcagcatcaagccgtatcgcgtgaccatgaaccagtggaacctgggcttgggcatgggcgcgcgctactggttcaacgacgcgaccgcattgcgcctggacttggacgggctggccagcggcagctatcgagcgggtccgagccgcggcgagctggatgtcggctcggtgacgctggggttgcagcatcggttctga

SEQ ID NO: 515298 - DNA, 858 bp, Stenotrophomonas maltophilia
gtgaacggtgcgcttacgccctggctcccagccaacggcggggcggccacggcagagtttcagtgctcgtccaatgaggtgatcagccacagggtggaaagccatggcggattcatcggcgagcgctaccacgaaggtggcgcctcctatgtcgtgtatccgacgggcgtgccgggcgtggggttcgccttcctggtggaacattcccgcggagggcagggcaggccgaccgcgctcgggtacgacgaggttgtgcttcatgacggcgacaccccggccggcagtatcggcacgcgcatcatggtcaagtacatccgcaccggtgatcttcccggtggtagcaggaatgccccagagtccatgatcatgcagtcccgtctgtatgatcgctctggcaatcagtttgcgcacgatgacctttggatcagctcgaacgtgctgacgatccgtgatcggcccacttgccggatgcggacgcaggaggtgcggatgcctacgatctcaatggccgcattcaagggcgtcggcacgcatgctggccagcgtagctatgagctgctgttggactgcgagggcggggtgggccaggtggattatcaggtcgtaccgacaacccctgtactcaacagcgcgcaaggtctggctggagctaccggcggcgtgcagggagtggcctatcagttcctcaatgcagatggcacaccgatgcgcttctatggttcggacgtatttggttatgggtcatccagcgtggaagtgcttcgcaagaccttcggcgtacgctaccagcagaccgaacccaccattacaccgggcgcggccaatgcaggccttgtcttcagcttgactttcccatga

SEQ ID NO: 515299 - DNA, 714 bp, Stenotrophomonas maltophilia
atgaagtcctcgttcccgcatctcctgttggtagcgctgctggcgttctgtgcgcctgtccgtgcggaagtctccgtgctgggaacccgggtggtttacccggcagagcagcgtgaggtgggtgtgccgctcaagaacgagggtgcgcgcgcatcgctcctgcaggcctggattgccgatggcgatctcgagcagaagccggaagcgtccaaggcacctttcatcctggacaagccgctgtttcgcctggaaccggggcaatcgcacatcctgcgcgtgcgcagtcttcctgcgcaggcgccaaaggacgaccgcgagcatctgtactggttgaatgtggtggatgtgccgccacgcgaagcagcaaccgacgagaatgcagtgcaggtggccattcgttttcggatgaaggtgctctatcggcccaaaggactgggcgcgccggtgaaccccgttgcccaggtgagcattcgccaggccccagaggggttggtgctgcacaacgcggcacggcattacttcaatgtggcagaaatgacgctggtgtctgcccgtggtgaacgatcacttgaccagttctatctggcgccgggcgagactcgcacgctggcgttcccggaaggctttgcgggcccactaagcagcatccgctacagttgggtggataatgaaggggcgctgcatccggaatcgccggcgataccggcgctgtag

SEQ ID NO: 515300 - DNA, 2682 bp, Stenotrophomonas maltophilia
atgaatggtctggcttcgagggtctactctttcatgggtgggcttcactatgagaatgttgataggtatcagccttcgggggagtatcttgaagtagttcgagagttgcttccgtcaagctggagtatccatatgggtggattctggataacatgtcgtccgcctgcttggaaagggctaaagcacggttggaagattcatgtttctagcaccgtcgagaatgcggaagttacgcttgcactggtttgtggtgttctttcgtccgcaggggttatgttcaaattcacatctgatgcaaggatgctgggcatgacatttgggaagtcatggtcccggtttcaggttgggaagttcattacaatatacccgcgtgatttgtcggaatttaagggaataatgattgacgtccataaggcgacaagtcatctcacggggcctcatatcctgactgatcgaagatttgacgaaagtagggtggttcactacagatacggttctcatctggatcaatacagggttgatcggtacggcatccgcactcaggggtttgagctcccggatggtcagtggtacgtggatgcaagaagcgcgctgtttagactgcctcctggtgtggtggatatccacgcgtcatcaatcggaggttcggatgagcccgattcgatgattaagctgaacgggagatttaaggttgcttctgcgctgaaattcaacggcactggtggtgtttacagtggtcttgatatgctgacaggaaggggtgtcataatcaaagaggtgcgcgggctggcgaacacgccggcggatgatgagaatcattctctggtgaagagcattcatcgccaagccgcgatgcttaaaaagctcgcaaaaactggtgccgtgcctgcgtttgtggactttttcagggagtggaacaattggtttcttgtggaggagcaaattgatgggttgacgctgtgggactcatcaatggacttttactataaaagtgaaagtcagacttgcggcgatggtttttctaggctgcgagagaagattcataaggttgtgcaggcgctggccttggttcatcagcacaagattgtgcttagggacctgacgaagagtaatgttctgtttaccgcaacgggtgaagtgaaattcattgatcttgaatttgcacatgatgtagagacggacaatgcctgggtgaaagggtggacgcccggatatgcatccgaacagcagttgagttcagttaggccgacaatagaagaggatcactatgccttgggtgttttgattctggatattgttacatattgcgcatcggggctggatctggcaagagacaatatagtaaatctgaagtttcctcaggtgctcaaagatctcggccttcccagcgagattcatgaaatggtatgcggtcttatgcaaacagatgtccatcatcgctggagtctggagcgcgtactggactgttttcagagagcatctgtggagtcgccaggaagatcgatgttgccgacgcgcgcagaactttataaccgcgcgccaccgggagatgatttcttcgtggaattgtcgactgtcttggacggtctgaaaaagtatttaaaatctcaccaatgtgctgcgagggaagatcggctgtggcctgcgagttcacagttattctctacgaatccgatctcagtgcagtttggtgctgctggaacggcattctttctcctgcgaagtggggcaggattagattgcgaggttttggactggatagaagaaagatcgtcactggtgaaatgcccgccgggtttgtactcgggacttgggggagtcgcgctgcttcttcttcacgctggtcgaattgattctgcaaaaagacaggttgagctgatcggagccagcccgcttgcgctggctacgcctagcttgtacttcggtgctgccgggcaggggttgattttattgcacttctggcgtgtgacaggagattccgcatacttggcagatgcggtattaattgcagagacgctaattgcgtcggcaagaagttcggcggcaggttgtttctgggagtgcgaagggaaattttttttaggattgggtgacggtcagagtggtatagccatattcttgacatacatgggtgtggctactggagagtccaaataccatttatttgcgcgaaaggcgctggattttgatgccgccaattgtgttgtgcgagctggtcgaaaattctggaggagttacgttggggcgagtgacagttctcccagctctcctcatacccggttcggatcagcgggtgttggggcggcttgcatccgatactatgcagcgacaggcgatgagcggttcagggatttggcgctggattgcgcatactcagctggatctagggtttccaataaaatctggcaggatagtggaaacgctggctttggtgagcttatgcttgacctgaaccattttattggtggtgatttctttaagaactcagcaatgtatcaggcggaagcggtgcttccacatgccgtggccgttgatgatggttttgcttttgctgggccggcacaccataagttgtgcagcgactatagcatgggaagcgcagggatcggtatattccttgatcggcttctccacgatcgggggcgattcctgatgctggatgatcttattaaacgcatctag

SEQ ID NO: 515301 - DNA, 807 bp, Stenotrophomonas maltophilia
ttggatcacgcggcatccgatgccatcgtcgccgcctacgaggttctgcgacggtggcttggggtgccggacgaaaaatggctgcctacacgtgccaaggagctccttccccatctgatggcggtcaccggtgcgcgaccacgcgtgcctacgaaggccgaactggaccggattcgctacacaccgatcacggcgggcttcgcccccatcgcggagctttcgcggcagattgcaaaccgaagggggctcgctgccgatattgatgccagcggcgatacgaaaggtgtgctgctcgacgtggccgagctgtgggagatgtacgtcctcagcattctgcggaaggccgccgcaccgctgacggtgactcacggcacccgacataagtctgtcaccaagaaactgctccacagcgatgtctcaggtcaaggtttgggcactttgatacccgacgccatactgttctcaggctccaccatcagaggggtggttgatgccaagtacaagtccctccatccatctgccagctcaccaaatgggccgcagcgcgacgacctgtatcagatggccacctatctgggacgcttccagtctcctgccggaatggtgacctggggccttttggcgtatcccttcgacccatcaaaacctggtacgcccaatgccgagcagagcagcccatggagccttgatgaccgaaagaagatcggctttgccacgttgccccacaaccccgccgacgcagtggccaagttacgctccttggtcatgcaagtagccactcctgctgcttggtctgcaagagcgtga

SEQ ID NO: 515302 - DNA, 1791 bp, Stenotrophomonas maltophilia
atggctcgctattcggaacacgacacaaacaagatctaccgagcagcagactcatttcgcgccaactgcctcctgcgtgacggctcgctactgttcgccgacgattctgtttggcgtcccgacgtgctggagcgcatccacaaagccttcgttgccacccccgacgagggcgaccggacgttcatcgacaagttcaaagaccaagtcggaaaggccggacaggacgtatcacgtcttgcggcagagatcttgagcgtgtacttcctgtttccgtccagtgtcggtggcgtgcgcaagcggcaggtcgtgaacgaggtgctcggctggggcggcgacagcctgccggactcacaccctgtctccgcagcattcgccaacgggatcggtagcggcggtcagggctacaacacccgccgccccttcgagatcgcctttctgatcgaactcgccatcgcgtggaagaagttaccgcaggatcggcaggtagaggtggcggccgatccgtggctctttcaagaggttgtggacagcattgaggatgcggagtcgaagcagcttcggcacatgcttcttcatctcttgttccccgaacacttcgaacgcatagcaagtggaaatcacaagcgcagagtcatcaaggctttctcgggactggtcacggccgacgcagaggatgatgaccgggcgatcttggccatccgccaggagctcgaacagctgcttcccggccaggagctggacttttactggtcaccgctggtcgaggcttggtacgacgatagcgagggcgcatctgaaggcgcgccgctggagatcatccagcacaagaagcagatcgtcctctatggcccaccgggtactggcaagactttccgcgcaaagaagctggctgagcgggtcatccgatctgcggcactgagtcagatggggccggctcgctacttccagtctcaatctgttgtcgaatccgcgatccgcgacaacgtgcatcgactacagctgcacccggcctacagctacgaggacttcatccgcgcacttcacatttcgaatggcggtggcacggaatatcgagctggctaccttccaaagctgattgaggacatcgagcagcagccacgcgctgaacgtctgccgcacatcctgatcctggatgaaatgaaccggacggatctgagtcggatgctcggcgagtgcttctccttgcttgaagatcgcaatcagacaattgagcttccggcacgcaatggcgacggggcatcaatgaagctgcgcatcccggacgatctgtacgtgatcggaaccatgaacctgatcgaccagtccatcgagcagatcgacttcgcgctgcgccgccgtttcctgtggctactttgcccgtttgacgccgaggctctagtgggtgccgccgaatccaagtggcaggttctgaaatcgggcctggagtgggatcgcatcgaaccggacttccgcaaattggctgcagcggcggcggcgttgaacaggcagatccacgacagcccgctgcttggctcgcagtacgagatcgggcacacctacctgctagatgtggtcgtgttccttcgcaatttcctcggtgctcgacctacacgcaagcagaactacctttggaacaaaaagggtgaagcgctggagcctgtcgtgcaggtgtggaatctgtcccttcgcccgttgctcgagcagtatctcgccggactggacgcgaccgcgcgcaacactgagctcgaccggctctccaaggttcttctcaagccgtcggtggccgagtga

SEQ ID NO: 515303 - DNA, 2553 bp, Stenotrophomonas maltophilia
atgaccgaaatcattactaacgagaagcgccttgtttcctcttgcacagaaatgcttaggggatctggtgacgctaattgctctagaaaattcaagaacaaatcgaatcaaatgcaactcagtttatctggcctggaaacgttagctgccacacaagtaacccatcaaggtggtaaaggagagccctttcatgactggtacccatacctagaaggattttcatcagaatttgtcaagtttgttcttgcgaaatacatgccgaatgccaaaaagataattgagccttttgctgggacagggacaacccctgtggctttggctgcatttggcattgattgtggctactgcgaagtgaatcccgctatgcggctcgtcgtcgaagcgaagatggcgcttggctctgccacaatgacgcgtcgaaagaaaattgcctcaagacttcagggtattgccgaaaacctccgtgatctcgtaaaagcagcgcaaccggacaaagctttacaggatgactacaaagttaactttgagggaagtcaattcttcaacgatgtcggcatggctgcagtgctttctctcaggactgtcaatgatgatgttgcaaaagaagacgagttgattggaaatttattcaccattgcagtgatggcgaaactcgtcatttgctcaatgttaaagcggtctggtgacgttagatacaaaacagaaaaagagcttcagaaaggcattccagatcttatcggtgaggtctcaagccatctccttctcatatcgggagattgtttggccgccgatcatctgacggcgtcggttggcatcattacagccaacgctcgcgatcttttgaagacggcatcatttgatgctgatggggtcattacttcaccgccttacctaaatggaacaaattactttagaaatacaaagctagagctttggtatgggcgctttctgtcaaacggaacgactctaagatcctacagggatgccgcaattacttccggcattaatgatgttggtgtggcgcagggtagaaagattgtccacaaatcgattcagatgctggttgataagctctctgagaacgcctacgaccagagaattcctagaatggtggcaggctatttcgaagacatgaggcttgtccttcaggggctaatgcatagctgcaaaccaggagcgccgatctgcattgatattggcgatagtcgatatggtgggatacatgttcccacgcatgagattcttgagtcgctgggagttgatattggccttgagcacatcgagacgttgcatctgaggaacaggatatcaaaggatcgcagcgtattgtctcaatcgctgattgtgttcagaaaaaaagatagcgcaggcttaaagccagatccgtctttaacaaatgagcctttccatgaagcggcagataaaggagattttctttctcgatgggaaaatttcaaagatgtattgccacaccagaaggagccgtactcaaaacggaactggggtagccaactacactcggtttgctcttatcaggcaaaaatgaagcctgccttagcgcaccatttggttgatgtattcagccgcagaggtgacaaggtcctcgacccatttagtgggtctggaacgattccatttgaggcatgcttgatggggcgcgagggatacggcttggaaattagtctgctgggcactgccgtatccaatgcaaagctaatgcgtgctgacgaacaaaaggtgcgccatttaatcgataagctagatttgtggattaagaataacaaggctacctccggcacactgcggcaagcggaggagattaggttcaatggggctcttgcggagtatttccatcctgatacgtatcaggaggtgctatctgcacgcgagttctttgcggcgaaccagagtgattcgccggagtggcatctggtcatggcctgcatgcttcatgtcctgcatggcaacaggccttatgctttaagtagaaacagccaccctataaccccatatgcgcccacaggagatttcataaaaaaatctgttgtagaaaaggtcagggcaaaagttgagaaaagcttggcctctcagttgacagacgacctccccactgggagatgctttcaaggtgatatttgttcggaatggccggcagaactccgagatatagatgccatcatcacatcgccgccattctacgactcgacacgcttctatataacaaactggatgagattctggttctgcggatgggcaagaagtgattacgatacccgcgcgaatgaattcgtcgaatcgcttcagaagaaaaccttcgatgtttatcgagggatatttgagcagtttcatgcccgcctaaagcctggcggattggctgtgctgcaccttgggctaagtcacaaatgtgacatggcaatggagttgaccaagcaggtcaacggactttttaatgtgctggacatcgctaccgaatcagtaggacattgcgagagtcatggcattcgcgacaaaggaaccaccacaggacatcagtaccttattcttcagaaataa

SEQ ID NO: 515304 - DNA, 1407 bp, Stenotrophomonas maltophilia
atggttaagcttccggggaaaactgcatattccggcgtacggcgtccaatgacaagagagtctggattctcatcgcaccctgattcaactggtggcgagtggaaaaaagaaagctctaaaacccttaaactccaagccggggaaactgtagaaattgttttcacaatcccggatcacacaccaaatacgtggatagcgttcggcggatggtattgtgcagataaatgcttggcgattgaaattacctccccaaatccaaagcacacattatcagagccagcatcaccgaattggtcgaaatttggaagcatgtggcagggagatggcaaaggagttactgccaccgtctctatgactgcgaataaaaacgcaagtatctctctttggaatctagcttgtgggctcgttgaacagccgggctgccataccggcggcaagttcgaagtatgtactgctccgggatatctaagcaatttgcacctgctttcaccggaggcgcacttttggagcaccaaaggggagactgggatcgcactgcttgggtcgacagaagtactggaactgagcgacgctggtgagcatatttttctaaaaacttgcaatcgatgtgcacgctttcttccgataaatgtaaatgacgagcgcattcaactaagcttctccaatcattgtgttgctcgccgaccgtgcatacacacaggctttggaaaactaaagaatgcagaaacgcaggaagtcctccagcttaactacggataccagcttgagtgtagattctgcaagaagtattgcgtcaatgcagcccataataaaaatagaactggcgctcagatgaaggaagacggcgctcgccgtaggcattttgaattgttggttaccgagctctatcaaatgagcaggcagatggcgttcaagcaccgaaccggtgttgaactgtctgattacatctggaaaaaatttagctgcaagtgcttcaattgcaacgcagatcttccgactgtgaagtcgatggcgctagatcacactaggccactagcactgctttggccgcttgatgaaactgcgactgcattatgcggatcatgcaacagctccaaaagcgatcgctatccgagggaattttactcggatgatcagttagtgaggctcagcgctctaactggcattcccgttgatcaacttaacgagcccactccgaacgtcgaggtcataaccgagcttgttaagcgcttagactggctttttgatacgtttctaatgcgagctgaaatgatcagagttcgagatggaaagataactggcgagttagtggtaaaggcactccagaaagcctttgatgctgcccctggaggcgcgccggtcgatcttgttgcggaatatgaattacgacggcagaaaaaatcatag

SEQ ID NO: 515305 - DNA, 498 bp, Stenotrophomonas maltophilia
atgaacctgattccgtggccttaccgctggctggccatcgccgctctggctgttgcgctgattggcttcggatggatcaagggcgcgggccacgttcaagcccggtgggacgccgccgtccagcaacaaaccctgcaggctgccgccgtccgccagcgtcaggccgaggccaccatcaaggtcatcacgcagtacgtcgaccgcgtccgcgtcgtccgcgagaagggcgacaccatcatcaaggaggttcctgtctatgtgcccgttcaagccgatgctgcttgcactatcaaccgtggctttgtgcgcctgcacgacgctgccgccgccggtgaactgccagagcccgcccggaatgctgatgcggcccccgcaggcattgcgctctctgccgtcgccggaactatcgccgccaactaccaaacctgccacgagaacgcagagcaactgagggtgctgcaggcgtgggtcaatgagatgacaacgagcatcaagtag

SEQ ID NO: 515306 - DNA, 501 bp, Stenotrophomonas maltophilia
atgatacgcccgccgcaacgccggacggtggccgcgctcacgctgtccgctgcagccctggtgggcatcgtgctgcacgagggctacaccgaccgcgcagtgattccggtcaagggcgatgtgccgaccatcgggttcggtactacatcgggcgtgaagatcggtgacaccaccacgccgccgaaggcgctggcccgggcactcaccgacgtgcagcagttcgaaggtgcgctcaaaacctgcgtgaccgtgccgctggcccagcacgagtacgacgcgttggtgagcttttcctacaacgtgggcagccgcgcgttctgccagtccacgctggtcaggaagctcaacgccgaggactacgcgggagcctgcgctgagctgctgcgctggcgcttctttcagggcaaagactgcgcgctgcctgcaaacgcgagactgtgcggcggactggccacgcggcggcaggccgagtaccggcagtgccttggggaagtgccatga

SEQ ID NO: 515307 - DNA, 228 bp, Stenotrophomonas maltophilia
atgaccaccgcccgcaaactctgcctgctcgacgactggcgaaagatcgcgcgccgcgcctggagtgtccgcctgtctatcgtcgccgccatcttcacggcggcggaagtggtggtgccgctgttcggcgacgtgctgccgcgtggcgtgttcgtgctgttggccttcagcgccagcatcggcgcggccattgcgcgattggtcgcgcagccggagatgcatcgatga

SEQ ID NO: 515308 - DNA, 2274 bp, Stenotrophomonas maltophilia
atgggtggcagcagcaaaaagcaaaccgtcggctaccgctaccggatgggactgcacctggtgctgtgccaagggcctgtcgatgccgtgcaggaaatccagatgggcgaccgtaccgcgtggggcgatgccgaccgggggccgctgtccagcgggcacggcctgaccaccctcggtatccacaagcccacgctgtttggcggtgacgagcgtgaaggtggtgtggtcggcaacatcgatgtgctgcccggaggccccggccaggggcgcaacgactacctgatgagccgccttggaccagccattccagccttccggggcgtgctgtcactggtggcgcgcaagattctgtttgcggccaacaacccttacatcaagccgtgggccgtgcgcgtgcgtcgtttcacggcgggctggcacggttatccgtggatggagtggaacgctgaagtccgcgcctgggatgacagccaaggccgcgagatcagtgtcggcatgaacccggctcacatcctggtgcaatgcctgaccgacccgcactggggcatgggctacccgcaggacagcatcggctggagcttctggaatgcggcgtgggccctgtcggatgagggcttcggcctgaatctgatctggacgcgccagcagcccatcgagagcttcatcagtcaggtcatcgaccacatcggcggcattctctacaccgatccggagcaaggcaccttcgagctgaagctgctgcgcgacgactactgggtcaatgacctgccgcaactggggccggacgagatcgtgcggctggagcgtttcgagcgcgcgcagtggggtgagctgcccaacgagctgaccgtggtctacgccaactggcaaaccggcggcgacaccaccgtcactgtggaaaaccttgccgcaattcagttgcaaggcggcgtaatcaaccagcgccgtgactacccgggcgtcaactacgggccgctggccgcgcgtctggcgctgcgggatctgcgcgccctgggttcgcccctggcacggatgagcctgaccgtggcacgcgacacgctggaacgcgcaccgctgcccggtgacgtattcctgctcaactggccgcgtttgggtatcgaccagatggtggtgcgcgtgaccggcatcgataccggcaccttgggcgcggccgagtggcgcatcgaagcgatggaggatgtgttcgggctggacaacgccgtgctggcaccgacgccgcccatcatcgacgagccaaccctggagccgttgccacctgcattggtgctggcgatggaaattccgtactgggaactggcgcgcagcttgtcgcgtgccgaactggattacctgaccgacaccgatgcagcggtgggtgcattggccgctgtgggcggtgcgggccagctcaactggcagctcgccaccggtgcctcggcaggcgagatcggcagcgttgccagcgaggactacgcgccactgctcacgcttgatgcgggcttgccagccagcgaggccgatgccatgagcgtgccggtgaccgccgtcagccagccggaaaggctgaccgtgggcgactacgcctatctggtcgatgccagcggggagatctgtgaagccgtcgccgtcctgggcttcaataccgctgcgcccacggttgaccttgcacgcggcgtgctcgacaccacaccgcaatcgcacccggtcggaacccgcctcattggcgtgggcgagtggctggcatcggaaggcgcggagcgcgccccgggtgaatcggtgttcgtgggagccatcccgcgcacctcaaccgatcaaggcgaagcggaactggccagcaatggccagccgatggtactgaccgggcgacaggccttgccgtatccaccggggcgcatccgcctcaatggccagaccgagcctgccgtggtcgccggtgacctcagcatcgcgtgggcccatcgcgaccgcacccagcagaccgcctacctcgtgcagcagggcgaagccgacatcgggccagaaccgggggtgagctacacggtgcgcatccgagatcgcaacgacgcgctggtgcatacggcgtccggcatcaccggagcgaatttcgtgtgggatgtggcgacggctgcggctgatgccggtgcgctgggcgaccgcatcacgttggagctcaacgccgtgcgtgacgggctggaaagctggcaaccgcaggtgcgcgctgcggatcgtgcgggatacggcctgcgctggggtcagtattggggaggtgtttga

SEQ ID NO: 515309 - DNA, 789 bp, Stenotrophomonas maltophilia
atgagccagcaagcgctgatggaagtcgagctctacgccttcgccagcagcagcgcgaatttctacctgaccccgcacgaattcgacgtcgatctcgacggcacgctgtacaccagcctgtccatcgagcgcaacgaactggcgctgggggccgaagcggccaagtcagcgctggatctcaagctgccacccgactgtgaacttgtgcgccacctgctggccacgtcgctcaccggcgacaccacctcagtcaccttgcgcatcgggcggcgcgatacctggggcgattactggtggttgtcgggcacccgctggatgggccgggtgctgggtgtggaaatcgacgccgatgccgcccgcatccgctgcgaatcggcacaggtcagtttgaagcgcatcggcctgcgcaggctctacagccgcaactgttcccacgttctgtactccagtgcctgtggggcgtcgcccatttccgagagtgccttcgtctatgaagcttatggccgcagtgtcgatctcgatggcggtgtaccgggtggcgtcagcggtggcttggccggtggctggctgcaaacgccggatggagcacgccacatgatcatccgcgactacggcagtggcgtcgagctgctctatccagcggccattgagccgggcacgcaagtgttgttgacggtcggctgcgatcacagcacgcaaacgtgcgcctcgcgcttcggcaacctcgacaactacggcggctttcccgccatcccgagcaagaacccgttttcgacgggcgtgttctga

SEQ ID NO: 515310 - DNA, 1569 bp, Stenotrophomonas maltophilia
atgacggatcgcgtcatcgctcgagacctcgcggaggtctccagcaggccgacgcccggaagtgaactgccggaatttcagggcgaagtgctgtcgcgtgcatcgttcggagcccgtgcggctaccttcacgcccgaaaccgccattgcaccggttccgcccaacttggctgcgacttggcttgctgagtctctggcgcacccgtggccgcccatcgatgccccggtattcctcgtcgaggtgctgcgccgggacaccgcatccagcgccatcgtcgccactggcatggacgccttcggggatcaaccctggccggatgcgcaacgcggtgtgtttgccttccgccacgactggaccgagcccttggtcgaacggctggagtggcagaccagcgtcacacggctggccagcggcaacgaatcccggcaagcacgccgccgcgttcctcggcgctggctcacctacaaggtgggcaatgcccgcccgaccgacgcactggtcgccgactggctggccgatcatcagggccaaaccgcatggtggccgctatcacagtacgccgtccacctcgtcgaaaacgctgaggagggcgcgctgaccctggcggtatcggaggccgcctggcggcgctttgcccctccggctgctgcgctgcgcttgacctacgacggcgtgcaaggctgggagggcagcgaacgctgggctttgatcattgcgcccgagggctggcaagttgcccaactcagcgacgtggaagccgatctgctgtggctggccgatccgctggcccgcaaagcggcggctggtagcgccgtgctgccgctggtgtggggcaaggccattgatccggccgatctcacccaatgggtgccggggatggtcggcggcagcgtcaccgcgagcgtcacgcccgaacaaacgccggacatggatgtccttgatgacccgtggctggacgagatcccggtctggcccgatggcaactggcgcgacgatcccacggccagcgcgcaggcgacgatcacgcgccaggatttctcacccgcagatccgtgggtgcggcgtgacgatccgtgggcgacgacgacttaccagcgccgctatctggccagctcgcttgatgaagtcgacatctggcgggcgcggctgtggcgcactcaaggccgtctggaagccttctggctgcccgatggcttggccccgatcctgtgggtgagcgtcgaagctgatcccgatgacggtttcctgcgcgtcgatggccaagacctctcggcattctggcatcgccccgccgcctgtttgatcgtgcatccggacggctatcggcagtacgccctgaccgctacctgccatctggatcagggcggtgtgctggtgctgcgctcgggcctcgacgactgggtgcccgcaggcagccggattgttcgccttgcgcgctgccgcctcgaccacgacgccatcgacgtgtactggcacagcccgcagttggcggagatcaccctgaccgcgcgccagttgcccgagccacgcggcaacgaccgagaaacgtatggagagtacgccgtatga

SEQ ID NO: 515311 - DNA, 282 bp, Stenotrophomonas maltophilia
atgctggccatcgagtcgttctacgaagcggcgcgacgatctggactgctgacggcggtcacggtgggcactgccaccgtgtattgcgccttccgcgccccggacgaaaccgtgctcgatggctttgcgctgtcacgcgactaccagatcgactacccggcggtgtggctgacgctcgctgcgggtgacaccgtcgaaattgcgggcagcagctatcaggtgcgcgacgtgcgtgccatcggcgacggcaccgagcggcgcgcctcactctcccaactctaa

SEQ ID NO: 515312 - DNA, 1005 bp, Stenotrophomonas maltophilia
atgaacaatgttttcgagaatcccgctttctcgatgtcggcgctgaccgctgccatcaacatcctgcccaacaactacgggctgatggagagcatggggctgtttccgcccaagccggtgcgcttccgttcggtggccgtagaagaaaagaacggcatcctgacgctgctgccaacgatgccggtcggctctcccggtacggtaggtgtacgcggcaaacgcaagctgcgctcctttgccattccgcacattccgcacgacgacgtggtgctgccggaggaagtgcaaggcatccgcgccttcggttcggaaaccgaagtgcaaactgttgcagcggtcatggccgagcacctgcagaccatgcgcaacaagcacgccatcacactagagcacctgcgggttggtgcgctgaagggcgtcatcctcgatgcggacggctcagatctgtacaacctgttcgacctgttcgaaattacaccgaaggtcgtcaatttccagctcggaagcgcgggcaccgatatcaagaagaagtgtctcgacctcaagcgctacctggagaagaacctcaagggcgagcggatgacaggggttcactgtctggtatcgccagagttcttcgacgcgttcaccagccacgagaaggtcatcgaggcttatcaccgctggcaggacggtcaggtcttgcgcaccgatatgcgctcgggcttcccgttcgcaggcatcaccttcgaggagtacgcgggcgaagccagtgatggcgacgacaacgtgcgtcgcttcatcgaggcaggcgaaggccacgccttcccactgggtacggtggacaccttcgccacctactttgcgcccgccgatttcaatgaaacggcgaacacgctgggacaacccttgtacgccaagcaggagccgcgcaagttcgaccggggcaccgatgtccacacccaatccaacccgctgccgatgtgccatcggcctgccgtgctggtgaaggttctggcgacctga

SEQ ID NO: 515313 - DNA, 378 bp, Stenotrophomonas maltophilia
atgcccgctatgactgaaggcctcaatctcggcgacctcttgaagtacgaagcaccgaatctctactcgcgtgatcaggtcacggtcggcgcaggccagagcctcctgctcggtacggtggtcggtcttgtgacggccaccgcgaagctcaagcagatcgatccgtcggccaccgacggcagccagtacgccgctggtgtgctgatgcaaggcgtggacgccaccctcattgaccgcgatgacggactgatgctggcccgccacgccatcgtcgccgatcacgcgctggcgtggcccgccgccatcaccaccgccgagaagcaagctgccatcgcgcagctcaagagcctcggcatcctcgttcgcaaaggagtctga

SEQ ID NO: 515314 - DNA, 1215 bp, Stenotrophomonas maltophilia
atgacactgctaccgcatatggcggcgcgcatctttggcgcgccgctgctgatccatcggccaaaactcgaagtcatcctcgccgtcctggggccacgcatcggcttgtctgagaacggcacgccgattccgtcacccaccacgcgcagcccgccagtcgcaggcggcagcatcgccgtcttgccgatctacggcaccttggtgcggcgaaccgtggggttggaggcggcatccgggctgaccagttaccaggacatcgccgcacagatcgataccgccatcgccgatccggcagtggccgccatcgtgctcgacatcgacagcccgggcggcgagtccggtggtgtgttcgatctggccgaccgcgttcgcgcagcggcgcaggtcaagccggtctgggcgctggccaatgacatggcgtattcggcggcttacgccatcggttcggccgccagccgcttctttgtcacccgcacgggcggtgtcggatcgattggcgtcattgccatgcacgccgaccaatcggtgcgtgatgcgcaggatggcgtccgctacacgaccgtctttgccggagcgcgcaagaacgatctcaacccgcacgagccgatctcggacgaggcacacgcctttctcaaaagcgaggtggatcggatttacggactgttcgtcgacacggtcgccagctaccgcagcctgagcagcgaagcagtgcgcgcaaccgaggcgggcgtgttctttggcaatgacgctgtcgcggcgggcctggccgatgccgtcggcaatttcgacgatgtgctgaacgagctcgtcgcatcactttcaccaccacctgcgctgtcggcagcggctgcggcgctgggcaatcttcaccaaccacgactggagcatttcatgaatgaacccggaaccactgctgaccctggggttggcgctgatcctgatcgcgatcctgtgtcgcccgcgccaatgaccatcgacgacgcgcaagaagtcgccgagctttgcgctctggcgggctgccccgaccgcattgccggttttctggcggcacgcactccggccaccaaggtgcgcagccagctgctggtcgctcgcgccagcggtcaggagatcagcagcctgatcactccgagcgccgccacgtcggcaacgcaatccctcaacgacaaccccttggtgctggcggctcgcgcccgcgccggacaggagaaatga

SEQ ID NO: 515315 - DNA, 1488 bp, Stenotrophomonas maltophilia
atggcttggtattcaaaaatccgcagcctgttcggccagtcgcccatccacgaagcagcaggtcgcggacggcgatcccttgcgtggatgccgggcaatcccggtgccgtggcggccatgctcgccacctccaacgagctgcgcgtcaaatcccgcgaccttgttcgccgcaatgcgtgggccaatgccggtatcgaggccttcgtctccaacgcggtcggcaccggcatcaagccgcaggcgatggccaaggacgaagcctttcgtgctgacgtgcaagcactgtggcgcgactggacggaacaagctgacgccaccgggcagaccgatttctacggcttgcaggcgttggctgcccgcgcgatgtgcgaaggcggcgaatgtctgattcggttgcgaccccgccgccccgaggatggtctggtcgttccactgcagttgcagttgctcgaggccgaacacctgccgctgaatctcaacacggagctgccgtccggcaatgtcgtgcgctcgggcatcgagttcgatttgatggggcgacgtgtggcctaccacctgtaccgctcgcaccccgaggatggccgactggcaccaatgtccgggcaaggtggcatggacaccgtgcgtatcgacgcgcgggaaatcatccatctgtaccgcgtcctgcgccccggacagattcgcggcgagccgtggttggcccgtgccttggtcaagctaaacgagctggatcagtacgacgatgccgaactggtgcgcaagaaaaccgccgcgatgtttgcaggcttcgtcacgcgactctcacccgaggacaacctgctcggtgagggaatcccggatgacgccggtgtggcgatggctggtctggaacccggcacgatgcaaatcctggagcccggcgaggacgtgaagttctccgaccccgccgatgtcggcggcagctacgccgagtttctgcgtgcgcaatttcgggccgtggctgcggccatcggaatcacctacgagcagctgacaggcgatctctccggggtcaattactcgtccatccgggccgggatgctggagtttcgccgtcgcaccgaagccatccagcacggtgtgctggtgcatcagctctgccgccccgtctggaatgcgtggctcgatcaggcagtgctggccggtgcgctgacggcaccgggctatgcccgccgccgccgcgagtacgccgcctgcaaatggattccgcagggttggcaatgggtcgatccggagaaggaattcaaggcgatgttgctggcgatccgcgccggtctgatgagccgttctgaagcgatttcggccttcggctacgacgccgaggacgtcgaccgcgaaatcgccgccgacaaccaacgagccgatgacctcggcctgattttcgactccgatccgcgccgcacttccaaggatggcggcagcgctgaacccaactcgcaggccaccgacagcaacgcttcgtccgcctga

SEQ ID NO: 515316 - DNA, 207 bp, Stenotrophomonas maltophilia
atgaaccagatcgacaccatcctcaccctgatcgcccagaagcacctcggcatcgaaacgctggaaacccgcagctcagacagcctcgacttccacgacacggcggtctggtgcatccgggacgcgctggaagcggccttcaaggcgggcgtcgaagtgggcatttcgctccccgcgccaactgaagcagagatcgcccgcgactga

SEQ ID NO: 515317 - DNA, 522 bp, Stenotrophomonas maltophilia
atgaccaccacccaactgaccccagcccagcacgcgatcctggcctacgccctcgagcacaccaacggcaaaatcgactggttccctgacaacatcaaaggcggcgcacgcaagaaggtgctcgacggcctgttcaaccgcgccctgatcactacggacggcacccactggttcgtcgccgccgagggctacgacgcgatggggcgcgcccgtcccgcgcctgcgcctttggtcgtcgaccccgagatcgaggccgccgtgacggcagcagaggccacgtgggccaagggcaccactaccgagcaggccaagccgcgcacccgcgagaacagcaagcaggccgcagtgctccggatgctgcagcgccccgaaggcgcaacggtgcagcagatcgttgatgccaccggctggcaggcacacaccgtgcgcggcactttcgccggagccttcaagaaaaaactcggtctgaccatcacgtccgacaaggcgcaaggcggcgagcgcatctatcgcattgcctga

SEQ ID NO: 515318 - DNA, 366 bp, Stenotrophomonas maltophilia
atgaacaccaccacgcaaatccccgccacccagaacaccgattggggtttctggggcacgatgaacgaacacgccagcgacgcgtggcccttggcactgaacgccatctcggacgccacgggccagaccctcgagtcggtgcggatcttcctcgacagccgccacggacgtcactttgcggacgatgtgcaaaacgggttgtaccaaggacagaccccagcggatgccatcaacgctgccacccaacgctggatgggctggacgattggccgccagaccagcaagcaatacggcatcccgcgcggcctgccttatctgacgggctttgtgatccactgcgacatctgcgacgaactggccgcctga

SEQ ID NO: 515319 - DNA, 1410 bp, Stenotrophomonas maltophilia
ttgaacacactcaacgtcgagtaccgcaaggtcgaggcgctgattccctacgcccgcaatccgcgcacgcataccgaggatcaggtggccaagatcgccgccagcatcgtcgagtacggctggacgaacccggtactggtggacggcgacaacgggatcatcgcgggtcatggtcgtctggccgccgcgcgcaagctgggtctggatcaggtgccgatcatcgaactggcccatctgtcgccgacgcagaagcgcgcctacgtcatctccgataaccggctggcgctcgacgcgggttggaatgaggaactgctggcgttggagctggccgagttgtccgaggctgggtacgaccttgctctgacgggattcgaggatgccgagatcgatgcattgctcgcagacggcgtggtttccgatgacgcagaccaggggcaggatgcagacgacacggacactgctgatgacgtgcccgatgcgccggtcgtcccggtgtcgcgcatcggcgatgtctgggccattggtcagcaccgcctgatctgcggcgatgctactgattcgtccgtcgtcgccacgctgatgcaaggcgacgcggcacggctctgcttcacctcaccgccttacggcaaccagcgcgactacacctccggcggcgtcaaggattgggatggcctgatgcgcagcgtgttcggccttgtgccgatggccgacgacggccaggtactggtcaacctcgggctgatccatcgcgacaacgaagtcatcgcgtattgggatggctggctcgactggatgcgcacccaaggctggcggcgcttcgcgtggtacgtctgggatcaggggccggggatgcccggcgactggcaagggcgactggctccgagcttcgagtttgtttttcacttcaaccgcgccagcctcaaacccaacaagatcgtgccctgcaagcacgcggggctggaatcgcatctgcgcgccgatggctcgtccacggcgatgcgtggcaaggacggtgaagtcggcggctggacacacaagggccagccgacgcaggacacacggattccagactcggtgatccgcgtgatgcgccacaagggcaagatcggtcaggacatcgaccaccccgccgtgttcccggtagcgctgccggagttcgtgatcgaggcctatacggacacgggcgacctcgtgttcgaacctttcggcggcagcggtacgacgatgctggccgcgcagcgcactggtcgcgtctgccgcacagtcgagatcgcaccggagtacgtggacgtcgccatcaaacgcttccagcagaaccaccccggtgtgcctgtcactttgctggccacgggtcagtccttcgacgacgtggccgacgaccgtctggtcaccacggaggctgcgcaatga

SEQ ID NO: 515320 - DNA, 429 bp, Stenotrophomonas maltophilia
atggctgaccgtcacaccacttggacgattgaggatgtggctgcacggtttgaggatgcagccaccaccggacgacgcctgcctcctgtgcgtgtgcagggctacttcaattgctggcctgccttcgctcgcaaagagtgggaagcctttgctgcggacgagaaggtgtaccgccccttcccacccagtcccgatgtcatcgaccggatgctggagacaatgcgctgggtgcaatggctggaggtcgagcagcgccacctcgtgtggatgcgcgcgaagcgatacggctggcgggagatcacgattcgcttcgcctgcgaccgcaccacggcgtggcgacgctggcaacgggcactggagatcgtggcggcacaactcaacagcgatggcgtgcgattgccttccaaaaacgtgggcaatttagggtaa

SEQ ID NO: 515321 - DNA, 255 bp, Stenotrophomonas maltophilia
atgaccgacaacaccaactcaaccactggcatcgaaccgatgatcgacgccaagcaggcggcggccgcgcttcgtctgccgtactactggttcgccgaccacgcgatgcgcaccaagtaccggattccgcactacttgatgggcggtctggtgcgctaccggctttccgagctctctgcgtgggctgctcgcagcaccgtcgtccagggccgtgataccgacgacgcggatgtacttgccgagggagccgaatga

SEQ ID NO: 515322 - DNA, 855 bp, Stenotrophomonas maltophilia
atgaacgcatccgtactcactgccagccactacggcgtcgtgcgcttcggcgatctgcaatgcgaggccgtcgtcctcaagggcggcgagcgtggctacgttcgccgccaactggccaagctgctcggcttccacgagacgcacaagggtggccgttttgctcgattcctggccgatttcgcacctaactccttgtcggaattggagaaaactcgtgagccgattctgttgccctcgggacggcaggcgcagttcttcccggcaggaatcatcgccgacgtcgcatcggcggtggtcagcgccgccatcaacggcacgctgcacaaggcccgccagggcatcgtgcctaactgcatgaagatcatgcgcgcgctggccaccaccggcgaggtcgcactgatcgacgaggcgacgggctaccagtaccaccgtgcgcccgacgcgctacaggagttgatttccaagttgctgcgccagtcgtgcgcctcgtgggagcgtcgcttccacccggactactaccgcgcgatctaccggctgtttggctggaagtaccaagggcatgaccagaacccgccgcacgttgtcggtcagatcacgcagcgctgggtctacggcccggtgttgcccgccgacctgatcgatgagatccgtgttcgcaagggcatctcgcaaaagcaccaccagtggttgtccgaccaaggactcgcccgcctggaaacgcagattcacgcggtgacggccattgcgcgcagttcgacctgctaccgcgacttcaaccatcgctgcacagcggcatttgcgggcggttcgctgcaactggcactgctggcggacgaacttgaggaggtggcgtga

SEQ ID NO: 515323 - DNA, 645 bp, Stenotrophomonas maltophilia
atgaacagccaatccaccagcagcaactggaacgacttcaacgatgccgattcgcagcagtccggctttgatttgatccccaagggcaccgttgtcccggtgcgcatgaccatcaagcccggtggttatgacgatgccaatcaaggctggggtggcggttacgccaccgagtccttcgacaccggctccatctacctcgctgccgaattcgtggtcactgccggtgatcacgccaagcgcaagatgtggtcgaacatcggcttgcactcccagaaggggccgacctggggccagatggggcgcagcttcattcgcgccgcgctcaacagcgcccgcaacgtccacccgcaggacaactccccgcaagcatccacagcgcgccgcatccagggcttccatgaactggatggcctggagttcttggctcgcgtcgacatcgagaaggacgccaagggtcaagaccgcaacgtggtcaagctggcggtcgagcctgaccacccggactacgccaggttgaagggtgtgccgccgaagggcaatccgggcggcggcaactccggcgctccggcgcaggccaccccggcttacgccgcacccacccagcaacgcgcgccagtgacgggcaaaccgtcctgggctcagtga

SEQ ID NO: 515324 - DNA, 483 bp, Stenotrophomonas maltophilia
atgaacgatctgaccatcttccccgccgacatcgccgagatgtccgtgaaccaactggccgcgctgccgcccgagcagaaacgcgaggtcgacaagaacctcgatgccgccatcgactggctcaagaaggcccgcaccaagttcgatgcagcactggatcagtgctacggcgagcaggctcgcgccgcgctgcatgaatccggccgcgacttcggtaccgcccacatcagcgacggcccgctgcgcatcaagttcgagttgcccaagaaggtcagctggaatcagaagcagttggcggaaatcgccgagcgcatcgtcgcctcgggtgaaaaggtcgagggttacctcgacatcaagctcgcggtatccgaatcgaaatacaccaactggcctccggcactgcaacagcaattcgccgcagcgcgcacggtcgattccggcaaaccgtccttcaccctgagtaccgatgggggtgaagcatga

SEQ ID NO: 515325 - DNA, 264 bp, Stenotrophomonas maltophilia
atgcaaacccaagttccagcaacccaaaccggtcgcgattccttccgacccaatcccggcggtgccgtgtgcatcgccctcgacgaaaacgagctctccatccgctgggggctctcagtcaagaccctgcgccgctggcgtcaggaacagctcggcccgatctactgcaagctcggtcgccgggtcacctacctcctgcacgaaatcgaagccttcgagcgccgcgtctcgcgctactcgagcttcactcgtgcgtaccagtga

SEQ ID NO: 515326 - DNA, 930 bp, Stenotrophomonas maltophilia
atgtcacttcacctgagattcttcgcagccatcgacaatctgccgcgcatcgatacgcctgtgccagtctctgcacttggccgtgactggccccagttcctgcaacggggctggattactgacgagggtcacctcacgcacgtgatggctccgttcctcgagtccgaatgtgaggtggaagtcgaggccgatccagatgcgggctgctatcgctaccgaagtccgcagaacggtcgagccgtcgtgcgaccactgagtgagatcgcgttgtgcggcatccagatcgatccgtggcttgccgatctggccacgctgatcggtatcgaagatcgacagcgctccaatcgtccgtgccgtacaccgaatcatctctggcacctcggcgagctacgcattgcggggactcacgattttgcgccggtgttcgttgcccgagcgtggggtcgcgcacctgtgagcgagacgaggtccgcgctcaatgatccgttctggctccgtggcggcatcgtgttgcggcgtcagcgagatctcgttgagctgccccgtgaccatgtcatgcgcgggctggacgagttcgttcgcgtgggcgacggccaggacgttttcgacgaaagcgcattcgacagggtactgcgtgggtttgtcacgcccagcggtgagccggagccagtggaattcttgcaaggcaatcggctgaagttaccgcacttccccgagtcgcgtgagctgtctgcagagcgggcaaagatcatcaagcagatgtggagtgccgacgggagggccgcgcccgagttgtcctgggctgaggtcaacaggatcgtcaacaccggctaccagtcgttcgatgacgccttcggtggtaaggccgaacgcgaggacgtaatcgcgttggtcaggcgcggcaaataccgggtacgacgcaacccataa

SEQ ID NO: 515327 - DNA, 1425 bp, Stenotrophomonas maltophilia
atgccaaccggtcacaccaccaccgcccagccgcagaaagtggtcaacccgaagtcgtccccgaaacgcgcgcgcgagcctcgatctgacgacggccccagcatcctgcctgggatggagcatttcgttgacctgctgcgtaaggtcaaacgtccggcgctggtggtgcgcctgctcgaacgtgccaacgccgaatcgttgccggaactgcaggccctggccggtgcagccaaagacaagttgccagtcgaatcccgccaggcatttttccattgcgtggccaaactggatgctgtcatccggcagcgccttgaggatgtcgcagaacgggtcatcctgctcggtgatgactatggcgcacaggctgttcagtcagtgctcgacgagcggcgcgaagacgatgccgccgtgcttggaatgcctagcgaccgtttcagtcgcgcactgcacctgtgcatcttgcaggaatttcccgaagccggggttcgccgcgaagatcgtttcgatcaagccgagcacgtgcaggtgatgcatcgccagtggaagagcgatcaatactccagccacttcctcggccccaaaggcgtggcgccaatgatggctgacgatgttcaggagactctgcgcacgcgcattgccgatctgttcccgcgagtgcccaaggatcaaatcctgatcgagcaattcacgcgccacgatctgtcgcatgcccagcatgccgatgatgaagatgctgacgccgacgaccacgccctgctgcacacgctcaccgcgaccttcaatggctcgaccgcgcattaccaacaggtagccaatggccatgtagtcgatcacgaggagccagctgccatgtccgcgcgcttttcctgggagccggcaacgggagcgctcactgtgttctgccaagaccgcgaagcacggcgcgagctcgccaccattttccgtgacgtggtgctggcgcacgacggcgagatcgacgacatgccgattcgccagttcgatctgctcggcttttcgtcgtcagaaatgctcaagcggctggagcgggatcgcatcacgggcatcgagaacatctcgatcctgcaaatcaaagtggccaagccctttgaacagcagtcggaaatcggtgggcgcgcggtcatccggcaactggcgagcaagatggaaatcacccgtgaccggcgcgacggtcgcactatctatcaggtcgcctacgaggattacagcgccgaagatctgagccagtttgcgctggtgcaagtgaagctggtgatgcgcatggccaaacagcctcatcgcaaggcgcacaacgtcgccgtgcagatcactgcgccgaacggcctgaacgacaaaagcaaaaccgaggacgaccgcaagcgcgtgttggagcaactgatccgcatcggtgtgctgagcgaattctga

SEQ ID NO: 515328 - DNA, 816 bp, Stenotrophomonas maltophilia
atgccggttctgactctcgactaccggcattgcgaccgcaagcgccccaagtacgtcaaacacatcgagattgaaggcattgctgcgctggcccgccaacaactggttggctccgggctcgacgccattcccttcgacgcgttgcgcgaaattaaccgcttgaagatcaacggcatcgacttctcagttgaagtcagcacggattgcgaggtgcacgacgacgatggcaaccacgtctttgggatctgcgagtacgaccccggcgttccagacaccgcgatggtgtgcgtgtctcctgtcggcgaaaaactcagccaactgctggcgctcagcacgcttgcccacgagttggggcacgcagtgttcgatgcgccgggctggatcgtcgagggcagcaaagggccagggctgttcgacgcattggagccagccgtacagcgtgcctaccgcacaaccacgccggacagtgagcatttggcgaagtcacccgttactcccgcacaggccgtactggccacggaggttcatttcgccgagttgcgcgccaacgagttcatgggatcgctactggtgccgcgccagcacttgagcctggcagtcgaagagcttgccccgctgttcagcattgcgctgcaccgtggcccgtctctcgatccagagattcccggtaccagtttgtatttctcgcccgtcggcgcaaacgatctggagtttttcgagaaagcgctcgccgcgcgctttggcgttaatcctcgatttgttcaggtacgtctgcaacgctacggcctgatccgagcggaggccgccgtgcgctga

SEQ ID NO: 515329 - DNA, 279 bp, Stenotrophomonas maltophilia
atgcctttcggagccttcattcgcaaaatgcgcgaagagaagcagattcagatgaacgagttcgcgcgtcagctcgagatatcgcctgcttactggtcacgcattgagcgcgacatggaaaaaccgcccaaggacgagctgatccgcaaggcggccgagattctgggcatcgaccccgacgacgccttcgtggaggccagccgtctgccgcccgacatgcgcgaggacgtagccagcgtggtgcgtatgtaccgtcgtgaagtaacggagaaaaagtga

SEQ ID NO: 515330 - DNA, 192 bp, Stenotrophomonas maltophilia
atgaagaacctcgaacttgcatctccctcggagatgtccgccagcgcccgtgctggtgaaatcaccaccatccttgcggctgccatcgtccgcaccctcgtcgcagacgagcaaaaccagagagcagttggccttggcttcctgcccgaccagcgcgttcatacaaccccctatcaagaggagaagttgtga

SEQ ID NO: 515331 - DNA, 450 bp, Stenotrophomonas maltophilia
atgaacgagaaacaagcatccgtcgccgcacggatcgccgagctggcctgcctgccaatgtccgaactctggatggtgtgggatcggtattttccgcgccgcccggactaccccaaccgtacgcacgtcgagtcccgcctcgcctacaagctgcaggaggaagccttcggtggccttgcgcccgataccaagcagcggctggaagccatcggcgcaaagcactccaagatcaagctgcgggccaagccgcgtgatttcgatttcgcgccgggcacgatcctgctgcgcgaatggggcgaacgagaacaccgggtgacagtcaccgcagaggggctgttcgattaccaggggcgcagcttcaagagcctgacggcagtggcgcgccacatcaccggcgcgcactggtcagggccgctgttctttggcctgagcaagggaggttcgcgatga

SEQ ID NO: 515332 - DNA, 1380 bp, Stenotrophomonas maltophilia
atgagtgagatcgccagcatcaagccccgcaaacgctgcgccgtctattgccgggtgtcctcggatgaacggcttgaccaggagttcaactccatcgacgcgcagaaggaggcgggccacgcctacgtcgccagccagcgatccgaggggtggattccggtggccgacgactacgacgaccccggcttctctggcggcaacacggatcggccggggctgaaacgcctgatggcggatatcgagcgcggccagatcgacatcgtggtggtctacaagatcgaccgcctgacgcgcagcttggccgacttctccaagatggtcgaagtgttcgaacgccacggggtgtcctttgtgtcggtcacccagcagttcaacaccaccacctcgatgggtcggctgatgctcaacgtcctgctgtccttcgcccagtttgagcgtgaggtcaccggcgagcgcatccgcgacaagatcgccgccgccaagcgcaaggggatgtggatgggcggcgtcccgcccctcggttacgacgtcgacaaccgcctgctggtcatcaacgaggccgaggcggcagtggtgcgtcgcatcttcgaggagatgctgaccattggttccccaacccagatcgccgtcaatctgactgccgacggcatcacaaccaaggcctggacgacgcaggagggccagacccgcagcggcacgcgcatcgacaagaagtacctgcacaagctgctgcgcaaccgcatctacctgggggagttgtcgcacaaaggaaactggtaccccggcgctcacccgccgatcatcggccaggagctttgggacaaggttcacgcggtgctggccagggatgggcacacccggtcggtggaaaccaagatccggtcgcgcaccgacgctttgctgcgcggcctgctgtacgccccctcgggcgaacggatgtacccgacctactcgcgcaagaacgggcgcaagtaccactactacgtgtccaagtcggaaagccggttcggagcacccggcaagagctacgagcgcttacctgcgccggagattgaggctgcagtggtggctcagatccgcacggtgctgaccagcccggaatccatcgcatcggtggtacgccacatccagcgcaacggcggtcagatcgacgaggccaccacggtgatggcgatgggacggctcaacgacgtgtgggatcagttgttcccggtcgagcgtcaccgcatcgccaacctgatgatcgagcgcatcgacctcgtccacgttggcgaggtgcagggcatcaaggtgaagtggcgggaactgggctgggacgccctgatcggtgagttcgccccgaggggcatcggcgcggagctggtggaggttgaggcctga

SEQ ID NO: 515333 - DNA, 372 bp, Stenotrophomonas maltophilia
atggacgacacactggaaaccttcgtgcccctgacgtttcgccgccggggcgcgcggcgggtggccgccgacgaccgccacgttcacgatgtgacgctgctggagggggtggcacgcggtttctactggcagcacctcgtggacaccggcgtgatgaagagtgggtcagacattgcccgggccgaaggactgcacccctcggtgcccaacgagctgatgcgcctgaccctgctcgcgcccgacatcctcgaactgctgatggccgggcggcagccccgccggatgaacctgatctggttccagcgcaacccgctgccggtggattgggaggcgcaacgccagatcgtgaagcgctttgaggaggacgcatga

SEQ ID NO: 515334 - DNA, 477 bp, Stenotrophomonas maltophilia
atgagcaagaagcaccggggccggttcaagggtgatccggtcacctatcaactgccgaacccggcaggcggcgtgcaactggaaaccttcgtgccctggacgctggtgaagcgggggctgaagaagcaggtcatcacgcccttggacgcgccgcaggaattcctggacgaggcccgccgcgagcgattgatgaaggcggccgcgcaggacacgcctttgatgcgcgcgctcggcctcgcgcaccactggcaaaggctgatggacgaaggacgcttcgcatcgatcactgagatcgccgaagctgaaggtctcgatctgggtcgtgccagccggatcgcccgattggcgcagttggcacccagcatcgttgaagcctgcgcaatcggcgcggctgcgggcgtgacactggaaagcgtcagccgtcgtgccattccccaacggtgggacgagcagcgtgaacgactgcgcctagcgtga

SEQ ID NO: 515335 - DNA, 222 bp, Stenotrophomonas maltophilia
gtgacggtggtgatcctggaatcgacgctgacctgtcccgagtgcggccacgccaaggccgagacgatgcccacggacgcctgccagtggttctacgagtgcgagcagtgtcactccgtgctcaagcccaagccgggtgactgctgcgtgtattgctcctacggcacagtgccttgtccgccgatacaggagcgtggcaaggaccgttgctgcggcagctga

SEQ ID NO: 515336 - DNA, 285 bp, Stenotrophomonas maltophilia
atgaaaaaactcgttgccctggccgcgttggcagcgatgacctcgcccctctgggctgccacccagagcgtcacgctgtccgtgccgggtatgaactgcgccacttgcccgatcacggtcaagaaagcgctgaccaaggtctccggcgtcagcaagatcgacgtgaacctggatcgacgcgaggccagggtgacattcgatgatgcgaaggcgaatgtcgaggccctcacacgcgccaccaaggacgcgggttatccctcgaccgtggtgggagccgccaagtga

SEQ ID NO: 515337 - DNA, 372 bp, Stenotrophomonas maltophilia
atgaatgcagattccccaaccgaacctcgacccagcggtgggcgtggtgcgctgttgaccggcggtctagcggccatcctcgcgtccacctgctgcctcggccctctggtactgatcacgctgggtgtctctggcgcgtggatcagcaacttgaccctgctcgagccgtatcaaccctacttcatcggtgcggcgctcgtggcactgtttttcgcgtacaggcgcatctggcgccccgttgcagcctgtgagcctgggcaggtctgcgcgctgccgcaggtcaaccgcagctacaaggccttgttctggatcgtggtggcgctggttatcgctgcactcgcattcccgctgatcgcgccctggttctactga

SEQ ID NO: 515338 - DNA, 408 bp, Stenotrophomonas maltophilia
atgaacgaactacccgaaaccctgaccatcggtgtgctggccgaggccgccggggtcaacgtcgaaacgatccgcttctaccagcgcaagggtttgatgcaggagcccgaccgcccgctgggcggcatccgccgctatggcgagacggatcgggggcgcgtgcgcttcatcaagtccgctcagcgcctaggcttcagcctcgacgagatcggggatttgctcaagctcgaggatgggtcgcattgcaccgaggctcgcgagcaggcagagcacaaactagcagacgtgcgcgcccggcttgccgatctgcaaaggattgagggtgcgctgcaggggcttgtcgagcgctgctgcgcgacgagcgggcaggtgcagtgtccgctgatcgcggcgttgcaggcggcgtga

SEQ ID NO: 515339 - DNA, 153 bp, Stenotrophomonas maltophilia
atgctccagcagatcgtctcgcagacacccgcctgggtctggcttctcctggcgttcctggtcacgcgcggcattgccgcgatgaagccgggcgaaacgtcactgcagaaactggccgtcgtgcctgtgctgttcaccgtctggggcgcctga

SEQ ID NO: 515340 - DNA, 1002 bp, Stenotrophomonas maltophilia
atgaaagcgtttctcatcgaccgctatggcaggaaggagacgggccgcatcgtcgacgtcccgccgccgccgctgcgcgatgacgatgtactcatccgtgtgcacgcggccagcgtcaatgcactggatgccaagatcaggaccggggaattcaaggcgatcctgccctatcagctaccgctgattctgggcaacgacctggctggcacggtggaacgtgtcggcgctgcggttcgccagttcaagcccggtgatgaggtctatgcccgcccggatgatgatcgcattggagcgttcgccgaattcatcgcggtcaaggctgcctccgtggcgctgaagcctgccaacctcagcatggtggaagccgcctcgctgccgctggtcgggctgactgcctggcaggcgctggttgaaaccgggcaactgaaagccgggcagaaggtcttcatccaggcgggctccggtggtgtaggcactgtcgggatccagctggcgaaacacctgggcgcctttgtggcgaccaccaccagcacggccaacgtggcatgggtgaaggcactgggcgcggacgtggtgatcgattacacgcgacaggacttcgctacggagctgcgcgactacgatctggcgctcaacagcctgggcaaggaggagctgacgcgctcgctgccgattctgaagccgggcgggcatctgctctccatctccgggccgcctaccccggccttcgcggcgcagcgcaggctggcctggccgctccagcaggtcatgcgcctgctcagccacggcgtccgccgcaaggccaggcagaaacgcgtgacctacacctttgtgttcatgcgggctgacggacagcagttgagcacgatcacctcgctggtggagtcgggtgcgatccggccggtcatcgacagggtctttccgttctcgcagacccagaacgcgctggatcatgtcgacagcggccgtgccaagggaaaggtggttgtcgcattgcggtaa

SEQ ID NO: 515341 - DNA, 789 bp, Stenotrophomonas maltophilia
atgagcacgcttcccaccgttctgatcacgggtgcttccagcggtatcggcgccgtctatgccgaacgcttcgcacgccgtggccacgaccttgtactggtcgcgcgcgatcagtcccgactggatgcactggccgcacgcctgcgccaggacaccggggtcaccgtcgatgtactggcagctgacctcaccctcaacgctgacctggccgccgtcgaagcccgcctgcgcgacgatgaccgcatcggcatcctgatcaacaacgcgggcgttgcgcaggccggtggcttcaccgagcagtcggccgaaagcattgacaggatggtgacgctgaacacgctggcgctgactcggttggccgccgccgctgccccgcgcctggcgcaggctggcaccggtgcgatcgtgaacatcggctcggtggtgggcctggcgccggagctgggcatgtccgtctacggcgcgaccaaagccttcgcgctctttctgtcgcaggccctgagcctcgaactggcgcccagcggtgtgtatgtgcaggcggtgctgcctgccgctacgcgcaccgagatctgggaacgtgcgggcatcgacatcaacaccttgccggaggtgatggatgtagacgaactggtcgatgcggccctggtcggctttgatcgccgcgaggcggtgaccattccgccactgcatgtggcctcgcgctgggacacgctggatgcctcgcgtcagggcctgctctcggatatccgccaggcgcacgcggccgagcgctatcgcagcgtcgcctga

SEQ ID NO: 515342 - DNA, 1095 bp, Stenotrophomonas maltophilia
atgacagacaccaccctcttccagccctacgttctggggccgctgaccctggccaaccgcatcgtgatggcgccgctcacccgcaaccgcgcgggtgcagggctggtgcccaatccgctggcggctgcctactacgcccagcgcgcctcggccggcctgatcatcaccgaggccacccagatctccgcccaggcccagggctaccaggacacgccggggatctacacgcccgaccagatcgcgggttggcgcgaggtcaccgacgccgtccacgcgcgcggcgggcgaatcttcgtacagctgtggcacgtgggacgcatctcgcatgtggacctgcagccgggcaatgcggcgcccgtttcggcctcggccgtccgggcccagaccaagaccttcgtccacaacggcttcgttgacgtctccgagccgcgcgcgctcgggatcgacgagctgcccgccatcatcgatgacttccgccaggctgcggccaatgcgatggtcgccggattcgatggcgtggagattcacggcgcgaacggatacctgcttgagcagttcatcaaggacggggccaaccagcgcaccgatgcctacggcggctcgatcgagaaccgcgcgcgcctgctgctggaggttacggctgccgtggcgcaggagattggcgccgatcgcaccggcgtgcgcatttcgccggtctcgccagccaacgccatcagcatcagtgatccgcagccgcagtacgactacatcgtcgaccagctcagcgcgctgaggattgtctacctgcatgtcgtggaaggtgcgaccggcgggcctcgcgacgttgcgccgttcgacttcgatggcctgcgccgtcgctttgccggcacctacatggccaacaacggctatgacctcgacctggccaatgcccatctcgccgaaggcaaggccgacctgttcgcattcggacgcgccttcatcagcaatcccgatctggtcgagcgcctgaagaccggtgcgccgttgaatgcgttgaacccggccacgttgtatggcggcggcgccgaaggctacatcgactaccccgccttgaccgacaccgcggcgcagtaa

SEQ ID NO: 515343 - DNA, 582 bp, Stenotrophomonas maltophilia
atgaaggtcaccaaggcccaggcgcaggccaaccgcgcccacattgtcgaaacggcatccgcactcttccgcgagcggggatatgacggcgtgagcgtggcggatctgatgtcagcagccggcttcactcatggcggcttttacaagcacttcgcttcgaaggccgacctgatggccgaagccgcagcgtgtagcttttcgacatccgccgaggccttggctgggatggatcaccgcaccttcctgactcattacctgtcccgcgtgcaccgggatgcgccggggcagggctgtacgatggcagcactgtgcggcgatgctgcgcgtcagccggattcggtgaggggggcgttcgtggcgggcattgaagctcggctcgcagcgggtacaggtcacgctgacccacctgatgcagcgtctgccgcacgtcatcgcacccggcgcattgcgcggatcgcccaggcagtgggggccatggtgctgtcgcgatcctgcccggatgattcgccgctggcggacgagattctggacgcctgccgggaagacattcttgccaggctgaccgatgaatccgaggcctga

SEQ ID NO: 515344 - DNA, 168 bp, Stenotrophomonas maltophilia
atggcccagatcaacgaaatcatgccgggtacacgcggcggcagcgccaatcttcatgacgaagatcaacagcaccagcacaaccaaccgcgcggaagtgcgcaagcgcgcaagcaaggcacgggacgcggcggacttcaaccctccggcatggccagcaacaggtga

SEQ ID NO: 515345 - DNA, 1278 bp, Stenotrophomonas maltophilia
atgcaccttgttcgttcgacgcgccgacgcgctgtcgcctggctggccatcgcgctgttcgcctgcttgctggcaggacaggcatgggccgcccaagcgcccggggccatggccccggcgcccctccgcgcggcgcttctggccgcttggcagcgccatcccagttaccgtgccaccgaagcacaactcgctgccgctcgcgcacggctggcagcagcgggacagccgctgtacaaccccgaagtcgagctgacccgcgaggaagaaggcgacgaacgtacgtcgactgctggactcagcctcacgcttgatatcagtggcaaacgccgcgtacgccgtgatgcagccgcagcgcgggtcgatcaggccacggcggaagcgcaaatgcaccgtcgcgatttcgtcaaacaatggttcgccagttgggctgatctgcaatcggcacaacagcggttccgtactggcgagcgccgtttggaactggtgtcccgatttgcaatgctggccgaaaagcagttcgcagccgacgacatttccggaatcgagcgggatctcgctcaactcgcccacgacgaagcgcaagccgagcaatcccagctgattgcagaacgcggggaagccgaagcgcgctttcgggctgtgggcggcagccccgaattggttgcgagcgtactcttgcccagcaaaaccctgccaccgcctgttacgcctgcggaaggcgtcgagcaattgccggagtggcaggtcgcacatgcggcggcgctggctgccgagcgggatgtcacggtggcgcgtcgtgatcgcatagcaaacccgacactggccgttcgcggcggacgcaaggacatcggcccggtgactgacaacattgtcggtttctcgatcagcattccgttgttcgtccgcaactcatatcgtgccgaagtagcggcggccaccgccgaggccgatgtggccgcagcggtggctgaacgcaccacaatggaactgacagcggatcgtcagcgcgccatcggcagctacggtgccgcgcagtccgcctggtcgcgctggcaaggtagcaggggcaccgatgtggagcgccgcgccagcttgctggagaaactctggcaggaaggcgaactgtccaccgccgattacctgttgcagctcaagcagacccttgacacccagctcgctggtgccgaacttgaggcgcgcctgtggcgcagctatgccgactacctcgccgccaccggtcagcttgaacgctgggccggtatggaaggcaccccatga

SEQ ID NO: 515346 - DNA, 1059 bp, Stenotrophomonas maltophilia
atggcacgtggcggcttgtacaagagcgatatccagaaggcccgtgacgccctgcgggcgcagggcaagcacccctcggtcgacgccgtgcgggtggcactgggcaacacgggctccaaaaccacgatccaccgccacctcaaggaactggaagaagaagagggccaaggcccgggggccaaggtcgcggtcagcgaggcgttgcaggatctggtcggccggctggccggacgcctgcaggaggaggccgatacggtggtgaccgaggcgcgtcagggcttcgaggcccagttgcaggaacgcagccaggccttagaacaccagcggcaggaaggcgccgcgttgagcgcccagttgcagcgcaccgagaccgcgttgcaggcggaaaagagcgagcacacgacgacgcaaacggcactggccgatgccaccatgacgatccgccaactggaagagcgcatcgccggcctgaccacgcgcctggccgagcacgaggcccacgcccgatcattggaggaaaagcaccagcatgcccgcgaggcgctggaacactaccgaacctcggtcaaggagcagcgtgaccaggaacagcgccggcacgaacaccaggtccaggaactgcaggtcgccctgcgtcaggccaatgaggccctgaccgccaaaaaccacgagctgctgcaactgaaccgcgacaacagtcagtggctcgaacggcacggccgcctggaacgggaattgacgcaaacccgccaagcggcgcaagcccagcaacagcaattggacgcattgcgacagacagcggtggagcaccaggccctgcaggcacggtgggcgcaagatctccaggccttggaagccgcacacaccgaactgaccggcgcccgcacggatgccgcgaaggaacgggagcgccgcgagcatgctgaagcggaggcgctgcgcgccggggtccggttggagacgttggagcagttgctcgcgcaattgcgcttacaggaagacaagcccgaaccgccggaacgatcgacagtcccatcccggcagactcggaagacctag

SEQ ID NO: 515347 - DNA, 1098 bp, Stenotrophomonas maltophilia
gtggtcggtgatcgcacggaggtggccgggccgggactcccctcgtctaacaggggagtcagtgaattcaggaacgccgatggaaccctgacggtcggcatcgactggttttccgcctcggtggacatgttcgcggtgctcaacgagctcgccttccgcgacggcgattcgtttgaagaggtccgtaactggatcgactacagcgccgataacgcccgtgtcgttgcgttgcagatgttctgctggttcttcgctgggctgggccttgaactggatgaggtggccgggggagggcgcttctacctgtggcgagtcaagatcatcaatgccgaaaagaagttcgtcggcatgatcgagctgggcggcgacaactgccgccgcgcggacggcacgtataccgctcgtattgagctgaccggcgaaggatgcaaagtgatagccgcagcgcgctgcggccatgcgcagcggtggctggagcttcgagcgaagctcgaaagctgcggcggaaggatcacccgcctagacgtatgcgccgacgacttgatgggcaagtacccattgcgcctggcacagaagtggtacgacgaaggcgaattcgacaatcgtgggcagcgccctaaggcgcagctggtcgatgactacgacagcggtgacggtaagaccctgtatgtcggcggcaagaagtcagaaaagcagctgcgtgtctatgagaaggggcgggaattgggtgacaagtcctctccttgggttcgctatgaagcgcaattccgcgcctccaaccgcaaggaattgccgctggacctgcttcgtgatcccgccgcatacctgctcggtgcataccccgttctgcgcttcctgcgctgcatttcgtcacgcatcgacgttacgaaggctgcggcggtcgccacgttcaagagcgcatgccgccacttcaaacgccaatacggcggcttcgtcaatttcgtgtttcgcacctgcccggatgaagaggtggcagtggcggtattcaagtcctgcacttcgccaaagctgccgaagtgggcaacaggagacgtagcagcgaactgggccacaagcgtggtcatacaaccaacctga

SEQ ID NO: 515348 - DNA, 1089 bp, Stenotrophomonas maltophilia
atgatcaacggcacgctttacagcggcggtgtctgcgacagtggctgcaaggtacagccgaatcttgatccgggaacgaacttctccatgcgggagaatggcaatccaaatgccatttcgattcgctccggcacgtggaaggcttcgggcgaggtttgcagcattaccgacactcagcctaagccagacaagaaggatgagtattgccatcaggctgggaactacaccgtctgcaagtccaaggacaggacgtgcatcagcacggcgagcggattccgcacctgcgccagcgacactgccaatgaaaagggccacacggcgacgaacaacccacgcactgaagcggccagcatcagtgcaccgaacacgcctcctaatccacctaccaaccgccccggcgaggactggaaaccgagcggcaacacgacgaacatcaccaacaacaacaccggtagcaccaccaacacgagcacatacaacaatcagggcacgcctaacggcaaccagccgactccgggtgatggctctggacccggcgctggtggtagcaatggcaacggcgacaaaggcgagggcaacggtaacagcgccagtggtggcggtgactgcaagagtcctccggtggtaagcggcgatgcggcgctgggaatgatcgcaacacagacctgggcaacacggtgcgcaactgaggcgggcaattccgccaaggtcaccggcgacgtaggtgattgccaatccccgttcagtgttgagggcgataccgttcaagccaatcagcttcgtgccatgcgcgctcagcgctgcggcagcagtccgggcgaggggcaggggaccgatggcaatccgcatgagggtgcggaggatgtggacggccccggcaagtggtcatggaagtttgacaagaacctgatcgacacgagcggttttggcggtggatcttgcccccagttcgggaacattgatcttggtcgatttggctctgtttctctggacggaacaacttggtggtgccagctggtggcgtcgattaagacggtaatgctgctgctgggtatgttcatttcgttccgcattgtcttcggagattga

SEQ ID NO: 515349 - DNA, 330 bp, Stenotrophomonas maltophilia
atgtttggtgcagatatttggggctggatcgcgcgtggtgtgaacctgatttggacgattctctttggtggcattgggcgaatcgtgacaaagattctttcgacagcgggtattacgctggtgtcgatcaatcagctacttcctgtgcttaagacaacaatcgcgacgtatgtcggctcgctgccgcaggacgccaataatttccttggtgcggtcggattcgatcagttcatgacgatggtgttgtcggcgctctcggtgcgcttcatgttcaagatcatcccgatgccgactgctcaggctcagcagctgggagtgaccaaggaatga

SEQ ID NO: 515350 - DNA, 636 bp, Stenotrophomonas maltophilia
atgaccagcagcgcacgcgaactgttgaagtggctggccgtgatcctcatgaccggggatcatgtcggcaaggtgatctatggcgaatacgtgcctggactcagcgaagcggggcgggtggcctttccgctgttcgcgctggtgatggcgtacaacctcgcgcagcccggtgccgacgtggtcaagtctgttcgcaggctttccatgtggggcctcatcgcccagccggtgcacgcgctggtgttcgggtactggttgccgctgaacatcctgctgaccttcgcgctgtcagccgcggcggtctacgctgtcaaccagcgaggatggctggcgctggcttctctcgccgtggccgcgttggtgctgccggcattcgtggactaccagtggtccggcgtatggttcgtgctgctggcgtactttgcctatcgtcagaaatcgcccggggcactgcttgcggccttcgttcccctgtgcgtcttcaacggcaatttgtgggctgtagcggcagtccctgtggccggactgttggcgcaggttccgtggcccgtgccgagggcggggcgggccttctacggctactacgtgggccatctggcgttccttgggctgctggcgcttatactcgcgccatga

SEQ ID NO: 515351 - DNA, 435 bp, Stenotrophomonas maltophilia
atgttcacaaggattgcagccggattgctgctgtgtgcactcgccgcgcctgcggtggcccagcagatttacaaatgcgtcaccaagggtggcgttgagtaccagtcaatgccgtgcgccagcggtgaggctgcgaagacgtggaatgttgaggttgctccgcgctccgcagaatccgtagccaatgagcagcgcctagacatgatcaggcagcagaacgcggccgccattgcacctcggccagcgcctacgcggcctgtttataacaatggcggtggcggcgcccgtctgcatcacatctcgcagtacaagaacccggacgcctgtgaggccgccaaggcggagcgcgctcgtgtctatgaggcggtgggcctgcgtcgcacgtttgaactcagccgtcgcatggatgatatggtctggtccgcctgcaagtag

SEQ ID NO: 515352 - DNA, 195 bp, Stenotrophomonas maltophilia
atgatggaaaacggccgcgcgatcggcggcacgcgaaaaccgttgccgcacaaggccgccaccgtggtgaatctctccgatgccctggcagaacgccgcaaaaagcggttgccggtggcgatggccggacccgacgccgagccaaccacagcagtcctgccagcaccggggccgaagcctctcaagcgcgtgtga

SEQ ID NO: 515353 - DNA, 636 bp, Stenotrophomonas maltophilia
atgaccagcagcgcacgcgaactgttgaagtggctggccgtgatcctcatgaccggggatcacgtagccaaggtgatctacggcgggtatttgccaggtctcagcgaagcggggcgggtggccttcccgttgttcgcgttggtgatggcctacaacctcgcgcagcccggcgcggacgtggtcaagtccgtgcgcaggctcgcgttgtggggcttgatcgcgcagccggtgcatgcgctgacgttcggctactggttgccgctgaacatcctgttgaccttcgcgctgtcagccgcggctgtctacgccgccaatcagcgaggatggctggcgcttgcctcgctcgcggtggccgcgttggtgctgccggcattcgtggactaccagtgggccggcgtctggttcgttctgctggcctactatgcctaccagcagaaatcgcccggagcgctgcttgcggccttcgttcccctgtgcgttttcaacggcaatttgtgggctgtagcggcagtccccgtggccgggctgcttggacaggccccgtggcgcgtgccgagggcagggcgagccttctacagctactacgtgggccatctggcgtgcctcgggctcctggcgcttatactcgcgccatga

SEQ ID NO: 515354 - DNA, 1335 bp, Stenotrophomonas maltophilia
atgcgccgcgttgctgctctgctcatgttgctgctcgttacaggcactgcgagcgccgtcgatcaggggctggcaacacagatggcggttaagcaggtgcatgagtcttgtaatgcgtcatcgccagcgtatggcacgcatattcaaggcgagataaagctcattgtggggtggggcagcgttaacgcttcgggcagttgcttctttggtgatggcagatatcagggttggcacagcaagactgttgcattcgacactgagtgcaagaaccggcctgactacaacggcgcattccccggtggacagtacaagcctaagagcggctcgctttcctgcgatctcggctgtgaggtcatgtggacgcacaatgctgatggcaccgttaacggcagtaccgtgctcaatcgctcgtgtacgggtgatgacatggacgacgatgacaagtgcaaggctaagctcgcttcgccaaatgccttctacaacaggcaggttggcgtctgcgaactcaatgagcctgaatgccaaggtggtaaggccccaaactcacttgggcagtgcgctccggagccgtgcccgaacggaatggcacagcaacaggacggcacttgcaaaaagaaggagaacgagtgcccggcaggtcaggtgcgctctcctgatgggaagtgtcttccaggtgacggccagtgcgcttctggcgaagtacgcggcccggacggcacttgcaagaaggatggtgacggcgacggtaagccggatgaaccgggcgacaaggacaccttctcaggtggtgatgattgcagcatgccaccttcgtgtagtggctcgccgatcctatgtgggcaggcacggattcaatggcgcattgactgcaacaccaggaagagtcgcaacatcgcaggaggcagctgtgcggccatgccggtatgcactggtgagaagtgtgatgccatggagtacgcagggttgttgatgcaatggcgttcggcttgtgcgctggaaaagatggcccagggcaacggcaatggcggaggggaaaacgccgatgtcaaggcgattcgtgacgccctgaccggcacgggcggatcagttacgacccctgcggatcgtcctgcgtccgatgtctggaccccgagtagcgggcaaccaacgcggcctgacacgtccggctacggctggggtaggggatgcccgcagccgccagcgattgaggtcatggggaaaaccattgcgttcgacattacgccgctgtgccggtggcttggtctcggcagttacttcgttgtgggcctcgctgccctgttctgtctccgcatcatcgccagtagggatgcctga

SEQ ID NO: 515355 - DNA, 126 bp, Stenotrophomonas maltophilia
atgcgcgaagcgcatccacgcatggcgtggacccacagcgtggtgggcgtgcgcagggaggacgtgcccaacgctgtggccggcagcacaggcctgcgtcaccgtgtcgcaggggccaaaccctga

SEQ ID NO: 515356 - DNA, 969 bp, Stenotrophomonas maltophilia
atgcctccgctccgtcccacgaagaagcagatgtctaccgtcaatcgtactaacaagccctcggcgctcaaagcagctgaggcatcacgcgttcactttccgcatacgaatcctaccaagcacgccgagctctacttggcggacgctctccagtggatggccgagcgcgaggaatgctcgattcatgcaattgtcactgatccgccctatggccttgtcgagttcgacgaaaagcatgtagacaagcttcggggaggggctggaggagtctggcgcatcccgccatcctttgacggggcaaagcgcggccccttgccgcgtttcaccacactgacggccaaagacagggagcgccttacgacgttctttaaggcgttcgcatatcaggccggacgcattctggttccgggcgggcacatcgtgattgcgtcaaacccactggtatcgaccaccacatttgcggcgattgaaacagctggttttgaaaagcgcggtgagctgatccgggttgtaaaaaccctacgcggcggagatcgaccgaaaggacacgaggaagaatatacagacgtgtccgtgatgccgcgttcctgctgggaaccatggggaatctttcgtaagccaattgaccaacctacggtcgccgccaacctacgcaagtggggcactggcggtttcaggcgcgtctctgaggatgaacctttcagggatttaatcgaggtcgctccggccagggacccggaaagggcgctcgccccgcatccgtctataaagccgcaaaaactaatgcgctacatagttcgaggcgtcctccctctcggaaagggcatcatttacgatccattttcgggcagcggctccactttggccgctgccagtcatctagggctgaaggctctggggacagagcgagacccaatctactttgcgatggcttccgaagccatccagaagctggcgaagctgccatga

SEQ ID NO: 515357 - DNA, 1071 bp, Stenotrophomonas maltophilia
atgaattccaagcagatcacaccggatctcattttaacggatgttaaggcgaacttttttggtggccagaagcgtaagtttcttccaggcctcctaatcgcaatcattcgcttcttgcgcagactgaacgcgacgggagggaaatactcaagcctgacggagttccacaaggacttcccgctcgtcacccagaagaaaaatggagctggcgtaaacaccttcacggtcactgtagatggaaaggatctggcaatccggaaggactacgacgcaatcgccaacttctttcggaatgacaaccatcgctatgatttcccaagctcagcaccacacgcgacccaggcttggcgagactacgtctcatggattgaagccattctctcgtttagcgacgactcgctggacaagcttgagcaggacgtaattgactacgtcctaggagcactgccatctcaagcaattgacccaaccacggtcaagcgagatccgccgttgttcttgcaatacttacaatcgtttgacatgactagccgtgcaggggagccgactggagctgcgtatcagggcacagtatttggctatatccgcgctgatgctccgcatctacaagtcgaagtcggcaaggtaaggacgggctccaagcgcgagaagcgcgtcggcgacattgacgcccgcgacggcgaaaagctagtcctctctgcagaggtgaagcagtatgtcgttgacgaagatgacattggcgagttcagtgagttctccaagcttatctcccaacaccaagcactaggacttgtcgtagcgctgggtttcaagggggatgctgccaagaacatcgcgaaaatggggttggagccactttcgagagacgatcttatcgagcgcgttcgcatctgggatcctcttaagcagcgcatcgcaattagcgcgatcctttactacgccaacttcagggagcagaactccgtactttatgagcggactcgatctttcatagcgtcgtgtgaagtcagcaaccttccgatatccccgaaagacccaatcaacgccgaagctgagacagcagacgagtag

SEQ ID NO: 515358 - DNA, 303 bp, Stenotrophomonas maltophilia
atggcgactgatggtgcttgggacagccgaaacaatgcgcataaggtgttgcaggcgcgccgcgaaatttgtaagcgccttcgggagcgtctgaaggaaatcaattcggaacttgatcgcattgatgatcatgcgcgctcgaatgaaggccgtgcggcccatcctcctgtggtaaagcgcaccgcagtagacgtattgctcgacaaggcaaatacggaagcggcgatcgccatagctgaaaagcgagccgcagaagcagaggtggaattcgatcgcttgaatgccccactgggtgaagactga

SEQ ID NO: 515359 - DNA, 222 bp, Stenotrophomonas maltophilia
atggggcttgataagaagttggcgagcagccggatcaaccgttatgagaacgagaccagcggcatcgatttggacggattgggcaaattggccgaagtgctcggtgtgccgatggcctaccttgtggcagaggatgaagccattgcagaggtcatcttggcgttgtcgaagatgacaccggaggagcgagccgcagcggttaggcgtctaaggaagatttaa

SEQ ID NO: 515360 - DNA, 501 bp, Stenotrophomonas maltophilia
atgttccggtggtgccaactccagcatcctgacaccctcacggacatccaacgggctgcacgcttctactacctacagcgcctggcttggggcggaaaggccacaggccagacgccaggcttcggtcggggtggcaaaggcctgaacctgttgcggatcgaagaggatctgagcgcggcgcacctgcggctgcacaaggtgaccatagagcacctggcctggcagcagtgcatggccaagtacgacggagccgataccctgttcttcctcgaccccccgtattgggagaccgagggatatggaacgcccttcggcatggagcagtacgaggagctggccagccagatggcgagtctgcgcggcgcggccattctgaccatcaacgatcacccggccatgcggaaggtgttcgggcagttcagggaccgggtggtaccgatccgctacacgattggccggcaggcggtccagcggagggagctgatcttcacgacctggtag

SEQ ID NO: 515361 - DNA, 489 bp, Stenotrophomonas maltophilia
atgtcagccgatccgaacgatctatcaaagaagttgaaccagacttccacgactttcaacgtggccaaccacatgatgatgatgggcctggtcgggaaactgccaatgctccgcaggtctatccagtgctcaccgatacgccacgcatcaagtgcaaccagtattgtgacttcgaaatcagatacagctgcggatgtcgccagcatcgccatgagtgcttatacgtacatcggccatgtgcctgttctctttggaaaatccgcattccgatttgcgccggtcatcggccaactgatgtttgccaaagacgcttacacattggcaaacggagtgatcgacgcacgcgcggcggcaggcaacgaacattgccaggtactgaagatgcatatcggaagcatggaagaatgtgtgactcggggggcgactaagatgatcgacgtgctttccaatattcagccaaccgaccttggtccgggcccatgggattga

SEQ ID NO: 515362 - DNA, 552 bp, Stenotrophomonas maltophilia
atgccgaacatcaaaaagccttacacaattgaggaagcggctatcgcgattgacaggagcaatggtcaaaaacttgatcacggccccgacgatccgcggacacggaatgcatacaacaacacagggaaaaagcttgggcatgagtacatgcacagaggtgccgttggaatctacaacacgacgggtgaccatccgaccggcatgcgcgtgttgactccgctcgagaacaacgtgctgaacaagagccgggcggccaatcgatcctgctcctaccggcttgcgcactttctgttgaactccagccaggtgcaggtcgaacttggaaatgctgatgccgggatcgggcccgcacagaaatggttgaagacagttgcagtcacggattcgtccatctatggctacgaggcggggtcggatgtgccaaagcgcgtatgcgaagcggcgataaacttcagaaaaataggcgatgaacttttcatcgcttccctctatccgacaaagttccttgcggaagaggaccttcagatatcgtcgctctttgaaggaccctag

SEQ ID NO: 515363 - DNA, 456 bp, Stenotrophomonas maltophilia
atggccagtcccgcactccgctttggtcgctggtcgcagaccggcaatgtctattcgatcaccgccgtcacattcgcgcgtcgctgctggttcgacgatgcagccaacgtagagcttctgatcgaagcactacgcacggtagagcggacgggtcggagcttctccctcgcctgggtggtcatgccggatcatctgcattggctgcttgaactacgtaccgggacgcttgccggctgcatgcagatcctcaaatcgcggagcgggcgttccatcggcaggcgcgttgttgccaacgctccgatctggcagccggggttctacgatcatgcgccgcgcagtgacgagtgcctgcgcacgcaggcgatgtacattgcagccaatccagtgcgtgctgggcttgctacctgtctcggcggctatccccatgcctggagcagatggcccattgaagggtga

SEQ ID NO: 515364 - DNA, 618 bp, Stenotrophomonas maltophilia
atggttcctgcgtcttcccccagtgattcctggtacagggccgagcctcggatgcgcggctgctccatgagtgccgctgtatgcgtcgtcctggctgtttggcttggtctgacgggtcaggtaagggcgaacagcggcgacggcgttggccataacacagggcttggcgctgcttcgtcggcggccgtccatgagacgagggcatgcgacgttgatgtggaccacatggacgtgaatcgggatgtcatccagcaggttcgcgagctgaaagcacagccgaatgcggatcaaagggccctggccatgagagccttgcttgaatgtctgtcgagtctcgggaaacgacagcttgatgaagccagtccttccagcgtgcgagagatcgcctctctgttggagatggatggggatgtgggccgtttctacgcttccaggatgctggcgatgctggggtgtcgatctcgtccagtgctgccgcttctgcatgatgcgctggacaagacggcgcccattgaatccaggctcggcccgatggtcctgtcgccagcagtgagtcctcgcgaagaagtcgcaagggcgatcagagcgattgaaactgcgcacccgtgtagaacgtag

SEQ ID NO: 515365 - DNA, 2166 bp, Stenotrophomonas maltophilia
atggctgcactgaactttgatcttgagaactgttacggcatacgcaagcttcgccataacgtatcgctggaccgcaatggttgcgcggcgatctatgcaccgaacggatcgatgaagacgtctcttgctaagaccttgcaggatctaagcaagggggcagactcaactgatcagatcttcacggaccgcgtcaccaagcgatccatattgcttggacagaatgagctgcaaggctccgcagtcttcgttgtccggagctacgatgaaatgttctccaactccgacaagaccgcaacgcttctcgtcaatcatgaacttcgcgtccagtacgagcagcagattggaagcattcttaaggcaaaggatgcgctactgaaggcgctgaagaaggtctctggcgcgaagcgagacattgagcgtgaggtctccatggtgttcatgaggaacgataaggagttcctcacggcactcaggcgagtcaaagaagaagtgctatccgattccgcacctgcttttgccggcgtgccctatgaagtgatgtttggggacaaggcggtagcattcctcacaaagtcggatgtaaaggcagccatcgccacgtacatcaagaactacaactccttgttggcacgatccacctacttccgcaagggtgtcttcaactacttcaatgcaagcacgattgcaaaaaatcttgctgacaatggtttctttacggctcaacacaccgttcgcctgaacggcgcggaggaagtcgaggtccgggaccgtcaacagcttgaagcgataatcgacaatgagcggagttcgatcctcaacgacgccgggctgcgcaagagcttcgagactgtcgagaaggcgatcaacgctaatacggaccttcgcgatcttcatgcacttctacttgataacgaagaagtcatcccagaactagacaacctggagagcttccgacagaagacttggatcgcctacttcaagtcctgcgcatccgagtatgcgaactacctcgagcgcgaagccgaatgtgcggatgcactgaaggcgattgaggatcaagcgtctcaacagagcactcaatggaacgaggtcatccgcatcttcaatgagcgcttcagcgttcccttccgccttgaagtccagaatcgaattccggtgatgctagggcaggaaaccgtccctacgctaggcttccgctttgaagatggcagtggcgatgtagctgacgttgatagacagagcttgatgcgctcgctgagcactggtgagcttaaggcgctttacatactcaatgtgatttttgagatcgagatgcgtcgagagctagatcaagtgaccctattcgtagtggacgacatagccgactcgttcgactacaagaacaagtacgcgatcattgagtacctccgcgaagtgtccgaagatccgaagttcctgcaactcatcttgacacacaattttgacttcttccggacaactgagtcgcgctatgtggatcgtacaagctgctacatggcggtcaagagtccgactgaagtgcgcttggaagaagcctatgcactgaagggaattttccccgtttggcgcgatcaattcttcgttaacaccaagatgaagattgcgtgcatacctttcattcgcaatctgatcgagtacacagctgatcacaacgatcccaggtatctaaaactgacgtcgatgctgcacatgcgcgaagacacgatggcattgcgcgtagccgatctagatgaggtgttttgtgcggtcttttccaaggagggcgcctctgcggagccggataagcctatcgttgatctcatacgtgagaccgccgctgcctgcctcgacgagccggagggaatcaattttgagaacaagatcgtcctgtccctagcaatacgcatggcagccgaagtgttcatggctggcaagatcggcgacgcggaggctatccgcaggatcaagaagaatcagaccggcgagctctacaagctgtacaaggaacgtgttggcacggcggatcgcgaatccagcgatgtccttcggaaggtcatgttgatgaccccagagtcgatccacctcaattccttcatgtacgagcccatccttgatatggcagacgaccacctacgtcgcctttactctcgcgttattttgcttgcctag

SEQ ID NO: 515366 - DNA, 666 bp, Stenotrophomonas maltophilia
atgaatacctacgttgggtactaccgggtgtctaccagaagccaagagcggagcggtcttggtctggagtcgcagcaggcttcagttcgctccttcatatcagatcaaggtcatctggttggcgagttcacggaagtggaatccgggtcgactgctgcgcgcgagggactacgcgccgctctcgcttgctgtcgaaagcatcgggcgacacttgtaatcgcgaagcttgatcgtcttgcgaggaatgtgcgattcatatcgcagcttatggaggctggcatagacttcgttgctgtagacatgccaagtgccaacaagctcaccctccatatcattgcagcaatcgctgaacacgagcgtgacctcatctcgcagcggacaaaatccgcattgagcgctgcaaagcggaggggtactaagctgggcaatcctcgcattgcggaagcccaggcgaagggagctggagtgcgcatagcgcatgcggaccaattcgcgaggcggacctaccctgtcattgtggcactcaggaaggctggagtgaccagctatgcggctctggctgcaggattgaacacagcagcgataccaacgcagcgctccaagctgtggacgccagccggtgttcgcaatgtagttctaagggcgtccatgaagaaggatggctga

SEQ ID NO: 515367 - DNA, 936 bp, Stenotrophomonas maltophilia
atgaggtggagcgggctggttttgggattagcagtgctgtcggtgggcgggtgtcgtcagggcactagcgagctggactatccggcgacccaacggagattcgtggacctgaatcgtgagtgcctacgcgcttacagggctggagtgaatgagatccaaaggtccgtcgcgttcaatacatgcaacaaggcgcggactgcattcgctgccaacggtcctatcagtgggtgggtaggcagaatccaagccattagcaccagccaaggtgccgatgttgtgtcgctcaggattgccacgtctgtggacggcttcgacgtaggctaccgaaccgtcagtaatcgtgtctccgatatcggttccggctctcttatcacaccggacaacccactgttctctgcgctggcaggaatgcaagaaggtgaagtggtcgagttcgatggggatttcttgcaagatcccagtggtgaacgaggggtatgggagtcaagcctcacagaggcggggtcgatggaggagccaggcttcaatcttcggttcaccgcgattcgacgccctggcgctaccaagtcggcaattgctgttagcgaacgtcaaaccgctcaggcgaccagcaagctgccagccacgccgccgacacgtgaggtgcaaaagtccgcgacaaatggggatccggtgcgatcggaagagattgctggcggaaggcagccctacaggacaactaagtcacaactgctcaggttggggtaccagcccgaagcccgagcgactgaaagcctgcctcatagcgttgatggcgatccggcactgtgtgggaatgcaggctgtcagatcccctggacccgaggaacccagtccatgtgcgtcgcggctaccgtgaatgacgatctcgaggaatcagcttggtcttcacaggcagatccgggtccgtgcacgtga

SEQ ID NO: 515368 - DNA, 237 bp, Stenotrophomonas maltophilia
atgaattcccttcttatcaagcaactcggtgaggcactacgcgagcggcgcaaggcggcggggtttagccaagaggggttcgcggaccacatcggaatgcatcgcacgtactacagcgcgatagagcggggcgagaaaaatttgcagctggacactctcgccaaggtctgctccgggctcggatgcaagccgtggcaggtgctgcaagaagctgacccggactcccgcaccccttag

SEQ ID NO: 515369 - DNA, 669 bp, Stenotrophomonas maltophilia
atgttcgttcgtggcacccccttttcgttcagcaaccttgacgcagagcagcgccaggcgctccgcaacctgatccccaacgaggcaccgcctgatccgcgaaccgggactaagccgaggcggactcggcagagcaccccgtttttcgatccgaaaatcgacgggaccgcatctaaagaagagcggatgaatgcagctcttgttgactacttccacgagcgcgacttcaacggcgtagcagcaacgctgacgtttcgcgcagctcgcccccccgccgtcttgactctagaagccggtgaagcagcggtgcaggaactcatcaaacgactgaacaagttctgtgcggggcgcaggcgtcgtcctttgcgggtgatcgcggtacgcgaagggagtgtcggtaccaatgctgccattcgcctgcactaccacctcaagatcgaaattccagaaggaatgacggcagaaaactttgcctccaaggtggagcagtattggaccaagcttagctgggcgagtccgaagcagaacgtcgtcaagccggcgagcgatgctggttggacccgctatataacgaagaggcgcagtaagcagagctatgcggatgggttcgattggacgaacacgcatctcctgccacccccgattgccgagtgctcggacggtgcctga

SEQ ID NO: 515370 - DNA, 717 bp, Stenotrophomonas maltophilia
atgcagccactgcgatacgggctagtcgaggaatttctgctcggtcagattgagagtcttgatgctcgcagggtgatgagtggtgtgcttgtcgatcaacggctgagcgacgcgctggatgagaagcgcgcccttgaagagcagatcgacacatcccgcaacgccatcgccaagctaaccgacttcatcattcaggagggaaccactggcggtgctcgagcggtgaaggtccgacttgatgacgaagagcggatactggcgaaagcaaccaagcagctcgccgccatcgatctcagagttgcagagattcggatggcaagtgagggtgaacgcagaagtgcgctggcacagctcatcacgcaatggagaagcgacccgacgaatgctccgatcctgcgccgggcattggctgaacagatccgatcactggttgatcggatggttgtatcgccagggacacatgtactggaggaagtactggacgggggaccgaacgaatctgaggatggtgaggcagttgcgtcctccgacgactggcggacaacctttggggtaaagagtgaggcggagctcaggaagctgttcaaggatcggaactttgaagtccacatctactatcgcagcggggctgaggagcgcgtcgatgcaatgagaggtccggtctttagggctaacgcgagtcgtaagatgaaggaaatgaggctagtcaacggctga

SEQ ID NO: 515371 - DNA, 162 bp, Stenotrophomonas maltophilia
atgagctcgcgccatgatgaagagggcgccaatcaagttggtggcgtcccctacagtttgggaagagtattcctgctctggcgagagcgtcacgactgtaatgccgcgatgaatgaggtcaagcagaagcgggagagcccgaccgatgtcctgacgacttag

SEQ ID NO: 515372 - DNA, 210 bp, Stenotrophomonas maltophilia
atgtctctcgacaccctggccgcgccgtcgcgctttgccacccgtatcgcacaccacctcggcgaaattgccgacaccctcgactggggtcattcccgctggctggcgctgacttcgcgcttggaggccatcggcaaagcgccggaagagctgacaatcggcgaagtcacctgggccatcgtcgccaccgaacaggaggccgcgcgatga

SEQ ID NO: 515373 - DNA, 843 bp, Stenotrophomonas maltophilia
atgacgcggcttgacgggttccttgccaccctgcgcgcagcggggctgatgctggatacggcggtggccgatggccgtctgcgacgcgtccgcgccgaaggcgatggcagcggccagcgcagtggttggtatgtgctgcacgcaggccctccgcaggccggtgcctatggcaactggaagaccgggctcaatgagtcctggtgcgaagttggaagcgaggcgctcagcgaggccgaccgcgcgatgctgcgcgaggccgtggtgcgcgcacaacggcagcagcaggccgaacgcgcccagcgccacgcggtggcccggcagcaggcgcgtgagcgctggcagcgcgccagcgccgctgcccccgatcatccctacctggtggccaagggcgtgggcgtgcacggcctacgacagctggacggcctgctgctggtgcccttgcgtgatgcacaagggcggctgtggagcctgcaaaccatcgccgccgatggcagcaagcgcttcctggccggtggccgtaaacgcgggctgtactacgccgtgggccgtacggtcagcgacgtggtgtgcattgccgaaggctatgccactgccgccagtatccatgaggccacgggccaccccactgctgtggccttcgatgccgggaacctagagccggtggcctgcgccctgcgcgccaagttcccctcggcggtgatcgtggtgtgcgccgatgacgatgcggccaccgccgcgcggctgggcatcaatccgggcgtagccaacgcccagcgcgccgccgatgccgtgggcggggtcgtggccatgccgccgcggccacgccatgaggctacttcctga

SEQ ID NO: 515374 - DNA, 729 bp, Stenotrophomonas maltophilia
atgagcgacatccagagcatcaacaccactgcttccgaaccggccattcaatccggcgaagggagcgaggctgcgccggtatcggagaataggcagcgactgaacgagctggcgcagcagttggccagcgcggtgcaacgcaagcgcgccttggtgggcaaggtcgataccatgcaacgtgccaaacaggccgcgcagggcgatgccgctgctgcccgccaacaatggggtgccaagctgcgcgatagcgatggcacgctgacccgtgacattcagaagctgcgcgccaacgagcgctcggcgctgtcgctggccgaggaatatgaggcgatggagggggagattgcggccgagctgccgcgcttggagctggaattggccgaggtggcggagcgttgcctcggcgctagaaacacggttacctgggaagtggccgatcaggcctacgagcagttgctggcacagactggggacagcctggccttcgcatttgcgttgttctcgagagcgacaaactccgccgatgccgatgaattggccagccaattctttggtcgcctcggcaatgcggtgcgccgtcgcctggacgatgacgcggtcacggctcagatggaagacgtgttggcgctgccgtcgatggacctgagcgaggtggacatgcagctggtgcatagcaccatacgtcgtattcaattgagggcgcagatcagtgtcggggacgcggcgtga

SEQ ID NO: 515375 - DNA, 900 bp, Stenotrophomonas maltophilia
atgaagatcagctactggatgcagattgcgaacctcagtacctcggcagcattagaactggacgagaccgcttacctgtgtttgctggatgcacgggatgtattgagggatttgaacgcattcgaggagaggtacgaaatcctcctgagcaactaccgagactttgagatttattgcgcacaacagtcgctaatatcggtgttgcgctcagaccagtcgtatcatgtcgcgtatggcgttctaggcgaagccaatcgtctgttcatgaactttatgacctcccatacttcttacgttgatcaagtagttcaggacttcaggaccgttgacttaggcgaaactctcaaggacgcaggcatcaatgccagcgtgtctttcgagcacatcgcaaagcaggaactgaggcgtgtctatgacgcgagcaaagactatcgtgcgatctgcgcactgcgaaatcatgcccaacacagcgctgctccgatccacaaaatcgacagcatcggcgacgcatgctgggctgagtgcctgacctttcattccttgaagaaagtactttctcagaaccgacgctttaagaaattggttctatctgagatggatgaaagcctggacattcgcagcgtatgtaaacgtgtgatagagcgcatgagcgccacacacataaggcttagggatatggttcgaccgtactgcgagcaggcacgtgcggaggtcgaacaggctcacgctgccatggcgcgtgccgtgcaggaggacgagagggtatacgctctctggctgtgcgctcagaacgagggcagcgaccacgtggaacgtgcaaccctgatgctccaatgggacgacgctcgaaggctgctccaagagaaaaatcgtcgacccatccgccctattcgcagctag

SEQ ID NO: 515376 - DNA, 801 bp, Stenotrophomonas maltophilia
atgggcaccagaatcatcggaccccggccctggctggggccaggcgtgggaggcggtaccggcaccgtcgacgaagacggcaacccggtggatccctacggcgggccgaccaccggcgatgtggtcgatggcatccgcgatgccgtgtacggaatccagcagcgggtgcgtggtgaagccaagcccgatgcgcgcgccgagccgacggccaaggcgcgggaggtggactgctcgcagatgcccgacgagaccgcgtgcaacgagtgcctgctgaaggaggggttcatcggtccgcctctcagcccgcgctatgtcacccaaagcaacctgatcaattacgaatatcagttgtacattgccaacctgcgctcggcgccgctgcgctttggtttcatggtcgccgacaaggcggatcctgatcggcggctattctcggtggatacgttgtttgactaccttgagcgcgatgggttctcacgcgccgtgcaggaatggcatttcaacgcctgcgagtttgatgggttctggttgaaggactgtacggtggtggaagcgaaggggaggtatgagcagtttctggacgagaacggaaggggtaagtacgggttcgtagaaaggagaatatttgagccctggggcaatcaaatgatcaggcagcgcgccgccataagtattgctgaaccacaaggggggctactgtggtgctttatgcaggcgcgggcgatggaagcagggattaccttcgccggtctcgatcccgctctctgcaagtacgaaccctatcctggagaattcgcttga

SEQ ID NO: 515377 - DNA, 681 bp, Stenotrophomonas maltophilia
ttggctgcgcaggcgaccaaagctctggatccactccatccatcgctcaggaactggtttgcactgccctcgagccgcaaaggcaagtatgtttctctcgatgaaacggacacgctcatagagcagatggggcaggatgtagatgaagcgcgtagacgcttcggcgattttgagggccttggggcttcactgaccttagcaaacgtgagcaacgaccgggattggagtaagcctggcctgatcgtattcggtttaaatccgacaacgggattcaacaagtttcgtctcgatgggatcgagccatttggaatggatacccctgatctcatgttgaaggcaatggtcgagctggtgaaggtagtaaggcccaccttcgcgtgcgttgatgtaaagtccagagcgcccgagaaaggccttgtgacatatcaaatagaccgacgcctgtatcaacaccggcagttcttcggttggatgggcttcgtgcccgcgcagatcacccacgcgcagatacgcgacgcgcatgccgttcacccggtcgatggcatgggcacggtgatcgtctcggtgccgggcgtgtttgatcccaccgacgacgcgcaggtggaaaaagtgcaccgcgtcgaaatggatctggccagctatgacctgttgccggtgacagatcccagcctcaagggttga

SEQ ID NO: 515378 - DNA, 750 bp, Stenotrophomonas maltophilia
atgatccttgatgctcaaataaatctacgcacatcggctgtctcccgtacaccggaagaagtgctgagcaagaccttggagctgacggaaagattggcccgcctgcaccctttgatgaaacgctggtatgcgttgccctcgcgaagaaaggaagcgtacattgccttggaagattctgctgcaatgctgtacaggatggagcggggtatcgagaagacgcgtaggcgattcgggggggtgagggggtttggcgcgtcactgttgctggccaacgtagacaatgaccgtgactggcgtgagcccggagtagttgtgctcagcctgcgtcccggccttggggtgcatagtttaagcattgaagggcttgagccctttggagaggacatctcctcaatcatgcttgacgcgatgattgaatcggtcaagatcatccagccggagttcgcatgtaccgatgtcaaggcaagatcgcctgaaggcgaattgatctgctaccagttggacaggcgcctgtatgggtatcgggagttcttcggctggatgggattcgttccagctcaggttgaccatacacagcttccggacgcgcacgctgtccatgccgtcgacggcctgggcacggtgatcgtctcggttccaggcgtatttgatccctgtgatgacacgcaggttgagcgcgttcatcggctcgaaagggatctggccagccgcgacctgttgccggtgaccgatccgcacttcaagggctga

SEQ ID NO: 515379 - DNA, 354 bp, Stenotrophomonas maltophilia
atgaagacctctgatgtttccgtctctccgcccggcgtggcatcggccaatgccgataccgctggcgagcccatcaccttcgtcgcgcagttgcgcggcatcgacagcggaggcgcatccgatggacggccctggcccgaacgccagctcaatcccggccggtgcatggccctggccgatgccgattgcgcattggccgggctgcgcaccgtgcatgccattctgctggctgccgagcgggcgcgacaggacggcgggccggaccaggatgtgggcggtcgcgcgatggagggcctgatgcaggccagtcgcgtgctgggcctgtatgccagccttaacgtgcggccctgctga

SEQ ID NO: 515380 - DNA, 210 bp, Stenotrophomonas maltophilia
atgaagcgcagtgcccgtatgttcgtcgccctgactaccctcgcggcattgcctgccgctgccgagccgtccgactcacccaggcgcccgtcggttgacaccctgcaacgcctgatcgtcgacaaggcaccgcagacgcgcgtagcgacgcctgggaccacgagcgcatcaccgcacggcgcatcgatatcgtcgatgacacgggggtga

SEQ ID NO: 515381 - DNA, 411 bp, Stenotrophomonas maltophilia
atgaagaaccagaagggcttcaccctgatcgaactgatgatcgtcgttgcgatcattgccatcctggctgccatcgcgctgccggcctactccgactacaccaagaagtcgaaggtttcggaagttgtgctggcggcctcggccctgcgcaccgccgttgctgaatacgcctcttcgaacaacaccctgccgggcgcaagctggagcggttttgaagctcagtcgtccaagtacgtcagcggcgtcacctgggatggcagcaagatcaccgcaaccgctcggagcattggtagtggcgttgatggtgcaaccattgaactggccgcgaccttgaatgcgaccaatggtactgtcgattggaagtgcggcggcggcattccgtccaagtaccgcccgggcagctgccagtaa

SEQ ID NO: 515382 - DNA, 1947 bp, Stenotrophomonas maltophilia
atggggatgtctaccttgcgcaggcttgcgccttggtgctttgcgctagcgctgattttttatctgcggccctacactgggattcggcatgacgccaccctgtacttggctcaagcgctgcggattatcagtcctgatatctatgacggcgatttgttctttgcggcaggtagccaggcagatttcacgctgttcccgcagttgctcgcatacttgctgcgctacgttgagccgggagcggcgtttttagccttgacctttggcatccgtgtcgccttctttgcggcaagtgcatacgtcattcgggcgttgtttccccagtattggcgttggccagcgatctttgcactgatcgtcatgccgagcttgtatggggcattcagcatgttctcttacgctgagcccttcttgaccgcgcgtccgttggctgaggcgctctccctcctcgcaataggtcttctgctgcgtcgccgtcttttgtgggcgcttgtatgtctcatcattgcgggattgatgcatcccttgcagggggcggcagctgcgcttgtggtctggtgctggctactcatccaggatcgcagatggttgtgggcagtatctttggttgtgcctattggtctcctgggtctcttccgtgtgggaccatttggaggtctgttccagtcgatcgactatgagtggtatcagcaaatctctgcgttgagtgcccagatcttcgttggctcttgggagccccgcgattggtgcattgtgctgtcggacttctatctcatctatcttctgcttcaacgcacagaaagatctggcgccctatcgaaaatggcagccgcaacgattcttgcggttgccattggcttggctttcagtgcgattttcgctgatgtcctgaagttggtgctgcccgcaggtttgcagatctggcgtgttctttggttgggccattggttagcgatggccagtattccgctcttgattcatgatcaatggattaggagtaatcgtgacttggtggcaacgttgctcttggttgcaattgttgtaacgggcgcgagcgttcctcggatttccttgccatgggccgtactaggcctaatcccgttgcatatgttgtggcctcatgctgtatcgaggattagccgtactggaaaggtgctcattatttcggggattttcctgatcctcatggctgcgcttctctggtaccagatacgggcttggactgtgtttgaggcgcttgggagcgacttggaaagagtgcgacaagacgttgtcattttcagctatccgttgatcgcgggcggggtggtggctgctgtcgcatggctctatcggcaatcgggttcgcgtttaggagctgtgcttggcttgggaagtatccttctcttgataggggcgatgtctacttgggacgcgagaagcccttggagccggacgttggagactgcgaaaggaacggacatcttcggtgtgagtattccgcggcattccagcgtctactggtatgcaagtgagccatcgccgttggggccttggttggtgctggagcgaattaattatttcagtatttttcagttgtcaggccagatgttcaatcggggcacgccgatggaaggcgcgcggcgtaaggatcaggtcgacccggtaaacagccagggagagatctgtgacaccatgaatgcggtaaacaaggatgacgactcatgttggatcggaactgaagggattcggcacctctgcacgccgcacgggagcacattgcccccggattacttcgttcttccattcaggcagagacaatatgtgcgtggcgtgtgggatgttaggcatccgacacgtggcgaaacgcttgggcgactttatctctacaaatgtagcgactgggtcgcagtcgttgattccgcgcatcaggagatcgaacagggtgttgatgtgaggttcgggcaatga

SEQ ID NO: 515383 - DNA, 456 bp, Stenotrophomonas maltophilia
atgagtattcgatcgtgggctatcgaatccctgcgcaatcggcttgggccgtttgctgagggggtaaggtatttgttcgcctcagcagttgctttgctcgcggatctcgggaccttcgcgcttctttcttggtggtggagtggttggtattccgctgctgctggcggtttcctggtaggcagtgtggtcgcctacgtcatcagcgttcgctgggtgttcgctcggcgcgtggtcagctctgcttcggcggaactggccatattcgtgctgatcggttgcttcggtctgctggttgtccaaggcgtcatgtgggtctgcattgagtggctgggtatgccggggagcattgccaggctggttgcggtcgggttctcgttcacgtcgaacttcgcattgcgcaagttgattcttttccggtcgcgggggcgcgaacgggccatcggggaggtggcatga

SEQ ID NO: 515384 - DNA, 357 bp, Stenotrophomonas maltophilia
atgatcattcactacgacattgcgtcgtggttgcgatcgggttatgtcgacgaaggtgtcattgggtttgtctcctcgaccccgtttgagggtggtcatgcgatcagggcatgtttgagccacacgccctatgacgacttcacctcaaccgacatgaactgtgaggggcaagtcattcctccctatcgaggaatcatcggctacgtctcgacggtacagctacctggaactgctccactgtatcgctgcgcttatgcctggaaggggaagctgcgccatttcgatacccgtgatatcggctgcgaagggatctcgggtgcccacaacgacgggccgcaaggctacgtcttcatgtaa

SEQ ID NO: 515385 - DNA, 1050 bp, Stenotrophomonas maltophilia
atggagaagctgcagaaccttcagatgatgcgtgcgatcgccgcgatcctggtcgtgtgggcgcatgccattgatcttgtcgcgaagcggcagatcgacgcattccaggtgagctggggtgcgctcgaaaacttcggcgctgtcggcgttgatgtgttcttcgtcatcagcggcttcatcgtctcgctgacggctgagcgttccaggtccgtgacgcagttcctgcttgcccgtcttgtcaggatctggcccctttatctgatcgccacggtggtggtgttcgccgtggatcccgcggccagatccttggcgacgctgggttggtcggttgtcttccttcaggtccctgggcttccagcaggcatgcccacccatccactgggatggagcctcatgtttgaggccgtcttctacctgatgcttgccggcgcgatgtgctggcgatcccagcgaccgatgcccgagcgggtgctgatcatcggctcggcggccattcttgtggcaggggtgtctggcttccaccaacccatgaacatcattggaaacccgatcatcatcgagttcctgctgggcgtggtcatcgggtgggtatatcgccgtcggccggagctacctgcgtgggccacgtcagcgctgttcgtcgccggtaccgttctgctgctttccaccgcgatgtatgggttcggatccatcagcgaggcgccgcaaaccttggacgccagcctgtcttgggatcgagtgcggcagtgggggatccctgcggcgctgctgatcgcgtcggccgtgttcaggaggaacgcgacttcggtggcggcccggccactggtcttcctcggggacagctcctattccatctacctgttctcgttcgtggccctgttgctccttgatcagggctgggacgcgtgggccccagcgtcgccagacgctgcaatcctgcttgccactgcggtggcggtggtgtttggtgtgatctgctacgtggcactggagcacccgctgacgtcagcagttcgcacagcattggcactgcggctggccaaggtgtag

SEQ ID NO: 515386 - DNA, 591 bp, Stenotrophomonas maltophilia
atgtccgacgcctggcgaaccctctccgccctcggcgacagccgatggctgctgcccatggccctggcgctgctgatcactctgccccaggccgatgcacgcctgaaatggcgatggttgctggccatcgccgccaccgccggtgtcacgcttgcctcaaagctggccttcatgggctggggcatcggtgtcaagagcgtgcacttcaccggcttctccgggcatgcggcaatgtccagcgccatctacccagttgttggcgtgctgcttgctggccccggcagtcgagctcggtcgttcggcctggtcatcggtgtgctgctggccaccgccattgcctggtcacgaatcccgctgcatgcgcatagcctgtcggaagtcgttgccgggctggcacttgggctgagctgcggcgcatgggcactttccgccacagctccctgcaagcgccccagcgcgaggatcctggcaactgccgtgcttatcggcctcatccttccactctgcctgccagatctacgcacgcatcagctggtcacagcgattgccgaggccatggagggccacagcgagacaaatcattggagatga

SEQ ID NO: 515387 - DNA, 264 bp, Stenotrophomonas maltophilia
gtgttcacaagtcgcgattacacccggctggtgcgcagctacggcctgaagctggagttcatcaccccgcagtgcccacagcagtacggaatggtggaacgtttgatcaggatactgaaagagcaatgcgtgcgcaggcatcactttgcccatgcgctgcaggtgatcgctgactggatcgccttttacggccagcagcgcccacatcaggcactgaagatgatgaccctggatgcggcctttgcggctacattgaccgcatga

SEQ ID NO: 515388 - DNA, 1161 bp, Stenotrophomonas maltophilia
atgattaatgcgcgcgttggttttgcggagaagttgtgcttctattctcttattgccttgggggtggtagggctttttagcccgttctcgtacaactatttgcccgcaggaccaatttttgaggttgtgcttgtccttgctgcattaatcgtttttcgattgccgaaacgctcggttgttgctttcttcattgcgtcagccgcctatgtttttggttcgttcgtggtgatgggtctgtataaacctgcgcaccctctcgattttgcgcaggcttacaaggccttcttctacgtgattcctttgtgccttttctataagtcagatgtattttctaggaaggttgcggtacgtgttcttaaatttcttcttgtggcatttttgattaagtattcatactcaatagttatgaactttactcctagaatggggtcgaggccgggaatatatgtggaaaataattttgagttgatatttattattctttatttctttgtggttaggggtgatctgggtcggagaatgacctattggtttttggttctattggctatcgttgctctgtctggttcacgaagttcggttctcgcactgcttgtacttttctatgggctgtacctaaataggctaagtctcaaaacctttttttacttcgcaggcatgttggctcttggggtggtcgcggcggctatctttttccttcggtctgagggagggggggttgagtcgattgatagatataactttatgatggtgttcgtgaatgaggtttcgagttggccatcttggaagtttctagttggaagcatgccgctgacgccgctatctagtgcggcttgcgggaggctggccttctatgatgatttatttagtttcgcgggtgatgggcgctgttattccgtaattttgcactcctatttccttcgagttgtttttgatcatggaatcattggtctcgctttccttttgtggtttatgtggcgcgcgctgaggaatagtgggtattcaaagaatgatgttgcagtgtttattgggatagtttgcagttctgcactttcggtttcggcaatgaatagtgtgtttgtggctctcgctctcgcattggcgctgggccttcgcaaggcgccagttttgagttctagccgttatgcggttccaggctaa

SEQ ID NO: 515389 - DNA, 696 bp, Stenotrophomonas maltophilia
gtggaagtagagggagctcgttcccttcgggcaggaaaggggcttgacggaaggcttcacaccttcgtcaatccatattcctaccgcgttttgcggaaactgcggcctgatgttcttcgaggggaagccttcttagttcattttgatggtatttctctagccctacttgcacgggtttgcggagggcgaacagttcaacgggagagtttcgacgacacgtcgctggctccggttgtcttttccgagtgtgtctcgcatggcctgagtgtggcgctgatcggatcgttgccaggcgtcgctgcatcggctgctgatcatttaatgaggcgttatccagcgttgaatgtcaagttcgtctctgatggctactttccagaagagatgttatcggaggttctggcccgagctgctcaatgcgatgttgttatctgcagtatggggactccgcaccaagaggaccttttgcttaagcttagggcgtacgcttggaagggcactggatacacttgcggcggataccttgatcaactagttgggagtgaaggggttagctactacccgctcctgatggacaaattgaatcttcgttggttatatagaatatggaaggagcccaggaggcttattcctagatacgctattgactatccggttggattggttgcgttcgttttggatagggtttattttcgatag

SEQ ID NO: 515390 - DNA, 657 bp, Stenotrophomonas maltophilia
gtgattgacaagaagattcactactgctggtttggtgggaaaccgctgcctgcaatgtatgagcgctgtgtcgatagctggaatgcgtggcttccggactttgaaatcgtgcggtgggacgaatccaatacggtgattgacacgccatttttgaagtcatgctacgcgcgaaaagagtgggcatttctctcggattacgtgcgattgcgtgtcgtacacagtcagggaggggtatatcttgatgctgatgtcgaagtcatcaagaacatggagcctctcctggactgtgagatgttcataggtgaagagtcccgaggtagggcaaccacaggggtgtttggtgccgttaaggggcacgcttttatgcgtgcatgcatggactttatcgatgagcggcatgaggcaaaacggccatacatgattgctccggaggtggccatggaggcactgcggacgatttcgaaggatggagtgcgtgtccttccgccaaactacttctatccatacaatccgtatgatagggggtctgctaccaaggaactgatgttccaagacattactccagacacttttgctattcatcactggggtaagtcctggcggcagaacattttcagtcgagtaattaagaaggtggagaagaagttgtggaagtag

SEQ ID NO: 515391 - DNA, 1098 bp, Stenotrophomonas maltophilia
atgatagtttttgctctctatgccctgaaagcacgtggtgatgctggggccagtggcggccatgtttcgaacatgcagctgatagtcgatgcctcccgcgcgggtcagtgtatggtcattgcgccaaatctctcaaaaaatgtcatcacattgcttgaggggcatggcatcaggtatctgacggcgcctttcccggagaagggattttcttcccgggttcgaaagcgcacatggatcaaggcgcagcttgacgatgtgctgagtagtagcggggtgcgtgtcgtactttccacaaatggcgtttcggatatcgtctactccttgctgatgaagaggagtgttggcgctgcgcatgtgatcattactcgagcattcgaagatctctattacagccagcatcacggtggagcgattgcacgactcaaagcgctcgctttcgacgtcgcaggaatgggtcgggtgcgacgggcgtatcgatcagccgatagggtgataaccaacagccgctttatgcagaggctggttggtaattacttcggaattcctcgtgatcgcatatctgtactctatccgccactctctggtaagtgccatagctacatgcagccccgtgccgagctgcatgtaggcatgatcaacccctcagcgcataaaggtgaggatgttctgactgggctggcggcatcgctgccgaaaattaagttcttctatttttccgcagcagagaggaactttcggctgcccaatcttatttatggcggctggaaatcccatgttgaggatattttttcctcgatcgatgttctgcttgtgccgtcccggtggcatgaaccgcttggtcgagccgcgatagaggccttgtcgcacggtcgtccagtgcttgtaagcaatcgagggggactgccggaaaccgttgatccctactttgtggtgctcgacgatagtgttgagtcgtggggagctgcgctgaaaaagatcagcggcgatccggagcagtgtcgcgatgcctgggggcggtcggccctagggttggacagattcagcgagcgagtgcacgcgaagacggtgaccgacattatcaaggaagtgacatcgtga

SEQ ID NO: 515392 - DNA, 1263 bp, Stenotrophomonas maltophilia
gtgctctcgatttttactctactgggatcgggtgccgcgtttactactcagattcttatcgctagagcattagggcctagtgaatttggcatctttgcgtcggcgctggctacggtcaccgcggccgcaccgctggccggatttggcgtgcagtccttctggctccgcgtctttggcgaagaaggttggggggcgcggcgctggatgcccgcttcactgcgatttggaatttggtctactttctccgcgctctgtcttgtcagtgtggttggactgttggccggtgcttcaagtcatgccggtgcgagtctactgattctccagttccatctgttgtcgatggcttttctggagatcatcggaacccgctttttgctggaagagcgcccccttgcattgatgctctggcagacggtccctcagttcgctcgactggggttggtttcgctactcttgtgcaaggttgaaggactggatgcccaggcaatgagctgggcatttgctttggttgccgtgatcacgcttgtcgccggttggcgccatctgaatagtcttgcacgaggcgaaatcaagctggttggtcatggtccagctggactgctatcgggctccatcgcccagtcagaagtcccgagaatgatcgaggcgggcaagggagctcttccctacgggttgggagggatcttctatcagttctacttccaggccagtatcgtctccctcacctatctccttggatcagcagccgctggcacttacggcgcggccgcatcgatactcatggctgtttacatggtgccgaatgtcgtctaccagaaaatgatgttgccgaggttgcatcggtgggcagcgcactctcaagagcgctatcttcaggctcacgcgcgtggagtcaagttgatggcggggctggggagcctagccgggttgggttgtgcggtgacttcgccctttgtcattccgctgattttcggcgatcagtatgggcaggcgggtattttgctttcagggttgtctgtcgcaatccctttgcgatttgtctccatttcagttggggcgtcgctttcgcttgactgctttgtgcgaccaaaggttgccgctatgtttgccgtagccgtaatttgcgtcggccttaatctcatttgcattccagttctcggattatggggcgcagtactttctactgtcgcaggtgaggctacgttggtcgcattctatctgtggttggcgcggactttgcgtcctggttggggttcgcaatga

SEQ ID NO: 515393 - DNA, 1167 bp, Stenotrophomonas maltophilia
atgaagatcgcgattgcgggcactggttatgtcggattggcaaacgccatcctgcttgcccagcataattctgtcatggcggttgatattaatgcagccaaggtggcgcagatcaatgcccggatatcgccgatcgaggatcgcgatattgagcgatatctggcaacacgagagctcgatcttcatgcaaccctggatgcgcggtctgcctatgggaatgccgattatgtggtgattgcgacacctaccgactacgacgttgcgaccaatcgcttcaatacagcttcggtcgagtcggtcatcgccgccgtgttggaggtcaacccctcagcgatcatgattctcaagtcaacggtacctgtcggcttcactgtatcggcaaggaagcgtttttgtacggagaacatcattttttcgcccgaatttctgcgcgaaggcaaggcgttgttcgacaatctccatcctagtcgtattgtaatgggcgaggatagcgacagggcgagggcttttgcagggcttttgcaaggcggggcggaagcaacggacattcccaccctcttctgcgattcaactgaggcagaggcaatcaagctatttgccaatacatatttggcaatgcgcgtcgcctatttcaacgagcttgatacgtatgccgctacccatggtctgagctcccgtcaggtgatcgagggtgtctgcatggacccgcgcataggtgggcactacaacaatccatcatttggttacggaggctactgcctccccaaagatacaaagcaactgcttgcgaattatcaggatgttccccagaacctgattcgggcaatcgtcgattccaacagtacacgaaaggacttcattgcggatgagattcttgctcgcagcccgaaggttgtcggcatctaccgcctcgcgatgaagtccgggtccgacaattttcgtgcatcgagtattcagggcgtcatgaaacggctgaaggcgaaaggcgtcgaggtcatcgtatttgagccgttgctacgcgaggatgtgttcttcggctcgaaagtggtgcgagatcttgatgtgtttaaggtgctttctgacgtgattgttgcaaatcgcgtaaatgatgagctctacgacgtttcgacccgaacgtactctcgcgatttgttcggggcggactga

SEQ ID NO: 515394 - DNA, 564 bp, Stenotrophomonas maltophilia
atggcgcgtaccaaatccattcctgatgaacgtgtggtcgagctggccgtggaactgctggtgcaggccggaccgcagggcttcactcttgccgcactcggggcgcgggcggggctgtcggcggcgacgttggtgcagcgcttcggcagtcgtgccgccgtgctggagcgggcgatcatccgctccagcgagcgcatggcaatctcggtgccgacagcggatgccgcgacggtggatgcgttggtgggctggctgggggcgcagacccgcggcatggagacacggcagcgcctggccgggcacatgacactgctgatggaagacctgcgggcagcgggtgggcgtcgggcgaccctggccaatgcgcatgtcatggagatgcgccacggcatcgccagccagctgcggacgatgggatttgccgacgcagaggccgccgccacgctgctggaggcgcactggcatggcctggtgatccagtgggggctggcgggcaagggcagcctgcgcagctgggtcgaagctggcctgcgccaggcgattacgttgttgccacgggactaa

SEQ ID NO: 515395 - DNA, 798 bp, Stenotrophomonas maltophilia
atgaacgtcctgctggtctatgcccatcccgaacccacttcgttgaacggcacattgcgcgactttgccgtgcagcggttgcagtctgccggtcacagcgtgcaggtgtcggacctgtacgcaatgcgctggaaggtggccctcgatgccgaagatcatcccggtcgggattgctccgcgcccttcaatccatcgctggattcacgggagtctttcatcaacggtcggcaaagcgccgacattgcagccgagcaggagaaactacgttgggccgatgtactgatcctgcagtttccactgtggtggttctcgatgccgtctatcctcaaaggctggatcgagcgggtatatgcgtacggctttgcctatggtgtgggcgaacactccgaccagcactggggcgaccgctacggcgaaggtgtgatgagtggcaagcgcgcgatgctgatggtcactacgggcggttggcagtcccactatgcgccgcgtggcatcaacggcccgatcaacgatgttctgttccctatccagcacgggatgctgttctatcccgggttcgaggtgctgccgccccacgtgatctatcgcagtggcaaggtcgacgggaacacgttgccggcgttgctggaagggctgggaaggcggctcgacggcctggccagcgatccggtgatcccctatcggcggcagaacaccggtgactacctgattccctcgctggagttgaggccggaactcgcagaaggactgacggggttcggcatccaccagatgacgacagacgagcaccgcgcctga

SEQ ID NO: 515396 - DNA, 903 bp, Stenotrophomonas maltophilia
atggacaatactttgcgtcgcgtcgacctcaacctgctggtaactctgcaggccctgctggaagagctgaacgtcacccgcgccgccgagcgcctgcatctggcccagcctacagtcagcgtgcagctggcgcggctgcgcgagctgttcaacgatccgttgctgctgcccagcgtgcgcggcatgcgcgccactgcgcgtgccgatgcgctgcgccagccactggctgacgcgctgctggcagtgcggcgcacgcttgcaccggtgcaagccttcaacccggcccaggcgcagcagacctggcggatcatggcctccgacttcggtgaatccacggtggtgctgcccgtgctgcccgccctgcgcagttcggcacccggcgcacgcctggcagtggtgggactggtgccagcacagatggtagtgctgagtgagcgcggcgagattgatctggccatccacatcacgtccgaggcgccgccgtcattgcatcaccgtccactgttccaggagcgctatgtgctcgctggccgccgcgatcatccgaggctgaagcgccgccccacgctcaagcagttctgcgccctgcagcatgtgatcgtctctcccgacggcggcggcttccatggcagtaccgacgatgcactggcccgcgccggcgcccgccgcgaggtggtactgtcagtaccgcatttcctgttcctgcgcgatgtgctgctgcagaccgatctggtggccatgatgccctcccggctggtagcagccgatccgggcctgaaagcagtcgaggcgccgctcgaggtgccgggattcgagatggtgatgctctggcacgagcgtgtgcaccgcgatcccgcgcatcgctggctgcgcgagcagatcgcggccgctgccaacccgtga

SEQ ID NO: 515397 - DNA, 567 bp, Stenotrophomonas maltophilia
atgctggtcgtggctgggctgatggcaacggcctgccaggcgcagtcttccgaagtcggcggttggcgcagggtctccaacactgatctcgaacaccagttccacttctcgatgctgccgcacgccgcagccacgggaagtcgttggaccatctacgacgccaaggcgaacaaggttgtctgttgcctgtcggtggaggggggggaggtaagcgaaagtgagttgcaggatcgcttcggcattccagggccctggattactgacttgaccaacggttggaatctcgatgcggccccctatcgcccgcacgtccagttgttgaaggtgcagggcgcgatgagcagccatgccttcaaggaggaacgcgaagcggcgggcggcctgttgcttccaccggatgcgcgggtggtgggtgaccgtctactggagttcgccggaaagcgctacaggattgagcgtcgggagacatcgctcggcgatggggatggcggtgtccatacctacagcttgaaaccggccaagggaggagtggcattggaggtcgaggttccgttcggaacgtactag

SEQ ID NO: 515398 - DNA, 3612 bp, Stenotrophomonas maltophilia
atgccgacgtacaacccaggcccgccgttccgcgtaagcagtgactggtcgaaggcccgcaagcacccgacacagggtacggtgaagcgccacgaagggcaggattgggccgcaccagcaggtacccccattcccgctgcagcagacgggcatgtgatctataccggatggatgaacggctacggcaacacgatcgccgtcgagcacatgatccgtgggcaggtggtgcatacgatgtatgcgcacatgtcggctgcgtcgccgctgaaggtgaaggacaaggtcaagaagggcgatccgctcgggcccgtcgggatgacgggcggggtgagttcgggcaatcacctgcatttcgaggtgcatccgttcgccgagtccgggaagctggtgctgcacaagacggttgatccggcgaccttcgatttcccggacggagaggctgtgtccggcgcgttcgggtatccattcctgctgaaggatggtgagccggcgcgcagtcttgccgcctacatgcatgcgatgcgtggcgcggaggacgggttctatccggtgggcggcaacagcctctggcacggtggcattcatttcggcgatggaactgccaatgcgttggcgcaggggccgacgcagctcggcgagaaaagtggcgtgcgctgcatcgcagacggtgaggtggtggcctacaagcttgattcaacctatcccgcggtgcagttccgcgagaatcagctgaaggcgttgtattccaccggtttcacgctggtgcggcatacgctggtgttgcccgagagcacccagctcaaggcgtgccagccggaagatgaaacggctgaccttgaggagcagacccgcgcggcgcagatgcgttcggcaatcgccgtgaagatgcaggccgaggacagaaaggctgctgcggacgccaaggaggcacagaaggcagcggcggcagaggcagccaaggatgcaaagaagggcaagaagaccgaggttcccaaagcggaggcgacgccggagcggactgagagcaagccggaaacactggtccttttcagcctgtacatgcacctgatggattggcgtggttatcggcaggacgaaaagattccgcgtgcgaagtactggaaaggcgacagtacctaccgtgtgaccgcctctgccgccgaggatacgcagaaggtcccaccgccaccgccaccgcaggaagaatcgacggcagatccgttcgcgctgccacgctctccgttctccagtgatcgcggcttcggcctgggcgagtcaccgctgggaggcggctggggccaggggcaagcaggtggtcaggcgagcgtcgaacagcgtggattcggattggaggcggccgcagagcaggcgacaccacagcgcgtgccttatggcagcctgcctacacccggtgcgtcgatgccatcctcggcgtcggccactgatgcggccaggtcgacggctgcgagtgcgccggctgcacctgccatcaaggggcgaaaggggctgaacatccgttccgagccgaacgggaagctgcttggcatgctggcgcagggagctcgcgtgcgcttcaccgaaacgaaggcggtgggcaagggcgtctggggccacattggagagctgctcgaaggcgagatcattgctgcggaagccgtcgatggacaggtcaagccgggggccgaaaagggctgggtttatctgtcgcgcatggaagcggtgtttgacaagcccgatccggtggatcaggtggtggtactggacaagccattcccggtgaaggccggcgatatcatcggccagatcggtgagtaccagacctttggtgttgcgcgcgcatcgccttcgccaggcatgcgcagcatgctgcatctggagatgttcagcggcggtgacgtgcccggtttcatcgggcgcagccgcgcgtatgcggccacgcggcctgaaaacgaacgcaacatgctggtgcttgatgtcggcgtcaagctggtcacgcccatcgccagcgacaccaccctggctgcaggttcgatcgtggcaatcgctgccgacagtccgaagggggcctgggtaaagttgcacaagtccgtggccgagcaggtgccgagaaaggcgcttggaaagtacaacgagaaaaccaagcgctacgccgatgggcggatgttcaccgggtggtacgtcagcagtacaggtgaacggacgcagtcggagaaggtgggggggaagtggccggaccgagaggtactcaccgagctcgacgacgttttctgggcagaagcagcacgcgttcccgctgcggcggcagggaagcctcttgatgccgacctgcccgcgtggacccgttatcccttgcagctcagcaaccagacgacgcctgccggaaagctgccgcgcgtgatcgcgcgcgtcgagttggacgcgcttggaaaagagttcatcgcgattgacgataagggtaatcgctggtggtgggtggcgacagatcaggcgccgggatgggtttgtcagaaggatcatcctctgacgcgttgggaatctccgtgggcatggccgtgcttcgagtatgtggaagaaggtcagctgacgccactggacctgatggcctggaaggttttccagatggccaagtcgcggcccgaggagaaggcggagcacaagatgcgggccgatcgcgtccgtggcagctcgcttcatcgcaagatctatcagttgattgacgtcaacaacgatggcgatctgagcccggcagagttgaagcacgcgcagcagaatccactgctggcccgctacctgcaaaggttgatcgctcgctatgagagcgaatggggcggtggcatgcagaaatgggacgaacttgattccatgatgatgcgggcgcaaggcaacgagtgggcgggcgagaaggtgcggatccgcaagctgcaatggtgggaaaccgtgcagggggtgaaggatttcccttcgagcctggacgtgtttcatttccatccgctggccatgatctccaatttcatgggcttggggacgaagatcatcgacggtgacctggtgcggcgcctcggtgatctgatcgcgcatggcgaaggcggatacgattcgtacaactcgggcaccaagaatgttcccgagggcaaggtcggtttcagtttccgcaatcctccggccggcacagtgaccgggaagaccatcgatgaaatcctggcaaccgagcctttggacggtaccaaccgcaaccgcatgttcgcgaccggaaagtaccagaccatcttcggaactctcaaggctgccaaggccaagctgggcctcaccgggaacgagaagtacgatgcggaactacaggagcgggtgttccgcgagtacctgctgtacaaggcaggtgatggcgcactggggcgtctggtgatcgaaggcaagggcaccgtggatgatgcgcagatggcggcggcccaggaatgggcgtcgatcgctgctcccaagggccgcaagatcgcctcgggagcgatatcggacggcaccatgtcctaccatcagtcgctggcgaacaaggcaaacgtggagtccacgccggcggttcgcgcgcttcttgtcgaaatcctggaaagcaaaaaatga

SEQ ID NO: 515399 - DNA, 636 bp, Stenotrophomonas maltophilia
atgaatcagagaaagccaggcaagccggtcaaccgtcatctgcccgtcgcgttgcccaaactgctgctggccacgttgttgctgccactggcggcctgcggtaacggggcgccgcagggaggcgcgcagggaggcgcgcaggaggacgccacgcgttcggcgcaggccgcggtcgaggcgcagatcgcggccgatgcacgcgccgcagagggtgaggcgcctctgccgggtgacccggacagcaccgaaacgctcttcgacgggttgcttgattgccagccaaagggctggtacctcagcgctgaatcaggtcggcccgccaacccttacctggccaggcacgcgccggaaccctgcgaacgcgatgaggagttcgggatggcgtacttctgtgtcaaggcggattttcatggcctgccggtcgaaagggtagttgcccatctgggaaccgcgcccaccccgatcggcatcctgatcgacctgccgctggaccaggcgcgcgcgcgcgcgcgcaagtcgttggggtcggattttcccgaggatgagcgcagccagcgtggcgaaaggccgaagttgggtccccagggtgacaacacgcagaagtcgcagttgatgtgcacgcccgattgggcttga

SEQ ID NO: 515400 - DNA, 2760 bp, Stenotrophomonas maltophilia
atggatcagctgaacaacctgatggcgcaggtcgccggtcttggcgacgcccagcgtctgtatcgcctgcagtccgacgcattcacggcatgcaccgtggagcgttggcgtggacgtgacgcgttgggcgaacacgcgtggaccgaagtagacgtgctttccaccgatgcggatgctgccctggaggcactgcctgcaacgcgtgccacattgaccctgcaactggctgacggtgggcaatcccagcgcagcggactggtggccgatgccgcccgggttggaggcgatggtgggctggtccgctaccgtctgcatctggtgtcatggacctggtggctgcagcacgcgcgccacagccgtgtgttccaggagcaggccgttcgcgcgatcgttgacgcggttcttgccgggcatggggatatcgcgcgctggcgctgggccgagggggtcgacgacttcctgggcgaacgcgtgcgcagctactgcgtgcagtaccgcgagagcgatctggatttcctgcagcgcctgctggccgaagaggggctgggctggcggctgtacgccgatgaagaggctccctgcggcaatggcatggagatcttcgccgacagcgtggcgttgccggaggatgcgaccagcgccgggtccggcgtgcgtttccatcgcagtgatgccaccgaagccagtgacagcgtgcaggccatcggcatgtgccggagcctggccagcaccacggtcagcctgcagagtgatgattaccggcaggtacgtgccttggccggccagtcgccgatggacggcggtggcagccagtcggcgcgcgaggatttcgatgccgtgggtgcctacgcgttcagcgatggcgccgccgcttcgcgccaggcgcggctgctggcccaggcacgcgaagcacacagccgacgctggcgcggacagggcactgtgcgcggcctgcgatcgggggcctggctgcggctgcagcaggcgccgggcgcgacaccgccggagctgctgctggttgccgtggaccatgccggcatcaacaacctgccgaccgacctgcggcgcagccttgatgatgcgttcggtgtcgtgccggccgagagcgacgacgcggcgctgtggcagcaggccgatgcggtgggctacagcaaccggttcgaggcggttgaacgcagcacgccgtggcggccactgctgctggatggcaccggtgcccgactgaatccgcgcccgaccgtgccgggctaccagacggccgtggtagtggccggtcagggcggcaccagcaaggatctgcatgcggacagccagggccgtgtgcgcgtgcgcttccatttccagcagggacagggcgagggcgctcacgacagtgcctggttgcgcgtggcacagcgctacgccggccctggcgttggcagccagttcctgccgcggatcggccaggaagtgctggtcggcttcctggatggcgatatcgatcggccgctggtgctgggaacgctgtacaacgggcgtggcgaggccggtgtggcgccgacgcccgctggtgccagtggccagggcgacgtgtcggcctatggccaggccggcgatgcacgccacagcgcgcaggccaacctcagtggtggccaggcgccggcgtggcatgcggccggcgcgggtgaccaggcccatcggcatggcggtgcgctgtggggcgtccgctcgcgcgaatgggatggcggtgaaggcagcaaccatctgttgttcgacgattccaaccagcagctgcgtgtgcagctggccagcagccagcaggcatcgcagctgacgctgggccatctgcggcaccaggctgacaactttgtcggcagcgtgcgtggcaccggtttcgaactgcgcagcgatgcctggggtgcggtacgcgcgacggcgggcgtgtggctcactgcctatggccatcgatcgtccgcgcccgcgggcgaggcggtgcagccctccgcgctgctggcccagctgcagacgctgggcgagcgattcacccaggccgcgcgcaagcacgtgaccagcccgctggcgatgcaggagggggcgaaggccaggcaacgctcagctctggtagctgatcgttctcctgtgccgggcattctccagagcgttcgcacgaccttgaccggggaggcgtttgatccggcaacggaacaggccagcaagcgtgatcccgcacccggtgaaacgcgcgtgccgcacagtggtgatccgctgctgggcgtggccgcgccggatggcgtcgtgcaggtcgccggacaatctttgcagtggtccagcggtgaagggcttctgttgtccagtggtggtcacagtgacatgaccgtgatggggcaagcacgccttcatgccgcgcaggcaatgggcatgctggctacggccaccggtacgggcgcggagggggtggcgctggccgccgtcgcgggcgcgggccagctggacgtgcaggcacaggccgatgcaatccatgtgcaggcccggcaaccgctgcgggccgccagtgcgcagggtgttgtcgaggtcgaggcgggcaaggtcgtgcatgtcgccaccagtggcggcgccagcatcactcttgagggaggcaacattacgttcgtatgccccggtgttatcaccgtgcacgcaggaacgaaatccttcctgggtccggcccagttcaagaccgagctgccgaactggagccagagcgacacatccagctggagactgaccgggttctcggggtga

SEQ ID NO: 515401 - DNA, 993 bp, Stenotrophomonas maltophilia
atgcacgcccaacatgatctccgctttactgaaggccctctacctttcgctgccacctcaaaggcctactccgtccgtgacgtagtgcggcttgacgatgaggccatggcctggtcggaaggcacaggcgcgtcacggatggaatccataatgccggtcgctgcgttggtacttttttgcatggccattggcttgggttacaggggggtgatgctggcgcttgaccctactgagagcatgggaatgcgtgtattcgcatcagcatgcgcgagccttggggtcgcggcgctcgcaggaaccgcttttctctgcgtcaaacagagtattggcagcaagcaaagcgacctgtacttcttccgtaggagcagggcagtcttctgcattgtcgatggcaagcaatgcctgttggactggaacaacgtcagaccctatgcccgcgttgggtacggcccggtccagttcggtgcccccttgatgatggcactcgacctgatggaaatctatccggaggcacctgaggcgtggcgtctacgcttcaccgtcgatggcccccttccagaccgggaggcctgccagcagtcatgggaattgatccggcgctacatggatgaagcgcccgaagcgatgcccgccacattcctggttgatccatcgcactggacgacatccctgctggagcgagggccactctccgccggcggagcgggcaaggagatgattgaacgcatgcgtgccatgaactggaatgtcttcatggtcccgcagtatctggcgagcgttctgctatggctgatcttctggccaggcccttgtcacagatgctctacgctaggttcaagcgtcctatgcccctccccaaggaggttcttgccagcaactcacttcatggcagcagcgcgaactactgcattctgcgttccagtccggaagatgtcgctggtagaaaaaaggccgctctccaggttgcgatggtgtgcggcatctgttgcctga

SEQ ID NO: 515402 - DNA, 981 bp, Stenotrophomonas maltophilia
atgtatccactgcttctgcggagagcggaggcgggtggccctgatttcgttctagacataaatgatgaagtattgatagctgcgcccgatgttgcctcggtttccgctgggaagggtatagcaataattttccttttctcacttatcccgatagatgctgcaattctaaaattaattccgaaaatggccacggcggggcagatggtctcgatcccagtagttgtaatggtcttgatgctgctgctaagtgttgctttcggtattaatgtatttaacgcagttcgagggggtaaccggatcgagccaattttgctggataggcagaaggggacggttacgcttttcagcaaggtgggtgtaagcacatacgactggcgtgttctcaagcccttcattcgcattgttcagattgtccatgctgcgggtggtgcagtcacgtatcagcttatcctcgcggatgttgatgaggatacaggtgttgtccgttcagaattcatcgcggcgaagggggacctcattggcgcaggggttcagcgctacggcttctttaagcaatttatggatgggccgcatgaggggcttcctgatttccaaatcgtgtcgccgcgcatgggctgggcgaagcaactggctgtgagtatttgggcaggcgacatgctccgccagcgctggatgggtgaaaagtcctggacgctttggatggttatttgcaacatgctgtgggtcatgttgattacgccgctgcaaatcacagagttgattggggcttggatatccaaggggccatttggcttgaaggaaacagggccatggccgggcaggttcgatagtatgaggagcaactccctgctgaaagaaaaaggtaagcgctatgccgaggtcacgaacaagagtaggagtattttgttggtgtccatggcgctcggtgtaatcgcttggatagtgcccattgttctttttcttaaagtcgcgttcctatag

SEQ ID NO: 515403 - DNA, 975 bp, Stenotrophomonas maltophilia
atgattcagatgcagtcctctactgcgctgaggcttccgccgagtagtcaccaagcatcaccacgggcctctatgcatggtggtgttctcgatgtctacgagtatgggatctcgtttgtcgatcagatgagtgccatgcgcggctatgccagtagctgtggctgggtcggtacgctcgctactatgttcgggctttacatttcgttcttcgttaccggctttagttgggtgacaattctccagttcgtcctgctcttggtcttcttgctgttcattcagatcgattgggtgggctaccgtgctgagccagttttgtttgatcgccgtggaaggaaagtgcatgtcttcaagtcgctcggactaccttggtggcaatggggctggaatatttttggtcgacctcgatatgaggtgcagtcctttgactgggattgcgttcgtgcagaggtagttacctatacggtattcactgggcaggtgccgcgcagggaatcgagtttggtgctcgcgatttccgatctccctgggggcgcgctggaggttcagcgagtcggggttggaccaagctttggctatggcaacagtaccggtgctgtggagcgatgggagttcgtccgtcgaatgatggagggcgttggtcccgtctggtcggcgagtgaggtgcgatatcaggacttcgcagtaagcttgggagaagcattgactgttgcgcaacctctcattgggccggggtcccgtcagtactggaaaaaggggccggcgatgtggttgccgggggcggttggcctgatcgcgctgccgctgacggcctacattggtttgaatcgctatctcagctatcgattgcagcggaaaccaagatggcctcccaatgtgttgaactcagtgggggcgggtcctttcactgacgccgttttgaggggccgactcagcatagagaggccgacagaagccggcaggaagcgacgcagatag

SEQ ID NO: 515404 - DNA, 1002 bp, Stenotrophomonas maltophilia
gtgctcggccccggtggaaagatgtacccactgctcctctgtcgtgccgaaaatggtggtcctgactttgttcttgacatcaatgaggaggttctggtcgccgcccctgatgtcaacgcaatttctgcaggaaagggtgttgccgtgatcctgctttttgcgattgctttggtcatcggtgtcctgataggttttctgccgaaatttctagagcatgcatccgagctcaagtttccattggttctgatctttctcactgtcatcctcggcgtagcggtgagcgtcaacgtatttagggccgtgcgcagtggtaatcgattggagcctgtagttttcaataggactgatcagacggtcacccgctacagtcaagaaggggctgcttcgtacaggtggcagtcactgaggccattcattcgcatcattcagatcgtgcacactgcgggtggctcggttacgtatcaattgatcctggcggaggtggacgatgagaccggcgtggtccgctcggaattcgtagctggtaaaggcgatctgattggtgctggcgcaaatcgctatggtttctatcagcgtttcatggagggtcccctttcgggcctgcctgcgtttcagctagctgcgcttcgcatggattggttcaagcgcatggcggttagcatctggatgttggaggcgacccgcaagcggctgctgggtgaacgatcttggacgctactcactacgctcttgagcgcgtcttggatcgctctgttggcgccatttcaagtgcccgagctgatcggcgcttggatctccaaggggccatacggtttgaaggagtgtgacccttggcccgggcgctttgaagcgttgaagaacgactcgatactgaaatcgaaggccgaacactatggggaggtgacgcccatggcaaagagaataatcatcatctcgctggtgtttggagcgttggtatgggtgccactcttcttgcttctgtgcgttgcggtgcgcggttga

SEQ ID NO: 515405 - DNA, 1050 bp, Stenotrophomonas maltophilia
atgagccagttcgcaggttggcttgcgcagcgatatcgcaacaatcgtccattgacggagtacgagatcgccgcagacgttcgtagattcgattcgtcaatcatgacgccgctggaccagggcatcatttacctcgacgacgagtatattgagtacgtggatcgccatttcctgtatcgcggctgggctgcaatgtggggcggggtaattctcggtcttgtactcgcattcgttctggcgatcgtatatgcaaccttggaaatgcatgccgaagggaagtccgtaagtcaggagatgacgatcacggttgctgtgctcggcgtactgatgttcggtttcgtcgtctttacttattggatgcttctcggcagagacatcttcagatatcagtactatccggtccgattcgatcggcgtgagatgatgatccacatctttactggcgggaggaacggtatcgtttcggcgccatggtcagatgtccgcttcgtcatcgggagggacaagtccgcggggcctgatgatgcagcaacttatgaccttcggggcctggtcatggatggagacaatgtcgttcacacctttgcagtcggctcggatagcggcagcaaccccggcatcactctcgcacattgggaaatgatcagacgcttcatggaggaagggcgctccgcgcttccattcccgccgttgcagctctacacctcagtggtgccgagcttccgcaatgccttcatcattcatgtctcttctgcgggcgcagggctgatgtggattgcgctgccgctgacgttgccttgggcgctgttccgcttcctagcgatgaagctgtgcaggaagccggtctggccatcgtctgtgctcagacatggagcatcttcgacttccggagtgcccccgctccgcgcacctgctgtctatgggcgcgtgaatcgagaaggagggcgggcggatgcgatggagcgcttctggaaagagtcgattgtggccgcgaaggctcgcaatgacgaggttcggaggcaactccagcaggcgtcaatcaacgcttga

SEQ ID NO: 515406 - DNA, 2388 bp, Stenotrophomonas maltophilia
atggcggactcgcaggtggctcgcttcgttaccattccagaccccaagcgcgcgggaaaagtctggtttggcttctcggaggctccgtggacgaaggagatcattgagcggaaccgcaggtcaagtgagcgcaaaaagcatatgcgctgtattgacgttcaggcgtggctcaagggcaagtcgctggatcacgtaggaagtgcgactgacgcccccctcatggtcagcgagttcaagtttggcaagagggtgaaatccgagcctgaggtgaagatccctatgcttccctcgaatccgccgccagctgcggaacctggaaagccccagattgtggatggtgcagttgagaagctcctcgatgtcgttgaggtgtatgccaatcctggcttttcgttctccttcgcgcctttttcaaggtgcaagcaggatgtgccaggaatggaggcgtggcttcagaagagctccccggccgttcgtccgatgatggtggcgttgaatgatcccgcggggataacgcaggagctttccgcactcgttcggcagaagatccgggacttcgaagaggaagatgatcgcgggtggaagcatgcgacgtcggtggcaatccggggcatccggcaggcaattgaggatcaggctgccgcggaaaagctgagttccgtacgcgcaagcgcatacaccggacgtgctgctattgagctgtacgcggcgggaatcaccaagatgcgtgaggaactaacgcctgaggaagataagaaggcaagagactcagcatgggatcgttatcgtgatgactacagtcagcaagcgcttgatcagttcgacaagaacctagcgccagaaatggagcgctacacatcctcgcacttgaccccgatcgcccagagcttcgcgcgctggtacaagaatgacgacttcaggacgtggctggcatgcaatcacattgacgagctgtcatacaattcaatgagattgacggagattgtcgacaattcgcttgagggggtcgtgggattcgagtgcgtacaggctgcggttctggaggacctcgccggacgttttcaggacatcaagaactgtacggttcgggccttgaccctcaatgacaagattgcggcggaggtgatcgagaagcagtcaaagacattcttgagcaatgcagacaatcccggagcctggtccaatctcttcaaagcgtatggtcatgttctggatcgcggagctaacaagccccgcgaattgcagcaggggctgggcctggtcgcaggcttggtgttcaagacatctgggatgattgtaacggccctgaccaaggcgggttcaacggtcgcaaaggctggcatcaacgtggccatttctgccgcgacgaggaacaatctggttggactgctcggagtcctttcggggaagcgtatccagagggtcgggatacgtgcctcggagcgcgagatggcgcactttctggtggaggcgctcagccaaggacaagctggagtcaacaagcgggagttaagggcccgtgtggatcaacacctccggcaggaactcggtgagcggagtggcgcaagagtcacgacaggtgatcgcaatgcacgcggcagaaaggtctttgagtgggctgtgttctgggacaaggaagcgatggcagctgtccggaatgggcagccgggcgctatggcaaacatgctgatgagcgaggagcaggtgagggcgctggtaaggaatcgtgccgcgcagtataccgccccacatgtcagcttagacgtgcgattgggcgtagttgggctggtcctggacgcttggaacgttgcagattcgtacgggaagttggatgaggaaaaggaggggccggccggacgtcgccatctgagtctgggagccgcgcttgcaggatttgctggaaccagcgttgagttgaccggattagctctggggaagtcgatgtgggggcgcacagcgctatcctccgagattcgatttggtgcgttgcaagtgtccacgcgagcgggaatggtagggttctttggaaagctgctaggggctgtgggggggctgctgggtgcggtgattgatggatggaaagcctatgatgcgtacaaacgaaatgacgttccgatgattgcgttctataccgtaactgcgatatccggggctgtcgtggctatattgatgctggctggcgtgatgacggctggcgtgggattcattgtgcttctggttctagggcttatcagcatgcttggcgagtggcttattaatttgattcgagatgacaagatcgagcgatggcttgatatgacgccgttcggcgttcataaccatggttcatttgactcagtcgatacgcaagatgaggcgtacaatgcaatgcttcccgctggggtttga

SEQ ID NO: 515407 - DNA, 225 bp, Stenotrophomonas maltophilia
atggataagaagccgacacagtcgtgtgaccccgcgaagaaatgtgatgtctgcgatcaggtcggcttgccgattcttccgatcagatacgctatttgccgttccgacgtcaaggaaatgtggcaagggcccaagctgggaggaagttttggaaaggatgtggccagcgttgcccttccgggcagtgaggcacactacacgctacgccttgctcgccaaggctaa

SEQ ID NO: 515408 - DNA, 852 bp, Stenotrophomonas maltophilia
atgcaactcgatcatcggctatttgaagcccatcagtacgcattgattaatccgctccagatcgataggcgaattgccctgttgtggccatgcgaacctatcgtgcccaaggagctccacgggcagcagcatctctttccctatctcctcagactcggggaaatggcgccagatgcgcgcctggcagcgcttgatgaaaccgcgcagtacgcgcacgatcatggccgatctcccttctctgctctcttgaaatgtcctgccgggagtcaccaagtccgaaatcacctagcccgtatgatggtgagaaaagtcgaaggtgagaagatgctgttcagatactacgatcctcgtgtctggaacgcgctgaactggattctctcgccatcgcagttgagcgcgttgcttggccctatcaattcctggactgcccccgtaggccaggggataaagtggcagacgtatgaaagcacaggccctgacacggatggcgtacacctcacgtcagaccagctgtacgcgatcgcgtcattggcatctgtcaacaaggtgatcgacaggttgcgtctggagggccgggatatcgatgacacaacactgtcgaggcgtgtctttgatgaaatgaaaagggctggcgagcgtgggttgacggatccagacgacaaggaatcctatgcattcgcctcgctgtatcaatcacccgaaattcacgatacacatcggtatcaagaggccctacggattgcccgcatagatcctggtgcgttccgtagcgccgtcagtgacccctccgacgaagaggcggatgaaccttcattggagcaggaagaacaaggagcttggcagcatggataa

SEQ ID NO: 515409 - DNA, 2742 bp, Stenotrophomonas maltophilia
atggatctggtaaacaacctgcgggccgcgctggccggcccttcgcacgcacagcgcttcctgcggctgcacacgtcgctggggagcgacgtgctggtggccgaaaccctggatggcgtcgagcagatcgacggcatcggtttccagtggacgatcaccgccctgtcgttggacgccggcctgcagttggcgccgctgatcgggcagggcgcgctgctgcagctgcagcaggccgacggcagcctgcgtccgctgcatggccgtatcaccgccgccgagcggctgggcagcaatggcggcctggcccgctaccggctgcgcctgcagccgtggctggcgttcctctcgcagcgggtggacagctacgtcttccacgacaagaccgtggtcgagatcgtcgaggacctgtttgccgactacggcggactggcgccggcctggcgctggtcgctgggtgacgccagccagtacgcgcggcgcagcctgaccacgcagtaccaggaaagcgacctggccttcgtccagcgcctgctggccgaagagggcatctattactggttcgagcatgccggcgagcccggcagcgcggacttcggcacgcacaccctggtgctggccgaccacagccatgacacggccgaactgggcagcgtgcgcttccaccgccgtgacgagagcgagcgcagcgacagcgtgcagcagtggtcgaccgcgcaccgctggcggccgggcaaggtcgagcgcgcgacttgggattaccgcaccctggaacgccgccaggccagtgccgaggccgggcagggcaacgacctgggcatcgtcgaccgcgacacctgcggcccgtatggctggcaggacaacgcccgcggccagcgtcgcgcgcagcagcacctggatgcgctgcgcgtgcgcgcgcacacgatcgaaggcgccggccagtggcgagcactggcaccgggcgcgcgcttcagcctgtcgcagcatccgcaggtgggcgaagacgcgtcgttcctgtgcctatcggtgcggcaccaggcgcgcaacaacctggatgccgacgtgttcgacgcgctggaacagaccctcggaccggccagcgtcaccgtaccgacgctgcctggcgcactgtccgggctggcctatggcgatgcgcccgacgaggtatccgccacgttctacgacaaccgcttcgtcgccatcccggccgaagtgaactatcgaccccagaccgaggacggccatggtgcacacctgcatccgcggccgaccatcaccggcacgctcagtgccatcgtggtcagcgacggtgacccgctgctgtccgaccgcgaccaccgcatcaaggtgcagttcccgtggcagcgcggcggcaacgccagcagcggcttggctcatcccggtggcgacgacaatgcaccggccaacggtggcgcctggacctgggtgcgggtgatgacgccctgggctggcgacaactggggcggcgtggtgctgccgcgccgtgggcaggaagtgctggtggcgttcctggaaggcgacatcgatcgcccggtagtggtcggcgcggtctacaacggccgtggccagcaggatgcgcagcacaaccagatcaacggcggtggcgccaacgccaccggcaacgccgccgcctggttcgagggcaatgaccacgcggcggtctacaccggcttcaagagccaggcgctggccgacagccagggcggtaccggtgggtatcagcagctgcgcttcgacgacacgcccgggcagggccgagcgcagctgtccaccacccagcacgagaccacgctcaccctgggccacctcaagggaggccaggacaacgtgcgcgaatgcgagcgtggcttcggcgtggaactggccacgcaggcccagggcgcgctgcgcgccggccgcgggctgctgctgaccaccgagcagggcacgcctcagatggcggcgccgcaggccctgagccagttgcaggaaagccagcagctgctgcagcagctggccgaatcggccgccaaccagcaggcgcagctgccgagtgacccgaaagagctgccggtcgataccaccctgaccgagctgcaggaagcgctgcgtgccacccacagcggcagtgccgcgggcggcatcgcgggcggcgacggcgaagcaccgggttggaacgcaccagtgctgctgggcagtggcgtggccggcgtgttgagcctgacccccgccgaccaggtctgggtgagcggcacccacaccaccctggccagcggcgtggcgctgaactggatgacgcagggctcactgacgatggccgtggccggcggcctggtgctgtacaccgccggcgtgcagcccagtggcgaaagcccgaaccaggagcgcggcatcgcgctgcacgcggcacagggcaaggtgagtgcgcgcgcgcacaagaaccaggcgatcgtggcggccaaaacgcaggtgcgcatcgccagcaccgaggcggacgtgcagctgtcggcgccgagcaagcacctgctggcgaccgcggcgggtgcctacatccgcatcgaaggcgacaacatcgagctgggcgcgccggggaaggtggaattcaaggcgagccagcgggaatgggtggggccggcgagtgtggcgggggaggcgaaggtgccggagggctcacacaaggcctgcgaataccgggtgcgggcagccgagaaatcgggtgccggcttggttccactgggagcctga

SEQ ID NO: 515410 - DNA, 624 bp, Stenotrophomonas maltophilia
atgatcaagaaaactctcctgcttttgttttttgttcttggactgggagcctgcgacttcgggcatcctgcagcctcagctaccgacactcccaaaggagcaagcccactggctttccaggatgaccacgtcaagtacaacggccagcgtctggatttcactcagaatctgtccagttggatcaaagtacttggctctaatcatcggaccgcgttccccaatgaccctagcattgtggtctgggacgacctgggcatccgtgtctacaccgatttccccaagagccaacgtgtggtaacagcatcagttaccctacgcggagagccagaggattcgccgtcctatatcccgcccggcgaaggcgttcgaccacgccgggactatgcctactcagtacttgtcaatggtgtcctcgtaagcaagaacactcgcgtaggcgacgtcgcacatctgagtggaggtcggcttcgcattgactgcagccgcggcatcagcatctgtggcgcgagcaggaacgatgacaatttcattcagataaagacttatttcggagtggatgaccgacggtacgacagcacgccctacgtcattgagttcggcccaggccacaacccgcctgaatga

SEQ ID NO: 515411 - DNA, 384 bp, Stenotrophomonas maltophilia
atgggcctcgtccgccagggaagcacctatctcatcatcggactcgtgcagctgctgctcgactggctggtgttcgtggtcgccaccgcgctgggcatgccggtggcgccggccaacgtcgccggacgcctggccgggatgctgctgggcttctggctcaacggccgatatacctttgcccatgcggatggtgcacgcctcggctggcgtcgattcacacgcttcttcggggtgtggctgctgctgaccgcggcaagcacgttgctgatgagcctggtcgaccactccctgggcctgcaatacacctggctggccaagccactggtggaaggcagcctggcgtgcgtatcgttcctgatgatgcgctacgtggtctaccgctga

SEQ ID NO: 515412 - DNA, 3276 bp, Stenotrophomonas maltophilia
atgaagctcaccgcattgcctgtccggtcctttgctgccgcattttcgttgacttcatttctgctgcttccggcgatttccatagccgatgattcagaagaagaggataagccgcctccgaccaatcttgagcgtgtaaatgtggtgcttcagcaaggtggcggaggcgactttggagggctgtccgccctcagttggagcagggatgtcatcagtatccaccctgtatccatcggcggtgacaaagctcaggagaccgagaaacgggacccctgcggtgatgctggcaatcccggcccgcaaagcagcggcaatccggtggttctcttcaccggaaacaagatcgagatcgagaacgacttcgcagtgggcggagagatggggctgcacctgcaacgaacgtacaaccatcattggagcgctacgggcctgttcggcgatcattggctgagcaacttcgactattcgcttgccgtgtccagtacgggtgaggtcatctggttgcagcgcccagatggcaggcgcctcaaactcgtaaaggatcccgcgtcaggccgctggcgcgacaatcgacagcaaccactggcaacggtcgcgcgcgaggcggacggcagcttcacgttctataacgaagagcgcggtgtcgagcgctacaactcacaaggcttcatcaccgagcgccggaacgaacagggggtagcgtggcacttcagctacaccaacaactacctgcagaaggtgacacattcttctggtcgcagcgtccagttccgttggagcaatggtcagttgacccaggtcattgacccggccggcaccacctacagctacagctatacccccaacgtgttcgcggggcagcgcgccagattggcgagtgcaacgcttcccggcacgcccgccaccacgatcagctatcactacgaggacagccgataccccggggggctcaccggaaagtccttcaacggcgttcgctattccacctttgcctacgatgaccagcgtcgtgccatcctcagtgagcatgcgggcggcatcgagcgctatcggttcagctacagcgtgcaatcgagcgagcaagtggttcccgcccctgcccctgtgaaaccaggcatggaaatcggaaatccggaaacgggttggtgtgagtacgacggcaggaacggctatgtctgctatgagccgcatgttccgcaggtcagccgccaggccgacaacagccaccgagccatggcggcatcgtcgcaggcaggcaagccgcgcgcgatcaagatcagcgttaccgagaccaaccctctcggacggcgaaccacgtacgtctatgatgatgggaagctaaagtcagtctcgggagagcaatcatcgcattgcgccgcaggctacaaagagctgacgtacgacagcaatggccttcccgacatcctgtccgatttccaaggcacgctcaccgaccatgaccatgatgctcagggtcgattggtaagaagagtcgaggcggctggtactccgatttccagaaccatcgagacgcaatggaatccccagcatcgcgtcacgcgggaaaccctgctgggaagctggcaggcagactacacctacgatccccggggcaatatcgcctcgaccgccctgcgaaacctgagccaggttggctcaccgggccaggtactgaccaccaccctccactacacctaccacagcaacggactcaaggcgtcgatcaaggtcgatggcccactggcgcaggatgacgtcacgcggcgattcaacgagcagggggacctggtctctgtcaccaatgggctgggtcacgccacgacctacagtgcatacaacgcactggggctgcctggcaggatcgaagatcccaatggcgccgtggttgaattcacctacgacgcgcgtgggcgcttgctgacccaacggcgccggattggatcggcctgggcaacgcaatcgagaacctatgacggtgcaggcaacatcgccacggaaaccagtcgggaaggcgtgacgaccgtctacgcctacgatgccggtcagcgcgtgacccggaccgtgcgtccagtcggagatggcacctatgcgtggaccagcttcggctacgacgccgcgtcgaacctgacgcgctcggaggtccgcaaccgtgacgttcctcccgatacagccgttgtcggtgacatggatgtcgtgcacgacgggcagtggaactggaacatcgtcgggtgggcctgcacgacgggctcttcgcgcccactcgaagtccgcgcatttgccgaccctgggcagcagttggcaagcaccacggcgaatctgcccagcgaagcggcagtcgggcaagcgtgccgatccggaggcaccgcgcacaggtttagtatccccatcacgctgcagcagcgccagcaactgggcggaaggccggtcagcgtgtatggaatctcgcccctgggcagttcggcggacgcccgcctttctggatccggcgcaaagacgattccctcggcgaacatccacggcgacattggtggagtcacccacgacgagaactggaacttcttcgtggagggctgggcctgctccatcggcgtcgatggctccattgatgttcatgtctacgctggcggccccgccggcggcggcgggagcttcgttgcggcaggccatgctggactggcaaccgacacggccgtggccaatgcctgccaagcccggggcagcgcgtatcgtttccgggttccactggatgagaatgcgcggcgagcctttggtgaccgctccctccatgtgcacggcatatccccctttggcggccccaacctcacgattggacgctcgggtagctttgcgatgccgacctactccaagacggcagccatgggatggggattggagcgggacaccatcctccatggcgaatcgaccaccctcaaggcttggctgaagaacacaggcaacgtcacgtggggaacggacaactatctggcctggaccacgggtggtcccttcaaccaagcaatgcatcttccgcgtcccattcgtccgggggaagaggtggagctgagtacgaccgtggcgcctttgaaccacaacagcttccccatcaccatcagctacgtggcggcaatggcaagcaacggcgctacatgggggcctcaagggcatacggtcctgaccgttctgcatcaggaaccgccaggatgcgactttggccaggactgcgaaccggtcatcagttcgctatggaatgctgaactcaaggatgggaggaactga

SEQ ID NO: 515413 - DNA, 2223 bp, Stenotrophomonas maltophilia
atggttgcgctcactctcgcactgatgggccttaactccgtcgctctggtcgttgaatacgattatgacgaactggggcgccgaatcgcagaacgtggcagccaaggccagaacatccgctatgaatacgacctggaaggtcgattgctgaaagtcaccgactcgcagaaccgcgtgacacgcatggagtacgacccgctgggtaggatgacccggaagaccgatgcggccggtggcgtcacccagctcacgtacaacgcgctggatcaggtagtcagcgtcaaagatccacgcaaccttcagacttcctatcagtacgacggcctggggcaactctggagccaaagcagcccggataccggcttgaccgaccaccagtacgatgcctctggccagcgcattgcgaccgtgcgcaacgatggcagcagcgtgggctatggctacgacggcgcgggtcgtctggtgacaatggcatcagaaggaaggcagcacaccttcacctatgacaactgcaccagtggtaaggggcgactctgcggcgcgacggcaccggatgcggaaagccgcttcacctatacccgcgaggggcaagccgccagccgcaaggatcgcagtacgctaggtggaaccgtgaccgagcaaaccacgtcctacggctacgacggattgggccgagtctcgacgttgacctatccggacgggacgacggcccactacacctacaccccactaggtcaacccaagtcgctgcaattgaactctggtgtgacgacactttccgtcatcaccaacacgacctacggaatcttgggtacacgaaagagcatggcgtacggcaatgggctgacgcgcacctacgccgtggatgagagtggacgtttactggcgatggcggtcagaagacaggacaccagtctgatcagccgcacgaactacagctacagccctgacaatgaaatcacccggatcggaaacgatgtggatgccagcctcacacaggtgatcggctacgacgcgttgagccgcttgacgcagctccagcgctttggcgccgcccatacgctgcgttacgacgccggcggcaactacgatcgctaccagaccggtaaccaggtcaccagctacaccattgatccccagagcaatcgcaccctgggctacaccagcccggatggcacccgcagctaccagtacgacggcctcggcaaccgcatcagcgagacagtgggaaccgccacgtcgacctggacctacgggccgttcaaccgcatggagcaaagcgtggtcggcggcctgacaactcagtacctgctcaacgcctttggccaacgggttggcaagcgaaacagccagcaaaccagtcgctacttctaccaggggcagaaccagttgcttgccgagcagacgggtaccacgtggacgaactacttgtggttcgacggggagatggtgggcattgcccgtaacggccagatccagcatgtgcacaccgatcatctcggccgaccggagatcgcgaccaacgcggctcagcagaccgtctggaaagcgtacaactatgcatatgggcgcagcgtgttgcaggacgacatcggtgggctgaatatcggattccccggccaatattacgatgcggaaagcgggctctggtacaacgggctccgcgactacgatgcgacgattgggcggtatgtgcagagtgatccgattgggttggcgggggggctaaacacctatgcctacgtcggtggcaatccaatatcgcgaattgatccgctggggttgaaggcgacctgcaaatgcacggattcgggtgtggaggtcaacataaactataaattcaggggcgcgggcgcttccgacacagcgaagatcagtgcgttccgtaacgctattgagaatctgtggtctacgtcaggcttcaaagtgacgacgagtattggtggatggggggcatccaaggtcaatcttattcctggaaagggtcgagccaacagggacaattggtacatggatgctgacccgtgggttggtgctcatgaagcaggccatcatatgaagctgggtgatcaatacacggagtcaacacctgggcgcaccattccaaatcctggctgggaggggacaattatggctgaacatctaggcgcggtatctcctgcggatcgacaaaacgttctcgatgcgctcggttgtaattgtgcatgcggtggtgagaaatga

SEQ ID NO: 515414 - DNA, 1053 bp, Stenotrophomonas maltophilia
atgccaagaacgcgcagttaccagtacgacggcctcggcaaccgcatcagcgagacagtgggaaccgccacgtcgacatggacctacgggccgttcaatcgcatggaacaaagcgtggtcggcggactgacgacgcagtacctgctcaacgcctttggccaacgggttggcaagcgaaacagccagcagaccagtcgctacttctaccaggggcagaaccagttgcttgccgagcagacgggtaccacgtggacgaactacttgtggttcggcggggagatggtgggcattgcccgtaacggccagatccagcatgtgcacaccgatcatctcggccgaccggagatcgcgactaatgcgaatcagcagaccgtctggaaagcgtacaactatgcgtatgggcgcagcgtattgcaggacgacatcggtgggctgaacatcggattcccgggtcagtactacgatgcggaaagcgggctctggtataacgggttccgcgactatgatgcgacgattgggcggtatgtgcagagtgatccgattggattggtggggggactgaatacctatgcatatgtgggtggaaaccccgtttccttcactgatccttatgggctctgtgcaatcaactaccttgaccttgccattggaattgccgatttcaacatcggaagaattgaactcgccggtggtgctgctaccacaatcattggcgctggattgggatcggaagaagcgatggctgcaggcgcgttggccggaggtcttggcctggcaaccatgtatgatggcgtaaccggcatctggggtgcttttgacggaaagaagcgtgaccctgcgttacaagaggttggtggagctcttttgggacaccacggagctaaggcgggaagaatcgtctctggctggacgaccattcgcggtggattcaaaggcctgaggaacgtgatgcgaggtaaagcgactcttcaaggagcctatgatgccgcaaaagccggaaaagagatggtagatagccagtcgtccggcaccgatccgtgcgattgcaagtga

SEQ ID NO: 515415 - DNA, 1416 bp, Stenotrophomonas maltophilia
atggcaagctttggatacggtggcatcggctcgggcctgaacatttcagacatcgtcagccaactggtggcggccgaccgcaagcccgccgacaacgcactcaacctgcagcagtccaaggccaagctgcagttgtcttcgatcggtacgatcactgccgcattcgacaagctgaagacctcgctgaatgcactgaaggccaccacggctttcgacacgcgcatcgtcaatgccagcaaaggtggcgacaagggcaccgacgagatcctgacggcctcggtggctctgtacgacgtaggcaccagcaaggcggccgctgccaatggcacccatgcagtcgaagtcaaatcgctggcgaccgcgcacaagctgatcgcagatacttcaatcgccaagacagacaagttctctgccggaaccctgacgctgaccgttggtgtcggcgacaaagccaaggccatgaagatcgaggtcgaggatggcgatacgttgaccacgatccgcaacaagatcgacgcagccggccgcaaggaaggcgtgcaggccacattgatcagctcgggcgacaaccagtatctgtcgattggacaggagaagacgggtgccgccaacgcgatcaaactggaatatggcggaagcgacaccaaacttggcggcctggtcaacagcctgaaacagaacacaccggccgccgatgccgagctgaccatcgacggcgtcaaggtcgtcagcgacagcaataccgtgaccgatgccgttccgggtttgaccctgaacctcaagatggaaggcaagagtacggtcaccatcagcaccgacaccacggccgcaaccaaggtcatgcaggacttcgtcaagtcctacaacgacgctctcgcagcgatcaataccgagacgaagtacgacctgaagaccaaggaagcttcgacattgaccggtgatgcgcagatgcgcggcgccaccagccagctccggtctgtgatgtccggcgtgctcaaggagctggccggtgacaagctggactccaaagcgatcggcctggatacccgcggctatcccaatgccgatggcaccctggtcctggacgcaaccaagttcgcagccgccctttccagccaacctgaaaagatgcgtcaggcaattaccggcgacaagggcggcgccggcaggctctatacactggtggatggctacgtcagcaccactgtcggcaaggaaggcgccttcgtcgcccgtaccaagggcctgaacaccacgctggacaacatcgacaagcgtcgcaaggacctggacgtccgcatgaaaggtgtcgaggaacgctacaagaagcagttcctggcgctggacagcctgatgggcaaactgcagcagagcaacaccgcattgcagcagcagctggcacagctgaaccgctaa

SEQ ID NO: 515416 - DNA, 135 bp, Stenotrophomonas maltophilia
atgccgcgccggttcgggagtgttcccgggccgggcatggcccgcaccttcgtggcgcacggtagttccggttggatgctgccaccggccggggccggtggcagcatccgcttctacgtctacgtcgatgcgtag

SEQ ID NO: 515417 - DNA, 156 bp, Stenotrophomonas maltophilia
atgacgagcaacaatcaaatcttcatttcccggctgcagacgctccagcagacccttgtcaccaacacctttcaggttggtggcgtgaagatgggaccgcaggacgccacgatcttcatcgtgggcctgacagaggttccgctggggttcggttga

SEQ ID NO: 515418 - DNA, 870 bp, Stenotrophomonas maltophilia
atgaagaccttcacataccgatacacccagaggccaaagtaccttcagggctgcttctattggaaggggcggggttatcactactcgcacgctgcgccgctcgcaatgctgtccgctggtgaacctccaaatgatgacccatgggcagcattggcatgggtattggagcgcgcaaagaacgcagattttggccatgtttccaagctgagacgcttgatattggacgagcgcaatgccccaaccctggtgtcggcctgcttggggttgacagctgatacggggctggatggcgatctcgagtttcttgcggaactgatgattgatgggccggaccatcttcgcattgaagcaagtcttgcagctcaatggtccggtgtcatgtggttggttcccttcatgcttgaggcgtggcgcgcgctgtaccgtagagctgatcgggaatcgatcgaggcaaacattgtcaatcttctcgacccaattgatgctactgagcctcaattctttgccagtggctcaagtgaggacgagtatgccaatgctgtgggtgcgagactgcaccagttgagagtcatctgtggcaacgacaaggcatcgatatcgggaggcgcctctgtcgatatgaacctgcaaatagcgctcatgaagaagtcactggagccgagggacgccaatgactgggtggattggggtaatttcctgatctggcgacgtaaattcgaggtctattctggagtcgattgctccgctttctacagggagggcatatttcaacccacggcagcggcagtcataatgaaccggtatttggcagcgcctgtggaatttgcggtcggtcagcgatatttcttcggccacttggtgccgcagtga

SEQ ID NO: 515419 - DNA, 264 bp, Stenotrophomonas maltophilia
atgagcagtcctgccagcaagcgcacgggcaagcgcatcggcatcggcgcgcgtccgcccgcgaatccgcacgccgaggcgtggattcgccagggcagtgccgatgacctccagaaaggcgacctctacacggcccgcctgaccctcgacatcacgcccgccatgcgggcgcgcatcaaggtatcggccttcacgcaaggcgtgacggtggccgatctgttgcgcgcgctgctggagcgggaattcccggagaagtcctcatga

SEQ ID NO: 515420 - DNA, 873 bp, Stenotrophomonas maltophilia
atggaacttcgacatcttcgctgctttctcatcgttgcggaggagctccatttcgctcgcgccgctgaacgactacatatcgaccaatctccactttcacgcactatcaaagaattggaagaggaacttggtgctcgtttattccttcgtactacccgaagcactcaaataacccgtgccggacgacagcttctagagcatgtcccgcgcatttttaccgcgttagaacaggcccgcgatagcgttaaatcagctgccaacggatttttcggccagttgcggattgccttgtctgatggagtgacgccatcacggctaccagctttgctcgcgcgatgtcgtgaagaagacccagaaattgaaatacggttgttcgaggtgccgctcggacaacagatcaagggtttacacgaagacttgtatgacgcaggcttttcaatggcagaggatggaggcgatggcatcttggtcacacctgtttgggaagatgaactgatggtggcagtgcctgctcgccattcgctacttgcccataagcgtgttccgcttcaggaagttctacgtcatccgttggtactcggcgaccccgcagtgtgcgaaggccatgctcggcaagtcgatcgctttctccgcaagctcaaccaggagccgttgatagtccagcgcgtagcgacctttgacgtgatgatgactttggtgtccgccggtctggctttgggcctcgcaggctcggcgcatatagcatcctgccgagaatcaggcatcgtgggccgtcctttggcgggcaagccgccaatgctgagtacctatctgctgcgccgcgacgcggaaccttccgagatgctggcccggttcatcgaacgagtgacctga

SEQ ID NO: 515421 - DNA, 273 bp, Stenotrophomonas maltophilia
atgaacgccccggatacctttgcggccggtttcgaggtgccgctgcatcgctcgctgaccgagccgatcctcatgggcggcgcaccgcgcaccgtggcgatcgccaacggcacgctggccgccgccgtcgggctgggcctgcaactgtggattccgggcgtggtgctctggatcgtcggccattcgctggcagtctggggggcgcgcgtcgatccgcagttcatggccgtgttcgcccggcacatcaagcaccgcccgctgctggacgtgtga

SEQ ID NO: 515422 - DNA, 747 bp, Stenotrophomonas maltophilia
atgatgcataaggaaatgtctttgaagatggccagtaaactgctcaaggcgatccgcgaaatccccacgcggccgaaccgtccctggaacgcccgtgaggccatggaattgtttgtccagcatgccttggtgggtttaattcttgcgggtaagaagtcggcgctcaatgagctggatgcttccttctacggccccgaacttggttttcggacgttgaaggagcacagccctcccgtggagcccttggctcatgccctcagggcctacatggaactggtgatcgagtgccgaccattcgaagacgtgttggtatgggtgcatgccgagttcttggccaccaagcgcggagaaggacttggtcagttctttacgccgccagacatggtggaattgcaagtcgctctttctcggcatgtcaaacctcattcggcaagtcctcgccgcatcaggatccacgagccggcatgcggtgccggtgggttgctgttgggtcagattcgttcgctaatgaaagaacttgccaccgacacgatcgaggtgagtgccattgatttggatccgttctgcgtggcgatgaccgctttgcagctgcaggcagcccaggtgctgcactactccccgctcaagcatgtcgatctctgggtgggaaatgccctggctggcccacggaagctgggttacgccaccaaccggtggaatggaacgatggaggagttgttgcgccggaagaggatgatggctgtttag

SEQ ID NO: 515423 - DNA, 1623 bp, Stenotrophomonas maltophilia
atgaacgtcaaggcagcgaacagtaggaggttcggaggtttgttgaggactgctggtatcagcgttgaagaactacgcgccattgtggcggcagctgaactgtctgattttgaagaaattcaagaattgtttgggagcgctgtttgcagggacgaattcgagaaagtaacggtgttcttggatgcaggtgtgaagcccggcagttccgtcatgatcgaagccgctaggtccggaccggcagatacgctcgaacgcctcttgtcggcgggtggggatccaaatgcacgtgagtggcacctttcgccgctttccgagtccgttagatggggggacgcgaagaaggtgtctctgctcctggacgctggtgcaacccccaccgctgcagcgatgacccaggcggcaactcaccgagatccaaacattctcgttcagctgttggcggcaggtggggatcccaatggaggcgagttgagcactagacctctccatgttgcagcatttcgcaactttacggagtcagtgagtattcttctcgaagccggtgctgatccgaacaaggaaagcaacggaacattccccctccactgggcttgtctggcgggtgggacggaaacagtagcgctgttgctggaatccggcgctgatccccatgcgaaatgtgtcgctgaccattcccctcgcaatggggattcacaattatacgagactgggcatgcccccatcgatctcatccgctcctatgtaacggatgagttggacgtcttgctgaaagccggtgtcgatccaaatcataagtcggaagtgtcgggtctcagtctcctgcatcgcgctgccatgggcggcagtggcgacttcattgcaaagttgttggaggcaggtgccgatccaaaccatcccagccgccacggtgatatgccattgcacggtgccgcggagaagggcaggacggatgtgttgtcaacgttgatggcagctggagctgatccaaatgggcggggcaacaatggaaactcgcctctgcaatacgccgcgcgggcggggtattctgatgtggttgaagcgttgctggccgcgggcgctgatcccaatcatgccaatgaggaagggcaaaccccgctgcattcggtgtgttcatacagggtaaggaattcatacggggtaaggaatatcgacacgtcgaaattgggtgaaacggcaaggttgcttttggaggcggggtcggatcccaacgcgcgcgacatctggggcagaactcctctgtttaacgtagcctcagctgctgatgagcatgggaggttcatcaagtcgagtattgaattggtggaaaacctcgttgaaaagggcgctgacatcttggccaagaataacgacgggaagaccgcctcgttctatgctttccatctagaagtccaggcacacctggtaaccgccgaggcccaagctcgccaacaacggctcgaagtcaaggttcaagaggttggcgaattggcatcaccgaagcggcaatcgagcgatggcccgtgcttgattgtggggggtgacttgttcaacccgcgggaggtggccaaagcaccagcccccacggccgtccaagaagctcccctccagcggatgcgtttgtga

SEQ ID NO: 515424 - DNA, 216 bp, Stenotrophomonas maltophilia
atggaccatcccgatgccctccacgaatccgccctcgatcggcaggacgccctggcggcctccccccgtttcaccgtgcaccgaacccacgagggcatgcgcgtgcagctccaggagggcgacacagaccccggcaccggtttgaccatcgaccgggccttggcgttgctggagaacctattggagcagggacgcgccgtcaccattcacgattga

SEQ ID NO: 515425 - DNA, 483 bp, Stenotrophomonas maltophilia
atgaaagctctgaaactcttcgcaaccgtcgcaacttgcacttggcttcttgcggcgtgcgatgccaaccgcgaattgcgcaacacggttcaacaactcgccaccgaatctcaggagaaccgagcgagctgtgacgaagcacgcaagctggagaacaacgcccgtgaccgccggtggtccattcggacagagctttcgggcctcagggctgacaaggattgggacgcgatcgttcagactggagatgcggggaccagcgagctgcttatccagagcaaaagggcaatggacaatcccgcctacaagtccgagagggatcgtgacatcgaacgcctggagcgggagattaagttgtatgacgctgatgagcctgatcttcagaaaaaaaggcaaattgcctgcgatgccatgctgaagagcggtgaagcctatcgttctgccaagaaggcgctcgaagaggcggatgcgaagtcgcagaactga

SEQ ID NO: 515426 - DNA, 264 bp, Stenotrophomonas maltophilia
atgaaaatgcatcacctcatcagcgacggaaaccaagcggtcaccgtcacgcaatcggcattgagtggcggtggttacgcgcacccggtgaagctctccgccattcgcttcgatgtgaaggaggctgaaacggtgcttggcgagatcatcaggtctggccaccgtcacgagaagaagtttgggcaggttcggcgcccgcggagggaaacacagagggagacgctggctgtcgtagaagctaaccatcagcgcgtgcgcctgtaa

SEQ ID NO: 515427 - DNA, 1254 bp, Stenotrophomonas maltophilia
atgtcagaacccgccaccacccagcctggctccaccggtgacagagttgatttcatcacgctggtgaagtcctcgctcagattcgtcagcgaacagaaatggctcttcgctgccgcaggcgtcatcggcgtggtcgtccacttctggagaattggctatctgcctcaaatcacggtagccgatgtgggcctggtcgcgtccgcaaccgccttcttctcgttcgttgcactggtgttttttctactcgtggtcatggggcctgccctatgctttgttgcatggtccacggcggaattcatccctaaagcaccctccagtcgcctgagagcacgacgccgcagatcgccccgctccccatgcactcactgccaacggccattcgcgaagtcacacaccccgaacttcgtcgcaaaggccatgctgccgactctgctgatcgcctatgggggattcttagtcgcggcagcagtctggtgggtgctttggagggtcgatctgccgcagaactggagcaccattgccgctggccttacgttgcttgcctcaggcattggcctctgcttcggcatgtcaaatagcgcaccagcaaccttcagcgctcgaaaggagcgccgccgcaatcgctgggcgaagtacttctggctgtgcgtttcgctgtatgggctcgtgattccaatcatcctgatggttggatgggcgctcctgcgcggcgtcgagagcaaccaaagcaccgcgaatctcgtcttgctgctggcgcttccggcactccatgtcatgacctatgcgctacagagcagcggagttgtcgtgcgcgctacagcgctggttgccatgggcttctatatcgttttcttcactggcgccgcgttcgccatcagcgacttggcggctgcaaagttccggctcggcatgctgaagggccaggatgttctggtgacgcctctaggctgcgaccttgcgcgcctttccggcgttgcaaagaagtgtggatctgtggcaggtgaatcggggaatcttctgtgcctgaagaatgtcaagatcctcactcggttaggtaaccacgtgctgatcaccgatttggagtggaggcctcaaaagccctctccgtccgtggcgattcccactgcagagatccgaggatggtttagcacgcctcgcgacgagaaggatgcggacttcaagcgggagccacctacgatacagtgcgcactctccagcgaagcagcatctgttcagggcaccaagcccaagtag

SEQ ID NO: 515428 - DNA, 3678 bp, Stenotrophomonas maltophilia
atgggcaaggatgcaatcgacaattcgtttctggctggaatgtttaatctattgagtcagcgccgtgaacgccgtgtagtgacggttggaagatggcttcgctcaatttttcgccgtcctagggagcttccgcctccgacgttcgagccgctgacgccggttgatgttgaagactctaagctcgcagtttatgagtctgagttaataagcgcgctacgctgtcctgaaattcataatatcgctatcaccggcggatatggtgccggtaaaagtagtttaattaaaagttttgtaaaaaggcatccggaatacagctgcgccttcatatcactggctgcatttgatgggacggatgataagtcggggggtgaatccactcaagacgcaatagagagcacaattgttcagcaattgctctactctgccccctctcgcaaggtccccgggactcggcttaggcgaatatcctacgtgacacgaggccggctaatgttcgccacatttgctgtcttcgttgcgcttatttcttacttgcgcttaatcaatgattggccatcagtcattcctgatttatcttattctttaggttggattccagaagtattggcgaaaactggcctggctctcagccttgttttggcgatctattggataattaggattatatctaatctaagaattcaggagattagctttacaggggttaagtgggatggcggtgccgcgccctctgttctgcacaagcatgttgatgaaataattcacatgtttgagatgattccaattgatattgtattcgttgaggatcttgatcggttcaatgacaaatccccattcgtcaggttaagggagattaatttcattgtaaattcatcggccggcatttcctatcctgttaggtttgtatatgcgttgaatgatgaaatatttggaagggaggataaggcaaaattcttcgatgtaataatccctgtggttcctgttatcaattctgataacgcgagggatatgtttatgtcccttctggagcaacgagtcaagggggtttcaacggatgcacgagtagttcagctggtggagaccgttgctgattacgttggcgatcttcgtcagataaagaacatggtcaatgagtttgacctatacagggccgttctcaagggtggtcatgttggtgatatcgccaaagagttggcgatggtggcggttcgctgcatctatccccaggcatatgcagatcttttaagggggagtggaagcattcgtaatatattttcgatgtttccagattggcgaaatcagcagctggatcagttgctcgccgagcaagatgaacttcttcgtctggaagcgaagagggaggcagatgccctcgatggggcagttgaaatcatgacgttgatctggtcgagaatagaggaccaggctggcgggaattcaataacagaaattaatcttaatgatcttggacgtctggagaaatcggagttcatcagctctcacgataaaattgatcaaatcgccacaaaggggagtgttcaactccttcgaaatggcaatttcgccggatacgccaacgttcgcgatattctcacgagtggagagcccagcctgagttctcgactggccctcaagcttcgtcctgttgaacctgatagacgggcaatcgaaagagtgtcagctcgtatcgaagagctgagagccatgaccttagtagactcactgcaggatgctggcttcttggttcaggtggctgattattgtaaagttcacgaacttcagctagttccttatctgttgcgaaaaggatatctgggggccgattattcggagtacattggatacttctatccaggggtgatgagcagttccgacaaggttgcgcttcttaatataagaaccggcagcttactagatgtagatttccagttcacctcgccgtcattggtgctaagtaagttgtcgacagcagaactagggggaggcgttggcatcattacctcgcttgttatgcaagtcattgatgattctggctgcgaagagtcgctaagggctcggcgcattcacgccattttctctgaatttgaatccaatttcgaaagaattgatcagctatataaatcagcatttcaaatggggcgattgcgcgatctgatttttgcgacaattccagtttatcctatggtgcccctggagattgctgagcgtggattgttttgttctcgcgcggaattaagggctttgattgtcgcgaacattgccgctgaagttgacccaagtgctgcaggcgagttcatgcccaaattggtcagtatgttatctgagcttccagagcttgaagtcgttctttctgttgactcaaaggtgtccctggaaaaatggttcaatgtcaaaggcgcgcggcttcgagagattgccagtgacacggataaggacgctctaaaaacgggcttgaagcgaaatgctattcgtgttaatcagcataatgtgatagttgcggctcgctctctgtgtggtgttgagattgaagacgcaaaattttctaacttgagaaatggcaatctaatcgatgttattgattttgtaaaatcagattggattggctacgttgagtcggtctatggggcgcgcgctcctgttgctgaggatgatagtacgttaatcgagatgctggatttttcggccgagtacgacggaggaagggagcttgtattaagggtaattaagtcaagagtatcaaatattgatttaattgatccctctctgtgggaggctgtttttgagagccaggatgttattccatccatcgataattttgttctattggcgatggaagagaagctagcccatgatgtgagactacgcctggcgggatctctgctcgaggaggtgatatctctggaggcacttccacctcgcttgaacgttcctgaagtgacagaggcactgtgccgacttctaacggatctttcggaatctcacggtgccaaagctgcgagatctatcgttgatctcaatattggaagtctgatgctcgaaatgggtgacgcaagtcaggatcttgttgacctcgtagttaaagcaggccttcccttcactgaagataatttcagggaagttgctgttttgtctgagaatagtgcggcatttatggctatctccaacttcgaggcttttttggattattcaagccactatgaggtcgggccgtctgtcctttcgcaactgatgcaatcctctttgctctctgtggcagagcgactgaggcttctggcattaattagtccggaggaaattgaaggcggcgaaggacttgctaacgcttgtatagagttcatttttaacgaaggtgtcgacttcagtgtggccggtatatatgagaaggagctaatgtttgctctccttgctcattgtgcctccgaggaagatctccttaggctgctcgcgatgctattagtcgtggcgccttggagagatgttgcaacccacttctctaggctccaggaatctggcttcgcagccattttgggggcgccacatcgtattgaggttgcagattccactttgaatgtcaaactgctggaggttctgcgtagaagaggaatagtgggtattccaaatcataaaaacggacgcgtttgggccagggttcggacgtcgaggattaagctcgattaa

SEQ ID NO: 515429 - DNA, 5460 bp, Stenotrophomonas maltophilia
atgaatcacatctatcgtcgtatctggagtcatgcaaagcagtgctgggtggttggcagtgaactgagtgcgtcgcgcggcaagcggtcgtcaaccaaaattcaagtgcttgctttgctgattatcacgtcgacggcgttcgctggatcggcgagtgagagcatggaggctgcgcctgagagtgagaggtcgatcgaggcagaagtggagcgctttctggctcattctccgatggtgtcttcgctctttgcagcgcagccgcgcgcagtgcggacccaggtggcgctggtcaatgacgcctactacaaggattcgacactgaatggcgacatgcagatgatcctggggtcgcgttccagcatcaatggctggggatctgtggtctacgggacagcatcctccctgtctggaagagggagcgttctggtaggcaatgaagcttccgcgaagggcgatagcaatgtagtcatgggctacaaggcggatgccagggcggggtactcggtagcgcttggcgccaactccgtagctcagagcatcgggacaaccgcggtggggaacaatgccagggcatatagccagaattcaattgctctgggtagcggagcgaacactgtcactggcagtgcaggggtttcccatattgcaattggcggcaacgcattcgcaggcaccggcggctactcgggcgcgattgccttgggcggaaactcgcgtgcagagtacagcggtatcgctctcggtcatcatgcgaaggcgctggctaatggatcggccgccattggcgccagctctgaagcgaccgaggcgaactcggtctcggtcggaaactcgtcgaccaagcgaagaatcgtcaacgtggccgatgcgcgcttgaatgcaacaagcacggacgccgtcaccggcaagcagctgtttgcaacccaagcccttgcgcaatcggtcaacaatcgggtggatgcgacggcgctggcgctcggcaacggggccgtcgctgagtcggatacttcccgtggcgcaagtactgcgctgggtaacaatgccaagggctataacggagcgagcgttgcgctcggtgacgatgcgcgcgcaggcgtgaatgccgctggaaacaaggccaatggcagctcaggcggtgtctcggtcggatccggtacccggagtgcgcatggtgccgtggccgtgggtcacaaggccattgcgggaggcaatttctccgttgcgatcggctccgatgccgtcgccaatgaggaattgagtaccgccttcggaaaaaccagcatcgcgggtgcccagcagacgacggccctggggcgagggacacaggcaacggcgaagttcgccaccgcagtgggtaatcttgccagggcaacgggcatcaattcgctggcacttggaaacagtgcacatgcagggcatgaggacgctgttgcgattggcgccggttcggtgactgcctcggccagcactgtttcggtgggcagcgccagcaggaagcggaagatccaatacgtcgccgatggtgtggtgggtgccggcagcaccgatgccatcactggcaaccagttgttccagaccaatacccggctcacggccgtggagaagatcgcaggcgatgtgacgggtgagctggccgtagtgaagtcaatcgcacaggccgccacgaaccgcatcgatgcgacgaccttggctttgggtagaggtgcaaccgcagagaatggcagctacggcatcagcaccgcactcggcaacaacgcaaaagcgtacaacggccgcagcgtagcgctgggcgacgacgcgcgggctggtgtggatgcggacggcaacaaggtggccaaccagaacgcaggcgtctcggtcggcgccggaacccgtagcgccaacggcgccgttgcaaccggcttccgtgcaaacgcaagcggcaacttctctattgccgtaggcggcgacgccaaggccgaggcagagcacgctacggcggttggctatctgagcaaggcaggcgccagccaggccaccgcactggggcgtggcagtgaggcgacggcgcagttcgccagcgcactgggcaatctggccaaggctacgaacaccagctccgtggcgctgggtgaccgcgctcaggcctcacatgagaatgccgttgcgctgggtgcaggtgcagtgaccgcctcggccaattcggtatcggtgggcagcgccagcaggaagcggaagatccagtacatcgccgatggtgtggtgggcgccggcagcaccgatgccatcaccggcaaccagcttcatgccaccaaccaggccgtgaccaaggcccagacagcagctgacggcgcgacgaccaccgccaatgccgcaaaggtggagtcgggcaaggcactggccgagacggtggtgctgggtggcctggtcagccagaccgctgccaatggcagtgttcgtctgggtcagaagaacagtggcacgcagctggatgtgcgcaacagcgccaatgcaaatcgcgggatcgtgggcgtcgccgacggcgccatcagcgcgaccagcaacgaggccgtgaccggcaagcagctccatgaaaccaacgcgaacgtgaattcggcacagacgacagccagcgcagcgaaggtcagcgcggactcggcgttggctgacactgcagtgttgaagggtcttgtcggtcaagtcgctgtcaacggcaacgttcgtgttggcgagaagaacagcggcaccgtgctcgatgtacgcaacagcgcgaatgcgaatcggaagctgaccggcgtggccgatggtacggtcagcaccagcagctatgaagccgtcaatggcaggcagctcaatgccaccaatgacaaggtggcggcggtggagggcattgccaggtctgcgggcacggaagctgccgtggcaaagacggatgcagccaaggcgctggccgagacagcggcgctgggtgggctggtggctcaggtatctgcgtccggtaatgtgcgattgggcgagaagaacagcggtacgacgttggatgtgcgcaatagcgccaatgccgaacggaagatcagtggtgttgcagatgggctcttgagcgcaagtagtgctgaggctgtgtccgggaaacaactgtactcatccaattcacggatctcagttctggaagatgccagtcagtttatgagcattggcgtggctcccactagcgaacgcgccgaggctgggctggccggggtcgctgtaggtaactcagccaagaccggcagcgatgggggaactgcggtggggacccttgcaaaggcactcggtcgaaactccgtggccattggccgcgcttcagtcgtgcacgagggttccgatagtggatttgcactaggtgctggagcggaagttggcattgcgggaggtggcgcacggggaggtgttgctatcggtgctggagcaaaggtgggcaagggagcgaatggttcgctggcgattggcgaaggctctcaggcgaatgaggccggagttgcttcatttggtagtgcaactacttttcgccgtctggtgaacgtcgcgcgcggtacggccgaccacaacgccaccacagtcgcccagctcagtgattccctcgccatcctcggcggcggcgcaggcatggatgccaatggcaacatcatcgccccgacctacacggtgcagggcggaacgcagagcaccgtcgaggatgcgctgacggcactcgatggcgccgtcatcaccgccggccgtcgcgcggacaaggtggaaagtcagctgagctcgatcttccaggattcaccttcagcccgtgccgacggcatgagccagatcgcgctgaatggcgtgaatggcatggtgctgaccaatcttgccgacggccgggtggccccaggaagccgtgatgccgtaacaggcaaccagctgtacgccgcagagcagaagatctcgcagaatcggaatgatctggacgcgatgcgcaaggagcgggagttggggcagcaggcgatacgaggaatggatgcgagcgtcatcgactacggtggtgcgcgtttgactggcgtggctgaggcgaggctttcggctgacagttcggatgttgtacgcggcagtcagctctatgggaccaatagccgcatttcggaacttgagggcgacgcgcagttcatgagtatcggctcagcccccttcagtgagcgtgctgcagccggtgtggcaggcgttgcggtcggaaattcagcaaagactggactagaaggaggaaccgcggtgggcacgtttgcggaggcgatgggaaagaactccaccgcaatcggtagagcggcgagtgtctctgtggattccgagaatggattcgcaatgggagtcggtgcacaggtcggtggaggctcgggcggcgcgaatgaaggtatcgcgattggagctggcgcaagagttggagacggggctcacggctcgctggcacttggaaatagctctctagcagacgaagaaggagttgtgtcatttgggggtgtcggtatgaagcgccgcctcgtaaacatcgccaacggcaccgccaaccacaacgccgccaccgtcggtcagctgcgcggtgcgctatccgccctcggcggcgaagtggatgccaacggcaacatcgttggcccgagcttcaacgtccagggccaggcacagtccacgttgaatggtgcactggaggcgttggatggtgcggtcgtcaccagcacctcgcgcgtgggcaaggtcgaaacccagctccgctccgtgttccaggacactccctcggtccgcgccgacggtgtcagccagctcaccctcgccggtgccaacggcatggtcatttccaacgtggccaacggcctgatcgcggccggcagccgcgatgcggtcaacggtggccagctgcattcgatgcagcagcagctcaacgggcgcatggatgggctggagcagcgcatcgacgatgccccggcaccgcgtgctctggcgtcgtcctcggtgccgaagccgcaggccgaggacactcctgtggtaccggatggcaaggattcccagcaggtcgcttcggtaggcgagggtgacaagcccacgccgcagccgaaggccaacaaggacgaatcgccgaagccgcaggtcgacaccgctgagctggagaagatgctggcccgcgccaacgagtacaccgatggtgcgatcagcaacttcgagcgccgcctggacaagatggacaagcgcttcaaccgcatggcggcgatgagcagtgcgcagacggcgatggcgatgaacaccgccggcctggccacctacaaccgcctcggtgcgggcgtgggctacagcgagggtgagtcggcgatggcggtgggctaccagcgcgtgctcaacgagaagggctctgccaccttcagcctcaatggggcgttcaccaacagcggtgagcgcagcatgggcgtgggtgtgggcatcggctggtaa

SEQ ID NO: 515430 - DNA, 186 bp, Stenotrophomonas maltophilia
atgaacatctacggcagcctgttgttcctgcacggccacgtggccagcaccgagcttgcgcggcagctggcctgcccgtcgccgactccgccggccagcggcacccccggtagtgccggccgctggccggcaacctcgccgaccgggcatcccgcaactgccggccagcggccagcactacgctaa

SEQ ID NO: 515431 - DNA, 333 bp, Stenotrophomonas maltophilia
atgcgtacagtacagctgcagcgcgtcgcgttccgcattcgtgattgcagcacgttcattcttctcgtagccgaaaaggaagaaccaatgcccgcctcgctgtgtggcgacgatggttcggacgctcccacgctttcctcgccccggcaacgcaacgcgcttcttgaagattccgccgccaagatcagcatccaccagacccgcttccatttcatgtaccgaccggtacagcgcagcgtcggacagggtggtcctacgcaaactgcgattgaaacttcgtgtgcggaagacgcgtggcatgatcataccgtgccactgcgtggtacggcgtga

SEQ ID NO: 515432 - DNA, 594 bp, Stenotrophomonas maltophilia
atgacggcgctgccaaacgtgccgggcttcgtcgccgggccggtcgcaaggcggcccggcgcgccggtgttgttcctcgatcgggacggggtgatcaacgtcaatcacggttacgtgcatacaccggatcggaccgagtgggtccccggtatcctgccgctgctgtccgatgccgcgcgcctgggataccaggtcgtggtggcgaccaaccaggccggcatcgcgcgtggactctacagcgtcgaggacctcaccgcttacacgcgctggcagcacgagcagctgcagcaggtcggggcgccgctgctgggcacgtggttctgcccgcatcatccccaagccggcttgggcgaattcaagatcgattgcctgtgccgcaagcctggtccgggcatgctgctgaaggcgatcgagcagttcgcggtcgatcctgcccaggccgtgtttgtcggcgacaagatttcggacatgcaggcgggcgcagctgcaggtcttgggaagctgttcctgatcgctggtgatgtgggtaagggtgatgcgccgcagcaaaccgtctttgtgcctgacctcgctgcggtgcagcgtcagttgtag

SEQ ID NO: 515433 - DNA, 417 bp, Stenotrophomonas maltophilia
gtggtgtggagagtggagcaggagcgcctggtgcgtctcctcaaatccgagaagctgcggttccttgccgttggtgccgtgaacacggtgatcggctatgcctgcttcctgctcgccttcgcgctgatggatccttgggcaggtccggtccccatcctggtggtggcctatctcatcgcgctccccattgcctttttcaatcagcgtgtctttgtgttccgttcccgcgcgccctgggttcgcgaattccgccggtttcttctggccaattcgacaatcttcgtcgtcaatgttgtagcgcttccggtctgcgtcaggttctttgacgttgatccccgagtaattcaagcggtgttcgtgatggtttcgactgtcgccagttatttcgctcacaagtatttttctttctcccggtga

SEQ ID NO: 515434 - DNA, 876 bp, Stenotrophomonas maltophilia
atgcgtcgtattccgttgttgattcccaggatgccatccgcggacaaggtttatccgtatctccgaaagattgatcagaatcggatttacaccaactatgggccgttgaatggcgagttcgaacagcgtctggcaaccgaactcggccaagggctggaagccaaccacctgacgacagtttccaactgtactgtgggcctggagctggccatccaggcattttcactgcctgaacaggcgcacgtcctgttgccgtctctgaccttcgttgccaccgctaccgccatcgtccgagccggcgcgaggccgctgttcagtgacatcgacccttccggctggtgcctgactccggccatcgcggaacaggccctggcagacggcgcggctttcgatctggtaatgccggtcagcaccttcggcaagcagaatgacgtcgctgcctgggatgccttcaccgaacgcaccggtattccagtactgatcgatgcggccggtgcctttggcaaccagccgatcggacgtaccacggatgtggtgttcagtttccacgcgaccaaatccattggtagtggcgaaggcggactggtcgtgtcattcaacaccgatcgcatcaagcgcattcgccagttggccaacttcggcatcgatgctgcgcgcggagagctggcaggcctgggtaccaacgggaagctcagtgagtaccacgctgcggtggggctggcggcactggacgagtggcctgacatcatcgctcagcgtcgcgagctgcacgcccggtatgtgcgcaacctgctgcaggcctgcccggccctgaaactgcaggacaaggaccctgacgggatctatccgctgcttccggtgctgctgccggagtag

SEQ ID NO: 515435 - DNA, 1392 bp, Stenotrophomonas maltophilia
atgttcgcgcgtactctggaacagcatggtgaccggattgcggtgatcctccccggtggagaaacgctggattaccgtgagctggccgtgcgtgcagacgccatgtgggccgctgccgatcgtggttggggggtgatcgcgctggagtgtgccaacacgctgcccaacctgttggcgtacctgggcgcgctgcgcgcaggacagcccgtgctgcttctggacgctacgctgaacgatgcgctgcgtgcacaggtcatcgaacactactgcatcagccacgtaatcgacgccgaaggtcagtggcatgcgaccaatctgcgacccgcacccaccaatgcggaactggcggttctgttgccaacctcgggcagtacaggctcgtcgaagctggtccgactctctgccgacaacctgcaggcgaacgcacgctcgatcgcatcctatctcggcatagatgccagccagcgggcgatcacctcgctgccgatgcactattcgtacggcctgtcggtggtgaacagccatctgctggcaggggcaaccttgctgctgaccagcgaatcggtggtttcccgatctttctgggatttcttccggcagcacgaggccaccagtttctccggtgtgccaacccactatgaaatgctgcgtcagttccgcttcgaacggatggcgctgccgtcgttgcagaccatgacgcaggccggcggtcgcctggccgaacccacggtccagtggttccacgacctggcgagtcaacgcaatcagcgcttcttcgtgatgtatgggcagactgaagcgacggctcgcatcgcctacgtcccgcatgacgcactggcctccaagattggctcagttggtatcgccatcccggacggaacgctttcgctggtcgacgaacagggggcgcctgtccagcatgccggagaagtgggcgagctgtgctatcgagggccgaatgtgatgctcggctacgccgagggtcctcaggacctggtgctgggcgacagtcaactgggtgagcttcgcaccggagatctggcgcggttcgatgccgacggctacttctatgtcgtggggcgcctgaagcggatgatcaaggtgttcggcaaccggttcggcctggatgaaatggaggcgacgctgcgcggcgcaggctgggacgtggtcatgaccggacgcgatgacctgatcgttgctgtacttacccagcctgaggatgacgctctcgagcgtctcagacaggacatcgctacgcggtacaagctgaatccggtggcggtgaaggtgctttcggtcgatgccatcccggtgtcttcgtccggcaagatcctctacgcagaccttcttcaacaggttgaggcagcccaaggggccccccgtgcaacgtga

SEQ ID NO: 515436 - DNA, 1209 bp, Stenotrophomonas maltophilia
atgagcagctaccagtccctgattacgacagcccccgccctcgaaaccctgtcagacgcgccgccgctgtcggccttcgccgaaccgtcggtggcatttgtcgacgcattgtccgcggagctgttcggcatgcccgaggcgcgcagctaccctgagctgaccgcgctcgccttctggatgcggcgctccagcatcgtcaggctcaaggaagcctaccttcgtcgccacgccggacagctgtcggtggcgcgtggcaccgtgctgcatttcgcgccctccaacgtggacacgattttcgtgtactcgtggtttatctcactgctgtgtggcaaccgcaatatcgtccggctttcaaccaagtcatcggtgcagaccgatctgctggtcggcgcgatcggtcgcgtgctttcgcgcccggaacatgccgggatcgcacgacgcagcatggtggtgcgctatgcggctgacgcacgcaccacagcgttgctttccgcgcagtgcgatacccgcgtgatctggggcggcgatgccactgtggcggcgatcaggcaggtgccgctaccggcgacggccaccgagattgcatttgccaacaagttctcgcttggcctgttcgatgccggtggctggctggcagcatcggatgagcagcaggcgcgatggatcgatggattcttcaatgacgcctactggtttgaccagatggcctgctcgtccccccgcctgatcctgtgggtcggtacagaagcagaggtcaacagcgcgcgcgatggcttttggcccgtgctggaacagaaggtacgccagaagggtgtctcgttcggtgacgttgactacgtaaacaagcgtattgcccaggatctgctttccatcgagaccgatgtcagcattccggcaggcaaaggcaacgacgttgcgcgtctgtggttggaaacccccgcgctgcacgccgatgcacattgtggtgcgggtctcttcttcgagtcgcgacttgcacagctggatgaactccgggcacttctatcgcgcaaggtgcagactgtttcgtacttgggcatgcggtcagagcaactgcgcgatttcgtgcaggaggccccgctggccggtgtcgatcgctttgtaccggtgggcagtgcactcgatttcgcgagcatctgggacggatttgacctgatgacggtattcactcgagagatcgctgtcgcctga

SEQ ID NO: 515437 - DNA, 501 bp, Stenotrophomonas maltophilia
atgttccgctggtgccagctccagcatcctgacaccctcacggacatccaacgggctgcacgcttctactatctccagcgcctggcttggggcggaaaggccacagggcagacgccaggcttcggccggggtggcaagggtctgaacctgttgcggatcgaagaggatctgagcgcggcgcacctgaggctgcacaaggtgaccgtggagcacctggcctggcagcagtgcatggccaagtacgacggggccgataccctgttcttcctcgaccccccgtattgggagaccgagggatatggaacgcccttcggcatggagcagtacgaggagctggccagccagatggcgagtctgcgcggcgcggccattctgaccatcaacgatcacccggccatgcggaaggtgttcggacagttcagggaccgggcggtaccgatccgctacacgattggccggcaggcggtccagcggagggagctgatcttcacgacctggtag

SEQ ID NO: 515438 - DNA, 1077 bp, Stenotrophomonas maltophilia
atgaagattgtagacacggtactcagctacgcgggcgactaccatccacaattcaagggaatgtgccgtgtacgggtattctccggcgattacgatcctcgagtccttgttacagatcttggcgagttcaatgacggccgcaccgtcaccgacgcattcaggaccatcgtggagcggatcgaagacagcgggctagcgattggcgcaaagatttacatcgaacaccacgaagggactcttccagagttcgacacctttgatcaagtgcaattttcctcccaaatgaagtggaattcgatttcaaaagatgtggcgattaccctattggcatgcagttcggatgaacttgaagaccgaacaaagaacatcaagcgaatcgtcaacagaaccgaaacgctcaggctcttcgcaaggcgattcgatggttcaccctggccagagtctttcgcagtttccaagcgaaaactggagattgctgacagaatgatctcgcgctcctccgtgcgcgcactcgtcgaggctggaagtggtgaacgcgagctccaacgcttgctcaagagcgatctatcgattgtcgccgaagcgttcacctcgccagatgacgaatacatctgcttttcggaatttccctttggcgacggctatgtggatttcgccgtgttcaccggtcgctcgcgcatggatgtcattctgatcgaggtcaagggagccgacttcaacctcgtcaatagcaaccactacgaggagttcaaccacaaagtactggaagccgcaggccagctccgcaaacgcctcggattgttctatcgcaaccaggaacccatccgctgcgagctgcaccgtatccgcgcagaagccgagcgcgggagttcgctccataatgcatttctcggccccgaagcccctcttgaggtcgatcccgataaggacatcaacatccgcccggtgatcatcggcgggagaacccaaaacgacctggaagagagccgcaaacgccacgattacgaacgcggaacgtcaccccaagtgcggctcgaatcgtgggacacctggttgcgtcgaatccagcgggactga

SEQ ID NO: 515439 - DNA, 1800 bp, Stenotrophomonas maltophilia
atgaaccgctgcctgcctttcgtgatcgcgctcaccctctcggcatcgtggacgctcgccgccacgccactccgagcggccgaggtgcatccaggccccacgtcatcggctgcctgggtcgcccgcagcaaccagtacgcacagatcctgctggatgcgcaggcgccgttcggccccgaggacatgtcgttcatgggcatccccggctacgaccgcctcatcaccgacctgcaaccgggcttccccgcgcgcttccgcgccgccagcgcgaaggcccgcgaccagctgaaggcacagcgggccaacgaacaggacccgaacgtccgtcaggacctggacatcatgatccgcgccgccgacgaggccatcgccagcagccagctcaacgagcagctgacattgccgtggcgcgatgcgccgcagatcatgttcaacggtctccgcaccctgctctccgatcaggccacgcccgagcgccgcgcattcgcggcacaacgcctgcagcggtacgtggggcaggacggcacatcgcagccgttcaccgaactggccaaggtccgctacaccgaaagcgcgactgatcaccgcctgcttcggccctccaaggcagaggtcgaacaggccctgggcaacatcaacacctacatcaccggcatccgggccctgttcacccgttacccgcagcctggtgccgaggccagcctggcgttgatggaagcgcagttgaaggactacggccaatgggtgcgtacgacagtgctgcccgatgcacgcgtggatacccggctgccgccagcgctgtatgccaaccagctccggcagatcggcatcgacatcgatccgcagctgctggtgcagcgcgcgcaggtagagttcatggaaacacgcgcggccatgcagcagctggcacccagtgtggtcaaggaacatggattgcaggtcaccgatccgcacgatcacgtcgcagtggtccgcgccctgaagaggaatgccatccccaacgagcagctggtcgcgcgctatcagcaggccatcgaggcgatcgagcccatcatccacacccagcgcatcgtcaacctgccggcccggccgatgatcgtccgccttggcacccccgcggaatcggccgtggtgcaggccccgcatctgctgccggcgccgctggtcgacaacaccgggcagcagggtcagttcgtcctgcccgttgcactggccactgccgacggcaacaccctgcactacgacgacttcaatttcgatgcggcgcgctggaccatgtccgcccacgagggacggccgggccacgaactgcagttcaccgcgatgatcgagcgtggggtctcgctggcgcgcacgctgttcgcgttcaactccgtcaacatcgaaggatgggcgctgtacaccgaagcagaaatggtcccgtacgaaccgctcgacggccaattcatcgccctgcagttccgcctgatgcgcgcagcgcgggccatgctcgatccgatgatcaacctgggccagatcgaccgtgccgccgcagcacgcattctgcgcgacgacgtcggcctgtccgaagcgatgatccagcaggagctggatcgctacaccttcaatgcaccgggccaggctggcgcgtacttctacggctacatccgcatcctcgaattgcgcatggaaaccgagatcgcactgggccaccggttcgaccgccttgcattcaacaacttcctcatcgaccagggcctgctgccgccggacctgctggccaaggcagtacgcgagcagttcgtgcccaggcggaagtag

SEQ ID NO: 515440 - DNA, 810 bp, Stenotrophomonas maltophilia
atgaactcgcgcggcttcatttcccccttcggccgcgaggagcaggagcacctgtcctgccggcagggcaatttcctctggctgacggtgggtggcgaggacaagatcctgcccggcgcggtggtcaaccgtgcgctggagagccgtcttcagatcatggaacaggaacagggccgccgaccaggtggtcgcgagcgcaagcacatgaaggacgacatcttgcacgagctgctgcccaaggccttcgtcaagaacacccgccacgacgcgatcctggacctgacccacggctatgtggctgtggatacctccagccgcaaggtgggcgaggccttcgtgtccgatatccgtggcctgctgggcggcttcccggcaatcccgctgaacgctcaggtggcaccgcgctcgatcctgaccggctggatcgctggcgagccgctgccggacgggctatcccttggagagtccgccgagttgcgcgatccggtcgagggtggcgccaaggtgcgctgcagcgaccaggaactgcgcagcgacgagatcgacaagcacctggatgccggcaagcaggtcaccaagctggcgctggtgctggaggacgcgctgtccttcgagctgggcgatgacctggtggtgcgaaagctgaagttcctggacggtgcgctctcgcagttggagcaagccgacgccgatagccatcgcgccgaggtcgatgcccgcttcgccctccagagcggtgagattcgccgcctgttcctggtgctggaacaggccttcaagctttccgatgcggaggtgcaacgtggatga

SEQ ID NO: 515441 - DNA, 600 bp, Stenotrophomonas maltophilia
atgccgaccttggtcggcgctgtgggtttcgtgccaaccaaggttggcacctaccagagcgatgcgtcggttgttgcaggggtagtgccggccgctggccggcaattgccgttggtagatgccgaccttggccggcgctgtgggttcgtgccaaccaaggtttgcacctaccagaacgatgcgtcggttattgcaggggtagtgccggccgctggccggcaattgccgttggtagatgccgaccttggccggcgctgtgggttcgtgccaaccaaggtttgcacctaccagaacgatgcgtcggttattgcaggggtagtgccggccgctggccggcaattgccgttggtagatgccgaccttggtcggcgctgtgggtttgtgccaaccaaggttggcacctaccagagcgatgcgtcggttgttgcaggggtagtgccggccgctggccggcaatcgccgttggtagatgccgaccttggtcggcgccgcgggtttcgtgccaaccaaggttggcacctaccagaacgatgcgtcggttgttgcaggggtagtgccggccgctggccggcatttcccttgggcgaagaggatttctga

SEQ ID NO: 515442 - DNA, 468 bp, Stenotrophomonas maltophilia
gtgttgatctggaaggcggccggacccgatggagtccgcatcgacactgctctgggcggggtgacgctgactcccgctgctaatggtgcgttcgtcgacacgcgcgaacatctgattggaaatcaacgctttcaggcggtgtatcaggtattcgattcaaacgccgatagcccgatgggccgttgtggcgcggggcgcgagatccagctcttcgtctacgaattgatcccgcccaagcctgtcgagcggggcaggatactgatcagtagttgccttgagaccgtgtccctggccagccagaactcgggaagtcccgaaagtgagtccgacttttcctccgtggtctggcataacgacgggttcaccatcaagtggtggagtgccgggcccgacggaaaggcctcaagccactatgcactccgcaatggccgttttgccccggctcaatcggacgagagaagccgttga

SEQ ID NO: 515443 - DNA, 2958 bp, Stenotrophomonas maltophilia
atggctcagatcgtccgcaagcgtcgtcacctgctgtcccaggccctggtcctggccctgttgcccctggcggccagtgcgcaggaggccgccaactcgtccaccaaggatctcgacgcggtcaccgtcaccggctcgcgcatcaagcgcgccagcgtcgaaggtccggcaccggtcaacgtgatcactgccgcccagatccagaaggaaggcttcgtcagcgtgtacgacgcgctgaagacgctcactgaagcgaccggtaccgtcgaggcggcctcgcagtggggttcgcacacgcccaatgccagcggcctgaacctgcgtgggatgggcccgaaccgctcgctgctgctggtcaacggtcgccgtgtagccgactatccgctgccctacggtggcgaaaccaacttctccaactacggcaacattccggccgcggcggtggagcgcatcgaagtactgaccggtggcgcctcggccatctatggctcggatgcgatcgctggcgtggtcaacgtcatcctgaagaccaactatgacggcgacgaagtacgcgtgcgcggtggtacctccaccgaaggcggccgcgatacctgggatctgtcctgggccggcggcaagaccggcgacaactggagcgtgacctacgcgctgcagtacaccaagcgcgatccgctgttcggccgtgaccgcccgcagatggacgatgccgacgatgcgccgtacccgtcctggaacatggaacaacgcaaggtcgggttccgtcccaccgccggcctggcgctgatcgatccgaccaccggccagcgcctggcgccgcccaccggcacctgcgagaagttcgatggcgagtactacaccgccgatcgcctggtctacaactacgccgccaacaccatcaccaacaccggccgcctgtgcggcatgagcgccgactacgccaactggctgctcaccgggggtgccgagaacgtgtccggcaacctgtatgccaccttcgatttcagcaacgacctgcaggcctggaccaacctggcggtgtaccgctccgaggcgatctggggcaccaatccgcccagcgtgtcgctgatcgacgatgacaacggctactactgggatgccaaccgcaaccgcccgatcctcggcgtgcgccagttcaccccgaacgaggtcgggggcctggatacgctgcgcaacaccaaccgtgaactgtcctgggactggagcgcgggcctgcgtggacgcctggccgatcgcttcgactggagcgccacggtggggcgttcctattaccgcgtggaagaacggcagaacgtggtcgacaagcagaagtcgtacgactacttccttggcccgcgcctgggcaccaccgccgatggcgaggcgatctacgcattgaacgaatcgcgctggtggaacccgctgacgccggaccagtactggcagatgggcacggtggcgaagaaccgtgcgtcctcatgggtcaaccaggcgtcggcggatatcaccggcgagttgttccagggctgggccggcccgatctcgttcgcggcggtggccgaagttgcgcagcagggctaccacctcagtcccgacccgcgcgccggcatcgacttcgacctgcagaacgtcgatcggggcggcggcgagcgcacccgctattcggctggcgtcgagttcaagattccgctgctggaaagcgtgaccgccactgcggccgcgcgctatgaccgctatggcagctacaaggctgacaacagcggcgaagcgctggacatcggcagccagaaggagaccacctggaacgtcggcctggaatggcgcccggtggagtcgctgttggtgcgtggctcctatgccaccagcttccatgcgccggacatgcactatctgctcggtcaaccgagcagctccgaagtgcagacctatgatcgcctgcgctgcatccagagcggtgcctacctggtcaacaactgcggcgtgggcaataccgatgtctggtacacgttcgacgtgaaccggcgtggcacgccgctgctgcgttcggagaccggtgattcgtggacggtcggtttcgtctgggacgtgatgcccaatctgtcggtcagtgcggattactgggcaatcaaactggaagacatgatcgtcgacgttggcgccgacgaggtactggccagcgaagcgggctgcctgaccggcaagaacatggacggtacgccgtgggccaatccggccggtggcgagtattgcgccggcatcctggcccgcgtgaaccgtgacagcaacggtcgcctggtatcgatcgagcgcggccccttcaacctggccagccgcgaagtgcgcggcatcgacctgaccgcgcgctatcgcctggaaaccgcgcagtggggcaacttccagctcggcctgaactacaccaaccagatctcgaccaaggaacagcgttacgccaacgatccgaacccggagcgtcgtgaccgcgacctgcgcagcaagctgcgcgcgagcctggcctggcagcgtggcaactggaatgccaacgtctatgccgatcgcatcggttcggtgccgggcgtgcgctaccactggggcaccgatcgcctgaacaatcctggcggctgcctgccgttcgccgatggttacgtgcccagcgacagcccgtcgctcaactgcctggagccggccacgcgcccggacggttcgccgaatccgaatcccaacgccggccagcagacggcgcgctactacgggcgggtggggccgttcatcacctggaacttcaacgtgggctaccaggtgaccgagcacgccaaggtgaatgtctacgtcaacaacgcgttcaactcggccagctggaaccacaaggacccgtacaagctggactacgatttcgccccgacccgcctgctcggcgcggtcggccgcgagttcgcgctggaatacgtgttcaccttctga

SEQ ID NO: 515444 - DNA, 1527 bp, Stenotrophomonas maltophilia
atgcgcgccgatggcgagctggttggcctggcgggcatgttcggcgttctggcgcacggtggaggtcagttcctccatcgaggcggcggtttcttccaggttggcggcctgctgctcggtgcgacgcgacaggtcactgttgcccgatgcgatctcgccagcggccgagctgatcgcacggctggactgcttgatgcgggtgacgatctcgctcagctgcgcggcggtggcgttggcgtcgtcacgcatgcgggcgaacacgccctggtagtcgccgtgcatgcgcacggtcaggtcaccctgcgacagtgcggcaagcagcccggagatctgttcgatgctgccggcgttggcgtcgagcaggccgttgatctgctgggccagctgcaggaagaagccttccttgtcggtggcatcgatgcggccggacaggtcgccggcagcggcctgggcgatcacgcgggccacttcggcttccacctgcgcttcctgggtgcggtcgcgccattccaccacgtagccgacggtgtcgccgccttcattgcggatggtcgagaccacctgggcgaactgggcgtcgccgtactgcatcgggcgacgggcgacgccgtgtgccttcaggttgcccagcagggtctggtccatctcgccgcgatgctccagcacggtgaccggcttgccgatcagcgaggcctgcgcgtcgaagtccggcaggtcacggcgcacgtcgtcctggtactggctcagggtctgctgcagggcgcgattggtgtagacgatggtgttgctggtgtcggtcaggtacacgccggtcgagctgtaatccagcgcggtacggatgcgcaggttctcgcgggcgacggcctggtcggtctcgatgcgctcgcgcaggtcgcgctgcatgcgctgcatcgcctgcatcagttcgcccacttcgtcctggcggctgacgtcgatgtggccatcgagcttgccgccggccacatcgttggcaaccgagacggcgccgcgcacgctgccgaccagggcacgggcaaacagccacaccagcaccaggccgagtgcggcgccgcccagcagggcgatcacggtcagcacggccgaggcggagtaggtggattcggcctcttcgcgcgaggcgcgggcgaggcggttgtcttcggcgatcagcgcttccagcgccgaagcggccttgcggtgcttggtgcgggtctcgccgacgaaggtatcgatggcgtcgtccggcaggtccagttccagcatctcggtgacgctgtcataggaggccagggcgtccttccattccttggcgaaggtgtcgaacagcttcttctgctgtgcattgtcgaccagtgccgggtagcccttgatcgacttgtccatgctctctcgcagttcaacggtctgcttgcgtgcgtcggccttgacgtcgtcgctggcgcggatcagctgctggtacgcggcgttgcggtactcgccgagcatgccgcgcatttcgcccgccatgcggatgctctccatgcgtga

SEQ ID NO: 515445 - DNA, 276 bp, Stenotrophomonas maltophilia
atgttcggcacggcaccggagccgctgcggcaggcggcacgacgacgctacgacctgctgttcctgtgcgcaccggatattccgttcgaccaggacggtacgcgcgtgggcgaagccttcagggcgcagcagcatgcgtggtacctggcgcagctgcaggcagagggtgtcgagtacgtgctgctggaaggcgatctggagatgcgcatcgcacgggtgcagggcgagctggcgaagcgggcggacaaccggttcagtgtcgccccgcctctgtag

SEQ ID NO: 515446 - DNA, 1281 bp, Stenotrophomonas maltophilia
atgagccaggacgacattcccgaccatgccaccgatgcttcgccttcggcgggcaaggtggcacccgaggcgatggccttgcgcgcgcagccgcgcccggtcacgcgcctgaaccggcgcacgctggccatcctcaccggcggcctgtcggtcgccgtgctcggggccacgatctggtcattgcagccgcatcggcgtggtgctggcgagcagaccgagctttacaacgtggatcgcgtgtccaagtccgaagggctggacggcctgccttcggactattccaagctgcctgcgaaggtgccggagttggggccaccgctgcccggcgatcttgggccggccatcgtgaagtcgcagcagcccgtgacaccggcctatgcgccgccgggccacgacccggaggatgcacggcgcaaggaagccgaggccgcagcggcctcgacggtgttcttccgctcgggcaatcaaggcaaggccgctgcgcctggcgcagcccaagtcgctgcggcttcgcccggcagcgccttggcgggcttcgatccactggcggccgggccagcctcgacggctgcccagcccagcgatcccaccgctgtgcagaaccggcaagagcagaaagaggctttcctgaaaggcggttctacggaaacccgcaattccggcaatctgcaaatgccggcttcgccgtaccaagtcatggcgggcacagtgattgcgggcgcactggtcacgggcatcaagtcggacttgccgggcgacgtgatcgccacggtgacggagccggtctatgacacggccacgggcaagttcctgctgatcccgcagggctcgcgcatcctgggcaagtacaacagccaggtgagctatgggcagagccgcgtgcaggtggtgtggaaccggatcatcctgcccgacacgtcttcgctgaaactcgacaacctcgcgggcaccgatcctgccggctacgccggtctggaggatggcgtcgattggcattgggatcgcgtctttgcgggcgcggcgctgaccacgctgctgggcgtaggcgccgagctggccgcgccggagaaccggcaggacggcaaccgcatcgtgatcgccgggcgcgacagcgcgcaggacagcatcaatcaagtcgggcaggagatgacccggcgcaacatgaacatccagccgaccttgaccgagcgaccgggcctgccggtgcggctgatcgtagcccgcgacctcgtattgcgtccttaccagccgatgttctatcagcttgggagaacgcgatga

SEQ ID NO: 515447 - DNA, 993 bp, Stenotrophomonas maltophilia
atgaatgcgattttccgtaaatccgccttgccactgatcttgcttgccctcgcgggctgcgccacgcagggcaagccgccgccggccatctcactcgatgagccggtgcaggcccagccgctgcccgaggcgccgaagccggtggaagtcgtggccgtgcccgaggtgttgccgatgccggcgcagatgaagcctgtgccggattccaagcctacggcggaacccgccgatgaaaccgtgcgcgtggcccgcgccaatgccgaggcgcgcatcgcgcccacacgcgagggatatgtgaacgccattcaggtatggcccttcaccgatggcgcgctctatcaggtctatgcggccgtcggccgcgtgaccgtgatcgcactccagccgggcgaggagctggtgacggtcgcggccggcgacacggtgcgctggatcgtgggcgacacgtcgagcggcagcggcgaggcgctgcgcgtgaacgtgatggtcaagccgatccgatccggcctcaagacgaatctcgtcatcacgaccagccgacgcacctacctgctggagctgacctcgaccgaaaagacgtggatggcgtccgtctcgtgggaatacccgaaggacaagatgctggctttgcagcgccaggcgcaggcggccagcactgccgtgccggtcgatgcgggcctgtctctggagaagatccgcttccgctacgcggtctcgggcagcaatcccccgtggaagcctttgcgcgcctttgatgacggggagaaggtctacatccagttcccgccgggcatcgcccagggcgaactgccaccgctgttcgtgatcggtgcgcagggcgatgggcagctcgtcaattaccgcttccgctcgccgtactacatcgtggatcggctgttcggcgccgccgagttgcgcctgggcggcgacaagggcgacgtggtgcggatcgagcgcaccgacggggttgtgggtggcacgcggaggaactga

SEQ ID NO: 515448 - DNA, 1350 bp, Stenotrophomonas maltophilia
atgaacgacgtgaccatcattgatcgcttcctcgatacgttctcgcgctacatcgactcgggcttcggcctgctgcatggagaggtggcgtttctgactgccacgctgatcgttatcgacatgacgatcgccgggctgttctgggcgatgggccatgccaccggccagggcgaggacgtgatcgccaagctgatccgcaaggtgctgtacgtcggcgccttcgcctacatcatcggcaacttcagctggctggccggcatcgtgttccgctcgttcgctggccttggcctgacggccagcggctcgaccatgagcatggagaacttcctgcaaccgggccggttggcgaaggtcggcatcgacgccggggcgccgatcctcaaacagatcggcgacatggcgggctttcccgaggtgttcgtgaacatcacgcccatcgtcgtgatgttcctctcctggctcatcgtcctgctgtgcttcttcgtgctggcgatccagcttttcatcacgctgatcgagttcaagttgacgacgctcgcaggctttgtgctggtgccgttcgcactctggaacaagaccgccttcctcgctgaaaaagtcttgggcaacgtggtgtcgtccggcatcaaggtgctggtgctggccgtgatcgtgggcatcggctcgggcctgttcgccgaattccaggtgcagccggccgagccgtccatcgaccattccgtcgttgtcatgctggcttcgctgaccctgctggcgctgggcatctttgggccaggcattgcgacggggctggtgtcgggcggcccgcagctcggtgcaggtgcgatggctggtgccgcgctgggcgcggccggcgctgcggttgccgtgggcgcagcggccacgggcgttggcggtgctgtcgcagccggcgcacgtatggccccggctgcggccaagctggcaggcagcggtgcgcgtgccgccaccggggcggccagcagcgcgaagtcggcattccaagccggctccgcgtccgctggcggtggcctcaaaggtgctgccgctggcgtgggcaatgttgccaagaccggcgcgcaagcggccgggcagaaggcggcgcaaggcgcgcgttcgatccgcgaacgcgctgccgcagcgttcagcgccgacgcgcccacagccgcaagtagcggtgcccccagcggcgatgcgccttcggccgctccgcaggagcaaccggcctgggccaagcgcctgcaccgacgacagcagctcacccatgccgcgacaaccgccgcccacacgctgcgcggtggtgatggcggcggctcgggccaagggccgagcctgcgcaaccccgatgaatga

SEQ ID NO: 515449 - DNA, 210 bp, Stenotrophomonas maltophilia
atgcgggagtttgcactgcgcctgctacgcgaagccgagctgccgcatcgccaagtgaccgttatgcaccgggatatctttgccaaggctggcatcgtctggcaggacggccaggacatgaacttggttctttctggcttgaatacgtggcagctgctcgcgctgatctatcagctgcgcgacggtgacgaagatgaggaggaggaatga

SEQ ID NO: 515450 - DNA, 141 bp, Stenotrophomonas maltophilia
atgaccaagcgccaaatctccctcgcttgggagtacgtccaggcccagcagcggcgcgaaaggcgggagcgaatcaccgacaccaatgctgcctatgccggcggtagcccggcgaccaacctgctgaaggatctgaaataa

SEQ ID NO: 515451 - DNA, 234 bp, Stenotrophomonas maltophilia
atgcggactgacctgtgggatcaattcggcgatctggtcggcggcagcccgaggctgatcgccaccgtcaccgcgcacaactctgatggcaccagtagtttgacgacctacgacggggtgcagatgcgcgccttcgggcagctgcatctgacggttccgtacaacgtctgggtgcgtggcggcaggttggtggaagctgctccgaacctgccgctctatgaattgactgtctaa

SEQ ID NO: 515452 - DNA, 228 bp, Stenotrophomonas maltophilia
atggtgtcgctcaacgcctgggcgaaggtgatgccggtacgacgccccttctcgcagaccgcgatatccagcccttcctgcatccggatccattcggactggtgggccatcagcacaccggccttgctcgggtcaaagttggccgagatcgagcgcacgctctcgggcagctcctcccagtccaggacgcgctcggtatccggcagggggcccagtgcactcacttag

SEQ ID NO: 515453 - DNA, 300 bp, Stenotrophomonas maltophilia
gtgatcgcgtactgctgggccaatggccagatcggcttcgggacaaacgtgccggatggcgccattttcattgccgaagggagcagcacgcagctgcgcaaggtgatctcagtcgttgctaggcacggaaagggagccatgcaggggatgctggttgtgccgggcgtgccagaggcagacacgcagcaggcaaagggtgacgcgctgggcgcctggttggcgtggtgcggccagcatccgcgccggctgcgctggggtggcatgtccgccgtgaccgtttatctgaaggagaacacctga

SEQ ID NO: 515454 - DNA, 402 bp, Stenotrophomonas maltophilia
atggacgcactaaataaacttcttgacagcgcacgcaagatgtgcagccgtgacagtgacgcagccgtagccgagcgcctgaaggtgtccagaacgacgctgatgcagtggcgcacaggggaccgtcgcatcactgatgaacacctgatggaagtcatcgaactagcgaaagaagacccagcgctagcagtgttggtgcgtcaggaaatggcaaagacgaaggccgagaaaaaagcctggggtgcgctgtgggacagactaagcgcggcggcggcagtgctggcgctggtaatggtcgcaacgccaggcgtcgcacgcgcaaatcccctgccggttcaagggtttagcagcggccacggcgacagtatgtatattatgttgcgtgcctgccggcacgtgtag

SEQ ID NO: 515455 - DNA, 843 bp, Stenotrophomonas maltophilia
atgcctacgtgggctttgttcgtccttcatatgcgtctaccgggcggtacgcatcgagcaagcgcggctataaaaacagctgcctttctcgtacggagcagactggctgggccaatagttcgcagatggtttgcgagcgtggttgtgcctacaagttgtacggcgatggggcaggtggccactactactccaccttcaacgattcgacgaattcgtcgtatggcacttgcaagtcgagtgatgaaaccccgcctcccaagccaaagcctgatcccggcccgggcaccgatcccggcaccgatccgggtggcactgatcccggcggtggtggtacggaccctggcggcggtggcggtactgatccgggcggcggtggtggcaccgatcccggtggcggtggcggtactggccctgatcccaagccgtgcccggcaggtggcaaggatgccgatggcaagccgtgtccaggggagggtggcggcactgatccgggcggcggacccaatcccggtgaaggcagtggcaacggcagtggtagcggcacctgtgcaaagcctcctgtttgcagtggcgatgccattcagtgcgcccagcttttccagcagtggcgtgctggctgtcaggctgaggggctgggtggcaaggtcacaggtgatccaaccaattgcaaagctgcataccagtgcgaaggcaatgcggtcgcctgcggtcagctcgctgtcatgcgtaagcagatgtgcggcgccggggagggggacggcaacggcacactcaccggcgacggtacgtgcgctcaatccttcgtttgcactggcggtgatcccgttgcatgcgcggagttaa

SEQ ID NO: 515456 - DNA, 2550 bp, Stenotrophomonas maltophilia
atgtcactggtcgagtaccgccgcaagcgtcgttttgaccagaccagggagcccgaaccgggcaaggcgctgccaaaaggccaacgcgccattttcgtggtgcagttgcatcatgccagccgcaggcactacgacttccgtctgcaggtgggtgacgcgctgaagagctgggccgttcccaagggccccagctacgacccgaaggtcaagcgcatggcggtggaggtggaggatcatcccgtcgactacgcagcatttgaaggcgagattcccaaaggccagtatggcggcggacatgtcgcccagttcgaccacggtgtgtgggccacgcagggtgacccggaagcccagctcgccaagggccatctacgcttcgagctgttcggcgccaagctcaagggtggatggcatctggtccgttccggcaagcctgcgcgccagccacagtggctgctgttcaaggacgacgatgaatttgccagcgatatcgaggcagacgatctgctggcggatgtcgctgtagcgcccccggaggacctgaagcgtgccggggcaggaaagaccgcgaagaagaaactcacggtcgtaccgcccacacgcacccgacgaaagaactgggcgaagaaggccctggcgctcagcaaggcgaaaaaggcggcagcgccgtccggaccgtttgagccgcagttggccaagctgggcgacgcgccgccccagggcgggcagtgggtgcatgagatcaaatgggatgggtaccgcatccttgctacggtggctaagggcaacgtgcagctgtggtcgcggaacgcactggaatggaccggcaggctgcctgaaatacgtgaagcgatcgcggcactggggctcacctcggcggcactggacggtgagctcatcgccggcgccggcaccaaggaagacttcaacctgctgcaggccacgctctccggcgagcggcagggcgtcctgacgtatgcattgttcgatctgctgcatcttgatggcgtggacatcgccgatgcgcccttgctggaacgcaaggccctgctgcactccgtgctggaggggcagggcaggccattggcgttcagttcgcatgtgcagggggatggcgacgaggcctatcgcctggccggtgagcagcacttcgaaggcatcatttccaagcgcgccgatcgcagctaccacagcggccgcagtgaggattggcgaaagaccaaacagctggtcagcgacgagttcgcggtgatcggatacaccgcgccgaaaggcagccgcaccgggttcggctcgctgctgctggcgcggccagacccgaaacatggctggctctacgtcggccgcgtcgggtccgggttctcggacgaactgatcggcgaaatcagcaggcgcatcgaaggcggcggcggccgcaagccgacggcgcacgtgcccacccaggacaccgaccttcgcgccgcgacctggttcgcaccgcgtttcgttgtggaggtcttctatcgcgggattggcgggcagaagctgttgcgccaggcatcgctgaaggcggtacgggcggacaaggacatcgccgatctcgaagattccgatcgctccgggccggccatgccctctggtggacagcccgcatccaggcgtcctgcgcgcgatacgaaaaagtcacccgctaccggccgcacaccgcccgcgctttcgtcccccggcaagatcctgtttcctggcgatggctacaccaagcaggaggtatgggactactacgcagcagtgatggagcacctcctgcccgaggtggttgatcgcccgctgtcgatcatccgatgccccagtggcaccgcaaaaccctgcttcttccagaaacaccacacagccgggctggaactggtcgatccggtaaggctgaaggaggaaagcggcatcaacgctcattacctggtggtgcgtgacgcggccagcctgcttgaactggtgcagttcaacgcgctggagttccacccctggggcagccacgccgaagcgcccgacaaggccgaccgggtggtgttcgatctggatccaggaccggacgtaccctttgcagaggtcaagaaggcggcaaccgacatccgcaaactgctggcgcagctggagctggaatcgttcctgcgggtatccggcggcaagggcctgcacgtggtggtgccgctcaacccgggatgcgactgggacctgaccaagcgctttgcgaagggcttcgccgatgcgctggcgcaatccgagccgcagcgattcctggcaacggccaccaaaagccgccgcaacaagcggatcttcgtcgactacctgcgcaacgggcgcggtgccacggcagtcgcgtcctactcgctgcgggcgcggccgggcgcaccggtcgcgttgccgatcgcctggggcgatctggcgaaactcaagcgcgcagacgcgttcacgatcaaggacgtgccagcaaagctcaagcggcggcgcaaagacccctgggccggcattgggaaagtgaagcagaatctggcgcgctgggcgcaggcagacccgtag

SEQ ID NO: 515457 - DNA, 732 bp, Stenotrophomonas maltophilia
atgaagcgactagcaacaatccctgtccttgctgttttggttacgcgcatagcgctcgccggtgatttccctcaggacgtgatcggtgtcatcaagagcgatgctggaaccgtagaactactctcagattcctgcgcccggcccggtgcactcatcgccgcccgggcaggaagtatcttggccgagagatcggaatggcttagccagcaaccggggcgcgttctatttatggccgcgaccaaggacagtccgatgttgttggtgtgctacgaaaagacagccagtggtattcgtgcatacggccccagcagtgcggagagcatcgagtatcccgacaatggcattcaatggttgcgtaagcctgcacacatggaccggtctgcgcaggccagcgaagaaacgccgcccggaggcgcgtccgccctgccgcctgcgataccgagcattcgcgaggcgtcaagctttacggatgagaactaccgatacgggatagtcgaagcgacgtgctccgacatggcacggtttctagcttcgtcaacggagcctggcgactcggatcgagcgattttcgttaactggctggcactgcagccgggaaaatttgtatatgtcgataggctctctgacggcacagataccggcgagcgaggctgctacgtgcgcactggcaccgggcttcgcattacagtgcaccgccgtgccaaactcgttgagtacgaggcggcccgctga

SEQ ID NO: 515458 - DNA, 855 bp, Stenotrophomonas maltophilia
gtgatcctgtgccctgatccagcatcagtctggctcatcgaagccgtgtggtggcgcgggcggagcccatcaaatcgttcaagccggtgcagcttcgcggtcagcttaactcattgttcgcccgtcaatcagcatagtcgagttctcgtgaataagataaataccaagaagataatctctgacttctctggccgcatcgatgccaaacgagcgtcgtttgatcgcctagttgcgcacgtgaccggtacgccgacagagctctctgatctcaacttcctgtgcgagaactatctcgcatctatttacgtggagtttgagtgcctagtgtcagatctcttccatgggtacataaacaacagcaacaaaacatacctgtccaatctcgagtcaaaaatcaagaactcaattagcgacaagtacactccgtggcatgcgtctcacactagcttcattggccccaagcacattgcatctgctcaactttccaagctacttgatccaactagttggaatgtaacctttaaagacgtcactgctatgcagctacgagccaaggagtggctcgcgccagcgcatgaaaaggcgttttcgtctctctcaccttcggataggactctcgtcgattcggcacatgcgattcgaaactgcatcgctcacaacagtgaaagttctcggaagatcatgaacactaaggtacgagctctaatcactggaccaacgtgcacaaatgttggtctcgagatcggtgccaacaacataaactcgattggcaagtatcttcgtgctgcgctccccggaggcatgcggataggcgtgtactcagacaggttgaaagccatcggagcatcattgtga

SEQ ID NO: 515459 - DNA, 141 bp, Stenotrophomonas maltophilia
atggccgagttgcaaggcaagggcgaggtcatcgtggacggcccggtgatgggcaccggtgcgaccggtcccattcgatccatctatgtgcgcgatccggatttgaacctgattgagatttccgagtacgttccggcctga

SEQ ID NO: 515460 - DNA, 2475 bp, Stenotrophomonas maltophilia
atgcagagcctctatcagtcccaacttgagctcgcctgcggcctcgattctgacgtcgcatccttgacgcacttgtccgcgatccttaggtcgctgctgcaaagcgcggcaatctgcgcgatagagattgtccgccaagctgcgcccgcgacggaacacgacatagagctggacggctatctggaccgtttcagtcagccgtcggacggtctgcccatcgaggtcctcgaccacctcgttcccgcgattcgaggcctggtgtcgcggcagtacttccggggctggttcgaaaccacgaacgccggcgatccctcgttggtggccgcactgaacgaatgggttcgattccgcaaccaccgcctggggcacggggtggtggacgcgcccaccgccgccctttggtcacagaagatcgaggcgctcatcaggcgcctgctgaccgcgggtgcgggtgtgttgcccaaaattgacagcaccggcttgcaggttcgcgtcggcgatgttgacgtcaggatttcaacgccgctagtgatcgatgcccacccgattgtcgtgtcgaagattggacccagcaaaggcctttggaaactacacgcgcaacttctgtcgctcgacaacgcccgcgtcctcacggtcgatcttcccgcaaccaatgtttttgcgaccgacggcggcgtgcggcctgaaaagtttcgctggacggaggttccatcgaccaacgggtccaaactcgtgctgcacaacatccctggacgacagacatcgacgttcgttggacgcaaacgagagctcgaaaagcttgtcgaatggtttgacgaaatagccgactaccgtccgtgcctcgtgtttggcgatggtggcttcggcaagacaacactagtactggaatttttcaattctctcatcgagggtgacgcggagactaaggcgcccgcgccttcgatcgtcagttactacaccgccaagcggacgcggtggtccgaagacggtctgattcacatcaagggcatgtccgaagcgatggaggacagtgtccgggagctgatgtactgcttgggacccgttttaggccgggactggtaccgtgcacagggccgggcgctggtggacaaggctgctggggagctcaaggccgaagggttctctcgcggcgacgtcctactgatcatcgacaataccgaaacgctggctacctcgaccgctgacgcggaggcgctaggcgatttcctcaagcaggtggccaagtccatcggacgggtcgttatcacctcgcggcgccgggagcttctggctgcagaacccgtgcccgtcgcgcagctgtcggaggcagaagcgctcacgctcatccaacggcttagcgatgcttacggagctatcgcggtccagcaagcgggcgacgccaagctgcggcgtgcgtgcgagcagctgatgtacaagccgcttttgatcgacacactcgtacgctacatcgcgcggtcttcgtcgagcgttcaggagggtttggaccagattttgcgcaagaccaacgatgagctcctcgaatttttgtacgaggatgcgtggcagcgtatgcccgcggccgtccaggatgtcttcatgacgctcgtgctgctggtcacgccggtagacgggaagtcggttggcgacgtgtgtcgggagataggcgtgcagcatgcggagttccaagccagtctggccgaaacctactttgccacggtcgtggatcatggagagatctacgaaatggaaatcgtcgagttggcgaaggagttcttccggcagaagaagaagcgcctggtcctccatgagtcggaaaagatcgagaagattgccactcgggttgacaagcttgcgacggaacgcttcgaaattgcgaagaactaccgccgcgatcgtgtggcggacgcgttccggagcgagtttgcgaaggcggcaaagatcgctaccttcaagaaagactacaaaggcgcccgcgagctgttcgagttggccttgcaggatgagcctctcaatgcggcgctacgcgagcgttatgcctcgttcctctttcgtacgttgcgtgacacctcgggagcgctgccagtggctcaggcagccattgagcttgacccaaagaacgccgatgcacatctgacgcttggcctcatcctctacaagctaggccagatcggtgctggcgacggttccatcgcacgtgctgaggagttggggaagacacccgccctctgcatgctgaggcgcgcaatcgcgcggtatcactccgtcgctcgtcagccgtacgcgcgctcgagcggacgactgctgcgagaggcggaacaattcatcgaactcgcgatgcgcaccgcgagaaccaaggatttctattacgagaagaaccgaaaggaagccgagaagtacgcagccatgatcagctcgctgagaaaccggatcagccgtcgcgaggcgtcggccgacaacgcacctgaaccggcgtag

SEQ ID NO: 515461 - DNA, 942 bp, Stenotrophomonas maltophilia
atgaccgactgcgaaaatggaattgaaggggtctctctcaaggagcagcttagcggtcgccggtacgatatcgaacacgcgctcggcatgtacgcgctgggcttctgcaccttgccagcggccggcatctacgacaaggagaggctccgtgccctccatactacgatcaaggactgccacatctacttgatcgggtacgtcccgcgcatcacctacatcggtgccactctttcgaaggaaaagctgtctctccggtacaccgtcctggggaatgagtacaccatccatggagaggtgccttcggattatgaactgcgaacctccgatgggcgggactacctcgtggacaaggctgggaaggaacactggccgagatcgacggatattcaacgccaactggggaagcagtccaactccaatgagtttgatgtcaagtacatcggaaaggcatatggaaaggaaggatccagaaatgcaatcgacagattgatcagtcacgagactcttcagcggatatccttggaaggtgtgccggaaggttacacgctcacactactccttctctccatcgctccatctgctcagcttctaaccgtcattaatcctttcgccgtcgagcaggatgacggcactcgaatcgccgcgggaatcgataagctttacaacacaaccgaagatgagcgcattgccctctatgaggcgtcgctgatcagatacttctatcctcagtacaacaaagaattcaagaacagctttccctcaacggatctaggtgtcctgcaaggctgctatgagaaggatttcggcgctgtggttgcagagatctgccacgatgacattccatttcttctgaaatcggacacagttcccgcggccgcctaccacatagccagacatgagcttcacaaggaacaagaccgcagggtcttcttctcgatgtag

SEQ ID NO: 515462 - DNA, 258 bp, Stenotrophomonas maltophilia
atggcatacagcgatgagtgggaagatgagcacctgaccaagacggggtgggtcagtggaagctacaagcacgactatgggcgcggagagatacggcccgtcccggaagacgcagtcctaaccgtacggcgccacgtttacgtgggtgccatgggtgcaacgccttcggtagagatcagcgagactgttctgtcgcctgacgtggagctgatcatggagcttcgtaaaaagtttggcgaacccaccttcgcctgctag

SEQ ID NO: 515463 - DNA, 798 bp, Stenotrophomonas maltophilia
atgaccaacaacacccagcagctgtcgctgcacctgatccatcgtcagatggagaacaccctgattgagcagcgcaagctcgatgggtacatcaacgcaaccgccatgtgtcaggcggtcggcaagcgtcttgggcactaccttgagaacgccacgacggcggccttcttggcggagcttgcgaccgatgtcggaattccgacatcgcttctcgttcaagtagttaagggcggatctggcccgcagggcacctgggtgcatccggacgtcgctgtccacttggctcagtggctgtcaccgaagtttgccgtagctgtggcacgttgggttcgggagtggttgtctgggcgccagcctagcggcgctcctgcacctggcctcccgcatcacatccagcgctaccttgccaacaaggatcgagttccctacacgcacttctctatcctgggcgagttggcgatatctttgattgcccccctcgaggcccgtggttacacgctgcctgaacaaatggtccccgatatctctgagggcaagatgtttgccaagtggctgcgagaccaaggggtggacacgtccaagatgcccacgtacaagcatcgctatgcagacgggcgcgtctgcgatgcgaagatgtaccccgttggatacctccatgcattccgccttcactttaacgaggtctggttgcccaacaaggctcaccagtacttccgcgagcgtgacccggcggcgctcccctacttggataagattctgctggaagcgcctggcgcaccagggctgcctgccgcttga

SEQ ID NO: 515464 - DNA, 1374 bp, Stenotrophomonas maltophilia
atgacccccatcacccttcctcgatttgacgcccttggcggttactgtaggttcgggccggcgatgtcgctcgtcgaagagtgcggttggtacgagtctgctgatgggaagctgctaggcctggtcttgcgcgaccgacaggatggagactaccaaggggcattgtttgcccgcgatcaagccgagcgttttcgttgggtcgacggaacgtcgttctttgatgacgcagatatggcacttgccgagcttcaaaggaaagagactgttcttgctgagcgacttcagcaggatcgagcgcagggaaccgagcctccggaggcgacgaatttcttcacccttcgcgtacctcacgaaagactacatcccagctttagagctctgcgcgagagtgacggttacagcccggcacgtgaactgataacctcaatgatgcgctggcacgaggacattgatggaaattatgttgagcagctccagtccactgcattcgacgctcgccttctagaactctacgtatttgggctactagtcgagaatcgattctcgctcaaccagacgaaccacgcgcccgactacctcgccaatgatggaatcgctgagatcgccatcgaggtaaccacatgcaaccctacactagatggtcgaggcaacgctgtacctccgccgcagccgcggtcgccccaggaacagacggactacctaaagcagtacgtaccaatcaagtttggtagcgcgctaacttccaagcttcgcaagcggtactggaggctgcctcatgtggccggcaagccgctggccttcgcgattcaggacttccacgcgcccgcatcaatgacctttgctcgtactggattgagcatctacctctacggttacgactacgattggcatcgggatgagtgcggcaacctggtgattgaaccacgaaaggtcgacgagcaccgctggctagataaggtcatcccatcgggcttctttgatcttccggacgccgagcacgtaagtgccgtgctctttaacaacagtgcgactctcagcaagtttaatcggatgggctatgtcgccggaatgggttcagagaacgtgcacatgcttcatgtcggcacggccctcaatcccgacccccacgcctctgatcctattaggtttgcttttgatgtggatgaggcctatgaagagacttggaccgaggggcttgagatctatcacaatcctcgcgcgctccatccgctcgagccgggtcactttccgtccgcggtacatcaccaccttaaagaggacaggctgatgtcgaccacatgggatggcggtttccatccccttgcatcgattactcagatcctcacaggtcgagcaacgcccgtagaagaatag

SEQ ID NO: 515465 - DNA, 897 bp, Stenotrophomonas maltophilia
atggccaagagccccatcgccgaagcaaatggcgtttcttcactcttgaatcaggttctgggtgctgaacgctttccagtggacgtgaaagagctcgctcttgagtattctcgaaagcggttcccggaagagccaatttcaagcgtgaaagcgctggtagctcctggattcgaggggatgcttgtgaagcatccagtccagagcagatggaagatcgggtacaacgatcagattcagtccgcaggaagggtgcgcttcaccctcgcccatgagtttgggcactacctgctgcatagaacgcttcagactgacttccagtgcacggatgaagatatgcacgactgggattcagtgcaacgagcgatcgagtctgaagctgatgtctttgcatcttacctgctgatgccgctagatgacttcaggcggcaagccttggggcaatctgtgggaattgaactgatcctgcactgcgcagcgcggtacggcgtctctcctatggccgcagctctcaagtggacggagatcgcccccaagcgtgcaattgtcttggctgtgcgcgatggatttgttctatgggctcgttcaaatcgcgcggcagtaaaatctggtacttacctagcaccaaagcgcagtctcatcgaagtgccaagcggctcgtcgctgtacaactgttcagtcgaagacagcggcaccaccagcgaatgccctgcgagactctggtttccgaaggagcccagcgacatgccgctcaaggaacacatctatgtggtagggggaaactacggctacacattggccatcttggagcttcctgatgccattccaagatgggagcgggaagctggggacgacgatgacgatcgccttgctcccatcacgaagcctaattggcgataa

SEQ ID NO: 515466 - DNA, 324 bp, Stenotrophomonas maltophilia
atgccttccatgctcggtgagaagattaggaaccgcagaatcgctttgaatctaagccttgaggaactagccaagcgcaccgactcaagcaaggggtacctttgggagcttgaaaatagggacaagccgaatccttccgccgacaagctcacaaagctggccgcagcacttgacctaacaatggagtttttactggaaggctcgactgtggatgctggccaagcagtcttggatcaggcattcttcaggcgttatcaaaaccttgaccagcgtcacaaggaaaaggtccagaagttcatggatatttgggacgacgaagactga

SEQ ID NO: 515467 - DNA, 1104 bp, Stenotrophomonas maltophilia
atgactgacaacatcttgcaccaccctcatcagcctccgggcaaggccactgtgaacgtgaatgaccacctgtacgttgtagctgatgctacgcctacggggcgtcagattctcgcagctgcagggctgcggccggagaccgcctacgccctgatcgcttggcccgataccggccctaccagggaaatcgggctcgaagaggtgctccatctccgtcattctgaggagccttctgcattcttcgctgtcgagtccgatggggtttcctacttcatgctcgatgacgagcgctttgcgtgggccggcccgttgactctggatatgatccggcgcatcggtcggatcagcccggatagggaggtatggatcgagcggcgggatgtccccgaccagctcttcccgcaggacgcgaccttcgatcttgctgcccctggtctcgagcgcttctacaccaaagtggcgcgtcgtacctggttcctcgacattcagggcgagcgcaccgaatgggacaagcagtttgtaccggtacgggaggctatggcagcggcaggcgccgacttgaccaaggagtaccggattctgttcaaatttgtcggcggccagcgcgagactgtacagctgagcgacacgcttgacttgggtcgcgaaggaatcgaaaggctgtggtaccggccgcgcaaggtgaacaacggggaggctgccggaacgaccaggcgtgcgttcagtttgctcgaccaggatgtggaattcttggacggcactggctggggctggcagaccttggacgaaggacgccgttggctcatcgtggactcatatcctctccccgctggttacaacttggacatgtgcagcatcgcgatggaagtgtcctctcagtacccgactgctgaaatcgatatgttctattgctatccgcctttggcgctttccagtggcatggcgctcgctgcgtgtgagcacgttgaaacgatcaacgggcagcagtaccagcgatggtcgcggcaccgtgatgccagcgccccttgggtcccgggcaaagacaacgttcggactcattttggtttggtcgaagagtcgctgggccgcgaggtgggggcgtga

SEQ ID NO: 515468 - DNA, 1401 bp, Stenotrophomonas maltophilia
gtgattcggggaagcaccctggttcttgcaggcgctgattttcagcgcctgcaagaacaccttttccctggagacgggctggaggccgctgcggttcttgtctgcagtcgcgtaacgaatggtggtgtgaagctcttggttcgagagctggtcaccgtaccccatgaggagtgcgagagaagcagcaggcacttgacttggccgggagagtacatcgatatggccattgacatcgccgaccaggacgatctttcgctggtatttattcactcccatcccaacggttacccagaattctctaatctggacaacgagtctgacggtgaaatcatcccgccagtgtttgcgtcgcgtcgcaaatcgcatgcgggagtgacagttcacggcagcgcaatcatgatgccgtccggtgcaatccgggcaaggctgtatggcggtgatggaagagcttcccctgatacggtcgacctcgttgccgtttacgggaatgacgcctccttcttctggggcgatcagcccttgacggccgatagacctttagccttttcttcccaaatgacggctgagctcgggaacctgagtgcagccattattggtgtatctggcacgggtagcatcgtagctgagcagctaatgcggatgggattgggtcagctgatcttgattgactccgatcgcgttgaggaaaagaacctcaacaggatcctcaatgcaactccagaccacgctcgtgatgcggtactgaaggtcgaggcctttacagaggctgcatcgatcatcagaccagatatggacgtgatcgctgtgccgagagagattggatgccgagccgcagtggaggcgatcgcccaggcagatctcatcttcagctgcgttgacagcgaggaggggcggcacgtggccgatcgagtcgcgcaggcatttcttcagccactgtttgacgtaggggtcactatccccgtaagaaagccgggcggagtgaccaagatcgctagcattgctggtcgaattgactacgtgtatcccggcagtccgacgctatttgatcgaggcgtgtacagcgcatcggggcttcgcgcggaggagcttcgcaagcatgacaccagagcctatgagcagcaggtggaagagggctacatgcctggagccaatgaggaagctccctctgtgatctgcgtcaacatgcacggagcgagtgcggcagttctggaggcggttgcaaggctctacaggtatcgggctgactcgaacgaaggattcaatcgtactgaatttgatctcgttgtcggagagcacatgaaagagcccatccaagacctagaagcacggaacttggtgcgcctcggaagcggcatgctgaagccacttctcggcctgcctagccttgaggatgatgcatga

SEQ ID NO: 515469 - DNA, 774 bp, Stenotrophomonas maltophilia
atgacgctctcccggattacatcccgcaccctgatcgccttggccaccctgactgctaccagctgtggaaatgcggctgagccatcgaagccgaaggttcttgagaccatcgcgaagcagggtgtggaggtcatgggcgagtttcccgccggtacccaggtccgtgcgtttgcgggttcctccggcggaaacccgctggccatttacatgctcagcgatggcagtgcggtagtgggcacgcgcgtgagtgccgacggcaaaatactggaccaggaagcacttgcgcgactggtggcaaagccgatggccgatagcgcgatgaagcagcttgaagctgcgtcatggattctggatgggtccaggaacgcgccgaaggtcgtctacgtttttacggacgcaaactgcccttactgccatcacttctggcaggcggcgcgtccctgggtggacagtggcaaggtccagttgcgccacatgatggttggtgtgatccgtgaggacagcgccggcaaggctgctgcaatcatgaccgctccggatccgtcggctgcgctgaggcagaacgagcttgcggccccgggccgtggcacccttccactcaacgcgattcccgcacgcattcagcgcgaactggaggcgaatcagttgctgatgacgtcccttggatttcaggggacgccggggatcgtaacgcgcgatctggaaggcgctctgcggaaggtcaatggaatgccgcgcgtgggagcgatgtcagaggttcttgggcctccgtag

SEQ ID NO: 515470 - DNA, 522 bp, Stenotrophomonas maltophilia
atgctgatgagcttcatgatgacagcagcgccgttggcgatgcacatgcatgggcacccgcagcaggcttccaacaccagcctgcaatggcatgtcattgccatgtacctgcccagctttgtaacaggtcgcctgatcgcgcgatggggggcacgcaacattgctgtcatgggcctgctgcttacgggtgcggccgcaatggcgggattgcagggcctggagatcttcgacttctccttgagcctggttctgctgggtgtgggttggaactttggcttcctgggggcatctgcactggttctcgagtaccgcgctgatgcggatgccaagcggatccaggcgctgaatgacttcctgatcttcgcaatgatggccggtggttcgtttctgtccggctggatcctctcccgcttcggctgggggacggtgctttggacctcgttcgtgccgctcgccttcgcgctcattgcgctgatgctcttttcaaccgggtcgcgcaccgccgaggaccgcggcggctga

SEQ ID NO: 515471 - DNA, 435 bp, Stenotrophomonas maltophilia
atggaggaggtctatcctgtctgctcaccgcagctgctgattgatcattggcgcctggagaagcccgccgacctggcccaagaaatgctcatccacgacttgtccatggatagccacacggactttcccacgtggcacgcctggttcaaaagcgccggcctgccagagggcggcagcagtcgcggtatgaagatcaacaactccgccgccgtgctgcaggcggcgatcgaaggccacgggattgccctggcccgaagtgtcatggcgcacaacgacctggccagcggccgcctcgtcaggcttttccccgagatcagcttccagtcaccgctggcctactacgccgtgtaccggccggaatgctccacgctcccccggctcaagcgattccgggattggcttttcagcgaagcgaatgatccggcatccaagtag

SEQ ID NO: 515472 - DNA, 732 bp, Stenotrophomonas maltophilia
gtgtccatgaagggaaaggttgcattagtcactggcggccgctctggcattggattggcgatcgcacaaaagctctcagcagacggtgctcgcgtcttcaccgccccgcgtcgtgcagacaccgtctatgaaggcattgaagcggatttcgcggatccagcctctgcacaacgcgtcgtctcaaccgtgattgaccaggcagggcgtctggacgttctcatcaacaacgcgggcgtcatggaggaagcgcttgtcgaagagatgtcctttgaggcctggaaccgtacgctggcggtcaacctcagcacccccttcatgctgatcaagtcggcccttccgcatctccgcagccatggcggaagcatcgtcaacatcagttccgtggaaggctcgggcgcaaatcccaggcatgccgcctacggggcgtccaaggcggcgctcaacgcgctgacgcgtgccgttgccatcgaccatggcgtggaaggaatcaggtgcaacgccgttgcgccgggttggatcgacacggacctcaacaccaagttcattgcttcgcttccggaagcggaagaattcaagcagcggattacgaagatccatccgatcggccgcacaggcaccccagaagaggtggccaatttggtcgcgtggctggtgtcgccagaggcggcgttcgttacgggtcaggtctggaccgttgacggcggacggacagcaaagctcagcctaccttga

SEQ ID NO: 515473 - DNA, 615 bp, Stenotrophomonas maltophilia
atgtgcaatgccgcgccagcgcgtgcggcctcgccaaggggtaggggtgattgtcccgaaatcaaggggttgttcggcagggcttgcagccctgcacctgcagaggccgatgcaacagcaacagcaacatcaacagcagcagcgggctatccgtgggatggcggggcggtgtgggttggcaggacacgccgtgaacccatccatgggggctcgatggcgccatccatggcgccaacggtcctgccaacccacaccgccccgcctctgacaggttcacgcggctgttggcaggtgtcgaccttggtcgacacctctgtcagatatcgaaataaaactggggtcagatccgttttccgcaggaaaacggatctgaccccaagagaccttccggcagatcgcaggaaactgtcgaaggcggggtgggtccggttgagggggcgtgagccgcatggatgcggcgaccgagcttacatggacgtacttgcagcgtccccctcgaccggacccaccccgccaacccacggatatccggcttttgccgttgcttcggccgttgccgtggcttcgacgggtgccgggcaaagcccggccgaactacaatcccgctcatgctga

SEQ ID NO: 515474 - DNA, 585 bp, Stenotrophomonas maltophilia
atgcagggcctgctcatcgaccagggtcaagcggccttcggcggcggcttgggccttgagttcgcggaagcggtcggcctgggcctgggcgtgctgggcgttttcggcccgcaccctctggatgcgttcggcgcgggggctgcgcttgccccggcgggaggcagcggtggcggtgcggcccaccttgggctccggctggcggtccagctcggcggccgtggcaaagtcgcccacggtgacggcggccatttgccggtcgagcaagctccggtggtccacgcgggcggacaagcctgcacgtttcaggtgccggttgatggtactcgccacttttgcgcgaacttcctcaacggcaccggttttgcggtcgtccagttcacgggttttcgcgcccagcccggtcggctccattcgccgcgtcgtcgccaaaatatggacgtggtggttgcgctcgtcggccctcttatccggggcatggatggcgaacatggccgcaaagccgaaccggtccaccaggtgggcggtgaggtcgcgggccaagtcagcgcgttgctcgtcggtcagctcgtgcgggagcgacactag

SEQ ID NO: 515475 - DNA, 171 bp, Stenotrophomonas maltophilia
atggatggcgccatcgagcccccatggacgggtttacggcgtgtcctgtcaacccacaccccccgccatccctcggatagtccgctgttgctgttgccgttgctgtcgcttcggcctctgcgggtgcagggcgcagccctgccgaacaccccctacttccgcggcaggtag

SEQ ID NO: 515476 - DNA, 264 bp, Stenotrophomonas maltophilia
atgacccagctcccaccaacccccagcgccgacgtgcccccgctctcactcgaaacggccttgatgctgtccgagtccgaaaaccccgagatggcggccagcgcctgcctgcgctgcgcccactcaacaaccttaaccctggcctggccgccgggggacgacgagctcccgaaaccgccggatttggttgtgttctgcggacaaatgcaccgggacattaccgcaccggtccagcgctgctcggggttccagcccagcccgtaa

SEQ ID NO: 515477 - DNA, 699 bp, Stenotrophomonas maltophilia
atgccccgtcctgccgctcacgcggccggtcagcaggcgcatcggtccaagatccaactaccggccgctggccactcccgcgtcaccggcaacgggacgaaggaaagcgaacaagtcgcccggctggccaacctgtggctggcccagttggaaaaagacattgccgaactgatccggcgggccctggcttgggcacagaaccaccgcgagcctttgccccgctccttggctcggaactacctccaagccgagggcgaagcgcagttggccaccgtcatgcgtgaccaggcggccaccgagctcaagcaagccaggcgcgcccggctcgatgcccggtattaccgcgaccaaggcgaaatcggtctgaagggcaaggacaagctagcccagcgcttgggctggacgcccaagatcctgcgcgacctacaggacgcggtgaagcagtccgaggaaaccgtggtccacgccaagcaggccgagcaacaggccatcaccgcccaggaaaccgctaccgccgaggccgagcgccaccggaaccgcttgatggacggcttcttgaaggcccatccggaagataacgtccagttcccgaagcagtgggcgccaaggtcaacatttctacctttgccgggtagccgccccgatgcggaacctactcttgagcctcgtcggctcaagaaatcgccgagacccaaatag

SEQ ID NO: 515478 - DNA, 855 bp, Stenotrophomonas maltophilia
atggcggaattttcagaggcgcggaagggatttcatgccaagctgttggaagcgacgctaacaataaatagcgccggtgtggtgagcaacgctgacggcagcaacactacgagtaaggcgattgctaggggcatcgctgatttgctcaaagctgaaacagttggcgagcgtatcgcgggtcagacgtcgggaaatcagtttgaaggaatctgtgcgggtttcgtgagagaaacattccttaggcttggtcaccttcgcccaggcatttgggacgtgcatcaagtatctggccggaaccgcttggaaatcgctcgttatgagcaatatgcgcacctagtcgcgctagacagagcggctaaagcagatgctgaacttgcagctgcgctgggaagcgactacacgattacacctgatattgtcgtggtgcgcgagactgaagatgacagcgctattaactccccggcgcttctggttgatgacagtgtcaccaccttggcaagtctgcggaggaaaaacggtggcttgccgctgcttcatgccagcatttcatgcaaatggactattcggagcgatcgagcgcagaatgctcgctctgaagccttgaacctagtgcgtaatagaaagggccgcctccctcatgtcgtggtcgttaccgctgagccaaccccaagccgccttgcctctatcgcattggggacgggagatatcgactgcgtgtatcacttcgctctgtatgaactgcaagcgacggtggcggcattaggcatgaatgatgctgcggacttgcttgccgtaatggttgatgggaagcgtcttaaagatatctccgatttgccattggatttggcggtatga

SEQ ID NO: 515479 - DNA, 894 bp, Stenotrophomonas maltophilia
atggctggcttcggccattctgctttggtcgaactggagccgcccgcctgcgcgacactgcgcctgaatcggccggactggaatgtcgtcgagggggaccttcgcgctttcgacggacgcccttatcagggtgttgaacttttggctggtggagtgccgtgtccgcctttttctaaggctgggaaacagcttggtgcggatgatgaacgtgatttgttccctgaggctatccgtctggtagatgagtgccgtccgaaagccgttatgcttgagaacgtgcgaggattgctagacgcggtctttgatgactatcggaacaaagtagaaaagcagctcaaaaaactgggctacgtgccacgctggcggctgctcaatgcttccgactatggtgtttcgcagctgcgtccacgtgttgttttcgtgggtgttcgtaaagatcttgccgatggcttcacttggccggagccactacaaagtgagccgtcgactgtgggccagttgttgcatgacttgatggcctcaaatggctggcgaggggccgaccgctggcgtgagcaagccaatgctatcgcgccgacgctggttggcggctccaaaaaacatggtggccccgaccttggtccaacccgcgcaaagctggcgtgggcaaacttgggtgtcgatggcatggggctatgggacgatgcaccaccccgtgactttgtgggcatgccccgccttacaacgcgcatggcggcccgtattcagggcttcccagatgattgggagttttcgggtcgtaaaactgctgcttatcgtcagattggaaatgcattccccccgccagtagctgctgctgttgcgcggcagatttttgcagcattgtccgtcaaacgcatttatagggtggcgtga

SEQ ID NO: 515480 - DNA, 630 bp, Stenotrophomonas maltophilia
atggaccgggggggcagcagcggcgacgctgtgaaccatgctgggccgtcacggggtcgttccccgccggcacacccgcagccgcaaggcacctcaaccgcgggccgaccatctcgttattcctggccctggcgggtggggggctcgtgcccagcgacccgcaaaacgggttgcccgcccaaaacgccacgcgttttgaacaggcgaaccgaaaggccgaggccgacgccttcggcgacggtcctcggcagccggggggtcgcaggggggcgcgctgccagcgcccccccgttgctcaaggccgccgttggcgcctttcgcggccgaggggtcactaccaggaaaacacgcgcacgggcttcgtcgctgggcgggctgcgcttgggctcaatggcaaccgcaacagcacgggcggctacgccgcccttctggccctcgctcccgctcggctccccctgggggaaaggcacgaggcggcgccggtgcgccgccgggcttgcgcatcggcggaaacgcgctaaaaactgggaatggacaaaaccactcgccgcgcggtcgccgttgccgctgacaaactcctcaaagccgccggttacgacacaagtggcaaaagccttcgccggaccatga

SEQ ID NO: 515481 - DNA, 603 bp, Stenotrophomonas maltophilia
atggagcttttccaggaggtaggccgcttgcgcggcgtcaatggtgccgccaaggtcgatgacggaggcaactggaagtatgcggagatggtgatcaatgccgaggctccgatggttgcattcatcagcgacctttacccattcttcccgcagtttcaggagatcggcgcaaaccagttcaggctgacgctgtggacgaacacgcccgcgcgtctgcagggctgggcctacgtgttcgatcgccccgccaacgaggatgcgcagtatctggcattgtgggatgcgaacggccgtctgacttatgcgctgggcgcaaagcccatgcggatcatcggtgtgggcggcgtctttcccaatggtggtatgggagagggcaggttccctgacttcaccggcaagacggtcgccggggtgatctgcgcccctgccaccagcactttccagaacagtttcaccgtgatgggaatcggggacgggcagggcgtcagtgggaaacacggcctgttcggtaacgccatcaccattccgaagatcggaacaggcggctcgccaaatcaggccgtggtcgggatcgtgatggccgtggatgtgaagaactactga

SEQ ID NO: 515482 - DNA, 2607 bp, Stenotrophomonas maltophilia
gtgctcgatctgctgcaggaccatgaaggcggattgtgggtcgccctgctgacccagggactggcctacctcccgccagactggcgccgcttctcgatctggaaccagctcgatggcaagccgctggacagccagtacctgctgggcgcggccagtgatggccagaactactacgtgggttcggcgcacggcgtgtatcagctggacgcacatggcacgttgcgcctgctggccagcgaccgcgagatcggcagcggtgcggtgtggtcggtactgccgcggtcggacgggcgcctgtggctggggcgtgccggccgcatcagcgtgtatgacccggctacccgcgcgctgcacgactggcacatcggtggaggcgccgatctgcgccagcgcatcgacctgatgcggcaggcacccgatggcacggtctggctttcggtgatgaacctgggcctgcagcagcgcagtgcggagggccgggtgctgcgcagctatcctctcgacgatttccgcaaggcggccgactcacccatcgagcagatccgcttcgatgcccatggcaaggcatgggtgatgggcgacatgggcatctggcgtgagcaggccggtcgcttcgaagcggtgccgggggtctcgcgcgggctgatctacgacctggtgtgggtggatccgcagcagttgtggctggcccgccagggcgcgctggagcgctaccagtgggatggcatgagcctgcgcctgatccagcgcattgatggaagcgccggtgtgccgccggtcagcatggggggcctggcattggccgacaatggccgggtgtgggcgaccacgccgcgcggcctgctgcgctgggacccgaaagcacgacgcctgcagttgttcaatgaacgcgatggcctgtccgatgccgagttcaccagccggccgccagcggtgaatgccgatggtcgcgttctggccgttgcccagaccggcctggttgcattcgacgtgaatgccgacgacgtggtgctgcccgggtcgtcgctggtgattgccgaggtgcgcgtgcgccgcgacgatgcacgcggctggcagccgctgccgaataccggcaccctgctgctgggaccggatgatcgcgacctgcagatcgatgcacggttgttgtcgtatgccaatccccagggcaaccgctaccgcttccgggtacgcgggtatgaccagaactgggtggagcagggcggcgacggccagcgcacgctgtcgcgactgccgaccggcagctacgtcatcgaagtgcaggcggccaccgccaatggtgcatggacgccttcgcagcagctgcaggtgaaggtgctgccaccctggtggcgcagcggcatggcgatcttcggctacatcctgatcggttcgctgctgctgctcgtcctggtctggtcgatccgtgcgcgcctgcgccgtcgccagcaatggcagctgaccgtgcacaagcaggagctggccgaacaggcctcgcaggccaagagccggttcctggccacgctggggcatgaagtgcgcacgccgatgaccggcgtgcttggcatgagcgagttgctgctggccacaccgctggacccggtgcagcgcagctatgccggctccatccagcaggccggcagccatctgctgcggttggtcaacgatgcgctggacctcgcgcgcatcgaagccggtcgactggagctggatctgcgtccgttcgacctggccggactgctcgaccaggtgcaggcgctgatgcagcccatggcgaaacagcgcaagctggatttccagcgtggcgacgatccgcccggcccgatcagcgtcagtggcgacgagatgcgcgtgcggcagatcctgctcaacctgctgggcaatgccatcaagttcaccgagcgcggtcatgtcggcctggccgtgcacctggaagagaacggcggcggtctctgcttcgaagtgcacgacagtggtccgggtatcaatgccgagcagcaggagcggctgttccaccgattcgaacaggcggaggggccgcgcacggcctcgcgctatggtggaagcgggctgggcctggcgatctgccaggagctggccgtggcgatgggcgggcgcatcgaagtggacagccagccaggcaagggcgcgcgtttccgggtgcggttgccgctgccctggacccggcaggcagccgccacgggcgaagcgccggcactgccgatgctggcgccactgcgcatcctgctggtggaggacgatgccaccgtggccgaggtcatcgccggcctgctgcgcagccgcggccatgaggtggtgcatgtgctgcatggcctgggggctttgtcggagatcgctaccgacggcttcgatgtcggcctgctcgatctcgacctgcctgcgctggacggcactgcgatcgcccgccagctgcgcaccctgggctacgaactgccactggtggcggtgaccgcccgctccgatgcgtatgccgaatcgcaggtgctcgctgccggtttcgatggtttcctgcgcaagccggtgaccggcgacatgctggtggcagcgatcatccaggctcgcgccaaacgacagaccacaacttga

SEQ ID NO: 515483 - DNA, 1230 bp, Stenotrophomonas maltophilia; identical to SEQ ID NO: 509197

SEQ ID NO: 515484 - DNA, 627 bp, Stenotrophomonas maltophilia
atgatctgccagagcctggaccagaagtccacgcacacccgtttcgttaccgtgcgcttcggcaacgtgctggcctcggccggcagcgtggtgccgctgttccgcgagcagatcctgcgcggtggtccggtcacggtcaccgatccggaagtcacccgctacttcatgaccatccccgaggcctgccagttgatcctgcaggccgcggcctcggcctcgcacggtgcgatctacacgctcgacatgggcgagccggtgccgatccggctgctggccgagcagatgatccgtctggcgggcaagcagccgtacaaggatgtgcagatcatctataccggcctgcgtccgggcgagaagctgcacgagacgctgttctattcggatgaggactaccgcgcaaccgcgcatccgaaggtcctcgaggccggcgtgcgcatgttctcgcgcgatctggtgctgggcaacgtcccgcgcctgcgcgaggcggtgtgcagctacgacaccgaaaccatcaaggaagtcctgttcgcgacgatgcccgagttctcgccaatcgaacaggatgcttacatttcatccgctaaagtcgtgccctttcccgcacgcgaggccaacaggcaccaatga

SEQ ID NO: 515485 - DNA, 735 bp, Stenotrophomonas maltophilia
ttgagcacggcgctggtgcgcgcgttgcatgcgcttttgccggaaacggccgtggtccgcgttggctgggacgacccgcagctggggagtggccgagggggctggcccttgcttgcgattgacagcgctgcgtccgtggagcccgccaccggcgatggccagcacggctgggagtatgacggtgcgcggctgctgctgtcggttgcgggcgcggtgccttcacccgcgtggtgggggctggcccggcaggcgatggagctggcgctgcagcgcggccgccaggccggccagatcaaggcactggaagaggccgaacggctgcagcaggccctgttccagattgcagatctggccggtgccgacctggaaatgcccgagatgctgcgccatgtgcatggtgtgctgggcacgctgatgtatgccgagaactgctacatcgtggaatacgacgatgtgcgcgaccagatccgcttcctgtacttcgccgatcaggtcgatgacttcgtcgccgatcccacgcagagccatgacgccagcgagatgccgcgcagcctgaccgtggcgctgttgcgccatggcaagccgctcagtggtccctcgcgcagactgctggcgcaggtgatggaacaggagcacgacccgcagcgtgggcccgaaagcctggactggctgggcgtgccgatgctgcgcgacggccgggtctgcggcgccatcgtggttcagagctatgaatag

SEQ ID NO: 515486 - DNA, 468 bp, Stenotrophomonas maltophilia
atgaccgcgatgcgccagacccgacgcctgttgcccgtgctgtgctgcctgcttgtggccggtaccgtgcaggcacagcaacagccattgaccggacagatgctcggtggccccccgctgtcggcaccggctgcagcgccgatgcaggccgagccgcttcccagcctggacatcgccgctccctccgcatccgccgggggggccacggcgcaagcgacgaccatcgcaaacgacatcgcaccagcatcgcccgcagcaccgcgcgcgcgcctgcccagcggcgaggccacccgcaatctgttccgcctgcaggcctccgggcagcaggccggccagcgcctgccgatcctgggtgaccaggccacgctgagctatgcgcgttacctgaagagctttgaacacgagatcccggacttctttgagaccgatgtctcccggtccagggacgcctcctcctccggacgctga

SEQ ID NO: 515487 - DNA, 633 bp, Stenotrophomonas maltophilia
atggcaggcaagggccggaaggacaggatcgcgcaggagatcggcctgttcatgcagcagtacgcgcgcaaggcgcagcgccatgcagaaccctgcgaccggctgtacgaccggggctggaagcgcggctcaagcgcttgccgccctaggaagtgggtaggctgctttccgcagagcatgacgaggatgagcagccccgttgcatgggccaggcgcgccattgtcgtgacgttctgtagcgcgctatgcgcctgcggtatggtgatggacagttcgttcgacaccctgcaggaggcgcttgactccgacagggtgaacaaggggtggattcccggctgggtgccgcaagcggcgaccgatctgcgcgaggtccatgacctcgactccaacaccagcgcgctggccttcaccaagcccgctgcgataccactgcagctgcctgcggattgccaggcgaccacattcaacaacagtgatcctgttgcattcaatcgatactggtggcctggcaacgggacgctcagtgcgtcgtaccgcgtttttcgctgcgcgcccgaatccggaaaatccgtcttcgtcgccatcaacaggaccgaagaccacgtgctcttctggcgaacctacgcgcgctga

SEQ ID NO: 515488 - DNA, 231 bp, Stenotrophomonas maltophilia
atgcatgtcaagaccttcagggccgaactcgtccaagaggtagagcatctttcttctagacatcctcgccctctcgtcccgaagaattgcgcgacgatgttttttcataagcagtctgaattgcttggccgttgtaacaccgagccgcgcaagctcatccagcagttcttcgggctcgaaatcaccatagtcgtgccggcgatggaacagactccctactatttttcttag

SEQ ID NO: 515489 - DNA, 297 bp, Stenotrophomonas maltophilia
atgctggccaggctgatcagcagcgtcgtggcaagcaggatcagcgacaccaccatcctgcgcgccgtcgatgcgggttccggcgacggcgcgctggcccataggccggcaaacgtggccagtgcgcaggccgccagcaggagcagccccgcactccgcaactgcgcggcgccgtcggcaacgggcataatgaactcgcctggcgagaatcccgcaggcagcagcaacaccaggacggggagcagacagctgccggccagcgccaccgcgccggcgatgccggcactgatgaggtga

SEQ ID NO: 515490 - DNA, 675 bp, Stenotrophomonas maltophilia
ttgtggctgctgttcctcgcgccggccgcgcaggccgacgtgaccgtggaaggcacgcgggtgatctatgcggcaggccagcgtgaggcggcgctgcgattgaagaatgacggcgaacgcgcgtcgctggtgcaggcgtgggtggccgacggcaaccttcagcaggctccggaagcctccgcagcgccgttcgtgcttgatcgcccgatgctgcggctggaccccggtgcatcccacgcactgcggataagaggcatcgccccgcagctgccgacgggcgaccacgagcacctgtactggctgaacgtggtggatgtgcccgcacgcgaggccaaggcggatgacaacgtagtgcaggtggccatccgcttccgcatgaagctgttgtaccgcccgcaggggctcggggcgccggtgaatcctgacggccaggtgagcatggcagcaggcgcgggcgggctggcgctgcgcaatgccgcacggcattacttcaacgtggcgggcatgacattggtctccgcctccggcgagcgggcggtggacgccttctacctggcccccggtgagagccggatcttggcgctgcccgaagggtttgccggtccgctgacggcggtgcgctatgagtgggtggacgatgatggcgtgctgcatgcggtgacgcggccgctctga

SEQ ID NO: 515491 - DNA, 939 bp, Stenotrophomonas maltophilia
atggcagcctcctgcagtggcggtggcggccacacggacttccaaccacccgcgctggtggagttcaccgcgcgcgacgttcctgtgggcgccggcctgaccccgtggctgcccgtcaatggcggcgcgtccaccaacgagttccgctgcgatgcggacgcccccatcgactataggatggagacgcacggtgggttcatccgtgagcgctatcacgaaagcggcgcagagtatgtagtgtatgagaccggcgttgcgggggtcggcatggcgttcctggcggaattcgaacgcagcacccgcgggcgcccatcagcaatgggctacgacgaggtggtgctgcatgccggcgacagcggcaccgggccggtgggggcgcggctgaaggtgaagtacatccgcaccggcaacatcgcctacggcagcgccaccagcaagcgggaaatggtgatcgagtcacgcctgtatgaaggcggcgccggcccactgcggcatcagctgtgggtaggtgcaacgaccctgaaggtgcaggaccgccccagctgccgcatgcgcacgcaggaggtcaacatggggttcgtgccggtggcggcgttcaccggcgtgggatccatcgccggcgaacgcagctatgagctggtgctcgactgcgaagccggtgtcgggcgggtggactatcaggtggttcccaccacggcggtgctggatgcctcgcagggcatcgccgaggccagcggcggggtggtcggggtgggctatcagttcctcaacggcgatggttcgccgatgcgcttctatggttccgatgagtttggccggggctcggccaacgccgagatcctgcgcaagacctttggtgtgcgctatcggcagacccttccggccatcacgcccggccccgccaacgcggggttgaccttcagcctgaccttcccctga

SEQ ID NO: 515492 - DNA, 756 bp, Stenotrophomonas maltophilia
atgacccgtcgactggcagcctgcggcatgacggtggcaagggtgctcgtggcctgcctgctgctgatcagcgtgggtgacgccgcagcgcaggttgcactgcccagcaccagggtcgtcatccgggccgaacagggcgcggtaaccgtaccgcttcgcaacatgggggaggtgccggtgctggtacaggcgtggattgccgaaggcgacccgaatcaaccgccggagcagtcagcggcaccgtttgcaatggcgccaccgttgatgcggcttgaccccggcaaggacaagccgctgcgcatcagaacgctggcaacgctcgcgcccgccgatgcgcgcgagcacctgtactggttgaacgtgcacaccatttcatcacgttcggaactcgcgcaaggcgatcggctggaattgccggtgcgcagcatctacaagctgctgtaccggcccgcaggccttccggcgccaagcgtgaagcgggcagaggcggtcgcggtgcagttgcagcgcgagggcgcggcgcgatctctggtcgtgaccaatccgacgccgtactacctgaacctgggcgacgtaacgttgctgcacgcgtcgggcgatacccgcctgggcaacccgcatgtggcaccgttcggcagcgtcgcgattccgatacccggcgatgccccggacggacgtttgagtgcacgcttgaactggatcgatgatgacggccgcctgctgcccatcgttcgcgagctgggccacggggggtag

SEQ ID NO: 515493 - DNA, 966 bp, Stenotrophomonas maltophilia
atgatggcggtggttgccatgggtatcgctgctcctgccatggcgcgttgcgacttcggggagcctggtcgcgcgaccctcaccggcgctcggctcacagtcaatggaactcaggtcggcaggccggtttcgccgtggtacaacctgtcgtccgtcgatgatgttggcggctgcaccgactctgggacgatgtatgtcaccggccgtgccaccacccaggggagctacacagagggccggtctacctattccatctatgagacaggcgtcccagggctcggcttcatcatggcattccggagcgaggcgcgggagaacggcatcgactatcagccggttgttgcaggcacgaccaactcaaaggtcttcttccggcattggctgacgctggatctgagaatccgcttcatcaagattggcgatattccagaaggcaccctgattattccggaagtggctgcggcggacttcattctgcgcgacttcagcagcgtgaccaccggcaataggcttctgctgggcgcaacctcaatcgagggaatttacagaaagctctgctaccccaggaacacttcggtgaacatgggccgtgcgctgcagacggagttctccacgcgttacagccacagtgcgccgcgtacctttgatatcgtgctcgactgtgaggagaaggtcggtgatgtcctgttctacctggaggaaaatgcggccagcccgctgcttgatcgtgatcggggattggttgaagtcagcggtggtgcaaagggcatcgcccttcagatgacggacgtgggcggggcggcgatcccgttcgattcgatcaggtccttcggccacagcggcgatgcggccggcgagctgcggcgcacgttcgaggcgcgctatgtgcagaccgtcggtgatgccgatgacatcgtgccaggcaacgcgaatgcctccatttccatcgtgatggcctacccatga

SEQ ID NO: 515494 - DNA, 2583 bp, Stenotrophomonas maltophilia
atgactcgacatgccatgcacaactcgctctgcctccgcccattggcggccgcagtggtggccgcgctgctgccgatgtcggcatgggccgcgccgaaggtggagttcaacccggatctgctgttcggcatgggcagcgagcacgtggacctcagccggttcgagcgcggcgatctgctgccgggcacctacaatgcggatatcagcatcaacggccaggtcgttgaccgacgggatatcgtggcccgcgttgcccaggacgatgaggtgcgcatctgcttcgatgcagcgctcttcgagctgatgggcctggacgagaagcggctggaggccgagcgcgcctctggcgacggtgccgaaggcaccctgctgccgctgccgtcggagtccagttgcgaacgcctggacgccttcatcccaggtgcaacgagcgagttcgacgttggcgagcaggcgctgctgatcagcattccgcagatctatctggcccgtaccccgcgcggctgggtggacccggcccgatgggacccgggcatcaccgctgtcacgctgggctacagcctcagccacgatcgctatcgctacgagagccgggaaagccagaacaccagcatgaccgtggatgccggcctgaacctggggcaatggcggctgcgccacagtggctatctgcaccacagcaacgacgatggcatgcgctacgcagcggggcgcagctacctgcagcgcaacgtgccgtcgctgaatgcgcagttgaccgtgggtgagtcctccaccagcggcgacatgctgcagggcgttaactaccgtggcgcgaacatcaccaccgacccgcgcatgctgccggacggtgccagcaatttcgcacccgtggtgcgcggtgtcgcgcagaccaatgcgcgggtaaccattcgccagcgcggcttcgtgattcacgagaccagcgtcgcgccggggccctttgagattgacgacctgcagatctatggttccagtggcgacatcgaggtggaggttaccgaggccgatggccgcatcgagcgcttcgtggtgccgttcaccgccatgccgcagctgctgcgccctggccagcagcgctacagcatcaccgccggtgaactgcgtgacgaccagttcgcgcagaagccgcgcttcattgaagcgacgctgcgccggggcgtgagcaacaggttcactggctatgcgggtgccaccgcagcgtcgggctataccgggctggtgctgggcggtgcctggtcgacgcccatcggtgcgttctccggcgatgtcaccttcagcgacgcgcggattccgggcatcaacggcggcgtcgagcgtcgccgtggccaatcctaccgtgttgcatacaacaaggcgctgttcgacgacaacaccaacatcacgatggcggcctaccgctattcgaccagcgacttcctcaccctggccgacgccatgcgcctgcgtggcaatgtaggccaggaggctggctatgacatcgtggggcgccaacgcagccgcctggacctgaccatcaaccagcgcctgcaggacggcaagggccagctgacgttcaccggcagcaccagtgactactgggaccagaaccgacgccagaccagcttctcgctgggctatggcagccgcatcgggcgcgccagctatacgatcagcgcgcgtcgcacgctggaatcgtcgctgttctccagcgacgcggcgaaggccaccaacagcgtgtacctcagcgtcagcgtgccgctgggcgtgccggccagcgcgccgcgcctggatgtgaatgcaagccgcgacagcagcgggcgcaacggctacggcgtgggcgtgatcggatcactcggcgacaccggcctgggcagctacagcgcctcactcaatcgcgacggcgaccgttccagctacggcgtcagtgccaactatcagttgccggtggcacacgtcaccggttccttcaaccgctcaacgcagagcagcaggctctcgctgggcgccagcggcggcctggtggtgcacggtggcggcatcacgctggcccagcgcctgggtgagaccgttggcctggtgcatgtgccgggtgctgcgggcgcaaaggtcgacagcgccaccggcgtgaagaccgactcgcgtggctatgccgtggtgccgcacctgagcccgttccgtcgcaacgagttgggcgtggaccccagtgacctgccactggacgtcgaactcagcgccggttccgtgtctgccatccccaacgcgggtgcggtggtgaagatggtgctgccgacggccgtgggccgtaacgcacttatcgaagcgcggctgccggatggcactgcgttgcccttcggcaccgatgtgctcaatgcacagggcgccgtggtgggcgtggtggggcagggcagccggctctgggtgcgcggcctggatgagcagggtgagctctttgttgcacatggggcaggtgagggggcgcagtgccgaattccttatgacctgcgcgacagcccgagcgccgatcttctggttgcggcctgtgcgccgtcgctggctgatcaggcgcagcttgcggctgattga

SEQ ID NO: 515495 - DNA, 750 bp, Stenotrophomonas maltophilia
atgcctttcatccatcgaacactgatgtgctgcgcgcttgcggcgccgacactcctggctagtgtcggggtcgaagccaaggtcgtggttgaatccaatcgcgtgatttacgcggaaggcaccaaagagctgagcgttcggacgcagaacgcaggcagcggtccggtgctggtacaggcctgggtgagcgaatatggcgcccgaacgccgccttcggagagcaacgctccgtttgtcgtactgccgccggttgcgcgcgtggatgagggaaagcaccaggcgttcaggctgcgcgcgattggtggagacttgccggcggaccgcgagagcgtgttcaccttcagccttgctgaaatacccgctagtccggtaggcgaagcagcctccagtgcggttgtaaacgtaatattccgcaatcggctcaagctgttctaccgcccgcagtcgatcagcaagcttgactctgcctctgccatcgacagcctccgctggtctgtagtgcctcagggtcacggttgggcactgcaggcagacaacaacagccccttccatgtcagcacggtcagggcttcgataaccgtgaatggtcgcaagaccgaagccgccaatgttgacatgcttcgcccctattccaagcagtcgttcccgttgccaggtgccgcgtcggcttcatcgggcacggtcactttcaagtacatcaatgaccacggcggcgatgttgaacgcacgatgcccctgaccacgaactga

SEQ ID NO: 515496 - DNA, 555 bp, Stenotrophomonas maltophilia
atgaacaagcttgcaattgctctttcggccgcgctctcgttgggcgccgctgcctcggctcacgccgctgacgccaccatcaccttcaccggcaaggtcgttgcatcgacctgtgcggtcgacgtcagcacgggctccaacaccgtcgctctgcgccagatcaatgcaggtgcattcaagggcgatcccaccgtgggcagcacgccgttcacgatgacgctgaaggccggcgccggtaccgcaacctgcgccaaggacaaagcacgcctggttgtagacaagactgccagcgccatcaacgcggacggcatgatcactgataccgcgggcggttcggggacccggaccaacgctatcgtcaagtttctggacgctgacaacggcgacgcagcgattgacctgaccaagctcgacgaccccgccctgcagcgtgacaaggatactggtggcgagttcaagtacaactggatcgcgcgctatcacgcaccgggcggggctgatctgaccgagggtgatttcagcggcaggctggtcttcgacatcgataactactga

SEQ ID NO: 515497 - DNA, 681 bp, Stenotrophomonas maltophilia
atgcccaatcccttcatggtcgttggcgccgccatcggcatgtgcattcctgccttggcaatggccggcgacccacacaactacgagaccgtccgggtcattgatgcgcaccaccaggcccgcaacatggacgcgagtgcccggcccggaatcggccgcttcgtagcgggtgaccagaagcagaatttcgtgaccggttcgctcgcgtttggccgcgcctatggcaatggctggcgcagtgaaggcgagttcgtcgcccggcgcacggacacctacaccagcggttccagcgccttcaccaccagcagcaaccatcacgacgtgcgttcgcagcggctgatgctcaatgtctaccgcgatcttgcgatcaaccaggcatggtcgctgtacgccaccgccggtgcgggtctgtcgcacatccagtcaggcggctggcagggtacgccaaaccgccggtacggcaaggcaacgcgtaccggcctggcctggtcgatgggggccggtgtttcgattgccgccgggaccaacatgacggtcgatctgggataccgctatgcggacctgggccgcaccgaaagtggctggaacacgttcgccaacgcacgtggcctgcaggacgagaagctgcagctggatctggtgtcgcgcgaagcgacgctggggttgcggtacgcgttctga

SEQ ID NO: 515498 - DNA, 906 bp, Stenotrophomonas maltophilia
atgatttcacgcaagctcctgtgcagcgccgtgctggcctgcattaccccgctggccgcttcggctgccgaggcctacctgaccccaagcaagaacggcggcacgggtgatcttccgtccggctacacgaaggtgtacttcgagctgtcgaacgacgactggacccaggagatcaagctgccaagcaatccgcgcagcggcgataccgttgtgctgagttcgctggccacagcgggaagccgcctgctcgcttccgacactgcgttctcccatctggcctatgttccggtgcagccgctgagcaacatcgagctggcctggagcagcggcagcaagcgctgggaagtgaccgggggcttgtctgcgcgcacgctgcttggccagaacgttccggacttccagatcccgagcaccgaccacgtcgtcacccagatggacctctgggacggctatcacgtgggcacgctgtcgttgccggacaccgccgaacgtggcgccgtcctttccatcagcaaccgggccacctggggcacgactctcaccggcgcacagctggccgagggacgcgatcaggtctgcccgggcagcagcgagtgcagcttcgtcttcaacgccgatggaaagtggcatgcgcgccatgggcgcaggcatttccagccgacccaaccgcagttgccggtgccggcgcagcgctggactgacatcgtcatcagcggcccagcggaagacgtcatcacgccgatgctcatgagcctgccgacgggtggcatccacggcgacatcatccagtttaccgatgtgtccaactccagggcctaccgtgttggcgggtacggcatcgatggcaaggcgaagaccttccgctacaacgcacgtctcggcacctgggtgcagcagccgcgctga

SEQ ID NO: 515499 - DNA, 906 bp, Stenotrophomonas maltophilia
atgatttcccgcaagctcctgtgtgctgccaccctgctgtgcctggcaccgttcgccgccagtgccgccgaagcccatctgaccccgaagtccaacggtggtagcggcgccatgccgtcgggctattccaagctgttcttcgagatcgccgacaatgacttcgcgccgatgctgacgttgccggccaatccgcgcgatctcgatgacgttgtgctgacctcgatggctgatcgccgcgccagcatgctcgatgcggcgggcaccagcgtagccgatctggtctatatcccggtgtcgccgttgagcagctacaatctctggaagtccaactcgctgggccgctggatgactaccccctacggtgcggatgcgacgcgcatcgtgctcaacaagggggctcacgcacaggcaccggccatcacgcagaccttcgtggatctgcatgtgacccggaacgtttccagcgtcggcctgccgccgcatgcaccggcgcgtgcggtgcttggcctggtgaactacacccagaacgacgtgaccatcagtggcccggaactggccggtggcattcagacctgcgccgtcgcacagacctgcgcctttgttttcgatgggggcgatggccggtggcatccgcgccgcgggcgtgcccacttccagccgaccaccgagcagctgcccaagctggcgcagcgctggaccgacatcgtcctgcagggacctgccgaagacgtgaacaccccgttgtcgatgatgctgccggttgaggccgtcgacggcgacgtgctgcagatccgtgacgtgtcggactcgcgcgcgtatcgcatcaatggcaccacggtgaagtcgacaccgttgacctatcgctacaacgccagcgagggccgctggggtagcccggagcgctga

SEQ ID NO: 515500 - DNA, 222 bp, Stenotrophomonas maltophilia
gtgtcgcgcctgctcgatgtacgcatcgccgcattgatgtccagcttttccagattgtcgccgcatggccagaagcggttcctggatctgttgaatgtctacatctatgcatcgccggcgcagcgcaggcagctgcgcagcacctggccggacgtggtgatcgagccatgcggctgcctcgaagacgcgccgcaaccgcaagcccgcaactccacccgctga

SEQ ID NO: 515501 - DNA, 678 bp, Stenotrophomonas maltophilia
atgagcatccgcattgtcatcgccgatgaccatcccgtcatcctggccggtgtgcgggaggcgctgggcgaagtgccggacatcgacgtcgtggcaggcgtcgaggattctacggcattggtcgaagcgctgggcaggtttcccgtggatgtcgccgtgaccgactactcgatgcccggtggccagtatggcgatggcgtggcgctggtcggcttcctgcgccgccgcttctcggccgtgccgctggtggtactgaccagcgtgggtggcgcacaggtgttggccagcatccgcagggcaggggtgtcgtgcatcgtgtccaaggctgaccctattccagagctggccgaggccattcgtgcggcgaaagagggacggccctatctgtcgccggaaatcgagcgccagttgggcagcgcgaccattgaacaggcggtgctgacgcgccgtgaggccgaagtagtgcgcctgatcgccgagggcaagacccagaaggagatcgcccagcagctgcagcgcagccggcagaccatcagcacgcagaagcattcggcgatgcgcaagctgggcctgcagcgcagcgcggaaatcttcgaatacgcgctcaacgaaggcatggtgtcggcatcacagggggcgcgtctggcacgtgggccgcgcaggaacgacgatgactga

SEQ ID NO: 515502 - DNA, 648 bp, Stenotrophomonas maltophilia
atgatccagctcgccatccgcgttgcacttgccgacgaccatccggtcatccgccttggcgtgaagtcggcgctggacgaggcgcctgcgatccactgcattggcgcggcgaccgattccaccggcctggtggccctgctggaacgcgagccctgcgacgtgctggtgaccgactatgcgatgccgggcggcatccacggcgatggtttggagctgctggcgtacctgcgcacgcacttcccgcagttgcgcgttgtggtgatgaccggcctggaacagcccagcctgctcaaccgcctggatgcgctgggcgtgcccggcatcctcagcaagggcgacgacctgcaccacgtgcaggcagcggtgatggcggtgtacgcgcatcgccgttatctctcgcccagcgtggccgagctgctgcagcgcaaggaagtgcgccgcgtgaccgcgctgtccgagcgcgagcaggaagtggtggcgctgttcatttcggggctgagcgtggccgagatcgccgagcgcttgggccgcaagaagcagacggtcagcacccagaagatcaacgccatgcgcaagctgggcgtggagcgcgatgcggaactgctgaagttcgcctcggacctgggcctggatgcgccggcaggctga

SEQ ID NO: 515503 - DNA, 3405 bp, Stenotrophomonas maltophilia
atgggcacccacgtcaggatcaatgtcatggcaggttccggaaccgcgcccaccgcaggaagctcggctgccgcagcgcgcctggacgacctgcgccgcctgcgcaagcgcctcctcatcggcggcggggccctgatcacggtgctggtgttgctggcggccatcgtcagctccatcgccgacgtggaagagttccatggccgtgaacggcagtcgttcatggaagcccgggctgcgatggactacttcctgttccagcgtgaccgcgcgtatgccacggtggtcaacggcaacgacgtgctctggcgcgaccagcgcccggtcctgcagcacgccggcgccgcgcttgcagaacgcttccatgcgcagggcgaggaactcctggtgcgtgccgagggccgcacggccgtgccgtggctggtgctcgggctgcaggacaacccgctgccagcgcacgagctcagtgcctatctgggcatgatcgaggtctattcggcctataccgccgattcgatcacctcgcaggaggcgccgggctcggtgacggtctatgcctacgagccgcaggggcggttgctggccgtatccaatctgcgcgatgaggcgcagctgctgcagaccctcggcgtggccacgcgccagcaggcgtttgcgcggctgctgcgcgacgagcccgacgtgcggcggctggcgccgcggcccggcccgatccgctcggcatcgcgcgaggggcggctgcgctcgcacttcgcggtgaaccccttcaacggccaggcctcgctggtcggcacggtgaccatggccgaaggcaccacgccgtacttccggcgtgtcgtgttcgaatccaccgataccatccgggcacgcctggaggcgcgtgaagagggccgctacctggtggccaccggcgaccatcgcgtcgtgctcagcagtggcgggctgaccggcgacgagcaggcgctggcattggccgccgtggccagcggcctgggcacccggccggtgcgccactatgcgaacggccgcttcatcctggcctgcgcgctgcccggcgtggactggacgctcagccatgtctacgactggtccgatatctggcaggcgcagggcaactacctgttgatccgctggatcagcgcgctgctgatcatcgccctgctgtggtggctgttgcgccgtatcgaccggcgcgtgttcgcgccggcgctggccgatgcgtcgcgggtctacgaaagcgaggcgctcagccgcgccatcatcagcaccgcgccgatcggcttggcgctgctcgcgcgcgacaatggtcgtccgctgctggagaacgacaccgcacggcaactcgtgcaggtcatccagcatgacagtacggcggagggcgaggtggcgccgctgtacgcgcgcctggccgaggccgggcgcggcgtgcagggcgacgaggcactggacctgcactgggcggccgatggaggcaatgcaacccagcttcagatcagcctggcgctggccaggtatcacgatcaggcggtgtgggtgtgtgcgctgcgcgatgtcactgcgcaggtggagctggaagagaacctgcgtcgcgcacgcgaagactccgaagcggcgcggcagtcggcggaagccgctacccgtgccaagtcagccttcgtggccaccatgagccacgagatccgcacgccgctcaatggcgtgctgggccacctggagctgctcggccggtcgccgctgcagccgggccagcgcgagcggctggaccgcatccgtttctcggccgatgcgctgatgcggatcatcagcgacgtgttggacttctccaagatcgaagccgggcagctggatgtcgagctggcgccgttcccgctgcggccgctgatcgagagcgtggcgctgctgtacgcgcccgacgcactgcgcaagggcgtgcgcctgtacttcgcggtggaggcgccggcgggccaggactgcatcggtgatgtgcaccggttgcgccagatcctcaacaacctggtcagcaacgcggtgaagttcaccgcctccggccgcatcctgctgcgtgcggagctgctgatcgacggcgccgccccgcagctgcgggtgcaggtggtggattcgggcatcggcatgaccgacgaacaggcccggcagctgttccagcccttccagcaggccgatgccagcgtttcgcgccgctacggcggcagcggcctgggcctggccctgtgccagcagctggcacaggcgatgggcggccaggtgtcggtgcagagcacggtaggcgtaggcagcagcttcaccctgcagttgccggtgcgcacgcaggctgccacggcgccgctgccgcagccactgcgtgggcgtcgtagtaccctgctgtcatcgtcgccggaatggcgcagcgagttcgagcgactgttggtgcagtggggtgcggcagtcaccgtactcgatcatccgcaggccgggaccggcggcgacgtgctgctgatcatcggcgatcaccgcccgtgggatcgcgaggaagaacggcagctggccagcgcccatcaccatgccgtgcttgcgcacgcacaaggcccgttgaatcccgagcagcgtggtgactataccgaggtgacctgctacgccagcgacgccctgctgctggcgatcggcgccgacgaacccatcatgccggcaccgcaaccgacgcgtgccacggcggtggacgcgcgcgggcgggtgctgctggtggaagacaatgcggtgaatcgcgagctgatccagcagcagctggaagagctggggtttgccgtcgatgcggccgaggacggccgcgcagcactggcgatgtggcaggacgatacctacctggcggtgctgaccgacatcaacatgccggtgatggatggctacgcgctggcgcgcgagctgcgcagccggggccactcgctgccgatcctggcgatcaccgccaccgcgctggccagtgagcgcgagcgctgcctggcggccggcatcgacgacctgctgctgaagcccttgaacctggaccggctggaagccgggttgagcaaggtgcatgcgcgcacgccgcgcccggtggcatcgggcattgccgccggtggccgcagggtctccgccgcgatccggcgcatcttcgtcgagaccggcgacaaggatctgcaggccattgccgaggcgcgcgcagcgaacgacccgcagcgcctgctggagcgcgtgcacgcgttcaagggggcactgcagatgctgggcgaaacactgttggccgagcagtgcggggcggtggaagcggcattgcgtgacggcgtgccggtggcagacgccacgttggatgaactgcagcaggcgctgcacgtccggctggaggagtatcgccaggctctggaggcgcagccatga

SEQ ID NO: 515504 - DNA, 2667 bp, Stenotrophomonas maltophilia
atgccatcgtcccgtccagccattgcagcgtccctgtatcgcctgcacgcccgtgccggggcgggtccggccgatggcggcgagctgcaggcactgcggcgctacccgcggcggctgatgctggcctgcggggcggtactcagtctgttgtcgatcagcgtgctgatcacgcttatcgtggtgcaggtgaacgcctacgaggcccggcgcattgccgatttccgccgggcccacaacgcgttgcagatccagctggcgcgacaggatgccagctatgcccgcctggccaacatggccgagtacgcctggggccacgacgtacggctgggccagtccagttccgatgccatgtacctggcctatctgcagggtgggcagcggttggtggtggtggctgacgacagcagccgcccgcagatggcgctcggcctgcagacactgcagtggcagccgcaggagctgaagcgctacctgcagctgagtgccgccgtctcgttgatccagcgcctgacccgaacctccgatgaaggcgagccggtgggagcgtcctacttctttgatcccagtggacagtatctgtcactggacaaggggctgaccgagcgcagcctggccgacgcactgggcacgcgctcgcgcgacgagatcttcgagcacctgcgggctccggcgcagctgctggcccccgcctcgctgcatgaccaggtgccgctgctggagagcctggcacgcagcgacgcaccgcagcgcaccttcggccgccatccgatcaccggccaagcctcgctggtgtcggtgttccaggccagcgccggagacgcacccattgccaccttcgttgcgtacgaaccgctggcgcgcttgcaggcgctgcttcgccgcaacagccagggccacctgatgctgctggaccgtgacggcctgcgcgtgctctccagccacgaggatgcacgtgatgtcagcggcgccgacgccgactgggtcctgctcggcaatgccacccgcgcacgctttcacaacgggcgcttcaccctggcgctggcggtgaatggcacgccctggacgctggtggaaacctaccgctggcgtgacatcctgcgcggcatcgcgccgatgctgctgtcgggcggcgcctcgctgatcgccgcgctggccgtgctgtggatcttcctgctgtggctgcacaagcgcatgtacatgccggcgctgcgccaggtgaaggcgatctacgcgcgcgaccagcgcctgcgtctgctgctggactatgttccagtcggggtcgcgctgctggacgcccgcagtggtgaggtacaggacctcaacagtccgttgcagcggatggaccgcgccagcggtggccgcttgattccacagctgcgcgccgcggtcgagcaggctgatctggccgatggcccggtcatcctcagcggtgagctgccgctggccagcgatccgcagcagcgactgttccaccgtacccacgtccactgcggcgggcacgcgtggccgggaggcgtgctgctgatggtggaagacaccagcgaggacatgcgcgccctgctggccgagcaggaactgaccgccgccgccgaatcacgcagccacgccaagtcgaatttcgtggcagcgatgagccacgagatccgcacgccgctgcacggcatcatcggccatctggaactgctggcgcgcgggccgctgccgcaagagtcgatggaacgggtactgcgcctgcgccagtcgaccgattcgctcatggacatcatcaccgacgtgctggacctgtcgcgcatcgagtccggccagtggacattgacgcccgagcggttctcaccggcggcgatgctcgagcgggtggcgctgctgtatgccccgatggccaatgccaagggcctgcagctcgattgcgtggtgggcgccgacgtgccggaaggtgccgtggcgccgatggcggcgatcgagcgggtgctgcgcaacctggccagcaatgcgctgaagttcaccgcgtccggtcgcgtgcagctgggtgtgtcatgccgtcgcgaggccgcccaggcctggctgcgttttgaggcaaccgattccggcatcggcctgagccaggcagagtgcgaccgcctgttccagcccttcgtgcaggcagacaccaccatcctgtcgcggtttggcggctccgggctgggcctggcgttgtgccagcagctctgtgaacgcatgggcggccggatctgggtggaaagcacgcctggggtcggcagccgtttcgcgttcgaaaccccgctggcgacctcggtcacgcaggtcgcggccgtaccactggcaggccgggtggtgggcctgttggccgctgccgggccgtggcgcaccgaacttgagcggcggctgcgcggcttcggcgcacaggtggtcacaccgcaagtgctggcacaggccccatggctggaacttcccgaggaggcgacggtggtgatgttcgagcctggcccgggtgaatgggagggggtgttgcgctctggccgtgcgtgggtgcgggtctgccgcgaaggtccgctgcgtccgcagtggcaaggggaggggcaggtggtgtcctgctatgccagcgaatcgctgtatcaggctctggttcaaagcgagccagaaccgccagtcaatgtcgcaatcggataa

SEQ ID NO: 515505 - DNA, 873 bp, Stenotrophomonas maltophilia
atgtgggcacgacgcatgggcgaacgctggtggctgctgcggctgctcagccggcatgcactcgatcaggccagcctgcgcctgggcggcttcgccgcgcgcctgctgtcaccgtcgcagcaacggcgcgtcgcctgccagatctctgccgtgctgggatcctgcctgcagacccgtcgctaccagcgcacctgtagcgccctgcaacaggtcggcctgcccgccggcacggcgagcagactgggcagcatcatgctggcacatgcgtggttgcggcgcatgcgcctgcgccacctgcgctcactccccttccccgccgtgaaacggcatgcgcgcctgatcacctggaaagacccccaggcgctctgggcagcaggagccggcaggcgccgggtggtctgcgtgctacccaccggtgatgtcgaactggccatcgccgccgtgctggaccggccgggtgcgccggcacactacttcatccgctgcccgcacgctccagggtcggccgagcatcgaatcctgtcggcactgcagggccagggccatcgcctggacatcggatcatcgtccatgcccggccagggctggcggcagctgcaacgtggcgccacgatcatcgcgctgctggatccgctgctgatggtacgttccgcgctgccgggccatcgtcaccccgcaccgttgcggcttgcgcgactggcgcgggtgccggtgctgcttgccgggcatcgcaacgatgacgacggcgccggcaccctgcacgtgctgggtgagttccggctggatgggagcgctgcacagtcggacgcgctgtacagcacggtgcaggcatttctcgcggcatcaccactggactggatggcgccggggtaa

SEQ ID NO: 515506 - DNA, 426 bp, Stenotrophomonas maltophilia
atgagcattgaacagatcctgtacaccgcccaggccaccgccgtcggtggtcgcgagggccacgccacctcatcggacaggatgctcgatatcgcgctgtccacgccggcagaactgggtgggactggcgggacgggcaccaacccggagcagttgttcgccgcaggttactcggcgtgtttcctcggcgcgctgcgccatgtcgctggccacgagggcgtgagcatccccgacaatgcttcggttaccggtcgcgttggcatcggcccggtcagcaccggcttcgccatcgacgtcgcgctgaccatctcgttgccgggcgtcgacagcgagcaggcacgtgatctggtcagcaaggcccacgtggtatgcccgtactcgcatgccacccgcaacaacatcaacgtcgcgctcatcgtagcctga

SEQ ID NO: 515507 - DNA, 780 bp, Stenotrophomonas maltophilia
atgccatcgcagctgggcgacgcgggacgcattgcgtcggcggcgaacacgcttctggcacgaccgaaggtcgacatcagcggcgcatggcaaggctctgggctgcgcgcgctgacccggctgcgccgggtggtggcggatgcctcgatcgttcaccgcatcgcggacggccgcacgctgcgcgatcttctccccgccaaggcccatgccgaatggcaggcggcagtggagcacagcggaatcgcgtctgtcgggctggaacacctgcgtccctttttcgcgctcaaggtactgcgcaaggccatcatggcccgccacggcctggaatcgccgaaggtgttctgcaaggagctgcgccggaccagccatgcagccggaggccgctaccatgtgccacgcgctgagttgaccatcgacattccgttgaatggcgacagtgccccggcacacgctgtactcgatgacaccacccggtttgcggcacaggtgcagcgactgcgccagctgccgcggatcgccgtcgcgcaggcccgggcctgggcacagggcgatgccgttgccatgtacggggacgacacgagtggcgacacgccggcggacacgcccgccgctgcgctcgcgctggacgcattgcggctggatgcctggctcaatgcggtggacgccgcgaccggggacgcatccaccacgcttgcagtactggatattgaggacgcgttcgacgggagtggctacatcaaaggcctgcgcgaacgtggattcaccttccagcccgcctag

SEQ ID NO: 515508 - DNA, 702 bp, Stenotrophomonas maltophilia
atgcatctcgtccgctccaacctgtaccgctctgtccttgtggccgcctgtgcgttggccgcggccccggcgttggccgatggcatgcagcccaaatccaccatcgtcatcctcgatgaggccgatggcgaaacgaccaccactgtcaccaataccgacaaggcccccgcgctgctgcacaccgtggtgttggacattcgcgaagacccggacaccgtagtgatcgccaccccgcccattgcgcgcgtggatgcaggccagcaacagctggtgcgcttcatcctgcagggtgaaccgctgaagacccagcgcctgaagcgcgtgaccttcgagggtatcggccagcccaaccaggagaccggcaaggccacggtgggtatcggcgtgcgccagaacctgccgctgctgctgcaccccaaaggcctgccacgcaatgatgccccgtggaaactgctgacctggtcgcgcgacagccgcacgctgacgctcaccaatgacagcccctatgtggtgcgactggccccctcggtcaccttgctgccctcgggcaagaccgcggagctgaagcgcgcctacctgctcgccaacgaagccgtgtcgttgccgctgcccgaagcctcggccgccgacaccacgctgcggatcagtccggcaagcgtctacggcttctccgtcgacacctacgacctgcccctgcaatga

SEQ ID NO: 515509 - DNA, 2469 bp, Stenotrophomonas maltophilia
atgaccgcacgccccctggcacgtgccaggcggggaacgcaggacacacaccagactggcctgatccggctgccgcgcacaacactggtggcggcgctggccagcctcgtgcatgcgcctgtagccagcgcggaccccggtacccaggcgatggagtttgatcgcagggcgctggctgcgcgtggcctggaccccgccctggccgaactgttccggcatgagccgcgctttgcgccaggcacgcatcgggtcacggtgacggtcaacggcaggaccggcgcccagcttcatgcgcgcttcggcgaggagggccagctgctggccgacatggcgttgctgcgcagggcacgcctgcgctggccagccagcttcgaccatatggacgacgaggccacgttcgacctgcgcgatgcctggccgcaggcggtgatccgcccggagcccggcacgcagcagctgcacctggtggtgcccgaagatgcgctggacgactccccggtcgacgccgtcgatgtggaacgcggcggcatcggtggacttctgaactacaccctcagttccagcaccatcgccgcgggcgggaacacgcgcacctcctactcggcctataccgagacgggcttcaatgcggcgggctggatgttccgcagccgccagtcaatgagcgccgacccaggcggcaagcggctgcagttccaggacagctatatcgaacgcagcctgccgcgccgacgcgcgctgttgcggctcggccatgtctcctcggccaatccgctgttcaccggcattccgatcaatggcgtgctgctagttcccgagtccgcactggccgtggccgaggcgtcggcaggcgctctggtggaaggcatcgccagcagtgaagcgcgcatcgagatccaccaggccggtgtgctgctgcataccacgctggtaccgcccgggcctttcagcctgtctggtttctcgctgcgcaacagcaccaccgacctggacgtcaccgtgcacgagcacgatggtgaacgtaccttcgtggtgcctgcctccagcttcagccgtgccacgcttgcgcgccccggaaagacctttgctgccggccagctgcgcgatacggtggcccacgctcccggtggtccacaggccgtggtcactgccagcaccgcctggcgcctccccaaggccgatgctgtcgccagttccggattcctgctgaccgggcagtaccgtgcggtggccatcggcctcgaccagatcacgcgcggcaatgcggagatggcattgagtgcccggctcactgccgcctcctcccgcgtgggcgtgggctatgcgctggatatgcgcgccaacacgcgcatgaacggcatcagcgcctacgttggcatgctacggcagagcgcgaactacgccgacctgtacacggcattgcaaccacgcgacgacgaatggttgcccacgcgcacgcgctggcaggcctccgccggcctggctttcagtacgtcacggcttggcagcttcaacgtatcctggtcgccgcgccgccgcttcgatggccagagcagcagccacctgtccgcaggctggtcgcaccgcgttggccgcagcctgctcatcgcctcggtgcaatcgacgcagggtggagcaaggggcaccgatcgcagcgcacagctgtcgtgggcgttgccgctgggcaacacctcggtgcgcagcagcgcccggaaaagccgcggcaccgagaccttcaccgtggacgcgtccggtcgcctggactcgcaactggcctggcgcacctcggtcgaacatatccgccagagcgagtccagcccccgtttttccgtcggtgccgggcggatgacacgccgcgcgcacctgtcgggcagcgcctcgcacagccagggcaacacccatatcaatctggccgccagtggcggcctggcgctgcaccgctacggcctgatcttctcgccgcagccgctgcaggacaccttcggcattgcccaggtggatcgccggccgggcgtgcgcctggaaaccgacgccggcagcgtctggaccaatcgccgcggatttgccgccattccgcgcatccgtccctatgtcgccacgcgcgtgcaggtggatggcaccacgctgccgtccaaggtggatgtgcacaacgcggtgtattccctgcacgtcgcgcggggtgcggtgcccaaggtgcagttccgcacccaggaaacccgccgcgtgtacgtgctggccacgctggagcacggccaaccgcttgaaaagggaaagcttgttctggctgcgggccagatcgtcagcgccgtcgccgagcgcggccggatcttcattccgaacgtggaaccgggtgtgccgattgaagtgcagctgggcgaaggccagcgctgcacgctcgaactggctctggaaacaccggtgtcgaatgacgcgttcttcgaacagggaaccgcgatatgccggccgtag

SEQ ID NO: 515510 - DNA, 642 bp, Stenotrophomonas maltophilia
atgaagttgaagatgattgcactggccgctgcggccctggccgcaagcgcaaccgccaatgccagcgtgaccctgaacgtgaccggcaaggtgaccccgccgtcctgccagctgagcctgaccaagaccgaactcgacctgggcaacttccatgccagcaagctcagtgagaatcagccgacccacatcggccgccagagcaccgatgtcctggtttcctgcgcctcgaagtcgcagttcgcactgctggtgacggatgaccagtcgggaaccgtcgcggatgatgccgttgccgtggcaaagatgggggccaatgcagagcaagcctatggtttgggtgtcagcggtagcagcaacatcggcgcctacgtgatttcgctgaacggaggcacggctgacgccggcgacgccagcttcgtgacgtccgctgacctgggggcgacgtggactgccgcgaccgtggtcgcacccaaccagctcaccgcctggcaggcccaggacggttcgctcgctgctgcatcggctaccaacgcccgcgcgaccctgacgatcgacgccgctgtggtgggtacggagcacctggacctgaccaatgaggtgtcgctggacggcaaggccaccatcgagctgaagtacctgtaa

SEQ ID NO: 515511 - DNA, 621 bp, Stenotrophomonas maltophilia
atgaaaaatcgattcatcccgcactcgctgctggcattggcgtttgccggctgctcggccatgcatgtcaatgccagcgagctgaaagtcagcggaagcatccaccccagtgcctgcgagctgtccgtcaacggcaatgagttcactattccgcagcaggatctggacaagctcccacccgatcggtctaccgagctttccacgatcacgctgccgggcactgtcacctgcgcgttccccgcgcgcttcggcctgcagtttgcagataccgcaacggtcgatggtggatttgatgacatcttccatatctatcccagcaatgacagctcgaagagtctcggatggtacgaagtgcatctgacaaacggccaggctgacgccaagtcctatccatttgcgcgcagaaagctggacaacaacgcgatgaccttggacaacaaagtccgctccaaggatcacgatcacgtcatggttctggccggcggctccactctatctggcgcccgtcatgccacgttcgacatcaatatcacgccaagcctgaagccacgaggtgaatttgatgcagtgaacgaggtggatatcgttggtcagatggtaatggaactgctctacctttaa

SEQ ID NO: 515512 - DNA, 612 bp, Stenotrophomonas maltophilia
atgagtaccgtcatgaagaacaaggcagttgcagcactactgctcagtgcgtgtgtccccgcttcgcttgtacaggcaagcgagctttcggtatcggggacgatccagccggaatcctgcacgctgtccctaccggatggcggcgcgctggacttcggtgagctggccccgcaaccgaccacggaaggcaaatgggcctttgtggagcaccgcaacgcacagctgtcgatcgactgcactgccaggacccatgtgggtttgaagttccgcgacctcctgctcatcgacaatccaattcccaaggatggcttcatcctcgccaccgagaatgacgaccacctggcaatggtcgaactccgtatccctcacggcgtcgctgatggaaagcaggtcgatttcgcaatgctccattcatcaggaagcggcagccatgtggtccgggtggacgatccgggcaactacatgcgcattggcgatcctcgcgacccaggattcgcaaaggtctctgccaacatgcgggtgacgatgctgggtgttgatcttgagggtgacgaacttgagaacgccaaaggtctgcgcagcatgataggcatcgaccttcactacctctga

SEQ ID NO: 515513 - DNA, 957 bp, Stenotrophomonas maltophilia
atggtcatgagcaagatttttaaactcaagaagtggttgacgttggatgatgccgcagctcatttagcacgcgcactcggcgaggatgtagcagtgcaggatcttttgcagctatcggtcgacggccacctcgctctgtcggtagagctggtcaatcacgggagcgcccagctaggtagggccgttcccacaactgaagctagcttcgagatcattcgcggctcggggactcctctttctgagcgccttcaacgactggccgagagcgcggcggcggtatcgggtgacgccgaacgtaaacagtggattgaagagaaccgagacaaggtggccgaacttggcgctttcatcggccttaccggggatcccctcgatgatgacacggttattgattgggagcgtccgatcaagtctatccacgggctatgggacatcccgacattcggcggtgcccgacttgacgtgttgcatcagttgcagtgcatgatcggcggcccagaaataactttgacggccatggtcggtgcggtcctagtgagtccagacgggtcccgttacgcgagactgatgcaacacatgtcggagaacccatatacgtccgatggcaacgaccctgacaagtatccaaggcgagatccgaatagctactaccctcgtagcggacttcctgaggatgccctgctcgttgttaggacggacgcccttaactcgttcttgagatctctggaatccgaggagagcggcatatcgcggacaagtgacgagctgggaagcagggagaaaattggactgctgcgcctgattgctggcctggcgaaggtggctggcatcgacctccgaagtgaaaaggcggcggttcaattggaggctgccgctgcccactttgacgggcctgctgagaagacaattcgtaagcaccttaaaatcatcagggaagtcgtgctcaaaggggcgtag

SEQ ID NO: 515514 - DNA, 660 bp, Stenotrophomonas maltophilia
atggcaggttcaagagttccggcgttctttgtaggggcgcgcaatcgctttgttaacggggcggtgccgggaaacgtctttgacgcccgtggcaactacatgggcaacggcggcagggcggccatcgccaccggcctcaagttgctcgcaaacgcgtttgttcccggaaccggtttgctggtggaccgagggctatccggctgggttaaccgaggggctgattacggcatcggtggcccagtcatggagcaggttgatatcccgggtgctccctcgtcgagccgagcattcactgcgcccacgccttcgcagatgacaacgcagaacctgggcctgggcgtccagcgtccgggcggcaactggtacggctacacaggtggagctggctctatgggcagctttggcaacacccagtttggcaatggcatggcaagcatcggccagtggaacccgcagagtgcatggggccagcaggtggcggctccgactgggtcgaacctggggcttggcaacaacgtgggcggcttcattggaggcggctcaggcggcggtagcggccagacaagcggaggcggcatgccaggcatcgtaggcggccgattcgcaggcagtaaccccgtggactacaagcgcagtttcatcacgaccaagaaggcttag

SEQ ID NO: 515515 - DNA, 303 bp, Stenotrophomonas maltophilia
atgtttagaccgccattcgtcggattatccgtcctcgtcctcctagggggctgcgccaaacagccagagacttggacggccttcgtctatccgccggggaggtccttggcggcggaagacgcatcgagggcgatcttcggctactacgggtcattcgaacagtgccaaagcgcctcaattggcgcgctgaggcaactggcatccgagaaccaatcggaagacttcgggagctatgagtgcggcgttggctgccggtacgagaaggagtgggacatgtacgtctgcaaggagacgcggaagtaa

SEQ ID NO: 515516 - DNA, 714 bp, Stenotrophomonas maltophilia
gtgaggggccacgccttgcccggagatccgcctgcgcgaggcggtctcgacaggtgggaaggggcagcgatagtctgcggacctctagatgagtcccctatgagcatcctcaacgttctgttacgtcctgaccagctcttggtcgcggtcgataccctcgcggaggacgctcgcaccggagcgcattcgtccggcgcaaagatgctgcttatcccgcagtacaacttggtgttggcggcacgcgggtccactcagttttttcttcgcatctacgagctcgcgctccaggcaagcttccgggcagatttcacaatggagcagctgacaaaggagctcgggcttgtgatcgacaagttgtggccaagctatgagagagcggctgccgaggcgagtctgcaaatggacgcgttgggcacggagttggtgctgggcggttggtcgccaaagagcggccggatggtggctactgcgtatgccaagagcgacagctctaggccagcaattgtgcaaccgctggagggtggcttagcttcgcccggagagcctcttgccggaaggccagatagcttcgctccagctgatgtgctcgcagctggcaagatccaagcggcatggcttaataagcgggtggggcggcaggtggccggggggcggcttcttgctacggtgcttcgggaagggcaggtggtgacccaggacttaggtcagatctaa

SEQ ID NO: 515517 - DNA, 870 bp, Stenotrophomonas maltophilia
atggagcacgttttcaaggatctgttgacgaagtgctggtggtcttggctttcgctgctcatcgcagtaatagccttcgtgttgtgcgttggtaatgggatgtctggcgttggcaaggctgtagcggcgacagtcagttacttcgcgctgtgtggatttttcgtctatccgctatttaaggctgcgtatgggcgcaagaaaagcatcatcacagtttgcttgtggagcttcgtgctgttggtgctgtggttggttgtattccactacaattattacgcttggatgccgtctgttggggttagtccggattcgtattcaaagatactgaatcttgtgcccgtcatggtcgcaatatgggccgcaggtctcggttggttcgttcacttcaagttgtcgacgttagcgcatcgaacaaacaattcgtttgccatgacgatggagacgacccggagcacggagttcttgaagaggcaggagatcgtatccaagcactttcctccaggcactcaagaaattcctaaggagtatcacgcctactttaaaggctcagcgctgcgtgatgcactcaacgcccaccctagggtgcaggacgatatccatcgggctcaggcgatgcacgcgctaaagcatatgcttaatttctacgaatttatggcagtgggaattaagatgggcgatctggatgaggagttgctctaccagaccaattgcgttcaagttgttaacttgttcacgcgtgcgaagagctacgtagactacgtcgtgatggatgctccagctggtgcaggtcagccattggcattttctgagctcagaagccttgttgaacggtggcgccgccgaattcaggtagacacggcaaaacgataa

SEQ ID NO: 515518 - DNA, 1359 bp, Stenotrophomonas maltophilia
atggaggccataacgttgtttgcccagatcgatcagtcctctgttagccccagcggcggaagagaatctgacgagtgggtgtttgatgcattcgtcgcgaccgaagcggtcaagcagggtctggtgccgagtgagagcacggacgaggaggcactcgacgtgcactacccggtagtcctggtcgccatcgatggtgaattggttaggcgccatttcagggtcaggccgcttatcagcggtactgcgtggtacgagatcaccctgcaggagcacggtgacgttccggcacgggtaattggcgctccagaggatgatagagaggtatccatttccgctctccgccgcgtggaccgcaatcaggcacgaaggttggacgcgctggtggagatgccgcgcggtgaggaaacgagtgccgccgtcctgaaacagttgtttcatgagcttgaccgctcggatgaggctcccgatgttgtggtcgtcgatgtgggacagggcgcgttggcggcggtgtgcgcgcggggcggtggcgatcagccgctgcttttcgtggacctaggatggccgacgaatttcaatcgtcgaggccaacccagctgccggcctgacgtcaccgggctgaaaactccggtgttattgacacattgggactgggaccattggggcttggcacttgacgccatcaagtgggcgggcactcccaagcactgcgtgatcaaatggaacgtcgccgcattggaacgaccgtgggtggtgccaggggttggtaagcaatgggggggtgtcaaattgtcgccaatgcactggcgcttcgcgctggccttggcgcgcaagggaaatctgtaccgatggcccgctccgaacgtcgtgatttctaaccactggttgatggtgacaccggtgaatggcggcaagcccggcaaccgcaataatcatgggttggtcgcagtggttgccgaccaactcaacggccttgagccacgtcgggccatcttgctgcccggtgatgccgactactcacaccttccgttcttgaagcccggcaggtcgcctgcgtactcattcagcggtctttccgcctcgcatcatggcggcaaagtgacatcggccaagattcccgtcgccgcatccccggcatggctggcgatctccgtggggatgggcaacaagtacaaacacccggccaagcaagcgcagtgcggatacatcgagaagggatggacctggcaagcaccgacctcccaccgcagcagcacaatcgccaagaattgcgcgcacgggaacatcctgctgaccaccgcctccgtgcgtacgcagtggccccagggtggctcactatgtttctggcacccggttcagtag

SEQ ID NO: 515519 - DNA, 432 bp, Stenotrophomonas maltophilia
atgaccgacaccgaccagagcgccatcgccgcgccgccggtgagtatcgaagccttcacctttggcgaggccagccctgtgctggaatcacgcggcttcctcgactacctcgaatgctggcgcaatggccgctacttcgagccaccggtggatctgcaagggcagtcgcgcacaacacgctccaacccgtacctgcacagcggcctgacattcaaacgcaacatgctggtgcgcatgttccgaccgcaccggctgctgagccgtgaggcgttctcgcagctggcgctggactacaccaccttcggcatggggtatgtcgagcgtcgccgccccatgtcaggagccgcgtacagtctggcgggccgctggcgcagtacgttcgccgtggcgtgcagcccggtgagttcttcccggtgcgtgccggacgggtag

SEQ ID NO: 515520 - DNA, 204 bp, Stenotrophomonas maltophilia
atgtcatcgcgggtcacactcttgatcccggtgaactcatctcggaccgccacctcactgaccgggatcacctgcaagccgtccttcttcccattgggcgagtgcacgaacaggttcttgaaattgcccggcccgcgcgactgccgcagcgcgtcgcgcaacgcgtccacgtccaagcccttgggttgggggtcggtcatgtag

SEQ ID NO: 515521 - DNA, 315 bp, Stenotrophomonas maltophilia
atgaggaccaacagacggcgcctctgtcttgaacacctcagcgatctgcccaagtgcttggttacggttgatccgtccggcccggagttccgccgcaatggttccgtattgttgtggacgattacctgtgccggaaacgccaatatctggaccgccagctgcaacgatctcacgctggacctggacattgctgagagtcgcggcggcttctcctcgcagctcgctgttcacataggcttgcttggaagttcgattttcgggttcggtgaagagatggtgcccaacttcgtgagcaagagaacttgcgatccttga

SEQ ID NO: 515522 - DNA, 303 bp, Stenotrophomonas maltophilia
atgcccatagccgaaatgatcaccgcaatcggtctcgacgcccgccaactgactattgccgggcaggttgccggcttgattagtgcggtgctgctgttcttttggggaagcgctggatggaagatcagaaaggatggaggtgtcagcagccccaacgtgcagatcccgatgggtgacccacgccgaaagcgcgccgttttctggttcaaagtacgctatctggtgatgagcaaggtcgctttgggcttgctgttcgtctcgttcctttttcagctcttggcgctttgggcacccgctgcctag

SEQ ID NO: 515523 - DNA, 162 bp, Stenotrophomonas maltophilia
atggctgagcagctgctgctattcccaagaacgacggtcgatgttgaggacgccatccagaagatcctcactctgcgccgtaagtactgctgtagcgggcatgccggcgaagacgttgagctgatccgggccgcactgatgaaggagcacgccaatggctga

SEQ ID NO: 515524 - DNA, 192 bp, Stenotrophomonas maltophilia
atgagccgccaagtgatggtgctggtcgccgcatcggtggctgccgcgctggcgcgagacgccgcgcgcgtccagaaggtcgagcgtgtcacgcacaacgtggacgtaccgaattggacgtatcgagtccgtgaccccctcccttatggcaagaaggggcgcagggcgctgcgaggcggccgccatggctga

SEQ ID NO: 515525 - DNA, 606 bp, Stenotrophomonas maltophilia
atgagcaacgacaacaagaccctggccgacgtgcagcccggtgggagggtgaggctgggggatcacgccgagcgggcgcagtttgaggcgtgggccgaagagcgggaattgggcaccgcaaaatgttcagctgacggcatgaagggtgattatgccgacctcaataccgactggtgctgggcagcatggcgagccgccctctccgcccagccctcccaacccagcagcctcgacctggaagcaatgctcgctacatgcgttcctgggggaagcatcgttgatccgcaggttgtcgctgacaacatccgccactggttctctgcccggccctccccgggtggtcagggggagctggccgctttggtgtcaaagtggcgtaacgaggcgagcgcatacgacgaccagcaggcaaaggaaactggtttcgaggtcgattggacttacgacgcaaaggcgcgtgccttggatcgggcagcggacgaactggaatccgccctcgccgcccgccagccggacaccgcccatgcggcttaccacacaggtaaggcaatcggtcgtcgtgaggccgaactggaagccgccgcccgccagccggaggtgaagtga

SEQ ID NO: 515526 - DNA, 261 bp, Stenotrophomonas maltophilia
atgaccgggccgacgcaaggcccttgggcataccaagagcagagcgatgcctacacgcacatcgtgcgcggccccaacaaccgcttcatctgccagctcgatcaaaccacgtccgccgaaactgaggcgaacgccaggctgatcgccgcagcgccggatctactggaagcgctgaagcgcttgaaccagtacgggcacacgcaggctacgtgggacttcgccatgcgcgcgatagcaaaagccaatggtgagcgcgcatga

SEQ ID NO: 515527 - DNA, 240 bp, Stenotrophomonas maltophilia
atgagcgccgtcatcctgcagttcccgaccaggcgcgtccgtgcgaaggcagtagccgacgccgtgcgcctcgcagcctgccgcctcggctaccaccaacacaacgcagacttcgccgccaacctggcccgccaagacttcctctctggccgatacagcgcagcgcgcgccgtcagcgaaatggtcgaccagctccgcaccgccatgcgcctgatgtgcgcacaaggcggtgccgcatga

SEQ ID NO: 515528 - DNA, 342 bp, Stenotrophomonas maltophilia
atgagcgagatcgaattgaaggcgcggaacctcttggccagctgcctcaatgagtggggctgccatcaggaggccggtaacgtccgcgacggcgacgacctggagagctacgagttcgagctgcgggttatcgggcagcttattcgcttcgggttcgatactggtcacggccacgcaacccgcgcgccgcagtggcagccgatcgccgaggcgccccaggaccgcacacggctgatgctgtgggactcggaaagcaagcggccggtgttcggcagctggcgtggcgacaaccccaagatcacgcactgtgcggccgagccggctggcccggaggtggcctga

SEQ ID NO: 515529 - DNA, 348 bp, Stenotrophomonas maltophilia
atggacgccatcaagaagcgggcgaggggattgctggcggtagagctgataaagcgccgtcgcccgacaatggccgggtgcgtgctggaagggcgagaggacgactctgcggcgattcaggcgctgatcgccgccctaacgccgcccgacgaaccggatcaggcgctgctggtgagcatggcgatgctcgtctaccacggattcggcctgctgacgccagaacagaagcaggcccagctgcgcgagatgcgcaagctgtgggacgaagtcatgggccgaggctactactcgcccgccaaccgggagcgctacgtcgccatgctcgccgctcgcccggaggtgccgtaa

SEQ ID NO: 515530 - DNA, 780 bp, Stenotrophomonas maltophilia
atggcacagcaagtaatcgacacaaccaccgaccatggaacctacaagggtgatccggcgaaggttgcctttgagaaggccaaccaaaacttcgcagagctctacacgatgactccgggcggcatctcggggctgaagttgacgagaaccagtgtcaatgtcgtcaccgtgggcactggtgcagcgcatatccctgggaccagtcgaatcgcgtcccttacggcgcctgtgtccaagactgtgtctggcccagccagcagctggctgcacggatacatcttcgaatcaaacggggttgcggatgttgagtgggtgactatcgcgccagcagcaccttactttggctccgcgagaagcaagtccggggattcaagccgtaggtacatcgggagcattcgaacaaacgcttcatcgcaggttgtgagcttcattcataacccagttaacggaaacgtccgctacctgagcgatatcaatgctcaaactgtgctgactggcggaaaagcgacaacgactactgaaattagccttgctcagtttgtaccgctcacgtcagtggttgcagatatattcgccgagacgggggcgagcgatctggccttcatatccaatcccgacgctggtgctgtcgcttcgtctgcgatcttgttctttgttagagcgtctcagcaggtagcgggttccatcgcgctttcgtccaaccagcggctcagctatttgatggcccccgctacgtcaggtctgagcattttgtgctccggatactacttcgagaggtga

SEQ ID NO: 515531 - DNA, 369 bp, Stenotrophomonas maltophilia
atgtacgcagtattggatggcacggccagatccatttgcgcaggaatggatgtcattcctggagaaacggtgcatgaccaaatcccagacaccaaggggatgcttgtcgcgcgcaccaagcagatgatcaccttgatgcttgaccaggttgtcagcactcgaggttacgacgacatcgtctcctgtatctcgtatgtcggcgatgagaatccgcgtttcgatgccgaggcgcgtgctgcccgttcatggcggagcgcggtctacaccgcaggatacgaaatcctagccaatgtcccggaaggcgtaagcactcctgagcaggttatgaatctcctgccgtcgatcgaacagttcgggtggccagagtga

SEQ ID NO: 515532 - DNA, 1182 bp, Stenotrophomonas maltophilia
atgagaaaggacatcgctgcagacggtctgcggggaatggcatcgttggcggtgttcttcgcccattttctattgcccttttacccggtagcgttcgagccatggtttccaggtgtatcggtatcaggatccccttctagctccgttgaggtgattctttcggttccagttctttccacgctatggaacggcagctttgcggttagcgtgttctttgtgttgagtggctttgttctatgcaagcgctacgttgacaccggtgatgcaggtgtggttcgctcgatggcgagtcggcggtatcttcgccttgggcttccggtagcagcttcggttttctttgcctgggcacttgggaaggcgacgccagacgttatagagcaggtttcgaccgctactggctcagcttggcttcgcggtaactctctggcaggtttgggattcttggacgcacttaaggacgccgcatatggtgttcttttggagggttccaaccgtttcaatactgtgttctggaccatgcgggtggaactcattggctccttcctcgtgttcgcttacacgctactatcgggaagccgtaggcagacagttattgttgccctaacagttctgctgattgtcgttgtaggagcggctcctggctggccgcactttctggcattcctcttgggtgcctttttcgcgcagtcaggtttgaaggctagctcttgggtaggttggcctctcatcattgttgggctgtatctggggggatatagcagcagagtcatctattcgccatttgatcggcttggtgtaccggctgattcgctgaagtggattctctccacagcgggagccgcattggtcttcttggcagtgaggggggatacagcgcgatcccttctggcgtcgaagttttcgcagttcctggggaggatctcctattccctgtacttagttcacgccccaatcatcatcggagtggggtgtcctgtcttctggtgggctgtgagtgaggtgggcgttggtagatcagttgccgccgggttcgctttggtggtttcgctgcctgcctcagtgctagtggcagtggcttttgagaagttcattgaccgaaaggcaatactgtggggaaggcggctagtagtcgaaggtgagcgaggcaccgttgtgcgcagcggaagtgctcccgcgcgctga

SEQ ID NO: 515533 - DNA, 570 bp, Stenotrophomonas maltophilia
atggggacggagcagttcaagccatacatggaattcaccgcgcaggggaaagcgtacgaagccctgatgctgatgatttcgcagctggaaaagaagccgcactcggcagctgaactgcttccagtggtggtgttcatggccttcaccgtggaggcctatttgaactcccttggcgccaggaagatcgaattctgggatgagattgaacgcatcccatggcggaacaaggtcaatgtgctgcatcttcacgctggtaaggaggcggactggggcggcaagcagctgcagtacgccgcgaggctattcgctctgcgagacaagttggctcatggcaagcccgaggtggttgctgggccgatctgcgcgtcgcgtgaagaggctgaggaaaagctgcttgaaatggtcaatcctccgtggctgaaggagctatccgcaggatggcttagaacggcgaggacgagtttccgggagctgatgacctacctctccggcctctacggcctggaggtagttgatcaccagctccactcccacgggcgattcgagatcatccgttcggaggaaaagtaa

SEQ ID NO: 515534 - DNA, 504 bp, Stenotrophomonas maltophilia
atgcagtactcccacggcttccgcaccgccccgatcccctctggctgggtccagaccggcgaccgctgggcgctttggtacaacggccgcgagacggccagcgtcacgcccgacggtggtcctggggtccggctatggatggaaggccagaagatgtggcaggtgaaggaagtgcgcgcggccaacgtccggcaggcgaagcggtacgccgagcgctggtgcgcggccaggctctatcccgatctgcccctgcgccaggcggtcgcccggctgaccgacagcacgccgatccagcccgagccgccgctgcccggcctgccgccgacccgtgagcagcagcaacaggcccggcgcttggccgaggctggggcgaaggaggtcgagcgcatcaaggcggcgcttgaaccgcgcaagccgccggcagagacgaaaccccgagcgagggacgcccgcaccaaggcgtgggtgagggcggggctgcagcagatgcggcggggcgtgtag

SEQ ID NO: 515535 - DNA, 609 bp, Stenotrophomonas maltophilia
atggagcagggaaacagcttcacgacgtttacgatgagcgccggcctgttcgccagcctgctggtgctgggcgcctacgccgtgcgccgcatcagcgcccgcgaccccagcggcaggcactggctgctgcgcagcctggccctgctctcgcccgtgtgcctgctggccggactggcgatcggcatgagcggcccccgcctcacgaccaaggtggaacctgcccacctacccgggctgtgggaaacatcgatggtactgatactggtcggtgccttgaccctgccaatgctgtggcgaacgctgctgcagcagcggcttagcaggccggtcaacgcgcttccgttcttccatgccagccgcacctcgttgctggtgctgttcgtgctggccgtgatctacatgaaagtggccaggacggccgcatcggaactgatgccctggcttaccagcccaggcctgtggccagctgtggcgcgcattgcgggtcaatcgatgcacatcgccatgcttgcggtcgtgctgtccctttcactgatggtcgtgcggcgggcgatgaccggtttcctgcgccttctcaccggactgttcaggcgctcaccggggctatga

SEQ ID NO: 515536 - DNA, 441 bp, Stenotrophomonas maltophilia
atgagcacgctccgcatcagcaccgatccgcagcacctggacgttgccctgatccaccagttcctgtccacccaggccaattggagcctgggcatcgggcgcgaggtggtggagcgggcgatcaatggttcgctgtgttttggcgcctacctggacgagtccggccaggttgcgttcgcgcgcgtcatcaccgatggtgccacctttgcctatctggccgatgtgttcgtgctgccacagcaccgcggccagggctacagcaagcaactgctgcaggcgatcatggcccatccgcagttgcagggcctgcgccgcttcatgctggccaccagcgatgcccaccggctctacaccacgttcggcttcagcgcgccggcacggccagagtcgttgatggaaatcatgcgccagaacctctatgcaccggctgcggccgagtga

SEQ ID NO: 515537 - DNA, 1287 bp, Stenotrophomonas maltophilia
atggacctcaacgtactcctttccaacagactggctggatacctgggacaggatgcacatggccatccgacattccggtatgcagacagttggcgccagacgccgggcgcctatcccttgtcacttgcacttccattgacagagaacagcgcgcccgctgccacgctctctgcggtcctgtgggggctgctgcccgacaacgaggcccttctgcagcgatgggcttcccggttccaagtttcgtcccgcaacccggtcgcattgctgtcacatgtcggtgaagactgtgccggtgcggtccagttcgtacgacgcgaacggctcgccgccgtacttgccggtgaggacgatcggcaggaggcgctgtccctccatgaggtcgcccagcgccttcagcggatccgagtggaccagattgcagcgcggcaacccgatgatgtcggccagttcagcctggccggggcgcaaccgaagatcgccctgatgcaacgcgacgacggaggttgggcaattccggccggtcgcatccccaccacgcatatcctcaaaccccccagtggcgactatgacggattcgtggagaacgaggtcttctgtctgcgcctggccagtcaactcggcatgtcggctgcgtccactgaaatgatctgcatggaggacgcacaggccattgcggtgacgcgcttcgaccgcgtacgaacagcacagggttggcaacgcgttcaccaggaagacttctgccaagcgctgggtgtcatgccacacatcaagtaccagaaccaaggcggaccggggccggccgatctggcgcgcgtgctttgggaacattccagcaagccgcgagcggatgtcgaaaggctgctgcaggcactgcagttcaactatctcattggcggcaccgacgcgcatgccaagaactattcgctgctgatcggcgcacaaggaaacgttcgccttgccccgctgtatgacatctcaagtgcactgccctatgcacacctgcagcaacgcaagatcaagatggccatgaagatcggcagccattaccgctggtgggatgtccgcctggcggattgggaggccaccgctgatggaatgacgctggacccgcagaaagcactgtcgggcctgttcgacatggcaacacagctgcccggcatcgcccgggcgttgcttgcggaactgcaggcagagggcatgcgccacccggttctggaacctttagtggatggcatcagtgcaagctgccagcgttgcctgcggcaattcgaacaatccgctacctga

SEQ ID NO: 515538 - DNA, 360 bp, Stenotrophomonas maltophilia
atggacatcctgcgaacgtcccgagacttgggcctggtcatccgccagcgtcgcaaagcactccgttgggatcaggcccagctggccgaacgcgtaggcgtcagtcggcaatgggtcatcgaaatggagaagggcaagccacgggtggagctgcaactggtgctgcggacgctcaacgtcctcggcctgatactggctacgggcactgtcgagggaatggcctcctccgctgcatcgtcggaaatgcctctggaactgcctgatatcgacactatcgtggatggcaacgggctgcgcccggacgagcaccgcgcgactgccatgacgttggggcgtagaaagccccacaaggccgtctga

SEQ ID NO: 515539 - DNA, 336 bp, Stenotrophomonas maltophilia
atgggtgagggcgctttgcttgcgaagcactgcttcgcaagcgcccgaacgcccagcctccagcggctgggccgggccgcggagcggggtttacggcgtgtcctgcagccccagaccgccccgaccaagccacagatagctcagagcctgctgttgctgttgctgttgctgttgctgttgctgttgcttcggccgttgcctctgcgggtgccgggtgcaacccggccgccccccttccctcagggccaggccggcggcgcggccgcccaggcctgctgcacttcggccagcgaggcacgctcgtcgtcgcgccacaacggcagcaactgcgcatag

SEQ ID NO: 515540 - DNA, 912 bp, Stenotrophomonas maltophilia
atgatgctgcaggtagccaacgcagccgagcgtacccgcccttccgggcgcatcgtgattcagaccgacgatgtcgcgcgcttcttcagcgtgctggatgcaagcggagggaagccaagtgccgacgatctgcagcgcggctatctgcatgcgggtacggatgcactacgcagcttcactgacagccgtatcggctcgatggatcgtcttgcagatgcgatccagcacaaacctgcgctgtttgccaaagcccgtacctgtgcgacggcgctgccggagatccgcgagcgggttgccaaggcactcgatcggttgggcacgctgcttccctccgcacgttttccgccggtcaccgtgctggtgggtcggggaaacagcggcggtgtcaccacgcccgacggcgtggtgatcggactggaggcgctgtgcaacgccgactggatgcagcccgacatcggcgatcgtttcgtgcacctgatcgcccatgagtacgtgcacgtgcagcagcccggtgcgagcgtcgatgtcgcgcagcccaccctgctctatcagacgttgcttgaaggcggcgccgagtacgtgggcgaactgatctcggggcaaccggccaacgcgcatctgcgtcgttggacgcagggccgcgaatgcgccctggaacgccagttcgcccgggacagcgccggtactgatctgacgcaatggctctacaacggagccggcgacgaaacgcgccgcggcgatcttggctactggatcggctaccgcattgccgctgactacgttgcccgcgccgatgataaagccggtgccgttgccacgctgctagcggtgcgtccggaaagtgcgccggcactgcttgccgcaagtgaatggcgcccagcgtgtgggccagtggaaaacgggaaagattga

SEQ ID NO: 515541 - DNA, 2049 bp, Stenotrophomonas maltophilia
atgacggacgtcaccgtatctccccctacccggatcctgattgacagatcccagatgccggatctcgctcgacgcgtggtcgaaatcatgcgctactggaaagacgcgcataagaatccgccgctcggccaagaaagaatgagcagcatcgttcaggctctttgtcctcagtatgacgggacaccgagctgggcatcccggatcgtctacgacgggaagacgtggcttcgaatgacggcggagcaatcggaacttgtggacaaggtgttgcgtcagccgcgcacggtcgcttctggctggcccggaacgggaaagactcttgtggcaatcgaggcagcccgcaggctggacgccgccgggcagcgcgtgctgttcataacgttcaatgcccggttgacggagcacctgcagcagcagttgcagggcactggctgcactgtttcaacctggcacaagctatgcagcgatgctcgccgtcgtttgaacctatccattgaccagcctgagggatggttcaaggagggttgttgcgaagacctgaacgccgccatcagtcaggaacggattcaaaactttgatgtgctgatcatcgacgaagcgcaggcgatgcagccaagttggtgccggacactggcgagttggttctctagcaagaagatcatggcgttctgcgatgaatcgcagatctttgcttttgaacatggaactgatcccaagacgctgtgcagcctcttcaatgccgaggagccatttctccttaccgtcataatgaggatgccgaaggcggtaaccgatcgactccgttccgtcagatcgacgaactatcaactgtactctccacgtcaggcagagccagacaccatccgtgagattctgcaagaagacttctggtctgcattgcagggccagatacaaggatttcgggctgagggagttgatgctgcggacatatgcgtactcttgcccgccgaaccctccctggaagactccaggataatgacggcactcggcgtcgcctgtgaatcagtcgctagatttcgaggcctggaatctcccgtcgtcatcatcccctttgcagccagcctggacgataatcagctcttctgcgcgtactctcgagcgacaacggtgtgcgttgccctctatgacaccgagcgggtcgcctggggcggaaagggagctttccatcaggctctcctgatggatgacgcgaaccggatactgatcgattcggcccgaactgcagctaagacaagaacgcttctggccggggatatggaggctggatcaatccgattgaagaccatcgatctagcgtggtctgatcgatggcaggcttggatggcgcacttcgaccgcttgaacagtccctcggtcctgtgggttgactacttgctggcgaacaccgagtggcctgtctactactggcacgaagattccaggcgtacagttcatcaagggaacttccagcgggaggaggaaccgtacatcgcatccgacagcttgatggatctggtgcattgcaatcagtgtggtggattcgctccccgcatttctctaaagggcagttgtgcgatctgcatcacgcgcagcgagggtcgtcgcgccccgccgcccgcggaatttgtcgcgaagctgaaggagctggatgcagttcttggaagatcaagtcatctgggggcactagcacgagccggaagacgtggacttcctgcctccatcgcggccatcggcgccaggatccatgcaaatgagaatgcgaaagacaggagggcgctcgatgcaggtatccccgctggaaagcttatataccggacgattcttgcctttgcacaagcgagaatctcacttctctctccgggcgcgagcatcacgattgacgcgctgacggacagcctacgtgagcgctatgaggagatggaacagctggaacgggcgaaactgcgaagcgtggtggctaacgcactggggacctgcctacagaagaagttgattgcgagaagcggtgatactgcaaaaggtagctactgcttggcgcctgagacgtga

SEQ ID NO: 515542 - DNA, 132 bp, Stenotrophomonas maltophilia
atgacccacgagctactgcatccgctgatggatctgtacgaacaactgtggaaagcagccacccaacagatgccctgcagccaccgcgagcatgattccgcctacgatggcagcacatcgggccgggagtga

SEQ ID NO: 515543 - DNA, 777 bp, Stenotrophomonas maltophilia
atgctgacattgacgcttctcctgctgctttcatgcagcgtgctggtcttgaaacgccgcctgcgcagcgctgcacttctggcgacgcttcccatggccattgcagccagcgccagcccgccgatcacgcaatggctgctggaccgcgcgcaggacacgccgcgtgtcactcaacatgcgctacatccacgcactgtgatcgtactgctgggtgccggaatcgatcacgatgcccatggccccaggcccgggctggccggttacagccgcctgatgagggctgcacagcgttaccacgaatgcgatcgcacgcgggaggtctgtacggtgcttgccagcggaggcgtcactgccaacggcgatgtcgctgaggccgatgtctacgcacgcgaactgatggcactgggcgtgcccaccgagcatatcgtccgcgagcgcaccagcgcgaacacctgggagaacgccaggaacagcagcacgatcatcggatatgacagttcgcgggtggtgctggtcacctcgggcctgcatctcacgcggagcttgatctacttccgtcacttcggcgtcgtggccgaaggcctgcccagcgaccgcctccgtgccacccgggggtggttgccctccacattcaatctattgctggtcgaagtgatattgcatgagcgtatcggcgttctgcgctaccacctctacaaccggatgggctggaacgatgcctccatcgacccggtcagcatcgcgcctgcaacaaccacccacgcatcgccgcactga

SEQ ID NO: 515544 - DNA, 456 bp, Stenotrophomonas maltophilia
atgtccagccccgcactccgtattggccggtggtcgcagaccggcaatgtctatgcaatcaccgcagtgacccacgcgcggcgacgctggttcgacgatgagacgaacgtcgatctgctgatcgaggcactacgcacggtcgagcggacggcgcggacgttctccctagcttgggtaatcatgccggaccacctgcactggttgatcgagctgcgacacggcacgcttgccggctgcatgcagatcctcaaatcacggagcgggcgttccatcggcaggcgcgctgaggccaacgcgccgatctggcagccgggatactacgatcatgcgctgcgcggcgatgagtgcctgcgcacacaggcgatgtacatcgcggccaatccggtgcgtgcagggctggccacgtgcatcggggagtatccctatgcgtggagtcgatggttgcttgaggagtga

SEQ ID NO: 515545 - DNA, 1053 bp, Stenotrophomonas maltophilia
atggccatgcccgattcgacttccgcactgcgcttctggttgatcaacaccctcggctgggcgctgttctgcgtgatcagcctggccatgaccggcgcgttcggtggcgccagcagcagtggaagtacgctcatcagcgtcggcctcggcgtgctgctgtatggcatcagcggcagcctgcgcgcgctggccttgcggcgccactggtggcggctggacctgggcgcgctggtgctgcggctggcgctggcggtgctgctgggtgcagcactggcgcaactgctgctgacggcggtgctgcagccggcgctggcgctggggtgggtggattttggcggccgatcgggtgatttccgcccggtcgcacgcctgctctactggctcaacaccgtgctgatgctggggctatggaccgcgatgtgggccggcctgcacggcatgcgcagcgcgcgccaggccgaattggcccgcctgcgcgccgaagccgaacgcagtgcgctggaacgtgatgcgctgcgtgcgcggctcaacccgcatttcatgttcaatgcgttgaacaatctgcgcgcgctgatcctggaggatccggaacgtgcgcgcgacatggtcacgcggctgtcgcgcacgctgcgccaggcgctggcgcacaaccgcagtgagcaggtcacgttggccgaggaactggcagtggtggacgactacctggccatcgaggcgatccacttcgagcagcgcctgcaggtgctgcggcatatcgatgcgggcgcgacgcaggcgctgctgccggcaatggcgctgcagctgctggtcgagaacgcgatcaagcacggcatcgccagtcgcccgggcggtggcgaggtgcggatccatgcctcgctggccaatgatgtgctgcagttgcaggtggacaatccacgtgcaaccggcagcgaacccaaccatggccatggcgtcggcctggcctacctgcgtgcgcagctgggcacgcgtggccgattcgtgctgcagccggtcggcgaccgcatgcaggccctgctggagattgcgcaatga

SEQ ID NO: 515546 - DNA, 1236 bp, Stenotrophomonas maltophilia
atgaatcgcaagggtgacaaatcgctgatcgttggcctggacatcggcacctccaaggtggtggcgctggtgggcgagtattcgccgggcaacccgatcgaagtgatcggcatcggctcgcacgaatcgcgcgggctgaagcgtggcgtggtggtggacatcgaatcgaccgtgcagtcgatccagcgtgcggtggaagaagccgagctgatggccggctgcgagatccgttcggtgtacgcctcgatctccggcaaccacgtgcagtgcaagaactcgccgggcatcgtgccgatccgcgacggtgaagtgacctggggcgacctggatcgcgtgctcgacgcagccaaggcggtggcgatcccggccgaccagaagatcctgcacgcgattccgcgcgagtacgtgctggacgattcgcaggagggcatccgcaacccggtcggcatgaccggcgtgcgcctggaggtacatgcgcacctggtggtgtgcgcgcagtcggcggcggccaacatcagcaagtgcgtgcagcgctgcggcctgcaggtggacgacctggtgctgtcctcgctggcctccagcgtggcggtgctgaccgccgacgagcgcgagctgggcgtggtgctggtcgacatgggcgccggtaccaccgacatcgcggtgttcgtgcagggcgcgatctgccacaccgcctcgctgccgatcgccggcgaccacgtgaccaacgacatcgcgcacatgctgcgcacgccgaccccggaagccgagcagatcaaggtgcgctatgcctgcgccctggcccaactggccacggccgaggagagcatccaggtgccgtcggtcggcgaccggccgccgcgccgcatgccgcgccactcgctggcgcaggccgtgcagggccgctacgaggagatcttcgagatggtgcaggccgaactgcgccgctccggcttcgaggaactggtgcgcgccggcatggtgctgaccggtggcgcgtcgaagatggagggcgtggtcgaactggccgaggaaatgctgcagatgccggtgcgcgtgggcatcccgcagcacgtctccggcctgggcgaagtggtcggcaacccggtgcacgccaccggcgtgggcctgctgctgatgggcagccagatcgagcacccgcggcggccgtcgctgccgaccgggcgcgctggaagcatgttcaagaaactcaagacctggttccgcggcgagttctga

SEQ ID NO: 515547 - DNA, 4617 bp, Stenotrophomonas maltophilia
atgaatcgaatctatcgacgtatctggaatacagcacgccagtgctgggtggtggcgagcgagctggctgtcgcaaggcgctgtggtgcttcaagaaggaagctggcgttgcgggttgttgcactttccgtgtccacgattggcgctatggacgccggcgcagtcgagtactgggggtgtgacgtcttcgatctgggcaagcccgagctccgctgcgcgccacaccttggtcaaaccgatgcggtcccctatgcaagctccaagttgtccacgtccaaggagtatctgatcatgggcggcggggcctacaacgacggatcgtggaacgccacctttggtcacaaagccaaggtgcttggcaactacaacactgctctcggccagcaggcatacatcagtggtgtggacagcgttgcagttggctacaacgccacggcccagctggggcacagcacagtggtgggtgccaacgcctatggcaagggcatcgggtccactgccttcggaaacaaggcgtcagccacgcgccagaactcgattgccatcggtagtggatcgctctcgcagagcgagaactcagtggcgatcggtgcaaattcccttgccagtgaagtgaacaccgtctccgtcggcagtgacaaggagaagcggcggatcgtcaacgtagccgatgggcggatcaccgcagccagtaccgacgccgtcacgggcaagcagttgtacgcgaccaacagcaagctgggcgcggtcgaagcgaacgtcggcaccatgaaaaatgatctgtcagcggttcggacgcttgcgcagtccgccaccaatcgcatcgatgccaccaccctggcactgggcaggggcgcggtcgcagaatcgggcagctacggcatcagcactgccatcggcaacaatgccaaggcctacaacggtcgcagtgtcgcactcggattcgatgcgctggccggcgtcgatgcggagggcaaccgagtgaccggccagaatgccggcgtttccatcggtgcaaacacgcgcagcgcaaacggcgcggtcgcgaccggcttccgggccattgccagcgggaacttctccattgccgtaggcggtgacgccaatgcggccgccgaacatgccactgcaatggggtacctgagcaaagccacggcaaagcagtccacggcgctggggcgtggcagcgaggccaaggcgcagttcgccaccgcgctgggcaatcttgcggtatcggccaataccagtgccgtggcactgggtgaccgggccaacgcccgccatgacaatgcggtggcactgggtgccggctctgtcacggcgtcggtcaactccgtttcggtgggcagtgccacgctgaggcgcaagatccagtacattgccgacggcacgatcagcagcgccagtaccgacgccatcaccggcagtcagctgttcgcgaccaaccaggccgtgtccactgcgcagagcacggccacgagcgcgcagacggcggccaatgcggccaaggccgacgccgccaaggcgctgaccgagacgaccgcgctcgccggcctggtctctcagaccgccgccagcggcaatgtccgcttgggcgagaagaacagcggcactgtactggacgtgcgcaacagcgccaacgccagccggaaggttaccggtgtagcggatggcacggtaagtgccagcagcaatgaagcggtcaacggcaagcagctcaatgccaccaacgtgcaggtggctgccgtggagaaagcggctacggcggcgcaggcggatgcaacggctgcgaaggcagacgctgccaaggcgttggtcagcaccaccgcgctggaaggactggtcagccagaccgccgccaacggcaatgtccgtctgggcgagaagaacagcggtactgtgctggacgtgcgcaacagtggcaacgccagccggaaggttgccggcgtggcggatggcacggtaagtgccagcagcaatgaagcggtcaacggcaagcagctcaatgccaccaacgtgcaggtggctgccgtggagaagtcggctgctgcagcgcagaccgatgccgctaaggcgttggtcagtaccgctgctttggaggggttgctgagccaggtatccgcgtccggcgatatccgggtgggtggtaagaatagtggcttcctaatcgatgtacgtaacagcgcaggtggagatcggacaatcagtggcgttgctgatggcgtggtgactgcaagtagctcagatgcgatcaatgggaagcaactgcatgtggtgagcgaggttgcaaatggtgccaagcgttcggcgcaagacgccatcgaccgaattggcgcgattgcggagcagtccaagtacttctatgtcggtaatggcggcccagatcagggtgccaaggcaggcttgataggcgtagctattggagactctgcagaggcatcgactacatcagaaggagctgttgcaattggtggatttgcaactgctcttgcaaagaactcagtttcactggggcgagcctcccatgttgctgctgacgctgagaacgggttcgcgctcggcgtgttctcaaccgtagaagcaagtggtggcgtcgctctgggtgcaggaagtgcagtcgagaagggggcctctagcagtgtagctatcggagcaggggcagtcgcagctgagcctgacgttgtctcattcggcgccggatcgctccagcgccgtctggtgaatgttgcccgcggtaccgccgatcacaacgccacgaccgtctcccagctgaaggattctcttgccaccctcggcggcagcgcaggcatggatgccagcggcaacatcattgccccgatctactcggtgcagggcgggacgcagaacaccgttgaagacgcgttgatggccctcgatggtgctgtcatcaccgcaggccgccgtgcggacaaggtggaaggccagctcaactcgatcttccgggattcaccctcggtccgtggcgatggcatgaaccagatcgcgctgagtggcgcgaacggcatggtgttgaccaatctggctgacggtcgggtggcgccaggaagccgtgatgccgtaaccggcaatcagctgttcgccgcagagcagaagatctcgcagaatcgaaatgatctggaggcgatgcgtaaggggcgggagatgggaccgcaggcaatgcgtggattggttgcgagcggcccgatcgattttggcggtgcgcgtttgactggcgtggccgatggcacgctctccgtggatagtcgagatgtagttactgggcgccagttgttcagtgttagcgatcgggtatcgcagattgagaaccataggcgattctttaaggttgatgtcgatgagctgagtcaggatgcggtggcaggattcttgggagtagcaatcggcgactccgcacgtacacagcgcgagggtggaaccgccgttggggccttttcttctgcattggcattcaattctgttgccttggggcgaggggcgttcgttgaggagcacgcagacggcggatttgctgtaggagttggatcgagggtcggtgcgcaaggtggcattgcaattggtgccagtagcaaggttggtttcaatgctctgggttccgtgtctatagggaatgggtctgaggcgacggaagcgggcatcgtgtcgttcgggaatgcgcttagcaaacgccgcctcgtaaacatcgccaacggcaccgccaaccacaacgctgccaccgtcggccagctgcgcggggcgctttccgcgctcggcggtgacgtcgatgccaacggcaacatcgtcggccccagcttcaccgtgcagggccagtcccagtccaccctcaatggtgcgctggaggcgctcgacggcgcggtcgtcagtaaccgctcgcgcgtgaaccaggtcgagtcccagctgcgcagcgtgttccaggacaccccctcggtccgcgccgacggtctcaaccagctcaccctcgccggaacccacggcatggtcatctccaacgtggccaatggcctggtcgccgccggcagccgcgatgcggtcaatggtggccagctgcattcgatgcagcagcagctcaacggccgtatcgatggcctggaagagcgcattgatgcgccgcagacgcgggcaatggccgtcgcttcggcgccggagccggaagcaccggtgccgcaggccgaaggcggccagcaggtggcgtcggtcgccgagggtgagaagcccgcgctgcagccgaagtcgaagcaggacgacacgcccaagccgcaggtcgacaccgctgaattggagaagatgctggcccgcgccaacgagtacaccgatggcgcgatcagcaatttcgaacgtcgcctggacaagatggacaagcgtttcaaccgcatggcggcgatgagcagcgcacagaccgcgatggcgatgaacaccgcgggcctggccacctacaaccgcctgggtgcgggcgtgggctacagcgagggtgagtccgcgatggccgtgggctaccagcgcgtgctcaacgagaagggctcggccagcttcagcctcaatggtgcgttcaccaacagcggtgagcgcagcatgggcgtcggcgtgggcatcggctggtaa

SEQ ID NO: 515548 - DNA, 1137 bp, Stenotrophomonas maltophilia
atgagccggcgtgtgttgttcgtgttgatgctggtgtgcgcgctggccgtgctgatgccacgtgcgtgggcgcagcggccgccggagacggatccgcccactggtgtgattacccacgacatcaagttgtcatgggatcgttcgtcgctgcctggcgataccgagattatggcgccaagaacgctgatcgcctacgaccaggttcctgccaagggctacggaatgctctacctgacctgtgcttcgcgctcagattctgcaaccgggcggtgcgagaccgaggacttggctgccctacagggaaacggaactgcaattcccctccgcttccaagagaagcgcggtggcatgacaagagacctgctggtcaatggtgccctatatcgagcagacgtttcccaacggtgcgacttgggcttctggcgatcgctgacctaccgattggagtcgtcagaatcagggatgtgcgtggcagaaaagcctggtggaacagggctgggcctggtactccatgcaacggagctgtctggcctcgtcgctggaacctggctgggcacgctcgagttagatctgcgaatgccaccatcttggcatctggcgaagtatgtcttcaatttcgagttcaccgtcaccgactacgacgcgatctcgatctacttcccggccttcgacaccgtcgcgccgctggtcaacatggacctgcgctacgaccccatcaagcagatggtgggtggccgcaagcagctggagatgtgcctctacgacggcctcggctcgcagagcgaattcctcggcgtcaccgtgcgtgacagcgggccgcgcccgccacccggcagcgacttcgcggtctggcaccgagatggtggcagcgacgaccgccagcgcttggattaccacgtcagcctgaactacggcgggcgcgatatccgaatgcggcatggcgtggaagaactgctgcatggcatcgacagcgccgaactgcgcctggtgatgctgcccggcatcagccagccggtctattgcgtgcccacaccgctgacattgctgacacctcccacccctgtcgccagcaagcgccccggtctctacgagggcgagctgacggtggaactgcgcgtacccaccgccaaaccctga

SEQ ID NO: 515549 - DNA, 765 bp, Stenotrophomonas maltophilia
atggccaacacttttcatcgcgtggggcaggggcctcacttcgtcctggtcctgcatggctggttcggtgacgcgcatgcgttcgagccgatcgagccgtggctgtcgcgtgatcatttcagctacgtcttcatggattgccgtggctacggcggcatgcaggatgcggcgggccagtacagcatcgacgaggtggcacatgatgcgttggcgctcgccgatgcgctgcggatcgacaccttcagcgtgatggggcattccatgggaggcatggcgatcgagcgcattgctgtgctcgcgccacagcgtgtgcgatccatgctggccatcgcgcccgttccctgcggcggtattgcctatgacgcgcccacgcggcgcctgttggagagtgccgcgggcagcctcgccacccggcgggccatcatcgatcgcagcagcggcgggcgtctgcctgcgacctggttggactggaaggccggctactcaatggagtgctccgcgcccggcgcatttgctgcctatctttccgcgtgggcagatacggatttcagcaatgagatcgttggtgaacatcggttgaaggtggtggtgggtgggaatgatccaacgttcaaccgatcactgatggagaaggcctatctgtgccgctatcgccacgcaacgctggaggtcatcgaaagtgcagggcactacccgatgaatgaggcacctttggcattggtggcggccatggagtgcttcctgttgtcgttgcccgggaggtag

SEQ ID NO: 515550 - DNA, 1350 bp, Stenotrophomonas maltophilia
atgcagcaatgccctatgccgatgtgcctgcattcatgcgtgtacttgcagagcgtgatgcgcgtgcacgtcgcgcgttgcggttcaccataccactatgcagcggtcggctcgctggacgattggcgacgcaacgtggcccggcgatgccaggacaactcgcgcctggtgctggcggtgtcagccatgttcgccgggcccttgctgcactttaccggcgctacgggcggtggcttccacctggtcggcggcagcagtagctgcaagagcaccgcgctgcgcgtggcggccagcgtggtcggtcccccggaatatgcccgcgagtggcgcagcacggccaatggcctggagggcgtggccgtgctgcacaacgatgccacgctgattctggatgaactggcgcagatcgatcccaagcaggccggtgatgcggcctatctgctggccaacggcaatggcaagagccgcgccaaccgggccggtgaggcccgtgcagcagcacgctggcggctgctgatcctgtcagccggcgaggttggattggcacagcatatggccgaggtgggcaagcaggtacgggcgggccagtccgtgcgcctggccgacgtaccggctgagaccgagggcgggcatggtgtgtttgagcgcctgcacgatgccggagacggcgcggcgctgtcggctctgctcaaggacgccgcagcacgcacctacggcgcaccgtggccgctgtggatgggttacctcacccagcaggacagccccacgttgaccgcccaactgcgcgagtcgaccgaccgattcctggccacctatgtacccgacgatgcctccggtgaggtgcgccgcgtggccgaacgctttgccgttgtcgcctttgccggggagttggccagcacctgccgccaccgcatcaccggttgggccaagggcgaggcgacacggggcgtggccacgtgcttccaggcatggctgcaacgtcggggcggttccggcagtgccgacaccgatgcgctgctttcccgcgtgcgtgcgttcttcgaggcccatggcgagagtcgcttggagccgctgcgctacgcgcaggaagcgccaccagtgcgcgaccgagcgggcttccgccgcttcgatgaggtgggtgtcaccgaatacctggtgctacctgaagcactgaaacgggagttgtgcgcgggcttcgatcctcgccaggccacccgtgagctgatcgcagccggttggctcaaacccggctccgatggcaaggcatctcagtctgtgcgtgttccaagccttggcgcaatgcgtctgtatgtctttgacagtcgcaaggttcatgacggcgcgctgtag

SEQ ID NO: 515551 - DNA, 750 bp, Stenotrophomonas maltophilia
atgagcaacatccagaccagcaacaccactacctccgaaccggctattcaacccgtcgacggggccgaggttgcgccggtatcggagaataggcggcggctgaacgagctggcccaacagttggccagcgtagtgcagcgcaagcgcgtcctggtgggtaaggtcgatacgatgcagcgcgccaaacaggctgcacagggtgatgccgccgctgcacgtcagcagtggagtgccaagctgcgcgatagcgatggcacgctgacccgcgacattcagaagctgcgcgccaacgagcggtcggcgctctcgctggctgaggaatatgaggcaatggagggtgagattgcggctgaactgcctcgcctggagctggaactggccgaggttgcgaaagactgcctgagtgcgaagaacgccattgcaagtgaagctgccagccaggcctatgggcagttgctggagcaagtggttgatagcctggcagtagcctttgccttgttctctctggcggagaatgcgggcgtggacaatcggcagtcggcgagtgccgaagaattggccagccggttctttgtccgcctcggcaatgcggtgcgctcgcgcatggacgatgccacagtgaccgagcaggttgcggagcgcttggcattgccgccgatggatatgagtgaggtagatatgcagctggcgggcagtgttgccgcacgtatcaggcggcgggtagcgctcaatgcagagcacacggcgtaa

SEQ ID NO: 515552 - DNA, 2766 bp, Stenotrophomonas maltophilia
atgaacgcgccaactggtagtcttgacgcagcaacacattcccatgtgttcgaagagaaagtcgttcctggcagcggattcgctcaagcttcttcacaatccaagcccaaggcaatcatcctcgcgggacaacccggagcaggtaaaggtagtttggcgggaagggccgagactgagcttcagtacgatgtcatcaagatcgaccctgatgaactgcgcggataccatcccgatattgagaaattccgggaaaaccatccctacacgtggtcctcgtacacccactctgatgccagcgcatgggctgacaagctgttggatgccaccgttgcgggcaagaagaacctgatcttcgacaccacgttgagcaacggcgagtggtcgtctgaactgatcaaggacctgcaatcgaagggctacgcggtggaggtgcgcgccgttgcttctgcgaagcttgagagcgagctcggggttgagcagcgctttgcaggcggtctagacggcaatggctacggccgctacgttcccgtcggtgctcgcgatgcgatctacgagaagttgcccaatagcctggacctggtgcacgaacgcaccgatgtgcaaattcgcatcttcaatcgtgaaggcaaggagttgtacgacagccacaccagcccgaagttgcctggggctgcgttgcaagaggcgcgcgaagcccgactgaaagatcccgccctgacgcgccagctgcgcgatggctggcaggagcaacaggcctggcaccgtgatttgccacagacactgccccacaacgacaaagtttctcctcccacacgagagaacctgctaacagagcgaagcgaagcccaagtggtcgaggggcttgaccggcaggcgcgggaaatggtcgatatcgatcacacggttcgcgttcgccccacccgtatacgcgcaggcagcgcgctgggcatcgcagctctagcattggatgcctatgacgccggtgaggctttgcgcaacagtagccgtctgcgcggtgaaggcaatgacactgccgcagaatccgggctcatccacttcggtgcacgtagcgttggtggctttgccggtgctggcctgggcatgacggtcggagcggtcgctggcgtcgagtcaggcccgggtttgctggtcacaggggccgtcggtggcatagcgggcgcgttcgcgggcgacaagatcgccgagtggacggacaaccgccgaatctacaaccaggccgacagcctggggaacacttggacctacaatcctgaccatcccgatcagggctggcagcgatccgcgcctgtggatagcaccaacgacggcgtaaacaacccagccagtggcgtgctgcgcgcgccaccggcccttgccaaccagctgaactaccaggcaaccagcgagtcagtgaaattggtattgggcagcccgcccagtcagcgcgacccgttcacacagcccgccaatatcagtgacccacaaagctggtatccggcacagtggacacggacagccgatggtctgcagtggcagcgcgaggtgaccactgccgtgtatgaacttggccagcgtgagacccgaattgacgtggccagtccagaacgagcggccgagctcgatcaggccgccgcccaggtcgtgctgcacaatgctgccaacagccgaccggcaattgcagcgcgctacgaagcagcgtatgcccagaatggctgggcatcctatggctcgatacccgaagctgtgcagcaggcgcgcaccgatctggatgcggtgaccgcctccgacgataaccgctatcagcgtcaggcggacggccgttgggtcagcgaaggagtgatctacgattccactgccaccggcaatctgcgcgccgaattggatgccacccgcgacgtagtggccgccacgctacctccacctcaagcgacacagagcccgtcgccgatgacggccgatgagcgcatgcgcgacacgctgcagggcgcctacgctaacgccggggttgccctgggttcagaacaactggcagcgagcgcggcagcagtccaggccacacaggccgctcaaggtctggaccccgacaccactgccctgcaggtgcagcgaaacgccgatggcggttacaacatggccagccctattgccaatctgcgtctggcgtccgatggcaagacctacaccattgcggccgtgaccacgactgaggacatccgccgagcccaggaacgggactctcctatcagcaacgatagcccgcaacagaccgtgcggtcctcgctcgaccaaccagtaggcccgcccgatgcagagagtgcgacgccttccctacagtcggcaatgccatcaactgcaatggctgcaatgcaggccgacccactgtatcggcagatccgcgacggcgttgtagagttggacacacagcatggacgtgaattcgatgcgaccagcgagcgcatgacggcaagcctgctcgtattggcaaagaacagtggactgacacgagtggatcatgtggtgttgagcaatgccacctcagtacatccggccgcgcacaacgtgttcgtggtccagggaaagctggacgatcctgcccatctgcgtgcggtcatgcccaccgagcaggcagtgaaagccccgattgaggaatcgatgcagaaatacgaagtggctagccgccaggtggaacagcaatcgcaggtcactcaactgcaggaacagcatcagcaggatactcaggccagagccgccagcatggggcgatag

SEQ ID NO: 515553 - DNA, 354 bp, Stenotrophomonas maltophilia
atgcgacacgcttctccgcctcccgtaccgcaaaaacttcgggacatgctcaaagactatccggagcatatcgagacgctgcaagctgacttgaatcgcgtcgtccaaaatccgttcaagggcacgcccatgtctgaacaggctatttgggcattagaggctgcgctcgatgcgttcatcgacgaagcccgtaaagaactgcaggcggccgaagccagtggcgatccggcggcaattgaacaggcgaaggcaaaagaacttcttatgttccgagcccgctctggcaatggaggaatgcggctcggattgatgaatgatctttggggctacttcgaatcgaacaagggcgtttaa

SEQ ID NO: 515554 - DNA, 609 bp, Stenotrophomonas maltophilia
atgaatatactccttctacaccccacacttccgattgttacgatcgctgcaggggtcgcttatttttctcttaagtcacaaaggcacttggcgagagctaagcacaccttagattttgagaaagagttcaaagataaagagacggtcaagctgcgcgctgtggtgaaggtgttgcgactgcgcacatcagccgagctagtgcagctcgcagtgcactcccctctggatcatgaggaggtcagtgatctttgcgatgctttaaatgtgtgggagggggtcgcgatcggcctcaaggccaaagtctacaacgagcaaatgatgtatgacgcatttggccatgcggtgattaaactctttgatatggcgataccattcataaaggcgcggcggttggtaaccccatctgtgtatgtggagttgtcctggctcgcgacacggtggaaggttcgcgctgggaaatctctcgcctcgccacttatcaaggatgatccggctgtcgatgtggcgaaaatgatcaaaaagaatagacggctgcgaagggatatcttccgttacaagcggattgttatttctttgcaggagcgtttggataagcggactgaccgctga

SEQ ID NO: 515555 - DNA, 339 bp, Stenotrophomonas maltophilia
atgagcgtgccccctcccctgcttgaccaaccggtgcccgcccgccgcaatctcacgacgccacgggaccgatttttctggtggtattcgggtgccctgctcctcactggacctttcgggttcgtcgttgggccgctcatggcccgacgcgcaagccggaaggcggctcggctctacccggcagaggcccgcgtagcccaggctagggacaagggcttcgcttggtggcagtggtgggtcatgactgtcctgaccctgatgggcgcgttcggagtcttcacactactgagtgggctgccgatgcttcttcttgtgatgtatgcgaatttgaatcaatag

SEQ ID NO: 515556 - DNA, 756 bp, Stenotrophomonas maltophilia
gtgaaaagtgaatttttcggctcagctcctttcacacctcagggagttgtggatacgtgtcttgcctatatagagtcggcataccagctaaatctcatcgtccgctctagcaagctccaagaagcgaagattaaggagatggatgatttcatcgcggagcttaaggccttcaaacattgggccattgaccatgaagtggaacaacatgctaacgagctgtttcacttccagtgctttataagaagcgttcaatcgtgcctagagacgtgggtaaacattaagaacagtgagcctgagagcgcttggcactccctaatggatgctattgactacaaagacatagccttaaggattagcgattacgaagggatcaggacccatgaaacattgctcaccgacgcgcgacgggtgctgtttcctgagaacatggtcttcaacagccccgctttccgctccacagtaggcgactgttcgatctgccgctcttcattcaactcctgtgaacacattgaagacttcatatattcaggaaggctctgccgcaggatcaacatttcaatcttggaagccaatcactccgcgattgtgaagaacccacgcgacccacgctgtatcatgaccgagcgctcggacgaggctggacgtatgattaatatgctttcgctggagttgaccggagaggagagcgaaaggtctaacgatgcgatgcgcgtgaaggggattctgctttccaccaggtcgctggatgttgactaa

SEQ ID NO: 515557 - DNA, 264 bp, Stenotrophomonas maltophilia
atggaggtggaagcgtatacgggactgccggattctagactggccaacacgggaaggatgattacttccttctttgcggcagcctcggaaagggtaggggtggggattgatgtggtagtgatgctttcactgatttccattttggtcatagcccgcgtgccaaagtttgggtggaatgtgttgtggatgctgctagttttcattgccagtcaggaggcgtgctatcggcaaagcagcctaagtgtttggggtggcgggcactag

SEQ ID NO: 515558 - DNA, 1947 bp, Stenotrophomonas maltophilia
gtgaagcttacacacgcacggattaagaactttagatcgctccgcgatgtcagtctcagctttgaatcccacactgcgctaatcgggggaaatggagcaggcaaatcaagcatcttgaaagcactggaaaagttctactcgaccggacgacacctcgaccaagatgactactatggtcgggatgtcggattgacggtagaaatcgaactcaccttcagtgagctgagtcaagaggaagctgaggtatttgaaagccgggttcgagaggggaagctcgtcgttactcgtctgttcgatgcgtcagcgtcttccggacgatactttggctcaacacttcagaatccagacttcgctccaatccgagccatgtcaggagcgatggacaagcgcaacgcctataggcagctgcaggagcagaacccagcctacgccgaccttcctccagcatcacgcggcaaccaagtagacgagcatcttcagcaatgggagacgacccacccggagcagttgacgcttctgcgggacgacgggcagttctttggcttccaaaatgcgggcaggggagcacttgagcggcataccagctttgtcttcgtgcctgcggtgcgtgaggcttcagctgatgctgcggatgggaaatcaagcgccatcggacgcttgttagagatcgtggtgcgtagcgccattctgaagcgtgctgatgtgctggacttccaaaaggaagtcacagagcgatatcaggcattggtagcgccatccaacatgccagagcttggggaactagcctatcgcctgactggcgacctccagagcctttatcgagatgccgctgtcggcctaacctggcgtggagcagccgacattcctgtcccacttcctgtggcagatgtcacccttagtgacgaaggcttcggaggccctgttgatcgacaaggccacggtctgcaacgagccttcgtgtttacgcttctgcagcacttggcaaagtcgagctatcaacgacaagatgccgatacgcaagccccccaaaccgcgccaagcctcatattggccatagaagaaccagagctttaccagcatccaaccaagcagaggcacctcgcaagcgttctaagaggcttgagcgaaggcacccttcctggatcctccggtgtgacgcagattatttttggctcccattccccggtatttgtagctcttgaacgcgccaatgaaatccgcctcgttcgtcgcacgaagtgcgatgagagcgacttcaaacaggcccagcttcaatctttggacttggaagcagtagcaaggcagattgagagcgcctggagcaagccccaaggaacttttacagccgctaccctcacccctcgacttcacatactcggcgcagagcttgccgaaggattttttgctaacggcgttgtcctggtcgaaggccgaagcgataaatctgctctgcaagcctgcgcaaaggtgttgggcctcgatttccaagcagcagggatagcggtgctctctgctgaaggaaaaggcaacctggaccggccctacgccatcttccgcgctcttggcattcctacttacatgatttgggattgcgaccgcgggggagttaaggaggccgccgtgaacgcggcgctactgagtctagtagatgagggtgccgcatatggcaacccactaaccacctgtgtggctggcaactacagctatttcgaaaacacactcgaagccatgttgattgctgacatcggagctgatctccaccagcagtgcctggaaagtgcctgtgagccgttcggattggtggccagcaaagaaacacacaaaatacctgaggtcatgcatcaagtgatgctaagcgcacgagagcatggggcgtggtcaaccaccctggaacaaatcgttagagcaatatggctacatctagtgcccgccaccccaaacacttag

SEQ ID NO: 515559 - DNA, 297 bp, Stenotrophomonas maltophilia
gtgacaaaggaaatcgtattatccgcacttgaatcaggaaaagttctggaacttcgatacgatggcttcaataggctagttgaagttcacgcggtcggtctgagcatgaaagcgattccatgcatgcgtgtgtatcaggtgtctggaggctcagttagcggcgagactgagggctggaagctaatgctcatcgacaagagtttttccgctcatctcacggacactccgtcgcaggcccctcgcccgggttattcaaaaggcgacaagggcatgacaaagatctttgcagagatttag

SEQ ID NO: 515560 - DNA, 465 bp, Stenotrophomonas maltophilia
atgacgttcaatctggaagaagcccgcgaggcttttgagcacttcctgatgttgatggacggccagattgaatggctggtcgcgcaggctcaaatgcatggcattgaactggattgcagcctcgaaagcctcgacaggctggaacacctccatgacttgatggcagccacgctgtctgaggatgagcgggactctctgagggtcgtgttcgcccgatatctaggggagaccgtcaggctggcacacggtgggaagtggaccctgccacttgatgacccaaaggacatcagtttcaacatgcccgttatcgtggggcactcatcctgcccgtggttggaattcaatcccatccatacgatgcgagcctattcacttcgggccaagcccggaatgatccgaggcatcgtagcgcacagtgttgctccacagattctggatctcggcgatctggtggaagaggactga

SEQ ID NO: 515561 - DNA, 150 bp, Stenotrophomonas maltophilia
atggcggggcagggggatggcgatccggactggatcgggtcccacgatgccgccaccgatgcagatgcgaatctgccgcaagcagggctgaccgacgtcacggtgagttcggtcacgatgacctccggcagggccggattgcaggcatga

SEQ ID NO: 515562 - DNA, 642 bp, Stenotrophomonas maltophilia
atgcaacacgacctttggcctgagcttcgagctgcggcatctcaaacctcggggctcaacgtccacgaatacgcgtccaagctcctcctgcagctcaaccgcgatttgatggccttgcccaacccggacatctttgaacctcgggtgcccgtcactgatacgcgtttcttagatctggcatccagcgcattgaaagtggccgatggcttgcgcacccgcgccagacgggccggcactgaatcatccgcctttcaccaagagttgaactctgtccttcagcagatcagtagcctgttcagcagactggacatcggcgatcctcgagatgctttggaccgctaccgctttaacgaagctgcgctggactggatggacaccctcggcattcacccacccagtcccggcggtgccctttactggaccagaccgcgcaagctgatgccgcttgaggagatccacaagaccatccttcgcaatgactcaatgctgaaagccatgctctcgccgcctgcgccaaagacgacggaggagtgggttcgtgaagcccgtcactggcaaacccttcgccgtcattgggcgccagtgcttgaggagttttgcactcaatcggcgaccatcagcggagagctggagcccgtgtag

SEQ ID NO: 515563 - DNA, 918 bp, Stenotrophomonas maltophilia
gtggcatttgactggacacaactttccctcgccaataccccctggcgcatccgggtcgtggccgacatcctcccgatcctgattcgacgggccaaggaaggaaggcctatcttctacggggagctggccgaccagctggagcacgagttcggacacgagcccaaggcgcgcaagacggtctacgggcctgccgttggcgcggtggggctcgccattgaacagttgggacttctgccggagtggcgaggggagcgcatcccgccgatcaacaccatcgtggtgagcaagagcaccggctacccgagcacgggcgcggatgaggttgcccactacttcttcgaggacaacggtgcaggcatggctgccgaccggaaggcttacctcgacgccgccatgagcgcggtctaccactacgacaagtgggatcagatagcagcggcgctgggcgtggcccgccttgaacccgcgtccggggagctggaggccgacaagggggacatgctgcccttgcccaaggtccaaaccggcggtgcaccagagagtctcgaacacaaagctttaaagaagtgggtgcgtgaacaccccgaagagctgtcagacttcggcgagttccagctcgggaggaacgaggcggtgttgagcagcggggatcggctggacgtgttgttcgacaacggaaagcagcgcttggcagtggaggtgaagaccagcacctgttcggaggacgaactcatgcgcggcgtctaccaatgcgtgaaatatcgcgcgatcctgcgggccgagcagttagcgacccgtcgggtgcccaacggggatgccgtcctgatctgtcctcgagcccctcgaaagaccaccaaggcgctcatccgacgtttgaacgtgaactttcatcgggtgccagtggacgccgaacaatga

SEQ ID NO: 515564 - DNA, 786 bp, Stenotrophomonas maltophilia
atgaatctcgcacctgatccgctggaagccgttcgctgggagcaccacgaggtggccgtttacagcggcctcgaccttccctcctttgctactttccggcgcgaagtagtgctggcctccgtctcagcgctggatactaagatcgacgctcttgaaaacagcaaagaggaggtggagcgggtcttcgccgtagatcactacgctgacatccggcagtcaaccatcgaagcgtttttgctggctacgcagtccatgcatgaacgagcccttcgaggattgatggttggcatggcagggaggaagagctggcccgccggcaaaatccagcagattcagcgctgcactttggacggcaagggccccaacctgctgcgcttctttcaggacctgttcgatgcacccatggaatggttcggcgtccacgccgacttgcagttccttcacttgttgggcaatgcgcttcgacacggcaacggcgactctgcaatcaagatccatcagctcgcgccgtcgctttggataacctggcttccgccagggtcgaccattgggggcctctacaccgttccgctcgacgcgccgcggcatccggccttcgacacgatcacccttcctcgcgtcctgctcgagcagatgatgatggcggtgcgaggattctgggaggacatcgagtttgtccgctgcaactcgttctccaggaaatctgaaggggtcgaaaagcacatgaacgaacttcgggaacaacgcgcgcgtcgatcaaatgaacgcgtctggaggccaggctag

SEQ ID NO: 515565 - DNA, 705 bp, Stenotrophomonas maltophilia
atgaggaaagcagtggacgtgttgctgcgtgttgttgtgctggaggaagaggcaattgcccgcgagcgcgtcctggtgccgcgcctgctcgcgcagggattcgatgtggcgggctgtgcgtgcatgcgggaactcgatgagctgatggcccgttggttgcccgatatcgtggtgatgggcgtcgacctggaagacggcgatggatttgcagtggtgcaggggctgagatggcgacatcctgcaatcggtcttgtggtcctgaccgggcgccaggggcgcatggatcaggtccgcgggttggtacacggcgccgatgcctatctggccaggcctgtcgacatggacgttcttgccgcaacgctgctcagcctcgggcggcggctgctgcatcgcgggccggctgcctgcgggccggggcaatggcggctggactgtggcgcatggaagctgctttccccgaagggcgacgacattgcgctcagccgcaatgaacgcgccaccctgcaatgcctgtttgaatcctccggtgctgttgtttcgcgcgagcggctgatcgctgcgttgacaccggacgtcttcaactttgatccgcaccggctcgactccttgataagccgattgcgccggaaggtgctgcggaacagtggcgagccgctgccgctgtctaccgtgcacggcgagggctacgtccttctggtgtcctga

SEQ ID NO: 515566 - DNA, 3030 bp, Stenotrophomonas maltophilia
ttgcctcggattctggtcgcgtgcgcgctgctgcctgcatccgcactggccgtgccgcccgatgcaggcatcgatggcaaggatggtgttgcgctgggccagcgtgccgaagcgctgggagatggagcaacggcgttgggcgcggatagtctcgcagagggcgacgccagcatcgccattggcgaagccagccatgccagggacgagggggccatcgcgatcggacaaggagcactggcacaggaagcctccagcgtggcactgggagacggagcgctggccgatggtgaggcgagccttgctctggggtctgccgcatcggcgataggtaccagtgcggtggccgttggctatggtgcgtcagcactgtccgcgtccgcggtcgccctaggtgaatccagcttcgccggtgctgccggtgccgccgcgctgggtgcgctgtcgagtgccagcggctacgtcagcctcgccgcaggcgcggaagcaagcgccataggcaatcattcgttggcattggggcacgtggcgcttagtgcggggcctttcagcgccgcactcggatggtcggcgagcagcctgggggactactcactggcgcttggcgctgcgtccactgcggtcggtgatggctccgtggcagcgggcatgggagcaatcgcgagcgggtggcgaggtgtggctgtgggctacgtcgctcaagcggacggcgctggcagcattgccattggcgggcgctatgcctgcagcttctgcctggcctatgtcaccgaggcacagggtgacaacagcatggcggtaggggctggggcccgttccgttggtagcggttcggtcgcattgggggcacattcgaccgcccaggaggatgaggcgttcgccatcgggcatcaggcgcggtccgatggaatgcggggcattgccatgggggcaggcgcggaagtcggcgcggaagcgagcgagagcattgcgctgggcgtggctgcgtttggtggcggcgagggcgcgttggcgctgggcagccaggccagtgccgagggcgtcggcagcatcgccggcggctaccagtcaggtgcctatggcgatgcggccgtggcgatgggcatgcaggcactggcagtgtcggacggcgccgtgggtattggcggcagcagtaccgccagcggcctgaacggtgttgcggtggggcagggaagcagcaccacggccgacttcgctacggcggtgggcggcacctatctgggcccgatacgcgacgagcccgtagcgcgtgtcactcatgctggcggagagggcgctgctgcatttggtgcaggtgcgcgtgccgacggtgcctactcgcttgcggtgggtgcggggtccagcgccaaagcgacgcagagcacggcgattggtttcggcgcggaggcgacaagcagccgcacgctcgccgtcggtacctacagccgggcggtgggcccgtggagtaccgccgttggttacggtgcgctggccagcaacgattctgcgcaagcatttggctgggacgcgaaagcccagggaacgttgtcgactgctgtcggttacgcagcaagcgcgtcggccagcgaatcgatggcattgggcgctcgcagccaggccaaccagtacgccgcgctggctatcggtccctttgcagaagcagggtggcgcgcttcggccatcggcatgtacagcgcggcacccggcgacgatgcagtggcgatgggtgttggctccaaggcccaggccaagcgggcggtcgcagtgggcaacgaagcaatcgcaaaggctggcggcagtattgcattgggctacggctcggtagctgatcgcgctgacactctttccatcgggcgtgctggaagcgagcggcagttggcgcacgttgccgacggcactgcaggtaccgatgcggtcaacaagcgccagcttgatgatgccattgcgctggtaggggatggcggtgccctggcggtgcgatatgacagcaccgacatggacagcgtcagcttcgcaggcgccgatggcacccgtcttcgcaacctcaaagcgggtgtccagcgcagtgacgcggtcaatgtcgaccagctggaaggcgttgcacgtgctctcggtggcggtgcgggcctgggaggggatggcctgatgatcggcccggtctacaccgtgcagggtgtgcgctacggcaacgtagggggagctctgggcgccctggacggcgccctggggtcgctcagggctcgggtcggcagcctggagtcgggcggaaccgatcccggtgacggtgggatcggcctgccaccgccctccggcgggggcgacggacttgccgtcggcaaaggttccggcgcgaaggacagcaacgatacggcgatcggccacggcgcgagtgtggaggcatccaacagcaccgcgttgggcagcaacagccgagtgtcgtccgtcgccgaggatgccgtggccgtgggtgccgacagccgtgttaccgccagaggcgcgagtgctgtgggacagaatgcgtctgcgacagccgaaggtgccgtagccataggccaggactccgttgcagacgaagcgaatacggtctcgattggcagcgccggcaacgaacgtcggctgacccaggtcgccactggcatccgggataccgatgccgccaatgttggccaagtgaaggatgccagccagcagaccctgagatcggccaaggactataccgatgcgcgcttcaacgcgatggatgatcgcttcagcgaggtcacccgcgaaatcgggcagcggttgggcaggcaggaccggcgtattgatcggcagggggcgatgagctcggcaatgctgaacatggccgtgaatacggccggcggccgtagcgaacgtggccgccttggtgtaggcgcgggctggcagagcggccagaaggccctgtccattggatatggaaaacagctcggtgcacgcgcaagtttcagcctgggaggagcgttcagtggcaatgaacgttctgcgggtatgggctttgggatcgatctgtag

SEQ ID NO: 515567 - DNA, 1824 bp, Stenotrophomonas maltophilia
atgagttcgattcaagcgtcgcgtatcggtctgctggccggagcaatcattcttggccttggctgtacgatcacctctgcggccaatgcccaggtccgcggagcactgcatgtccctgtcggagaattcgaggaaggcaaccggcgtttcatcgtgaatttcagatcgggtctgatgaaccatgatccggatgcggtgcagtccacgttggcggctgccgccgcaagagcgtggtcgggccgggattcgcagatcattccccgcctgcgcgcacagcggcggacggcactgggttccgagcttgtgattgcttcgcgtgccctgcgcggtgcagagagcgaacgcctgctgcaggcgttgcgcgaagatccggcggtgcgctatgcgcagatcgatcatcgtatgtatccagtgcaggggctgcccgatgacccgcgcctgctggacctgcagtgggacatgctagaaaccatcggcggcatccacgcaccgaaggcttggcaggacagtgccggcgagggcattgtcgtggcggtgctggacacaggggtgcttcagcatcgcgacctcgccgcaaatatggttgccggctacgacatgatcgcgtcctacggacaggacgatgatcatccggatatcgccgtggacggcgatggccgtgatcctgatcccaccgaccccggggactggagcgatggcagcttgtgtgggatcagcaacagcagctggcatggcactcacgttgccggtactgtcgcggcggttgccgacaatggaatcggcatcgcgggtgcggcgcacggcgcacgggtgcagccggtacgtgtcctgggccggtgcggaggattcacctccgacgtcgccgacggcattatatgggcggccggcggccaggttgctggcgttcccgacaacaccacaccggcggaggtgatcaatctcagcctgggcggaggacgttcctgcgcggagagcccggagcaccaggctgccgttgatgcggcacgtcgtctcggcagtgtggtcgtcgcagcggcaggcaactccaactcggacacggcaggtttctcccccgccagctgtacaggcgtgattgcggtgggggcgaccggtatgggaggggcgaaggccagctacagcaactatggctcgaccgtcacgctgtctgctcccggcggggatatcgacatgagcctggctccctcgatggcggcgatctggtccacgggcgatggcggcacgcagggcgccaacaatgacaacctgctgcttggaatgcagggaacctcgatggcagcaccgcatgtggctgccattgcggcgctggtacagtcggcgtccatcaaggcggggcgtggagtgctgacgccggacgaggtgcgcgacatcctcgtgcgatccgtgcgtccgttccctgcagcgccgcccgccggcaagccgatgggtgcgggtattgccgacgcctatcgcgcggtgcagctagccctaggcaatgaattgccggcgcagccgaagctggccctgcagcccaacgtacggttggatgcgcagagtggagttgccgggcagaccatcgtctactcgctggatgtgccgggcgggacgcgtaccctgaacctgcgcacgctgggcgggagtggaaatatcagcctgtacgccagccgcaatgaggacgctgtgccggaaaccgcggagtatcgctcgaacaagccaggaaccgcagaggcgattgtgatcagccaccccgcttcgggaatctggtacgtgcacgtggtgggggacacagacttccacgatgtctcggtgctgggcctgacacgctga

SEQ ID NO: 515568 - DNA, 219 bp, Stenotrophomonas maltophilia
atgttcccgcctccggcttttgacgtagttacggccgtaatggcacccgaattggcatcaatgctggtggacgtgacgttaggagacttgtccgccgcggatgtcaacgtcgcccccgcccccaagtccggcgcgttgcttgatgcattggcgattaccacttgcttcaatccactcgccagcaccaacgcttcggagactctcgctttgattacgtag

SEQ ID NO: 515569 - DNA, 441 bp, Stenotrophomonas maltophilia
atgaagaaccagaagggtttcacccttatcgaactgatgatcgtcgttgcgatcatcgccatcctggccgcaatcgccttgccggcttatcaggactacgttgtaaagtcgcgcgtttctgaagcaatggttcttgctgatggcctgaaggccgttgtggcagacaatgctgctcaggcagacaccaatctcggcaagggtgcgacgctcaccagcgcggctgacaagtcgccgaacgttacctctaccgcaattgatgcaaccactggtgccatcactgtggtgaccaccgacaaggctggcaagggcaacgtggtgctgactccgactgccggaggcaaggccctggcggcaggtgttccgccggaaggtaccatcgtctggacttgcacttccaccctgaagcagaagtacctgccgagcagctgcaccggcgtctaa

SEQ ID NO: 515570 - DNA, 123 bp, Stenotrophomonas maltophilia
atgaagaaatttattcgtaagacccgcctagttcatgcgttgctgtcgtttgggggcggatttttccgtttcctggcagcgctcatgaacatggcatctaactactcgtgggcttcgcgatga

SEQ ID NO: 515571 - DNA, 1413 bp, Stenotrophomonas maltophilia
atggctgatcggcgcgacattgaccggttgctccagaacctggagcaacagccgggcctccccaagggcgcggtgcgtgacctccgtgaagccatcgatacttcgccttaccttgcttcggtcatgacacaggccatcgacctgggaaccttgcgccggctggaagtgtccaaccagccgaatgagggcgggcactacgatgacaggacaggcaccgtcagcatcaacacctcgattttcgcgccgtccattcggtcagaccgcttggacatgttggcgggaacgttggggcacgagaccgggcacgcgctgatggcgccgtcggcgcaggtttccttgaacacctttgtgttcaagctcgatgccgcgctcaaagacggtatccaatacggcgagtcggtcgttgatgccacggcgctgtccaagcaatacgtggcgtccgctcggcagaacgaagccttggccgagttggtgagcatgaacgctgtggccagccgggtggagacgaccacgggcgagttcaaccaggccgagtttctgcgtcgcgtcgagccgacaaccgcttgcgtgagaggcggaaagcttgagccgggcattcacttggacgagcacggacttcaacgaaccggaaacagcatttccagtcccgcagtggaggcggtcgccgtttgtcacttcgaccgaagtgacagcagcatgggaacccagggcacgtctaactacgccggctactacgcgagctatgccgtgagtgcaggggctgtgttgctgaaggagcgcgcaggctccacgacgcaagccctgccgcgcctgggttacaacctcgctgagctcggcaccgatacggccaagctggagggagccggcctgaacttgggcgggcagggcaaggcgttcggatttgtcgatacctcccacggtcagcagcgggaggtggaggtgcgccaactgggcccagcgcagcatcgcccggacatcgagccatcctcgcttcggtcaccttcacaggtgctggccgacaatcccgtccatccggaccactcgacctatcagcagatccactcctgggtgcgaggcaccggcaactggaacgacgaagagagccggaacgtcacagcggccctctacaagcagcagaccgaggacccgttgctgaagcgggtggatcaagtcacgggagggctaggccgagatggggcccacaacgtcttcgcggtctacgcgccgcatggggtgggagttgcgcccatgtttcatgcccatgtcgatgggcgcgaagcctcgcaggagccggcccagcagaacctccagcaggctgaggtcattaagcaggaccagatgcgacagcagcagatggagcagactcaacagcagactcaacaacaagagtcggggccgaggatgactatgtag

SEQ ID NO: 515572 - DNA, 606 bp, Stenotrophomonas maltophilia
atggaaggacatccccccagcgccgcagacgtgcgctccgagcaagacaaagccgctgctagtgcggacagggccgcagacgaggccagccggcgagccgctcccaatgctgtggtgtcgggcgattacccaccactgccgcaaggcccagcactaacgtcaggtgcattggtcgaggccatcgttcgcatggccaaatctttcgaaaccagagcagacatggccccggtgcatgttgcgctcgtgtcagggcttgaggtgacaccagacagtcaagggcggcgaacagggctccagggcacactgggtgtggggcactacgagttcgccgtgtggaagccttacgcgcgtcatcctggccataccatcgagctcacagtgcggccgtccgaagcctgcgacctgtcgttcaaatcgctgcatgacccattggttgccgcagggtttggtgtgaccaagagcgcggtgggcttcaagccgacggtctacttcgagcgagcactcgcagacgggcttggattgtatgtggtcgtcagcacggacaagcacgacgacccacgctgcgtttcgcgggtcaggctcgaaatggagccgcgtgatggctga

SEQ ID NO: 515573 - DNA, 654 bp, Stenotrophomonas maltophilia
atgatctatctcaagctgcgacaggaaggacgcctggtgaactacaagcgcgtggagcggttgtaccgcgagcagcacctgcaagtgcggcgccgcaggcgcaagaaggtcccagtaggcgaacgtcaaccgctgctgcggccatcgcaggccaatcaggtgtggtcgatggacttcgtattcgaccgcaccgccgaaggccgggcaatcaagtgcctggtgatcgtggatgatgccacgcatgaagcgatcgccatcgacgtggagcgcgcgatctccggccacggcgttgtgcgcgtgctggatcggctggcacacagtcgcggtttgccgaaggtgatccgtaccgacaatggcaaggaattttgcggcaaagcgatggtcgcctggacgcatgaccggggtgtgcagctacggctgatccaacccggcaagccaaaccagaacgcctacgtggaatcgttcaatggccgcttacgcgacgagtgcctcaatgaacactggttcccaacgctgctgcatgcgcgcaccgaaatcgaacggtggcgacgcgagtacaacgaagatcggcccaagaaagcaatcggcggtatgacaccagccgcctatgcacaacaacttgccaacagcgatatcatcaaccccggactataa

SEQ ID NO: 515574 - DNA, 972 bp, Stenotrophomonas maltophilia
gtgcgaatgtcccccggcgccggcctgcggccgtcacctcctcctttacttcgcacacaagcccctctccccccgcgtgtcaggcatccgggcggctttggcactggctcttactacccgcaagccgagccgctgcgtgggtggccggcgtttggacaaagtaaaggaggaggcgaccgccgcaggcggacgacgggggacatttgtccagacgcctgccacctgcgctgcggcccagaccttcgcggtgacagttgccgtagacgcaggcgtggtcgagcgctggagggagcgggggctggctgcgaatgtcccccggcgccggcctgcagccgtcacctcctcctttacttcgcacccagcccccgctccctccgcgtgtcaggcatccaggcggcccaggcagtggctctcgactacccgcaagccgagccgctgcgtgggtggccggcgtctggacaaagtaaaggaggaggcgaccgccgcaggcggacgacgggggacatttgtccagacgcctgccacctgcgctgcggcccagaccttcgcggtgacagttgccgtagacgcaggcgtggtcgagcgctggagggagcgggggctggctgcgaatgtcccccggcgccggcctgcagccgtcacctcctcctttacttcgcacccagcccccgctccctccgcgtgtcaggcatccaggcggcccaggcagtggctctcgactacccgcaagccgagccgctgcgtgggtggccggcgtctggacaaagtaaaggaggaggcgaccgccgcaggcggacgacgggggacatttgtccagacgccggccacccgcgcagcggcccgaacgctcgcaatgagagtgatcgaagctcaacaaaaagccccggcagatgccagggcttttcgttcgtgaaggcgcgggcgccttacttcttcttcggcatgtacagatcggtgatcgtgccgtcgtag

SEQ ID NO: 515575 - DNA, 285 bp, Stenotrophomonas maltophilia
gtgaagctgctgctgatccagcctggcagacccacccaaaacgcctacatcgagagcttcaacggcaagttccgcgacgaatgcctcaacgaaaactggttcacctcactggagcatgccaaggcgacgatctctgcttggcgacgcgattacaacgaagtacgcccgcacaactcgctaggcaagagcgcccccaccgagttcgccgccttactccgcgagcttggatcccttgcaaccacgaacccgggcgataagctcacaaccacggactctacgaagtag

SEQ ID NO: 515576 - DNA, 567 bp, Stenotrophomonas maltophilia
ttgatcctgctgacgctggtgcgcaagagcgaactgatacaggctacttgggatgaggtcgatttcgagagcaagacctggacgatcccgaagcagcggatgaaggggcgcaacccgcacgtggtttatctgtcacgccaggcgctcgacatcttcgtgacgctgcacgcttgcgcggccggctcaaagttcgtttttccttctcgttacgatgccgagcggttcatgtccaatgcgaccttgaatcgggtcacgcagctcgtggcggaggctgcaaagaccaaagggctgccgctacaaccgttcactgtccatgacctgcgccgtaccggctcgacgttgctgaacgagatcggcttcaaccgcgactggatcgagaagtgcctagcgcacgaggacgggcgttcctcgcgctcggtctacaacaaggctgagtacgccgagcagcggcgtcacatgctgcaagagtgggccaacctggtcgatgcctggggcggcgggcagacctacgtgccaacgttgttgccgaagaacgtcgtcgtgccggcgttgagcgcggtggcctga

SEQ ID NO: 515577 - DNA, 354 bp, Stenotrophomonas maltophilia
gtggaacagctatcacaaacatccggtgcgcttccgctgccgggcacgaaagcctacgaagagttgccgcacttcccgaagcagcagcgcagtgcccttccctttcggcgcaccatccgccgccaggaattgcggctgatcgtccccctagctgaaacgacgatctacgaaatggagcggcgcggcgagttccctcaccgcttcaacctgacgccgcgctgcgtcgtgtgggacttggccgaagtggaagcgtggatcgagcaacgcaagcaagctcgtcgcggcagcgtctcgaaaccgaatgtccacttacgaaaaacccgccctgttcgggcgggttcgagtgaggaatga

SEQ ID NO: 515578 - DNA, 414 bp, Stenotrophomonas maltophilia
atgttgcccgattcgggtgtgcttgtgatctatatccggacgggtataattattacacggaaacgcaagctctcgaactgggagggggcgtcgaagaaagacttcaaggaattcccgatcgacgcgcggaagaacatgggcgtggcgctgttcattgtccagttgggtggcacgccggactcggacaaaccttggaaggggctgggctccggtgtgtacgaattgctggaagaccaccggggcgatacctttggcgcggtctataccgtgcgggctgccgacgcagtgcatgtgctccatgcatttcagaagaagtccaagtgcggtatcgccacgccgcagacggatgttgaattgatcgagaagcggctgaaagcagtgctcgcccgctatggggcgagtgggagaacgtga

SEQ ID NO: 515579 - DNA, 321 bp, Stenotrophomonas maltophilia
atggctcgcaaagacaatcctcaaggtaccgacaacgtgctgcacgacctcggtttcgatgatgcagaggaactgtcagcgaaggcggcgcttgcgctcaagctcaacgaactgattgatcagcgcggcttgagtcagatggaagccgcaacgattaccggcatgactcaacccaaggtgtcgcaagtacgacgctacaagctccagaacatttcgctggagcgactgatgcaagcgttggtttcattcgaccaatgtatagagattgttgtgcatcctgcgaggcggaaagacgcagcgggtatatctgtagctgcgtga

SEQ ID NO: 515580 - DNA, 459 bp, Stenotrophomonas maltophilia
atggacacgtttgtggatcgcctcctaggcgatcaatccgaatacgatgacaagcttgattacttcgagatcaatttcaatggcgcgatggcgaaggatcgcttggacgccggtgctcagatccgggtcgaacagaaccgttcggcagagttgctgaacgaagatgacgagatcactgctgaggtcgagcaggcggtggagcactatgatccgtttgatcccgatgaactcgacaaaaaagattaccggcggctgctgaacggcgcgattgatacgttgccgcttctgcagaaacaaattattgagatgttgcgccgagatattcccatcatgtcgaatgacccgagcgttcccacgatcagtaaggtgttgggcaaggcggaaaaaactatccgcaaccagcgcgaccgtgctttcgcgacgttgcggcgacgccttgagcgaaaggaggggctgtga

SEQ ID NO: 515581 - DNA, 564 bp, Stenotrophomonas maltophilia
atgaaccaattgcaagcaatgacccgcgacgaagtgctctacgcctttgccgtagaagatgcagggaataacgacgcattgatgcgttaccttgccatgtatccgcaatacgcacacgaactgatcgatctatcccgggagctttcccgtcctgtatctcatgagccgctgtccgccgcggatgcgcagcgtgtggatgccgcggtagcccgcttccgtgccggtgctggacgccgtgaacctgcgagtttcacggcgcaagccttcaatgtggcggctgaacgcctgcacctccccagactggtgttgatctcgtttcgggagcgccgggtcgatctcgcctcagtgcctgcgcgtttccttgagcgcttggctggagcgctggagagcactttagatcaactgcgtactttcctatcacagccccccctggtttctgccgcgcggcagagtaagtcgcgcatcaaaccagccgcagcgaccaaagtgtcgtttgaaaaaatcttgcgtgacgccggcgtggaggtcgagcgcgtgcaagcgttgatcgatcggggcgaataa

SEQ ID NO: 515582 - DNA, 3375 bp, Stenotrophomonas maltophilia
gtggacgcggtcgagcttgcgcgacagcgagccaccgaactgcatttggaagccgttcgccaggggcgcaatcccgggacgccgtacgccttcgcggttgccgaagcacaatctcggggactaacggtcgaaaaatgcgcgccgggcaccgatgcgctggatggtggtcgggcgttcttcgatcgcgaagctcggctcatcatccacgaggacagcgggtcgccttttgagcaggcgttcctcgtagcgcatgaaatcggtcacgtcgagctgggtgacgacgaagagaacgagggttcctacgcgatcgacctagcccgcactagcgaggcggcgcccgtggggctggatcgggtggttgactacagtcatcgccagcgccgtgaagtccaaatggacctctttgcgcgcgagttcttgctgccgcgcccggtagtcagggaactgcatttgggacagggaatgacgtgtagcgccattgccgcccggcttggcgcaccgtttgatgtggtggcgcagcagatgcttgacgcattactgctgcctagcctgaccctcacgcctccccgtcaaacgccggatatcccgatgaacgacgcgcagcgacaagctgcgatgcatcgaggagcagcctacctgctccaggccggccccggtactggcaagacacgtacgctcgtcgcgcgggtggagagcctgctagacgaaggcgtggacccccgccgtatcctgttgttgacgttctccaatcgcgcggctgccgagatggtcgagaggctcgcgcgtacacgacccgctgctgcggccgcgttgtgggttggtaccttccatcggtttggtctggacgtgcttcggcgctttcatgaccaagttgagttgccgcccgatccgcgactcatggatcgcaccgaggcggtcgagttgctggagtccgcatttcctcggctgggcctcacgcactatcgcgatgtctacgacccctcgcaagttatcgctgacatgctgagcgcgatatcgcgcgcaaaagacgaagtggtcgacgccgcgcggtaccgcgacctcgcacgctgcatgcatgacacagcgacaagtccagaggagatccaggcggccgagcgtgcactggaggtggcgacggtctacgagacgtacgaagaactgaaacgtcaggcaggttgcgtggatttcggggatttggttctgtggcccgtgcagttgctggagtcgaatgaagtgctgcgtttgcaattgcagcagacctacgatcatgtgctggttgatgaatatcaagacgtcaatcgctccagtgttcgcttgctaaacgcactcaagcccgatggtacgcatctttgggttgttggagacgggaagcagtctatctatcgtttccgaggtgcttcgtcgttcaacatttcccgtttcggtcacgaagactttcctggtggtgtcgtcggttacctgacgcacaactatcgttctgttcgggagatcactgataccttctccacgtttgctgcaggtatgcgcgctggtggtacgcacagtcggctcgaggctgatcgcgcgtcatgcggtatctcgccggaattgcgtcttgtcgcgacaggcgaactcaccagtgcagcgttggccgagaacatcgatcagctgcgtcaggccggctatcaataccgggaccaggccgtgctctgtcgaggcaacgacaaactctcagaattggggcaggaactggagcggttggggattccggtactatttctggggagtcttttcgagcgtcaggaggtcaaggaccttgtggccttcctgtcgctactgaccgaccgccgcgctatggggctagtgcgcattgcgtgctggccggagttcgcgatgtcgcttgaggatgtggtgcaggtgtttgagcacttgcgcacgactgaggcggcgccgggcgactggacatcagttttcactcatctctcgccggcagggcaaaccgcgctcggtgcgctcgcaacggctgtggccggattcgacgccttgtctcatccctggaccgttctggccacggttttactcgatcgaacgcgttcggcggcgcgcatcgccgcgtcaagcagtgtggccgagcaagcccaaggtattgccgtctggcagtttatgaatttcgtccgtgcgcagccggctggccaaggtttgccgatcgcgcggctgatggagcgcattcgccggctgcttagattgcgtgatgatcgggatctgcggcaactcccggccgcagcgcaggggatcgatgccgtccggctcatgaccattcatggcgccaaagggttggaattcccggtggtgcatctggccggcgcgaaccaggacagcatgccgggtgcgtatcgaccgcccaaatgcccgccgccagaagggatgattgctggcgcggcggcctcatcggagggggcggagcgtgacgcgcaggcgcaggagcaggaatgccttttctatgtggcgatgtctcgcgcgcgtgaccggctcttcctgtatgcggcgcatgccaaaggaaacggacatcggcgacccctgtccgagtttgtcgatcggctcggcgcgctgcagcagatatcggttacccccgtgcttcgcctgacgcccgcgccggacaccgtgccattgcctattgtgttttccgggccagtgagctttagcgctcaagctgccgcgctctacgaatcctgcccccgacgcttcctctatacccatttgttgcaggtcgggggacggcgacaggccactgccttcatgaagatgcatgaggcggtgcgttcggtctgccaggccgtcatcgagaccggccagacgcccgactgggagagccgcctggaagaggctttggtggagcatgagttgcatgaacatggctacgctacagaatatcgtgccatggcgatggccatgatccagttcttcttagcgtcgcgcgagggcgccattgtcgaacctatgcaagccttgagtgtggccttcggcgaccagcaaattgtcgttcgcccggacgagatcctgctcaaggacggaattcggacgctgcgaaccgtccgcaccggccatgccccgcgcaaggaatcgaaagacgtgggctcggcagccgtgcttttggctacccagcgggcattcccgggcgccacggtcgaagtgatctacctggctgatggcgagatcaggccgctcagccttacaccgaagcagttgaccaatagccacggcaagctcgcggacatcctgaccagcattcgagctggccagtttgcggccgaacgttccgaatacacctgtcccggatgtcccgccttcttcgtgtgtggcccgacgccgactggaacgctccacaagacgttctga

SEQ ID NO: 515583 - DNA, 756 bp, Stenotrophomonas maltophilia
atgagtacccattacgacgatatcgatgacgtgggccaggcgttgcgggagaaccgcccgctgagggtggcccgcgcctaccggattcactttgcccttgatggcgtggatttccgccctgtcatggtgaccgatcccgtaccgactggccgccaaattctggcggcggccgggctggatgatcgtgacgacgtcacgttgtgcgccatcctggcttcgggagacttcgaggacgtctccctcaacgaaacgtttgacctgcgcgggcagggcgctgaacgcttcatcgcgtttcgtacggaccgcgacttcaagctcacgctcgatggccgtcaactgatctgggggcagtcgtcgatctcgggtgaggcgctttacgtcttgtcgggcatcggtgcggatcaggcggttttcctcgaagtccgcggtggtacggaccgcatgatcgagcccgaagaccgcatcgatctcaccgagccgggcgtggagcacttcgtcacggcgcgccgcccggtgaagggatacgtcattgtcgtgaactcgcgcgaggagccggtaccggagaagcgtgtcacgttcgagcaggtggtgcagttggcgttccccggctcacaggtcgagcccaacgtccgctactccatgacctatcgtcatgcggcctccaagccgcacgcaggtgagcttgccgaaggcggttcggtcgaagttcaacatcacgggacgatcttcaatgtcacgaaaactgttcagtcttaa

SEQ ID NO: 515584 - DNA, 1182 bp, Stenotrophomonas maltophilia
atgtcacgaaaactgttcagtcttaatgcggacctgcgccagttgcgcgaggagggctacttcgtgcaagccgtgggcggtttgctggtgatgcgcgaagtgccctacgtcgatgcccagaagcggttgggcgcgggaacgcttgtgtgccccctggacttggccggggatatgacctgtaagccttcgactcacgttatgcattgggatggcgattttccgtgccgtgccgatggcacgccgctgcgcgaaatcgcgcaccagtcccagctcttcaatctgggccacggtgtgacggcccagcacgccttttcgagtaagccggggcccgacggctatccgaacttctacgagaagatggctacctatgcgtccatcctcgcgggccctgcggcggtgctgcaaccgggcctcagcccgcgcatcttccgtgcgcctgacgacacgaagaccgacacgatgttcaactatattgataccgcctcggaccgcgtgggcatcggtaacctgtccgaaaagctggagggcgagatcatttcggtgattggcacgggcggcaccgggagctatatagtggatctcgtagccaaaacgccagtgcgcgaaattcgcctgttcgatgccgacgagttcctgcagcacaatgcctttcgcgccccaggggctccgtcgcttgaagagttgcgcgacgcgccgaaaaaggtcgattacctcaagggcatctacggcaggatgcaccgcggtattgtcgcgcatccggtcaagctcgatcacaccaacgtcgagctgctgaatggcaccaccttcgcatttctctgtatggacgccggggaagacaaacgcgtggtggtacagaagctcgaagcctttggtgtgcccttcatcgatgttggcatgggtctggagctggtcgacggtagcctgggtgggatcttgcgcgtgaccaccagcacgcccgagaagcgcgagcatgtccatgccggacgcatctcgtttgcggggggcggtgagcgcgacatctatgcctcgaacattcaagtcgccgatctgaacgcgttcaacgcggtgctcgccgtcatcaagtggaagaagctccgtggcttctatcgcgatctggaacgcgagcaccactgtacgtacaccaccgatggcaacctattgcttaacggggatcaggcatga

SEQ ID NO: 515585 - DNA, 480 bp, Stenotrophomonas maltophilia
atgacgcgcatcaccacactcgagcatcgcttcgtacgcaacgtgccgagggaactcgtcccgggcatcttgtatgtgtcgatggactacgcgacggtagtgcatagctgttgctgcggctgcggcgaacaggtggtgacgccgttgtctccgaccgactggaagatgacctacgacggcgcatcggtctccctgtcaccctcgatcggcaactggcaactgccgtgccgctcgcattacgtgattcgccagggccgggttatcgaggccggaccttggagtgcggctcaggttgcggctgaacaccggcgcgaccaggcagccaaggcacgcttctatgggcggcaagacgagcacgagcgagccgaggatggagacaccggtcgagtggtcttcgaggctacgccagcgtcgcgtcgctctggcaactggtggtcttccgtcgttgcctggttctcgggtagtaagtcggacaagtag

SEQ ID NO: 515586 - DNA, 660 bp, Stenotrophomonas maltophilia
atggtcccagggtatgtctatattttggtcaacccgagtatgccgggcttgatcaagatcgggcgaacactacgcgacgcccgtacgcgtgcgcgcgaactttcgtccacgagtgtgccaacgccgttccaagtggccttcgaattgtttgctgaacaacatgaggcgctggaagcgaaagcacatcttgcgctgaccgattttcgtgtcgatgcggcgcgcgagttctttcggtatccgctcgacaaagccattgcattgctactcgatttggccgagccttcccagagtccggcagcacagtacgtggcggaagacgtgacacaacggcttcgggaaagatatccggcgtacctgcgctcgaatatcgcctccgtcaggatcgttcaagtacctggccgtgtctggctggagatcacgacggaggaagagagcgccgggtatcttgtggatcagaccatccaacgcacggatttggccttcattgctgacacggatgagccttttttccgaccggaagatgacgtccgtttgaacgcggataagctggtgaacgagtacgacgcatactcaatcgttatgacggcggacctgtttcacgacgaggcgtgccggcaggtcgagcgagagcatcaggcgcagagacgtcgcctcgcttga

SEQ ID NO: 515587 - DNA, 1269 bp, Stenotrophomonas maltophilia
atgttgatcttgtcgctaacgatgcttgttcattcagcggtcgcagcagagcctgagcaagtcgtagcccgcttgctcgatcacctggaggctgggcgcatcgctgaagccgaagcaatgttcactccacaaatggccgaagcggtgccggcggaatctctcagcaccctgtggaactcattggggactttgaagagtcgtggcctggcagcgatcagcactcatgaaggcatgcagctggtgttggtgccattgcagttcagcaacggtcgatttgttgcacaagtggtggtcgacaaacaggagaaagtcgccgggttaatgttgcggcccgccgcgcccgaacaagcggcgccggccccggccaatgccagctaccatgagatcgatttcgtcgttccacaggcacgcggtgcgcttccaggcacgctatcgcttcccaaaggagaaggcccatttcccgccgttgtgctggtgcatggctcaggaccgcaggatcgtgacgaaaccgttggacccaatcggcccttcctggacgtcgcgcgcggtctcgccgcgcagggtatcgcagtacttcgatacgacaagcgaagccgtgcgcgcccccaggatcttaatggcgacttcagcattgatgatgaaacaaccgacgatgcggttgccgcgctcacggcgttgggcgctgatcgaagcatagatggcaagcgtctatttgtgctgggccatagccaaggcgcgatgctggcgccgcgcatcgcccagcgatcacctgaagtgagaggggtagtcctatgggccgcacccgcgcgaagcctgttgcagattattccagagcagacccgccgcctcctttcggtagacgggcagcttgggccaaaagcggaagagcagctggccatgctggatacacaaatcgcggctgctttgggtgatcaggaagttgaggccagcaagctcccgctgggtgcaccccaatccttctggaagagcatcgaagcagttgacgcgcgcggcgacgccaggtcactccggaaaccattgcttctattgcatggtggccgcgattttcaggtaacagcgattgactggcgcatgtggaacgaatcgctggaggggcagcaggaagtgcaactgagagagtattccgcactcaaccacctcggcattgcaggtaatggcccggcttccccccaggaatacatgcagcccggaaacgtggacccggtaatgatcagcgatctcgcacgttggcttaaagcccagaagtaa

SEQ ID NO: 515588 - DNA, 1035 bp, Stenotrophomonas maltophilia
atggatttatgcgctacccaggtgctatcgcccaggacgctgacgtttatcacaacctatcgctgcactgcggcatgcgttcagtgctgtttcgagtcgagcccgacggtcaaaggaaggctcagtcgcgatgagatgatcacagcgcttcatgatgccaaaggctccttcccctcgctgtctgtcatcgtcttcaccggcggcgaggcgacacttctcaaagacgatttgatcagtgtgatagccgaagcgacatcgctagggctcggcacgcggatggtatcgaatggctcctgggcgaagacccgatccaccgcgaagcgttgggctgaaaagctttcaaccgcaggattgaaagaactcaatatcagctccggcaaagatcatcaggagtgggtacctcattcttccgtggtcaatgctgccgaggccggcctcactgcggggctgcacgttctcgtgacggtggaggcagacacggaagacggtcgaacaatggcgaccttcgccgaggattcgacaatacggatgcttctgaagaagggcttgcaactgcagtcaaacagctggatggagttcaaaagcgatcaggtcaagcgagagaatacggttccacagcacctgcgaatagccccgtgccaccagattcatgacaacatcgttgtcacgccctacaaggaagtcgctgcctgttgtggactgacacttgagcacatcccagagatgaaagttgggcgtctcgaggatggcgtcagcaacgcctatctctctcaaacggacgatttcctcaagttctggatcagagtggacggccctgcggagatcatcaggcgcgtgatgggcgaagagaaagccgatgaactactgaatggatcggtgcacatgtgccacgactgcgcagtgcttcacaagaacagtgaagtgcgcgcaagacttgaatcggattaccagaagttcattccagaggtaatgagtcgccacgcactcggtaaggcagtagacaccctttcccggcaacaaggagcgttcaaatga

SEQ ID NO: 515589 - DNA, 1047 bp, Stenotrophomonas maltophilia
atgaagcggcggaagttcatccagtccacactcgcggccagtgctgctgcatcaatttccggggcggcggctgccgcgggcgacaagagggtgttcggcacacctgcgagccttaccggcggcacggatgtcaacgcaacacgaatgcttcttccactctcgcgtagcggcatgcctgcagccggctgggatcactggtcaaagttgagtgccgctgctgtcgatatgttttctgacgagaagaagcgttcgctcttcaacaccaatcctggtcgatatctttccacgcttgggttcgacaccagcaaagagacactgaacgcaccatctctggctctgctggttgctctgtcggatagggatgtacaagacgcggccaaacgtcgtgactatacgcaaatgttgaactatctccaggcatctggtgcgttggcgcgtccaaaggaagacgtgctcaccatgaagatgcagcacgcactccagagcaatatagacatgatccgcggcgtgatggagctttctggggacgagtctcccgatgccgaatcggtactcgctttcatcaaagctactgacaagcctcctacaacggcagacctcgcggccctcgccagtgtggcggagcttctgcggacagcccctggtcaagcggttgttggcgcggctgtgattgtggttgcggctgttgacgccattgttggtgtgaccgtagccgtggctgcattcaccatggttgccgttgtgaaccaggtagtggttgccggaaacgagacccagataccgtcatacaatcatgtgttcaacggccagctgagtcggctggacggtgacatctgcgacagttgcgacgttgcacatcgtgcagcttccatcctgggagcccccggcctttacgacgaacacgcaaaactcgtaataaagaacgaggttcgctcgttcctgcgcgcgatgcgaaacgtcggccttgtcacctatgaagaagatgcatttgagacgattgtcgaagcgacttacgtttacggcatgcggtcaatctctgcggagtag

SEQ ID NO: 515590 - DNA, 3315 bp, Stenotrophomonas maltophilia
atgtctccgccctacaccgatgaggacctggcccgctggttcgataaaggcacgctgggccgcagcgagcagtgcatgggtggcgtgagcctggtgcaacgccacggcgatctgctcactgccgaggtgcagggcactgccgcgcggccttaccgcgtggagatcgacctcacggcaagcacgcgcacgccccgcagccgcttgctgggtgactgctcctgcccggtcggccagaactgcaaacacatggccgccgccctggtggtctacatgctggatggcgcgatcgaagatgatgggcaggtcgcggcgtggaccgggaccgagggcggactagagcagcccgcgcgcccgcagctgctggcggaactgtcgcgctggcaggccgtgcgcagccagcctgccaagccggtccggagcggcgtgatcttcgagctgtccacgatcagccatcgcccgtccgtgctgatgcgcaaggtgaagcatcgccccgacggcggcatcgagttcggcaagtggaccgaaatcaccgccgagatgctgctcaccccgcccagctatctgacgcccttggacatgtcgatcatcacccagctctgggcggagcgccgtgccactaccccagagccacgtatcgacatcaacgccacgctggcactgatcgttgccagcggccacggctgggtcgtccgcgggcgggatcgcgtgcccgcacgaaccggcgcaccgcgccaaggcacgctgtactgggaggttgacgaggtggatggcacgctgctgtcgtttccttcactgcagctggacggcgatgccgagggcctggtcctgggcaatgccgccggctacctcgaccccgtcacgggggaggtgggtcaactgctgctggatgtgagcattcaggatgcggatttctttctctccctgcctcccctgctgcccagcgaagcgccggtggtggcgcagatgctgcaacagatggacccggcgctgccgcgccccggctcggttgacgcgatgcgtacgctgcagatcagcgcgatgacaccggtactgcgcctgcacagtttcgagtaccgcccggcatggatgagccgtcgcgggccctcgcagtgggcggactttgcgaccgttgccttcgagtatgacgaacacgtgcgcttcctggatgaccccaacgtgttcgttcacgatgtcaacggcgatctggcgctgctgccgcgcgatccggccgaagaagcgcgtcgcgagcgcgagttgcgcggcttccaccttcatcgcgacaccacgcccagggcatcgctggagggcgcaggaccgcagttcgttctgcgcagccaggcctggactcgactcatgctgcaggacgtgccgcagctggaagcgctgggttggaaagtggaggtggatgacgacttccgccaccgcatcaccttggtcgatgacatcgatctggacatccagcccagccagacggaagacggctggttcgatctcggcctggatatccaggtcgacggccgcaccgtgccgctggccccgctgctgcacacggtgctgcagaccgatccgcgctggctgcgtggccagatcgacaccattggcgacgacgagcacgtgatgctgtcggccgacgacaacatccatctggcgatccgcgccgcacgccttaagccggtcatcgccttgctggccgacctgttcacccagcgcgatgcgccgctgcgggtgtcggcacgtgatcgaggccgcctgcgcgcactgcaggaggacgcgcgcttgcagttcaagggccaccaggacacccgtgcgctggtgcaacgcctgctgcagaccccggcgctggaggaggtcgctcccccggccggcctggccgcctccctgcgcccgtaccagctgcggggcctggcctggctgcagtacctgcggcagcaggaccttggcggcgtgcttgccgatgacatgggcctgggcaagaccctgcagacgctggcccacatcctgctggaaaaggaacagggccggctgcagcagccggcgctggtggtggtgcctacttcgctgcttcacaactggagcagtgaagcggcccgcttcgtccctgacctgcgcgtgctggtgctgcacggcgccgaccgcgccgccggtttcgagcgcatcagcgagcatgatctggtgctgaccacctacccgctggtgtggcgcgacgaagaagcgctgctggcacaccactatcacctgctgatcctggacgaggcacagcaggtcaagaacgccaaatcgaaggcagccattgccctgcgcgccctgcatgcgcgccatcgcctgtgcctgaccggcacgccgctggaaaaccacctgggcgagctgtggacgcagttcgacttcctgctgcccggcctgttgggcagcgaaaagcagttcaaccagcactggcgccatcccatcgaacgcggcagcgacccgcagcgcgcgcacctgctggcccagcgcctgcgcccgttcatgctgcgccgtcgcaaggaccaggttgcttcggagctaccgcctaagaccgagatcacccgcagcgtagcgctggaaggcgtgcagcgcgatctctacgaaacggttcgcgcctcgatggaggccaaggttcgcgaagccgtagccagtcatggcctggcccgcagccagatcgtggtgttggatgcgctgctcaagctacgccaggtctgctgcgatccacgcctgctgcccggccaaaccggcaaacggagcgcgccctcagccaagctggacctgctgcgcgacatgttgccggagatggtggaagaaggccgccggatcctgttgttctcgcagttcaccagcatgctcgccctgattgcgcaggcgctggacgagctcgggctgccctatgtgacgttgaccggagatacccaggaccgggccacgccggtgcaacgcttcatgcagggcgaagtgccaatcttcctgatcagcctgaaggcgggcggtgtcggcctgaacctgaccgctgccgacacggtcattcatttcgatccctggtggaacccggccgccgaacggcaggccaccgatcgcgcccatcgcatcggccagcaacagccggtgttcgtctaccggctgattgcggcgggcagcattgaagagcgcatcgccgagctgcagcagcgcaaggcagcgctggccgagaccattctggaaggaagcgggaatagcggcccgcgcttcaacgacgaggatctggaagcgctgctggcaccgctgccgggggtgacgccgaaggtcaggcgggagcgaagacgagactag

SEQ ID NO: 515591 - DNA, 372 bp, Stenotrophomonas maltophilia
atgagtgatcagttgtttggatcttggatggataagagagattctgattgggtggtttttgcctactttgattggatttattcgtcgggaatgtttattcagatgctcgagtgtctatcaaggggctggggttttggtaccgatgatgttgattgtaggtttccggataacaatagcttcgacgtggatgatcatttttctggggtggaattttcatatgggctcaagtacgacccggacgttgtaattgttagtgatgaagagtttagtagatacctgggtatggcatgtctcaagtatatagaaagaactccgggatcggctgagtacgttcgctcaatgctgtgccggaatgagccgggaaatggctaa

SEQ ID NO: 515592 - DNA, 462 bp, Stenotrophomonas maltophilia
atgaatgatgcgtttgagattcttatggaggctgttccgtgggttcacgtgtccacggtgctggaatcgatcggtcgcttggctgattccgtctcgcggaccgagctggatggcgagccgatagcgattggcgactggcttgcaggaagtgtcgacgacttcccatgcagttcttgcatgatccagatgatcaatggttttaggttgggatctgccgtctatattccaacgttgttgattcgtgtctttaagtttgatgggacgataattttcgatttttcattcgacatggattggtcgaatgttgccgtggccatgcctatgctgcatcggcatttccagcaattgaagttgctgagtggaacgcgcagtgtgtttggagggatggagccggcgcaggatctggacactagattcttcactgacgatgcgcgcggccctttagggagttccattacctga

SEQ ID NO: 515593 - DNA, 1515 bp, Stenotrophomonas maltophilia
atgcagatccccgtagttgacgtctttgccggtcctggtggcttgggcgaaggattctccgcttacagtccaaaaggcaagaccaaggtccggcctttcaagatcgccatttctgcggagatggaggtcaatgcagcaaaaaccctgcgtctgcgggccttcttccgtcagtttgaacctggcaaagtccccgcaagctactacgattacgttggtggccgggcggaacagccgtggacggatgctaccaaggcacagtggattgcgtccggggaggaggcacgtcagctgcagctcggcgtgcccaaggacgacagaattctccatgagaaaatcaagcaagtcgccgcgaaaggggatccctggattcttatcggtgggcctccgtgccaagcctattcgcttgttggccgcgcgaggaacaagggtatcgccgactacaagccagaagaggatcatcgccacttcctttatcagcactacctcaagatactgagagaccaccgcccctcagcgttcgtcatggagaacgttaagggaattctatcctctaaggtgggcggggagctgatgtttccgaagatcctggcggacctccgaacacccggagggaagaacgggcctcgctatcgagtcataccgctgatcaagagtgacagcgacgcactgttcgatgaagaagatggccggcgctacatcctccgcgcggaggagctcggggttccacaagccaggcatcgcgttgtattggtcggcgtccttgaggacattgacgtatcgaacgctcgcctcatggtgccctcagatgaacacgtggacgtgtcgtcgatgatacgaggcctaccgaggctcagaagcggcctgacagacatggaagttgattcatggcccgaagaggccagagaaattctcacgcatgcagcgaaactgtccgaggacactgacgttgcggctgaactgctgcaacaggcacagagggttaccaagaccgatcccggctccggctgcaagtcggcgaactggacagcgggctgtgcgaaggttcctgcccacttggaggggtggctccttgatccaaagcttgcctacttgttgaaccatgaagtgcgtaagcacatgtggatggatcttgttcgctatgcgtacgcctctgccttcactttgattcacgggaaatcccctcgcggttcgggagagtttcctgaagccatgcatccggcccacgcaaactggtcatcgggcaagttcatcgaccgcttcaaggttcagcgatggaaggggccaagctcgaccgtaacgagccacctctcaaaggatggccactacttcattcatcctgatccatcacaacttagaagtctctctgtgcgagaggcggcaagactgcagactttcccggacaattacttcttcgaaggttccaggggtgctcagtttcggcaggttggtaacgccgtacccccatggatggcgaatcaaattgcggatgtagtctattcgatcttgggaacttga

SEQ ID NO: 515594 - DNA, 780 bp, Stenotrophomonas maltophilia
atgactaccctgcttttcccgcgtctctcaaggcttggtgtcaggcgattgattgatgagttgggcacggattaccaagcagcctctgccaaaagctatctttccagtcattcttcactgagtggtttcggcgccagtggcggacttagggacgctcgatcctttgaagacttggcaggagagttgagagggattgcggtgacctgcggattgccatctcctgccggggcaactgcaaaagcgaggttcgatcgagatgccgccgtcgtgctcggcgagtgcgccatgctccgaagtggggaagcgctgcgggatgacatttgggcatatctggctgccgtcctgctccctgatgtggtgaggtggcgttttggagatgcgccaactgaacgcttccaaggaggggttcgaaacacgtttcaacggctctggatgcgcgcgtgggcgctagatcttggagaaggcaatcttgagcgctggacgctcctgcgcggcctgtccgaagatgcccacgtagccatctttgagcgaccatcgattggcggaaacgcccttctggcaaaagcgtgcgccgaggagtggatcagtgtgtcccaaggaatcggccggggagcgatggaagatgtgatgcgtaaagcgatcaagatactgcgcctcaagcatcagatcatcgacatttccgccttgtcgcttaaagaggttagagagcacgtcaacgggtcgtttgcgctcgccttgggcgagttggcgaacccgcccctccccattccggcagcttga

SEQ ID NO: 515595 - DNA, 900 bp, Stenotrophomonas maltophilia
atgaggaggacagcatttccattccttgttctctccgacgaggcggtcacgttcgagggttggtaccttggcgacaaggggatgccgcttgagccagctcgcgaactattggaagactgggactacgctagaaatctgacattgcgcgcctccattcgattggattggcagaccgctgccgatgtactggaggttgatgcagattcacttgtaattgttgccacacttcatgtgggaactggccagggaagactcccgcggcgcacggcgatcctggccaaggagcgcctcagcaagatgcaaacgcatgctgtgctgacggctgagctcgacggttctcaactttcctcgcggatcactggacacattcacctctccttgggcgccggggtcgaaggggcgtcccccctatcaccacgcctgccgggctcccgcctctggtctacggacttcgatgttctcatcgaggacggcggaagttcccgattcccgatttcttcgcttagtttcaagaatgcattcccgaaaagcgcgcacgtgttctccccttggtaccttgagtggaggcccggtgatttgcattcggatttttcgtccagcgtgtcgctatatgtaaacgaggatgaagaggagttccacaagcgattccatgctggggatcgtcttacagtccaaagcgtgattggcggggtcgcgtttgaactctgcagcgctgctttgatgtccgaggagggctttgacatcgatacgtttgaagaagggtcggtcggtgccgtgatttctcactggctggttcaggcgtttggtcagaccgtagcgcgctcagccaagggcgtgctagagagggaccctggtgcgttctttgcgtccatgctttcggcaatgagtgaggagccatga

SEQ ID NO: 515596 - DNA, 1842 bp, Stenotrophomonas maltophilia
atgaacacgcttgacatctatagcgaaccatactcccccaacggaaacttggcgggctccgggtatcgcaggctacttggccgtccgtccatggacttgcttcagaccgttattcgtgaagggctacagaacgtaatcgatgccgctgatcagggccatcctcctcgcgcgctcatcagggttcgtacattggatgattcgcagcgagatgccctgcggacgttggcactggcgagccttccgcatggcggcgagtcgactgcacttatagagtccacgttgagacggacaagcatccgcgtattcgagctgtgtgacttcgatacggctggactttcgggaccgacggatgctgatgcacctccaacggaaggcgaaaagctcaactttgttaattttctgaagaatgtcggcgcatcacgtgacacgcctcaaggcggcggcacctatggttacgggaaaagttcattttatgccctaagtgaatgctcaaccattattgtagatagccaaaccacatgcgccggctcgcccgtgcggcgattgatgggttgtcatctaggcgatgcctttgacgctccttcaattgatggcgtgcggaaccttcgctttacgggaagacattggtggggagtgcggcatggggatggccgagttggtcctttgacggatcactccgcatcctcgttggcagatgcgcttggcctgccttacaggtcgacgaaggagtcgggtacgtcgatcatggtgctggacccctcgatggacgacgttgataccgctagtgttgccaagcgtattgtcagctgtgttctgatgaacttctggccgcggatgtgcgaatcgactcccaaggagaagcgactctctcttgatgtctatgtggatggcagccttgtaggacttcccagtccggaggacttcccgccactagacctatacgccagtgcgctcgcctctttgaagagcggcgtcgactgcttggctatcaagcgatactcaaaggtactgggacaactgagtttcaaattcgggttcaagggtcaacggcataacttggcagacaccgatggcgcaaatgtactactgggatcttcgcacattgccctcatgagacccgttgagctggtggtaaggtatctgcccggccaaccctattccgatgacctattcgaatgggcgggtgtcttcatttgctccgatgatgatgaaatcgagagagcattcgcggactccgagccacccacgcacgacgactgggtggccgataatctccaatctggagacgcaaaagccatggtcaagctggcgatgcagaagttgaagaaggaggcgaatgactacacgcgccgcccaagtcatatagcaacctcagaatcttcgtcccccagtcttgcggcgacagccggtaggatgggacgttttcttgcaccagtttcatcaaagggtcctgggttccccgatcgtgcgcgcacccgacctggccaaggaagacggatacgaattgctccgccggagtttgtcggactgtccgttggtcaggatggagcaacggtagccacatttaaggccgagctccacaacgatggctcttccccagagctgcatgtcaaggtcagtccgcgattggttgcagatggcgcgaaggcgtctgatcgagacgttccgcccgccttcctgcctcaggcaataggtgtctcgttgcctcagcactccatcgaagcagctggaaggatgttgaaggtcggcaagctaagcggaaccctttttatccgaacgaccgtgcctactgggacagctgtcgaggtagagctggataccttttttgaggccgatcgatga

SEQ ID NO: 515597 - DNA, 1008 bp, Stenotrophomonas maltophilia
atgaagcctgagtcaccacatgatatatgggttggcctgcgaagcaacagcacttgggacaacgtcgtcgagatcgcgagcgtccccagcaccgtccaaaccggttacggacctgtgcgttatgccctagatgggagtggctctcctaggctcctgatcccctgcacgtggattgacggccttgagaccctgacgaaattgagcggcccgagtctcagcgtcaggttgtcgagtctgcaaggaagtgatggtcgagtgctctttgtcgacttggtgctggtttctcctgttctctcgaaagtcttcgcggagctatgccaagagatcatgagccgaatctctttaggtggaaatcctggggaggctgttgccagtacgatccaagattttcgggcgctcttggccgatcctaggacagaggtggttgatgaatcttccctcggcgggctgataggcgaacttcttttcctgctgaagatcactaggaatggtgccaaatctgcttctgcatggacaggtcctatggggcagcggcatgacttcagaaccagcaagggctcggtcgaggtaaagacgtcgctgaggaaggcaacgacccacattcatattcacggacttgagcaactttcggaaccggcgggagcctctctttggctggctcatttcagaatcgagcggtcgtcatcgggacggctttccatctcggctctctttgatgagctcatcgcccaaggtgtgtcatccgaagagcttcgcaccagacttgcggccatgggatgcaacgacccgtacagcgcggcttggaatgcctcctcatatgaacttgaagcattcgacctttatgcagtaacagaggcttttccaaaattggacacattatccttccgaggcgacatgcttcccttgggagtatctgacttggaatatcagatcgacctttcatttgcacgcgactgcctgatccagggatctgacatggagcacgtcattgaggcgatgtctgaatga

SEQ ID NO: 515598 - DNA, 2583 bp, Stenotrophomonas maltophilia
gtgagcaaacagttcgactcctttgtgaccatgctacgggacaacctccccaagcacgacagcattgagcaggccgctcaagccgttcggacgcacatgatgaactttatcggtccgttctcagcggagcttgaacaggacttcgcggcggcgttggccagcctgaaggcgtccttccagaatgttgagattctgaggcgaaactcgctcgtcaatcccaggcgcatttggtatagggggccaaggccaaaggaccgccattggccggccctctattcttacctgaccgaagtcaagggatggaaagattcggtggaatctctggatgactcatcctcggaggtcgtttcgctactggctaatccgacggacgacaagttccgctgccgaggcttggtagtcggctatgtgcagtccggcaagactgcaaacatgactgcggtcatcgcaaaggccgtggatgctggctacaacctcatcattcttcttggcggtgtgaccaacaagctccgagcacagacacagcggcgcattgaacacgatgttgtgaatcgtcaccgccatctctggcacacctatacggatgactcggacgacggggacttcgtgaagccgaagaatggacagttcacaatgccacttgaaggcggcgcacagcttgccgttatcaagaaggaatccaggcggctggatcgccttctcacaacggccaaggccacaaccaagcagactctccataggctgaaggtcctcataatcgatgacgagtgcgaccaagcatcggtcaactcggcagcggatgcggatgagatgacgaagattaatgaagccatccgccgaatcattcacgcgtttccctccgtaagctacgtcggctacaccgcaacaccgtttgcgaacgttttcattaacccattcccggtaagaaaagaagagcttgacgacctgtacccggaggacttcattactgccttaccccgaccggatggttacttcggtacccgcgaggtattcggcccgtccgacatctctgtcgatgacgagaaggatggggactatggaaagagcatgcttcgccctatcccctccaaggaagtggcgaagctgacgccgggcggaaagaaccagtacaagacctttgtgccggcgatgacagagcagcttgagcgcgcactggtgtggtatttgattacatgtgccattcgacgcagccgactgcagctgtcgcacatgaccatgctgatccacacatcgtcatatgttgcccagcacgacaacatggcaacgttagttaacgattggctgaatcggaacagcgccgatattcgcgacctaggtggccgaatgggcactcttttcgaagacgtttttgcatcggaaactcggcgcgtgcctttggagtacccgctgccgactgggaatctcaggtccgacctctcatcacacttgggagaggtgcttgatgcgatcgaggtagctgttgagaatggctacagcgacgagcgactagacttcacaaaggacgtcaagacttacatcgtcattggcggctccgttttggcacggggactaaccctcgaagggctctgcgtttccttcttccttcgcacttcgcgccaatatgacactctgcttcagatgggtcgctggttcggcttccgacacgggtatgaggatcttcctcggctctggacgacgtccgacctcatctccaacttccgatctttagcccaggtcgaagaggagattcgtaaagagatctcagtgtacaagacggcagaggtaaggccaacagactttgcagtcaaggttcgcgagataccaggcctcgcgatcacctcagccgcgaaaatgcgccatgcgtaccggaccagcatcagcttcgacggccgccaccttcagacaatccgattcgatcacaagaaggagaccaactgggcggttacggaatcctttgtcaatgcgttagttgaggagcttggggatggttcacaccagagcgtcttctttggtgttcccgccggtatggttagacggtttcttgttgattactccatctgcgacaagcacctcgatctaaacaagtcgatgctcctcggctatctcgatgagaatttgaacaagctaccggcttggaacgttgcagtgatgagtagcagcagtcgagacgccaagattgcatcgcttggtcaatttggaagcgtttctctgttcaaccgctctcgcctagacgagccgacggactacgccgatataaaggcgctaatgtccaagggagacatccttgtagatgtgccaaaggacgaccgtgctccagcggggagctgggaggagctcaaggctcagcgaagcgaagtccctctgctactcatctacccaatcgacaaggattctgcgcccaatccaaaggccaccaatcgcgccagcctagacgcgaaaggcaatctgataggcctcggctgggtattcccgggagccaaggatcacgcaggttcctattacagcgtggagctcaacgtgccaacgcctgagcagctggacgagggcgacgaagtgattgccgagatagtcaatgaagcctga

SEQ ID NO: 515599 - DNA, 1296 bp, Stenotrophomonas maltophilia
atgagtacttccggggtcggagccctttccttcggaaaaggctccgaccccggcgtgcttctggagacctgcgtgatccgcgccctatgctccctgtttctgctgaccgcgctggccgtgagcactgcgaccgcgatggccgcacccgttgccgacgagcaactgcagcaggtcatcctgctcagccgccacaacctgcgcgcaccggtggtggcgtccggcgcactcgccaaagcgacccctgaaacctggcaacgctgggacgtggcaccgggcgagctgaccaccaagggcggcgtactggaggtctacatggggcgctacatcggccagtggctgcgccaggcgcaattgttgccggcgtcgggttgcccgcagccggttgacttccacgcccatgccaacagcctgcagcgcacccaggccaccgcgcagttcttcgttgctggcgccttcccgggctgccctgctgcggtcgaacagcgcacgccgctggggacgatggatccactgttcgatccggtgatccataacgatgaccctgccttccgcgcccgcgcgctggcggcaatgcggaacgcgctggcggcagcggatctggccccggcactttccgtggtggaggaaatcacccgttacccgcagtcggcggcctgtgcggggcgcagcgactgtcatctggtgccggccgatacctctttcagtgcggagccgggcaaggagcctcgcgcctccggttcactggcactggccagcgggctggttgatgccctgttgatggagcattaccagggcagtggcatgcgccgcgacggttgggggagattgaacacccgggcccaatggcaggcgctggcgcagatccgcaacctctaccaggacatcctgttcggcaccgccgaggtggcgcaggatgtcgccggaccgctactgacccacgtcaatgcgttgttcgctgatccggcgtcaccgaaggtgaccctgctggtcggccatgactccaacatcggttccgtgctggcggcgctgggcatcaccgactacacgttgccgggccagtacgagaagacgccgatcggtggcctgctgcagttcgagcgctggcgtgaccgccagacgggtggcgagcggtttcgcctggcctacgtctacccgaccaccgcacagctgcgtggcgcacagccgctgaccgaggcgcagccgccgcgccatgtcgcgttgcgggtgccgggctgcgcggcgcagggctgcaccatcgcggaattccagcgtctgctgcaaccggcagcccgctga

SEQ ID NO: 515600 - DNA, 396 bp, Stenotrophomonas maltophilia
atgaaccaagccctgatccccttcgataccgacccgctggaaacgcgggagtggtgtgaatcgctggaggcggtgatgcaggccggtggccggccacgcgcgcactacctgatcaaccagctgagcgatctggacgcgcaacagcacggcgacctgcatacccacgcatggacggcctacgtcaataccatcccgcccgaacgccagccgccctatcccggtgacctggccatcgagcgccgcctgaacgcaatgatccgctggaacgcgatggtcatggtgctgcgtgctggatacaggacgcgatcgacaagtacggcatcgacactggcaagcacgatccggccgcggtgtaaggcggctgcgttcaccacgcccgttgtgcgagcctggtga

SEQ ID NO: 515601 - DNA, 936 bp, Stenotrophomonas maltophilia
atgcgcgcgccaagtaccgtggtgatgatatccgagagcgcgttcacgctttcgcagaggtcgaagacctccggcgacaggctctggcgacgcgagaatgcaagcagttgcggcggtcagcttggtggcgcggtccgacgctgttgcaatggcctggatgtagcggcgccgggtgtcgtctgccggccacgtgtgcaggagcatgtctaccgaaccggtgatgacctgcagcaggttgttgaagtcgtgggccaccccgccggtgagctggccgatcgcctccagcttctgcgactggcgcagctgctcgcgggcgcgcaccagttccagatgggcctcccgcgcctgctcggtgatcgccgcgacctggcggctgtgcaggtcgcgctcgatcacccgttcggtctgttcgctgaccacgcacaggatgccggccacactgccgcagccgacgcgcagcggcgaataggagaacgtccagaatgtttcacgcagcgtgccgtcgcgatccatcatcagtgggaggttcttgaaactgcggctggtgccggcgaaggcatcgttgacggcctgcaccacgttcggccatacgtccgcccagacatcctccaggcgattgcccatcgcgccgtgcagtttttcccccagcatgggcaggtacgcatcattgaagaagaacgccttgtcttccttgccccaggcaagccacaggggttctggcgaatccaggatcatcgccagcaacgtgcgaagttcggcgggtgcgcttgcggcagtggccgagcgggcccagtcactgtcctgcagcagtcggtaagcgagctgatcaggtgcagagactggcaggggaaaaggatgcatggccgccattggcgcaggaaggtggcgcagcatagccgagcgcatgtcatgacgctctgcacaccgccgacatga

SEQ ID NO: 515602 - DNA, 591 bp, Stenotrophomonas maltophilia
atgaagaccacccccaacgtttacatcatcgaatccctttatccgaatgatgagggcaatggccggtttgagggtgtcttcttagctcagattcttcgtctccacgggaaggagaccaagtattcgtatgtccgcactcgaaaggagttcaaggcagcagttcgagatttcagggcctcaggatacagatacctgcacatctctgctcatggggacaagaacggcatcgacacgaccaatcaagaaggagtcacctatcagcgactggctgaacttctgtctggcatcccaaagaactgccgcctattcatgtcctcatgcgaagtagttcatgaagaatccgctgaggcattggttaccgagggcagattccgctcgcttcttggcccgcgaaatcgtatcaagtttcacgacagcgcagcgacatgggccgccatctaccacctcatcttcaaagcgaaatcaacatccatggcggactcaaggatttctaccatcatgaaatccatcattgaactctatgcggtcaatttcgctttcttcacagagactgatgacggggaaatcgaagaccgactggcaatggactaa

SEQ ID NO: 515603 - DNA, 1596 bp, Stenotrophomonas maltophilia
atgccgccacgccgtcgcgtcgtttccctgtatcagccgcctgcgcgcggcctgcaactggcatcggcactgattgtcgctctgtcgctgccggcagcggggggctgggccaacgagctcgcagaggcactgggatgcagtgtcggcgaggtggtgtcggacggccttcgctgcgaagcggcgtcccgtgcaggcaaagtcgcatcctttgacgacgagaatgtcttgctcggaaggggcacttccaccacaggccaggcggacattgccatcggccggaacgccagcgcggacagcatcaatgccaacggatcggaccccgatgactactccattgcgatcgggccctctgcacaggtcacggggggcggctcgattgccctgggcggaaacgcgaaggtcattggcgcgacaaacagcgttgaaatggatgccgttgccgtaggcatgaagagcgaggtgactggagaacacggcgtggcattgggctatgccgctagagccaaggaccagggcagcatggcgctgggctacgaggcggaagtctcggcagagggcggcattgcgctgggctacgaggcgcgcagtattcatcagggcagcctcgcgctcggtgccggatcgcggacgggcgccgacaacaccgtttccttcggcaacgccacgctcaagcgccgtttgaccaacgtcaaggccggcgaggaagcagatgatgccgtgaccatgggccagctgcgctcggcgctcggggtcgacccgaacaccggcaccctgttgaacatgctgacctacgatgacgtttcgctggccagtgccagcctgggcggcagcggcggcacggtcctggggaacctggcgcgcggagcggtggcgcatgacagccagcaggccatcaacggccagcagctgtgggaggtcaaggccgattgggaggcccgttggcgcgatatggatgaccgcatggccgaggttgaacgtagcggtggtggtagtggaggcgggtcgggtggcgtggttgcaccaggcaagggagcagggtcggtggcggtgggcaccggcagtaccgccgatggccgtggtgcggttgcgatgggcagtggcagccgtgccgatggcaatggcgcggtggcgatcggcgaaggcgcagcggccaccggccacaattcggtggccatcggcgcgggttccagcgccgaccgcgacaatgaattctcggttggcgcgcagggcaatgagcgtgtggtcagcaatgtcgcagcgggcgtgcgcgcgaccgatgcggtgaacgtgcagcagatggaggatcgcttcaaggcagagcgtgagtacaccgatcgccgcttcacccagttggacaggcgcctggaccggatgggggcgatcagcgccgcctatgcgggcatggccatcaacaccgccggtctgagcggcgacaaccgtattggtgcgggtgtgggggcgcagaacgggcgttcggcactggccgtgggctaccagcggatactgggcgagaagaggaacgtctcggtttccctggggggcgcgttcagtggcagtgaccagaacctctccgcaggcgcgggtttcagctggtag

SEQ ID NO: 515604 - DNA, 306 bp, Stenotrophomonas maltophilia
atgaacatcatgaaatgcacgcgcttggcaacgatgctgggggcgaccctgctgggcgttctgctatgcgaaggttcgtctgcggcagacgacaacatcgtctatgagcgtgttgtgctgctggagctcatcaacggtgcggtaatgcaatgcgagagtaccgtagaggtcgcccgatgcgcgcccggctcggtgccgcagaatctggttactcaatcggtcccctttgaatgcaaggcgctggggctggtatccgtcagcctgaatctgccaaggcaggtgccgaccagctgcgtcgcccaatga

SEQ ID NO: 515605 - DNA, 1413 bp, Stenotrophomonas maltophilia
atgtcccccactgcccgcgtacacggtactggtgtcatccaccgtcagcgtgccggtgccggtaacgctgtcgcccagcaccagatcgccatcgaagctcagctcggtgctgttggccaggctgatcgtctcccagttctggtaacggcccacgcctgcggtcttgacgttgctcaggttgagctggtcgatgccactgccaccgtcgaacagcggcaccgcacccaggttgccctggttgaggttgctgaggttggccacgtcgttgtctgggcccatgtcgatcgcaccgtagacaatgccaccgccgctccagttgaaggtgtcatcgccggtactgagcagtacctgcccgcgcacggtaccgtcggtgatggtcacgctgtcgttgccgccgctgacgctgatgttgccgccgatgtaggcggtgcccgagatgatgatggtgtcggtgtcgaagccagtcaccacgttgccgtccacggtgccgccggactggtcccacaggttcttgtccagcttcatgttgacgcggccgatgcggcctgcggtcatccaggcctggtcgccatcttcgaacgcaccgacgatgcggccaccgctcatgcggaaggtatcgatgttgtcgccctgctgcagcgcgccgatcgtgccgccactcatgacgaaatcatcgcggccactgccctgcgccaccacgccggtgacggtgccaccggtgacggtcatctggtcatcgccactgctctggtcaacgctgtcgatcgtaccgttgcccagcaccagcacatcgttgccatccccttgcaggacaccgccggtgatgctgccggcctgcatctcgaggcgatcattgccggcatcgaactgcacgccggtgcgcccgctgatcgttccgctgttgaccagcacgctgtcgccggcgccaacgaactgcagcgcgatgttgttgccggtgctgatgctgcccgaactctcgacacggctgccgccaccgagctggaccgccacaccccccaccgaactgatcgtgccgaggttggacagcaggtgcccgccggccccgaccagcgaaatcgcactgccaccaccgctctgttgcagttgtgccgtgctggcgacattgacggtgataccggccgcgccattggcggtgatgggaacagtctgcgggttcggcgcattggcatcgcaggtgaccgtctggccggcgacgggggcggcgctgttacagccggcccaggcgacgctggcactcagcagcatgacggacgggacagccagggcctgcatcacggaaacggtgaggcggcgcggacggaaagcgcacgggacggcacgggacatacagcactcctgggcaggggatcaggaactgcaaatgcacgctgctgcgtgtgcagtctgccgtga

SEQ ID NO: 515606 - DNA, 444 bp, Stenotrophomonas maltophilia
atgagcgcccccaaccgcaagacggccagcctcggcgtaccgtgggaatcggcgtacggttacgtgcaggccgtacgcgtgaacaattcgattttcgtgtcgggccagctctcgcacacgccggaagggcagctggtggcgccagccactctgggtgctgatggcaagccagctgacttcggcaccatggaggcccaaatgaggcgcacctatgagaacgcgaagatagtgttggccgagctgggcggatcgctggcggatgtggtggaggagaccctgttcgtcatcgatgtgccggccgcatttgccgccagcggcaaggtcaggccggccgtctacggccagactgtcccgcaggtggccagcaatcttattggcgtttctgcgctcgcgttccccgaacagctgatcgagatcgccttgcgcgctgaagtgcagtcttag

SEQ ID NO: 515607 - DNA, 963 bp, Stenotrophomonas maltophilia
atgaacctacgtgatctgaagtacctggtagccctggccgaccacaagcatttcggccgggctgccgcttcctgctttgtcagccagccgacgttgtccacgcagatccgcaagctggaggaagagctcggcctgccgctggtggaacgcgcaccgcgcaaggtgatgctgaccccggccggccaggaagcggccgcacgggcgcgggtgatcgtgtccgaagtggaacagctgaaggaagcggcgcgacgcagccgcgatccggaagccggtacggtgcgcctggggatcttcccgaccctgggcccgtacctgctgccgcatgtgatcccgcgcatccgcgagcgcttcccggagctggaactgctgctggtcgaggaaaagagcgatgtgctgctggaccgcctgcgcgaaggcaagctcgacgctgcattgctggcgctgccggtgatcgacgaccagctgcatgccgagttcctgttcgaggaaccgttcctgctggccgtctccggtcgccacccgctggcacgtcgcgagcacctggacgtgcaggaactggccacgcagaagctgctgctgctggaggacggccattgcctgcgcgaccaggcgctggaagtctgccgcctgttcggcgccaacgagaagtccgagttccgcgccaccagcctggaaacgctgcggcagatggtcgccgccgacgtcggcatcaccctgctgccgagtctgtcggtgcagccgccagtgccgcgctcgaacaacatccgcctgctcgacttcaccggcgaaggccgtcccagccgccgcatcgccatgatctggcgccgcagctcggccatgaacgacttcctgatggacctggccgaccagttcaagcgcctgccgcaggcgctgttcaccctggaggcgctcgatgccggcagcgatgcaccggccctgcccggccccgcgctgaacggctga

SEQ ID NO: 515608 - DNA, 723 bp, Stenotrophomonas maltophilia
atgcccgcctcgatcggcggagcggacatcggaacggaaggtgccttgcatttctccgggggaagcggggccgtgtccaccgtcatcagggtcgcggtggtcttgaaggggctgcttcgcatcggacgattgattctgcgcactcggttgggcaggcaaggtctgctgaggcgaaacctaatcacggttttttttactgtcaacaacccccgcgaaaaattttcacatccgcacctttccgagcgccgtcggcgccactgctctacgcggcccgccatggcggttgaagcgtcgcgcaagcgtgctgcatgcaccggcatcgatgcatacgttgaacaaaaagcacttgaaataagcactccgcgcatacagacactgactcgcaacggcatcgcgcgtgcgacgtcgatggtcaccggcgccgccaccaacgccagcacaacagcgccgcaacagggggcgaaaagttttcacatccgagtgcgtcggcgcggggctgaaacgcggatttgcgcaaaactgcgcacgcccatcggcaccgttcgcccgtcggctgatgccacgccgagggtgcgcagcgaaccccgcgtcatgagtccggtgcagtcgccaaaacaaaaacggccacccgaaggtggccgttccagaatccggaaacgacgactcagtggtcttcgttctccaaggcttcggcgtacgcgtccgggtccagcagctcgttga

SEQ ID NO: 515609 - DNA, 888 bp, Stenotrophomonas maltophilia
gtgagagcaatcagcactgcgctgtttaaagcaatcattgtccttgccgtaatttcattcacagatgaagccagagcgggcggactcatcgagtgcaacaattgtgcctcgccgaagtccgtggctttgcagtctgggtctgggcttactgtcgtaatcgacttcgaaaaagcacaactgactgctttcaatgttgagtatgaccgtgaactcaggaagtggcgggccatttccaccccagtccctagccaaatccaaatggcatttctgcgaattgtggaaagcgtgtatacccccaattctcagcccgaccaagcatttccaaaagcgggtggagctgccgtggtcccgctccacccggacaatccaggaaattctaatggggcgcgatttccagattcatacaaatcctccgacgcgttcgagatcgtcaattcagcaaccatgagaacgcggctaggccagtatcttgcgctggaaatcgcaggagcaaataccagcaatcccggctggaacagtttcgcgctttccattcaacaatttgcgcttagctgggccagcatcaagggcggcggcgcagttaatatagttatcacctggcgagatggttcaaaaaccatttatcgcatcacgcctgacaatgtgacagaagccaagtatcagaagggggaaagccgcgacagcaccggcaacaaggtgccggacgagaccattgcagatcccgccactgctccctcatacgccggccaatattatttcggccgcgaaggtgatcttgacaaatgggtccgctctgcacagatgtatggagtccccgtccagcgcggaagcagcagccgcatctcttgcagttgggatggtcgcacagtctactgccagcaatactga

SEQ ID NO: 515610 - DNA, 318 bp, Stenotrophomonas maltophilia
atgaagcccatgaccttggccgtgacgatgttgttgagcatggcgtctgcatccgcatctgcattcacgcttccccagatgggcgctctttcgccacgttccagtacacaggcgtgtcagaacgcatggaatgcgtcgtctgccagccgcagttgccatgtcaaccgcattgaagggcggcccggcacgcagtgcttcatcaatgtcagctgcgtgcgcaacaacggcagcaaactggtgaatcagtacacgatggaggaatggggggtacgcgccctgtccaactgcgacggaattctcagggtcggagggtgctga

SEQ ID NO: 515611 - DNA, 207 bp, Stenotrophomonas maltophilia; identical to SEQ ID NO: 501876

SEQ ID NO: 515612 - DNA, 150 bp, Stenotrophomonas maltophilia
atgggatcccgtgagtggctgggttcagtcacgctgccggagtgcccggaagacgttcctcgcatccgttttagtcaaaggagtggggacagcctccgtttttctggcgtcgtttttcgccaggcgttgttgctccacccgtttttctga

SEQ ID NO: 515613 - DNA, 930 bp, Stenotrophomonas maltophilia
atggcagattcaaagcacgtcacatggatcgctacagctgggcgattcaacataggcgatgaccacatcaccttcttagatcgcgatgacacacttggcacccttggggatccactcttcgggatgattcgctcaaacattgactttgagcaaggatccgtcgagtttgatttccgcatatccgaccctcaagcaagcgtccaggttgctatcccaggaagcaattcggatctttttgcgggcgtcaatgtgatgcatgcaccctacgggttcgcagcgttcagagagagatccacttgggaaccgaaaggtggcgtcgggcatggagctgcccctatcctcaaccaatggagaaggatgcgcgtcgtcgtcgaaggtagcgaagtttccttgttcgttgacggcgtaaatattgtttcgacaacatttccaaccgcaagggggcagctgtactttgcgttcttcggcgccgccggcagtgaagttcggaaaatctcagtcaagactcgtcagccggtggctttcgtagtcatgcagttcacagacgagttcaattctctctaccgagaggtcatcaaaccggtatgcgaacactttggctacagggtcgttcgagcagatgagttccatacctcaacgatgatcgttgatgacatcattcgctccttgcgagatagctctgtggtgatcgctgatatcacccccgacaacccaaatgttttctacgaggtcggctacgcacatgcacttggtacaccgaccattctgctttctgatcgatcgagatcgaggctgccgttcgatgtctccgggctaaggacgatcttctatagcaacaccatcgctggcaagcgtgatgtggaagaggcgctcaccaggcacttaaccaccctgggagaccgctggaactcgtcagctgggcggatgtag

SEQ ID NO: 515614 - DNA, 1806 bp, Stenotrophomonas maltophilia
atgcagcacctgccccagacgtcccttggcaaagcgttcgtcggcggcacaggcggccggcgcaacgtcatagctgtagcccacgtccagattggggtccggataggcgatgccgatcaggcggttgagtgcatcgtagtgataggtggcggtgacgccgcgtgcatcggtggccgtcttgcgattgccagccgcgtccacggtgtagctgctggcgccgctgtccgggctgacttgcccggtcaggtcaccgaacccgttgtaggcataggtcgtatgcagacctttcgggtcggtgacctgggtgacctggtccagcgcgttgtactggctgcggatctccgccgcgacgccgccgacgtcctgcagggtctgcgccaagcggttcaacggatcgtactgctggctggtcacgcgctgcagggcatcggtcaccgtctgtgggttgccgttggcatcgtaggcaaagccggtggcgtggttgcccgcatccttcagcgcggtcagctggccaagcgtgttgaacgtccgcgccagggtacggcgcagggtgccgcctgcatccagcgtgtcttccttgaggcggttgccggcgttgtccaatacgtagtggatcgtgttgccgctgttgtccgcaatatcggtcaagcgctgggcggcgtcatagacataggtgacactgctgccgtcgggctcggtgatctgttgcacctggccggtcggccagtagctgatctgggtcacccggtcctcggctgtggtggcaccgcgcacggtgaccgaggtcggccagccgcgcgcatggtaggtgtagtcggtgaccacgccgttggcatccttgaccgacaacggccgcccaagcgcatcgtaggccagagtctcggccgtctgcccgagcgcattggtcacgctgcgcaggtcgcccttgcggtaactgcaggcaccattggccgcgcatcccgcgtcgtccgctgtgtagtaggcataggtggacacatccgccacatcgcttcgcgggccgtccacactgcgcagcagtcccaccagcgggcactccggcccttcggcctcacagtaggtctgcgtggtgatgcgggtatcaccggtcaccctgtcgcgcacggtgatggtggttggctggaggcgcgcattgcgtgcgatgcgcacctcacggttaccgatggcctgctgcaccagccgattgctgtccatggccacgcgcgtttcgctgacgcgctgatccggagtaccggccgcttcggtggtggtggtcacactgacagcacctgcggcagcgtcgctggcctccgcataggcgtagttggtaacaacgccacggcgatcggtcaccgactgcagccgacgccggaaatcggtgccctcgggcagataggtgcgactgatgctgccgttgctctcggtgattccattgaccttgcgcggaaggccgctggtaccgctggcggtcaaggcgtaggtgctctgcttgcccagtgcgtcggtgacgatggtggtgcctgccggggtgtactccaggcgcacgccatcaatgcccacgtcggcctgactgcaatcgccggaatggcggctgcaggtgactcgcccttgcgtgtcatagccgtaccagctgtagcgctggctgtcttcggcggtcacgccggtcaggtagcccgggaagcgggcgtcctcatagtgatacgtacggctggcaccgtcggcataggtcgcggtgatcagttccccggccggagaataggcgtagctcaccacaggctggccggcgattaccagggccgagatcagtga

SEQ ID NO: 515615 - DNA, 606 bp, Stenotrophomonas maltophilia
atgaatctgctgcgcgtgctgcctgccaccctgctgtgcctgccgctgatcgcctgcggcggcacttcttccgcacccgacaagaccatcggcaagagcgtcgccgaggccaccagcggcgtcggccagaccatcaaggaggccatggacgatgcccgcaaggaaatcaccgagggcaacatcaggatttcttcctccaaccagccacaggccgagatcacccccgacggccgtctgctgatcgacggcaaagatgtaccggccgacgccaaccagcgccgccagctgctggcataccgcagccaggtggtggccgtggcgaatgaaggcatggagatcggcctggccggcgccaaactcggcaccgatgctgccagcgaagcgctgaagggcatcttcagtggcgacagcgatggcatcgagaagcggatcaacgccaaggcggcgaagatcgaggcccaggcaaagcgcatctgcgagcgcctgccggcgatgctggccagccagcaggccctggccgcatcgctgccggcgttcaagccctacgcaacgatggaccagagtgacgtcgacgactgcggcaaggacaccgtggtccagcgctag

SEQ ID NO: 515616 - DNA, 915 bp, Stenotrophomonas maltophilia
atgaatatcaaacagccacaatacatcttctccgcacttgccctggcggtcgtcgtcggactgagcggaccggctctggcccaatcggcggcaggttctagcccaggtgctgcagcaccctctgccgcatccaaggcggcacagccacaggtagatgacaaggtcgcccgggaagccgcgggaaagcgcgccaaactcgcccaagatgcaatcactgcgctggccaagacccatgaggcattgatcctccttgatgcaaggaagaccaaggaggcgctcgctgcgctggaactggccagcggaaagctggaactggtattggcgcgtgacccaaaacttgctttggcgcccgtcgatgtacgcgtcatcacccatgacatccacgccgacgtggaatcggtcaagaaagcggtcaagttgtctcgggagttgttggatgatggcgaggtgcaaaaggcacggcccatcgtcgccaatcttgccagcgaaatcgtgatcgaaaccgacaacctgccgatggcaacgtacccggcagcgatcaagtcggccgcacggctcatcgacagcggcaagattgacgatgccaaggcggtgctcgcccgagcgctgaacacgatggtgatgacctcggtcgcctttcctctgcccgtgctacgggccgaagccgcgatggcaaaagcggaaaagctggccgagaccggcaagcgcaatgccaaacagagcgaggagctcagcgccctgctggcctacgtgcgcacggaaatcgagctggcgcagatcctgggttatggcaagaaggcggacttcaagcccatcttcgatcaggtgaaggctatcgagcagaaatccgccggaggaaaaagcggcaaggggtggttcgacgagttgaagatgcgcatccaaaggctgtcttga

SEQ ID NO: 515617 - DNA, 603 bp, Stenotrophomonas maltophilia
atggcccatctcgtgataggccacggtttcccgctccttgggattgagcacgcggttcttcttctccaggcccgccacgatgcgctcgatggcggcggtgaagttttgcagttccacagcctgcgccttgcgccgcgtcgcgttcagcgctgcttcgttcacgagattggccagatcagcgccggaaaagccggtggtcagcgccgccacctgttccagatctacaccgtgggccagggtgatcttcttgacatggaccttcaggatatccaggcgacctttcttgtcgggccggtccaccagcacctgacggtcgaagcgaccggcgcgcagcagcgcctggtcgaggatttcgggccggttggtggcagccaggatgatgagccccaccgagctgtcgaagccatccatctcggtaagcaactggttcaaggtctgctcgcgctcgtcgtggccgccgatggggccgccgacaccgcgcgcgcggcccagtgcgtcgagttcgtcgatgaagatgatgccgggcgcctgcccgcgcgcctgctcgaacaggtcgcgcacgcgcgccgcacccacgccgacgaacatctcgacaaactctga

SEQ ID NO: 515618 - DNA, 282 bp, Stenotrophomonas maltophilia
gtgcatccgctgcccgccctgcgcgccaggctgctcctgaagcgcgccgagaccttggtagaagatggtcagcggagcgaagcgtccaatgagcgcctggagacattattgaaagaagcgcggcagcagttggaaatggcagaactgctgggctatggaaagaagaaggactttgagcccctatatgctgaactcaagaaagtcaagcaaaagacggctgggggaggcagcggaaaaggctggctcgatgaaatcaaggcaaagctgtccaagttgttctga

SEQ ID NO: 515619 - DNA, 282 bp, Stenotrophomonas maltophilia; identical to SEQ ID NO: 507089

SEQ ID NO: 515620 - DNA, 207 bp, Stenotrophomonas maltophilia
atgaatcgattgtgttgttgtgggcaggagcgcgcaagcggcataagcgacgtgcaggacgtggcccgcgtggaccacgcgatggcgccgcgcgagctggtgcggctgggcagcgataccgaatcgctggtgctggcgcgcgcggtgcgccgccatgtggagcaccgcatcctgctcaacgggcaccgaacggtggtgttccggtaa

SEQ ID NO: 515621 - DNA, 207 bp, Stenotrophomonas maltophilia; identical to SEQ ID NO: 515620

SEQ ID NO: 515622 - DNA, 288 bp, Stenotrophomonas maltophilia
atgtcaaagcgtaggaagttcagtgccgagttcaagcgcggtgcggttgagcaggcgagccagcccggcatcagctgcgcccaggtggcccgggagctgggaattcgcgacagcctgctaacccgctggaagcgcgaggcgcagaatccagaagcggccgctttcggcggcgccggaacgccacgggacgaagagttggctcgactcaagcgtgaattggcgcgggtgaagaaggaacgggattttttgcgagaagcggcgacgttctttgcaaagggatcatcctga

SEQ ID NO: 515623 - DNA, 315 bp, Stenotrophomonas maltophilia
gtgatcgaacgttgccgcgatgagtttccgattcggctgatgtgccgctgcctgaaggtatcgtccagcggctattacgagtggagcaagcgtcctgcgagtgccaggcaggtcgagaatgagcgtttggtggtaaggatgcgtgagttgcatgaagacaaccggggtactctgggagctggccgcatgcgcgaagacttggccgaggaaggccagagcgccagcctgaaccgggtagcgcgcctgatggccgccgacggcctgcagggttggccccggcgtaagcgtcgcggcagcgcgcaagtccggccatga

SEQ ID NO: 515624 - DNA, 549 bp, Stenotrophomonas maltophilia; identical to SEQ ID NO: 515200

SEQ ID NO: 515625 - DNA, 666 bp, Stenotrophomonas maltophilia
atggcgcgttccgccgaaggccttcttgatccgtgcagctacgtccttctcgacgatattcaacgggatcggcggcaggaactcgccgtccggcaacacgtccagtccttcgcgagtgccggcgatgccggcgaacttctccacatggtcgtaccacggcgcgatgtcggcatagcggataggccaatcggtggcgatcccgtccttgaggttcgcctcgaaatccagatcggagaagcgataactctgccggccccacagcagcgagcgaccgccgacgtggtagcctcggaaccagtcgaaacgtttggtctcgatgtagggcgagtcctgttcgttggcccacattccttccagattctcggccagcccgtagtcgcgcatcagcaccgggaagtcggccttcatcgcctgcgttggccggttgcggtgggggaagtcccacgcttccttcatcgcgttaacgtagtccttgacgtgctcgatgttgcgtccgcgttccagcatcaggaccttcaggcccttctcggtcagctccttcgctgcccaaccgccactgattcccgagccaacaacaatggcgtcgtagtgattatctgccatgggtttctcacctgggtggatatcgtttcagacgtcgcagaggcggattgcctcgcgcaatga

SEQ ID NO: 515626 - DNA, 486 bp, Stenotrophomonas maltophilia; identical to SEQ ID NO: 515201

SEQ ID NO: 515627 - DNA, 318 bp, Stenotrophomonas maltophilia
gtggaccctgccctgcagccacctgaggccgcgcatggcgaactgaccctgcgctggcaggccggcagcgaaggccagcagtaccgggtgcaggtggaccgtcgtggcgacttcagggcgcccctggtcgaccagaccgtgagcgagccgcaggtcagcttcaagcggccgtggagcggcaccctgcatgtgcgtgtgcagtacatcgacgacgatggtcatgcgggtgagtactcaccggcccagcagatcaagctgccctgccgcctgtgctacggcgccggtggtggcgccctgctgctgttgctgttgttatga

SEQ ID NO: 515628 - DNA, 228 bp, Stenotrophomonas maltophilia
atgcgtctgttggtgatcgaggacaaccgccagctggtggccaacctgttcgactatttcgagtcgcgcgggcatgtgctggacgtggccccggatggcatcaccggcctgcacctggccggcagccacccctacgatgcggtgtcctggactggatgctgccgcgcatggagggaccggaagtgctgcgccggctgcgtgccgagcacgcgtcggaggtgccggtga

SEQ ID NO: 515629 - DNA, 876 bp, Stenotrophomonas maltophilia
atgcgcctgaccttgcgccagctgcaggtctttgtcgccatcgccgaccatggcagcaccaccgctgccggtcaggccattgcgctttcgcagtcggccagcagcgccgccctgcaggagctggaagcgcacttcggcacgccgctgttcgaccgtatcggccgccgcctggcgctgaacgggcacggccgcgcgctgctggagccggcgcgtaccttgctggtcaatgccgccgatctagagcggcagctggccgccggcggtgacccgtcgcagggcgcaccactgcggctggtgctggccgccagcaccaccgtcggcaattacctgctaccgccgcgcattgccgaactgctgcggcaggcgccgcaggccgaggtcgacctgcgcatcgacaacagtgccggcgtggttgctgccgtgcagcgcctggatgtggacgccggcctgatcgaaggcccgtgccacgagcgcggcctgcaggtcaccgcctggcagcaggacccgctggtgatcgtcgctgccaccgatgtccccgcgcgctggtcgctggacgaactgcgccgcgcacgctggctgctgcgcgaaccaggctcgggtacccgcgaagcggtggagcaggccttgttgccgcacctgcgcggtttcgcgcagaccctgcagctgggcaataccgaagcgatcaagcaggccgccatcgccggactgggtctggcctgtctttctcgtcatgcgctggaagaaccactggccctcggccgcctgcgcgtgcttgagaccccgttgcccgccctgcagcgcaccctgtggctggtacgccaccccggcaagcaatggttgccggggttgcaggcgttgttgggggaggtgcagtag

SEQ ID NO: 515630 - DNA, 459 bp, Stenotrophomonas maltophilia; identical to SEQ ID NO: 495228

SEQ ID NO: 515631 - DNA, 282 bp, Stenotrophomonas maltophilia; identical to SEQ ID NO: 515618

SEQ ID NO: 515632 - DNA, 228 bp, Stenotrophomonas maltophilia
gtgttgctggtgcgcggtgaaaagcgtcaggagcaggaaaccaaagacggtggtttccaccgggtggagcgctcctacggcagctttcagcgcgctctgaacctgccggccgatgccaaccaggacacgatcaaggccgctttcaagaacggcgtgctcacgataacgatggacaagcgcgaggccagtacgcccacgcaggggcgctcgatcccgatcaatggctga

SEQ ID NO: 515633 - DNA, 207 bp, Stenotrophomonas maltophilia; identical to SEQ ID NO: 515620

SEQ ID NO: 515634 - DNA, 207 bp, Stenotrophomonas maltophilia; identical to SEQ ID NO: 515620

SEQ ID NO: 515635 - DNA, 696 bp, Stenotrophomonas maltophilia
atgaccaagcgagtactgaacgtcgttacaaatgtctccgactttgaggaccctgcgcataagacagggctttggttgtcggaactgacgcacgcctacgacgtatttgctcaccacggctacgaacaagtcctagtgagccctcagggcggtctttcgccgctggagccccgcgcgctcaagtggcctctactggatcgctctgctcgaaactggttggagcgtcccgatcggatgtcgcttctggagagtaccctcagcccagcccaggtggatccaacgatcttcgatgcgatctacttcaccggcgggcacgcggtgatgtgggacttcccagagtcgtatccactccaggagatcactcgcatcatctatgaacgaggcggcattgtttcggcggtctgccatggatactgcggccttctcaacactcggctcagcgggggcgaactcctcgtcaaggggcggcgaatcaccgggttttcctggacagaggaaatcctggcgggcgtttccaaggagatgccttacaacgcccagcaagaaatgtctcgtagaggtgcactctacgaaaaggcagttcttccgttcgtgccaaaagttgtagtcgatggaaggcttgttacggggcagaatccgcaatcagccaaggtgacagccaaggcagtagtggccgcgctggatcggaacaattag

SEQ ID NO: 515636 - DNA, 468 bp, Stenotrophomonas maltophilia
gtgaagatcggagagttggccaaggctacgggcctcagcacttcgcggattcggttctacgaggcagaagggcttatcagcgttgcccctcggggcaacaatggctaccgggtctattcgcccgagaccgccggcgtgctgcagatcatcgatagcgcgcagcgcgctggattctcgttggatcagatccggcagttcctgccgactggccaggccaagtgggaccatgagggcttggtcgaatcactgactgcaagagtaggggagatccgacaattgatctcgcagctccagcagaacgaggcacgcctgatcagcatcatcgacggagtcagtcagcgtcccgatggcatctcgtgtaccgataacatggcaaggctgatgaagctccttgacgctcatccggcgccgcaggcatcagattctgctcatcgcgtgagagcttcccgcatgcccaaatcgacctga

SEQ ID NO: 515637 - DNA, 972 bp, Stenotrophomonas maltophilia
atgaaaaccgcaaccctagctcccgtccttggcgccggcctgctggctgccgcagcatttgcccaagcagccgagacgacattaatcaagattggcaaccacgatgttcccgtggtgaagggaggattgtatgaccgctatcggtccaacccaccgctgtcggtcattgccgcggaggcgcccaacaccgacctcagctggttcaagggcatcaccaaggaaaaagtaaacattgggtttgagagctggtctccgaacttctattacgagaaccgccgcatcactgtcatcttcaccgcagatctgaaccggctacgtgagctgatgccgccggaggtcctggagaaggtccagcccctgcaggtgtggcccggacgtggcgtggtcgcgctgaccgcctattcctatcagtactgcgacaacgatagctataacgagattgggctgtccgtcgtcaccagcaagcccggctctaccagctgggggccgctctccctgatggctcaatccttctctgatgacttctggggctatgtacttaagttgccggtcgacaccgagctggcgcgtgtccgtggcgttgttggctacaacttgcccaagtggttgacgcgaatcgactacaacgaaggcgacaaggacgttgtcgtcaagattttcgacagccagacccaggcgctggacgtaaccctggaaacgcgcaagctcgatgtcggctccagcaaagaggccttcgtgacaaaccacttcacgaatcttgacaagcaaggaaatctccagaccggaaacaccacggcgcgccagttgagccaagccagtacgtccagccgcgatgccgtcaagctcacgctgaccgatggcagcctgtcaggcttcatatcgtcattgaagctgggaaggatgctcaagtatgagtacgtgcccgatttccaagccgtcctgtacgcacccaagcctctcgccaaggagtga

SEQ ID NO: 515638 - DNA, 1413 bp, Stenotrophomonas maltophilia
atggttgatgtattgagccgacagcgcgctgccttcctgcaagatggcgcgccaagcctttccttgcgtaaggcacggcttcaacgactacgcgctgcagtgctgcgacatcgtgaggcactgaaggatgcagtcagtgcagacttcggcaatcgctcaaggcatgaaaccgacctgatggagttggcctgcatcatccaggccatcgactacctgctcagcaaccttcgccgcttcatgaagcgtgaacgccgccacgtgcggtttgcctaccgctctggtcgcgcctatgttgagtaccaaccactgggagttgtaggggtaatgtcgccgtggaactaccccctgtctcttacgctggtgccgctcgccactgcattggctgcgggcaatcgggccatgctcaagccctcggagctcacgccacgggccagtcaggcgctgcacgacgtgctcgctgaagctttcgcagaagatgaggtcgccgtgatactaggtgggcccgaagtcggggccgagttcagcgcactgccatttgattacctcttgttcactggcagcacgcaggtggggcgcatggtcatgcgcgctgccagcgacaacctggtccccgtgaccctggagctgggcggaaagagcccggcagtcatcgcgcgtggtcacgtcaacgatcgcacgatacgaagcctggtgttcgggaagctctccaatgcaggtcagacctgcgtggcaccggactatgcgctggtccatgaaagcgatctgcagacattcatcgatcagtacaccaacacggtcagacgcttctaccccaacgggctggacagtcccgattacacgacgatcatcaacacacgtcactaccagcgcctgagcggactgatcaatgacgcacgcaatcggggggcgcgggtgcttgagatcggtcaatgccctgacgacatagcggtacgcgagcgcatcctggcaccaacgctggtcatcaactccgacgacgatgcgctgctcatgcaggaagagatctttggaccagtcctgcctgtgcgcacctatggcacccttgatgaagccatcggctatgtaaatgctcgaccgcggccgctcgcgctctactacttcggcaacgaggatcaaggctgtgcccaagtgctggcgcgcacgacttcgggcaacgtgggcattaacaacaccctgctgcacgtggcacaagatgacttgccctttggcggcgtcggtccgagcggcatgggcgcctatcatggtgtcgaaggctttcgctccatgagccaagccaagggcgtgttcgtgcaggggcgttggaatctgccggggctgctacatgcccccttcggcaagatcgctgaattgggcatcgcgtttacccttgggaagagcagggtgccttcgccgtga

SEQ ID NO: 515639 - DNA, 933 bp, Stenotrophomonas maltophilia
atgcagacgatcctcggggccaatggccagatcgccaccgaacttgcccgggaactccggcacacctacaccggcgagctgaggctggtaagccgcaatccccgcaaggtgaacgacacggatgctctgatggcggccaatttgctggacaccgagcaaacgctgaaagctgtcaagggcagcagcatcgtctacttcactgcgggcctgccgccggacacgaggatgtgggagacgcagttcccgacgatgctgaagaacgcactggatgcctgccgtgccgagggcgccagttttgcctacttcgacaacacgtacatgtacccccaggacgcgcggctgctgactgaggatgcgcctttcgcgccagtaggtcgcaaaggcgtcgtgcgcgcagccatggcctcaatggtgctcgaagagatggcacgcggtgcgatccctgtattgatcggtcgcgcacctgagttctatggtcccggcaggacgcaaagctttaccaacgcactgatcattgacaagctccaggctggaaaaaagccgcgcgtaccggtgcgtgatgacaccctgcgaacgctgatctggacgcctgatgcgagtcgcgctcttgccgtcctgggtaacacccctgatgcttttggccagacatggcacctgccgtgttgtgacgaccgccccacctacaaggacttcgtcacaatggccagccaagtgtgggggcgcgagccgtcctacggagtcatcagcaggtggatgctggccgctgccggactattctccaaacccgtgcgggagatccaggaactgctgccgcgctacgaacaggacaatatcttcgactccacgaagttcaagcgcaggttcccggagttccaagtcacgacgtacagccaaggcttggagctgattcgaaaggacttctcccgtcagtag

SEQ ID NO: 515640 - DNA, 444 bp, Stenotrophomonas maltophilia
atgaaaattggagaactggcccagcgcacgggcttggcgccatcccgaatccgtttctacgaacgcatcggcttgctaacggcagtggagcggcaggacaacggctatcggagctaccccgaggatgcggtactcgcactcaggctcatcgccaccggacaacaagcaggcttcagcctggatgagctgcgcgtactgcttcccagcgacctcgcaagttgggagcacggcacgttgctcggaacactccagcgaaagatcagcgagatcgataagttgcaagcccaacttacagagaacaaagcgcacctgctggagttgattgagcagatcgatgccaagccacagggtgtggactgcgcaaccaacgcccgacacgtgctgtcgacggcccaactagtggacatcggaaaagcgccagccacgaaacgaattcggcgttag

SEQ ID NO: 515641 - DNA, 1023 bp, Stenotrophomonas maltophilia
atgaacaccccgattcaaggccgcgatcgtcccactgagatggtcgctattgagatcactcaacctggcggtcccgaagtactgagtccgacgacccgtcccatcccttcgcccaaggcaaatgaagtccttatcagggtggaagcggctggtgtgaacggccctgacatcctgcagcgcatgggactctacaacccacctcccggcgcgtccgacatcccagggttggagattgcgggtgaagtggtggctgtgggcgccaatgtcatagatcacgcagtaggggatcgcgttgcggcattgctgaccggtggcggttatgctcagtacgccgtggctgacgagcgcgtcacaatcggaatcccagacggtctgagcatgattgaagccgctgcgctacccgagacgttcatgacagtgtggcttaatctgttccagcgagggcagttcaaggctggtgaatcggttctgatccacggcggcgcttcaggtatcggaacgaccgcaaccatgctcgcccgtcagttgggcgcatctacgatcatcacgaccgtcgcatcgaaggcgcatcaagaggctagcctgcgcctcggggcggatgtcgccgtgaactacctggaagacgacttcgttgccgcggtaaaggctgcgacagatggcgctggagttgacgtgattctggacatcatcggtggcgactatgtggccagaaactacgaagcggcagccatgaacggtaggattctccaggtcagtgtgctgaagggcccggccaaggaactcaacttgtggcccatgctggccaagcggctgacgcactctggttcgacactgcgctcgcggccctatgaagacaagcaaggcattctttccgagcttaagcggaatgtttggccgctgattgccgaagggcgtgtgaagcctgcagtctacagcacgttcccgctggccagcgctgctgacgcgcatcggttgatcgatagcgcagaacacatcggcaaggttgttcttgtaagcgggtaa

SEQ ID NO: 515642 - DNA, 396 bp, Stenotrophomonas maltophilia
atgcagacagcgaggtcggcttggcaggtgatcttggattttgatctggatatgtcccttgaattgacatcttccagtaccgttgctcaaggatgggatgaatttgggacgataaacgtcgaggttctgtcgaggagggctgttgaatcgacaagcgaatggggcaatctggatttgcaggaagaccttgacgttgtccgcatcgagatcgtgcgttggcaaggcgacggactgatcgttgactccggcattcgtttgcattttgccgatggccggaccttctcggccgtggcgttgggcgtgccgggagcgtttctcttgaccatgccgggcgaggctgctccagccttttggcagtttcctgcaggggaatactctttcgtcgcgattgaatga

SEQ ID NO: 515643 - DNA, 630 bp, Stenotrophomonas maltophilia
atgccgctcgtggaaaaggaaattttggaatcggtagtgcaacttctgagcaggctgatgttatgggtcgggcgtgggttggatctggttcacgcaaaaatagttccggaaacgaacttatcagccgatgtggtctgcggcaataccgctttccatcagagaagcccaatagccatcacgcgcctacaggtattcaggcaaattttgagtctcgctccatgcctgaaggtagatggacgaacaatgcccatctcaatgtcgagaaaaaaaatgactaaggcaaggttgaaagggattgatactgctgattgggatgctgcatttgaaacgtatcaaagaacgggtttatttgactgctactttcaggcgtccattggtgcagatgatagtcgaggtgcagacctgtttggctttaccgcttgtaatcgcgagtggttggggtcgatgattgaggacgggcgatccattccgaaatttgttgtcgtaaatgatgtcagccttgaggccgtcgagcgagccgtcgagcttgtgtgtggcgccgtaccagatggaaggtgggaagaagttgcccataagttggctgaattgatggattgggagtttgaaggttacgtccccagacgcaggtaa

SEQ ID NO: 515644 - DNA, 1089 bp, Stenotrophomonas maltophilia
atgcccggtgtaccccggcccgtccttgacctgcccgcccaactcggcaccatatggctcaaaccggcgtcgctcgacaacacttcctgtgttgtccgtaaccgcaaccgggctgcccagtgcatccacatgcgtccaggtaacacccgtcgggctgcgggtggccagcagtcgaccacctacatggatgtactccgaggcgcccttccctcgccgatcttcgtgcaccactttcccggccaacgaatacatctcgcgcaggcgttgcccttgggcatcgtacgccaccgcacgccgcccatagccgagacgaaaagccccggccagggccggggcttttcattacaactggtgccggaaacaggagccgaacctgcgacctacgcaaaggtgactcgccaactgaaccgcaacagcagtcaagcagcgccaaggccaaacacgccatgcagcagtcggccataccggcgcagatgtcacagagcatattcagccacgctcgcccacattctttccacaattctggccagaagcgcagctttcaccgttcatccccaaagccctccttgggtaggatccggaagccaacgggcctgtcatttgggcttggcacttgcttcccccgatcgggcggggagcgtctcccaacctaaccaacaacgggtaccagtttatgccccctcgtcccaaggaccttcaacgatcctcccccgccatacgccttcaattccaggtgcaacaacgatgatcttagcagtgagatcaccgtctgatcctgtagcgggcatcccctcttcgagaaccagttgctctcttctcagatcctccagcgtccccgtgaggttaagcctcaagaagccatcagcatctctattgttgaagtcgacaaatattctgagctcagacatctatggcctctgcagcctttcaacggccggaaccggattggatactgtaggggaaaacaaccggctcgctgcttccggctcaagccccacaactgttgcgtgcgtcggcgagaccccgcctgtcgagatgacatcacctcccgcagcccttacctgcccaaccgtggaaacaccgacctga

SEQ ID NO: 515645 - DNA, 3774 bp, Stenotrophomonas maltophilia
atgagccgtactggaccgattcggcaatcgtgcttcgtctggcgcccggggctgcatgccgcggtactcgtggtatcgcttttgtcgtgcgtatcagcattcgccgccccgccacgatgtgaggatgggagccggccgcatccaacgaaaggttgtccggaagactacgaacccctgccaggttcgcttcaaaggcagtcgacctacatctcgatgtcggtgcccacgcagatggtggtcgggcagctctatgcagtcagtgtcacctacaagaacattggcaaggccacatggacgaatgagcagaatttcaggctgggctcctggtatccccctgacaatctgacctggggaacttcccgggccaacctgccggggcccgtcgcacccaacgagacggtgactatcccctttaccgtgcgagcccctacacagcccggtcagcacggattccagtggcggatggtgcaggacggagtggagtggttcggcggtgaaacgcccgcgccgatggtcaatgtcgttgcttccaacgttacgggctacatcgacggaatctctggagcccatctggtgggatgggcctgctcgacggggatcgaaactccgattgacgtccatctctatgtggggggcgctgctgggcagggggttggtgtctcctcgacccgagcagatctgcctgccggtgccggcgtagcgtccgcttgcgggacgcagggtgacgcacacggtttccgcatacccattgatggcgggctgatcgcagcgcatcaggggaaaaccatccatgtgcacggcatttcgcccgttggagcagccaactacgagatagggcggtcaggcgtgttcgtggtgccggccaaccagcagcctgtcgtaacgctggtatctccggcgcatggcgccgtgtactcagaaggcacggtcattcgtctctctgcaacggccagcgatgcggacgatggcgttgcatcggtgagcttcgtcgtggacggcgccacgatcggcgtgacgtccccgcccaatcactttgttgactgggtggcatcaccgggcagccatacggtacaggcatctgtacgcgatacgcgtggagcggtggcgttgagtgactccaggaccgtgcacgcatcaaaggtctcaggtgcgatcacgggtctgcgggacggcaatatcgtcggctgggcctgctcgacgcatgtgcctgggccgatcaaagtgcgtgtgttcattggagggcctgagggcgcaggactatctgctggagagtatctggctgaccgggcaggtcccactgaaagggcggcccagtgcgcaacggggagcgcgcatgacttcctgatcactccttcggctgaggtgcttcaggctggcttgggaaagaccattcacgcctatggtgtttccgcgctgaccggacagccggttgcgctcgaaggctcagggcatcacgcgctctcagcgaaccaggcgccagtcgtccgcatcaccgccccgcaagcgacgactgcgctgaccacgcctgcgaccacgctcttcagcgcctcggcgagcgacgccgacggcgttgtcagtgatgtcaggctttaccgggacggagcgcttgtcgcggaattgtcctcggctccctatcaggtgcagctgacggggctgggcgaaggaccgcacacgctgcgcgccgttgcccgcgactccaggggggcatcgggtagtgacgagatcacgatcaacgtgagcgcgccgcagtcacccgccagtgctgctcggcgatacgtgtatgacgcccagcagcggctatgcaaggtgatcgagccggaaaccggtgcgaccgtgatggagtatgacggggctggcaatgtgatctggtctgctgcgggcctggcactgccggatgccgggcgctgtgatcgcgaatcggcctggtcttctggacgtcgggtcgatcgcgtctacgacgtgcgaaaccgccttgtggaactgcgctttcctgatggcaggggcaatcagcgctgggagtacacgcctgacgggcttccctcgaaggtgatcaccagcaacgatgggccgaacgccgcggtcgtcaacagctatcgatactcaccaagccggcagctcatatgggaagagtcgaccctcgatggcggcagtccgctttcaataggctatggccgcgatcgaaacggaaatctgtccagcgagacacgaccaggagggctgacactgagctatgagcccgacgctcttggccaggccagacgagtctctgacagtgctggagcgctctatgccgagaacatcgcctggcatcccaacggtgcgctcgctggcatgcgctatggcaatggcatcgtgcatcagggcgtgctcaatgcgcggatgcttccgtcgcaattaaaggacggcactgccagcgagcttctgtatcagtacggcgccaatggtgacgtttcggcaatcatcgatcggcagcagggaactgcgcatgacatccgtatggggtacgacggccagggcaggctgacgcttgcgcaatcggcttccttcgggggcgatggcgtattccgctacacctatgacgtgcaggacaatctactgagcgtgcagctgggcggagtgcgcagccagcagttctggtacgacgcgcggaatcagctgaccaatgttcgcgatgatgctggcgcgacggtgaccggattgacctgggatgttcaaggcaatctctcgctgcgcaacggtcggaagtacgacttcgactttggcaacaggctgcgcgaagtgcaggaagcggagcgctatgcctacgatgcctatggacggcgtgcggtggcgtacgacgcccaggggcaacgcctgcgcgcgatgtattcgttggccgggcagctggtgcatgaagagcgacgaggcaagggcgcctcggagtacatccatgtaggcggtcgactgctggccacccgcagcccgacgggtgttacctggacgcatgtggatgcactgggcagcccggttgcggtcacggacaacacaggaagtgttgtcgagcgacgccgatttgagccgtatggtgctgagttgggcgggcaggtcaaggacgggccagggtacaccgggcatgtgagcgattcggccacagggctgatttacatgcagcagcggtactatgattcgcagctgggtcggtttctttcggtggatccagttgcacctgatccgagcaaagatcaaaactttagccgctataaatatgccaacaataatccgtatcgtttcattgatccggatggtaggcaagaaaggtctgccgaacgatttggtgatgcgttcgctgaggatcctggcgcatttgagcaatttggtcccgcggctgttacggctactcaggttgcactaaacacaacacctattgttggtcctttccttggtgcggcgttcaggcaggtagctaaaggcaatgttgcaccgagaggcagctcgggtggtccgcgtgcgggtaaggactttacgccagctggtaagcgagaggtgattcagaaaaatgagcaggaaaacggtggtcagacgacgtgcgagggctgtttggttgctacgactcccgctcaacagagtcagcgaggggtatctacgccaaaaaacgaaaccaggattgatcacataattccaaaatcaaaaggcggggatggggcgccttcgaatggacaggttttgtgtagttcctgtaatattaataaaagcaatagagttgactgggttcctcccaaagatcggatgccatga

SEQ ID NO: 515646 - DNA, 2193 bp, Stenotrophomonas maltophilia
atgcccctgaccttccgtaaccgcctgccccgccgcgcgctgctgccggctgccctgctttcgtcgttgaccctgctggccgcgcccagcgcgttcgccgccaccgatggcgctgccgacgccaagaccctggaccgggtgagcgtgcgtgccgagcagtccgctccgccctccagctccacccgcctgccgatcaccctgcaggaaaccccgcagtcggccactgcgatcagcctgcagcgcctgcaggacgagtcgctgttcagcatcaacgatgtgatgcgcaacgtcaccggcgtcagcgtgtccttctatgacacccagcgcccgctgtactacgcgcgcggctttgccatcaccgacttccaggttgatggcatccccacctacagcggctccaccaaccaggaatacgacactgccttctacgaccgtatcgaagtgatccgcggcgccaacggcctgctcagcggcgccggcgtgccctcggccacggtcaacctgctgcgcaagcgcccgggcaaggagttcgacgcgtcgttcgcggtcagcgccggcagctgggactaccgtcgcatggaggcggatgtgaccgcgccgctgaccgccgacggccgcttccgcagccgcgtggtcgccgcctacaccgatcgtggcctgtattacgaccgttacgacgagaacaagatggccggcatggcagtgctggaaggcgacatcaccgacagcaccacaatcaccctaggttaccagagccaggacaacaaccccaccggttcaacctggggcaccgtgccgttcttcgacagccagggcaatttcgcgcacctgccgcgctcgaccaacctgtcgccgaagtggagctattggaagcgcgagagcaataccgccttcgccaacctggaacagcgtttcggcgacaactggctgttgaagatcaacaccgcctacacccgcggcaacgtgcagaacgtgcgcctatatggcaccggcaacccggacccggtgaccggctcgggcatctacctgcgcgcggccgccggtgattcgaaggacacccgccgcaatgtcgatgcctacctgaccggcagcttcccgctgttcggccgcgaccacgacctcaccgtcggcgcgcagtggtcggacctggaaggcaccaccaacaccctggcgctgaacttcccgaacgactgggcgcgctgcggcggcgagcgctgctactacattcccaacgtgtacaactggaacggcgacatctccgaggtgacctaccgccgcaccggcgcgcgccgcgtggccaagaccacgcagagtggcgtctatctggccacccgcctgcgcctggccgatccgctgtcgctgattgccggcgcacgcctgagccgctgggaaaccctcagccgctcgtacaacgccgcaggcgcctacaccggcaccagcggtgcgtacaaagtgagcgatgaagtcaccccctacgtgggcctggtctacgacatcaccccgaacgtgtcggcctatgccagctacaccgagatcttcaacccgcagaacttcaaggaccgcaacgagaacctgctggcaccagtacagggctcgaacctggaagcgggcatcaagacccagtggctggacggccgcctaaccgccaatgctgccgtgttcgaggccaagcaggacaactacgccgtgcgtgacatgggcgtgccggaaggttcgctgagcgatggcacttccgcctacatcggcgtcaacggcaccaaggcgcgcggctgggagatggacgtcaacggcgagatcctgccgggctggacggtcaatgccggctacacccacgtcaaggtcacccgtgccgccaccgacctgctgtacgccaacccgccgaaggatctgctgcagctcaacacccagctgcagctgcgcggtgcgctggaacgcctgagcgttggcggtggcgtgcagtggcagagcaaggtgcagggctacaacatcgcctacccgctgggcggcacggtgacggtgaaccagccggcgtattcgctggtgcagttcaacgccaactaccgcatcagcgacagctggaccgcaacgctgagtgtgcgcaacgcactggacaagacctactgggccaacctggactacaacaacttcggcgagccgcgcttcgtgtcggccagcctacgctggaagttctga

SEQ ID NO: 515647 - DNA, 600 bp, Stenotrophomonas maltophilia
atggaggagcgtgtgaagtggcctactcggcctgcagcatgtcggagttcagggcgtatcgctgatcgccagttctgtgtgagggctgtcagcagttattcagcagcaatgttctcgctagcattctcatccgcaagtgcagaagagaactgccctcccggtatgtatccgattggagggcagggagtacagggctgcgcgccaattccaggagccagttctgggggcagcgctacgattcctactcctccgcccagaccattgggtgaatgggttaagacctggggcgcactcgctggctcatccagcggttcggaggggggcgcatctgtaggtgaacccagtgagcgtgctgcgaaggggaccgcgatttcgaattgcgagaagaacggtggacgttgcaggatcgagttcacctaccagaatcaatgtgtggctgctgtcacctcggaactggcatccaccggtacacagtacgccagttcggggaccgtggagagcgccggggagcaggccatgcgtgactgtcaggcagcaggcggggcgcattgcaggatgatctactcggcatgttccgcgccggtcttccgcaagtattga

SEQ ID NO: 515648 - DNA, 951 bp, Stenotrophomonas maltophilia
atgactgcatgcgatgccgccccctaccccgcattgagcgcccgctacgcggactttttcccgggccagcctgccgctgcgccgcacagcgagtgcttcggctggggcagcggcatgctgcgggtggatcgccacgggccacccgacgcgggcgtgaccgtcgttctggtgcatggcgccgggggctacggccgcatgttcgcgccactggcggcgggactggccgctgccgggcatgaagtgctggcgcctgacctgcccggctacggcttgagcccggcagcgtgggagcacgtcgactacggcgcctggaagcgggcgctgctgattctgatcgacgccgagcagcagcgacgggcacgcccgatcgtactgctcggcgcgagcatcggcggctacctcgcctatctggtggctgccgaatcaccgtgggtgagggggctcgtggtcaccactctggccgatccgcgtgaccgggcagtgcaggctgctctggtccgccaaccgtggatgcgcctcttcctgccgatgctgaggcccatgagccgcgtaacccgcaacgtgcgcgtgccggttcgctggttcacccacatgcagcggatgtcgcgcgatccggcattgactgcgctggtctgcgccgacccgctgggtggcggcaaccgcgtccccctcggtctgctggcgtcgctgttcgacaccgccccggcgctggagccggagcggttccagcgctgccctgtgttgatggtgcatcccgcctgcgacgactggaccccggtgtccatcagcgatcgcttcttccaacgactggccgcgccgaagcaacgggtgctgctggacggctgcggccacttccccatcgaacagcccggcctggaccaactgcgcgatgcattgctgccgttcgtccagtgcatcgccaccggagttacgcccaagccattgacttaa

SEQ ID NO: 515649 - DNA, 1167 bp, Stenotrophomonas maltophilia
atgaaaatcgccgtggttggcacgggttacgttggactctccaacgctgtgctgttggcacagaatcatgaagttgtggcggtcgacatcgatgccgatcgtgtggcgctgatcaatgcccgacgcagccccatcgaggaccgtgagattgaaagctacctcgccacgggtacgctcaatctcactgcaacggcagatgctcgacaagcctacgaggataccgagttcgtaatcattgcaactccaaccgattacgacaccgaaaccaattacttcgataccagttcagttgaatcggtgatcgcagacgtcatggccgctaattccaatgcggtcatggttgttaagtcaacgattcccgtcggctgcattgatgcgctgcgactgaagaccggcagcgacaagattattttctcgccagagttcctgcgggaagggaaggcactgcatgacaacctgtatcccagccgtatcatcgtcggcgagcgttcggagcgcgccagtgtcttcgccgaactcctgaaagaaggcgccatccgcaaggatatgccgattctgttcacggatccgaccgaagcggaagcaatcaagctttttgccaacacattcctcgcaatgcgcgtcgcgtatttcaacgaacttgatacctacgcagcaagccacaacttggatacacggcagatcatcgagggtgtcagcctggaccccaggattggcaatcactacaacaatccctcgttcggctatggcggatactgccttcccaaggatacgaagcagctcctcgcaaactacagcaacgttccgcagaacctcatccacgcgatcgtggaggcgaaccggacgcgcaaggacttcatcgcagacgaagtgataaagcggaagcccaatgtagtcggcatctataggctgatcatgaaggcgggatcggataacttccgcgcctctgcgatacagggagtaatgaagaggatcaaggcgaggggcattcgggtcattctccacgaacccacaatcaagggcggcgattttttcaattcggcggtggtcaacgaccttgccgtattcaagagcgagtctgacatcattattgcaaaccgcgttgaccagcaactggaagatgttctggacaaggtttacacgcgcgatattttcaataatgactga

SEQ ID NO: 515650 - DNA, 1104 bp, Stenotrophomonas maltophilia
atggccagttctgagaaactgaaaaaaataacctatgtcgcgaacctgtttccctccaggaagaatccgtcattcgggacattcgtcaagaactccagcgacgatctggccaagcgaggctgggagaccgaaaccatcgtgctgccggaatttggcagtggactcaaaggctacgccctgttctatgccagcgccttcacgaagctgctgaaacagcgacacccggtgtacgtacactacgtaagtcattccgctccacctgtgatccttgcaaagctgttcaactggaagctcccgatcatccttcattaccacggtagcgacgggttcccagagtcgtccgaaggcctggcacgtagagccctcaagcgtctggtctgcaactctgccaatcttctggcctctgttgtcattgcgccaagcaacggatttctcgcacgcctccgttccagctattcacttgagggcaagcactccttcgtcagcccttcgggcggagtagacacagatgtcttccacgacacggcctccgaaccgcgctcgctggacttggcctttgcaggtcgaatgattgcgggaaagggcggaatggaagcggcacacatctcactgcaggtgctgcgtacccgtgccgactccactgcattgttcgtcggcgcaggaccggagcgagagcagatgcagctactacttgccgaatacattgcttcgggccgcgttaggtttctccctgccctgccacaagcggaactggcacaggtttacagaacggcaagggtcttcctctttccctccacaagaaagggtgaatcacttggcttgacctgggtcgaggccgccatgtgtggagcgctaccgctggtacttcgcaatggcattacagagaatctgcttccgccagaaatgagccagcagctatcggcacagggtgtggacatgctggccgaacgtacactgtatttccttgaggatggcgcagcccgtgatgatgccgtcgcaaccattcaatcgacactggccatggactacagctccgacgaagtgagttcaaagctggacgcgttcctgacagatgccttccaaacaaccggagcaatgaattga

SEQ ID NO: 515651 - DNA, 390 bp, Stenotrophomonas maltophilia
atgagaccgctgtttgacaggtatgacacgacctatgtctcgacccgtgccgaactacaaaccatggtcgacggacagaagttccgggtcgtgaacgacgccgccgcggaatcaaagctgaaactgctgattacgttcgcaagagcgctctggatcgtgcttcgcgtccgtccccatgtgatcgtctcgaccggcgctgcgcctggattcgctctgctgttctggggccacatactgggcgcaaagaccgtttgggtggacagcatcgcaaatgccgaagagatgtcgcggagcggccggctcgcaaagcgctttgccacactgtggctttctcaatgggaggatgtcgccagccgcgcgggcgcccagtacatggggcgggtcatatga

SEQ ID NO: 515652 - DNA, 483 bp, Stenotrophomonas maltophilia
atgattctggtgacagtggggacgcagtttggctttgatcgactcatccagtggatggatctgtgggcagtcgcacatcccgatgtagacgtgttcgcccagatcggcgagggcgatttccagcctgcccatatgcgctggaccagggagatctcgccaatggaatttccatcggtgatatcgacggcgtccgtgatcgtctcgcatgcaggcatgggaacgatcatttccgccaatctctcatccaagacaatcatcatcgttccccggcgcgcgggccttggcgagcacaggaacgagcaccagctcgccactgcgcgccgtttcagtgacctgccaggatgccgcgtggccgagacccaggaacagcttgacgcccacctggccaatctggattcatccgtctcagcctcgatgggtgccgcagcaggggacctcagccagaggattttcgaattcctcgagcgggagccctccgcttga

SEQ ID NO: 515653 - DNA, 1251 bp, Stenotrophomonas maltophilia
atgcgcggcgtaggcgccgttttcacattcctggtcagccttcttgttggcagattgctggatatcgacgatgcgggtcgcgtcctctgggccatagcggcgacatcgctcctcgctgttttcgccagagccggcctcgacaaggcattcatgaagctgggcgcggtcgagtcacgtagtacggatgcacgaagcgcagccggcttggtaattgccgcgtatggactgcgcatcgtcgtcggtgctgtcgcgctcgccattctgcttgtggcatacggtgcctggctcgattcgaccatgcactgggatgcaaatcttctgtgccttgcaatcctgtccatcgccattgcaggtatcgcgctcgccaacgctgctggcactgctgcgataggcagcggtgccgcagtccacggaaccgcgaccatctccgtactgccatcagccatcgccttggccgcgttggcaatcctgctttttcctctggcgtacgcaccttccgcgctcatcttctccatcgcctacacgggcggctggctgcttgcggctgcattcgccatcctgaccctgaggcccccagcttcgggcccgaaaagcgccaaggtgagaattgcggaaggtgaaacccgaccgtttgcggtcattggcatgtccaatacgctcgaacaatggcttccaaccttcatcgcgggcatttttctctcctcagcggatgccgcaggctttgctctgagtgcgcgcctggtcgcgataatccagcttctgatggtatccgccacatcggtttatgcacgcacatatgccacaaccagcatcaaggatctgcggggcgttgcagcaagtgcctcgcggagcatttcccttatcggcctgccggcaatcattttgcttttcatatttgcaccccaagcactgtcaatattcgggcccgaatactcgcaatccagcaccctcttgcggatactgctgctcggccaagccgcaaacatggcaatgggtaccttctcggttgcacttatcatgcacaatcaggtatcacgtgttgccggaatattcgccgccagctctgcaatccagctggcagtggcgctgacagccgcctacattggatccgccaccctgctcgccgcatcatcggtggcagctgtattgatccataccactgcctgcgcattcacggttgcgcggataacccgaagcacgggtttgaaccagaccggcactagtggatctgaacgcggtaccgaaaagtga

SEQ ID NO: 515654 - DNA, 1344 bp, Stenotrophomonas maltophilia
atgcaccgggtcgacagaacaatgattaacagccgaatcaccgcagattcgcccggccgatcagcctggcagacgaccaattcagttccggcgatcgtggcgcagttgatactgctgcttacgccgttcctgatcgttgtggacaccatgaacggcgccctcatgcgaggaattggcatttccgggctgtcccaggcattcaaggtcgcgtacctgctgctgctgttcatatacagcgcacggaccagatctggattgctgacgatctgcgcctgtttgctgagcaacatcattttcgttgccatccatatcatcccgaatggcaccttggaggcgctcacctcggatgtccagtggctgctcaggttcaacatcgtctggctgggataccacgttttcaagcaactcctggaccgtggccgaatcggtctatcgtggatctacaagtgcatcgccttcgtgtcagccgtactcttcatcaacctgatgcttggcactctcggttttggctactcgcagtatggcaagtacagtgattccgagcagatcggcgccgtcggcttcatctatgccggcaatgagatgtcattccttctactgctgtgtcaggttgtcctgtgcggaattacctatcacagccagaaccgatcaagcatggtgaagtaccttctgatctgtgcggttttttttgtggcgtccgttctcaaagcaaccaaggccgccatgctggggtctctgatcatttcctttgcattccccgcaatcgagttcgccagaggacttcttaccttcaagatgtcgtccctgaaggcgcttgcgataggcgtattctctgcaatcattgccattgcagctgcgccattcgctatttccctgatcgaacgcaccgggctgctggcgcgtatggagtacttcttcgacgaatttggtcttttgttcgtcatcttcagcggaagagaccagtttgcccgggatttcctcgataacgtgtgggccgactacaccattgtagaatcgctgttcggacccggccggcacgagatgcttgttcggttggggcaccccgttgagatcgatgttctggacatcctcggcggatttggaatcacaggcctcgtgatctactacctgccctatcttgcgctcttctttaaatccaccactgcactattgaggaagagtccagccctttccactggcctggttttttccaccatactactggcggtcagtgtcactgcaggacacgtcatctatagcggacttgcggcaccttacatggcactgtgcatggggtttttcgcctggtggcgcaccccagacttcaacgcagcggcgcggtga

SEQ ID NO: 515655 - DNA, 855 bp, Stenotrophomonas maltophilia
atgaattgctggaacgagaaccccgtaattgttcgcgcggccatcctcctgctcattgcgacggctccgctcagtgcaggctgcgtgcgggccaggcaggcgtctgtagatgggattccggagcttcaacgtgaggcccctttcagctactcgataaagacgacgccttcacttcgagcagccggctcaggcaacgcctcagacgcgggaagcggcacgacttacgatttcgactggagaatggctgactgggacggtacgcgcgccacaaagggcactgaactcagaacaaagccgatgccttggctcaaggagcagtggctatccttcaaattctttgcagacgagaagtattttgcaggtgattcacggttctcaatcatcctgcagtaccacagcatgcctgacatcgacctcggagaagagtggcgaaaccccgtttccagtttcgtcattcgcggccggaacatccagtatgactaccggtcaagcagtgagcgggtcacccccaaagacgcgtctggattcatctacaccaacaaggggactgttcaactcggcgctgtcagattcggccaatggaacgagttagtcgtccatcagacgtttgattactacaacgggcacatcaagatatggatgaacggtaaagcctttgaacagaccggcggcatagggttcaacgacaggcgcgggttgttcgtaaagttcgggctctactgcccagagcgctctgatcttgctgagaagcgcatctcgttccgcgacgtacgaatgatacccgcgaagccaaatgaccctattccaggtaccgaggaagctgccttcaggcagctcggggtcacgagaggctag

SEQ ID NO: 515656 - DNA, 696 bp, Stenotrophomonas maltophilia
atgccacggcagaagatcatcaacctgccggaccagcgtttcatcggtccctacagcatcgagtactggcgcatccacgaaggtcaggtcttccaccaggggcggctgctgcgcaagcccgacgcggccagtttcgagctcatgccggcgcaccacttcatcggccgcgatgcacacgcggtctaccacgcctggatccggcagacctccatcgaccgagacagctttcgtcaatctggcgcgcactggctggacaaccacgccgtctacttcgagcacaagacctcgctgaaggcgttggccggggcagattgcacgacgttccgcgaactaggcggcggctacgggggcgacgaccatggtggctggtactgcgggcggcggatgaggcactgcctgcgtggggatctgctgcaggtggtggcggaggacccgctgtttgcccctgatgacagcaatgtctactgcgatggcaagccgctgcccggggtggattccgcgtgctggtggctgctgggcggacacttctcgggcgatggccgccgggtctactacccggagcggaagctgccgagggtggatgtggcgtcgtggcggaggctggaggggagctggtcgcgggatgcgactcaggtgttccgcatgcatctggttgagagggatgctggggtgcgggcgttgtatggggttgagtga

SEQ ID NO: 515657 - DNA, 267 bp, Stenotrophomonas maltophilia
atgcataacgagagcccgctgccgatcggtagagtcgactgtcagttgactcgcgaagtgcagccgacaggtagagtcgactgtcagtcgactcgccaggtgcagccgaccaacagtcggctctaccaaagccaaagccagaccgaagcccaacgccacggcatcgaacagcaacggcagcgcgccaggcgcacggcgatgtgggtcggcgccatcgccgtgctggtctacgtcggcttcatcctcagcggggtgatcggccgatga

SEQ ID NO: 515658 - DNA, 477 bp, Stenotrophomonas maltophilia
atgccaggggatggccgctatgctggcagcgcaccggaatggaaaccacgtatgccgcgtttgaacaccgccctggcactgaacctcgctctgatgctgctgggcgctacacctgccatggtcctggcggcagacccgcaggtttccactgaagtgtttgtagaggccggtgacaaccccaccttcatgctgcagcgggcgcccgccgttgtgtattcaacggccctcgccacgccgcccgataccttcctgcaggcccccatggtggtgctgttgattgctcaactggatgagctgggccacgtttccaacgtgatggtggcgcggtccagcggatcgcgggagcttgatcgtgcggcgcttgccgcagtggaccaatggcgctttgatccggtcgtggttgagggcatcgcgcagcatgcgcgggtgcgggtccgtctgaccttcgtgcccacggccgaggcgccgcccgactga

SEQ ID NO: 515659 - DNA, 1929 bp, Stenotrophomonas maltophilia
atgcaaaatagaaggactctctgttcaatagcaatactcggactcgcgttcaatgtactttcccaaccagctttcggaagtgtgccaatcacccaggccccagaagttgtcgcacccgtttcgcacccttcgaccccagatgcagcgtccgatttaaagaagcttgagattgaagtggcgttagcaagcctgaggaccgaggcaaaatttgagattgaggcgaaagaacgcgcgttgacttctcttcagacatcaagccttgaaaagctcattgatcgccaagatcgaacaattgatcgggcgattagtactttcggggtaatcctctcgattgccacgctggcggctgctttgcttggctttgttggattcgtaactgtaaagtcccgcgcaacggaagaagccagaactgtcgcgcgctcagaagctaaagggaccacagatcagtggttcagggagcatgctggagaagtttcagccacccttgctcgcctgtccaaagaactcgatgaaataaaagacaaagcggagagaatattttcagcaagagcggcggagatcgagacatttgctcagcaggcacgcactgcgattcagaatcagctcgctagcgacactcctccaattccaatctcaaatgtggagtccttggctcttgctgaatcggcacacgccgcacaagcaaagcccgcatcggcgcgtcgattccaagactggaacactagtgcatttgaggcaattaggaacaatgacgtcatcgcagccgtcgccgcatggatcgaggcatcgaaggccggcgatgcaagtgaagcaagtcgcgctggagcccttttcaacgctgcactggcgcatcacaagtatcagaatgacgaagcgtccttggagatcgcgaacaagctcatagaggatttcggtagcacgaacgatcccgccacccgagtgcaggtcgcaagagcccgagtgaccaaggcatcctcactcaggagattgggcagggaggacgaatcaattaaagagaatctagacgttgctgatggattcgacgcgaattctcatccagacatgctcgaacgcctagtaaacgcgcgcacaaatgcaattattgcacttgcggcaaggcgcgacttggaaaacacaatcacgcaaatatcaaaacttcacgaatcaacaaaagcatgcgatctgcctttcgcccgcagggcaacagccaagacacagtgctgtctgtcatccgccctacttggggaggaaaaatggaatgaatgcatcgaatcctgcaagcaggttgaaatgcatttcaaaaatgatgccgacgacgaggtcaagaattgggttaccgccgccgccgcaataaaatcggtcggattatacgccactggtgacgctgcgggagcgatcgataatctcaattctgcatttagcagatttagggagaaccgcagcgaagatgccgctcacccaatagtcattgcatgcgcagaacttgcgcgcctcatgaccaatgaggaaaactaccccgccgcgctcacgctttacagcgagatactatccattacagatggctcgtcaaatgaagccgtaaaaaacatgagaccggcagttctcacgaacaattctcacgcgctgattcgggctgcgaaggaaaaatggaacgaccttgaagttcgcagagcctatattgatgaagcaatcaagcacctcgaagagtcactaaggtcagcaccgaacagtggggtggcgcaggccaatcttgcgtatgccaggtatctcgtgaccgaagactgcgagaccgctgcaccgcttctcagaacagcattcgcaatagagggcccagaactagtcaccagcatgaaggaggacgccttgtataaaaggacccccgctgacagcgcattccttgacctgattgatatgatctcccaaagctaa

SEQ ID NO: 515660 - DNA, 297 bp, Stenotrophomonas maltophilia
atgctgaaaatagaaatttgttccctgaggttctactcacgactggacgaggatgcgttcttctccaggttgaaccagattccgggcgtggtgtctgtcgaagggttcctcaggacgatcaacgtctctgttgatccgtcggctgtggatgacgaaggtatgagagagttgatttcgctgttccagcgctatggaatggacatgcgccagctgcggaaactggagacgggagaattcagctcatggatgcggaacagatccgcctactggttcaagtcgatgtatccggacccgtga

SEQ ID NO: 515661 - DNA, 732 bp, Stenotrophomonas maltophilia
atgcaggcggcattcggagggggtccattggggttggcatgcggccatcgcctgcaccggcgtcagcgcgctcggcagtgcatcgtagtgctggtcgatcagcgccacctgctcctttgccggcagcagccagtcgccttcacgctggacatcggtggcaccctgcaatgcgcgggcgaaggtggatttgccgctgccattgtcgccggtcaccagcaggcagtcgcccacctccaggcgtacctgcagctgctgcacgaccaggggcgcgtggtagccgcatgcgccgtcggtgacctgcaccaccacgccctcccggcgccagcccgcgggaagctggaagcgcggcgcgatgacctcgtcgcgctgcagctgccggcggcgctcggcgatgtcttcctgcacgtctcggatctgctggcgtttctgtcccgccgtggtgttaccgcgctccagcttggtggccgagcgcaccgtgccccatttgcgctgctccaccttcaccgcgccacgcttgcgcgaggaggcggcgcgttcctgttcgcgcatgagagcgtcgtgggcctgcgactgcgcgcggtcgaggtcgcgcacggtacgatccagcgcgtcgcgtcggcgctgcagttccagctggtggtcgtggtagcggccctggaagacctcgatacgctggttgtggatatgccacagcgtgccgcacagcgcctcgatcagggcggtgtcgtgtga

SEQ ID NO: 515662 - DNA, 477 bp, Stenotrophomonas maltophilia
atgcggaatcggatgctgatgatcttgttgatgggtggcctcgctggctgttctcccagcaaggaggagcttgaaaaagagaagactgaggcagtcagagccgcagttgaggcgggtgttcgcaaggcgttgaaggatcccgattcggcaaggatcacgattcgccaagtgttttcactctatgacggtacgatcgcttgcggaacggttaacgcgaagaacagcttcggcggctatacgggcgacatgacattcgacatcggcgtcaatgctgatggaagccccaccgcgccgaccatcgcgaatgatgaaatgagcaatgccgtgttcgtagccatgtgcgatttccaggaggagtatgctgcacgccctggaaatgctgggaaaccctcaacgccagaccagaggaagcagctcatcactgcgtatgaaaagcgggtgcgagaggtggttcaagaagtggcctccaaaaggtag

SEQ ID NO: 515663 - DNA, 2967 bp, Stenotrophomonas maltophilia
atgccacgtcgttccatcctgtccgccgccgagcgggaaagcctgctggcgttgccggactccaaggacgacctgatccgacattacacattcaacgataccgacctctcgatcatccgacagcggcgcgggccagccaatcggctgggcttcgcggtgcagctctgttacctgcgctttcccggcgtcatcctgggcgtcgatgaactaccgttcccgcccttgttgaagctggtcgccgaccagctcaaggtcggcgtcgaaagctggaacgagtacggccagcgggagcagacccggcgcgagcacctgagcgagctgcaaaccgtgttcggtttccggcccttcaccatgagccattaccggcaggccgtccagatgctgaccgagctggcgatgcaaaccgacaaaggcatcgtgctggccagcgccttgatcgggcacctgcggcggcagtcggtcattctgcccgccctcaacgccgtcgagcgggcgagtgccgaggcgatcacccgtgctaaccggcgcatctacgacgccttggccgaaccactggcggacgcgcatcgccgccgcctcgacgatctgctcaagcgccgggacaacggcaagacgacctggttggcttggttgcgccagtcaccggccaagccaaattcgcggcatatgctggaacacatcgaacgcctcaaggcatggcaggcactcgatctgcctaccggcatcgagcggctggttcaccagaaccgcctgctcaagattgcccgcgagggcggccagatgacacccgccgacctggccaaattcgagccgcaacggcgctacgccactctcgtggcgctggccaccgagggcatggccaccgtcaccgacgaaatcatcgacctgcacgaccgcatcctgggtaagctgtttaacgctgccaagaataagcatcagcagcagttccaggcgtcaggcaaggccatcaacgccaaggtacgtctgtacgggcgcatcggtcaggcgctgatcgacgccaagcaatcaggccgcgatgcgtttgccgccatcgaggccgtcatgtcctgggattcctttgccgagagcgtcaccgaggcgcagaagctcgcgcaacccgatgacttcgatttcctgcatcgcatcggcgagagctacgccaccctgcgccgctatgcaccggaattccttgccgtgctcaagctgcgggccgcgcccgccgccaaaaacgtgcttgatgccattgaggtgctgcgcggcatgaacaccgacaacgcccgcaagctgccagccgatgcaccgaccggcttcatcaaaccgcgctggcagaaactggtgatgaccgacgccggcatcgaccggcgctactacgaactgtgcgcgctgtccgagttgaagaactccctgcgctcgggcgacatctgggtgcagggttcacgccagttcaaggacttcgaggactacctggtaccgcccgagaagttcaccagcctcaagcagtccagcgaattgccgctggccgtggccaccgactgcgaacaatatctgcatgagcggctgacgctgctggaagcacaacttgccaccgtcaaccgcatggcggcagccaacgacctgccggatgccatcatcaccgagtcgggcttgaagatcacgccgctggatgcggcggtgcccgacaccgcgcaggcgctgatagaccagacagccatggtcctgccgcacgtcaagatcaccgaactgctgctcgaagtcgatgagtggacgggcttcacccggcacttcacgcacttgaaatcgggcgatctggccaaggacaagaacctgttgttgaccacgatcctggccgacgcgatcaacctgggcctgaccaagatggccgagtcctgccccggcacgacctacgcgaagctcgcttggctgcaagcctggcatacccgcgacgaaacgtactcgacagcgttggctgaactggtcaacgctcagtttcggcatccctttgccgggcactggggcgatggcaccacatcatcatcggacggacagaatttccgaaccgctagcaaggcaaagagcacggggcacatcaacccaaaatatggcagcagcccaggacggactttctacacccacatctccgaccaatacgcgccattccacaccaaggtggtcaatgtcggcctgcgcgactcaacctacgtgctcgacggcctgctgtaccacgaatccgacctgcggatcgaggagcactacaccgacacggcgggcttcaccgatcacgtcttcgccctgatgcacctcttgggcttccgcttcgcgccgcgcatccgcgacctgggcgacaccaagctctacatcccgaagggcgatgccgcctatgacgcgctcaagccgatgatcggcggcacgctcaacatcaagcacgtccgcgcccattgggacgaaatcctgcggctggccacctcgatcaagcagggcacggtgacggcctcgctgatgctcaggaaactcggcagctacccgcgccagaacggcttggccgtcgcgctgcgcgagttgggccgcatcgagcgcacgctgttcatcctcgactggctgcaaagcgtcgagctacgccgccgcgtgcatgccgggctgaacaagggcgaggcgcgcaatgcgctggcccgtgccgtgttcttcaaccgccttggtgaaatccgtgaccgcagtttcgagcagcagcgctaccgggccagcggcctcaacctggtgacggcggccatcgtgctgtggaacacggtctacctggagcgtgcggcgcatgcgttgcgcggcaatggtcatgccgtcgatgactcgctattgcagtacctgtcgccactcggctgggagcacatcaacctgaccggtgattacctatggcgcagcagcgccaagatcggcgcggggaagttcaggccgctacggcctctgcaaccggcttag

SEQ ID NO: 515664 - DNA, 561 bp, Stenotrophomonas maltophilia; identical to SEQ ID NO: 15275

SEQ ID NO: 515665 - DNA, 987 bp, Stenotrophomonas maltophilia
atgacgagttcgcagcccgccggatggacggcggccgagttggcgcaggcggcggcgcgcggacagcttgacctgcattaccagccgctggtcgatctgcgcgatcaccggatcgctggcgcggaagcgttgatgcgctggcggcatccgaggcttggcctgttgccgcccggccagttcctgccgctggccgagtcgttcggcctgatgccggaaataggcgcgtgggtgctgggcgaggcctgtcgccagatgcacaagtggcaaggaccggcatggcaaccgttccgtcttgccgtcaatgtgtccgccagccaggttgggccaacgttcgacgacgaggtaaagcgggtgctggccgatatggccctgcccgccgagcttctggagatcgaactgaccgaatcggtcgcattcggcaatccagccctgttcgccagtttcgacgccttgcgcgccatcggcgtgcgcttcgccgccgacgacttcggcaccggctattcctgcctgcaacatctgaaatgctgccccatcaccacattgaaaatcgaccaatcctttgtcgccaggctcccggatgatgcccgtgaccaaactatcgtgcgggcggtgatccagctcgcgcacgggctgggcatggaggtggtagccgagggtgtggaaacacccgactgccttgcgtggttgcggcaggcgggttgcgacacggtgcagggtttcctgttcgccaggccgatgccggcggcggccttcgtcggcttcgtcaaccaatggaggaacaccaccatgaacgccaatgaaccgagcaccagttgctgcgtgtgctgcaaggaaatcccgctcgatgccgccttcacgccggaaggggccgagtacgtggagcatttctgcgggctggagtgctatcagcgcttccaggcgcgggccagcactgcgaccgaaaccagcgtcaaaccggacgcttgtgattcgccgccgtcaggttga

SEQ ID NO: 515666 - DNA, 237 bp, Stenotrophomonas maltophilia; identical to SEQ ID NO: 10330

SEQ ID NO: 515667 - DNA, 363 bp, Stenotrophomonas maltophilia; identical to SEQ ID NO: 39670

SEQ ID NO: 515668 - DNA, 276 bp, Stenotrophomonas maltophilia; identical to SEQ ID NO: 10326

SEQ ID NO: 515669 - DNA, 1833 bp, Stenotrophomonas maltophilia
atgcagctcagcaaacacccgatccgctccctgatggcggccgcgatcgcgctggccgcgctgccggccatggcaggcgaatccccgttcacccgcaccgtgttcttcggcgacagcctgaccgacagcggctactaccgcccgctgctgccggccgaagtgcgtccggtcaccggccagtccaccaccaatccgggctgggagtggtcgcagttcgtcgccgactactacggcaccaacgccagccccaacggcaacggccagaccggtgacaactacgccgtcggtggcgcccgcgtgggtgtcgacctgacccagccggcgttcggcaacgtgccggtgccgtcgctgaagacgcagtttgccaactacctggccgccaacggtggcaaggccgatccgaacgcgctgtacaccgtgtggggcggcgccaacgacctgttctcgatcaccgccccggcccaggcgccggccgtgatcggcgcagcggtcaccacccagatcggcatcgtggccagcctcaagcaggccggcgcgcagtacgtgatggtgcccaacctgcccgacgtcggcatcaccccggggttcatcgaccgcggcgccgccggccaggcgcagggcaccgccctgtccaccgcgtacaacaacgccctgtacggtggcctgaagcaggccggcatcgagttcatcccgctcgatacctacaccctgctgcacgaaatcatcgccaacccgggcatgtacggtttcagcaatgtcaccggccgcgcctgcctggtggcctcgtcgctgacctgcagcccgctggcctacgtcaccccggatgcggccaacagctatctgttcgccgatgacgtgcacccgacctcggccgcacaccagatgctgggccagtacgccatctcgatcctggaaggcccgcgcctgcagcaggtgctgagccactcggcacagaccatcggccgttcgcgcgccgaccaggtcagcctgcaccgcagtggtcgcccggccgacggtctgtcctggtggggcggcgtgcgcggtgatctgcagcgctacgaccacgccgacctgtacgacggcatggcgccggccggcctgttcggcgttgattgggcccgcgacggcatggtcttcggtggcttcgccggcttcggccgcctcaatgccgacttcggcaacagccgtggcgatttcacccagaaggacaccaccgccggtctgttcgccggttggtacggcgaccgtatctgggtcaacggccaggtcagctacacctggctgtcgtatgacgtgaaccgcaaggtccagctgggcccggcgacgcgcgagcacagcggttcgcccgacggcagcaacctgaccgcagcactgaacgccggctacgagttcggcaccgaaggcggcttccgccacggcccgatcgcttcggtgatctggcagaaggtgaagatcgacggctacaccgaaggtgccagtgccggcacgatggccaccgctctgggctacggcaagcaggatgccgattccaccgtcggccgcattggctggcaggcgcgcttcgatggcggcaccatgaagccgtacgtgcagctgacctacgaccacgagttcgaggacaccaagcaggccagcgcctgggtgcagagcctgccggccgtgggcatgtaccgtgtgccgggcatggacttcgacaagaactacgccaccgccatcctcggtgcccgcatggagctgttcggcctgcagagcaacgtgggcctgagcgccacggccgggcagaagcgtgcgcaggacgcgacgctgtttgccagcttcagcggcagcttctaa

SEQ ID NO: 515670 - DNA, 4833 bp, Stenotrophomonas maltophilia
atgaacaagatctatcgacgactctggtccgccgcccgccaatgctgggtggttgcaagcgaactggcggcagcgcgtggcacgcgcaggcacacatcgcgtggtcccggactggcgctgatgctggccatgctgccggcatcggtcatggcagccactgcgggccatctcgaaacaggcgctgatgagtggacggaagatgccctgtacgctggctttggcccgttcaacacaagcgccatgcttgtgcacgaggatgccgtgaccgctcccagcgggcgagcgttctcccgcgcgaacgcgcttccgctggcctacagcgatttcgtccagctcggttcgtacgccggtgcccgtgacagggcggtcgcggtcggtgtatgggcattctccaacagctacggcgcggcactcggttaccaggccaatgccaacgggcaatacgcgaccgcgctggggcacaaggcggttgcctgggagctcggtagcgtcgcggtgggcaatgatgcgaagtcatatgcgcataacgcggtcgtgctggggagtggcgcgctcgcagccgggcgcaactccgtcgtgctgggggcggattccaacgactacggcgacaatcaggtgtcggtcggtaacggcggcatgcggcgcaaaatcgtatacgttgccgacggtgcagtcgacgcaaacagcagcgaggttgtgaccggcaggcagctgcacgctacgcagcaggcgctgtccagcgtgagccagagtcagaagttgctggcgacggggactgcggcgaccaatgccaacgctgcccaggcagtgggtagccgtgcgctagcgatgggcgttggctcaacagctgatggcgacgataccatcgcgttgggcgggggcgcacgcacagcgtccggcccgggtatctcccgcatcgccatcggtgcaggcgcctccgcgggcaccagcggctggacgggtgccgtcgccttgggcgggggcgccagttccacgcatgacggcgttgccatcggctatcaggccaagacaagcagcagcggtacgaccgcgcttggtcgcggggcaacggtcacgcacggaaattcggttgcactgggcgccaactcggtgacctccagcgccaatacggtgtcggtgggtaacagcagcaacaagcgcaggatccaataccttgccgatggcgtgattgcggcgggcagtaccgacgcgatcaccggcaaccagttgcatacgaccaatgcatcggtggcgaccgcggcggcaacggcgactgaggcaaaggccggtgttgatgcagtcaaccggcgactcaatgcagaagcgctggcgttgggtggcggtgctcttgcagagtccaatgcttatggcatcagcactgcagtggggcgcaacgccaagagctacaacggcaagagcgtcgcgctgggtgatgacgcaaggtctggcgtggacaaggacgggaaccgtgttgccaacgccaatgcgggtgtgtcggtgggggcaatgtcacgcagcggcaacggtgctgttgcggtaggccttgaatcccaagcagagggcgaccgcggcattgccattggcaatggggcaaagggcaatgcggtgcatgccaccgctgtcgggtaccagagcaacgccagtgctggtcagtccactgcactggggcgtggtacccaagcaagcgctcccttctcgactgcgatgggcaatctggccagatcgtcggccgaaagtgccgtggccattggtgatcgctccctggctcagcacaatggttcggtggcgttgggcaatggttcgcagaccagcgctgccaatcagatttccgttggcaacagcgccatcaagcgcaagctggtcaatctggctgacggtgcgctcagtacgtccagcaccgaggccgtgaccggcaagcagctcaacgctaccaatgccaatgtgacgactgcacagaatgcggccaatgccgcgcagacggccgcaaccggcgccaggaccgccgcggacaacgcgctgggcagggccacggcgttgagtggtctggtcagccaggtatcggccacgggcaatgtgcgcctgggcgcagacaacactggcaccgtggtggatgtggccaacaaggacggcgcgaagcggcgcgtcaacaacgttgccaacggcgtgctgagcggcaccagtaccgatgtcgtgaccggacagcagcttcatgccaccaaccagtctgtttccacgcagggccagtcactggtgctgcacggccagcagctggcaacgcatacccaggctctcgcggcacaggaccagcgcgtcgcggccaaccgcgccgccatcgatcagcttcgtacggacgtggacaacttcgatccggatctggatggagtggtgaagttcagtgccgatcgcctgcttgtggacatggaaggtgcgcgcgtatcgggagtggcggcgggggatgtcagctctgcggccagtaccgatgcggtgaatggtgggcagttgtttgcggccaacgagaagatctcggcacttgaaggcgccggaaagttcgttgctgtaggcggcggtggaccggccgatagcgcggctgcgggattgatcgcggtcgcggtcggggattcggcgagagccgaggctgaaggagcggtggcggttggtagtttcgcgatggcagcgggaaagaactcagtttccttgggtagggcttcaagtgtcgcgggaaaggctgaggatggcttcgcgctaggagttagggcatccgttgagtcggagaagggcgttgcaataggtgccggaagctctgtttccgaagctgcttctaacagtgtcgccgtgggcgccggctccattgcaactgaggcgatgacggtctcagttggacaaggtgctttgaagcgtcgggttgtgaatgtcgctcggggtgtgaatgaaggtgatgcatcgacgattggtcaggtcagtgacgcactggcaatgcttgggggaggcgccggctttggctcaggaggcgatgtcattgctcctgtctacaatgtacagggtggtacgcagaacagcgtgggtgacgccttggctgtgctcgatggcgcggtgctcaggtccgatagccgagtagatggcgtcgaaggccagctgcgcgcgacattccaacagtcgccgtcaaccagcgcagatggaatcggccaactgaacctggctggcgcgcatggcatggttctgtcgaatcttgccgatgggcatattgccgcgggtagccgtgatgcggtgactgggagtcagctgcatgccactgagcagaagattgagcgtaatagacgcgacttggatgcaatgcagcgcgactggagctcggatcagaatagtctgctgagtgaggccagagatggaaacctcatcgacttcggcggcgcacgcctcactggtgttgccgatgcgcacctctccgctgatagttcggatgtggtgcgcgggagccagctgtatgcaacaaacctgagactgaactctatcgaagacagaagcggcaacattgcatttggctggatgcccgaggagggacagtatccagctgaagcgggcccggctgggctggctgttggcaagaatgcaaaagcgtcactgcgttcagaaggcggcgtcgctgtaggtgcttgggcaacggcgggagggaagaactcggtagccttgggacgcgcggcgtacgtagatgagggggcggtgcagggcttctcactcggagtcagttcccacgtttacggatcgaatggtgttgccttgggagccggcgcagaggtcagaaccggcgcgctcatgtcagtcgccgttggcgcctactccattgccactgaggcgaataccgcttcattcggttcatccggccatcagcgtcgcctgaccaacatcgccaacggcatcgcgagccacaatgcagccaccattggtcagctcagcagtgccctcgctaccctcggcggcaacatagacgccaatggcaacgtcaccactcccggcttcaacgtccagggccagcaccagaacaccatcaacgaagccctcgccacgctcgactcggccgtagtcaccaccggctcccgcgtcgatcgcgtggaaacccagctccgctcggtgttccaggaatctccgtccatccgcagcgacggcaccgcccagctcaccctggcgggcgccaacggcatggtcatctccaacgtcgccaacggcttgatcgccgccggcagccgcgaggcggtcaacggtggccagttgcatgccgtgcagcagcagctcaacggtcgcatcgatggcctggagcagcgcgtggacggccagccgcaggcgcgtgcaatggccacggcgtcggcggcaccgaccgaagagatcatgccaagccgggaagccagcggttcgccgcaggtcgcttcggcgggcgagggcgcttcgcctgcaccgcagccaaagtcgaagaaggacgattcgcccgcgcccacgccgcaggttgataccgccgagctggaaaaaatgctggcccgcgccaacgagtacaccgatggggcgatcagcaatttcgaacgccgcctggacaagatggacaagcgcttcaaccgcatggcggcaatgagcagcgcgcagacggccatggccatgaacaccgccggcctggccacctacaaccgccttggcgcgggcgtgggctacgccgagggcgagtcggccatggcggtgggttaccagcgcgtgctcaacgacaagggctcagccaccttcagcctcaatggtgccttcaccaacagcggtgaacgcagcatgggcgtgggtgtgggcatcggctggtaa

SEQ ID NO: 515671 - DNA, 888 bp, Stenotrophomonas maltophilia
atgaagcgaattgcgggtctacgccgggcgcatggcatcgaacgggtgattgagcatcttcaggcctgcctgcgtgagcggcaggccttgccggacgtgacgaccctggcagccgttgcacatcaatcgccgttccacttccagcgtctgtaccgggcaatgaccggtgagagcccggggcagacgctggaccggttgcgcctgctcaccgccttgcaggcgctgcagcacccaggcgccagtgtcaccgatgccgcgttggcaggaggctatgagagcgcacaggcattggcgcgccgttgccggcaacgtctggatgccaccccgagcgggctgcgcgacgatcagcagctgcgcgagcactgggagcaggttctggcgcagcccccggccgacgtgggcgaacagacggccgcaccattgagagtacaggtgaaggcactgcaacccttcgaagtggtgctgctgcgtgcgcagggggccttcgccgacctcgactccagcttcggtgaactgttcgcatgggcgcagggacagggactgacggacgcattgctgcacttggtgggtattgcggtggatgatcatcgcgacgtgcccgcgcgggagcaccgcttcgactgtggcatgggtttcgcgactctgcttcctgccttgccatcgcgcttccggcggcagacgttgggcgacggccattacgcagtggtgcaccatgtcggaccctacgaagagctgcaggcgttgggcgatgcgctgctgcgcgactggtggcctggcagcggacgcacgctgggcgaggcgcctctgtacttccacttccttgatgatcccgaacgggtacccgccgagcgcctgcgcgccgaggtctgccttccactggcggactga

SEQ ID NO: 515672 - DNA, 963 bp, Stenotrophomonas maltophilia
atgcctttacttgtgtcccgatccgccctgctcgctttgtcgctcctggcatcgcctgcgttcgcgcaggcgccgccgcctggactgcctgcccccattgccgagaaggcaggaccggacaccgcaccacgatctgccctgcacgcccaggtgctgctggatcgcgcgaatttctcgcccggccagatcgacggcgaagtgggcagcaaccagcggcgcgcagtgtcgggtttccaggcggcgcgtgggctgacggtaacaggtgaactggatgacgccacgtggaaggccctgcaggccgagacggtcgggccgctggtcggttacacgctgaccgccgaggatgtcgccggtccgttcgaggcaattcccaaagggcccgctgcccaggccaagctgaaatcgctgggctacggcaatgttgaagaagcactgggcgagcgcttccatacttcccctgagctgctgaaggtgctcaatccgggtattgatctggccaaggcgggcagccacatccaggtgcccaacatcgcacccgcggcattgccgaaggcgacgaagatcgtggtcgataaatccgactccaccctgcagctgctggatgcgcagggcaagttgatcgcgcaggtgccggtgtcgtccggcagccagcacgacccgttgccgatcggcgaatggaagatcctgggtgtttaccgcgacccgccgttccactacaacccgaagctgttctgggatgcccgaaaaggtgaaaagaaggcgacactggcgccgggcccgaacaatccggtcggccgggtctggatcgacctgtccaagccacactacggcctgcatggcacgcccgagcccggccatgtcggcaagaccgagtcgcatggctgcgtgcgcatgaccaactgggatgcgctgcgtgtggccgatgcggtggatacctcggtacccgtggtgatgcaggagtga

SEQ ID NO: 515673 - DNA, 657 bp, Stenotrophomonas maltophilia
atgcgtctttcgcagctgatcgtagtgggcgttctgctggggctgagtgcaggctggtggctgcaccgcgatgcaggtgagccggtggcggttgcccagcccgcagtgcaacctgcggtggctgcggctgcaacgccgcgcgtggacggcccggctcccacggccgcgccgccgtccaacgccaccgatgcgccagccggtctgctgctgccggtgcagggcatccaggcgtcccagctgcgtgacacgttcaccgatgcacgcagcgagggccgcgtgcacgatgccatcgacatcatggccaccgccggcacgccggtgctggcggtggccgatggcaccgtggaaaaactgttcaacagcgagcgtggcgggctgacgatctaccagttcgagcccagtggccgctggtgctactactacgcgcatctgcagcgctacgccgatggcttggcggagaagcaggtgatcaagcgcggagacgtcctcggctatgttggcagcaccggcaacgccagtgccgaggctccgcatctgcactttgaagtgcacgtgctggggccggagaagcagtggtggaagggagagtcgatcaacccgtatccgctgttgaaacaggcggcttcgactcccgacgctgccagcgtcgcagagtga

SEQ ID NO: 515674 - DNA, 234 bp, Stenotrophomonas maltophilia
atggagaaagccagttccaacccgctacgtgtcgtacggagagaagaggtccagcggcggctgggaatctctcgctcgacgatctacgcgtatatcaaccggcgctcgcccagctacaggccctactttccgaagcctgtgcatcaggggagaaccatgggattcatcgagcaggaagtggatgactacgtcctgcgtcttatggacgcaagaaaactcgaaactcagccctaa

SEQ ID NO: 515675 - DNA, 402 bp, Stenotrophomonas maltophilia
atggagcagctttccgccgagctggggttggtggtggaccaattatggccgaactacgagaaggcagcggccgaggctggcctgccgctagagcagctcgggaccgagttggtactgggcggctggtcgccgaagaacgggcgaatgatggccacggcgtatgccaagagcgacagtcagcgcccgacccgtgtccagccgatcggcgggcagctggcatcgcccggcgaaccgctccaggcggtgatgccgagcatgtcccagaccgatttaatggcccatgcgcgcctccagtccagctacctcaatgagcagatgggccggcaggtggcgggtggtcggctgctggctgggttcctgcaaaacgggcaggccgtggtcaaggatctaggggcgatctga

SEQ ID NO: 515676 - DNA, 804 bp, Stenotrophomonas maltophilia
atgagccgcgtgccgccgattgccgcatggccggccgcaccgctgtcgggcaaagtggtgttggtcaccggcggcgccaacggcatcggtcgcggtattgcccaggccgtgctcggtgccggtggccgcgtgctgatcggcgatctggatacggaagccggccacgcctgcctggccgaatggcagcgcgatgacgatgcggcgttccagcccctggacatcaccgacgaagccagcgtgcgcgcgttcatcgccacggcggtgcagcggtttggcggcatcgatggcctggtcaacaatgccggcatcgccggtgcgcacggtacgccgctgcaggacatggcgtgggatgagtggcagcgccacctgtcctcgctgcatggcgccttcctttgcagcaagcacgcgctgcccgtgctttcggccagtgccgccggcgcgatcatcaacatcgcttcgacccgtgcttggcaatcggaggcgcacagcgaggcctatgcggcggccaaaggcgggctggtggccttcacccatgcgctggcgatcagcagcggcccggcggtgcgggtgaacagcatcagccccggctggatcggtaccacggcctggcaggcaccatcgcgccgccacgagcccgattactcggccaccgaccacgcccagcatccggtcggccgggtcggccgccctgaagatatcggtgcactggcggtatatctgctgtcatcgctgtccggtttcaccaccggccaggacttcatcgtggacggcggcatgacccggaagatgatctacgccgaatga

SEQ ID NO: 515677 - DNA, 597 bp, Stenotrophomonas maltophilia
atggcggccccgccagccgacgtgcccgccatgactgattcccacctgcccaccgatgacccgatcgccgccacccgcctgtggctggagcgcatcgtcatcggcctgaacctgtgcccgttcgccaaggcggtgtacgtgaaggaccaggtccgcatcgtgctcagcgatgcgaccacgccggaagcgctggttgaacaactggccgaggagctggtgctgctgcgcgacacgccggccgagcagatcgacactacgctgatcgtgcatccgcaggtgctgaccgacttcctcgactacaacgacttcctcgacaacgccgacgcggccatcgaagcgctggacctgcagggcatcctgcaggtagccagcttccacccggactaccagttcgacggcgtggccgcagacgacgccagcaactacaccaaccgcgcgcccttccccaccctgcacctgctgcgcgaggacagcgtggcgcgcgcggtggatgtctatccggacccggacgtgatcgtcgagcgcaacatccagaccctggaccgcatcggtgtggacggctggcatcgtcgcctgcgtggggacgacctgtcatga

SEQ ID NO: 515678 - DNA, 1194 bp, Stenotrophomonas maltophilia
atgatcaacaggtactatgttgtttgtgacacgtgcgccacaccgcacacccttcgaattcaagtcgggcatgatgactaccaggagcattcatttgcctgcaccgattgcggcgaacagatggtagtgggaatgcattgcgatcaggtaaatgcgacccttcggattgttgagaaagaaaactgtagccgaggtgatgccgaagggatggttataaatctaagtcctgactttccaatatcttctgcagaccttcatcaagatcttgctttcccctcagggccgcatgttcttcggctccttgctgcgcaggctgcgttaggtgcgcgcccaattccggcgggagattttctgaaggtcgcatcagatgcgttgaatcatcgccctagtgtcctttggcctatcctggacaaggcgtggtctttgcatcgccgtggaagggcggacctcgcacaggccaaggtggatgaatatttcggagaagacgatagttcaaggtctatttatgaggccatttttgatttttgtatccgtatgctatctcctgcgcgaacgccgctcttcaaggacgcagccaaattctcctcggaagcgctccgagctcatcgcgatgagttttcgtcacttctgacttacttggctggtggtgtccatcgcgataatttagagcgtgcccatgagacattaaaggaatatttctcgtcttacactgatttctctcagttgctgacccacgctaggcacggggttgatgtctctgatgactacgaggcatcatcggttgcgttctccaagacgaagctgttctatgggaatgcatatgagaatttaacaaccaacatcgcaactttggcgcttctgaacaatattcatgcgggccgaaagtttgatgagtttatggccatgtcgttaagtaagtacctgcagtccaacaaggcgagtcgtgccaatccgttttctgctgtagaggctctcgcagaaatatgcgcgcccctcaatagtacgatacgaaatgcttcgcaccacggggcgatgcgaattattaataacggtagagcaattcaataccgaagtgggtcgagtggcgagcagaagactatgcgctatctggaatatattaatgcatgtaatgagataatgtttagtacctgtgctctgctggcgcttgagttgctgataatgaaacaggcctga

SEQ ID NO: 515679 - DNA, 864 bp, Stenotrophomonas maltophilia
atggatgtcgacgtaaatctggtggatgccaaaggcatgacgtattcctttgtggaaaaggtgtcgtacctgaaattcctgaagcatgcgtccttcgctggcctaggtccagatttcgcatggattcctaccatctttcactcggtaggcctagcttttcactttggatctaagttttccctgaagtctgatcatatcgaacgaacttggccaattatagatccagatgatcttcgggagatgtctcgcataaccggtcgagccatcggcgacatgtttgccaagtcgcattttggcgctcgctacacgctatgctatgagcacgccctgcttgtcaacgctattgtgcagtccggaaaatctcccgacttctactgcatagatcgcttaaacaccaaagctttcactgtggaagcgaaagggttcagtaagcgcaccatcggtccagcgcaatttgcgcagcataaggcacagtcagcagcgagccagcttcccattcattacagcgtggcatcagtcacgcataacatttacagcaagataatggcgcgcgtagaagatcctgagcacgaggccagcccgcttgatcctagcttcgctcgcggcttggtcgaaagctacctagatacagttcacgcccggctttctaatttttgcgaagtgtcgaacgagtttaaaattagaggatcatggtatttatcgtatgacgctactccttacttggtgaccgcgccgaatcgtggaagtggagttgagtacttgattcctcgtgaagtggcggcaggctctgcattagaacgtcaaatagaggaggaacattcctattttgatctcgacggcatcggtgtgaagcttggtgcctaa

SEQ ID NO: 515680 - DNA, 849 bp, Stenotrophomonas maltophilia
atggatgtatttcgcgatgtggttctggcacttgctgtttccttaggtctcgggaatgctttgggatggctcattaaatcgtggatgggtcagcgtattcttcatgatattaagcacacttatgatagaaagcttgagttgctaaaaagcggtttaaaagagcaggagaatatctccgcatcaatcgagcgtcggcttgattcgggagaggagtttgtcagatcctccgccgccaagctcacgcttgaacgtagaaagggagctatggcctaccagcttgagtgtcttactgggatatggaatctgatggttggattccgaaacctatcttcccttgcaaacaatttgggtgcgttggacttgtcagctctggacgcaatggacgtcaaaagccgcaggcgattcatggagctgatgtttccaccggataatcagtcgaagtatgaccttgttatcggtgagagatatcgaccttttgtacccgtcgagctctacaaggcttactgtgcgagtgtcgcctgcgcggcgtatataatgacagttgcggtcgccttcaggactacgggaatggatccgcgggaaataaatcgtaagtacgtcagggaagccatagatgaagttctgcctggtcgattcgtgtctcttgacctgcaaacggatctaattctgatcgggaggctgatgaaggagttggaggactttgccgatctttcgattcgtggagagatatcgagtggagaagccggcgacgtcgagtcagtgagaaaggttgcggcggatgcccgcaatgccgtctcaaatctacagctgagggtggctgtcgatcaggttgaatgcaagggatcctga

SEQ ID NO: 515681 - DNA, 1992 bp, Stenotrophomonas maltophilia
atgcacacattaccaatcatgcattttgcggacatccccatggctaagaagggcaaggcagccaacgaagcgctctttgaagaagactatgtgctgcggtcgctggggcggattggctatgacccagacatggcgctcactgagttggtggccaacacgtgggatgcgggggcggccaaggttgccgtgatcatcccggagaaaacgggtggcttgctgtcggtcgaagacgatggccatgggatgacccaggaccagtttcgcaagcgctggatgacattgggatacaaccggcatcgaagccaaggggcgaacgtccagtttccctccgaacgcgacgattgggtgcgcatggccttcggacgcaatggtatcggtcgccatggcttgttgtgcttttctgatcattacacggtcgaaacttggacgaagggcgttctttctacctttgtgatcggcacccgaaatcagccatccccgttctacatccaaagccatgagacaggcacccgttcgggccatggcacccggttgttggtggaggttgaacgccaccgccccgatccagatcggatcaggacggtcctgtcgggacgcttcctgcacgatccgcagttcctcgtttcggtgaacggccagtccgtcccgttgtctgagcatgagggtcttctggagaagcgcaagattcaggtcgaacccggctttggggtcaccgcgtatgtagtggacacaacacgcacggcgaaatccacccgctaccaaggcgttgcgttctgggtgagcaatcggttggtggggctgccgagctggaccgtggggccgatggccgttctggatgggcgggtgcgctttgccaagcgctatgccatcgtgattgagtgcggagcggagtggctttcggagatcgaaccagattggtcgaagttcaaggccactgagcgaaccgatcatcttttcgaagcggccaacggatatgcccaggaaatggtcgagaagttgtcggcgcacctgattgaggaaaattcagaggacgcgctctacaagaatcgagaggatctccggacgctgccgaggcggtctatgcttgaggtagcccagttcacgaagaccgtggtgcatgaccagccaggcataccgccggagaccctaaacaaggtcgtcaaggcggttatcaagattcagaaggcgcgaagcggttcaagtttcctcgacaagctgatgcaactggatgagcacgacatcgacgggctggatcgattgctgggacagtggagtgtggaggatgcgctcacggttctggatgagatcgacagtcgtttatccatcatcgccgccatggagaagctcagcggcgacgcagaagccgatgagctgcacaccctccatccgctcgtgacgcaggcgcgttggctgtttgggccggagttcgatagttcggagtatgcgtcgaacaatacgctgcgcacggttgcctccagtctattcaaagcaagaaagcagaatcagagctttgctaatgcagcgaagcgccccgacatcgtcgtcctctccgatgccaccctctcaatcgttgggacggagagttttgataccgccaaggatcagcttgtgatgatgcgcgatgtcctgctcatcgagctaaagaaagggtgttctgaaatcggtcgcaaagagatgaatcaggcggcagagtatgtcgatgaacttgtctccagcggaggcatacagggaagtcccttcttccataccttcgtggtcggccattcggtcgcatccaatataccgactgtcaataaccgggagtacaacggggtccagcgcggaagggtgacggcgaccacatacaaccagctcgcaatgacggcgaatcgacgcctccatgggctcaaggcaagaataccgtcgcgatacgaggaggtttctggttacgagcttgtccagaaagtcatggggacgccaagccaagcatcgtttgtgccgccagctgagtag

SEQ ID NO: 515682 - DNA, 207 bp, Stenotrophomonas maltophilia
atgctcggcttgatttatcgcaacctgtccgaagagcagccgagcatggctcggctctacagaaagcagaaaacccgcgctgtcgccagcgcgggtttttgcttttgcattggtgggtgccgaccgttggtcggcacgccttacttcaatgccgcctgcacgaacggcggggtcaccagcacgccggtgtgcagcgcggcggtgtag

SEQ ID NO: 515683 - DNA, 681 bp, Stenotrophomonas maltophilia
atgttcggacggcggcgcgcagcgctggaagacgtcgcagggcagccgagcatgggctcggctctacaaggggtggcgaccatcctgcagcgcccgagccgatgttcggacggcggcgcgcagcaccggaagacgtcgcagggcagccgagcatgggctcggctctacaaggggtggcgatcatccagtagcgcccgagccgatgctcgggcggcggtgcgcagcaccggaagacgtcgcagggcagccgagcatgggctcggcgctacaagggttggcgaccatcctgcagcgcccgagccgatgttcggacggcggcgcgcagcgctggaagacgtcgcagggcagccgagcatgggctcggctctacaagggttggcgaccatcctgcagcgcccgagccgatgttcggacggcggcgcgcagcaccggaagacgtcgcagggcagccgagcattggctcggcgctacaagggtcggcgcccatcctgcagcgcccgagccgatgttcggacggcggcgcgcagcgctggcacatgctgcgcttggccctacaacgcggggcgttcggccaccagcaaccagctgttgaacggcgtgcgtccatgcagagggcgcggtgccgtcacctgcaatccggcttcggtcagcgtcgcctgcagcacgttcggatcggggtag

SEQ ID NO: 515684 - DNA, 339 bp, Stenotrophomonas maltophilia
atggacgaagttggcgaccaagaacagaagcgcctggagcaggtccaagaattcgcagtgcgtctttacggcctgcacgcggcagctaacctactcgacataagcaacgtactgactgagcaagcggtggagcgggcggagttcgttgatacggagttgcggaaggtattggctaatcttggggcagcggtgacagagatgcctggcaccatgggggaaccagtggtttgggtggtttaccgtggcaagctggtgccgcgcactggggaactcgtctatcgggatcgttggcacaatcacctgatgaatcctcaccagccaatgtttcccgatggctga

SEQ ID NO: 515685 - DNA, 579 bp, Stenotrophomonas maltophilia
atggagacgctgcacaccgcacatgagctagaagccaggaaggcgatggatgcgctgttgcaggacgacacgtctttgctatctgataccacgcggctgttgccgctttgcatgtacgtgggccaggcgaccatgcggaccaagcacatgcgggacagcgttgccaaggtcagatcggaggcgatacaagagccgaccaacaaggccttggccggagcgtggtggttcctgagtttcgtttacggtgcggcgtttgggcagagcctgtatcggtcacttgactcttcgcgcatttccctgctggctacaacccctgaggcacctttcataatttccgaccagccgatagtcaacatgcaaccggatgtggccgcatcgcttgatatggttatgccactgtctccgcttcgcgctatcgccatatgtgattcggaccgattttacccaggccttcacttcctagagtgcgatgcggttgacgcgattaatcgcctgcagaccgagcgctctacgatgatcttcgcttcgtctgaggagcaactgcgtaggtactccacgcctgcacttagtagccggtag

SEQ ID NO: 515686 - DNA, 741 bp, Stenotrophomonas maltophilia
atgaccccgtttgaactctaccaccatgtaggtcagctgctcgaaggtatgccggcgtacatcgaccttcagccagagggggaggaacaccaggtgtggcaagcgaaagccttggccgcgttggaatgcgacgacgcgatcgcctcgatccgtgatgccgcagatttccgtcgctacgtcgaccaggctcgacgcggattccggagcacctcggctctccggctaagacaagctctcgccaatcttctcgcacggctggaactgcgccttcctgctgagcaacgcggcgcattcatttcagtcggcaacaacttatcagctttctcgactctcgcctcggttattggcgaagcaagaaacgatctcctagtggtagacccatatcttagtcacgaagcgatcacccgattcatagtcgccgcacctcaaggagtgagcattcgcctcctacgagacggcgaaggaaggcaacaggcactgacagccgggctggtagctgcaatggcagcgtggaacgcgcagtacggcgaccgccacatggagatccggtccgctccggcgcgaagcctccatgatcgagcgatcttcattgaccacacctctgcattcaccgtttcccagtcactaaaggacatcgctgcccggtcgccggcaattgttcagcgagttgaaccagctcttgcagtcgagaagatcgctgcgtatggagacatatgggtcaactcgcacccgatcccgtag

SEQ ID NO: 515687 - DNA, 801 bp, Stenotrophomonas maltophilia
atgagcaaaggcaacaagaccctggcggacgtgcagcccggtgggagggtgatgctggggaatcaggccgagcgggcgcggtttgaggaattcctgagccggaatccgctcacagcgctgtgcgctggcactgcatgggaagtgtggaaagccgccctctccgcccagccctccccgggtggtcagggggagctggccgctttggtgtcaaagtggcgtaacgaggcgagcgcatacgacgaccagcaggcaaaggaaactggtttcgaggtcgattggacttacgacgcaaaggcgcgtgccttggatcgggcagcggacgaactggaatccgccctcgccgcccgccagccggtggcgctgatcgctcagaaggtcggcgactaccgcgtcaccgtggccgaggatgccattacggtcagccgtgggcgcgacattgtgttcgcctacagtgctggtgacgcagaaccgatcaacgccagccagccggtggggcagatcgttggctacatggacccgaacgctgatttcatgctggcgcgtccgggtgactgcgtgctgatgggcaacatcgtcctgtggcgcgagccgggcagcaaatacaccaagcctctgtatgacgccccgcccgcgaaggctgtggacctgggccgctggtcgcagcgacatgcagacgatctgcacgtggcagtgcacacggcccttagcgtgcacgcaggatcgttgagccagaagaagcgcgcagcaatcagtgcctacgtgaagcgtctgctgatcgacagccaggcggtgggcaaatga

SEQ ID NO: 515688 - DNA, 201 bp, Stenotrophomonas maltophilia
atgatcgaaaaatggctgcagtacacctgcgacgggtgcggcgagacggagacggcggacgcgcccaatgagtcggcagcggagtgccgtcgccgcatacgggagtacggctggaagaatcatggccgtctggactactgccccgcctgtgtggccgatggcgcggcggcgaggcgtaaggagggattcggcgatggctga

SEQ ID NO: 515689 - DNA, 129 bp, Stenotrophomonas maltophilia
atggctgaccagctgctcaccgctgcaatgacctggtcgattgccggagccgagctcctggccgacttcgccaccctgtgggcgatcagccgcgcatgccgcgtcgagcgcgcaggggccgcgcattga

SEQ ID NO: 515690 - DNA, 981 bp, Stenotrophomonas maltophilia
atgaatggctacatcgtgagcaaggtcaactgcgatgcgagcgactcattcgactcaatctggaggaaggcgctccgcgatatcacttatacgaataagtctgtatcccctggtttcctaccggtgacccagtcaacgatcacatcagtcgcgagcacgttgccggaggttttgacaccagatgaagttcggcggacgctgaccatgctgggcgctcacgccccggttttgattatcctggacgaatttgaccgcttgctgcatggatgtgcggccagcgtgggcatttccgacacaattaaagccttgtcagactttggggtgaatgcctccatcgtcctgatcggtgtcgcggattctgtgaccgaactcgttgcgggacacggatctatcgagcgggcactggtgcagatccctatgccccgcatgtccgcagatgaaatcgctcagattgtcgagaatggtctcgctaggcttgggatgaccatagaccaaggtgccaagagccacttggtccacttggcgcagggcgtgccctacatcgctcatctattggctctgtacagcagtcgaatggcgctgcaagagggcaaacttcacattgcccggacacatgttgatgcaggaatcaaccgatcgttggaccagtggaaccagtcgatcaagaatgcctactatcaagcagtgaagagcgcacaacctggcaacattttcaaggaagtccttcttgcatgcgccctagccgagattgatgaacttgggtattttgcagccgccgccgtgcggggcccactgcgcgagattaccggcagggaactggacattccaaacttctccagccacctcaagcaattcagcgaggaaatacgcggagggattttggagcgcgtaggtgagagtcggcggcttcgataccgtttcgtaagtccattaatgaaaccctacatcataatgcgggcttatgccgagggactaatctag

SEQ ID NO: 515691 - DNA, 951 bp, Stenotrophomonas maltophilia
atgtctaatgagttgataaagcgaagcaacattgtttcgctagcctatcgcaatgtgcttcgaccagtggctgcggcagccgatccggttagctggattttcttcgtcgcgtttctggcgctgcttgctacgtccattgtctgcaaaatattcggggcaggcgatgaaaatagcttctatgaaaaatacttcctggcgttttggtacggcgcatgggggctactgctcgcagctacgatagggccaatcttcaacattgcgaagcagcgcaacgaggttccacttggagttctcgttggtgtcggggtgagtcatctagtgatgttcatcggcattagcgttgtagtgttgttgcagtacgacaagcccgaagctgtgactggattaatggctgcgtttgtcgcagcaatgatggttggtatcggctgggtcgtccagcatcagaccagcgcaagagcgtcgcgccgggcgcatacgttcaacatcttgatgcagtctaggttgaacaaagagttcggcgagaacgtggcgttccgggcgagctactatcatgcaggttttattattccggcagaggatgccccgcttgtaaccaagaagggcctgcgggagcgtttggcggatattgaggagcggcgggctagagaggttaaacagtctagagcgccatttgtcactgaagtcgaggcgcgcttcactgcagagattgagctggttaacaagaagcatcagtccttggttggaacgatgtacctacttaatttttacgagttcatgtgcgcagggatttgccagcgggagctggacaaggatcttttatacgcaacggttgcctcgattgtgtccggactctatgccgacaccgtgcatctgagagcgcactgtagacagagccagccaaccgtcttcaccaagcttgatgaagtgatgcgtagccattggcatgcatga

SEQ ID NO: 515692 - DNA, 333 bp, Stenotrophomonas maltophilia
gtgtattcctggtccagtacccggtacagcgacaccatcaccagcaccatcagcagcgcgaacggcaacgccgcgatcgtgatcatgccctgcagcgcatccagtccaccggccagcagcagtgcaccggcaatcagcgccacgcccactccccaggccagcttgcgcttggacggtgggtcaccggcttcatcggtggacatgctggccagcaccagtaccgccgagtcggccgacgtcacgaagaagatcatcaacagcaccagcgcgatgcacgacagcagcaacggcagcggcatgctgtcgaacatcgtgaacagcaccgtctcgtag

SEQ ID NO: 515693 - DNA, 504 bp, Stenotrophomonas maltophilia
atggcattgctgcacgccaagacggctgctggccgtcaggaaatcgaagaccgtggccggcgcctgccggcggggctgcgctcgatcctgctgatggtcgatggccgtcgcgacgacactgaactgcgcggcctgttggaaggcctgcgcgcgcctgccgatgcgctggagcagctggccgcgcagggactgatcgaagtgatcggtggaagcgcagacgtggcgcccgcacgtggcctcagcaccggtcgcgaacacgacccggcgctgtaccagcagctgtacgacgcaatgagcgaggcggtgcggcgtcatctgggcctcaaggggtatttcatgcagttgaagatcgaacgctgcaccgatgcactggcactggaacgcctgtgcccggaactgctggcggcggtcgccaaggcgcgcagcccggcgctggcccagcgctggtggcaggaaacccggctggccctgctggacaccggcagcgaggtcgtgcaggcctga

SEQ ID NO: 515694 - DNA, 900 bp, Stenotrophomonas maltophilia
atgcggatggatatcgccgacctgcgcctgttccttgcgatcgccgaggccggcagcatcacggccggcgcagcgcaggcgaacctggcactggcttcggccagcgagcgcctgcgcacgatcgaagccgatgccggcaccgcgctgttgaaccggcatccgcgcggcgtcagcctcaccgaagccggtgccgccctcgcccaccatgcacgcctgatcctgcagcagcaggcacagctgcgcggtgaactgcaggcgttcgcgcagggtgcgcgcggcaccctgcatctgtacgccaacaccgctgcgctgaccaactacctgccctcgcggctcgcgccgtggctggccgagcgcccacgcctgcacgtggaactgctggagcgcaccagccccgaggtcgtgcgtgcgatcaacgcgggccaggccgaggccggcatcatcagcgatgcggtcgacgctgccggcctgcagcaacacgtggtcgccgatgatcccctggtgatgctgctgcctgccgaccaccgcttcgcgacccggcgcagcctggcttttgccgaggttgccggagagaccttcgttgccctggccgatggcaatgcactgcagacctacatcgaagaccgggcgctcgacatcgggcgccggctggacgtgcgcatcggcatgaagaccttcgaaggcgtgtgcatcatggtcggccacggcatcggtgtcggtatcgtgccgcggaccatcgcccgacagcatcggcgcagcacgcgcgccgtcggcgtagcgctctccgatgcatgggcacaacgccgcctgtgcgcctgttttgccgagtgggcgcagctgtcaccggcgatgcgcagcctgctgctgcacctgggcgtgcagccgcagaaaaaagcgtga

SEQ ID NO: 515695 - DNA, 747 bp, Stenotrophomonas maltophilia
atgaatgaatcgacgtacttctatctgttgctggtggtggtgttcgtgctggccggcgtggtcaagggcgtgacaggcatggggttgccgacggtggcgatgggcctgctgggcagcaccctgtcaccggtggcggcggcgtcgatgctgttcattccgaccttcgtcaccaatgcatggcagctgttgtccggaccgtcgctgggtcgcatcgtgcgccgactgtggccgatgatgctggcggtggtgggggtgacgctgggttcagcggcgctgctggtgcgggtcgatcgcaccgcatcgcgcattgcactcggcgtggcgctggtggtctatgccgcctatgcgctgcttgcgccggtgttccgcgtgccgcagcgtcgcgagcgctggctggggccgctggtgggggcactgtcgggcgtggtgaccggggccaccggcgtgttcgtgatgccggcagtgccgtacctgcagtcgctcgggctgcagcgcgacgaactggtgcaggcgctggggctggcgttcaccgtgtcgacgatatcgctgaccgccggactggtgctgcacggtgcattcggtatccagcaactgggcctgagtgcactggccgtgctgccggcgttgctgggcatgtggctggggcaactgatccggcagaggatcagcgcacgggtattccgcgcctgcttcctggggttcctgctgctgctcgggctggagctggtgctgcggccgttgttctga

SEQ ID NO: 515696 - DNA, 345 bp, Stenotrophomonas maltophilia
atgcggctgcgcgacgccgacaggttttccgacgaggtctgcaggttggccaccaccgaggtgaagcggttctggatcgcaccgaggtcggcgcgggtgctgttgatcgcacccagggccttgtcgacgatttccatcgcctgctgggcacccttcacggtgctgacgtccaggtcgctggcgtacttggcggccggggcggcggtggacgcggtgaaggtcggcgcggtggcgccggtccaggtacccggggttgcggtgatggccttgaacgaaccatcggcgttgacgctgtccttgaccgaggtcagggtgacgcccgcggtgccgttcacttcggcgtag

SEQ ID NO: 515697 - DNA, 405 bp, Stenotrophomonas maltophilia
atgcgtgaactggatatcggcgaggtggtcaagcgcagcggcgtgccggcctcgaccctgcgctactacgaacagctggggctgttgcaggcgctgggccgccgcggcctgcgccggcagtacgacgcgcaggtgctggaacggctcgcgctgatcggcctgggccaggcggccgggctgtcgttgcagcagatcggtgcatcactgccgtcgccgcagggatgcatctcactcgaccgcgaggcactgctggcacaggccgaggtgctgcagcggcagatcatccggttgcagcgggtgcgccggcacctgcagcgcgcggcggcctgcccgcaggcggaggatgcccgcaagtgcggttcgttccggaaactgttgcgcgcgcagcagcggatgggcggttga

SEQ ID NO: 515698 - DNA, 672 bp, Stenotrophomonas maltophilia
atgggcgagcgcacccgacggtgcgctgtggctgctggaagaccgcaggtagtgccggccgctggccggcaacttggatccttccggcaccctgcggttgccggccagcggccggcactacccttgccagacgaccccgcacgcggggaccttcacctcggtcttcgtgatgggcgagcgcatccgacggtgcgctgtggctgccggaagacggcaggtagtgccggccgctggccggcaccctggatccttccagcaccctgcgcttgccggccagcggccggcactacccttgccagacggccccgcacgcgggggacctttacctcggtcttcgtgatcggcgagcgcacccgacggtgcgctgtggctgctggaagacggcaggtagtgccggccgctggccggcaccctggatccttccagcatcctgcggtggccggccatcggccagcactacccttgccagacgaccccgcacgcggggccgtctgcagtcactggatggtgatgaccctcacctcggtcttcgtgcaggcctggtccaggcactggccactcaaccacacctggccgctgccgatcatcacgccctgctggttgacgaacaccttgccgaagtcctgctcggacaccgccttgaccacctccggcgtgatgatcttctcgtag

SEQ ID NO: 515699 - DNA, 273 bp, Stenotrophomonas maltophilia
atggtgatgcagaccgccacgccgctggacgccgtgcagcgcatccccggcgtgcagccgggcgcgcgtctgctgctgcacgccgaaggcgatgccaacgtgcgcgccgtgctggaacgcatcgacggcatcgaggcgctgggcatcgcagccgcagacacatcgcccgcgtactggcgcacgctcgcgaaccggctcgcagcgcgctcggcgctacccacatacaccgcagaacggcacgccgcctggctggccgggagggcattgccatga

SEQ ID NO: 515700 - DNA, 333 bp, Stenotrophomonas maltophilia; identical to SEQ ID NO: 96873

SEQ ID NO: 515701 - DNA, 1014 bp, Stenotrophomonas maltophilia; identical to SEQ ID NO: 29928

SEQ ID NO: 515702 - DNA, 675 bp, Stenotrophomonas maltophilia
atgagataccccggcggcaagggcggtgccggcgtctaccagacgatcatcaacaacatcccgcctcacgacacgtacatcgaaacgcacctgggcggcggcaacatcctggagcgcaagcggcccgctgcccgcagcgtcggcatcgacgttgatcccgaggtgatcgaggtctggcagcagctcgacgtgcccggcctggagctgcaccacggcgacgccgtggcctggctggagtcccaccagttcaccggctccgagttcgtctacgccgatccgccctacgtgatggacagccggcgcggcggcaagctataccgccacgaatacgacgacgccgaccacgtgcggctgctcgacgtgctggccggcttgccgtgcgcggtgatggtgtcgggctacagctcaacgatctatgacagctctcccttggcgtcatggagaaccatcgactttaacgcgatgacgcgcggcggcatcgctatcgaacggctgtggatgaactaccccgagccggccgagctgcacgatctgcgctacctcggcagcaacttccgcgagcgcgagcgcatcaagcggaagaaagcccgctggcaagcgaagctcgccaagctcgatccgctggagcgggcggcgatcatggaatgcctgcgcgagctggaggcggccgagtag

SEQ ID NO: 515703 - DNA, 432 bp, Stenotrophomonas maltophilia; identical to SEQ ID NO: 200829

SEQ ID NO: 515704 - DNA, 699 bp, Stenotrophomonas maltophilia; identical to SEQ ID NO: 200828

SEQ ID NO: 515705 - DNA, 267 bp, Stenotrophomonas maltophilia
atggacaaattccacgccttcatgatgcggtatacgctgggcgtcggccggttgcttcaagcctattgcaagtgggcggaaggacaggccaagaaccagctcgatttgcttctgctgggcctcggcccgatcttcgccttgggccttctgctgtgggcgctgccggcgtggatcggcaagcccatcgccttcgtgctctcactgccagcgctctacatcatcttcctggtgctgcgcgcctacgcgattcgcgggggccggcgctga

SEQ ID NO: 515706 - DNA, 636 bp, Stenotrophomonas maltophilia; identical to SEQ ID NO: 200826

SEQ ID NO: 515707 - DNA, 588 bp, Stenotrophomonas maltophilia; identical to SEQ ID NO: 200825

SEQ ID NO: 515708 - DNA, 1719 bp, Stenotrophomonas maltophilia; identical to SEQ ID NO: 200824

SEQ ID NO: 515709 - DNA, 228 bp, Stenotrophomonas maltophilia; identical to SEQ ID NO: 110225

SEQ ID NO: 515710 - DNA, 765 bp, Stenotrophomonas maltophilia
atgaagccgaagtttttagccgctaaattggccctcgtcattgctgtttcgagcacgctggcggtcacacctgtgcaggctggcatccccgtcatcgacggcaccaacctgtcgcagaacatcatgacggccatcgaatcggtggcccaaacgctcaagcaaattgagcagtacagcacccagctccagcagtatcagaaccagctccagaacacgatggccccggccgcgtatatctgggatcaggcgcaatcgaccatcaacgggttgatgaacgcggtcaacacgctggattactacaagacccaactcggcagcctggacagctacatcggcaagttccaggacgtgaactactacaagaactcgccgtgctttacggcggtagggtgctccgacgcggaacgcgcagcacttcggaatgtggcccagctcgcgagcgagtcgcagaagaaggccaacgatgccttgttcaagggcctcgataggcagcaaacgaatctcacggccgatgcagcgacgttgcagcgtcttcaatcggcagcgcagggcgcgcagggccaaatgcaggccatcggctacgccaaccagctcgccagccagcaggccaaccagctcttgcagattcgtggcctgctgatcgcgcagcagaacgcgatggcaaccaagatgcaggccgacgccgacaaggaagcccagcaggcggcagcggccgcacaactgcgccagggcagctaccgggccagcccggcgcgcacctggtaa

SEQ ID NO: 515711 - DNA, 1422 bp, Stenotrophomonas maltophilia
atgacagaaaacgccgatcagatggcacctgacgcttcgcctggcgaagtgtccaagaaggcgggcgtccgtcgcgtcaacaacatgcccatgtacatcctcggcggcgtcctgctgtcgttcgtgctggtcatggccctggtcgcggcggatcgcgcggccaagcagaacgcgccggcggacggccccaaggagaaggccggcaacacgtcgatgttcgccaaggagatcgcaggcgacaagaccggcggcttgatcgagccggcaagcccgctcaaggtgcccgacatgccgaccggcccggcgtcggctccgctggagatcgcgcggccgtccaacccggacgcgccgccggccccgccggccaaccccggcaacccgggccagccggtgaacgacgacgaggcccagcgcatccgcatggcgaagatgcagatgttcggcgaagccgtgaaggccaagaccaccgtgcgcgtggatgccccgcgtagcaacggctccgcgccgggtggcccgagcacctacaccggcacgccgcagacgcgcgatgaaatgctgaaccgcatcgcagcggtgcagcagcaaattgacgcgcagcgcagcaacgatccgaccgccgcctatcaagcacgcctggcgcagattcgcggcatgggcgtcggtggtggcggcgcggctccggccgccggcggcatgggcgcgggcggtgcgccgcagctcctgcaaacctcgaccagcggcggcgggcgcaacagcatggcgcagttcggccaaggtgggcagggcgaccgctggaagctggattcgcagccggaagcgccgcgcacaccgttcgagctgcgcgcgggcttcgtcgtgccggccacgctcatttcgggcatcaactccgatctgccgggccaaatcatggcccaggtcgcgcaggacgtgtacgacacaccgaccggcaagcacctgttgatcccgcagggatcgcgcctcgtcggctcgtattcgagcgacgtggcctacggccaagcgcgcgtgctggttgcgtggcaacgcatcgtgttccccgatggcaaggcgatggacattggcgcgatgccaggcgcggacagcgcgggatacgcgggcttccacgaccaggtgaacaaccactatgtgcgcctgttcggctcggccttcctcatgtccggcgtgacagcaggcatcacctacagccaacgccagaaccaggccacaaacacctatggcgcaccgagcgccagcagtgccctaagcgaagccctcggccagcagctcggccaggttacggcgcaactcatcgccaagaacctgagcatttcgccgacgctggaaattcggccggggtatcgcttcaacgtcgtggtcacgaaggacatgacgttttccaagccgtaccgttccttcgattactaa

SEQ ID NO: 515712 - DNA, 489 bp, Stenotrophomonas maltophilia; identical to SEQ ID NO: 200820

SEQ ID NO: 515713 - DNA, 900 bp, Stenotrophomonas maltophilia
atgaagaaaaccctctccgctttgatcgtgggcgctgctgtggcggtgccctccctggctctggccgcccctggcgacgacattgccgacaagtatttcaacaagaccaacccgacgctgaccgctcaagagcgcgcggcgctcgccatcgccaaacggtgggaagcggggtcggcgacgggcatcaagccggtggccggctcgggcggtgccatcaagttcgtgtacggcgcgcagcagccgagcatcgtttgcgcggtgctccaggtgtgcgacgtggccttgcagcccggcgaacaagtgaactcgatcaacctgggcgacacggccaggtggacggtggaaccggccatcaccggcagcggcgcgaccgaggttcagcacctcatcatcaagccgatggacgtgggcctcgaaaccagcctggttgtgaccacgaaccgccgcagctaccacttccgcctgcgctcgcatcgcaccgagtacatgccgcaagtctcgttcacgtaccccgaggaagcgcaagccaagtgggacgcgatccagcgccgcgagaagcaggaacgcaccgacaacaccctgccggcgacgggcgagtacctgggcgatctctcgttcgactatgagctgtccgggtcggcgagctggaagcctgtgcgcgtctacaacgatggccgcaagaccatcatcgaaatgcccggcacgatgcagcagaccgaagcgccgacgctcctggtcgtgcgcaaagagggcggcttgttcaccgacgacgaaacggtgctggtcaattaccgcgtgcagggcaatcgctacatcgtggacacggtgtttgaccgcgcgatcctgattgccggtgttggcagtagccaagaccgcgtgaccatcagccggaggaagtga

SEQ ID NO: 515714 - DNA, 783 bp, Stenotrophomonas maltophilia; identical to SEQ ID NO: 200818

SEQ ID NO: 515715 - DNA, 2559 bp, Stenotrophomonas maltophilia
atgatcgaagcaatcgcaattgccattgctgtgctcggtgcggttctgttgctcatcctctttgcccgcatccgggctgtcgatgccgagctgaagctcaagaagcatcgcgccaaggatgccggcctggccgatctgctcaattacgccgccgcggtcgatgacggcgtgatcgtgggcaagaacggctcctttatggccgcctggctgtacaagggggatgacaacgccagcagcaccgaggaacagcgggaaatggtgtcgttccgcatcaaccaggccctggcgggcctggggaacggctggatggtgcatgtcgatgctgtgcgtcggcctgcgccgaactactcggagcggggcgtgtcatcgttccccgactccgtttccttcgccattgacgaggaacgccggcgcttgttcgagggcctgggcgcgatgttcgagggctactttgtcctgaccgtcacgtggttcccgccagtgctggcccagcgcaagtttgtcgaactcatgttcgatgacgatgcggtggctcccgaccatacggcgcgcactacgggcctgattgcgcagttcaagcgcgagatcaccagcctggaatcgcgcctgtcctcggcggtcaagatgacgcgcctgcgcggccaaaaagtcgtgtcggaagagggcagggaagtcacgcacgatgacttcctgagctggttgcagttctgcgtgacgggcctccatcacccggtcatgctgcccagcaatccgatgtacctcgatgcggtaatcggcgggcaagagctgtggggcggcgtcgtgcccaagatcgggcgcaagttcatccaggtggtcgccatcgaaggcttccccttggagtcaacgcctggggtgctctcggccctggccgagctgcccagcgaataccgctggtcgagccgcttcatcttcatggatcagcacgagtccttgaagcacctggacaagttccgcaagaagtggaagcagaagattcgcggcttcttcgatcaggtgttcaacacgaataccggctcgatcaaccaggacgcggccgcgatggtcggcgacgccgaggcggccatcgccgaggtcaacagcggcttggtggcggccggctactacaccagcgtggtcgtgctgatggacgaggatcgggagcgcctggcggcctccgcgctcctggtcgagaaggccgtcaaccgcctggccttcgcggcccgtatcgagacgatcaacacgctcgatgcgtacctgggcagcttgcccggccacggcgtcgagaacgtgcgccggccgctcatcaacacgatgaacctggccgacctgctgccgacaagctcgatctggacgggcagcgccacggctccgtgcccgatgtacccgccgctgtcgccggcgctcatgcactgcgtgacggtgggcgctacgccgttccgcctgaacctgcacgtgcgcgacctgggccacaccttcatgttcggcccgaccggcgcaggcaaatcgacgcacctgggcatcatcgccgcgcagctccgtcgctacgccggcatgtcgatctacgccttcgacaagggcatgtcgatgtacccactcgcggccggcatccgcgcggccacgaagggcaagagcggcctgcatttcacggtggccgccgacgatgaccgcctggcgttctgcccgctccagttcctcgaaacgaagggggatagggcctgggcgatggagtggatcgacaccatcctggcgttgaacggcgtcaacaccacgccggcgcagcgcaacgagatcggcaacgcgatcatgagcatgcacgccagcggcgcgcgcacgctctccgagttctcggtgacgattcaggacgaggcgatccgcgaggccatcaagcagtacacggtggacggctcgatgggccacctgctcgacgccgaagaggacggcctgtcgctgtccgacttcacggtgttcgagatcgaagagctgatgaacctgggcgagaagttcgcgctgccggtgctgctctacctgttccgccgcatcgagcgcgcactgaaaggccagccctccgtcatcatcctggacgaagcctggttgatgctgggccaccccgcgttccgcgccaagatcagggaatggctcaaggtgctgcgcaaggccaactgccttgtgctgatggcgacgcaaagcctctccgacgcggccaactcgggcatcttggacgtgatcgtggaatcgaccgcgaccaagattttcctgcccaacgtctacgccagggatgaggacacatcggcgctctatcgccgtatgggcctcaacgcgcgtcagatcgaaatcctggcgactgccattccgaagcgtcagtactactacgtctcggagaacggccgccgtctctatgaccttgccctggggccgatggccctggccttcgtcggtgcgtccgacaaggaatcggtcgccaccatcaagagcctcgaagccaagttcggccacgaatgggtgcatgagtggctggccggccgtgggctgaatctcaacgactacctggaggccgcatga

SEQ ID NO: 515716 - DNA, 312 bp, Stenotrophomonas maltophilia
atggctctgcgcgcgatccccatccgtagggccggcaaccgagaaaacctgttcatgggcggggatcgtgagctggtgatgttctcgggcctgctggccggcgcgctgattttcagcgcccaagaagtgagggcaacggtgttcggcatcgccttgtggttcggcgcgctcttcgcgctgcgcctcatggcgaaggccgatccgaagctgcgacacgtgtacctgcggcaccgccggtacaagccgtactacccggctcgcagcacgcccttccgtgacaacacgccgagtcaagggaagcaatacaaatga

SEQ ID NO: 515717 - DNA, 465 bp, Stenotrophomonas maltophilia
atgcaagcaaccttcccggcattccgcctcaaccgcaacgccctgttctacatgggcctcttcgccctcctggcgttcttcctgctggccccccagcacgcattcgcctccgagggcaccggcggctctctgccgtatgagagctggctgaccaacctccgcaactccgtcaccggcccggtggccttcgcgctgtcgatcatcggcatcgtggtcgccggcggcatcctcatcttcggcggcgaactcaacggcttcttccgcacgttgatcttcatcgtcctggtcatggccctgctggtcggcgcgcagaacatgatgagcacgttcttcggccgtggcgcggaaatcgccgccctgaccgatggcgcgctgcaccaggtcaaggtcgccgcgctggacgtggccggcttccccggcgaagccgtcatgcgctgggccgagcgcggccacatcgcggggtaa

SEQ ID NO: 515718 - DNA, 963 bp, Stenotrophomonas maltophilia
atgaccgaccagaaaccagaacacaacagcatcaaggaacgggcgaagaagaagctcgaacgcgacatggggccggagctgctggccgccctcaacgatcccaagaccgttgaaatcatgctcaacgcggacggcaagctctggctcgaacgcctgggcgagccgatgaagtgcatcggcacgctgcgcgtcgcgcaggcgcaagccatcatcgaaaccatcgcgggctaccacggcaaggaagtcacgcgctccaagccgatcctggaaggcgagctgccccttgatggcagtcgcttcgccggccagctcccgccggttgtgcccgcacccaccttcgccattcggaagaaggccgtcgccatcttcacgctcgatcagtacgtcgaacgcggaatcatgaccgcgccgcagcgcgaggcattgattgcagcggtgcgcgcgcaccggaacatccttgtgatcggcggcaccggctcgggcaagaccacgctggtgaacgcgatcatcaacgagatggtgattcaagacccgaccgagcgggttttcatcatcgaggacaccggcgaaatccagtgcgccgccgagaactacgtccagtaccacaccagcatcgacgtgaacatgacggcgctgctgaaaaccaccctccgcatgcgccccgaccgaatcctggtcggcgaggtgcgcggccccgaagcccttgatctgttgatggcctggaacaccgggcacgaaggaggtgctgcaaccctgcacgcaaacaacgccaaagctggattggatcggctcgccatgctcatcagcatgcaccccgattccccgaaacccattgaaccgcttatcggcgaggcggttcacgtggttgttcatatcgcccgcgtcgaaggctcgcggcgcatccaggaaatcttggaggtttccgggttcgccaacggccagtacatcaccaaaaccctctga

SEQ ID NO: 515719 - DNA, 363 bp, Stenotrophomonas maltophilia
ttgtacaactacatcttcttcacgaacgtgctccggctgctcgatgagcggcacatgacgaaaaaggagctatcggacaggtcgggggtttcgatctccttcctgtccgatctcactactggcaaagccaacccctccctaaaggtgatggaggacattgcgcaggcccttgaaactcccctgccgctcctgcttgaatcgaccgacctggacaaagaagcccttgacgccctggccggcggcaaggcaccccgaagcctgccgccaggcttcgagcgcgtggcggccgtgctgccagaacaccaggcgttcatcgtcaagaagtggggcgaagcgacaaggaagaaacttagagggagttga

SEQ ID NO: 515720 - DNA, 342 bp, Stenotrophomonas maltophilia
atgagccacaacctgttccagtttatcggtaatcttacccgcgataccgacgttcgccatagcgaaaacagcgcccgcgccgttttcgacctggctgtcaatcgcgtgtggcgcaacgcagccggtgcgaagcaggagcagacggacttcttccgcatcaagtcgttcggcggcctggccgagaacgcgggcaagtacctgggcaaaggctccaaggtgttcgtccagggccgcatcgagccgacgaagtacgagaaggacggcaagaccgaatacgggttcgatttcatcgccgaggaaatcgaatacctggacaccaaagcgccaggcggcggccagtaa

SEQ ID NO: 515721 - DNA, 1221 bp, Stenotrophomonas maltophilia
atgcagaacgagttcaacgagcaggaatacaggcgcaagctcatcgagggcgggcttagcgaagccgacgccaccgaccttgccgcccgtaccgccgccgctcgcagggactcgggcagcgccggcggggccttccgccccgccggttccctcttcgagctgccggccacggccggcgacaacgaggcggctttgccgccgaagctaccgacgccggcaagtgccgccgtcgagcgatccgagcgcatggcgcaggaatcggccgagcttgcgcgcacgatgggcctgccgcccgaaccgcgcaccgccgtgaacaagatggccgagcagatcggcgcgctggcccaggacaaacggagtagtgcgatggcgaccaagaagcgaacggccggcggtgagctggccgagaaggtcagcgaggccaagcagacggccttgctcaagcacacgaagcagcagatcaaggacatgcagctctcgctgttcgacctggctccctggccggatcacatgcgggcactgcccaacgacttcgggcggtcggcgatcttcaccgtccgcaacaagaaggtgccgcgcgccgcgctgcaaggccagtcgatctaccacgtcaacaaagacgtggagatcacctacaccgggatcgagctgcgcgccgacgacgacgagctggtattcgcccaggtgctggagtacgcgaagcgcaccgcgctcggagagccggtttccttcacgttctacgagctttgccaggacttggactggtcaatcaacggtcggtactacacaagggccgaggaatgcctgacgcggctccaggcgtcggccatgcagttctcatcccaacgcatcggccggctcgaatcggtgtcgctgatccggcgcttccgcgtcctggatcgcggcaagcgcacgtcgcgctgccaggtcgagatcgacgccgaaatcgtggtgctgttcgccggcgaccactacacgaaattcgtgtgggagaagtaccgcaagctgtcgcccaccgcgcggcgcatgttcgactacttcgccacccacaaggagccgtacccgctcaagctggagacgttccggctgatgtgcggctcggattccacccggccgaagaagtggcgcgagcaggtaggcgaagcgtgcgacgagctgcgcgaaaacggcctggtcgaaagtgcgtgggtgaacgacgacctggtgcattgcaagcggtga

SEQ ID NO: 515722 - DNA, 963 bp, Stenotrophomonas maltophilia
atgagccccacagacgctgtcgccaggcacgtgaccctgcgggagctgcggctgcttctcgcggtcgcccgatcgggcagcatcctcaaggccgcgaacgagatcggactcacgcagcccgcgttgtcgcgatccatcgcagatctggagggcgcgttcggggtgcggctattcgatcgcaccaatcgcggcgttgccccgactccgcacggcgaggttctgctgcgtcgtgcaacgggagtctttgaggagcttcgtcaggccgtcaatgaactgcgtgccttggccgacgcagcccatggcgagctgcgcatcggcggcacaccggccatgtgtgcggggctgctgcctcgcatcatcggcaccgtccggagcgaccgccccagattgcagtttcatgtcgcagagctcgagtcaggtaagttggcgagtgaagttgtcggcaggtcgctcgatctgggtctcggtcgcgagcatgctgtcagggagagccacgacctggtcttcgagggactgttcgaagatcggctgttcgtcgtcgcgggatcgcagcatcccttggctgagcgacgatcgatttccctggaggaaaccctgcgtcatcactgggtgctgcccacggaaggggcggtcacagcgcatcttcagggcgaatttggtcgacaaggactggccatcccggaggcagcgatcaccacgatgtccatgcttgtccgatgcgagctgatcgcgacgggatctttcctcaccgtcatgtacggttcagttctccgattcgggaacgcgccgaagtctttgcgtgtcctgccggttgatctgccgtccggcataccagtgggagttattcgcttgaagaatcgaacccttgcgccaagcgccgagatgttcatccaggcgagccgccggatggtccggtccatgccttcactgagcgcaagtcagctgcggcgggctcggccgtga

SEQ ID NO: 515723 - DNA, 423 bp, Stenotrophomonas maltophilia
atgaaccgacgcaccaagctcctcgctgccctgtccggcgcagctctcgctgtgtccgcagcctacgcgcaggatccgaaagacgtcccgcaaaagaccggggtcacacccaacgacctcgtggtgcgcggagtggacggcgcggagaacctcgagttcatcgtcatcgacgtgaagtacgagccgggcggtatcaaccgtcgccattaccatccggcggcggtaaccttctatgtactttccgggacaccggtgttccaggaagagggcaaggaacccgttaccctgaaacccggtgacagcctgctcgttccggctggcaccacacattcccattggaacccgagccggactcaaggtgttcgatggctggaatttatcgttgctgaaagaggcaagggaaaatccatccgaaagccttaa

SEQ ID NO: 515724 - DNA, 315 bp, Stenotrophomonas maltophilia
atgagctacgcggtcgtcttctcgcccgaggccgaagagcagcttgccgagctgtaccgctacatcgcggcggcggcgtcgcctgacgttgccgctcgctacaccgaggcaatcgtcacctactgcgaaagcctgcgcacgtttccactgcgcggcaccatgcgcgacgatgtgcggcccggcctgcgcatcacgaactaccgcaagcgcgccgtgatcgccttcgatgtggccggcgatctggtttccatcatcggcgtgttctacggcgggcaggactacgagacgatcctgcacgacgacgcggacgactga

SEQ ID NO: 515725 - DNA, 270 bp, Stenotrophomonas maltophilia
atgcgaaccacccagcaactgagcatcaccctgccgaacgacatggccgacgtggtgaaaacgaaggtcaagaccggggagtacgcgagcgaaagcgaggtcatccgcgacggcctgcgtgcgctactcgcgcgtgatcgcgccgtcgagtcctggcttcacaaccaggtcggcccggcgtatgacgccctgaaagccgatccctcccgagccgtcaccgccgaccaggtgcgcgcccgcctggccgccgagcatgcgaaggcgcaatga

SEQ ID NO: 515726 - DNA, 429 bp, Stenotrophomonas maltophilia
atgaacacccaagaccaacccgtcaccgcttccctggtcgccgaggcccagcgcctcgacttcttgcctacctacttcggcccgcgcctgatgatgcgcggcgaggcccttgtgtacgcctggctgcgccggctctgcgaacgctacaacggcgcgtattggcactactacaccctgtcggacggcggtttctacctggcccccgacctggccgagcgcctggagatcgaggtagacggcaacggcttccggggcgaactgtcggccgacgccgccggcattgtcgcaaccctgttcgcgctcggccagctcgcggccgagatcgccggcacggacgcggccgacgccctgatcgaccgctatcacttcctgcgcggcttcgcggccggccaccccgaggccgctgcgatctaccgggctattgactga

SEQ ID NO: 515727 - DNA, 1206 bp, Stenotrophomonas maltophilia
atggcgaagcgaacaaagcaaccggcccagacgggccaggactggagcgcgccggcggccgagctgctggccgagctgccggcagaccgtgacggcctgctggctgcggccgttgcggccgtggtggagatcgacgcggctgtcatgcgcggcgacggggcggcggccgagctggccggcgaccgatacgaggcgatcatctggaagctgaacggcggcacgaacttcgggtgcatggccgacgacgaggccgccggccgcgtcatcgagcggcattgcgctgcggtgccgggggacgtgcccttgtggggccagcgcggccagttcctggccgtggcgggcgacgtgcgcgccctggtggagtacgaggccggttatggcgggccgctcaacgcgcattttcagttccacgcggttgacctggacaggccgtttatctcggcgacgggctatcgctcgcacttcgacacggcgcggggctgcatgaccgtggacgaggttgcgcgcggcatcctgacggccatgctggccgagaagaagcggccggtgttgatcgaggccaactaccgcgaccgcttggccgacgctcccctgcccgattggctggccggcctggtgccgccggcgcggcgcgagccggcgaccgtgacgatcccgccgggcttcgtcttggtcgatgtggtgctgccggcgcacaaggcgttcatcgcgcggcgctgggcggccgaggcggcgggcaaggtcaaggcggccagggccgccaggtcgaacgccaagggaaaggccgggggccgcgagcgagatcccgcatcggcggaaacggcgatgcgctgcagcaccgccaaagctgacgattgcaaggccgaggctgggcctgtatcgccagaagcgacgatgccgggcgcaggcgaagcatcctgcagcaccgccaggaatggcgatgcaggcccggccgacctggtggagttcacgcccgcaccaggccaacggtgcgagatcgtgagcgtccaccatccggtgttcgccaaggagatcggcaagcgcgtcatcatcgtgaaggtgcatccagacacccgccaggtgtgggcgcatgacgaccggccggtgacatacaagaccaaccgcgcgggccgccgtgtggtggattcagacccgagctgcattcagtcgatctacggattcgaccaactgcggcttatcacgtga

SEQ ID NO: 515728 - DNA, 258 bp, Stenotrophomonas maltophilia
atgacgaacgacgccaatatccggctggagtgcttgaagccggccgagcggtgggcgcagccgagcggcgaagaggtgcgcgaggtgctgcgcctggcgggcctcaccggcggcaaagccgcgaaggtgctgggcctcggcccgaagggcgaccggacgatccggcgatgggtgggcgaggacacgccgatcccttatgccgcgtgggcgctgctgtgcgactacgccggcctcgggctgatctggaaagaggtttga

SEQ ID NO: 515729 - DNA, 237 bp, Stenotrophomonas maltophilia
atgagcaagaacaagatcatgccttgggttgacgccctgccgaatgtggaagccaccgacttccaagcccgccgcgaccagatcgaggccacgatggccgaggcggccgagctggtgaagcaggcggaagagctgcgcggcaaagcctatttcgccgccttgagcctggaggccagtgccaagggcgaatggtcgagccaagcggtcgagcaggccaagcgcagcgtcggctggtaa

SEQ ID NO: 515730 - DNA, 216 bp, Stenotrophomonas maltophilia
atgagcaaaggcaagatcgagatcatcgagacgtgctgccggcgctgcggcaagagcatccgaaccttgagccacaccatcatcggcgccgatgatgcccgcgagaagttcggcagcatctgcggcggctgcatcacgccggaggaagataacgagctgacggaaatgctgctggcggcggccgtgcgacgcatgagcggagcgacgctgcaatga

SEQ ID NO: 515731 - DNA, 330 bp, Stenotrophomonas maltophilia
atgtccaacatcgtcaagttccccagggcgagcaagccgccggctcccgagccggtgcagcctgccgcgcccgctgctgcgcctgccgcacccaaggccgaaggccggggcctggtggccggcctggtcaagttcgtatgggtggcgaccgtgctggtctggccggtgctcaagtgggtgctggcgatcatcaccttcttccagttcgtgcggatgctctaccactggaacacgcctggcgtgtatgccggctggtcgttcctggcgtacttcgcggcactgaccgcgatcacctacttcgtttcgatctacaaaccgaaagggctttga

SEQ ID NO: 515732 - DNA, 531 bp, Stenotrophomonas maltophilia
atggcaaagcagaccctcccctacccgcctggcttcgtggagccgaccactggccgcgtggccgtcatggtgcgcgagtacgcggacagcgacttgaacggcgacgcgccggcctactggtacagcgcgcaatccgaagaatggggccttgacccctggcgtctcgtggagggcgtcgatccgcacgtgggcggcggttccttcgacgtgtgctttgccagcggcggcacgcgcaccgtaggcccgctgatgacgttcttcctgagtgccgcccatgcggcacagctcattgacgccaagggggaagagttggccttgcagcgcgccaccctggccgtcatcgcggacgggctgggcctgcctgccaaggcgctgcgcatcgaggcgaaggtggagggccggccggccgtgttctacgaccaggacggggccacgctttgcgcgtgcgcggtggattccgaccactggcgacaggcgcgggcgacggccgcaacggcatcggccatcgacaaggcgcgaacaaatttttag

SEQ ID NO: 515733 - DNA, 312 bp, Stenotrophomonas maltophilia
gtgcaatccatgaagaaacggctaaccgaagcccaattccagacggccatcaaggggctggagatcgggcagcagaccatcgacatagcgcgcggcgtgctggtcgatggccggccccaggcggagtttgtcacttcgctggggctgaccaagggggcggtgtcgcaggcggtcagtcgcgtatgggcagcagcaggggaacagctccccgagggcttcgagcgagtgacggcggtactgccggagcatcaagcgttcatcgtcaagaagtgggaagcagacgccaagaggaaacaggaacccaagtcatga

SEQ ID NO: 515734 - DNA, 765 bp, Stenotrophomonas maltophilia
atgaaaacactggtcacggcaattcagaagggcggtcaaggcaagacgttcgccacctgccacctggcattcgacttcctggagcgcggccttcgcgtggccgtgatcgacctggacacccagggcaacgcatcgttcacgctgtcggcgtaccaatcgggctacctcgccagccagttgttcaccggcgacaccgatgacctgcggtattggttcggcaagcgcgagggcgagagcctggcgctgatcgcggcagacgccaacctggcgaacctggacaagatggagctttcccaggcggccgccgcgctgcgggccagtgtggccgcgctgggcgagttcttcgacgtgtgcctgatcgacacggccccctcccttggcgtcgccatgacggcggccgtgctgacggccgactacatgctgtcgcccatcgaaatggaggcgtacagcttgcagggcatgaagaagatggtcgcggtcatcggcaacctgcgcaagcagaaccccaagctgcgcttcctcggcatggtgccgaacaaggtggacgcgcggaagccgcgccacgtcaacaacctggcgacgttgcagcaggcatacccgcagctcatcttgccgttcagcatcggcgcgcgtgacagcatcgccgaggcgctgggcgagcagatgccggtgtggaagatcaagaagaccgccgcgcggaaggccacccaggaggtgcgtgcgctggcggattacgtgttcacgaagatggagatcgcgcaatga

SEQ ID NO: 515735 - DNA, 1050 bp, Stenotrophomonas maltophilia
atgagcgccaagaccaacgccaagaagaaggagcaggacaagccgcaatcgtccgggctgggcctggacgggctgggcgacctggccggcctgctgaacgagcagccggcggccaacgccggcggcgcaggcccgcaggagctgccgcttgacctgatcgacgaagacccacaccagccgcgcacggccgacaaccccggcttctcgccggagagcatcgcggagatcggcgagaccatcaaagcgcgcggcgtgaagtcgcccatcagcgtgcgcgagaacccggacgcaccggggcgctacctcatcaaccacggcgcgcggcgctatcgcggctcgaagtgggcgcacaagaccacgatcccggccttcatcgacaacgactacaacgaggccgaccaggttatcgagaacctgcaacgcaacgagctgacggcgcgtgagatcgccgacttcatcggccgcgagctggcgaagggcaagaagaagggcgagatcgccaaggagatcggcaagtcgccggccttcgtcacgcagcacgtcacgctgctggacttgcccgaacccattgccgaggcgttcaatagcggccggggcaaggacgtgactgtcatcaacgagctggtgacggcctacaagaagaaccccgacgaggtggccgcctggctggccgacgacagccaggagctgacgcgcggctcggtgaagctgctgcgcgagttcctggaggacaagcgcagtcacgaggacggcgaccgtgatcccaacaccgtcgatgcgctgaccggcaagaccgacgccgaggccggcgacggcgagcaggggccgcaggatgatgacgccaaggggaagaaggagccgaaggaggccgaccccgacaagctcaagaaggccatcatacaggtcaagcacgacgaccggccggcacggctgatcctcaaccgccggcccccggccgagggctgggcctggctcaaatacgaggatgacggccaggagttcgaggccgaccttggcaccgtgcagcttgtcgcgctgctggagggctga

SEQ ID NO: 515736 - DNA, 1032 bp, Stenotrophomonas maltophilia
atggcgatctcgaaggagcagatatttgcggtggccgacgaactggacgcggccggccagaaccccacgctggcgaacgtgcgcaagcagctcggcagcggcagcttcaccaccatcagcgaggcgatgaacgagtggcgcgcacgcaaggccagccaggccgccccgatccgcgagccggcaccgcaggcgatcaccgacaagctggccgagctgggcggcgacttgtgggccgtggcgctggaaatggcgaacaaccgcctggccgccgagcgcgaggcgctggaggccgtgcgccaggagacggaagcagcgcgccaggaagccgcagagctggccgaccagctcaccggcgagctggacgaggccaaggcccgcgtcgcggccctggaggccgtcgaggcggccgccaagggcgaggccgacgagctgcgcggcaagctcgcggcgaccagcgagcgcgcggccacggccgaggccagggccggcgagctgcgcacggagctggatcacgcccatcaggaagcccgccaggcgcgcgcagagcgcgacaaggcccaggagagggccacggccagcgccgaccaggtggaggccctgcgggccgacctcgcggccgcgaacagccgtaccgccgagatcgagcgccgcgccggcgagctgcgtgccgacctggagcgggcgaaccaggcgaccgaccaggcgcgcgccgctcaggccgagcagcggaaggccaccgaggtggccgccgccgagcgcgaccaggtgcgcgcggagctggtgaaggtgcaggccaaggccgaggcggccgagcaggcccaccaggagcagcgcaaggcgatggcggccgaggcacaccgccaggccgagcggctgaccgccgcccagggcgagcgcgaccaggcgaagcgcgacgctgcccaggcccgcgaggaagcggccgggcttcgcggccggctggaggccctggaaaccgtcatggcgcaaggccgggcggccgatccgaccagcggcggacgcaaaaagacctga

SEQ ID NO: 515737 - DNA, 348 bp, Stenotrophomonas maltophilia
atgaaagaacgcctcttggtcatgaacggtcaacgcatcgttcaggccgaaaaggacggcgcttggacgaatcagaaagtagacaaggcgggcgcgttgaagcccggcatctacaacctgtacacggcccaagcggccgacaagaagcagacccacgccggcgtgatcgttcatgccgacgccaccaacgtgtaccagcagatcggcaagaactttgtcatgcacgctcggtcagatttcgataaagtacctgaaattgggagcgcaaagagcatcagctacaacgcccagggcaaggcggcagtcgccgcagaggccccgaaactgacgcgggggcgctccatgtag

SEQ ID NO: 515738 - DNA, 654 bp, Stenotrophomonas maltophilia
ttgaaacgactcaccatccccggcagcggcaccgagagccgcgccaccaagccggcccgcgtcagcgcgccggccaccctcggcggtgccgccttcggcgcttcgcgcgaggacaccggagccgacttgctggaggccgcccaggcggccgagatcgagcagcaggccaccctagaggcggccccggtcgagcagtcctaccccgaaaccctggcgctctacgtgcaggccaagcacgaccaggtggagcacatcgaggacaggctagaaaacctgatcgaccggcagcaggcccgcttgcagcagacccaggcgtccgcgcctggccggctttccttgcccggctctaagcgagcctggcagaaccagcaggcgcagcagcaggcccgcttgcagacgcttcacgcgcgcctggaggccgtccgcgagatcaaggaaggcatgggcctgcactcgccgaagatcgaagagctggcgacgcgcaagatgcgcgccgagaaccccgagctggcttccgattgggatgccatgcgcgaggccgcccgccggcatgagctgctgatgcgcaagcaggagcaggagcgcaagcaatcccaggcccaggagcggccagggagatcgcagtccttgggcctgtcagccaggcccgcataa

SEQ ID NO: 515739 - DNA, 441 bp, Stenotrophomonas maltophilia
atggcggccgacgacaagatcgaggagctgatacgggagatcgcggccaagcacggcatcgccgtgggccgcgacgatccgatcttgatcctccagaccatcaacatgaagctgatgcaggacagcgcatcggcccagcaggaaatcttggacgccttcaagtcggaactggagtccatcgcccaccgatggggtgatgacgccaagggaaaggcggaaaggacgctcaacgcggcgttggcggccagcaaggacgccatgacgcggggaatgcaggagggcgcgaaggcggccgccgaggccgtgcggcgtgaggttgaggcggtgacggcgcagctcgtcgcgccgatccgcgaggcgcggcgcgtcgccatgatgaacatggtcgcggccggcatggcggtcgtggccgccggcctggccctgtgggcctcgctgtag

SEQ ID NO: 515740 - DNA, 726 bp, Stenotrophomonas maltophilia
atggcgaaaattcacatggttctgcaaggcaagggcggcgtcggcaagtcgatgatcgcggccaccatcgcgcagtacaaagccggcaagggacagaagccgctttgcatcgacaccgatccggtgaacgcgacgttcgagggctacaaagccctcaacgtgcgccggctcaacatcatggacggcgacgagatcaacacccggaatttcgacgccctggtcgagatgatcgcgtcggccgagggcgacgtcatcatcgacaacggggccagctcgttcgtgccgctgtcgcactacctcatcagcaaccaggtgccggcgctgctccaggacatgggccacgaactcgtggtgcatacggtcgtcaccggcggccaggccctggtggacacggtgagcggcttcgcccagctcgccagccagttcccggccgaatgcctgttcgtggtctggctgaacccgtattgggggccaatcgagcacgagggcaaggggttcgagcagttgaaggcgtacacggccaacaagggccgtgtgtccgccatcatccagattccggcgctgaaagaggaaacctacggccgcgacttcgccgaaatgctccaggatcggcgcaccttcgatgaggccctggccgattcggcgctcacgatcatgacgcggcagcggctcaagatcgtgaaaacccagctcttcgcccagctcgaaaacgcggcggtgctctga

SEQ ID NO: 515741 - DNA, 399 bp, Stenotrophomonas maltophilia
atgccaaagacctaccccgaagagctggctgaatgggtgaagggacgggaagccaagaagccgcgccaggacaagcacgtggtcgcgttcctggccgtcaagagcgacgttcaagcggcgctcgatgcgggctatgcgatgaaaacgatctgggagcacatgaaggaaaccggccggctgcgctgtcggtacgaaaccttcacccagcacgtgaagcggtacatcaaggccgcgccggtagcttccccgccgcctcccgccactcccccggacagccagcccaagggcgcgaagcccgagccgaaggccgccccgccggcctcggaatccaagagtgagccacccaagatcggcggcttcacgtttgatgcgactccaaagaaagaggatttactgtaa

SEQ ID NO: 515742 - DNA, 375 bp, Stenotrophomonas maltophilia
atggagaacgacgaaaaggaacacggccgccggcggcggcagcacctgcgggtgccggtgttccccgaagagaaagacgagatcgaggcgaacgccaagagggcgggcgtcagcgtggcgcgctatctgcgcgacgtgggccagggctaccagatcaagggcgtcatggactaccagcacgtgcgcgagctggtgcgcgtcaacggcgaccttggccgccttggcggcctgctcaagctctggctgaccgatgacgtgcgaacgctccagttcggcgaggcgaccatcctggccctgctgggccggatcgaggccacccaggacgaaatgagccggatcatgaaggccgtggttcagccgagggccgagccttga

SEQ ID NO: 515743 - DNA, 2241 bp, Stenotrophomonas maltophilia
atgatcgccaagcacgtgccgatgcgctcgcttggcaagagcgacttcgcgggcctggcgaactacatcaccgacgcccaaagcaaagaccaccggctgggccacgtgcaggcgacgaactgcgaagccggttccatccaggacgccatcacggaggtgctggcgacccagcacacgaacacccgcgcgaagggcgacaagacctaccacctgatcgtcagcttccgggccggcgagcagcccagcgccgacaccttgcgcgcgattgaggaacgcatctgcgtcgggctgggttatggcgagcatcagcgaatcagtgccgtccacaacgacaccgacaacctgcacatccacatcgccatcaacaagattcacccgacgcggcacacgatgcacgagccgtactacccgcaccgggcgctggcggaactctgcacggccctggagcgcgactacggcctggagcgcgacaaccacgagccgcgcaagcgcggcgcggagggccgggccgccgacatggagcggcatgccggcgttgaaagcctggtcggctggatcaagcgcgagtgcctggacgagatcaagggcgcgcagtcctggcaggaactgcaccaggtcatgcgcgacaacggaatggagctgcgcgtccgcgccaatggcctcgtgttcgaggccggcgacggaacgatggtgaaggcgagcacagtagcccgcgacctttccaagccgagcctggaggcgcggcttggcccgttcgaggcttcgcccgaacggcaggcgcaaaccaccgcgaagcggcagtaccgcaaagaccccatccgccttcgcgtcaacaccgtggagctgtacgcgaagtacaaggccgagcagcagagcttgaccacggcgcgcgcccaggccctggagcgcgcccggcatcgcaaggatcggctgatcgaggcggccaagaggtcgaaccgcctgcgccgcgccacgattaaggtggtcggcgagggccgcgcgaacaagaagctgctgtacgcccaggcgagcaaggccctgcgcagcgaaatccaggcgatcaacaagcagttccagcaggagcgcacggccctctacgccgagcacagccggcgcacgtgggccgactggctcaagaaggaggcgcagcacggcggcgccgacgccctggccgccctgcgcgcccgcgaggcggcccagggcctcaagggcaacaccatccggggcgagggccaggcgaagcccggccacgcgccggcggtggacaacatcacgaagaaggggacgatcatcttccgcgccggcatgagcgccgtgcgcgatgacggtgaccgcctgcaagtctcccgcgaggccacgcgcgaagggctgcaagaagccctgcgcctggcgatgcaacgctacggcaaccgcatcaccgtcaacggcacggtggagttcaaggcgcagatgatccgcgccgccgtcgattcccagctacccatcaccttcaccgatccggctcttgagagccggcggcaggcgcttttgaacaaggagaacacccatgagcgaaccgaaagaccagagcatcgaggacgaactggacgcggcgctggcggccctggacagcggcccgctgccgaccagcacgctaccggagccgcagccgtcgcccgagcaggcgacggccggccagccgccggccgaggcgaccgcgccgacgccggccttcacgccgccaccgtccaccggaagcccgacgttggacgccttggaagaaaaccgccgccccaaagccagcaccgtttgcgagcactgtccgaactcggtgtggttcgcatcgccggcggaagtgaagtgctattgccgcgtgatgttcctcgtcacgtggagcagcaaggaacccaaccagatcacgcactgcgacggggaatttctcggccaggaacaggagtaggccagacgccgccgggcgtcgccgccgccgacaagtacatcgccgaacgcgaggcaaagcgcctaaaaggtttcgatataccgaagcattcccgatatactgccggtgatggtgcgctcacgttccagggcaccaggactatcgagggccaggcgctggccctcttgaaacgaggtgatgaggtcatggttatgcccatcgaccaggccacggcccggcgcttgacgcgcatcgcggtcggcgatgccgtctcgatcaccgcgaaaggctccatcaaaacgtcgaaaggaaggagtagatga

SEQ ID NO: 515744 - DNA, 1914 bp, Stenotrophomonas maltophilia
atgaagatcaagatgaacaacgcggtagggccgcaagtccgaaccgccaaaccgaagccgagcaagctgctgccggtgctgggcgcggcctcgatggtcggcggcctccaggccgcgacgcagttcttcgcccacacgttcgcctatcacgcgaccctcggccccaacgtgggccacgtgtacgcgccctggtcgatcctgcactggacgtacaagtggtacagccagtacccggacgagatcatgaaggccggcagcatggggatgctggtttcgaccgtgggcctgctgggcgtggccgtggcgaaggtcgtcacgtccaacagctcgaaggcgaacgagtacctgcacggctcggcccgctgggccgagaagaaggacattcaggcggccggcctgctgccacgcgagcgcaacgtcctggagatcgtcaccggcaaggccgcacccacggctaccggcgtgtacgtgggcggctggcaggacaaggacggcaatttcttctacctgcggcacagcggccccgagcacgtgctgacctacgcgcccacgcgctcgggcaagggcgtcggcctggtggtgcccacgctgctgtcgtggggcgcgagcagcgtcatcaccgacttgaagggcgagttgtgggccttgaccgccggctggcggcagaagcacgccaagaacaaggtgctgcgcttcgagccggccagcacctcgggcggcgtctgctggaatccgctggacgaaatccgcctcggcaccgaatacgaggtgggtgacgtgcagaaccttgccacgctgatcgttgacccggacggcaagggcctggactcgcactggcagaagaccgccttcgcgctcctggtcggcgtgatcctgcacgcgctgtacaaggccaaggacgatggcggcaccgccacgctgccgtccgtcgatgcgatgctggccgacccgaaccgggacattggcgagctttggatggaaatggcgacctacgggcacgtagacggccagaaccatcacgccatcggctcggcggcccgcgacatgatggatcggcccgaggaagaagccggatcggtgctgtccacggccaagtcgtacctggccctgtaccgcgaccccgtggtggcccgcaacgtcagccggtcggacttccgcatcaagcagttgatgcacgaggacgacccggtaagcctctacatcgtcacccagcccaacgataaggcccgcctgcggccgctggtgcgcgtcatggtgaacatgatcgtgcgcctgctggccgacaagatggacttcgagggcggccggccggtggcgcactacaagcaccggctcttgatgatgctggacgagttcccgagcctcgggaagctggagatcatgcaagagtcgctggccttcgtggccggctacggcatcaagtgctacctcatctgccaggacattaaccagctcaagagccgcgagacgggctacggccacgacgaaagcatcacgtcgaactgccacgtgcagaacgcctacccgcccaaccgcgtcgagacggccgaacacctgtcccgcctcaccgggcagaccaccgtggtgaaggagcagatcacgaccagcggccgccgcacggcggcgatgctgggccaggtgtcgcgcacttaccaggaagtgcagcggcccttgctgacgcccgacgaatgcctgcgcatgccggggccaaagaagaacgcccagggcgagatcgaagaagccggcgacatggtgatctacgtcgcgggctacccggcgatctacggcaagcaacccctgtacttcaaagacccagtgttctcggcacgcgccgcgatccctgcgcccaaggtcagcgaccgcctgcgcgccgtcgcacaggccgagacggaaggggagggcatcacgatatga

SEQ ID NO: 515745 - DNA, 537 bp, Stenotrophomonas maltophilia
atgagccgcatcctgaaacgtatcgcggcaggcgtcgtcatcgcgggcgtggccgccctgctgctggccgccggcggctatgccgccggtgcccgcgtgaacaccaccaagagcattccggtcggcctgtactggacgagcagcgcgccggtggagaagggggcctacgtcctcttctgcccgccgcagctcggcgtgttcgatgacgccaaggagaggggctacatcggggccggcttctgccagggcggctacggctacatgatgaagcgcgttttagccgctaaagacgatgccgtcgccgtcgccgatgacggcgtgcgcgtcaacggcgagctgctgcccctcagcgcgccgatcaaggccgacaaggccggtcggccgctgccgcgctatcagtccaacagctacacgctcggcaattccgaggtgctgcttatgtcggacgtgagcgccacatccttcgacggccgctacttcggcccgatcaatcgttcgcaaatcaagaccgtgatccgtccggtcatcacctggtag

SEQ ID NO: 515746 - DNA, 2064 bp, Stenotrophomonas maltophilia
atgcgccttttcatcgcagaaaagccgtccgtcgccaaggccatcgccggcgagctgggcgcgaccggcaagggcgacggcttcatcgagtgcggcaccgacaaagtgacctggtgcttcgggcacatgctcgaacaggccgaccccgacgagtacacgcccgatgacgtgccgcgcggccagtccggcaagaaggtctggcgcgtcgatgagctgcccatcatccccgagagctggattctcaagcccaaggacgacgcgaagaagcagctcgccgtgatcggcaagctgctcaaggaggccaaggagatcgtcaacgccggcgaccccgaccgcgaaggccagttgctggttgacgaagtgctggagcacttccgcaacagcaagccggtgcgccgcttttgggtgagcgcgcaggactccgtttccgtcaagcgcggcctggccgcgttgaaggagaacaccacctatgcaggctgggccgacgctgcacgcgggcggcagcgcgccgactggctgatcggcatgaacctcagccgcgcgtacacgctgcgcgcgcagcgcggcggctcgcgcgccctgctgaccgtgggccgcgtgcagacgccgacgctggccctcgtggtcgcccgcgaccgcgagatcgaggcattcaaggccgtgccgtaccacaccatccgggcggtggtgcagcacgccggcggcagcttcgccgccgcatggaaggcgaaggaggatcaagccggcctggacagcgaaggccgccttgtcgataccgccgtcgccgacgccctggtggccgccgtcaagggccagccgggcaccatcgccgcgtacaaacaggaggccaagaagcagaaccagccgctggccttcgccctgtccgacattacggcactggcctcggccaagttcggctacagcgccgaggacgtgctgaacacctgccaggcgctctacgagacgcacaagctgacctcgtacccgcgcaccgactgcgcctacctgccggagtcgcagcacgccgacgcgccgcgcgtgctggaggcgatcaagcacgtcaaccccgaactggccggcctggtcgatggtgccgatccgcgtatcaagtccaagacgtgggacgactcgaagatcaccgcgcaccacggcatcgtgccgaccatgcagaagggcagcaaggccgccctcagcgagcgcgagcgcaacatctacgacctgatcgtgcgcgcctacctggcgcagttctacccgctgcacgagtacatgcagaccaccgtgggcgtcgagatcgcgggcgagaacttcgccgcgagcggcaaggtagtcacgcgcaacggctggcgtgacgtgtacagccaggccgacgaggaaggcgagaaggacgaggacgacgacagcggcacgcaggccctgccgtcgatggcccagggcgacgccgtgacctgcacggacgccacccgcaaggacgccaagacgaagccgccagcgcgctttaccgagggcacgctgatccgcgcgatggagaacatccacaagttcgtcagcgatgccgagcacaagaagatgctgcgcgagggcgacggcatcggcacgtcggccacccgcgcgtcgatcatttccgagttgaagcggcgcgagttcctggccgtcaaaggcaagcagatcatcagcacgaccctcggccgcagcgtcatcgacgcgctgcccgaggttgtgaaaagcccggtgctgaccgcgctctacgagcggatgctgaaaggcgtcgagcagggcacggccgccctggacgccttcatcacgaagcaagagacgttcatccgcgaccaggtggcgaaggccaacagcggagccgtgaccatcgccggcggcaaggaagccgcgccggtgtcatcccttcacaagtgcatggcctgcggcagcggcttgtcgcgccggccgagcaagaagaaggggcaattctggtggggttgcagcaacttccccacatgcaagcagacctaccccgacctcaagggtcggcccgactacagcaagggccgcaacggccaggcatccgaatga

SEQ ID NO: 515747 - DNA, 390 bp, Stenotrophomonas maltophilia
atgaacgagcaaaccaccaccaacaccgccgcccacgacgagccgctggccgtcctgccgccggttgacgacgacgccgccggccgcgaggccgtgcgcgagaagatggccgacgcgctgacgcccggcttccaggtcgagttcgaccccgacgaagccgagcgcgtgggcgcgttcgtggaggacgcgctgtccgagcaggacgccgccgcgagcggcgacgacctggtggaagtcgatggcgcgctggagccggcattcctggacgacgaaggcccgagcgccgacatcccgccgttcatcaccaccacgaacgcccgcgagctgtacgacctgcggcccggcgagacggttgcccaggccgccgcgcgcaaggcgtcggagggctga

SEQ ID NO: 515748 - DNA, 4347 bp, Stenotrophomonas maltophilia
atgccgatcacgaaagccgaggcgcaaggggtgacgcgggctttcgtccgcgactaccccggcgcgctggagctggcctacaagttccgcgaggacgcggccgagctgtacgggccgcgagcggccgaggtgccggccgacatgaagggcggctacgtgcccaaggagacgctgcacgccggccgcgcttaccgtggccgcgtggacgtgcccttgcagaacgtcgagagcgccagcgacctactgatgacgctgcggcacgaggtgctaggccactacggggccaacaccttcgcgccgggcgagaagcgcgccttgctggacggcctggcggccgcccgcaacgaacccaccctcaagccgctatgggatgacgtgaaccggcgctatgccggccagtccctggacgtgcgcgccgaggaagtgtttgccctgcactgcgagggcatcgagccgagccagcaccaggtcgccgaccaggtgcagcagcgcggccaacagtcattcacggaaacctgcatcgcccgcgtgcggcccatgcaggccgacgacctgcacaacatcgtgtgcatggtcgcccagggcctgcgcgaccgttcccggacacagcagaacttccctcagttcaacgagctattccgaagggacgagaacatggagccgaagaagccgtttcacgaagtcgtggccgaaaagctgatcgagcagctcaaggccggcaccgcaccgtggcaaaagccgtgggagccgggcgaacccaacgcctacctgccgatgaacccgaccaccggcaagcggtacaaagggatcaacgccatccacctgatggcccagggccgcagcgatgcgcgctggatgacctacaagcaggccgccgccgtgggcgcgcaggttcgcaagggcgagaaaggcacgccggttcaatactggaagttcagcgaagagcaagacaagctggacgacagcggccggcccgtcctcgatgcgaagggccagccggtcaaggaaaccgtcatgctggagcggccgcgcgtgttctttgcgaccgtgttcaacggcgagcagatcgacggcctgccgccgctccagccgaagaaggaacagacttggaacgccgtcgagcgcgccgagcacatcctgaaagcctcgggcgcgacgatcacccacgccgccggtgatcgggcgttctaccgcccttcgaccgacagcatcaccctgccggagcgcggccagttccccagctccgaccgctactacgcgaccgcgctgcacgagctgggccactggacgggccacgcttcgcgccttgaccgcgacctggcgcacccgttcgggagcgaggggtacgccaaggaagagctgcgcgccgagatcgcttccatgatcgtcggcgacgagctgggcatcggccacgatccgggccagcacgccgcctatgtgggttcgtggatcaaggcgctgcaagacgagccgctggaggtgttccgcgcggccgccgatgccgagaagattcacgactacgtgctggccttcgagcagaagcaggttcaggagcaagaccagcagcagagccaggcccaggacgaagccgtggcccaggccctggccgtggacattgccgaagtcctggacaacccggacgtgtctttcagccactaccaggcattccagggcgacaccctggaagacgccttgcgcagccgtggcctcgaaaccgtgggcagcatcaccggcaccgatcccgagcagttctacgcggtcgcgcatgaccggctgtcgccggtgttcggcatcgacccgagccacaccgacaccgacaacgcctacctggagcgcaagggcttggcgcaagagttcgccaacatggccgaacagctccacctcgcgcagcagctccagcagcacggcgaacagatcgtgtcgagcatcgacgccgaagccaggtggagcgacggccagcgcatctttgcgttccacgaccaggacggtgaaccccaccaggttcgcagcctggacgagctgaacaactacgcgcccgaccagttgatggccctgccggcgctgacccagcagcaagcggccgtcgcagaccaggaggcgaacatgaccccaccgaccatcgaccaggcggccgccctgctggccgcccatcctgccgacgcggtgcagggcatcgagcaggccgccgccgcgcgccggcagctcgccgccggcgagatcgacggccaggcgttcgccgacgcgacccgtcaacaccttggcgttgagctgccgcccgactggagcggagagctgcgcatcgtcggcgtggccgagcaggacggccagaccgtcgatgccgcccaggccggcatcgagccgcaggcgttccaggtctacgcgcgcaaggccgatgcgcagttcggcgaggacgcctttgccttcgtcgccggcacccgcaccgagggccaggccgaggctctggccgagcgcctgcacctggtcgatgcgctgggcaccgacaaccagcacgagcgcgccgccaagctggcccgcgtgcaggaagagcgtgtacggcgcgaccccaacgcgaccgaagaggacatttcagccgctaaagaggcacgcaagaccgccgaggcgtcggccatgctcaacgacagcgacgcgcagcgccgcgcggccgagctggagcgccaggaacgcgatcggcagcaggcgcagccgcaggccgagaagcccgaacggcagtacatcaacgtgccgtacaaggagaaggacgaggccaagagcctcggggcgcgttgggatcggcagcaacagtcctggtacgtgccgccgggcaccgatgccgctcccttcgccaaatgggcgcagggagccgctacagcggccgtagagccgcgttcggcccagccggcacccgaagcccagggcgaggcgcagaagcccgcgcagcaggcccagcaggcccgccagtacctggccgtgccctacgagcagcgcaacgcggccaaggccgccggcgcgctttgggacaaggccgcgaagtcctggtatgtcggcccgcgcgccgacgcggcgaagctcgaacgctggaagcccgagaacgtgcaggcccagcaagggccagcgatgacgccaagggaagagttcgccgaggccatgcgcagcgccggcctgttcaccggcagcaacgcccagggcgatcacccgatcatggatggcaagcggcaccgcgtgccggtcgagggcggcaagaagggcgcgctcgatggcttctacgtgggccacctggacgggcacccggccgggcggatcatcaacaacaagaccggcacggacattacctggaagagcaagggctacgccttgagcgaccaggagaaggccaagctccaggccgaggcggccgagaagctggcacagcgagccgtcgagcaggacaaggcccaggaggccaccgcgcagcgcgtcggtcggcagatggccgacctcgtgcccatcgagcagccgacgccctacctgcaagccaaaggcatccaggcgcaggccggcgtgatgaccgaccgcgaaggccagaagacctacatcccggccttcgacgcagagggcaagcaatggacgatgcaatacatccaggaggacggcactaagcggttcgccaaggactcgaagaaggaaggatgcttccacccggtcggcggcatggacgccctggcggccgcgccggcgctggtgatctcggagggctacgccacggcggcccaggtggccgaggccgtgggccacgccacggtcgccgccttcgacagcggcaaccttgaggccgtggcgaaggcgctgcacgccaagttcccggacaagccggtcatcatcgccggcgacgacgaccggcacctggtcatgacccacggcaacaaccccggccgggagaaggccgaggcggccgcccaggccgtgggcggcaaggcgatcttcccgatcttcgcgccggccgagaacacctacccgcgcgacttgcccgccatcacgcccgacagcttcaagacccacctgcgcgccgagcagcgccttgccgacgccgccgccggcaaggtcgagctggccggcgacgaggcggccaagctcaaggcgtcgatgttgagcggcgcgcagatcgcggcgctgtccacgatgaagcagcacaccgacttcaacgacttggcgcacaagagcgagctgggcatcgagggcgtgaagcggcagatcggcgcggccatcagccaggtgcagcgcgacgagcagcagcaccaggagcagaagcacgtcgagaaaaagcaacagcagatcgagcagcgcccacggcgggccgctcgcatcggataa

SEQ ID NO: 515749 - DNA, 501 bp, Stenotrophomonas maltophilia; identical to SEQ ID NO: 83644

SEQ ID NO: 515750 - DNA, 792 bp, Stenotrophomonas maltophilia; identical to SEQ ID NO: 360622

SEQ ID NO: 515751 - DNA, 468 bp, Stenotrophomonas maltophilia
gtgccggtcgatctgacccggccgttcggctaccgcatggcgttccaggccgaggactacgccgacttcagcgtggccggcggcatggccgtgccggacccgccgggtggcgagtcggtgcgtggcttgtacgccaccgcctcggcgccggccaacgagacaccgttctactgcaatgccagcctgcgcgaggaaacctatcgcctgcagttcccggccaatgcgccgatcatcgccatcccggccagccagcgtttcgccaatgcagccggcgagtaccgggtggactggagtcgcgagggccaggaggtgatcgtgcaccaccgcttgcagcagaatgcagtgcgtgggccagaggcgttgtgccagccgcaggactatccggcgttccgcgcgctgtatcgcgaagtgcggcgtggcttccgcggccaggtgctgtacggcaagctgccgggatccggtggctga

SEQ ID NO: 515752 - DNA, 1200 bp, Stenotrophomonas maltophilia
atggcgaagatcaagctcaccaagtccgcagtcgatgcggcacaaccccaagacaaggccatcgaactgcgggataccgtggtgcctggcttcctgtgcaagatcaccccggcgggccgcaaggtgttcatgctccagtaccgcacgaatgccggcgagcgccgcaagccagcgctgggccagtacggcgaacttacggtcgatcaggcgcgcacgatggcgcaggaatggctggccgaggtgcgcaagggtggcgatcccagcgcggccaagaacgctgcccgcaaggcaccgaccatgaaggagttttgccacaccttcatggaggactactccaagcagcgcaacaagcccagcacgcagcgcggctatcagggcgtcattgaccgctgcatcatcccgatcatgggccggatgaaggtgcaggacgtgaagcgcccggacgtggccacgctgatgaagaagctggcctacaagcaggccgaggccaaccgcaccttcggcgtgctgcgcaagatgttcaacctggccgaagtgtgggggctgcgccctgacggcaccaatccgtgccgccacgtcccgatgtacccacccggcaaggaaacccggctcatcgtcgatgacgagctggtgcggatcttccgtcacctggagcatctggaagccgagggactggagaactacgtcatcccgctggcgattcgcctgcaattcgagttcgccgcccggcgctccgaaatctgcccgctcgaatgggcatgggttgatctggaaaagcgccgcgtcgtctggcctgacagcaagaccggcggcatttccaagcccatgagcgaggaagcctatcggctgctgtccaccgcgccacgtcgggaaggctgcccctatgtcctgccgtcgccgaacgatcccacccggcacatgacccacggtgagcactacggcggctggacgcgcgtgctcaaggccgctggcgtgccccacgttggcacgcatggcatccgtcaccgggcgacgaccgacattgccaactcgggcgtgccgaccaaggtgggcatgaagctcacaggccacaagaccgtggcgatgtttatgcactatgttcataccgaggacaagccggtgcgggatgcggccgaactggtggcgaatcggcggctggcgattaccggagcatcccgctctatggaggtgacagcatga

SEQ ID NO: 515753 - DNA, 1167 bp, Stenotrophomonas maltophilia
atgacaaggaagatgcctgtggcaacgcggaaacccgctgccttaccggctggctatgccggcatccacggcggcatcgtggagctgctggatgccgcgcgtcaggcagcggcgcgcagcgtcaattcgctgatgacggccagctattgggagattggccgccggatcgtcgaagccgagcagaaaggcaggcggcgagctggttacggcgagcagttgatggcgcggttgtccgctgacctgacggcgcgatttgggcgcgggttcagcccggacaacctggagaacatgcgacgcttcttcgccgcttacccccttgagacaatttccgagacactgtctcggaaatctggtggagggctgcccatcgagaattccgagacggtgtctcggaaattcgacctctccgaactggcccaggccttcgccttgccgtggtcagcctatgtccggctgctgtcggtcaaagatgaccatgcacgccagttctacgagaccgaagcactgcgcggtggctggagcgtgcgccagctcgaccgacagatcggcagccagttctacgagcgcacggccctatccaaagacaaggcggcgatgctggtcaagggttcggtggccaagcccgaggataccgtcactcccactgacgccatcaaagacccgtatgtgctggagttccttgacctcaaggacgagtattcggaatccgacctggaagcggcattaatccagcgtctggaagacttcctgctggaactcggggaaggcttcaccttcgtcgggcggcaacgtcgcttgcgcatcgaccagacctggtatcgggtcgatctgctgttctttcatcgcaagctgcgctgcctggtcatcatcgacctcaagttgggcagcctgacccatgccgatgtggggcagatgcacatgtactgcaactatgccaaggagcattgggcttacccggacgagaatcctccggtgggcctgatcctgtgcgcggacaagggtcatgccctggcgcggtatgcgttggatggcttgccaaccaaggtgatggcggcaaactaccggacggtgctgccggatgccgagttgctgcaaaaagagctggagaacacgcggcgtctgctcgaatctcgcggaacgctgtccctcaaggacgaaaagcagtag

SEQ ID NO: 515754 - DNA, 1263 bp, Stenotrophomonas maltophilia; identical to SEQ ID NO: 354297

SEQ ID NO: 515755 - DNA, 1791 bp, Stenotrophomonas maltophilia; identical to SEQ ID NO: 206697

SEQ ID NO: 515756 - DNA, 1764 bp, Stenotrophomonas maltophilia; identical to SEQ ID NO: 206698

SEQ ID NO: 515757 - DNA, 486 bp, Stenotrophomonas maltophilia
atgtatgactcatcaacgatttatcgagtattaattgatgacttgcatcgcaagggaactgtagcctttgattttactgactggaaaaatcttataaagaacaaaggaaccactcatggcgatgttgagcgggttatatcgtcttatacggagaagaaggggctcgaggcattcgagaaagacttggacgatattctcaaggatcttgaactgaaatcgaataagcggattcaggtacgcagagcgtttgaacgctatcacaacgccgtgcgcctggagcgttcattgattgccattgacaaccaacaagcagttaaggatgcggttgaacacaactttgaagtattcgaaaaacaaggcgtgatggattttatgaatctgacacttgaaattttgccagaggcaaccaaaaagaatctggtgaacctggagtcaatccaagcagccatcatttacgaactattgagcaagtgtcatgaaaaatga

SEQ ID NO: 515758 - DNA, 387 bp, Stenotrophomonas maltophilia
atgacacacgcccatgctttccgcttttccgtaaatccgcttccccacctgtccggtctcatgcggctgcgcagcctcgcgcgccctgcggggcaggggctgctgctggccgcactgctgctgttcctggcggatacggcgcaggccgccggttcctcgatgccgtgggaggggccgttgcagtcgatcttggagtcgattcaggggccggtcgcacgcatcgtcgcggtcatcatcatcatcgccacgggcctggcgctggccttcggcgacacgtcgggaggctttcgcaaactgatccagatcgtcttcggtctgtccattgcgttcgccgcgtcctcgttcttcctgtcgttcttcagcttctccggcggggccgtcgtatga

SEQ ID NO: 515759 - DNA, 264 bp, Stenotrophomonas maltophilia; identical to SEQ ID NO: 355707

SEQ ID NO: 515760 - DNA, 945 bp, Stenotrophomonas maltophilia; identical to SEQ ID NO: 355706

SEQ ID NO: 515761 - DNA, 387 bp, Stenotrophomonas maltophilia; identical to SEQ ID NO: 361435

SEQ ID NO: 515762 - DNA, 1041 bp, Stenotrophomonas maltophilia; identical to SEQ ID NO: 355705

SEQ ID NO: 515763 - DNA, 426 bp, Stenotrophomonas maltophilia; identical to SEQ ID NO: 355704

SEQ ID NO: 515764 - DNA, 1998 bp, Stenotrophomonas maltophilia
atgaccgaccgccgcgacgacgatttccgcgtgcgccccagcgccccgaagaatcggggtaagggccagggccatagcttcgtttccaaggtgctcaagcaggctggcaaggccagcggcggcaagtcctcgatgcgccattccgccgcgtccggcggccagggccagcgcgcaggccagcggcccggctcgcgcctgggacgcggccatacggcggcgcgtttcgccggggcgaagctgacgcccatgtctcggcgcgtgacgatcaagaccctgctggtcaatcaacgcaatgccagcccgcagtcgctcgccaagcatctgcgctacatcgagcgcgacggcgccggccgcgatggcgaaccgggccgggcctacgggccgcagaccgacgaggccgacctcgacgccttcaaggagcgggccgccgacgaccggcaccatttccgcttcatcgtctccccggaggccggcgccgagctggacgacctgcgtacctacacccggcatctggtgaaccggatggaagccgacctagggacgcggctggattgggtggtggtcgatcactggaacaccgacaacccgcacacccacctgatcgtgcgcgggcgcgacgacaccggcaaagacctcatcatcgccggggactacatcgcccacggcttccgccatcgtgccgccgaactggcgacggaatggctggggccgcgcaccgaactggagatccagcagaccttgcagcgcgaggtggagcaagagcggtggacgagcctcgaccgcgcgttgcagcgcgaggccggcgaggatggccgggtgcagatcgaacgcttcaacgaaccgacgttgcagcgccagcgcctgctgctgatcggccgcctgcaacgcttgcagcgcctgggcctggccgacgagacgcagcccggcacctgggccgtccatgcggacgcggagaagaccttgcgcgccctgggcgagcgtggcgacattatccgaacgatgcagcgtgccatgagcggccagccgcgcgagctggcggtgttcgagccgggcgacgacggccgcgccattgtcggccgcgtggccggcaaggggctggccgacgagctgcacgaccgcggctatctggtcatcgacggtgtggacggcaaggcccactacgtcgccttgaacgcccgcgacgagctggcgaattaccccaccggcgcggtagtggaagtgcgcggttccgccgaggtgcgggcggccgacaagaacatcgccgcgctggcgagcaatggcctgtatcgcgccgatcatcaccttgccatcgaacaaggccgggccacggctggacgcgatccgcaggaagtcgtcgcggcgcacgttcgccggctggaagccctgcgccgggctggcatcgtggagcgcgtggccgatggactatggaaggtgccggacgacctggccgagcgtggccgccagtacgacgcacaacgcctgggcggcgtggcggtggagctgaaatcgcatctacccatcgaacggcaggcgcgcgtgatcggggccacctggctcgaccagcaactgatcggcggcggccgagggctgggcgacctgggctttggtggcgatgccaaggcagccttgcagcagcgcgccgacttcctcgaagaacaggggctggcccagcggcgcgggcagcgcgtgatcctcgcccgcaatctgctggggacgctgcgcaaccgggaactggcgcaggccgccaaggacattgccgccgacaccggcctggagcatcggcccgtcacggacgggcagcgcgtggccggcatctaccggcgctcggtcatgctcgccagcgggcgctacgcgatgctcgatgacggcatgggtttcagcctggtgccgtggcgtccggtgatcgaacggcggctagggcagcagctcgccgcaaccgtgagtgctagcgccgtgtcctgggaactggggaggccaagaggccccagcataggctga

SEQ ID NO: 515765 - DNA, 600 bp, Stenotrophomonas maltophilia; identical to SEQ ID NO: 206702

SEQ ID NO: 515766 - DNA, 297 bp, Stenotrophomonas maltophilia; identical to SEQ ID NO: 206701

SEQ ID NO: 515767 - DNA, 1041 bp, Stenotrophomonas maltophilia; identical to SEQ ID NO: 206700

SEQ ID NO: 515768 - DNA, 315 bp, Stenotrophomonas maltophilia
atggctaacatcggcaccttcaccgcagagaaagacggcttcaccggcacgcttcgcaccctgacgctcaacgtcaaggtcaagctggatcccaacgacaagggtgacaacgagagcgcacccgactaccgcctgcaagcggctggccacgacatcggcgcagcgtggaagaagaccagcgaggccggacgcccttatgtgtccgtgacccttgatgatccatcgttccctgcaacggtctatgcccgtctgatcgaaggcgaggacggcgcacacgacctgatctggtcgcgcagcaagcccaaagcggcgtaa

SEQ ID NO: 515769 - DNA, 210 bp, Stenotrophomonas maltophilia
atgagccacgacaccacgaaccgcccgcgcatggccgcgacttacgcccccggcacgatacgcgcccgccgctggcatggcgatagcgacgtgcgcggctaccgtccgcctcgcggctggacagcccgtgccgacctgaccgacctacaccccattacgggccgcgccttgccgcgtgccgtgtggtggatcatcgaaaccaaagaatag

SEQ ID NO: 515770 - DNA, 810 bp, Stenotrophomonas maltophilia
atggttggcgggccgcagccagccatccacgagggttggcgcaccgttgcccgtccacccttcaatggtctgattgaacggccagagcttgatgctgtcgaactgcgtcccgctgccggccgcgacctccgacaccgcccgcgccaacgactcatcggcgctctgccgcagctgctcctcgcggctgatcgccgcctcgcgcgccatcttctcgttcaggagcgcatcaatccgcgcctgggcttcggcgctgatcgcctgcatggcttcggtcacgccctgctgccgcagcagcgcctcggcgaccaagtcctgtgcggcctgcgccaggccggcggctcgagcagccgcttcgtctgcgatcgcttggatgcgggcactgatctccgccgccagcttggcctgctgttcggccaggtccttggacgtagtcggcggaacaacgcccactacggttccggtgcctgtcttgccgcgtacggttggcgtgatctggaaccaccacgtcttgccgctgccgtcgctgtagacgtaccgcgtttcggtggtgcggtggatctccgtccaaggaccgtcctggctctcgctgcgcgagatgacgtagatcacaccctccagatcgacggcgtcccattcgagcacgacgccgtcggctaccggcgtaggattgaccccgttcgccggcggcacgtccggcgccttgaagggcaccgggaaccacgtggaaaagcgcggcgccaccggagacgcggacggcagcccgcccacgccgatttctaccagcgtgagtttccttgcttgcattgctga

SEQ ID NO: 515771 - DNA, 153 bp, Stenotrophomonas maltophilia
atgggcttgaccagcacattgacgcgcagcgcgtcgctgctgccgctggacgtgtcgcccacgatccagcgcacggtatcgccggcggcgaccgtcaccagttcctcgcccggctggagcgaaaccacggtcacgcgccccggcgaggcatag

SEQ ID NO: 515772 - DNA, 318 bp, Stenotrophomonas maltophilia; identical to SEQ ID NO: 82646

SEQ ID NO: 515773 - DNA, 348 bp, Stenotrophomonas maltophilia
atgccgatgccgttccgcgcgccccactggatcaccgacatgccgtgcacgccgttgaaaccgaagccggggaaatggagcacgtcgtcctggtcgacggtgaagtacccgtccgcgtcgtggaacgtgtactgcaggcgcgtcggttcgcgcgggctggtcttctcctgcttgaggatcatcaccctgtcgcgtggccaggggatcaacccggtcgccaccccggcacggttgcgcgtcacgtacaccacgccatcaccgcgcagcagcatctggccgacgatgaactcccagccggtggcgctcgaccagccggacgagaactgctcgttcagcagccaccagtag

SEQ ID NO: 515774 - DNA, 705 bp, Stenotrophomonas maltophilia; identical to SEQ ID NO: 363974

SEQ ID NO: 515775 - DNA, 828 bp, Stenotrophomonas maltophilia; identical to SEQ ID NO: 117483

SEQ ID NO: 515776 - DNA, 900 bp, Stenotrophomonas maltophilia
atgcggatggatatcgccgacctgcgcctgttcctggcgattgccgaggcgggcagcatcacggccggcgcagcgcaggcaaacctggcactggcgtcggccagcgaacgcctgcgcacgatcgaagccgatgccggcaccgcgttggtgaaccggcacccccgcggcgtcagcctgaccgaagccggcgccgccctcgcccaccatgcacgattgatcctgcagcagcaggcgcagctgcgcggtgaactgcaggcgttcgcgcacggcgcgcgcggcacactgcatctgtatgccaacaccgcagcactgaccaactacctgccttcgcggctggcaccgtggctggccgaacgcccgcgcctgcacgtggaactgctggagcgcaccagccccgaagtcgtgcgtgcgatcaacgctggccaggccgaagccggcatcatcagtgatgcggtcgacgctgccggcctgcagcagcacgtggtcgccgaagatccactggtgatgctgctgcctgcggaacaccgcttcgcatcgcggcgcagcgtggccttcgccgatgttgccggcgagaccttcgtcgcgctggccgacggcaatgcactgcaggcctacatcgaagaccaggcacgcgacatcgggcgacgcctggacgtgcgcatccgcatgaagacgttcgaaggcgtgtgcatcatggtcggccacggcattggtgtcggcatcgtgccgcgtaccatcgcccgccagcatcgacgcaatacccgtactgtcgcggttccgcttgcagatgcgtgggcacagcgccgcctgtgcgcctgtttcgccgaatgggcgcagctgtcaccggcgatgcgcagcctgctgcttcacctgggcgtgcagccgcagaaaaatgtgtga

SEQ ID NO: 515777 - DNA, 747 bp, Stenotrophomonas maltophilia
atgaatgaatcgatgtacttctacgtgctgctggtggtggtgttcgtgctggccggtgtggtcaagggtgtgactgggatggggttgccgacggtggcgatggggctgctgggcagcacgctgtcgccggtggcggcagcgtcgatgctgttcattcccactttcgtcaccaatgcgtggcagctgttgtccgggccgtcactggaccgcatcgtgcggcgcctgtggccgatgatgctggccgtggtggtggtgacgctgggctcggccgcgctgctggtgcgggtcgatcgcacttggtcgcgcgttgcgctgggcgtggcattggtggtctatgccgcctatgcgttgcttgcgccggtgttccgcgtgcagcagcggcgcgagcgttggctggggccgctggtgggggcgttgtcgggcgtggtgaccggcgccaccggcgtgttcgtgatgccggcggtgccatacctgcagtcgctggggttgcagcgcgaggagctggtgcaggcgctggggctggcgttcacggtgtcaacgatttcgctgaccgccggcctggtgctgcacggcgcattcggcatccagcagctggggctgagtgcgctggcggtgctgccggcattgctgggcatgtggctggggcaggtgatccggcagcgcatcagtgcgcgggtgttccggggctgcttcctgggtttcctgctgctgctcgggctggaactggtgctgcggccgctgctctga

SEQ ID NO: 515778 - DNA, 396 bp, Stenotrophomonas maltophilia; identical to SEQ ID NO: 499446

SEQ ID NO: 515779 - DNA, 423 bp, Stenotrophomonas maltophilia
atgctgcgcacgttgaccccggcggcagaggaacccgtgtcgctgagcgaagcgaaggcgcacctggtagttatccacgatgccgacgacgcgctgatcggcgccttcatcaccgccgcgcgtgagtcggtggagcgcaccacggggtatgcgttggcagcagcgacctatgagtggaccccggtcggcgagggccgctctccgctgccgatcgagccggccacgctcgacagtgaaccgggcgcctatccggtgaagttcacgacgacgccggggccgcttccggggccgctgcgcgcggccgtgctgctgttgctgggtgacctgtacgccaaccgcgaggcggtcgtggctggctcgcagttggccgagaacccaaccttggatcggctgatgttcccctaccgacgggtgttgccatga

SEQ ID NO: 515780 - DNA, 138 bp, Stenotrophomonas maltophilia; identical to SEQ ID NO: 510475

SEQ ID NO: 515781 - DNA, 1209 bp, Stenotrophomonas maltophilia
atgctggcccgactgaaccacaatgcgatgctgcgctactccgggttgttcacctggggcaccgtcggcctatggcttgcgatctacctgatcgacccggcctcgctgaccctggagaacctggatggcgacgttggtttccggatcatcccctgggcctcggcctacctcgccttcggcgttgtctactgggtactgacccgttcgctgggcgagagccgtcccggcatcttcgaccatgccgcgttgatcctgctgactgcctgtgcgatcggcgtgagctatttctccggcaccgcactgggcagcatcctgttgatggtggtggccggcctgctgccctggttgctggggccgcgtatcggcgtggtctggctggttgccagcaaccttgccgtgctgccggtctacatccagccactgggctttccgccggccatcgctgtgctgcaggcggtgggatacatggggttctccagcttcgtgttcgtgatcgcgctggtggcccgccgccaggccgaggcgcgcgaggagcagcgccgcctgaatgccgagctgcgtgcgacccgcgccctgctggccgaaagtgcccgggtcaacgagcgcacgcgcatttcgcgtgagctgcacgacctcctggggcatcagctgactgcgctgaccctgaacctggaagtggccggtcacctggccgagggcaaggcgctggagcacgtgaagcgttcccacgcactggccaagctgctgctgggcaacgtgcgcgaggtggtcagccagctgcgcgagaccggcgccatcgacctggctgccgcactgcggccgctgaccgagaacgtgccctcgctggacatccagctggacatcgaggatccgctgaacgtggaggacccgcagagggcccacgtgctgctgcgctgcacccaggagatcatcaccaacacggtgcgccacgccggtgcacgccatctgtggatacgggtgtaccgtgaagcccccgatcgggtggtggtggaggcccgcgacgacggcgtcggtgcggaaatgctcaatgtgggcaatggcttgcgcggcatgcgcgagcgcctgcaacaatgtggtggccagctgcaggtcgaaacccggcccggtgaaggcttccggttgcgggcgacggtgccggcaacggtgctggtggccgcccttaccaaggttcctgaaggagtgcgttga

SEQ ID NO: 515782 - DNA, 192 bp, Stenotrophomonas maltophilia
atgaagtgggtcaacctcgtggtggtgatgctgatcatcatcctggcggtgcgatacctgtggagccggaccatgagcgggcagctgggcggcatgcacgacattgccctgactggattcgtgttcttctgcctgttctttgttttcctgaccgttcagtcgatccgtcgtggcaggagcaagcgagggtaa

SEQ ID NO: 515783 - DNA, 189 bp, Stenotrophomonas maltophilia
atggaggacacagggcagggcgaggaacagtgcaccgccgccctggaagccgccgatgatgctggccttatcttctacatgcccggatcaacgatcatcaaaattcagccaccgggcctctatctcctatcgtgtgaactggtagacgaagagcagaggcgttctcttgacgcccttcgccttaattga

SEQ ID NO: 515784 - DNA, 258 bp, Stenotrophomonas maltophilia
atgagcgcaatcaatctcgcagtcttcatcgtcgtctatctcacccagctgaccttgctgttcctgttcgcccgcttctgctatcgccaggcaggtttcagcaggactcacgcaggtagtcccgcaggagctttcttctacgccattggcgggctgatcgcggttgtagggatagttgcggctactgttctggcctttatctcaggaagcatgctagtggcggtagtccagcttgtgccttgtcctacgccattttaa

SEQ ID NO: 515785 - DNA, 174 bp, Stenotrophomonas maltophilia
atgacatttgaactttttctaattttgactggatctgctcttatcatctctgcgaaaattgctcgtatacatcagcgccattctgacaagcagtattcagagagtagggaggatttcatccaggacgctcaggtctttgctgctagagcaaagcagatcatcggcaagcattaa

SEQ ID NO: 515786 - DNA, 816 bp, Stenotrophomonas maltophilia
atgaacgacattcagcgtgaaagagagctgcgcaggttagaagcgagtctgggagtggatagaggtgttgaaggtagttcgaaaactgagccagctcctatcatcccagagcgtgcgatggagcaagcgcagccggtggtgaagaaggttgctgaagcaacacagcgaataatcaaacagacaacagaggctgctgacggcgtcctcaaaatattgccagtcaaaaaatctctgagccgtaagacgcttatctatatctatatatgtgcgggagctgttctgttgacgggcgctggaatgacgggcgttggaattatcaccttcaatctcatgcgcgataaagcgggatcagctgcgcctgctcctactatcgctattgctccaccgcagggcctatacattccgcctgctactaatcaagtgccagggcgagtgcaggaagaggaaaggaagcccgttgaacaaccagagcaagcaatgcctcaggaacttcctgcgatagaagaagctccgccccttgaacctgtgcagcctcctgctagttcagtgggcgagggaagggggagcgctgaaagcactacgcctgctcaaacaattgccccagcacccgctgttgcgcctcaagttagaccagcgaaaaataactctgaaactaaggttgcccgtccacctgctttagttgccgcacctcgtgctattcaacggtatcaaccgcctcctgcatctgataaagaaattaaagctgaggttgaaagagtggaggctgggaagccctggcagagcagaattgatcaattaaaagagttggatctttaa

SEQ ID NO: 515787 - DNA, 2664 bp, Stenotrophomonas maltophilia
gtgcccgtcaaggcgggacggctttgttttgcgcctagaaaaatgggcaagtcaactacagcgcagcaagccgaccaggccggagaagccaagggaacgacgccctcggtacagccagaggacttggtgcgctccgatctagtggtgtggaccccagctttcgcgccccgcacgcgggaacggcactttgccccattgccccaagaggaagtggagcgccacgcaagatcccttggtctgactccccctgggatcgagtatctgatctcggccatcctgcttcccccggccagaaaggtcaggaactcgcacggaacaaaccgagttggcgagcgccatggctacgtccaggggagctttctctctggggactctgaagcgcgcgttcaaaccgagtcagatggtgagatggtctttgcggagatcgtgtcctgcaatccgtctacgttgatcctcttggatcagcccagcagtgtcgcggtgacctacgccgactcaattggtcgccgacagccacgcaggtatacgccagactacctattggtcatgtctgacagagtggtcgcggttgaagttaagcccctgcaggcactcctgcagaaccaccaacgtcgtccggacctttggacgttccgcgaaggaagattctccttcggccctgccgaaggccacttcagatccatcggcatcgaccacgaagttgttccgactgagacaatcccctggattctcgcccggaacctctctctgctggagcccgtcccccaccccatcaccgatgccgatcaggcggtgatcaaagcagtgcaacgtgcggttcatcgcaagcagcccgtgtccattgaagatgtaatgaaccattgcggtctgacgagcggactcccggtactccaggccattctgctgcagaaggtatacgtggatctctcccggtgctgtctgtgggaacccgactcctccacaatctgctcaacccttgaccgggccacgaagattggcattgcgatcgagcagagggatctcgtcctgcagagaggcctcggcgaggccgagcagctgttcaatccgcggtaccttgagaaaattgggttccggcttgccgtcatcaatggacaagccctagccctgtttcccgaatcagctgaagttagcgaacgaactgttcagcgctggcgcgcgagctatagagatcatggactagcaggactcgcgccaagatcagagaacgccggccgcccccgctccattacggatgccaatcttgacatcgcagcttcccagatagcatctgatcgatcgtcagggaatggggtgacgattgagaaatcctatgcgagctattgcgtaacagtggagagcatgagcacagggccgcatgggcttcatccaatgtccaaggcgtcctacaaccggctatggcacttacgcgatcacaataggatcgacgcactgagggctggaggtaaacgagctgcaaatgcggacgcagggcgtgtggccactgagaagcaagctccacttgccaccatgccatttcagatcgcccaggtagatcactgcactttgcccgtggcctgcgaggtgaagggcgacgcgatcctcagcatgctggttgaccaagtaaaggaggaagttctcgcgtggataattctgttctcaccgccaagttcgactacaaacgctctactcctgcgcgattgcgtccgcaggcacggacggcttcctaggacgatctactccgacggcggtagcgacttccgcagtgatgccttccagttatccctttgggatctcgagatcagcttcctccagcgaggagccgcacatccgaaaagtggaagtcagattgagcgtagacataacctagttcaggaagcggccattcgtggggcaacaggcttcaaggcagacgtaaagagcagccgcgccgtatctgctagtcatagccctgaggccaggagtaagcaactgcgcagccgagttctcaagaaagtctccctgactatagacatgatcaaccagggcactgcttgggagggtacgccaagcctcatcgacacgcgccatcacctagagaagatctatggagaacagggtgttccggtcaagaaggatctcaaattctttatcaccacttcaccgttcattgagatccgtggctacaccaaccctcggggcgccatccgctgggatcagcgttactttacctcgactgtccttatctcgaaatccatcgcggctgcaaacccctcacctcgacttgatccagagagtgacggcaacgtcatctacttctacctcgagaaagcgtggcatagggcagtctgtcggaagcacagtctccgcgcaggcatcagcgacgaacttctctccggaactgcatcattcgccaccagaccctcgtcagaaagggggatccatccaatgcacagggcgatagagatggagcagagggcatacgatcaggcggcacgggctgatgacttcgttcccactgaaggctctgcaaaggccgacagggattcggagctcgcggaacagtccagacaggcatgggccgacagtgaacagcttcctccgacccgcacatccagcgtgcgcgtggacgatggctgggacgacgtccagccggcacctgtggatcctgcgacaggtatcccatga

SEQ ID NO: 515788 - DNA, 1116 bp, Stenotrophomonas maltophilia
atgacggcagagccaacgtcattcgagcgcgatcttgatcgcatcacgccaagactcatcggggttgtcgggcatcgcaacttcatcgcgacagaagtgttccttagaacgttctgcgagaacatcggcggaggaaatatcattgcgatcattggcccatcaaactgtgggaagtctcttcttcttctgaggctagccaagcacctccgagaggttgtcttcaaagcggcaaagccagagtcaacacccatcattggtgctttcgtcctgccttctaatgattctcgcgtaacgccgaagtacgtgattcagatgctgctcggtgatgctcgccatcctctttacgatccggtgaagctagagcagtcgcgccatcgcggaagtgctggatccaagactgaggccgatcacctcaagctgctcaggaacctgttctccatcagcaggatcgaattcgtactgctggatgacgcacagagcattgcacgcacgaagaacgaggagttcggagccacgcttctggaggccctgaaagtactgtcagggcccggacagaacctcgtgctcaccgggggatatgagctacttggtccactgctagcccacagagcacacctggccgcgagagtcacgattgtccatctggccccctatgagggcgaggccgactatggcgcgtggcagagcatcatcaaagctatcgagaaggccaacccccatggcatcggcgagagtggcgcactgagagcctgcagtcgcgaactctacatccaatgccatggatgcattggtgttctggacaaacgtctccagcaggtggttgcgtacgcagccgcctgtaacgaaagcatcaccactaacatgattcgcgccgtcaagccggtgcaggccgaatggtccactatcgcgaaggacatcgagcttggcaaggccgcccttgctcaggtttccgatgtgatcacgcccggagcacctcacatcgactcgaaccgagaaggcggccgctcctcagagcgcactgagggcacgaaaagcagcaccagcccagcacttaagaagcgacgcgccggtggtcgtccattccagcgaaagcctgcacgagttccaggaggctga

SEQ ID NO: 515789 - DNA, 1293 bp, Stenotrophomonas maltophilia
atgaacaccttcttgctacctgtccaacccatatcatttggaactgtggagaccgagtcgctctcgtctttctactcacgagtggcgattcttcacggatatggcagctcgcagctcctacgagcgctgcggggcgccttcaatccaggtgccgccgccgacggcgagtccaggctctacacgggcaatgggctcaatggcacaggtcaatgggtaaggggagtttcggatctcctggaacggggacttggcagaaccgacctcagcaggctcacgttgttcgcacttccgtcatacctcccaaggacgagccggagcgtgcgtgctggaacaaagaacatcgcgcgtctgcgcacttggtgcgagatgtgcttgttggaagatgccaggcaccatatcgatgcacatgaccggctgatctggagcatcagctatatcgagagatgtccattccatcgcgtgcggctccgcgccagctgtccatcctgtttccagtctcagaggtaccacaacatgaggctcggcctttcccattgctactcatgcgatgcgtcgctcgttggcagtgagactctcattcagccggatctgcttccccattacggagagaaagagtgcctagagctggttgccgccattgcctccggagacatcctaagcgtcgcccccgatgttgtccctcgcttctatcgtacgttggacgcgatgtgtgcccgtttacaccgacttgataggcgcaaagtgaaggacaaagtagtgtctcgcggagtgaaaaactcctctactttgagcaacttgatcgagatctccatgcgacaccaggtctcgatctcgcagcttgcgattgaacctgagcttgctgcgaaggcatcctttggactggttctggcttgcccaggtaaagagattcccttcgaaggacggagctacgacgaaatcatcgacgacgttcgctccctaatggagaggggacttgcctcccccgatggaatccgcattccaacgctcgctgagatctccacactatttcgcctgcgcagcttctccttccgacttgagttcccgaacctcgctcagcgctacataggaaaaattaggcgacaggcgcagatgctgctgcggcgagagacgggcatggcgctcatagagcgtcttgacgcggaaggaaagcttccgtatctcaccgaaggagaagtgcggagcatgctggaggacgagctcgacatgagccatggctcagcccgtacgctgcttagccaatgtaggcggaggcgcgctgcccgagctccttag

SEQ ID NO: 515790 - DNA, 978 bp, Stenotrophomonas maltophilia
atgccccaccttccaggcagcatctcgaagcgcgccttctcggtacttgccaagatcggtgagattagtgaagtttccaagccatcaatcgagctattggatcaggacgagatcctcagcaagagcttcagctttcttgagcttgaaatgcgcggaatgcgcctacttctggcctgctcgcgtggcgggtacaagctggattggatagtagccaggcacttggcctaccgtacatcagggctgtacgacatagtgaccgtttccgctgagaaccttgtggcgacggagaggctggcgctgatgtccgctgggctgtcctacatcatcatagatcgagagatcttcattccagatctgaacgtcaatactgccgaaagaccccccgacacccgacccggtgccaagctatcggtcgcaacacaggccgtgcttacccatgcgctcaacagcggtaagtgccgctatgaggtttccgggacgttagcccaactcgcaattccgctgaaacagctcagttgtgtcagccaagagatagttattgccggaattggtgcagtggatcgcttcggagcaaggtctcatgtcgagatggatgagtgcagcgtcacttgggcgagagtagagccggtgttgtcgactccgattatcgatgttctgcgtgtccgcacgcgctccgtggcgcgcctcggacagatgcgcatcgcgggtgaggccgcactcccttggagggagtgcggccaggacgagcatccgcgtcatctcgcagtacaccaacgtcttctgaggtcaacaagaagaaatctgtcacctgacgaagccgattcattcgccgaagttgagatctggaaccgctgcccagcaaggctgagtccgcattccactcaagttgaccccatctcgctctatctctgcaggcgccgtcacgccacgctagccgaacttggccgactgcggcagatcatcagcgaaagatggtag

SEQ ID NO: 515791 - DNA, 162 bp, Stenotrophomonas maltophilia
atgagtccgattgtgccggagattgcggccaacggcggtgccctcgtggtggaagaagtacgcgcctctgccaacgtcgcatccgacggtccgaaggataccggtcaggacggcccgcatgacccacgctcggcggctctgctcaggacagctgttggctga

SEQ ID NO: 515792 - DNA, 729 bp, Stenotrophomonas maltophilia
ttgaaggaaaacgatcatcaagtatcggccatccctttaaatgaccgactaggcataggagttatgctgtatgcgtacgcaacactgcttggcgcatcctacatattcagctattggagaccctttggatttgacatatttccttatgcgtcggccatcgactatgtaagcgcccccttgaatcgagtgctagtactcatatccgttcccgcactagtttcgctattattattcaggagttgtgaaatcaacaactcaagactaattcgccaagcgtcaattttattgaatgcattttacgcaataggattcacacacgagtactaccttgcaatcaggcttttcattcagtttgatttctactatagaaatgaagagagcgtcttggtaatagctgcaatcctattcgtcgcatcacttgcctttgcgtttcgatccattataaacagaaatgatttattattcggagtcacagcactagtaatgatgcaacttgccctcaccgtatcggcaggctacagagacgggaagacagtgttcaacggcgccgacaatgtgtttatgctagacaataaagaaatttgcgaccccctcgacccgagaggctgggtatatctcggccgatactccgacaaatccttcttcatgaacactattgacaagcgaatctgcataacaaaatcagattcgatcaagctatcctcaaggaaattctcggaaaatctttag

SEQ ID NO: 515793 - DNA, 189 bp, Stenotrophomonas maltophilia
atgctgatgcgcgcgctatcgcaggcgttgcgcgagcaggaacagcgggcgccggtgccggatgtgagcgacgcgctgcagcagcggctgaaggctgaagtgcgcgacagtggcgcgcggtatgtggtggtgcaggtgctgttgttcggcgcgctgctggctgcagcagcctggtacttctggtactga

SEQ ID NO: 515794 - DNA, 153 bp, Stenotrophomonas maltophilia
gtgggcctgcactacctggaggatttcgatctggtcgagatcgagcgggtggccggactggcgcgcggtaccatcaagagctacctgtaccgcgcacggcagaccctgacgcaggagttgacgcgacgcgccaccgccggagagctgctgtga

SEQ ID NO: 515795 - DNA, 1161 bp, Stenotrophomonas maltophilia
ttgggtcaattctttacgccaccagttttcgctgatcgcctgatcgccaatgttggggaagctatgaacgcggcgccgcgcatccttgatcttggcgctggacatggcgccctcacgtccgctgcgtttcgtgcacgacctgcttcatctgctcagatggtggaaattgacccgcagcgagttcttgaactcgagcacttgagtcaaggtcggtggcgcgtggttgaagctgacgcccttcagcttccaacagagagatttgatcccacggatcttgttctctccaacccaccattcggacacagcaggctagacaaagaggcaattgcattgatttgtcgaggaggactcgtgcctccgtctgtgggcggctggatgaggacagacgcggtatttgttgcaaaagcctggtccctaatcaagcctggcgcggctgtcggcttcatcacagccagccccattatgactgatccgagttttcgaaactttcgcgcgcatcttttgactcggctgcggggtgccatagcgacaagactgcccagtgccaccttccctggcgtcgaagtcagtgcattcgcgctaaccggccaaagagctgtgagtcgcaaccgcggggtcgttctgcagagcgtagatgtaaatggtgaagtcgagcgtgagatcgaagtgtcgattggtgacgctatcaatagcctggatataaattaccatttagcactgaaggacctccgcctcgaatccaggcacgcactaaagacacttcgatcagtaggctgtacggtccgccggggaagtcgatcacaggctgagtacagaaagctaggactgcaagcatttcacacatcaagctttgattcgcctcggacaggtgtcaccttaaggggcgcgcgctccggctacaacgtcgctgcagtgggagacattctcgtcgcccgcgttggtactcgctgcctagatagacacgcccaagtggtcaagggcgcaggactttttacagactgtgtgtacagattagctgcccccgaaaggcatcgatctgaagtttggaaaacgctatccagcggttttggcatagagtggaggctcgccaatgcgcagggcagctgtgctaagtacattactgtcgaggctttgttgggaatgccgattaactggcgctag

SEQ ID NO: 515796 - DNA, 1968 bp, Stenotrophomonas maltophilia
atgcagcccatccctgaggctttttctaagaatcgcagtgaagagcatgccgacgatcactgggcctctttcatcatcccgccgttctacgacacgctcactatcaaacagcagacgaagtcattcgtgatcgttgggggccgtgggtgtggcaaaacatctctcctgaaatatctgtgttacccaagtcaactatcggtacggcgcccgacgttagacgagaacgctctcacacacattggactgtactggcgcgcagacacaaacttcctaaactccttcgccggaggaggggttgacgagaagacttggcgatctgccttcgagcatcttctcgcttgcgaactaggtgtcgaggttgcccgagcggttcttctcctaaacgctagtgggcgagaatccagctttggaggtttggatcgcgtcgatctgagttcattgcaggactttgatccagagttgggggctagccttcgtggattgatcgattcgctggtgcagcgaaagagaaagctcgccacgtggataaataacctcgaaagtttctcccggccgctcatgctgccggggacacagtttttgttgcagctggttagcctgttgagagatcagcttccatatctcgaaaattccacgtttgcggttttcgtggacgagtacgagaacatgcggatagagcagcagaggttgataaacggccttctgaagcatggaaagaatcctcttcttttcaatatagcaatgaaaagaaatgcttggcttactcgcgagaccttggggaatgaatcaattgaggccgtgagtgattacaatgaaattgatattgaggcgaagctctcaagtggatttgatcgcttcgctgctgagttgctccttttccgtctagcagagcatagaccggacctcgccgcacttctcccaatttcctcagaggtattgagggataccgaaagactctctgcaagatatggtgcttcttcggacgattatgggcgaagtgttgtgtccgcggctgagaagatgcttcccagggtcaatgaggcagaggccgcagcaagaatcatgtctaccccgcaacttaggtctgtactggtggatagagtgacagaggcccttgcctcacgtggcagtcggctgagtccagatgcttttgtggacgacatgcaccccgaggcatctgtcgtcattcccgcgctgttgtgtcgcgaacgagagcagcccgaaaaaattcttgcagagcttaggcaacttcaggctgaggggactggccgccttgcgtcaggaagtgaccttatctcgaataatttgtttgggtgtgtaaaccagatctacataggtaagcggaactccatactgttctctgggtttgactcagttgtcctcattgcaaagcacaatattcgacatttgcttgaactggtgcataggatctttctgaaataccacgaggaacagccccgggacgactcttcattgccagtggtcgatgcggaaatccaagcggcggctatgcgagaggctagtgaggcagttctaaggaaggttaaagggcggggaacctacgggcctcagctccactcacttgttgaaacgctaggctctatattccgcgagcggcatcggcagagacgtcagagtgaggctgagaccaatcacttcaccgtgtccacaggcgtgttgactgaaagcttgtcaatctaccttgctgaggccgagaagtggtccgttctctacgctgttcctcagaccaagatgaaggatccaggcgtttacggcgtggactacgtgccaaatccgatcttttcgccatattttcaaatatcgtatagaaaaaagcggagcatgaagtttagttttgagcagatgctcgtgatgtttgaaggtccgcaggaggcccgggcgttgctggtgaaagagctgggtgcgcggggggattattcgataggcgatcttttcgaaggagcgtga

SEQ ID NO: 515797 - DNA, 873 bp, Stenotrophomonas maltophilia
ttgatagttccagagcattccgagcagatagttcaatctatttacgataggactaaacagctatgtgccttgaacctcttgccgattcagtcgaatcgctttgagggctggaaaaagcagttcgtgacgagcgaggagagatttttttcggccgtcgtcctgaaacagttgatttttcgaactgatgagcagttcgacgcctcaatagcgtcactgttctacggcccactgaacagagcgtgctacccgacggagcatgatggtcgtcttgtttctgcattgacgcagcgcaagagtggcgatacctatctcgttcctgtcttgagggacagtgacccgccaactaaatctgggccactcgtgctccggagagtccaaaagtcactagccctagccgcagtgcacttttgttggccctggatggtgcctagtggtgccaagacaattatttttatagacgatatcctgggctcaggaacgcagttcaataaattcttaaagcgctgggagtttgagaagcggatcggggttaatcttatatatgcgcccgcagtagctcatgaaacaggcatcgatgctgtgagtaaaagctcgccctcggtaaaagtcatgactgcggaaaaattgggtgtcagtcacggattcttctcagagcacgtctgggcccgaatggaaggcgatattcttgcggctgacgccctcgcttggtatttaaactttgctgctagtagaaaattaatcccgtcgataggcactctaggttccggtgatctagccctcaccattggctttgagcacggtacaccgaacaactcgctacccttgctttggtacggggcgggtggtgcatgggtcccacttttggagcgatag

SEQ ID NO: 515798 - DNA, 1119 bp, Stenotrophomonas maltophilia
atgcgcttgctggctcttctccctgcactgctgctgttcgccgcgctgccagccggcgccgacgcgttgcagtgtggcgaataccgcagcgccgatggcggcatggcgctggtgttcaccacccccagcagcggctaccaccacgctgacggcagcgagcctcagccgctgtggattgatcgcagtgcggcgcagacgcgcctggtcatgctcgacgatggcgtggcggagccgatccggatcagtgccggtggccagcgcatcgaggacgacggggtggtgacctacaccctgcgccagtcccgtgcctgcaccgtcgagcccagcacgatggacggcagctgtcgcgccgccggcagccactgcattgcgcagctgcccacggcctctcccggccaggcccagcgcgcgtgcggcgaaggcgttggcgcgggctgctcggcgctgttgcgacaactgcgcgatggcaacgccgcagccgctggtgacaccggcgccgccctcttcgagcgcccgtccgcctgccgcgaacacacgcccgagcatgacccgcaggcctgcgaggcgctgaccggtgatgcgctggccaccgcgatgcagcgggtgggtgaacgcctgcaacaggaagacgaagacgcactggattcaccgcttccggccgctgcacgcgatcgtctgcagcagctgtgcctgcagcaccgcagtggtcgcttctgcgtcgaagtggccgaacagcagttgatcgcgctggaacccgcgttggcggtgcaggccctgcaggtggtctgcgatgcaggccgcatcagtgcctgcgaacgcatcgcaccgctgcgcgatctcggcgcggacctgcgcctcgtcccggcccagcaggtgccgtgcggccgctatcaggccgacggtggcgtgatcgacaggctcgacttcggcgatggcgcgcgtggccgtctgcatgacggcgcgatccacctgcggcagaacggcgaaaaccttgtgctgcgtcagctcggcaatggcgacctgcttggtatggatgcgcagacgggatatcagcgttaccagccggtgcccggcacggcacaatgcacgcccccgcgcgagggccgtggttcgccgtag

SEQ ID NO: 515799 - DNA, 1215 bp, Stenotrophomonas maltophilia
atgcgactgctggccctgacctatggaaccgaaggcgacacccggccgctggtgatgctgtgccatgggctgcgccaggccggccacgaggtgctgctgctggccgaacagggaacgttgggcagcgcgcgcgcgctgggggtgccgcacgcggcgctggaaggcgacatccacgacgaagtggtggcccttgtggcacgcggcaacaacctggccgccgcgtcgcgcggcctggcgcggatggccggtcgccacgtgccgacctggatgacgcaggccgatgcggccgccgccggctgcgatgccgtgctgaccggcggccttgccacgcttgtcggcctcagcgtggctgagcggcacggcctgccgggcatcggcaccggcatgattccgctgacgccgacgcgcgacttcgcatcgccctttctgccgccgatgccgctgccgggcgtcctgcgccgggccagttacgggctggtcaaccaggcggtgtggcgcaccttccgcgggccgatcaacgccgcgcgcgccgcactggggcaaccgccgcgccgcacgctgtggaccggcctgccgatgctgtacggcatttccccgcagctgctgccgccgcctgccgactggccgaccgatcatgtggtgtgcgggcaatggcggatgccggaacaaccttggtcgccgcccgccgacctgcaggccttcctcgatgccgggcccgagccggtctatctcggcttcggcagcatgaccggcttcgaccgcgagcgcgtgctgtcggccctgctgcaggcgttggcgccacgccgcgtgctgctgtttccgggctgggccggactaccgtcgggtgctttgccagcgaacgtgttcgtggtcggcccgaccccgcatgaagcactgttgccacgctgcgcgctggccatccaccatggcggcagcggcaccacgcattcggcctgccgcgccggcattccctcgctggtgatgccgttcgccgccgatcagttcttctgggcgcggcgcctgcagacgctaggggtggcgactgcgccgttgtcacccaagcggttggatgcgggagtcctggcggcggccatcaggttcgccgaggacggcgcgacgcgtgcgcgtgcggttgcactgggcgtagcaatggcgagcgaggatggcgtggccacgggcgtggcgatgatcgagcgctggctgcagccggcgtaa

SEQ ID NO: 515800 - DNA, 147 bp, Stenotrophomonas maltophilia
atgaagatggtgtccaaggttgcgttcgccttttggggaagcacgttgacgggtacgctgatgggtgagaatttcagcgaaggtatgtcgagcatggcactgcagcaaggcggcatgggcctgatcctgaccatgctgattctctga

SEQ ID NO: 515801 - DNA, 405 bp, Stenotrophomonas maltophilia
atgcggaacattgagatccccgttgcacaggttcacaacgtcactgccgtggctatcgaatcgagcaggcccgcttctggaatgagcacaccttatccaaacctgaaacctgttctcgttgagctgcgactggacgaagtggattcgcgcggcggcgctgttcccgagttgatcgcctccaccgcgcgccccatggcgctctccatgagtccccgactcacgtggtacagcttcgtcttgaatgacagaaccatgacccggatccgtcccggcactcggacgaactgcacgatctcattcatcaaccatgacggtgcgaaggaggcattcccctatggcacattggccgccttcggagacggatcgtcgacaagagggttgatccgcatcatccggtttgattga

SEQ ID NO: 515802 - DNA, 936 bp, Stenotrophomonas maltophilia
atggcgctgcagtcacagcaggccaatgcgagctgtgtgaggttgaatccgggtgatcaggatctgacggcgtcgttcaccatgccgaatgtagaccggccggatacgcgttacagagtagtcaatgttggacggatctctggcggcttcgaatgcaccgcaggacaaacggcattcaacattgatgcacctctcacgggtctcacctatgtgcgggatgtccagctggacagctacctctacaaggtctacagcacaggaccaagatcgccactgattggcttcagcttcagtgtgaggagggctgggacgacctttggcggtccgcccatcgaactcggcgttcgcaaccgacaccccggggagcctttgaccaagacggaagctatggacgtagacgtctacatggtgattttcttccgcggcggcgccatggagagcattcccatgaccgatctgggcaccatcacctcgtcggtcgagagcgaccccagccaatcgatgcagcaccacgtgcggctggagatcaccgtcccccccgtcacctgcagcctcgccaatgcgtcccacaccctcgacgacgtgctcgccaacgagctagccgccagcggcagcaacgcgaaggaatccagcttcgacgtcacgatgaactgcccgatggataacatcgacgtgcagctgtcgttggccgatgccaatgatcctggcagcagcaacggccagctcgcacctgcccccggcaccaccgccggcggcgtgcaggtgcagctgctacgcggtggccagccggtgcagttcggccaggcgtggtcgcacggctggtccagcaaggggcaacaggctattccgttcagcgcgcgctatctgcgtacagccgatccgttggtgccgggcgacgtcaaaggcgaggcggtgctgaccgctgactaccgatga

SEQ ID NO: 515803 - DNA, 981 bp, Stenotrophomonas maltophilia
atgaacgttgcattcaagcgaaagccaatggcaaagaacacgcgattgcgtgcagcggcactggtgattggcctttcactgctgacggtgtccgcgatggtccaggcgtgcacaggtttcagcaacactccaaggcatcgggaatacacccatgacacctacccggagcagcgtggccgatggttcagagggagcaatggcccctcaacattcaataactgcacggccgacttcgatctgaatctgcgcctggacgcaccggggctgacctatgtcggcaccctcgactatctgggcatgacctttccggcttacgagttcgggccggaatctcccttggtgatcttcacctttgagcaggttgttggctgggagcgcgttccgcttgaagtgggacgcgaacagacctatcccatccagatacagacgccgatgaatgcgaacgtcgatttccggcccgagttcttctccagaggtgggcggatgcgtacgtatacgtttgacgtgtccttgacctggacttccccgcagcatccggcaattgatggtgcctacaacagctcctacaccctgcactttcctgtggcgacgtgtccgttgcaggacagcgacgagacgctggacgacgtgcagactgcagagctgtccactcctggtgggacagccaaggaaaagcgggtggcgattcgcatgaactgcggcgtcgatccgccgcgcgcccggatgacgttgagtgacgccggcgatgcgggcaacaccgggagccagctgacgcccacagccgattccgatgctgaaggcgtgcgcgtgcagctgctgcgcaatggcaccgaagtgcagttcggccagacctgggacttcgagcctggcgtcggcggcgtgcacgatcacgccttcaccgcgcgctacatccgcaccagcgaggcactggtgcctggtctgatcaagggagaggcggtgctcaacgtcgactactggtaa

SEQ ID NO: 515804 - DNA, 2400 bp, Stenotrophomonas maltophilia
atgcaccttcatcctgcccgtcccctgtcgctgtgcccgttggcccgcagcctgctgctggcgctttccacgctctccactggcgtcgcattggcgggcgatctcgatggtcagtccgccgaggtcgtcgcgggtgatccggtggagtcctggacactgaagaatggctcgacgctggtcggtcgcgatgcggcgatgaactcgatctacgccgaagacagttctaccatcacgctgcaaggcggtacggtgacaacgggcccgtccagcaatacttccgtcacgctggtaggtgatgccaccctgaccgcagttggcacccatttccgcggcagcggcatccacctgaccggcggcaataccgtggcccgtctcaccggcggctccatcatcgtgaccgcagccgacatgaccgccttcggcggccgacccgtcggcgtcgatcttgcgagcgggttcgtcagcgcggggactcggaacccacatgcagtgctcgatgccatgcaaattctggtggaggaccacccgtcggcaacccagccctacaacagcggcctgggcgttcgcctgcagttcggcacgatggacatcctcaacggatcgcatgtgaccggtgccaacgtgggcgcgatgctgtggggcgagctcaatccggcgggtgcggtgacgctcaacgttgatgactccacgttggtatcccagcgcagcgcggccatccaggtcatgccgctggaagacaacgactacaacatcacgatccgcaacgacgccaagctgtcgggcgctgatggcaacctgctgctggtcaggagtgaattcggccctctcgctgcgcgcaccgacgtcaacttcaccgttgatgattccaggctggccggcaacgtgaccttcgacccgaccacggtcaccaatggcacgctggacgtgatcctgcgcaacaaggcccagatcgacggccgcttcatcaacgtcaccaccgccagcatcgacagcgatgccacctggctgatgaccggcgacagcagcgtgggccatctcaccctgggcgcgggcggtaccgtggcgctgggcaatggcagcagcttcaacacgctcagcctggacgagttcaccggcaacggcggcacgctgctgttcaatacccagctgggtgacgacacctcgctgaccgataagctggtcatcgctggcgatgccaatggccaggccaatgtgcgcgtgctcaatgccggcggtgccggtgccaagaccgatcgcggcatcgagctgatcgatatcggcggcacctccaacgcgcagttcgatctggtcggccgcgctgtgggcggtcagtacgagtacttcctggtgaaggatgccaacggcaactggtacctgcgctcggagctggcaaccacgccggacccgtgcctggctgacccgtcgctgccgcagtgcaagccgatcattgatccggttgaccccattgacccgatcaacccgatcccggtgctacgcccggaaaccggcgcgtatctggccaaccagttcgcgctggaccagatgctgcgccacagctaccgcgaccgccagggcggcgccgctgcggcggatggcatccgtggctgggcccgcgttgacgccacacagagcaagctgggtgcggtggatgaccagctcgacctgcgcgtggaccgttcgcgcctgcagctgggtgcggacatcggcgtgttcgatggcggccgtggccgcgtcggcgtaatgggcaccgccgcacgcagcagcgccacctcgcgttcggacgtgaccggcttcagtgcacgcggcaaggtggaaggtggcgcgctgggcgtgtacggcaactgggccaatgatgcaatgtacgtggatgccagcgtgcagcgtggccagttccgcaaccgtgtacagggcgaaggcctggccgaagagcgttacgactcggatctgtggcagtcgtcgctggaagccggttaccgcatcggtgttggcgcaatcggcagcaccgcgctgagcctgcagccggagctgcagctggtctacaccgacgccaataccgatcgccacgaagaaggcaacggcaccgtggtgcgcagcctgggcgacagtggtctgtctggccgtgttggcctgcgcctgcagggtgaaggccacagcgctgccggcgcctcggtcagcccgtacctggtagcaaactggtaccgcgatggcgccagcaacggcgtggcctttgacgatgaagcgttgaaggccagcgtaccgcgcaaccgctacgagttgaatgccggtgcacgcgtggacttccgttcgagcctgagtgcctggggtggcttgggcgtgatgcgcggtgacagtgggtatcgcgaggccaacgccaacctgtctgtggcgtacagctggtaa

SEQ ID NO: 515805 - DNA, 3216 bp, Stenotrophomonas maltophilia
atgcgcactgcttccccgcatcaccatcccctcgcaatcgccctggcgggcgcgctgttcgtctcacctgccgtccaggctcagcaggtggtggctgatggcacccatgagaatcccgcgggcggcagctattccaccaccggtgtcgacgcgcacgcgttccatgtactcaacggcggccgcatcgcggccaacgatgcggtcgtgctggccaccgagggaaatggggctgctggcatccgcgtggaaggcaccggcagcagcctgcatgttgccgatgccaccatcaccacccgtggcgacaatgcagcaggcgtgtccatttccggcgctgacggtgcgatccagatcgccagggtcagcatcgagacacagggttcagccagtcacggcatgaacgttgtgggttccgctgccagcgttggccacgcagacattctcacccgtggcaatggcgcgcacggcgtgatggtcagtggcggcggtgttttggagttgggcggcggtgcgatcaccgtggaaggaagcaatgccaacgcggtgatggtcagtggtgcgggcagtacggcacggatcgcagggagcaccctggtcagccgcggcgcggggaactacgtcgccctggccaactcgggcgccgccctgcacctgcaggacacacaggttgtccatgagggtgcaggtcttggcgtcgccatccacgcaggcagtaccggcgagctgcgcaatgtgcacatcacggtgcagggcttggggaccggtctggcaggtggcggcgacgtcgccttgcttggaggttccgttaccgcagttgcagcagggagcacggccgtcgaagcccacggtgggagcatgcgactggaatcggtggatgttcgcggtgactatggcatcagcgcgattggtggtgcgcggctggagctgacgggcagtcgtgtgcatgcggcgaacggggcgctgcggctctcagggctggggactaccgcccatgtcgagggatccgaactgctgggtgatggaggggcggccacgattgcagtttacgactcggcaacgttggaactcctgcgcagtgtggtccgtagcgaaggtgacaatcgggttggcatcgacaatcgcggcggtgcggtgacgctggacggcgcggaggtccacaccacgggcgcgtccagccatgcgctgtacgcggaactcagcggcacggtacgccctcgcatcgatgcccttgatacgttgctgagcactaccggcgacaacgccataggggccgtggcacgaaagggcggcagcatcgatctggtggacagcaccgtgctgaccaccggtgagggcgcgcatggtgtgctctccggtggtgtgggcgaaatgacgctggccaatacccacgtgcgcaccgaaggtgaaggtgcctgggcggcggtgatcaacgacaacggccgcatgagcatcgatggtggctcgctggtaagtgcccagcacggtggcatctggttgcgcagcagccgcgatccggcgctgacgttgagtaacggcgtggtggtgtccggtggcaatggcatcggcctggcgctggatgctgccgtcgccggccgcttcgacgtggcgctggaagggggctctcagctgcacggcgatatcgtcatcacgcccgaggacgaagacgccggactggtgccgcagtccgatgtacacgtgcgcctggcggatggcgcgctgtggcaggggtcttccaatctggtgcagacgcttgtgcttgaacgcggcagccaatggacgttgaccggcgatgcgaccgtggacgagttgcaggcgcgcgacagcgtggtggcgttgtccgatggcagcggccgcttcaatacgctcacggtggaaggtgacctgcacagcgagggcgccaccttcctgttccagggcgcgctggctggcgatgattcggccatcgaccgcctgcacgtgcgcggtgatacttatggtgatgccctgattgcggtgaggaacatcggcggtgtgggggcgcccactgtggatggcatccagctgatcgaagtggaccgcgcatcgctggccagctatgcgctgaccgggcgtgcggtgggcggttcgtacgagtacttcctgttccagggcggtctgggcgatcccagcgatggtcattggtatctgcgctcgcagtggtttgacgtctgcgaagacgacccgggtgcgccgggttgcgtggtgaacccaggcccgggtccggatccgggtgaaggcggtgaaggcgggggcggcggcggaatcgtcgatccgatccggccgccgccggtgctgcgcccggaagccggtgcctatctggcgaaccagtccgccgcagtgaacatgttcgcgcaccggatgcatgatcgcaccggcaccctcacgggtgagcgcactgcatgggcacgcgtgggtcgtagcaatgcggacttcactgccgttggtgggcagctgtccgtggacggcaatacgtcggtgcttcagattggcagtgacctgctgcgcaagggcaatgctgcgttcggcgtgatgctgggcaatggtcgtgccgacaaccgtgtcgtttcggatctgaccggctacagcgccaccggccgcgtgcgtggtaccgccctgggtgtgtacggcacctggttgcaggatgcggaaggcaccggcggtgcctatgtggatgcgaccatgcagttcggccgcttcgacaaccgtgtgcagggtatcggcctggagccggagcactatgatgcgcgcgtggccactgcgtcactggaaatgggccataccttcaatgtgtggcagggtgctgccagttcgctctacgtgcagccgcagctgcagctgacgtatgcggactaccgtgcggatcgccacgtggagagcaatggcacggtgatcgaccacgccgatgccggtggcctgagcgggcgcctgggcgtgcgcgtgttcggtcatggcactgcagccggcaacaccgtgcagccgtacctgggcgtgaactggctgcgtggcagcggcaccagcacgttgcagttcaacgatgacacgctgggcgcggatgtgccgcgcaatcgctatgaaatgcaggccggtgccgagttgaagctgggccagcgctggggcgcatggggcgggctgagtgtacagcgcggtgaccatggctaccgcaacgtgggtggccaggtgggcgtgcgcatggcctggtaa

SEQ ID NO: 515806 - DNA, 486 bp, Stenotrophomonas maltophilia
atgaaatactgcgtctgtctgcgcgccctcctggccagttccccgctgctcgccgcggtgctgcccgcaggcgcccgcgcggcggatggctatgttcctgacgcggttcagaccttcgtgctggaaacagtgctggccgacgaggtgcgcgccttccacgaaggccgcgagacctatctggttccggcaggcatggcgcgcacgcgtggcgatgttgaggtcctggccgacctgcgtgcggaattcgaccggttctaccagggccaaccgaagccaagaaaggaagtggcgcacatggcgatcctggtcgcacagaccgcgctgctgctgcccgaccggaaggcgtgcagcaccgatcgcgcgcgctgcaacgaagcgatcatgggcgtccgcacacgcgatgacgaggcaagcctgcaggccactctgcgtgctttccaggacgccgggctggacctgaacacctttagtgggccgacgtcctga

SEQ ID NO: 515807 - DNA, 693 bp, Stenotrophomonas maltophilia
atgccatggcagaagatcggcgaacttcctgaccagcgattcgtcggcccctacggcatcgaattctggcgtatccacaaaggccaggtcttccaccagggcgggctgctgcgcaagcccgacgcggccagtttcgagctcatgccggcgcaccacttcatcggccgcgatgcacacgcggtctaccatgcctggacccggcagacctccatcgaccgcgacagctttcgtcaatctggcgcgcactggctggacaaccacgccgtctacttcgagcacgagacctcgctgaaggcgttggccggggcagattgcacgacgttccgcgaactaggcggcggctacgggggcgacgaccatggcggctggtactgcgggcggcggatgagcactgcctgcgtggggatctgctgcaggtggtggcggaggacccgctgttcgcccctgatgacagcaatgtctactgcgatggcaagccgctgcccggggggattccgcgtgctggtggctgctgggcggacacttctcgggcgatggccgccgggtctactacccggagcggaagctgccgaggtggatgtggcgtcgtggcggaggctggaggggagctggtcgcgggatgcgactcaggtgttccgcatgcatctggttgagagggatgctggggtgcgggcgttgtatggggttgagtga

SEQ ID NO: 515808 - DNA, 600 bp, Stenotrophomonas maltophilia
gtggatgcgctgaccctgccgcaacgcatcaccctgcttcgccagcagctgcccgcgtccatccgtatctgcaggcaggcactgatggaatcgggcggggatcttgccgtggcgcatgcctggatcgtgcgccggctggttgccgagtacaggcagcgcacgggcgccccggtggatgaggccgccgccgacctgcagcggtgcggccatgatgtcgagcgcgcgctggtgctgtggcagcgccgctatccagcaccgctgctgcctcccctggagcggatcgcgcaggggcatccgctggcagcagagctcccagcacaggacgacctgcgccggttcgtgcatgtcctgccggatgcctacggtgccttcgaggcgcgtcttgtcacccacgccgcacgcttcaccgaaaccgcctatggcttcgactatgacctggccatgcaggatccgctgacgcgggtcgagcgccggtttgccgatggcatggcggcactcgccatcctcctgcagcagcacggcatcgagcccgcagagctgcgcgacgtggatgattttgacagctgcctgctgcacagcccgatcgacgcctatctctga

SEQ ID NO: 515809 - DNA, 1497 bp, Stenotrophomonas maltophilia
atgtcgaaggaacaagtattagcagcaatggatcttggagcaagcgtggccgagcatgatcggctcctttcccaatgtttcattagccacccgattctttttgagctcgtaacagatcgaaaagatgtggtgttgggagcaaagggtgccggaaaatcctcactttggaaggaggttaccgggaatcagcagcgatacgagcaaattaaagacgttaaatttgggctggtcacaaatcctgctggagatcccgagtttcgagacgttttagcagctattaggaaggaggattttcccgatgatgatgagctgcgggtcgcatggcgtctctacttgctcgcgcagttttggcgaaattgcagagaactaattcctgaatcagaccaaaaggctgctgttcaaaagtcgatatcaaagtatgggattgtcctcgatgatggcagtggactgaagcaagcttttgcttttgctgttgcgaaggctcgcgcgctaaagaacgtggatctcaaatggacttccggagtttcgtttgagttcgatcacaatcttttggtggcgggagggagtgcggcttccattccctttaacgaaattataagttctatcaatgatctcgtcgcttctgcaaatagaagaatctggcttgttcttgatcgacttgatgaaattgtacttggtgatgaggctagagaaaatgctgtgcttcgggggcttttgcttgcttacagagatttgagcgactggcagaatcttaaagtaaaaatattcctgcgagacgatgtctttgatcgggtaacctccatggggggctttcctgcattgacccatgttcgcagcaaaacggccggtccgattaagtgggaagtgcaagatcttttacatttgcttgtgcgcaggttggtggaaaatagcacggtggccggatttgctcaggctgatgcaaattttgttcagtctcagcggaatagggagcttgtattctatcggctcttccccgagaagatcgataagggtcgtgctgccgacgcaattgactggatcgtggatcggcttcgagacggtaatcgagtggcgactccgcgcgatctaattaatgcggttgatgcggcacgcacttatcagttggaagattttaatagagagccgtctgcctcgatggatggtccgttgctctacgaggactcgatcagaaagtctgtaagaaaaatatccaaggacaatctcgagactcgaatctatgcggagtatcctgatctgcggagtgcgatcgaaaagtttaggggcgggaaggcggatcacaacgaggtgactctcgcggctctcctgggaaagggttgggcgaatatattgagtcagttgcttcgaattggtttcatgtacaagcgaacgcgttctggcgttgatatgtggactattccattcttcttcagttttggtttggatgtgacgcgaggggccgcatttgaaatggcgggatcgaatgatgacgaagattaa

SEQ ID NO: 515810 - DNA, 435 bp, Stenotrophomonas maltophilia
atgccggtggaagggcgcagcaccttggcgccgctgggcagcagcgacatcgccggcgcggtcggctacatgcgcaatccgctggagaagcacaccgcgctcgccgtagcgacgaggatgggttcggcggcgatcgcgaggctctccctcgctgcctaccgtcaggtggccaaggacgtgcgttcaatgcgaccgcggccgttggacctcggcaagcccgccgatcgctggcgcctgcgcctggtgatctacgacgcagcccacgaactggtgtggccggagcggcgccagccgttcgtcggtctggccaagtcagccaagatgcgcaagggcaactacatcaaggcccacaagtgcgccagcgcagtcctgctggaggcgctccatagtggcaggcggggatttcgcagggcgctgtggaacgccgagagctag

SEQ ID NO: 515811 - DNA, 498 bp, Stenotrophomonas maltophilia
atggttgagacgtttctcggcttgacggatttgcagatgaaggcggtgactgcctttggtcagttggccctcgctacgacagtggcttatatcgccttccagcagtggaagacagcacgtcacaaactgaaactcgacatgttcgatcgccgattcgcagcccacgaggagctccggcacctcgcaacgtcgtttcgaggcaaacggcagatgcaagatgcggacgcaatcttggcgctggagcccacgttccgctatctgttcgggcaacccagcagcattttggtgcggcacatggcaggagttgcgatgcgcgccgctgcgcagacgagcgccgttgagactccgattggcctactcgggcgagatccagatcccgtaagccttgagcgatggaaggaatcacaagacaaaatcaccgcactgatgaccgagtttcacacactccatacccaggccaccgcagccactgccgaccatctcaccctcaagcactga

SEQ ID NO: 515812 - DNA, 708 bp, Stenotrophomonas maltophilia
atgggatgctgggcactggagatcaattggccagtagtgacacaggggttcggtgcagtcgcgcagggagttggcgcgttggtgctcggtggcgttggcgtgtggggtctttcaagctggaaaacgcaagcgaagctggggaagcagcaagcggttgccgaagaaggactaacgttggcctaccgggtgctagacgcgattgaggtcatacagaagccgagcatgtggcaggaggagttggacctggttgagcggcgtccagatgagagcgatgagcactactttgctcgagctttctacgctgtggttgagctgcgatccgcgcagtacacagagcttgttgcacaacttgctgcgatgcatttcagagttcaggcgctccttggggaacagccgtctcaggcgctgaaagacgtgatggatggttatgacaaggtcctgaagaatgcacgttcagctgggcgagcagtcgagagaattcgcaagcttgaactcgcactagagacggagcaggactccagaaagaagatgatgctgggacttgcatcggcaagactcaaaaccctcgaagagtttttctggccagactccgactaccaagatgtgcttgagactgatgagtatcatccagtccgagatcccgatgtggcgggaatacgtcggaatgttgaaggacaactacagcagttcgctaggcttggtgattag

SEQ ID NO: 515813 - DNA, 768 bp, Stenotrophomonas maltophilia
atggacgcttgtcgtagcctcttgtggggatcatatttcgaaggaaactttccagctttcccgtgcccgacatgtggaatcggaattctcagggcgaggccggagacgctccagaaatttgaagccgaatactcgaaggctcaggctggtgaggattggtgggacccttctgatgaggtttcaaagttcaacttgatgatgatctgtgatcgtcaaatttgtggtgaggtggtggctgtgctgggagacgtcacttggtcgaaaaatcctggcgaagttgcggaagatggcacgcccattggtgatggtgaatgggaatggttcctggatccaaagtgcttcaatccttcgctgtctattgcgagagttcctgagggcgttccagattctgtggctaatagcattcggcgagccagctggagtttttgggccgatcggcgatcctcagcaaatcaccttcgagcggcgctggaatgccttctggatcatttccgagttccgcggaaggcgaagaattctgggcgatatcttagtttggatgctaggattaaatcgtttgaagggggtgatgctgatcataaggcgatctttaaagcgttgcgaatagttgggaatctcggttctcatggtagcgccgtagagcgagacgccttgttggattgctttgagttgtttgagtacgtgctcgacgcgttcttcggtaataggaaggagaaagcggcggcattggcagagaagctgattggtagtggaggtagggaggcgtga

SEQ ID NO: 515814 - DNA, 918 bp, Stenotrophomonas maltophilia
atgggagctgggttgcgacgctcgatcgtcaccggtgtggaccaggtggtccgtcgcgccgatgcagcagctacgaccaaggccgcgccggcgccgagctctgggtcaccaggcacgaggcccggctcagggaagacgtcgccaagatcacgacctggcgggcggctgtgcgggccaacaggctggccagagcaaacactgagccaccgttcgggtggatggggtaggtcctcctgcgcctgcgatttgaagaattgcgcgattcgtcaaatcgttcaggcacgatatgcactctccatggatgaagggggctcgatgcctattgaaattctgattgcgcctgcggcgccttctgtagagtccgcaggaaacttctggaagtatggtttgccggtagtgtcactgattctcggcatcctgttgaagtgggtgctcgactatgcaattgaacgacgtagagatgctgctcagaggactttgaggctggagcagcgacgcgatttgcttaaaacgcggcgactagatgccgagcgctcgaacttaattgcagtccaagccgctgctgtgaaccttctacaagctggcagggaccttcgagtcgctaggctcaacgccccgcagcccaaggagagttggcaccgagcactggtagcccctgaactggaatctgaggcgcagcgttgtgcagcccaactgttgccactgtctactcggcttcatacgccagatgttgccggtcaggtcaacctgttcctaggcgagttctggaaatcagtgggcgcgtactccgccaaggagtcttggtcactatggcaaggtgctgaggctgaattcgctgcactacagcgattagcgggaaaggcgatcagagatctggaggacgagcgccagcagctcgtggatgcacccgcgcagtga

SEQ ID NO: 515815 - DNA, 1035 bp, Stenotrophomonas maltophilia
ttgggcatcctggcaatgcagatgccgaccgtcgtagccgccgagcccccgcgctcgacggtggaagttggctacagtgcctcgctggacctgttcaacctgctcgacaacctgccggactggctgccgggatacacctccttggcctaccagaaggcgtgggagcggcgcttcggcctggacgatcgggatcgccgcctgcttgccgcctatgcggccttccgccaacgcacgtccctcgtggcacaggatcatgaggcgacggctgcgcctgctgaccggctgttcgccggtgccgatacccgtgacggcgatccctacgccagccatttcctggatgccgcttctttcgacattgccgcggaggctgcgattgcgctccagaaccacagcgatcaggtgctgctgcgccagtactacgcgcgtttcgtcccgcgcgcgcgacagctgttggctgggcggaaaccgttcagtgcgcagcaggcagcgcttgaccggcaactgaagtcggtgcgggtagacgagcttgcgggccagatgaagaccttcttcggcgtggatgcgccgcccaccttccaggtgcgcttcctgtggtggccggaggcggcgcagacccaggcaaagctgcggggcggctacatttttctgttttcgaccttcgatgccgaggaggactgggcgccgatcgtgatgcacgagtacagccacttcctctcggtagggcagccatcgaagcagcgccgggcgctggctgaagcttttgcggggttgtgccctgcggcgctcacgctgcgaaacccattgaatgcccttgaggaacccctggcgatttactgggggcagtatcggtttgagcgactggttcgcgatggcacgctgtcggctgcgtcttcgtggtacatccagccgcatgcggatcgcgccgccaaggccattgcggcagcattcccggcaaccgctcctgcgccgcggctggaggctggcccgttgttgagcgctgcagcatctgtctgtgctggagcaacgccggaatag

SEQ ID NO: 515816 - DNA, 432 bp, Stenotrophomonas maltophilia
atgcagcctgaaatcgctgtaaccgatgcacccagtaccgaggcactggaattgattggcaccggcctggatcagttcaatcttgaggctgctggctatgctgatcggcgcacgctggctgtgctggtcaccgatccggccagtggcaaggtcgtcggcggccttacaggccggacctcgctggggctgtggttcgtggatctgttccatctgccgcctgcataccggggtagcgggcttgggtcgcgtgtactgaaggccgcagaagatgaggcgcgccgccgcggttgccgttccggcgttctgtacaccctcagcttccaggcgccggacttctatgtgaagcaggggtggaccgtgttcggcgaggtgccatgcgatccttccggggcgagcagagtgttcctcagcaaggatctgtcgatggtgtga

SEQ ID NO: 515817 - DNA, 465 bp, Stenotrophomonas maltophilia
atggcattcaatccggaagaagcgcaagaagccttcgaacagtttctgatcatcatggacgatcagattgaatggctgatcgagcaggcgcagcagcgcggcgtcgacctagacggtagcctggagagccttgatcgcctcgaaaccctgtacacgttgatggccgcaacgttatcgaaggacgagcaggctgccttgagagttgtgtttgcacgatatcttggggaaaccgtgtgtcagcatcacggcggcaaatggactctcccactggatgatcccaaggacatcagtttcaacatgccggttatcgtggggcattcatcctgcccgtggctggagttcaatcccatccacacgatgcgagcctattcacttcggcccaagcccggaatgatccaaagcgtcgttgcgcacagtgttgctccacggattctggatcttagcgatctggtggaagaggactga

SEQ ID NO: 515818 - DNA, 231 bp, Stenotrophomonas maltophilia
atgggtaatcacggaaaatccgcagaaagcggcctggcgcgctccgcggcaacgggccgcagaaacgaaaaaggccgcgatgcagggcatcgcggcctttcagggctgacggggaagagcggtcagccgatcttgttgaacaacgacatcgactgcatctgcgagaagatcgtctgcgccgcctgcagtgcggtgctctgcaactggtactggctgagcgcatcggcgtag

SEQ ID NO: 515819 - DNA, 135 bp, Stenotrophomonas maltophilia
atgccaagccggttcgggagtgatcccgggccgggcatggcccgcgccttcgtgccgctaggtggttccggttggatgctgccgccggccagggccggcggcagcatccgcttctacgtctacgtcgatgcgtag

SEQ ID NO: 515820 - DNA, 444 bp, Stenotrophomonas maltophilia
atgcactcagatactgcagccgccatgggcttcgacgacctctacagcggaagtgaggcctttcgtacgcgcttcaacgagatgctggacgcagtgaaagcgctgccagaaggccttcaagagcgtgggcggtcactgatgtatccccagcttcacaacgcttgcgtgatgggggatgtggagctcgtgagggcgcttttagctaccgggctgggcccggacgcgtatacctatacagacgacgaagacgatcagcctcctttggtctggctggcccgtgacttggagctcgacttcgaggtgaagcgtcagatcggcgaggcactgcttacggcgggagcaagcgcggaagagggggagcccgaacgggaagcggacgccataggtgacaaggattttgccgactttcttcgatctaagagcaggcttgaagagatgggctga

SEQ ID NO: 515821 - DNA, 933 bp, Stenotrophomonas maltophilia
atgggaagaactaggctttgggaggatagtgtcgttatcgccctgcgggattttcagtggaggaatgcagtcgaggatgctctgtatcagcgggatgacttggctctcaattgctttaagtctcctcttcctccgggaatgcttaagcatgatggtagggccgagagcaagttgggggatgtctccttaaaaagcggagagcggctttttttgttcgaagtgaagtcgacaaagtcgcaaatttcttcggaatggaggcatagtagagggatgaagtggtcgttcaggcgcttaaatgatcttgcggcggcggtaatcagaaagcctgattcccaggctgccgccaatatgctctccctctccttgagaggacatcacatttgctactggaacgattgtggtgaggaggcggaaatcagtggtggctatgccgttaagggagccttggatgcacagccctacgttgcggcgtgcgtggaggcccagagtctgcaagagcgacttggtggtagtcgtatgagttggtcgcccaaatggggcagagacgtttttaggcgggacatggagtcggctgacaggcgagtcatatcattgtctgatctgattaacaataaggctgttttaaaagttgcgattgccgggatgaatcaggagcagccttgtggtcttgatgcgaaggagtttgcgaagtatgtggccttcctttgcggcacgaaggatggtcagatcggcatccccagtgatgacgaggcgcaggccaggggtgccgaagatgtgcacgtagtcgtcatgtcttcgaaagggacgctgttccgagtggtttcagacactgctcacatggagatgctaattgatggggctttcaggccagggcccgagcgcgaaaggaagcggcgagtcattcgtcgcgggaaaccggaaatgcgccaatag

SEQ ID NO: 515822 - DNA, 555 bp, Stenotrophomonas maltophilia
atgaccaacaagcccaatggtatcgacgtcgccgctcttcaggaatttgccaaaggcgtcgctgaagacgcatccaagcgtaacgcccgcttcaacgtaaagacgaagtgggacggccagacccgttctgtcgccacggtcaaccattactcgatggccggggtgaaacacgagcgccacttcgagattgctgccgatgagccgaccgaactgctcggtcagaactcggctcccaatccgcaggagctgctgatggcagcactcaatgcctgcttgacagtgggctacgtggtgaacgcagcggccatgggcatcaccgtccacagcctggagatcgagacggacggcgaactggacctgcgtggcttcctcggtttggacgaaagcgtcaacccgggctacgacgaggtcacctacgtggtgcgtctgaacacggacgcctcgcgcgagcgcctggaagaactgcacgcggtggtgaccaagacctcggtgaacctggccaacttctccaaggcgatccgcatggtctccaaactggaagtcgtcgaaggctga

SEQ ID NO: 515823 - DNA, 525 bp, Stenotrophomonas maltophilia
atgaccatctatcaaatgaccatctgcggttttgcgcagatgcttcgcgcgctcaaaggccagctggacaaggccgacgcacatgcgctggccatcggctatgacccgcgcaacctgctctcagcgcgcttggcgccggacatgcacccgctgtccaagcagatacagttcgcctgcacccaggcacgcgaagcgggctgccgactcagtggagagccgttgccgtcacttcatgcaccccacgacatggatcaggcgcgtgcgctgatcgatcagacactggaccacttggccgcagtcgacgcagcggtcatcgatgccagcgcctcgcgtgaagtggcaatcgagctggctgacggccttgccttcgacatgaacggaggcgaatacgccgcaaactgggccacgccgcagttctactttcacctgatcaccgcttacagcatcctgcgccacaacggtgtgccgctgggaaaagccgattacgtgccgcacatgttcgcctggatgcgacaaggcggttga

SEQ ID NO: 515824 - DNA, 780 bp, Stenotrophomonas maltophilia
atgccagtcagtgcggttggcgcaaaggcgctcgagttggcgcaacacgagtgctcagctatcgctgcagcgctgtgcccgggcgacggcgtccatgaatccgtgcatggcgcgcgcaaaggcatccggcggctgcgggctttgctgcggcttttcgatgcctccgatctggatctggctacagaggaccaacgcctccgcaggattggaaagggcctctcggccttacgagacagccatgttgtgatcgaatcggcgcgagggatggaaaaaaagtatccagacttgccatggggaacgattctgcgaaggctggatgcccgacgtgagcacgtgctggcagcggagctcgacaaggacccaagctttgcccgccgtcggaaggcagttcagaaggtggctgagctactgagcacgcagccttggcccgaggtgaagagcgatgcgatctgggctggctataagcgcagtgagcgacgtgtcgtgaaggtgcgaaagaaagcggctggctcggacgacgtcgaagtcctccaccgttggcgaagggcggtgcgcaggctgcgtatgcaaatagaagccatgcaggccctcggcgtggatgtttcatctaagaaggcggttgggaaggccaaagtgcttcaccagctcagtgaccgcctcgggcggcgccaggacctgcggatgctccgcaatttggttagggtaatgactggcatcgagcaccgaaatctgctcatcgcggccattgaggaagagttggcccgtgcggtgcctaactga

SEQ ID NO: 515825 - DNA, 390 bp, Stenotrophomonas maltophilia
gtggctgactacaggaaaactctgacgtttgaggtcatcggcggcgagcggggcatcttcttgcaatgcaataaatccgaggccgtatcccaagtgtttcgtttgcttccaaaaggagcagcccaggctgtcttgggtgaggtgaaggtgtggcaccctcgaaaaggcgatgagaaggccaagcccaagaatattcatttcgtcattaaggacgagggtgtgtatgaggtcaccaatcagccgaagttggcaggcttctacctgtttacaacggcatcgggcggtcgcatgacctatctggcgatcagctcggcggagaggactgcgctcctggcggccccggctggggcaaatctggaatcgatgctcactgccttgagaaaaccgtag

SEQ ID NO: 515826 - DNA, 693 bp, Stenotrophomonas maltophilia
gtggccctagcggtgctggaggaagtgcaggaactggcgaccggcggcaaccaagaactaagcggcatcatccgcctgacggcccccatgccgttcgggcgcaagttcgtggccccagcgatccacgatttttgtcgtctacatccccgagtcggcttcgacctgcgcctgtccgatcaggtgcaggacctgtatagcggcgatctggacttggcgatccgcaagggcgaactggccgactcacgcctggtggcgaggcgcgtggccgacaatcggcggattcttgcggcgtctcccgcctacctaaaagtgaatggacagcccgctcagccggaagatctggagcggcacaactgcttggtgttcgcctatccggggctgttgcaagacacctggccgctgcgtaagggccggcgggagaagtctgtcacggtcagcggcacgctctgtagcgacagcggcgacgtcctacacgcttggtgccttgccggactgggcgtctcgctacgcgaaacctgggacatccacgaggaactccgcgacggtcgcttggtgcgcgttttgccggactgggaggccatcccctcgaagatcagcgtcgtgcgggcgcggcgagagcctgtgccccgccgactgactgccttcagcgacttcctactgaggcgctggcagcaggcgccttgggatcaatga

SEQ ID NO: 515827 - DNA, 1812 bp, Stenotrophomonas maltophilia
atggatgaaaacccttccctcgccagcaatggcgggacgacgcctatggacacgactgatgcttcgcttgatgtggccccgaatccgcaaggactcgccgtcgtagagcagaacgtgtttgttgccttccaaggcggcggtgccagaggcgtcgttcatgtcggcggacttcgggcccttgaggacgggttaggtgaagcagacgaatcagatagctcaccgataaggctcaagctggtaggcgtggcggggacatctgctggatcaatcgtggccgcgcttgttgccagcggaaggacttccgatgatctttacgatccaacgaccggagatcacctcctctcgacgctacagggcggagcctatcgctctctcacaggcctgttcactcggcgcggatggaacaatatccttcgcgccaaaagagtgtcttctctcttgtcctcaattgccaacgttcgagacctatttaagtatgcttttgtagcctcggtcgtgattgctcttacgacgtatttggtaggactttccgcctacccatcaagtttccttagccttcgtttggcagccagcctgaacgctgctgtaaacatcatgactgtgatcattccagttgggatgatcattttcatcatagttggcgcgttcgtggttgttcgcctgcgtccagggctagccccgttaacagccgttaaaacggctgttgatgaagccatcaggttatcgctacctaacttgagtagctacgcagacaggcatctcgaagatgaaaaatatgtgaccttcaaatgcctcaaaagctgtggtggactgccccttcgcatcgtcgcgaccgatttgacgagaaaggacgttcgcctattttcgtacgagaccactcctaacgtagccattgccgacgctgtatgtgcatcgatcggacttccctatatcttcaagccccatcgtatagacatcgacggcacaccacacgaatttgccgatgggggatttctatccaacctgcccctatgggcctttgatgatgaacgggccaaggatccagattgctggtccatcggaatgtctatcaagtcaatccctaaggtcgccgacgagaaaattgacaagccgtcacactggtcaactgcgatccttgacgccattgtctcaggaccatcgctcattcatcgccgtggcattgataatctgatgatggtggatctaccttcgtccttagacctgctggactttgataaaggcgaggtccgcattcgcggggagatatcccgggcccggacaagggctaacaagatgctgcacgcacagttcttacaatttaagctcacaaaactcatgcactggattgatgaggtcgcgcttgaaaacttcaattcagttttgcggagcgcgggcagggaagagagaaaaagcctgacgtcaaggctgtacttaaactctcagagatacgcgttactgattgcaggccctggctctggcttaggaggagcctccctaaccaaattccctctcatcgatatgggcaatagtctgcattggcgcacggcgtcagaagtgggcctgccgacaaaggggctttggtccgtggtggtcagacttaaaaagcccctaacgatgggagacgcgtttgtttcgttccactctttagatttgacgccacaagacctgagtgctataactgggatgggcgatgactcatcgagcttggacgctttggtcggactacttcgagggtcacttgaagagtttgaattagcgttagcagctgaaaagcatattacccgtgaattcatttttaattgcggcgtatga

SEQ ID NO: 515828 - DNA, 360 bp, Stenotrophomonas maltophilia
atgaacccacacttctcggccgaagcaccggagcgcccccgtccaaaaggcctatatgcgcaactagatttcattgaacccttgggcgaagggttggccctggttggcttggacggtgtggatgcggagtggttcgcggaattcaccaagcgctatggcctgaacgataatgccgcgagcgcggacgcatgcggagagttcttaggagaacgtggtagcacaagaattctgactcgccagttttttatcaagcgcgctgatcgggcttcgagctgcgctctgcgcctgtggagcaaagaagtctacaaccctgcgctgaggcgcagacaccgcccgagtgccgcccttcctttgatgtaa

SEQ ID NO: 515829 - DNA, 732 bp, Stenotrophomonas maltophilia
atggatgacgtctcccgctgcgcgggggcttatcgagggacggcgctgacgcgccgtccttttttgttgctggctaccgtgagtagaagccggcggtgtgctgcgctgagggcggatgggcgtggggccagcgcaaaacacgccgtaaacccatccatgggggctcggtcggcgcatccatgcgcctcacggttttgcgctggccccacgcccatccgcttcaagcattgcccgcgccttcttctcccgccgggtagccgggagaagaaagatcaaattcaaattcaaagtcaaaagccgaagccgcaattcctagctttgccttatgcctttgcctttgcctttgcttttgcccttgctcccgccttggggtctgatgcgtccgcgcccgcaggaaactgtcatgggaggcagggggcctcagccaggaccgttggcgccaaggatggcgccatcgagcccccatggatgggttcacggcgtgtcctggctgaggccccctgcctcccaagcacaacaacgactcggcgccaaacgcctcaaccccgcgctttactcggattcaccagattcccgaagaagatcgcgttgatcagcagccggtccgtcccgtgccagtacttgcggtgcgccggatcatcggcaaacagcaccacgttaccctgcccctgcgccgacaccagcaaccatgcactgcccgccacccgcgtacggttgcgctcggacaggtaa

SEQ ID NO: 515830 - DNA, 462 bp, Stenotrophomonas maltophilia
atgaagaaccagaagggcttcaccctgatcgaactgatgatcgtcgttgcgatcatcgcgattctggctgccattgccatcccgcagtacaacgattacacggctcgtgctcagctgaccgaggctttcaccttggctagtggcctaaagactcctgtcgctgaagcttatgcccaggatagtgccacgacttcctgtgccgttccgactggcacggttacctcgggtaagtatgtgaccagcattacgccgacgggtgctgccgatagctgcaaaattgttgcaaaaatgaagggctccggcgtcaacgacaaagtcaaggatgccgagattaccctgacctataagccgtcgaccggcgaatggtcctgcaatagcagcgtcaatgctgcattgacgccgaaggcctgcactgctgcggctgctggcggtggcggtggcggtggcggcaccaccccgtaa

SEQ ID NO: 515831 - DNA, 420 bp, Stenotrophomonas maltophilia
atgaacaagcaaaccggtttcaccctgatcgaattgatgatcgttgtagccatcatcgccatccttgcagctatcgctatcccgcaatacaacgactacaccgcgcgcagtcagctatccgaggccattgtgctgttgggggggctgaagacgccggtggccgagcagttcgccaatagcaacggcgcggcatcctgcgcactgccggacagcgcagtcctgactggcaaatatgtcgacggtatcaaggcgacagccgcggttccttgtgtcatcacggcgacgatgaaggccacaggcgtgaacgacaaagtgaagtccgccactgtcaccatcacctatgccgcgaattccggcatatgggactgcaagaccgatgctccggctgaagtggcgcccaagggttgccctcacggttga

SEQ ID NO: 515832 - DNA, 1629 bp, Stenotrophomonas maltophilia
ttggcgaacactactgaacgtaaggaaaagctctcaatttatttagttaaggatggtcactacagcccggacgaatgcgtaaagctggaactggttgggcgaaagtacgtcttcaacatcccaggtattgaggcgtttctctatgtaaaaatggaggcgccagcgcatccacctctttggacacgtatatttacggagcatcctgatggtccaacggtggaattcgggaaaagtagcaacgttggcgccgctctctacgccaacttggatgggaaaaaattccttatctcttttggctcaggatttcacctaattaatggggagctcactgagagagatttcggattgcgcgtaacactgaacgcagttgacccggaaaaactcagaagcctcgacaaagccagctatgacgacaatccgctcaattctaggacacaaagctcccttgaggtagatatattcgatcttcaagcgaacactgaatccgatttggtttatgcagttactggagcctgcaaagtcccactactcggcacacatatcacaggccgagacgctcttacgctaatggtcgaaacggaccttaatggaatcccgagaatactttccaagacgatcgagctatttaactcacccctaccgagcgcctacgcgtggatagataacatcgcaaaggtacgagacccggacacaattagaattcttgaccttcttcttgatgacgaaatatcaaaagtaggaggcaccaatgtctggcttggggagccagaaattgtcaattgggaatcaaacgctgggtactcctttgacatgtaccaaagcacaccacgccatcaaaccttatgcatttccgatcttcgcgattatctagactcaaagtcagtgaaattcagccttgatgcgctgaagaacattaccgttcatatcaatgatgccaactatcggtcaactcaaagctggccggcctacagatgcatccacgcagaaatagtggatggaaacgacagattcataattaggaatgggtcatggttcaagatagaagcggacttcattgccgagatagacagacggctatctaacgcaaaaatatcccggaccttcctgccaccatactcgtacgccaacgagggcgaatacaactcgcaagttgccaagagcactacaaacatccacctgatggataagaataatgtaaaaacaggcggcccatacgacaaaattgagttttgcgacctaattgttggaagtagtaattttgtgcatgtcaagtactacagatcatccgcgacacttagccatcttttttcgcaaggcgcagtggccgcagagatattcctgaaagacgaagatttccgcagaagactgaatgcaaaactgccaagccatatcgcactgacggatacagccagacgtcctgatccaagcaattacaccatcacgtatgcaatagccacgtccaaggcgctgcccatcgaattacccttcttttccaaggtcactctaaagaactccatttctcacctcgaagcactaggattcaacgttgagttaacgagcattccgttagatccaaccctgagcaaaataaagaaatatagaccaaaggctgtcagaaagaagaagtga

SEQ ID NO: 515833 - DNA, 765 bp, Stenotrophomonas maltophilia
atgctcgcgctggccacagtgaccagcgcgcagccgatgcccggcacggtgatcgacctggccagtggccagcccctggacgaggccgccttcgtgaagcgcgcggccacagcccaacggatgctgctcggcgagcgccatgacctggccggcgaccacgccgcccagcgctggttgctgcaggccctgcaacaccaacgcccgcaggctgccctggtactggagatgatcgccagtgagcgccagccacgcctgcagcgggtgcagcgctggctggccaagggcaaccacgccgacgatacgcgcctgcaggagttgcttgactgggatgcgcgctggccgtggacggcctatggcgggctggtacaggacgccaccgctgcgggtacgcccctgttcggtggcaacctgtcacgcgccgaggtcaacacactgctggcttcgaccaaggcagtccggttcccggttgccactgcacggcaacgcctttcggcggtggtgctggcccagcatacagaggccgcgccgatgctggacggcatgctggccgtgcagcaggcccgcgatagccgcatggcgcaggtgctgacccatgcgcctgcaccggcgctgctggttgccggccgctggcatgtactgcgcggcaccggcgtgcctggctacctgccgccagaagcgccgtctctggtgatcgcacttgcgtcacccggcgaatcggtcgacgccgccgatgcagatctgctgtgggtgctggacgatgagtga

SEQ ID NO: 515834 - DNA, 2580 bp, Stenotrophomonas maltophilia
atggcgcatgtcttctatccggacctgattgaagagttggccttgtcgctggaacagatgcccgttccctatcggcttatggtctcggtggtggatgacgtcgctgcagaacaggttcgtgcacggtttgggcagcttcccctgctgatcgacctgcagatagcgaaggtagccaaccgtggccgtgacatcgcgccactgatcctcgcatttgaagccagcatccgtgagctggacgtggtgggccacgtacataccaagaaatcgctttacaccggtagcacccaggagcagtggcggcgctatctactggcatcgctatttggtgaccgcgatcgcttggcttggttgttcggcgtgctgcaagcggccccggatctggggctggtctatccagaaacccatgcgtcgctaccgccgtgggcacatacatggctttccaacgcttcaataggtcgcactttgagcgctcgccttggtctggggtgggacggcaccggctacttcgattaccccgcaggctcgatgttctgggcgcgagtggatgccctgcggcccctgttcgagctgagactttcgtgggatgagtttccggcagagcagggccagatcgatggcactctgcagcatgcgatcgaacgtcttttcgcattgatcgctcgcgatcgcggctatcgaatcggcgtactgccggccgatggcagtcgccacatggccacagaaggtgagcgcaatgccggtgctgcctttaggtatccgctggcagagcaactacggatggcggtcatcgaagccagggcggtgacgctggatgtattcgacaccatggttctgcgccccttcacgacgccaaatggcgcgcgccaactgctggcacttcgtgctgaacgcatatcgggattgaccgcgttcgccgagattcgcgaggacgcggagatcgcagaacggcagcgcctgggccgcgatccggaactggccgaaatctaccagcaggtgagacgcgtcgggcaccttgacggcgccatggcccaacgtctgctggcactggaagtgcagacagagcaggagctgttgcgcccgcgccaggggcttctggaagcactaccggtgttggccggcaaacggctgatcgctctgtcggacatgtacctgcccgcaactgtactacgcagtatactgccgccagaggtggaagccgttaccgacacctggtggatctcctgtgaaaccgggcaacgtaaggatgccgacgccagctgggcgcgatgggcggagcagctggcaacagctccggatcattggctgcatgtgggcgacaacgaacattcggatatccagttgccgcaacgcgccggcctgatcaatccggtccatgtcctacgtcctgtcgcactgttcgacatggtccccgctctgcgcaccttgcgccatcgttcaacagcgcaggcaccttggcctgagcagctatggcgtggtttgctggccaatcgtttgacgtacttggccgacactgctccaaatcgcgtgtacccgacgccacaacttgcagcggatgacgcgggctactgcgtgttgggccccatcctgcttgatttcctgttgacgaccgctgctaccgcgcggcggcgggatatcggttcaatcctgctgctcgctcgtgagggctatctgctggagcaggcttggacactgttggccagggtccatcctgggatgcgagcactgcgcacagagtattttcttgcatcgcgccgctccaccgccttgccggcgctggcagcggatgcagatctatccgctgtgctggccggtagcttcaacggcaacatgcggcaacttcttgtggcacgccttggcacgcaggccatggacgtcattgcccaagttgactctacgctgctggagcgcgacgtctttttgcctgaaatggcagacacggtctcgctgtggttgcaacctgcacttcccgccctccttgagttggccgagcagagccgacaaatctggcaagcgcgcctgtcagaggccactggcggagagccagccatggtcgtggatctgggttatgcaggaaccatccagcgcaatctgatccgccttagcggcgaaccgattggcggccagtacttcgccttgcgggaaacggccaagcagctagacggattgggctgggctgaagcgcgctacttcgacggccgccaggatccctcaggctcatccttgatccttcagcacgacctcttgctggaagcactgctaagtgccccgcacggtcagttcaacggctatttccgcgacaagaatggaatagtgcacggcgaatttggcgaacagacgttgggggagcgtggactggaagctctcgccgcagtgcaggctggcgcgctcgcattcatcactgatgtctgctcggcggtcgacacggacgttgccagcatcaccctcgataaacgcagtgtgctggaaccactgcgcctgcttgccgagggaagctggcaggcaggcgcctggctgcaggatttggctaccgaagatgacttcagtggccgtggcagcgtagccgtgagcaggccttactga

SEQ ID NO: 515835 - DNA, 1419 bp, Stenotrophomonas maltophilia
gtgagcctcgaaaaacgcgcgctgtgcgtcgacctggacggtacgctactgcgtacagacgtgctttacgagtcgttcctagcgcttcttgccaagaatcctctctacgtgctccttattcctttctggcttttgaagggaaaagcagccctgaagcgcgagctcgctcagagagtggcgcttcctcccgaatcactcccctacgatgagcgcgtgctgcagatactgcggacgacctcccaacgcccgcgcgttttatgcaccgcttccgacgaactgctggtggcgcccattgcagagcatctgggcctgttcgaagaagtgatgtgtagcaacgggcgacagaacctagccgggcatcgcaaggccgaggcactcgtagcgcgcttcggcgaaaaaggcttcgactatctcggcaatggctccgtcgatcttgatgtctggcgccatgccgcctctgcgatggtggtcaatggtccggcagcgctgtcacgacgtgctcgtgacgttgttgaagtaacagacgttcttcccccagccacggccggcctgcgcacgtgggtcaaggcactgcgcatataccagtggatgaagaatctcctggtgctggtccccttgttcacggcccatcgcatcctggatccagaggccggcgcgcaagccatcattgcattccttgccttcggtctttgcgcttccggagtgtacgtacttaacgatctcttggacctcacccccgaccgcatgcacccacgcaagcggaatcgaccgtttgcagcgggccgcatacccattctgcacggcttgttggcagctcccttgctgacaatcggcggcttggcaattgcatttgcctgcagttggcagttcgcggcggtgctggcgggctactacaccatgacgttgagctattcattgaagctcaagcgaatcgtcatgatcgacgtaattctgctcgcggcgctgtacacggtccggatcatcggcggaagcgtggcgatcggcgcggaaatgtcgttctggctgcttgcgttctcgatgttcatcttcctcagcctggcactgttgaagcgctttgccgagctcgagtcggccaagctcagcgggaagcagaccgccatcggccggggttataacgtcagcgacctgtctctcatccagtccctcggcacaagcgctggttacatcgcagtcatggtcctcgcactctatatcaatagtcccgccagtctagtgctctaccaccacccccaagttctttggcttctctgccccgtgctgctgtactggatcagcagggtctggttggttgcgcaccgcggtcatatgcatgacgatccaatagtgttcgccgtgacggaccgcgccagccagatcgtaggagccgtgggagttctggtcgtgctgggggccatctaa

SEQ ID NO: 515836 - DNA, 1251 bp, Stenotrophomonas maltophilia
atggttgacagccggcgcgccgctctgcccgactttgagggcaaggcgctgccacggggtaatggacgcagctacggcgacagttgcttgaactcggctggcacgctgctgtgcacccgaccgctggaccgattcattagcttcgatccagtcagcggcatcctacgcgccgaagctggagtgaccctcgcgcaggtcattgccctgaccctgccaaagggctggttcctgccggtgacacctggaacacgatgggcgacgcttgggggtgccatcagcaatgacgtgcacggaaagaatcaccatgtcgccggcaccttcggccaccatgttcgcgcgctggaactgctgcgctctgacggcacgcgagaggtcctgagcaaggaggcaccgtcggctcgtttggcggctacgatcggcggccttgggcttaccggcctgattacctggtgcgaaatccagcttaagcgtgttcctggcccatggctggaaaccgagagcatccgctttgactcgctttcagattttttccggctatcagccacatccgcggcgagccatgagtacaccgtggcatggatcgattgtctggccaaagggaaagccctaggacgaggtcacttcatccgcagcaaccacgccaccggggactcatccgtcccggtgcccggcaatggtcaaaggctgacattccccgtgacgccaccggtgtcgcttgtcaaccgcctgacgttgcgtcctttcaatacgctgtactactggcgacagagtgcaagacaggtacgcagccaacagcattatcaaagctatttctatcccttggacgggatcggtcactggaacaggatgtacggtccgcgcggcttcctgcagcaccagtgcgtgctgccagcaggcgcggcacaggacgccgtccccgccctgcttaggcaaatctcatacagcggccaaggctctttcctcgctgtgttgaaggaatttggcgatcgcccctcgcccgggatgctgtcctttgcacgccctggtacaacacttgccctggactttcccaataccggcccatcggttttccaactgttacggcgcctcgatcttatcgtcgccgaagcagggggcacgctgtaccccgccaaggatgcacgcatggcgccatcgctattcatgcagggatatggagcagcgttgcaggcctttcaggaacatatcgaccctcgaatatcgtctgatttctggcgacgcgtgatggagtaa

SEQ ID NO: 515837 - DNA, 732 bp, Stenotrophomonas maltophilia
atgaagaaagtactgatcattggtgcgacgtcggccattgccgtagccgttgctcgccgcctctccgctcgcgcggccgctttccacctggttggccgcagtgaagagcgcctgatggacttagcggcagatctcagcgtccgtggagcccatgcggtgacaataagcgtgctcaacgttgcggatctgtccgcgcatgaggcgatgattgaaaccgccaccaggaatctcggcggactggacatcgttctcattgcacacggaacactcccggcccaggcaacatgcgacacggatactgcctacgcgcttcaagagttccacatcaatggcaccgccacgatcgcactgagtaatcgcttggcgcccatgctgacgcccgggtcaacactggcggtcatttcgtccgtggcgggagaccgtggtcgcgcgagcaactatctctatggaagcgccaaagccgcagtctcagcctatctcagcgggctaagccagcggctgttcaaggccgggatcaatgtgctgacgatcaagccaggcttcgttgatacccctatgacggcgagcttcaagaagggcgcaatgtgggccacgcccgaccaggtcgctgcaggaattctcactgccatcgacaagcggcgctcgatggcctacctgccttctttctggtacgtgatcatgaagatcatcgttaacatcccggaattcgtattccgcaggattcgactgtga

SEQ ID NO: 515838 - DNA, 276 bp, Stenotrophomonas maltophilia
atgctgattgggaccgccgtcggcctagtcaccaagtacgtcctcgataagaagttcatctttctttacgcaagcgagagcgccaaccaggaagcaaagacattcctgctgtatagcgtcatgggactcgcaacaacagctgtcttctgggctacggagtacgcattcgaacttgcattcgactcagattcaatgagatatgtcggcggtgtgatagggctcatagccggctacatcatcaagtaccacctcgataaacgactggtgttcaagtaa

SEQ ID NO: 515839 - DNA, 1425 bp, Stenotrophomonas maltophilia
atgcgattctggaaaacatcaggccgccccgccgccctgttcgtcgcggcaactgttctgcttatgacgctcggattgacattcccaggtaagggaatgatcaacaatggcgacttccttcgcgtccaccagtcgatgccgatcctcaccaaaggatgggagcccttgaaggaagagtacgcctaccgcaatgagcagcaggtttccccagactctctcatggctggtgtcgcccaactgacaggccttgcaagtcgagtcggcagccccaaatccatgccgatgtggacggtctccagcgtgcttcttgccgtcttcctgtcagggaccttcatcctagtacgaatgggactggccagccctcagctccgtcgaacgatcacggtaaccgtggcctcgctttctgtgttcgctgggatttacgcagtctatttcagatcactttatgaagaagcaatggttctcgcgctcgccccaacgcttgcagcagggatcatcgccctcacccaggaaggcaagtatcgacttttcacactcagctcggcagcaatccttgtatgcaaagcacagatgatactgatgctgccggtgttgctagtaacggtgctctggatggatccgcggggaggccgctaccgccaaaaactggccacctgtcttttcctgacagtttgcggattctcataccaagcgtatctcgctcatttcggcgagatgagtgcggtcaacaattacaacagaacctacaatggtatcggatgggcattacagcgatctgccgactggcctgccaagaccttcgagcagcgtctgcattacttcagcgagaatcggctggacatgcaggctcgaagttcaatctacgaacctgatccgagcctccctctgcttgggaccagctattggccaacgggagccgagatttcgaccgagcgatggtcccctgcgactgccgctacccgtgcggtacagatccagaatgcatttgacgcaggcaaaccccacatgtacgtgatgagagtggccagccaacccgctttggcatgggcgctgcttcggaacacagtggcaacagcgtggaagtcggactattcccttagccatctacgttcggacaaaaccatcgcagaccgcggattcaatgcagttggattgtctgggtgggcgtttcagcttggcgcccttctgctggtagtcattgttgcagtccgccgaacggcgacttcattcttcgcccttatctgctttggattgattgctccgctttttgtagtcctgggcgacgggtactacgaattcgaaaagcacatggcgccgtacatcatgttgactccagcttttgtagccattcagtttgcaaatggaggacgccgaaaaccgggtgtcctgcgtcaacccgaagcaggcgcatcccgaggggaatga

SEQ ID NO: 515840 - DNA, 1077 bp, Stenotrophomonas maltophilia
gtgggcttgaccctatttgcgcacttggagatcctcctgtattggcagagccctgccttcagaaagatcaccgacgtcgtctttttctggggtggcgttgacatcttcttctgcatctcaggttatgtgattaccgccagcctgcttcgtgaacacccccgaatcccatcattttccaagctggccattccgttctggatccgacgattttggcgtctgacgccgtctgccattttctggctgctggtggtggtcctcatgagcgcactccccatcaatgatggacacctgcgaagtgtgagccagaacctgatggatctggcctccgccacactctatgtcgccaatgtccatttctggtcctgctatgcgggcgagagtcaaggctgcggaatcaaccaggtgtactggagcctgtcgcttgaagagcagtgctatctgttattaccggtactggtctatacgcttggctggaaaaggctacccgttgccctggtcctcatcattgcagcccaggcactcttgtatcgccccatcctttcacttctctggttcgtcagaaccgacgcgcttgcagctggcgtcctgatcgcgctggcagcggacagagggcttctgaagaagatagagccaaaattcctcgggtggaggccactcggtctcaccttctttgccttgtgcatcctgtccatcggcatgcttgcagcaaagtcgcatgtgatccagctccatacgacctgcatcatgttagtggcggccgtgctggtatgggcagcctcctacggcaactcctacctgggcatcagcggacgtgccggacgacctgttgcctacatcgggagcaggtcctacgccctttatctcacccatgtgcccgtctactatctcgccaagccagtttccgagtgggccggcgtcggagcgcattcgtctccagtcagccatgtcgtttacgtatgtgcagcgctggggacagccctgctattggccgaagccaacttcagattcattgaagtgccgctacgcgcgcacgggcgcacgatcgcagctcgatggaccgagcatcgtagccaatga

SEQ ID NO: 515841 - DNA, 432 bp, Stenotrophomonas maltophilia
gtgagtcagacctgctaccgctatcaggccaaggccagccaggagaacgcgatgatcgccgactggttgctcaggctgaccagcgcctaccgcgattggggctttgggctgtccttcctgcacctgcgcaacgtgaagggcttcgcttggaaccacaagcgcgtgtatcggatctatcgcgagttggagctgaatctgcgcatcaagccgcgcaagcgcatcgtccgggaagtgccggcgcctttggcggtgcctgaggcggccaacgagacctggtcgatggatttcatgcatgatcagctggctgatgggcgcagcttccggatgctcaacgtattggatgacttcaaccgcgaaggactagtgatggaggtcgacatctccttgcctgcggtgcgcgtcatccgcagcttggaacaggtcattcaatga

SEQ ID NO: 515842 - DNA, 1878 bp, Stenotrophomonas maltophilia
atggaaatctacgacaacagtttttcagaccataacgtctatggccacatcgccagtcttttcgcccgcttcgagccagccgcgggaagctatttcctcgatttcggctgcggttttgggcgcctcgctgaggtcgtggaagagcgcttcggtgtcaaatacgtaggttttgatatcaatgagcccggcttggagtctcttcgtgcgcgcggattttccgcgcactatgctgatcttggagatgacgaagctgcgtttgagttggtgcggcgcgtgcttcctgaaggtgctgcaatcgctgcgctatgcacgattgacacgctcgaacatcttcctgatccacttgctgcgcttaggctctacgctcgcatcgggcgcgggcattcagttccgcttcttgtgtcggtgcccaacgtcgcgcacactgacattggcgcaaagctaacggtcggtcgcttcgattacaccgaagccggcctgcttgaccatactcacatgcagtacttcaccagcgaccgattcacctcgttgatgaaagacggtggatggcatgaggttcatcgtcacgatgtgtcgctgattcgcagcgaccagcatttccccgctcagttgcctgtccttgccccgaaagcaccgctggctgagctacttgccggaattcgtcagcaggccgacggttatgggtacgttaatcagttcgtacgtgcttacctgccggggccggaaactggcaaggtacacgtgccttacgttgctgcgcgtgagcgtgaagatgctccgttcctatccgtcgttattcgcactgtggggcgacggatcgaaaccctgcgcgagtcattgctctgcttgaccgcgcaaacgtgccaagacttcgagattgttgtcgtcggccataatctggatgtccagcgccagatcgcggtggagcagctgatcgctgagcttctggagagcgtccgtcttcggacccggctggtcacagtagacggaggtgggcgctccgcaccactgaacgttggctttttgtcagccgaaggccgttatgttgttgcgttcgatgatgatgaccttgtgttcggtaactgggtcgaaaccttcaagggactggaagagggcaactctggtcagctgctgagggtaacggcggccgctcaggattgggagcgcatcaggcggggcgacgcggtggcttctcgtgcgaccagtgggatgcgcatgctctatccagacaaatttgagttgattgcccacctggcggaaaacagaactcctctgcattccatcgcgttcccgcgagtactattctctaatctaggttatcgattcgatccggagctgagcacggcagaggattgggatttgatcatccgagttgctccgttgtcgggtgtggcctcatccaaggtggttacagcgctgtatcgcctctggaagagtggtgataattccacttctgcccatgatcagttcgaatggcaaagcaactatttcaagacactcaagaagatcaatgctgttccgcttcttctgccagcaggctcggttgtcaaactccggaagatgtatctgacgttggagcgattgcaggggcatgtcgaggttgatgtcgacagtgcaattgtggttgatccgcagattgaagacgatgcaaggatcgagcaacttcgtctgcgatatcatgagttgataaattcactctcgtggcagatgaccggacccctgaggcagatccgtcgaatcttgcggcggcagcctcgatcccggaatcctaggatttggacaatgaatgagcaggatttggagttccacatccgtcagatccttaactcatcttcctggcgcctgacgagagtcctgcgatcgcttcgacgtaagtag

SEQ ID NO: 515843 - DNA, 918 bp, Stenotrophomonas maltophilia
atgatgacaaaggataatctgccacgcctgggccgccttagagttcactcgatcctttacggtaatgaacctcatcgaatcagccaggcggtcgctcatctggaacgtgcagctcacgtggccttggagcagggcgtctttgacagtgtcgagctggcctacggggactgctcgcccggcgatgagttgcgcggtaccgtgcttgcacaggcgcgtgagaactctgcgctggccggggtcgagtatcatttcttcgatgccaacctaggttctgcgcacgggcacaatcgactgctcaacatcggtaattccgagttcgtgatcatcatgaaccctgacattatgatggcgccgaatgcgatcgttgagcttgcccgagttttttctgacgagaaggtcggaatggctgaggcaaaacagctgccaatcgagcatccgaaacagtacgacgtagcaaccggcgatacctcctgggcggcgactgcctgtaccctcatttcgagagaggtgctcagggtgctcgaaggcttcgatcaccagacgttcttcctgtactgcgatgatgtggacttctcgtggcgagttaagcttgcaggctaccgtgttctctattgtcctgccgccgcggcgtttcatgacaaacgacttggtgacggtggtgaatggaatgttggttgggcggagaaatactactcggccgaagctgccatgctgctcgcctacaagtacagcaggcaggatctggcggaagagatctattcttacttcaagaacagtggcgatgctgtctggctgaaggctgctgacgaatacgcccggcgaaaggtcgccggcgagcttcctgcacagcttgatcccgcgcacaaggttgctgttttcaccaatggcgcgtatgccaaccataggttcggaatgtga

SEQ ID NO: 515844 - DNA, 1068 bp, Stenotrophomonas maltophilia
atgaaagattgcatcctgattaccggtggagctggcttcatcggtagtgctctatctcatctccttcgcgctgaagatcagcgtcccatcgttgccatcgacaatctacatccgcaagttcatcctaagcggttgcgcccggcggacctgcatcgggacgttgagcttgtggtggccgatgtctgtgagccagacacctgggaggccttcatggctcactggaggccttcgcttgttgtgcatctcgctgcagagacgggaactggccagtccctcagtgaggcatccaggcacacgcatgtgaatgtcactggcacggcacgcatgctcgatgcgttcgccgcggtgggtcatgttccggatcgaatcgtgttgaccagtagccgggccgtgtacggagagggactttgggaaaaggcgacgggggagcgcttccagcccggtcagcgttccaagcgtatgcttgatgatgcgcagtgggatttccccggcgcgacggcaattcctttccgtgctgacgtcacgccggcgaatccgaccagtgtctatggcgccaccaaacttgcccaggaacacatcatcagtgcttgggcgctcagcttcggcactgatgttgccatcctgcgattgcagaatgtctacggtgccggacagtccctccacaacccctacaccgggatcgtctcactgttctcccgcctcgctaaagctaagcaaagcattccactgtacgaagacggattgatgcgtcgggactttgtgtatatcagcgacgtggcgcgcgccgtgctcgctgcgacgaaggaggccgcagcggtcggccgggtttacgacatcggatacggattgccctcgacgatcaaagaccttgctgacgaggtcgcacgccattatggggcacctgcgcctcatgtctgcggcaagtaccggaatggtgacgttcgccacgcgggctgcgacgtgtcccggtctcttgaacttggttggtcgccagaggtcactatgtcgcaaggagtcgcccatctctgcgattggattgatgttcgtctctcgggggagggcggatga

SEQ ID NO: 515845 - DNA, 1068 bp, Stenotrophomonas maltophilia
atgacgcgggaaaataactttgatgcaatgcgcattattgcggcattggtggtgatcttcgggcacgcgcatccgctttctgcgcagcccgatccgacgctgcttggcaatgccgtgcaaagcgtagcagtcaagatcttctttgttgtgagtggtttcctggtcgcaaagagctggtggtccgacccgcatttcgggcgcttcctgatccgacgcgggcttcgcctgttcccggcactgttcgtgctgctcgcgttgaccgtccttgcgctggggccgttgttcacgactcttccgattcatgagtatcttgtcaacgagggcaccatccgctacttcgtctacaatattgtcctctatccggtgtatgcgttgccgggggtattcgcgggcaatacgtatcccggggcggtcaatggatccttgtggagtctgccggtagaagtatcgatgtatctgcttctcccggtgcttgcgaccattgcggcgattgccagaagccgtatcgtgtttgtcgcgatctcgctcatagggatcgcgctgagcctctactatctgatgattgttccggcagagagccagattgtttggtggggaacgggttcccgctcagtggcggatgtcggcccctacttcttcctcggtgcgattatcgcagtcacgccgatggagcgcatgcttaacccagggattgcactctttctggtcgccattgctgcgttgtttcagttgccgcactactggatgcaacagctggtgctgatggtggtgctgccctacgtggtcctgtcattctctacgattgccacgcccatgatttcgcgggccggtcgattcggtgatccttcctacggcatctacctctatgggtttccggtgcagcaggccttgtttgccgttgggggcaatagcatggggccattggagaacactgcttttgcagtgcccattgtcgtcgcactggcgtatttgtcgtggcactcggtcgaaaagcgtgccttgtcgttcaagccgggcaagcgcatctctggccgaaccgtaaactcgaaggaaatcccctcatcatga

SEQ ID NO: 515846 - DNA, 1368 bp, Stenotrophomonas maltophilia
atgtgctctgaccaattgattgtcgatgtcgatcatgtcgacaagagcttcctgctgtacgacaaaccttcgcatcgtctttggcagatgctgctggggagtcggcgtaccttctaccgggagcatcgtgtcctcaaagacattgatttcaaggtgccgcgagggcagacgcttggcctggtaggtcgcaacggtgcaggcaagtctactctgctcagcatactgtgcggaacgctggcgccgagtgccggttttgcgcgagtgtatggccgggtggcggcgctactcgagctgggcgcaggcttcaatccggagttgacgggtcgcgagaacatcgacctctgtgcacagatctatggcctctccgaggagcagattcgtgagcggcgagattcgatcattgagttcgccgacattggtgattacattgatcgtccggtgaaaacctactcaagcggcatgttcacccgcttggggttctcggtggtcgcgcacgtcgacgcggacgtgcttatcgtggatgaggctctggcggtaggagatgccttcttcgtgcagaagtgcatgcgcttcctccacgcattccgcgacaagggcggtacgttggtgttcgtcagtcatgatatgggtgcagtgaccgcgctgtgtgaccgggtcatctggttgaaggatggctgcgtgttcatggatgcaccgccgaagcaggtggcggccgcctatctggcagatctatacgaggtagagcctgtagcagacctccctggcctggatcagtttgtcctagacgattctgaggaaaaggaggaagaggtggatggtcgcctttcctggttgaatcacacccagtttcgcaatgacatccggctcggagcattcaatgcctcgcacgacttcggggtgcggggcgccgagttcatcaatggcgggttctatgatcgccagggacgccggcttacctgggtagtcggcggggagtgggtcgagctccggttgcgcgtgcgtgccatggcgccgattcggtcattgatcgttggttttgttgtaaaggatcgacaggggcagcctctatttggagacaacagctatctgacccatcgtgatgatccagtcagtatcaaggcaggcgatgcggtcgagttttacttccggttccggatgccggtgctgcccgctggggactatgcggtcagtgctgccatcagcgatggtgtgcaggaagatcacgtcatgcaccagtgggtgcatgatgctttgattctcagtagtcgtgccagtagtgtcgcgacgggactgatcggaattccaatgctcgagattggtcattcgaggatggcaacaacaggggcgtgcaatgacgcgggaaaataa

SEQ ID NO: 515847 - DNA, 741 bp, Stenotrophomonas maltophilia
atggtcaagcgagatgtccggggccgataccagggatcgatcttcggcacgctgtggtcattcgctacccccctgctgctgctgtgtgcctactggtttttcctcggtgtcgtgctgcaggcgcgttttggcgcaacgccgcaggtcgcctttcccgttgtcctgttctctggattgatcactcatctgttttttgctgaagttctggggcgggcctcggggttgatctttgaacatgctacttatgtgaaaaaggtggtcttcccgctcacggtactgccgtggatgacactggcaaccgcttcgttccatctatgcgtgaacctgtccattctgctgatcggccagttcctcattgtaggtagcatccctccgacctggccgttgatcttcctggtgatgttgccggcgctgcccctgctgctggggctgtcctggatgctctccgcattcgcagtattcctgcgtgatatccagcaggtcgtgccgttgattcttaccctgatgatgtttgccagtcccattttcttccccatggagatggttcctgagcagtatcgaccgttcctggtcctcaatcccacgaccgtgatcatcgagcaggtgcgtgcggttgccattcacggcgagctccctgatttccgggtgctgggcatttattcgatcgtggctttggtggtgatgagtctcggctacggggcatttgtgcgcacacgcaaggggtttgccgatgtgctctga

SEQ ID NO: 515848 - DNA, 204 bp, Stenotrophomonas maltophilia
atgggccgccgcactccctccctgcatggcggcgccgtctcctttgtaaacaagtgtaaaaatcgcggcgtgatgatcgacactctttcacgcggaattgacgcaattgcaggccgattgcgtcagatagctgcaggttatgaccggacgatactgttcaccgcaggcagccttgatgcaggctgcgacagcgcgcgccggtag

SEQ ID NO: 515849 - DNA, 309 bp, Stenotrophomonas maltophilia
atggacagcgataaccgccgtggccggcacgcgctgctgggaatggatcacttcgcgatggtggcgttgaccctgctgctgggtggcagcgtggtcgcgctggttggccagtacaccgccgcccaggcggggccggccatcgtactgagtctgctgctggccgcattgggcacggcgccgatgctgtattgcctgcacgtgctgaaccagcagcggcccgcagccgatgcctgcacggcctgctgcgggccgcttggggcacggcagccgcgcgcctgctgggtgctgcactgctgctggaactggtga

SEQ ID NO: 515850 - DNA, 681 bp, Stenotrophomonas maltophilia
atgaccgacacaacgaatgtgcaccccgacgctgtgcttgccgcactgctggcaaaaggagggcgttcaaatcggcaggcgaatctggctaggatgcatgagatctgtagtaatcagcacgccaccggctcgcgagacttctcgatttcaaccattggccgcttggcagaggccgaaggagtgctaaaaggtcgagcactctataacgcagcatccgccgactaccggtcgctcattgaggcttgggcggcctacgctggcccgcctctaccgagagtcaagaaggtcttggcgagtgatgaatatctgatgcgtatcgaagatccggctattcgatccatcatgcagggcatcatcgccgaacgtgacaggctcaaatcgcagctcaatttgctgaaggcccacacgcaagtgacagttgatcgccgccccctgggcgccacgatctcggcgactggcgtagcaccgcctctggctgtattcacgctgtctgagcagttcacaccatcagaacgcgaggcactcaggaaagcgatatcaccagactacctgcaagagcggggcctgaaggaaggaactcacggagaaatcatcaacgaacggggacgggtcgtgcttgaggttggctttgcaagagcgatccgcaagattcttggagattcgatcaccaaaggccgatag

SEQ ID NO: 515851 - DNA, 2598 bp, Stenotrophomonas maltophilia
atgactgagatcaataaaggggcgaatgcacacctcaagaagaagggggcaggacgcgagcaggacacatctcttggatggctcgatcgtgagcatccgcacctaactgcttggcgaatcttggcagttgaatggctgaaaggcgagactcgggggctgcccagcaggctgagagccttatcagccttcttcgatcgcttcattgcgcgacaggggttgccccacgaacctagcgtgttcctcgctcgtagcacgagcgtgcccaacttctatctcactgcttgtccgaactcttttgacggcatcaagaacaacaatcacatcaattccttccttcaatacgtgctgctaaaggagttcagcgaggagactgacaacggccagttggttgtatccccggcgtttcacaatcccgtccctcgtatgtccagagagggtctacccaggcgtgatgagagtgttcattcgccgctgccctatggatacatcgacgaacttcgccagattcttgctgctggaccacacttccgcgattggcaatgggcgcagcaggcactgggggcgaaagctggtacgcgcggtagaactgctcctgactggtttgaggtaacagaggcgcaaatagatcgaacagaccctgattgcgtatggcgtatccgcaaactcaagtcgggatatcgtggcggacaggttctggagatgtggagcccggtgcgctgggttgcgctactcgtaaagctaatcctgccactgcgtactcaccaggtacgattccttgattccggcgaagccgacacttggcgctttgaagcaggttcttggacgttgaatcccagtcccctcgctgggggaagtgagcgacgccccgtccagctaggcgtatttcgacgtagccagcagctaggtgagagtgagtcctccggggcggtgctctacatcaacaccaataagactgctgacatggcgaaggctggtgaggacaaaggctacctaatgccgtggtgcgcaggtgggccgatccatcaagacgtcttctattggctagagaagatgcgtaactggcaggaaaagtacaatcctgtctcgaggcgaacagcctggggagagctcgacgcacgtcacgtccaagcaaaaagcgagatacagctaagtagttatccggatgcctgcttcttgtttagattgccggaggaatgcgatggatcctccaatctacctctgcagcgcgccggccagcttgagggctgctggttccgcctcctgtcagcactgcaaatccgcattgctgagcgaggcgagactcactctaacggtgcgccaattcaattccttccgcctgtggaggaacaaaattgcgggctgaccactctctttccgcttcatagcctacgcgtttcgctcatcaccgcactggccttagaaggacaagttccgttccccgttctgcagaagctcgtcggtcacagtcggctgctgatgaccctctactatacaaagccggggccgacccatgttcgcaagttgttgcatagcgctgcggaacggcttgaggcaggaaaggaagtcagcattcagaatttccttctcgatacggctcacgaagaattgcttcaaaaggcggtctgcaatagcgtccctagcctcgccgtggccatccctcaacatccctccgtacgcaatccagtgggctggatgccaatgcaccatgggttgtgcctggttggaggcaataccagtgagaatgagggcaatagtgcgataggtggctgttacaacggaggggcatacttgggatcagcaacgtctcaaaagtacggacctgtccccggcggcagtcgcaactgcgtacgctgccgctggtttgtgaccgagccacatcacctcccagcgcttgccgcgcacttcaacacactcgcctatcactttgacgaagcgcgcaacacttgcctcacgcgcgaagaagaacttcagaatatcaaaaggcagaaggctgacgctgaggacagcgggcatccctttgttgcgttgaacgcacaccgacaggcagagcgggtgtgggaaagcgccatgaagcgcttcagtgatctggcagaagacctggtggcttgctggcgtctaattgaacgctgcaagttggccctcggcgattcgcaagaaggcggtacgcagttgattgccgctggcgaaatggttgatgtacaggctatcttcgaggagacagagtcagaactcctacagctgacgggcatatgcgatagcgttgagatgtatccggatcttgacccaggaaaggcggtattccgccgaagtcagcttctcgatgccgtgctctacaacgatggccgaccgcccttgttcatgacgctcagcgaacaagagcagctactggcgggcaatgcgttcatgcggcatctatctcagcagatggatccaaccaatccaatactcggccaacgagaagtgatccgtttgatggacgccggtgtgcgtctcagccagcacttcgacgtcgatctctcgcatctgctgtctgtatctcaacatccggcgcaaggaatccctgtcgaccgggttcttctggaagaagtgaaagcatga

SEQ ID NO: 515852 - DNA, 744 bp, Stenotrophomonas maltophilia
atgctcattaccttgctgttgcacggcgcaggcttccgcgagtcggaacccttccacctctacatttcggacgtttttccagacccgggcaacctagagggggcaaaagtgctcatccaccatccgagccacggctctgctcctagtgactggcgtgacgaacgcggaagggtgcgtaaaggtacccgcgctgaatacctttcccaacaattcggcttggcgcctcgcaccttggtcatggatcggcgccatgcgggatggaagggcggcatgcatgaccaggcctactacaagcaggcgtactggtttgtgcccgagtatggcgaatggttcctgcagttgtggcaccgctatctggaacaggtcgctcgcattgatcgcaaccacccattcgcctttatcaacctgatccgccagcccgtgggtgccatgtacacgctgacccagtacaacaaggcacatgcggccgcctgcgagcgtatcgggctcactgtgggcaaggcattaggtactacacctcacggccaccgacatgcctacggcctccggctgcgtaccgcaggtgttgaaaaagcgcatatacgccgcttcatgcaccactcctctgaagcaagccaagaggtctatacacagccgagtacccgtgaagcgctgatggcacttgaggcggccgcacaacgaatgcgagataggggactcagcacggccaatgtgattgacataaatctgagttctggaatttaa

SEQ ID NO: 515853 - DNA, 195 bp, Stenotrophomonas maltophilia
atgacttatacacaaggtatgggcaatctgtggataaaaaagcccttttgctcagcgctgaaaactatccacaggttcccccccagcccgagggccctctatacagggggtttcaggctcataaatccctttaaaaacaaacagataatgcatttctccacgaaatctggctctaccatcaccaccatgctttag

SEQ ID NO: 515854 - DNA, 2394 bp, Stenotrophomonas maltophilia
gtgaataaggacttcatcgaaatgctggaaaagcacttcgacaccgcgtctgccgcacccgatggcgtcaagaagctgcgcgagctgatcctgacattggccgtacagggaaaactggttccgcaagatcctaatgaccaacctgccagcgagctgctgcacgaaattgaagcccagaaacaacggctggcgcaggcgggcgagatcaaaaaccccaaatctctgccggagataacaaaggataaacagccttattcgctaccgcatgggtgggagtgggtcagattgggaaacatcggtattattaaccctcgaaacaatgctgatgatgacaagctggcgggatttgtacccatgccttttattcaggagggttactcggaattccattcatttgaagagcgtccttggggtgagataaagaaaggctatacgcacttcgcggatggcgatgtcgggatggccaaaattaccccatgttttgagaatgcgaagtcttgtgtattttcgaatctccccagtggaattggtgccggaacaaccgagctccatatatttcgcaacgcctttcgcgcagttgacccgcgttaccttctatttttcttgaaaaacccaaaattcatttccgcaacagcggcgagaatgacaggttcagcgggccagaagcgtgtgccaacacctttgtttgcggaattggaactgcctttacctcccatctccgaacagcatcgcattgtcgccaaaatcgacgaactgatggcacgttgcaatgaactggaagaactacgtacttcccagcagggagcacgcctggccgttcatgccgcaaccatcaagcatctgttgaacatcgccgaacccgaccaacaccagcgcgcccaggccttcctcgccggacacttcggcgagctctacaccgtcaaggaaaacgtcgcagaacttcgcaaggctattctgcaactggcggtgatgggaaaactcgtcccgcagaacccgaatgaccagcccgccagtgaactgctgcaagaaatcgaattcgagaaaaggcggctggtgcaagaaggcaagatcaaggtatcgaggtcgttgccgacgctgtcgaaagaagaaatgccttatgtccttcctcaggggtggaagtgggcacggcttggcgaaattacggacataattcgtgggataacttttcctgcaagcgaaaaaaccaaagagccagccagtggccgcattgcttgtctgagaacggcgaacgtgcaaaagaaaattgaatggggcgatcttctttacattgaccgcacattcatgtccaagaaatcccagcttttacgacagcacgatattgtaatgtcaatggcaaatagccgtgaattagttgggaaggtcgcagttgtttcagaaattccggtagaggaggcgacatttggtggattcctcggcgtgcttcgcacacacagggtcgctcctctctatgtttttcatttactaaatacgtcctatgcgcgctcatcacttattgatgcagctagtcagacgacaaacattgcgaacatctccctggcaaagctgaattccttctttgtccctgtgccgcctatctctgagcagcaccgaatcgttgcgaagatagacgagttgatgattttgtgtgaatctcttgaccagcagatcgatgctgcaacctgcaagaaagctgcattacttaatgctctgattagtgctgaatcgcaaagccatatagcgaaaaagccccagcgaggatcatcctcaaaagcccaggtaattgaattggctgcctatcgcgccagcatcggctgctatacgttcagcaaactgtccaacgtcaagtattttggccgaaccgctgccgctaaactcatgtaccttgcgcaagcgcatgtcgggctggcgttggacctaatgcccgagcgtcaggccgctggaccgctcgacacgtggatctatgattttgagaggcagggcgaaaccaacggttggttcgagcacactgaaaagacgttgaccggcggtcggaaaaagaccgagtaccgttgcctgccagctatcttggaggaggctaagcgtgcggagctcctgatgtccccggcgcagaaggctaaatttgatcatctgatctacgcattggcaggcaagaagactgaagaagtcgaaatcatcgccacgctttttgccgtctggaatgatttcctgatcgaaggcattcacccgaccgataagctgatcatctccgaccttcgcgagaattggcacgagcgcaaggctcgtttcacttccgacgagcttggtcgatggcttgcctggctacgcgcacagaacatcgttcctgaggggttgtctccgcgcacggtgcagcaagccaagttgcatctgaactga

SEQ ID NO: 515855 - DNA, 324 bp, Stenotrophomonas maltophilia
atgcgcgaagcgctgatggcacgcttcggcattcccgcagatgcaatcatcatcgagccgtatgcccgccacaccaccaccaatctgcgcaatgcggcccggttgctggcggccctgcaggcaccgccgcggcaaccggcattggtggtcagcagtccatcgcatatcgattcggtcgccagcagcgccttcagcgagcgcaaccgccatgaactgggttacgttccgggcaaggtcggttcacgcgtttcgccctacgcgatcccgttcgtgccggctcccgaatcgctgcgcatcgatccgatggatccgctggatccctga

SEQ ID NO: 515856 - DNA, 2172 bp, Stenotrophomonas maltophilia
atgcccgcctgtatccgcccgcgcgccctggcaaccgccatcggcacgaccctggcgctgttcaatactgcccacggcgccgagcgcgcccccgccgcgaatacctcgcagctgccgaccgtgcaggtcacggccgacctcgatggcagcaccgaatcctcgcgttcctacaccaccgactccatgggcacggcgacggggctgtcgctgacttcgcggcagacgccgcagtcggtcagcgtcatcacccgccagcagatcgaggaccgcgggttgctcagcaccgccgatgcgctggccactgctccgggcatctcggtcacgcgcagtgatgccaaccgctactcgttctcggcacgcggcttcgacatcgacaactaccagttcgatggcgtggtgatgccggtgctgtcgccgtggaatttcggcgagaacaacctggacatggtggtgtacgaccgcatcgagatcgtgcgcggtgccaatggcctgatgaccggtgccggcaatccgtcggcggcggtgaactacgtgcgcaagcgcccgctgcgtgattttgctgccagtggcggcatcggcctcggcagctgggacgcgcgccgcgcctgggtggatgtgtccagcccgttgagccgggaagggcgtgtgcgtggtcgtgtggtcgccgcgcaggcagagggcgacagctacactgctggcctggacagcaccgcgaagacgctctacggcgtggtcagcgtggacctgggcgaggacaccggattgatcgccggtatctcctaccagggcaacgacaatcgtggcttcggcagcggcttcgcgctgttcaacgccgacggcacgcgtacccgcttcgaccgctcggtatcggccaccgcgccgtgggcacggatgagcaccgatacccgcaacggcttcttcgatttcaaccatcgcttcggcaacgactggcaggcgcgtgtgtcctacagccgctcacataccgacatggagatgaagcatctctaccggggcggctatcccgatccggtgaccggggcgatgcctaatggcaacagcttcacccgctacgacggtccggtgcgccgtgaggcggtcagtgtcagcctgaccggtcccttccagttgttcggccgccagcacactgcgtccgtcggctggtcgcgctcacgcgacgagaccgcactggggcagtaccgcgcactggcgccgttgccgccgttggcaagctatctggactggcacgggcccggtacgccggaaccggtgtgggccagcagcaagacccaggccgatgatctggacaatcatcagagcggtgcctatgccgtggcgcggctgtcgctggccgatccgctgcatgtgatcgtcggtggccgcctgagcaactgggagaccgaccaggtctacttcggcagcaagcgtaagtaccggtaccgcaacgagttcgtgccgtatgccggtgtggtctgggacctcaacggctacagcagcgcctacgccagctacaccggcatcttcaagccgcagaacaaccgcaacgaatccgggcagatcctcgatccggtcagtggccgcagctttgagctgggcctcaagggcagctggttgcaggagcgcttgaatgcgtcggcggcgctgttccgcacccagcaggacaatctggccgaggccaccggtggtctggtcgagggcagtacgcaggcggcgtatcgtgcggtgaagggcgcaacggtggacggcctggaactggaactggccggtgagccgctgccggggtggagcctgggcaccagcttcaccaccttcatcgcgcaggacgcgcagggcagggcgatcaacaccgccaagccgcgcagcctgttcaagctgttcactacctggcggctgacgggtgcctgggaccggctgaccatcggcggtggcgtggactggcagaaccgcatgtaccagaccgccaccgcgcccggaaatcgccgggtgccggtgcagcagcccagctacgcactggtgaacctgatggcgcgctaccagttcagctccaatgtgtcggcggcggtcaacatcaacaacctgtttgatcgccattactattcgcagatcggcttctacaaccagggctggtacggggcaccgcgaaacgtgatgttcacggtgaaggtgggttactga

SEQ ID NO: 515857 - DNA, 1047 bp, Stenotrophomonas maltophilia
atgacatccattgctacttttgtcgaatcgatctccgagtcaattgaatccttcaagaatttttgcgtggtcgtatattggcttcaagacgagtctgatcgagaaggcatcttccaggagctttctgtaagactggcgggtacgcgtctacttccccatgtactacgaacatcagcttttcaggatccgaacgcgtgggcttccgatgccatgtctattttgagctcattgaggaccgaggtttcaaatttagttgatgagggccatggatcgcctttcgggattgtcgttatttctcgaggaaagatgaatgtcgcgcaggcgtcctcgcccgcgattgccccggattggatgcccggccatggagggcgtgaagtcacagtttttgcacgggatgttaggtcgatttcaacctgctccctggctgcagaggaagcttgtatcgattcaattaaatccatgctctttagtcttgagcatgcgttactggagatagtacgtgcaaagatcaaggtggaaaaacactttggtcaaaagatttgggaccaggtacttagggaacgatcccgcttagataagaagtccaagtttccagactactggtcagaaggcctggattcggtcactgacccctcaagctacaggcccagcttgacctccggatggtcgatgatatccgcaatgtgggagacgtttcttggcgcatcacctagtcagctgttgacaaagtcggacgcttttcgggagtacctatcaatcggatctgactggcttcctttccaaccggaaccctccccattgctaccgattatgtttcgcggacctgaagaccaccgaaaatcggacgatgaacttgcagcgcggggtgtcatcctcaccgtcggattatcatgtcaactcacgactgcatccgcgcatgccgatcagtacggccgcgtgagcgcttcaaccctaaatgggctctcacaggatcttcgccggactctcgctgcggcagagcgccaagctcgttgggccgcaaaagccgcaataaggaaggatcaatga

SEQ ID NO: 515858 - DNA, 2391 bp, Stenotrophomonas maltophilia
atggcttccgtgatagagcttcttgacacgattgacaaggagcgagagtcaaatccgcggggagcggaggaacagcttaataagctcatgcagacgctaggatcggcgaatcttcagaaatggttaccccagcttcaagccgctattggaaactttctacctaagagaaggaagagtctgcagtccgctctggaattgctacttgccgcaagccaagatcaagacagcagtgctatgccgacagaggatgagcacgaggctgcggatcggtggaaagcagaggtggtcgaagaactgcatgatctttcggagttccacatatttcaatggcctacctattacagggaatgggttgggaatagcgttgagagcttgctaaaccttgcccccaaactccaggataacgcgatgttggcgttccaatccgcagtcgccgctcactcaaaggaaatttttgagaagggtttcacctataaggttataggacagcgaagaggggaggattcggcccatgtaacagcactctcaggggtccagcgatttgccgaccttgccgttgagttctactccggcggcgcgattaaggaagcgaaaggagaacgtcgggttgcgctgcgccgagcgacttcaaggctgctcgctggaattctgtcaggcttcatagcatgtaacttcaagtccaaatcaggcgcgcaagtgctggcgtccagtcgggtgcgctggttccattacctgacgtttttagactcgcacgatttgacccagattgcggagcagttcggaagtggctctatatcgcagacgcttgcgcgccttgttcgacctctggcgtttgccttggatcgttgcgcggaaagcgtgaccagctccaatccactgccgcaagtcagtcagtacttccatgaaaagaagcgcctcgaagttctttgcgtttcttccagtgccaagcgaatggtggcaaagtcagaagttttcgttcttcttgatcctgaactacctccaatatcggatctaagagaagcagagagccgtgacatttctctcgttatttgcagtctaaagcctgatgtggccaggtcttctcaagccgagcgaatgcaggagaagatagttgacacgaatgaggggaatcaaaccccatctgaattcgagcagcgagcgtgcgcaatcctcaccggtgcctttagcattatttccgagggcgatcgcgaagcgatccttgagtacaactttgcaaggggattccccctaaataacccattccagacgaagtatttccatgtcgtcaggaaatccgtacgcaatctgcttcaggagatcgaaggtaggaatggagtgcggttgtggtgtagcgccagacgcagcggaaagactactgcatgtaatgacctaagcggctcactagcttcttccgagacggtggttcagacatgcgaagttttgcggcaagacgatttgtcagggcgtctttatgggcgaatcattgactgtattgaaaatgaagagccaattggccgaaggttcctcacagacattattgacgaggtccggcaaggctctggcgcggccgccaagactgtacttgtcattgatgagtacgaaactctttttggccgattgcggggagcagtgcgacgccaagaagatatcaaatattcaatcgtcttccctttactagatcagattgtagagttcgctcgtgaaaacatggtaatacttgtagggcagcaacccaacgctcattttgttttcatggatcagaacaagctcagcgcatatgttacccaggactcattccctctttttaggcatacccctggatcaacgactggagagtttgttgatcttcttgcgaaagtcatatctgagagatttgggtttactgccagcttcgcggataagctttttcaggagacctctgggcatccattcctaactgtgaacatgattgtttccttggtcgactggctgatagcaagaagggttagagttatcgatattaggttcgatgcaaagatgctagagcagtactttgaagaggacctttcacaccaagatgttgctcttaatacagagtatcagttctttctcgaggccgccgcagacgcaatgagcgagactggcaagtcgtcaaatccttggctctggtcagtatataaatctatgcgtatgttcgtcataaactatggcgtccatgagtgctgcgaaatatctgaattctcaagatcttatgacagggccggactgagctcgtcgggagtatcttctttggaaatgctcagaactgcagaggatgcaaatttcttcaaaattgattcgcacaatctcgttaggctggcgattcctctactaggacgaatcgccgcagccgcaacccctaggatctgctga

SEQ ID NO: 515859 - DNA, 852 bp, Stenotrophomonas maltophilia
atgagaactcagtctcacatcattgattccaaggcgatcaaagccgtcatggcacagctgcccgaccactgggtcgttcgggaactaaccgaacgtgactatggcatcgatcttctggttgagatttttgcacccgggttgaaagatgcgaaggggaaagatgctttcggtgcaaccggagccgttttccatatccagatcaagggcactgagaagcgactcaggcgggtaaagggaggagacacgataaactactccctccaaaagaagtccctcgtttacatggaaaaattcagcacaccatttttcctgtttcgcgtaagcattcaagagccgcagagaatctatttcatttggacccaaggctacatcaaagaagtcatggatcgcgaaacgcccatgtggcgcgatgacgccaaagataccattgtggtgcgcatccctacagcaaacgtgctcccacagggcctggaaagaatcgagaattttgcatttgaaccaaagttcgtcgaggagttgatcgagttttccgaaatctactcagacatttcgaacagaattgatgccatccgccacggagctcacgacgtcgacaaagacgtggtggaggatctcaagaatcgcgcctatcgcattcggcggctcgacgtactccttacccgcaacgagtgctgcattaaacgggatagcgtggatgaactgatcgcctacattggtgagcttgacacgccccaaggccgtggcggcccgcccccctgggacgacaactttacgtttcttatggaaagcccgctcgcaagatccggcacgatgtctcttgtcctgcagaacgatggatttacatgttattga

SEQ ID NO: 515860 - DNA, 708 bp, Stenotrophomonas maltophilia
ttggacgtgaacaaggtcgcatgggatctcacggacaaggcgcacaacggcggttggctgctccgcctgtttggacttgtcctagtagcggatgtgatgttcacgctgctgctcggcagtggcgtttgggaggggaggtctgcctcggccgatcaaccgttcgtgtatttggcggtgatcctcgtctatggtgcagtggtgaaggtcctcggtccttgcacttggattgtcgcgttggagttactgaattggatcacaggtctcatacagtcctggctcaacgtgtctcccaagccgcgccaacccagtcgagagcgccacgtaagccgccttgaggccgagcgctggctggctcaggaacccgacgcagcccgtcgggagccggtggagcgccaaatcgctgagcgacggaaagctctgaagggttggcagtctgttgtccaggcaggctgggtaggggtcgtactggtgatcgccgattggtacgtacctggttcgactcttagtcagctcacgagttggagcgcatggaccccttgggtgctaggtgcgctgtccgggctgccctgtctgattcaactgtgggttgggccccctgggcacaacatgatcgaactgccttcgcttgcggcagagctccgttcgcagcaatccaaaaccgcgttagcgtctgcacgggcatcaaaccgaaggagcatgggagtctag

SEQ ID NO: 515861 - DNA, 348 bp, Stenotrophomonas maltophilia
gtgtcgattgcggtctcgaacaagcgatacgaccacggtgactacgaggaccacatctggtttgattgcgattacacgctttccgaagagtccaagcccacccgggcagtcaaggggaccattgagttcatggacttgttcggcgaagtgaagttccggctgaatgtgaccgtgaactctcccatgagtccgggtcggcctcttgccaaccctggcattggattcaccttcaatcagttcatgcccgagcatcagtggatgctgaccaccgatctccatgacatgcagatcaaattcgtcgcctccaacatgatctacagcgacggtaccacccaggtgttggcttga

SEQ ID NO: 515862 - DNA, 882 bp, Stenotrophomonas maltophilia
atggatattgcaccaccctggttcgccgacctgtgtgcgcagcacggactggctgcccaggccgacgccttgtccagcctgctgcggccctgcctggcgttcgcgcccgctgcaacggacccaccgatgctgggggcgtcacgcaaaggtggcggtcccgatgttccggaagggtttgcgtggcccgttcatcgagggcgtgcgctggacttcctgctacagatcaacctggcggatctggccgatgcgccatcggggctggatctgccgtcaacgggggtgttgtcgttcttctacgacatggacgaacagccatgggggtacgaaccggaacatcgcacgggacaccgcgtcttcctgttcaacgccgacgagcttgtgcgacgcctgcccgcggccgatgaagcgttcgcacttgtcccttccgcgttggtgttccaccccgggctccgcctgcctcagctggaatcggccgagggcgcacgcgtcggcggatggatgacggaacaaggcctgggctgggacgaacgctgcgaagacgcgtacttcgagctggtcgatgccgtcgcagcccatcatgctggccgcgccaagccactgcacgcggtgggaggccatgcgcatagcatccagggcgacatgcagctggaagcgcagctggtcactcacggcctgtcgtgcggtgacggcactgcctacagcgatccgcgcaggcctgcatgggaacaggaccggggccagtggcagctgctgttgcagctggactcggccgacaacgacgcgatgtggggcgactcgggaatgctgtatttctggattcgccggcaggacctggccgcgcgcgatctgtcgcagacctggatggcgctgcagtgttgttga

SEQ ID NO: 515863 - DNA, 894 bp, Stenotrophomonas maltophilia
atgatgaaccttgcacattggcgcctgctggtcgccgtggcagacgcaggcaccatttcgggggccgcgcagcgcgtaggcatcacccagtcgggcgctagccaggccattgcgcagctggaagcggccctggggtttgccgtgttcaaccgtgagcgccgacaggtgggcatcaccgccttgggcgagcaggtgatcgatcacgcacggacgatgctggcgggactgcaggccatccgcacccttgccgatgacagccaagggctgagtggcgcccgcatccggctggccagctttccctcgatcgtttcaaccgtgctacccgcgctgctgcgtgatttccaccgccgccacccgggcatcgaaatcgcggttgttgagggctcggatgaagaggtggaacgctggctggaatcaggcgcggtcgaggccggcgtggtgatgaatccggccgctgaacgatctgccctgacgctcggtagcgatgtatgggtggcggtgctgccgcaagcgcacgccttgacacgtcgcgccaccgaacgtgggatcgggttgcacgaactggctgccgagcccttcatcctcgccactggcggttgcgcggtgaatggtcagcgcttgatggaagaggccggtttgcagctgagggatgtgcggatcacggtgcgcgactgggccagtgcgtgcgtgctggtccgcgagggcatgggtgtttcgctggtgccggaatcgaccctgccagcggatcgtcatggtctgcgggtgctgccgataacccctggcatccgccgtgtgtttggtctggtctgctcggaggtgggtcgcgcttcgcgcgcgacgcaggtcttcgtgcggggcctgggcgtggctgtggatccattggccccacattga

SEQ ID NO: 515864 - DNA, 342 bp, Stenotrophomonas maltophilia
atgcacgtgacgatctggcacaacccggcctgcagcaactcgcggggggcgctgaagctgatccgcgacgccggcttcgaaccggtggtgatcgactacctggacagtcctcccgacatcgccacgctgcgccaggtgctggccgagtcggggttgtccgcgcatgagctggtgcgcagcaaggagcaatcgttcgccgagctgggcctggcggacgccgatgaggccaccctgttggcggccatggctgaacacccgcgactgatcaaccgtccggtggtgcgcaccgcgcgcggcacgcgcctgtgccgtcccccggaaacggtgctggagctgctgtaa

SEQ ID NO: 515865 - DNA, 261 bp, Stenotrophomonas maltophilia
atgactggcatcacccccgaacaggcacgcgccaacgccgacctcgctggccgtaccaccggcgaattcatccaggacatcgattactccattgatgccaattcacgcgaaggcaaacgcaatatcgtggtcgcccgaccccgcggcctggcgcgcgaaggccaggccgaagcagtaatggcgcattaccaggaccgtggctacgaggtcgaacaactgagcgtaaccggtcacgcctggaacctgcagatcggctggtaa

SEQ ID NO: 515866 - DNA, 354 bp, Stenotrophomonas maltophilia
atgaagacctctgatacttctttcccgcccaccggtcacgcgccggccaatgccgacgcggcaggcgagcccatcaccttcgtcgcgcagttgcgtggtatcgacagcgggggcgcgtccgatggacggccctggcccgaacgccagctcaatcccggccgttgcatggccctggccgatgccgattgcgcattggccgggctgctcaccgtgcatgccattctgctggcggccgagcgggcgcggcaggatggtgggccggaccaggacgtgggcgaccgcgtgatcgagggtctgatccaggccagtcgcgcgctgggcctgtacgccggcctcaacgtgcggccctgctga

SEQ ID NO: 515867 - DNA, 750 bp, Stenotrophomonas maltophilia
atgattctgggcgctcaagccaatctgcgcacaaagccgacctcccgtacacccgaggaggtgctgagtagggccaggggacttacccaaagcctggcgcggacgcactcattattgaagagctggtatgcgttgccctcgggtcccgcagataagtatgtgtccctgcaagacgccgatgccttgctgggttcaatgaggagccgtattgagagcagtcgtagccgtttcggccactatgaagagcttggagcttcattgatgctggccaacgttgacaatgatcgggattggcgaaagcccggtgtggttgtgctcgacttgaacccaacatcaggacgcaatagtttcagtattaaagggatcgcagccttcggagaagctgcttcgtcagtcatgctcaatgcattgatcgaatcggtgaaggcgattcagccagaattcgcttgtacagatgtcaaggctagaacgctcgaaaatgaacttgttaactaccagatcagccggcgtctgtatcagcaccgtcagttctttggctggatgggcttcgtgcccgcgcagatcacccacgcgcagatccgcgacgcacactcggtccatccggttgatggcctggggacggtgatcgtctctgtaccgggcgtgttcgaccccaccgacgacgcgcaggtcgacaaggtgcaccgcgtcgaaatggatctggccagctacgacctgctgccggtgacagatccccacttcaagggctga

SEQ ID NO: 515868 - DNA, 801 bp, Stenotrophomonas maltophilia
atgggcaccagaatcatcggcccgcggccttggcttgggcccggcatgggaggcggcaacggcggcgtggatgaagacggccatccggtggaaccccacggtgggccgaccaccggtgacgtggtcgatggcattcgcgatgtggtggatggcatccagcggcgggtgcgcggtgaagccaagccggatgcgcgcgctgagccgaaggtcaaggcgcgggaggtggactgctcgcagatgcccgacgaaaccgcgtgcaacgagtgcctgctgaaggaggggttcatcggtccacccctgaccccgcgctatgtgacccaaagcaatctgatcaattacgagtatcagctgtacatcgccaatctacgctcggcaccactgcggtttggtttcatggtcgccgacaaggcggatcctgatcggcggttgttctcggtggatacgttgtttgactaccttgaacgcggtgggttctcacgcaccgtgcaggagtggcacttcaacgcttgcgagtttgatgggttctggttgaaggactgcacggtggtggaggcgaaggggaggtatgaccagtttctggatgaacatggagacgtgaagtatggcttcgttcggcagagtgtcttcggtccatggcgcgagcaaatggataggcagcgtgccgcgattgggatcgccggggcatcagccaaacttttgtggtgtttcatgcagccgcgggtgatgagtgcggcgataacaatggattttgtcgatccacttctctgcaggtacgagccgttctttggaggaaatgcatga

SEQ ID NO: 515869 - DNA, 567 bp, Stenotrophomonas maltophilia
atggccactgcgggcatgaacgatgtcaagaacgggatgaagatcctggtcaacaatgaaccggccgtcatctccgagaccgagttcatcaagccgggcaagggccaggccttcacgcgcgtgcgctatcgcttcatcaagtcgggccgcaccgtggaaatgaccatgaaggccaccgatgacgtggaagtggccgacgtggtcgacaccaacatgaactacatgtacagcgacggcgagtactggcatttcatggacccggaaaccttcgagcaggtgcaggccgacaaggccggcatgggcggtgccgagaagtggctgaagggcgaagagtcctgcatcgtcaccctgttcaacggttcgccgatcttcgtgcagccgccgaacttcgtcgaactgaagatcaccgagaccgatccgggcgtccgtggtgacacctcgggcggcggcggcaagccggccaccctggaaaccggcgctgtggtccgcgtgccgctgttcgtcaaccaggacgagatcgtcaaggtcgacacccgttcgggcgaatactccgcacgcgtcaagtaa

SEQ ID NO: 515870 - DNA, 1485 bp, Stenotrophomonas maltophilia
atgcccgatctctctcttctgttcgacaccgccgccgcgcgcacgctcgatgcgcgcgcctcggcattggccggtgacggtggctggggcctgatggcacaggccggcctggccggctggcaatgcctgctgcagcagtggcccgaggcccgagcgttgtgcgtgctggtcggcgccggcaacaacggcggcgatggctacgtgctggccacccatgcgctgcggtcgggacgcccggtgcaggtggtcacgctgccgggcaaggcacctgccacggcgctggcccgccaggccgcggcggactttgcggcggcaggtggctgcgtcgtcgcgttcgacggccagctgccggcggccgaggtgtatgtggacgcgttgttcgggcttggcctggaccgggcgccggcgggcgaggccctggcgctgatcgaggcgctcaacagcacaacggcaccggtactggcgctggacgtgcccagtggcgtcgacgccgataacggtcgcgtgccggggggggcggtgaaggccgaggtcacactgcagttcatcgcctgccaccgtggcctgtacaccggcgatgcactggaacacgtgggccagcgccggttggcgccgctggaactgcctgacgccgcctgggacggcattgccgccagcgcgcagcgctggacgggggagcgtctgccggcgctgttgccacctcgccgggccaatacccacaagggtgaatccggccacgtgctgtgcattggcggcaaccatggcagcggcggtgcggtgatgctggccgccgccgccgcgctgcgcgcaggtgccgggctggtcagcgtcggcagccgtcgcgatcacgtggcaccgttgctggcgcgcctgcccgaggcgatgagccacgcgctggaagacggcgatgcgctgcccgcactgctggacagggccagggtggtggcgatcggtccggggctgggccaggacgaatgggcgcgggcgctgtctgcgcgggcgctggcctgtggcaagccgctggtggtcgacgccgatgcgctgaacctgctggcgcaggacccgcacgcgttgcccgaggccatcctcaccccgcatccgggtgaggctgcgcgtctgctgggctgcaggactgccgacatccaggccgaccgctatgccagtgcgcaggcgctggccgagcgcttccatgccgtggtggtactgaagggcgcgggcagcatcgtggccgcgcccgcgcagctgccgcgactgatcgccgccggcaaccccggcatggccgtcggtggtatgggcgacctgctcaccggcatcattgccagtctgcgtgcgcagggcctgtgcgcgttcgatgccgccgccgccggcgcgctgctgcacgcactggccggcgatgccgctgcggccgaaggcgcgcgcggcctgcttcccaccgacctgctggcgccgctgcggcgactggccaacccggaacactccccatga

SEQ ID NO: 515871 - DNA, 927 bp, Stenotrophomonas maltophilia
atgcggcttgaagcggcgctgcagcagttcgtcgatgcggtcgcagcccatccgctgccgcatgacctgcgggatctgcgtgcgatcagtgcaacggcgctgccacagttgcagggtgcgccgcagcgggtggcacaggtggtcgagtacagcgtgacggcgcgcgacggccacgcgttggaagtgcgcctttacacaccggaggggctgcccgaaggaccggcaccggccctgttgttcgcccatggtggcggctggttccagtgctcgctggcggtctatgacggtccgtgccgggcattggccaatgccagtggctgcgtggttgccgcggtcggctaccgtctggcgccggaacaccccttcccagtagcgctgcacgacgttgccgacgtctggtcgtggctgcaggccaacaccgaacgccttgggctggactcgcagcggctggcaatcggcggcgacagtgcaggcggcaatctggccgccgcctgctgcctgctgctgcgcgatctcggcctgccgcagccgcgccgtcagctgctgctctacccggcactggacgccggcatggacagcgactcctatcgcgagtacgccagtggctactacctcagcgccgaactgatgcaacgctgctggcaggcctatctcggcgatccgggcgcaccgccggcactggcctcgcctgcccatgcaacggatctgcatggattggcgccggcctcggtactcagctgcgagcacgacccgctgcgtgacgaggccgaacagtacgcgctgcggctgcaggcggcaggtatcgactgcacgctggagcggctgcccgggatggtccacgcctgcatccatctgcacacggtcagtgcctccaccgacgtggccgtgcagcgcgccggcgccctgctgcgccaggccctgtgctga

SEQ ID NO: 515872 - DNA, 552 bp, Stenotrophomonas maltophilia
atgcacctgcaccccaccctgctcgcctgcctgctgctggccgcctcaccggtgatcgctgccgagccggtgcgtgcggtcgagaccctggacatcgatcgctacgccggccagtggcatgagatcgcacacctgccggtgtcgttccagaagcgctgcacgggtgagatcaccgccaattacggattgcgccgcgatggccgcattaccgtcaccaacgcctgccgcgccgacgatggccagcgcctggtggccgagggcgtggcccgcccggtcgccgggcacgccggccagttgcaggtgcgcttcgttccggactggttgagctgggtgccactggtctgggccgactactgggtgctggcgctggacccggactaccaatgggccctggtgggcgaacccggccgccgatacctgtggatcctctcgcgcctgcccgagatggaccgggcccagttcgagcagctgaaggccaaggccgaggcaatgggctacgaccttggcccgttgcgggtcatggccccgctgcgtgacgcgccggccgattga

SEQ ID NO: 515873 - DNA, 492 bp, Stenotrophomonas maltophilia
atgatgaccaccgcaccggcaccgatcacgctgacactgctgcagaagctgctcggtgataccgacccgccgctgagcctggtcccggtgacccaggatgtgttcgtgcagcgcgcgacggtgtccagcaacatcccgctgcgcccgaccctgtggaacatcggcctggccacggccgaccatggcgcgccgatgccgcccctgcacagcggcatgcagctgcgccttcgccgctggcccgacttccgcatcctggcccatcgccccgaccacttccagctgtgtgcgctgctgataaagcagggtgcctcggtgcagacgtgctgtgacctgctcgaactgccgcgcggcaccgcgcagtcattcttcaacgcggccttcctcactgcctacgcctttcccgtggtgggcgaggaggttgccgtccgcccctccgccacggagggcctcgtcaatctgtggcgacagcttcgcatccgctggagtgcatga

SEQ ID NO: 515874 - DNA, 372 bp, Stenotrophomonas maltophilia
atgaatgagatcgctgccacttcggcactgggcgtcctgctgcgcgaggtcagcggcatccaggccatcgtcgtcgccagtgccgatggcttcgccctggcccaggcagggccgcagggtcatgtcgctgaccgcctggcggcgatgaccagctcgatgcttggactcgccggcgcactgggccgcgagctgcacttcggcgaactggacacgctgatcctcgacgccaccgacggcaaggtgctgatgcttgccattcccggaacacggccacgcctgctgatgaccgcatgcgaccaccgctgcgtcatcggcaacgtgctgtggcatgccaagcagtgcgtgcgtgccctggccgacaacacgaactga

SEQ ID NO: 515875 - DNA, 468 bp, Stenotrophomonas maltophilia
atgaataccgcaatcgccccgacatcccgcgcaggcatgcgcacttcccggcagcagggtttttctcttatcgaactcatggtggtggtggcgatcatcggcatcctggccatgatcgcgctgccgcagtaccagcggttctcggccaagaccaagctggccgccgcactggcagaagttgcgccgggaaaagtcggcgtggaagcgttgctggccgaaggcgccgacctcgagaatgcaacggctgaagcgctggggctgcctgccaccggctcgcgctgccagtcgttcgacgttgcagtggatgcgacggcagaccaggcccggctggtctgcaacctgaaggacgacgcaacctatggcgtcggcggcttctccctgagcctcgtccgcagtggcgcaggcgtctggaactgcgagagcgacgtcggcgacaagagccttctgccagaggcctgccgaacctga

SEQ ID NO: 515876 - DNA, 462 bp, Stenotrophomonas maltophilia
atgaacgcacatcccgcagcgcacgcgccaacgccgcgtgcccgacagaatggtttttcgctgatcgaactgatggtggtggtggcgatcatcggcattctcgccatgatcgccctgccgcagtatcagaggtacgcgggcaaggcaaagatggcagcggccttgtccgagctggccgcggggaaagccggggtcgaggcactgttggccgacggtttcgccgatgacgacgtcagctcggaagacatcgggctgccagcccagggggcacagtgcgagcggtttgaagtggccggcagcgggacgtcctttctgcttacctgttgggtgaaacccgataccgcgctcggcccgggtaccccgtcattgaacctgcggcgtgattactggaccggcacctggacctgcatcggcaatacgcatgatgaaggcctgcttccggaaggttgccgctcttcctga

SEQ ID NO: 515877 - DNA, 363 bp, Stenotrophomonas maltophilia
atgagcctgcgcccgcacctgcgcgccgaaacactcatcgaagcccgctcgcccgccgaagtgctggcgccgatcgccaacccgcactgtacggcactggtcatcgatccctgcatgcccaccatcggccagaccgacggtctgccgttgctgcgccagatctgctgccttcgcaacgatctgctcattctcgttctggcccaccaacccctgcgcctgttgcaggatcgcagactgccgacgcagatccggcatgtctatgccaagacggtcaacccgcgatggctgtgtcgcttcatcagccaggccctgccccgggcatcgccggggactacatcaacgatgccgggtgacgcccgatag

SEQ ID NO: 515878 - DNA, 258 bp, Stenotrophomonas maltophilia
atggtcattaccgtcaaatgcagtgccgcacagtggtccctgctggaccccgccgtaggcgcgcccgaggtattcggcagtggcgctgccgcgttcgacgccgccgttggccgggcaagtgcccatcatcgccggaccggccagggcagcatggtgcgcgtggaagcgctgggcagcagcgtggaagccgtgcgcttcgaggcgagcgctgcggtgactgcccctgctatcgggcgtcacccggcatcgttgatgtag

SEQ ID NO: 515879 - DNA, 528 bp, Stenotrophomonas maltophilia
gtgcgccagtcgctgctgcaggccaccgttgcgatgatcggccagcatggcctggccgccctgaccgtacaggacgtcgcgcgcgcggccggggtcagcaagggggcgctgttccaccacttcagcagcaagcaggccctggtcgatgaggccattggcgggctcatcggcgaattcgaggcacgcgtgcgcgccctgctgccggcagaatcgtcgggctacggccgcttcagccgcgcctatgtccaggccaacttcgagcacctgctgcagcaggaacaggacaacgatatcggcctcaccctgggcaacctgctcgaaccggccctgctggtgcgctggcgcgactggaagcgggccatgctggtcgaattccccgacgaagccgatgacccccggctgtacgctgcacgctgcgtcgccgatggctattgggccaccgcctatgggcgcccgctggatgcgctggaacatgccaacgcgctggcgatggccgagcaggcgctgaagctgtgtgatccgttgtag

SEQ ID NO: 515880 - DNA, 450 bp, Stenotrophomonas maltophilia
atgctgccacccgatgcctccccgacgatgctgcgtctgcgcgatgcggtgccgagcgatttgccggtactggtcgcgctcgacagcgtcgcggccggcgatccgcaacgcgcacggcagattgccggctggctggcgagcgccgccgtgtacgtggcggaacgggacgatgtcgcggccggctatctggtcatccaccatcacttcttcggcgaagccttcatcgaaatgctgatggtggcgcatgcgcagcgccgccgaggcatcggggccgccctgctgcgccacgcgagcgcactgcaggggcagcgcaagctgtttgcttcaaccaatgcctccaatgccggcatgcaacgtctgctcgctgcctccggcttcatcggcagcggcatcgtgcacggtctggacgaaggcgatccggaactgatctaccgctttgccggcagctga

SEQ ID NO: 515881 - DNA, 264 bp, Stenotrophomonas maltophilia
atgtgggcgcgtgccttcgccggcctcgtcgccggcttcttcctggccgccgcggtgaccgggctggtcacctggctgcctcccggcccttggcagaacgcgctggttccgagcctgatcgccttcgtgccgctgtggatgctggcggccctgtgggcgttcagtttccgcagcgcactgcgcgcctggctggtgctggccggcagcgcaacggccggcttcgccgtgctcgggctgctgcgcctggccggtgccgtgcaatga

SEQ ID NO: 515882 - DNA, 678 bp, Stenotrophomonas maltophilia
atgctgcgccacggcggcgcgctggtgctggcggtggggttggggggatgcacgccgcccgatccgccggtgctggcacctgcgccggccgcaccggcggcgattgcgccggcgcagcgcccggccagcaacgacgacatggcgcatcgcccgatcgatgacgcccctgcgccggtggtccccccgcaggccgatgaggacagcgcaccggcggtggtctcggtggccctggaccatgccggtgaggtgctgatcggccagcggttcagcgaagttgaagcggagggcacctggcattcggccgggctgcacgaggccacgcaggggcgctgcgaatactacgagcgcggcacgctgccggaaggcgtggcgatgatggtgcaggacggcgacgtggttcgtttcgacctggccccgatcgatgattccgggcaggtggtggtgcagccaggtccgttcggcctgcgcctggacatgccccgcgcgcaggcactgcagctgctgccgtccggtgtgaccgcccagccctatggcgacgacccggaagccggagagagcctgctctggcaggaccccggttcggacctggcgatccgcgtggagatcgtcgatggcgttgtatcgagaatgtactggggcgccagcggcgccgttgacctgattgaaggatgtacctga

SEQ ID NO: 515883 - DNA, 708 bp, Stenotrophomonas maltophilia
gtgaccgcaccggcgacactgccgtcaccagtgttgccggacacggccgatatcgccgtgctggctgactacggtacgccactgctgcaggcgctcacccagcgcgccgctggcgtgccctcggttgcaggcgaaggcctggtggccgcgttggcacgcattgccctggcactccaggccggcaaccctgcgcagatccggcgccaggagagctggtgggggcgcctgcttgggcgcgatgtcgaccgtgaggcggaagggcgtgcgctgcagtcgcaattgggcgtactggccctgcaggcgcgcgagcaggcccagcacctgcaacagcatcagcaggcccgagccttggccatcaccgagcgtgcagaggcggccacggcattggacgcctgggtcgagctgggcgtatcacggctggagcgatgtgatgcggccggccaggccgcgctgtcgcagcggctggatcacctgcgccggctggctgcgctgcatcgtgtcgaggccgctcagtggcagctgctgcaggaccaggacgcggtgctgctgcagcgcttcgcgcgcatccacgatgttctgctgccggcctggcgacaggccgctctggcgaagcaggccggtgccggtgccgccctggccgcgagggccagcacactgcacgcccagattgatgacgaggtggcggcggctcaggctagactgccgtga

SEQ ID NO: 515884 - DNA, 825 bp, Stenotrophomonas maltophilia
gtgaccacggcgccgaccgccgccggcgacggcggcggttcacggcgcttcgtaccgccgccacgcgcggcggtcgatccacgggtgttcgcgcacccgctgtttgccggcgtgcaggacttccgtgacctgctggacggcacggcatggccctccatcgcggcgcttgatgcacgcctggccgtgcccggcaagcgcctggttgaacagggtgccgcgttgctggccgacggcctgcactatgaggcgcgcatcgcacagggatgcattgccacccgcgccgacaactggcatgacctgttcaatgcgctggcgtgggcacgccatcggcagctcaagcatgtactcaatgtgcagcagtgcctgcatatcgaggccatgccggcgggccagcgaaatcgcgcccaggccgcgttgacccagttcgacgaaagcggggtgatcgtgcgggtgtgcgatgagagggggctggcggcatgggatgcgcacgactggccgacgctgtttgaaccgatgcactggcgcaccggcgttgtggccgttgcggcggtgttcggtcatgcgctgatggagcaggcgttgctgccgggccgcctgttggtcggcaaatgcgtggtggtgcagggcgacgacgacgatgcctgtatcgccgaagttgctgcggccatccgcgagggccgggtgctgaccgatccgttgcagctgcgaccgctgccgctggccggcatcccgggctggcacgaggggcaggacgccgccttctatgccaacaccgattacttccgcccgctgcgcgcagggcgccattacccgccgcctttgtag

SEQ ID NO: 515885 - DNA, 1329 bp, Stenotrophomonas maltophilia
gtgcagggcgcagccctgccgagcaaccctatacttgccgccgtgaccgccttccctgccctcgttccgctggatgcaccgctgctggtgggctacagcggcggtgtcgactcgaccgtgctgctgcactggctgtggcgctgcgcccaggcctctgccacgccgctgcgcgcagtgcacgtgcaccacggcctgcaaccggccgccgatgactgggtgcggcattgccagcagcagtgcgcagcgctgggcatggaactggccgtgcaccgcgtgcaggttgatctgcaccctggcctcggcctggaaggcgcggcgcgccaggcacggcgcgccgcgttcgccgccgaactgcgcgacggcgaaacactggcgctggcacagcaccaggacgaccaggccgagaccttcctgctgcgtgcactgcgtggttccggcgtcgatggacttgccgcgatggccgagcacaatcagctcggcgcacaccgcctgtggcgcccgttgctgcatgcaccacgcggcgcgctgctcgactacgccaggcagcacgcgctgtgctggatcgaagaccccagcaacagcgaagaccacgccgatcgcaacttcctgcgtctgcacgtactgccgctgctgcgccagcgatgggcgcatgccgctgcggcattggccggcagcgcgacgcactgccggcagacccgcgaactgctggacgaagaagacgccgaactgatcgcacacctggaagtcgcaccacgcgtgctgtcgctgcaactgctgcgccaggtttcgccgggccgtgccgcgcgcgtgctgcgcgcctgggtgctcggccacggcgccccgccgctgccggccacggtgctgcagcaggcactggagcagctgctgccggcagccaatgaccgtcaggcacaggtacgctggcacgaccatgccatccggcaatggcgcgaccatgcctatctgctgcctgcgcggctgccggctctgcccgccgactggcaggccacatgggatggccgcgcgccattgccgctgcccgacggcggccagctgcgcctgcggggtgccagtgctttcgagcagccgttgcagatccgtgcgcgggtgggtggcgagcgcatcctgatgcccggccgccagcatgcccatgcgctgaaggactgcctgcaacgcgagcacctcgcgccgtggcgacgcgcgcagctgccgctgctgtttgcggacggacaactgctggccgccgccgacgtggtcatcagcgcgcccttgcaggcatggctgctggcccgggacgcgcagctgcagtggcgtcccggcggttggtga

SEQ ID NO: 515886 - DNA, 651 bp, Stenotrophomonas maltophilia
atggttcgtacgtatcctgttgcatccgcgcatttcgaccccgcccgcgttgccgcctggagcgcggccatcgccctgcatctgctcgcgttcctgttgctgctggtcccggccacctaccaggccatcacggcgttgccgcgcgacgacaccacggtgcggttgattcccagggagctgccgcctccgcccgcgccgcccaccccgccgcaacacgtggacgtggtgccgaaacagcagacggtgccaagggaaaccgcgctgctgccaccgccgacggccacgctggagaaagcgcagggcatcgtcacccccgccgccgaatccgcgccggtgccgcaggcgctgaccatcgaccgttcgccccccatgcccggcgcccagctgcaatacctcagcgccccgccgccggcctacccgatcccggccctgcgcaatcacgagcagggcacggtgctgctgcgggtggaggtggacgaccgcggccagccggtcacggtgagtatcgagcgcagcagtggttcgcgaacgctcgaccaggccgcccgccagcaggtgctgcggcactggcgtttcgagcctgccctacgtgacggcgcagcggttccggccatcggcctggtgccggtgcagttctccctgcccgactga

SEQ ID NO: 515887 - DNA, 975 bp, Stenotrophomonas maltophilia
atgctgatcgtgcgcgcactgctgtccacgggctctctgctgcttgcactgctgccgttcatcacggcgaatgcggcacctcccacctggcatcctccgcagggcaccaccgagtttccgttgtggccgcagggcagggtgatggcgccgccgaaacggaacggccccgagcagatcagcgaggtgacctccaacgccagcggcgaacgctggatgatgctgcagaacgtggccgtgcccacgctcaccgtgtttgcgccgaaggggccgcccaatggcaccgcggtaatggtggtgcccggcggaggctaccgggtgctggcgatggatctggaaggcagcgagatctgcgactggctgaccgcgcagggcgtcacctgtgcactgctgaagtaccgcgtgcccgcgtccggcccgaactgggatcctgaatgcaactgccgcgatattccgaaggtgccgatggcgctgcaggatgcacagcgtgcaatgggcctgctgcgcgcgcaggcgcagcgctggtcaatcaatccgaagcggatcggtgtgatcggtttctcggccggtggccatgtcgtggccggattgagcacgcatgcgcggcgcagctacgtgccgctggatgccgccgatgcacaacccagccgccccgatttcgcgatggtgatgtattccgggcacctgtgggccgggcatggcaaggggctgtcgctggtcaaggacatcgtcgtggatgcggcggtgccgccgaccttcatcgtgcaggccagcgacgacccgaccgatgacgtgcgcgaatcactggcctactaccaggcattgatcgatgaaggcgtgccggtggaaatgcacctgttcgcccgtggcggccacgctttcggcctgcgcctgaagaatgctccggtcgcagcatggccgcagctggccgagcgctggatgcgggacatcggcatgctgccggaacaggcaccgtag

SEQ ID NO: 515888 - DNA, 237 bp, Stenotrophomonas maltophilia
atgtcgatccgcaccacctgcgccgccagcctgctcgtactgcttggcgcgaccagtgtcgcccacgccgcaagctactcctgtgcctatcagatcgggagtggcgaacaggccggaacctctgatgcctatgtcatcgaggccgagtccggcgtcgacgccaccaaccaggcgctgtcacggctcaatgccgagtacggcccggtggccttctcactgcagtgcaccgccctctga

SEQ ID NO: 515889 - DNA, 717 bp, Stenotrophomonas maltophilia
atgcgccgttacgcctttgccgcactgctggttgcgctgccctgcgcagcgcacgctctggatctaccgccaacgcagtacccggtgctgccggcacaggcccccgatgcggccggcttcgtgcccactggctggaccctggaatcaagccgcgagggcgatctcgaccaggacggccgcgcggacctggtgctggtgctgcgccagcaggaccctcgcaatgtcatcgagcacgatggcttcggtccctcgccctacgacagcaacccgcgcatcctcgccatcgcctggtcgcgtccgtccggctacgtgcttgcggcgcaggaccaccagctgattccacgcccggacaacccggtgatgagcgacccgcttgaagacggtggcgtcagcatccagcgcggcacgctgaaggtggcgttgttctccttctccagcgcaggcagctggtcgatgggcaccaccgcgttcaccttccgctggcaggacggtgcgttcgtgctgatcggctacgatcaggattcggtgatgcgcaactccggccaggccacgtcgctgagcgtgaatttctccacgcgcaaggtgaagcggatcgaaggcagcatcgaggacgacaaggaacacgtgcgctgggagccgctgcgcggccgccaacgctggacgctgcagaccgtcggcgacggctggagcttcgatcccatggttgcgggccgctga

SEQ ID NO: 515890 - DNA, 1335 bp, Stenotrophomonas maltophilia
atggcacatggaagggacgctgtgttgaagatcctgcgcggactgggctgggccggggccgccctgctggtgctggtcatcgtggtgtggtgtgcctcgcgcctgtggccggtgcccgaatcgagggtgcaggcgcagcagcggctggaggcgcggttgccggcgcatggccacaacggttacgcactgttgtggacgctgccgtttgacggactggatgcgggccagcgcgagcgggcgctggccgaggacgcgcggcgctggaatgccgatccacggagggctggcagcagcgctacgcatctgaccccccgccatcgcgaggtccgctcgcggccgggcgccagctgcgggccgatggccggcaactgcctggcccaggtgcgtgccgatccgcagcgcttcatcgacgcgcatgccgggcaccagcagctgcacgcgcgcttggaccagctggccgaggcggatcatttcgcgtcgccgttcccgcccaagggcgatggcatcctcgtcccgttgccgacctatggcctggtggtggacgccaccagcgctcacgcgctggcctatgtgcagggtgacatcgacggggccttgcgtggcagctgccaggggctgcaactgggacgcaggctgctgcccggcggcagctacctggtcgagagcatcctcggcgccagcctggtgcaggccaatgcacagctgctggcggacatgctggttgagcttccggctgactatccgctgcccgcgcagtgcgagcgggcgatgcagccgatgcgcgccgacgaacagagcctgtgccgggcgatgcagggcgagtatgcgatgagccgggccgccatcgagacctcggcgggggaattcggcggcgtgctggtgctggatcgcagcagcaccctggcgcgcgtggccggcaacctcgggtgggcctgcggtgcggcggcgacggccgcgctggatgcggatcgaccgttgccgctgcccgcaccgccacagcgtgacttcggttgcctgtcgaacatgctgggctgcgtgctgaccgagatcgccgcgccggcctatccggcctatgcatcgcgcgcacaggacgccgctgcgatgctgcgactgctgctggcacagcgttggctgcggcagcaggcgggcgatgcgctggatgctttgcagcggttgcctgcgcagttgcgctcgccgacccgggcgccgcagctgtcggccgatggccgacgcctgcaggtgccccgtcgatcccctgcacatcgcgctgaggagggcgcctggttgtcggttccgctgctggcggacgcgggttcaaccgtcgccgccgactga

SEQ ID NO: 515891 - DNA, 444 bp, Stenotrophomonas maltophilia
atgcgcaagaccttcaagaccctgctgctggcactgccgctgtgcctggccgcgctttcggcacaggcgtccgacagcccggccggccgctggaagaccatcgacgacaagaccggcaaggtgaagtcgatcgtcgaaatcacccaggccgccaacggttcgctgtccggcaaggtgctggacgtgctgcagtcggacaagggtcccaacccggtctgcgacggctgcgagggcgccaacaagaacaagccggtgaagggcatgaccatcctctggagcctgaagcccgacggcgccagcaagtgggccggcggccagatcctcgacccggctaccggcaaggtctacaaatccaagatggaactgcagcccggcggcaacaagctggacgtggccggctgcatcgccttcatctgccgcacccagacctggatccgcgactaa

SEQ ID NO: 515892 - DNA, 1149 bp, Stenotrophomonas maltophilia
atgtaccgtcctgccgcccgatgcctggtcatggtgctggccgcgctggccgcagcgcccgccttcgcgctggacgccccggctgccgcctccgccacccgcagcgccgcggtggtcattccagcgccgtcgcaggtctcggaaattccgccggccatgcgcgagatgctgcgcacccaggtgatcagtcgtggcttctcgcgcgagcagcgcctgcaggggctggtcgagatgatcttcgaccgccatggactggacttgcagtacgacgccgatgccaccctcaccgtcgccgaaatctggcagcagcgccgtgccaactgcctggcgttcacgctgatgttcgtggccctggcacgcgaagccggcatccaggcgcgtgtgcaggaagtcggccaggtggtgtcctggtaccaggaccaggaccaggaccaggggtttgtctacagcgtcggccacgtcaatgccggggtcggcttcggcggtcgcttcgccaccgtcgacctggatcgcaacgtgctgtacgaccgtcgcggcccgcaaccgatcagcgcgtcgcgggcgctggcgcacttctacaacaaccgcggcgccgagcgcatggccagtggcgatctggagggcgcacgcgcgttcttcaacgctgcgctggcgcaggacaacaccttcgctgccacctggaacaacctgggcgtgctggaaaaccgcagtggcgataccgctgcggcacgccgtgcgctggaagtggccctgcacctggacgggcgccaggatgcggcactgagcaacgtcagcgcgttgtaccgccggctgggaatggtggtgcaggcacaggcgctggaacagcgcctgcgctcggtgcaacgcgaggatccgttcgcgcagtacatgttcggcgcacaggccgaacgtgccggccggttggacgatgccatccgctactaccgccaggccgtgcgcctgtacgagaccgcccatcagttccacttcgggctggcgcgggtgtacttcctgtccggccagctcgggcgcgccgatcgtgaactgctgcgcgcccaggaactgggcggtgcgcagcagcaggcgcgctaccaggccaaactggacagcctggcccgctggcgcgcgcagcagcaggtgcggcgctga

SEQ ID NO: 515893 - DNA, 1407 bp, Stenotrophomonas maltophilia
atgagcgggccgcgcggggtgaagtggacctgggccacggcatggctgttgctgctgctgtgcctgttgccgctgggggtgatggccaccgttgcagtgcctgcgctggatgatccggtggtagacagcgcccacgcgttgtcggccgacacccgcaacacgctgcgtacgcaggcgctacagctgcaggcgcgcaccggcgcgcagctgcaggtgctggtggtcgaccacgttggcgaggagggcatcgaagcgtatgcacagcgggtgttcgagcagtggcagctgggccgcgacggtgtcgatgatggcgtgctgctgctggtggccgtgcaggaccgccgcgtgcgcatccagaccggctacggcctggaaggcgcgattcccgacgcctacgctgcgcgcatcatcgacaaggcgatcgtgccgcgcttccgcgaaggcgacctcgaccagggcctcctggaaggaacgaacgtgctggtcgcgctgatcgacggcgagtcgctgccggaatgggaagaaccgtcggcacgcaacgtgctcccgccggactggcgcagcgccgattcggtggttgcactgacgctgctggccggctttctcgccggtctgtggcgttcgccgtccacacgaccggcggcaaagacagcggacgacttcgcacgcaggcatcaccagcgccggcgcggaacatcgcgtgcggccaccccggcgcaggcgcgagcgaagcggttgccggcctggggccgcccgatgctggtgaccgctgtcgtggccatggggatgctggcggcggcgctgtgggcgccccgggctgcgctggcggcgctgtgcttcgtgctggcgctgtgcgtaccggtggcgagcctgctcggctggtgctggcgccgcagccgcgcgctgcgcgtggtgttgctgggcctgcttgcggtcaatgcaggtttcttcgtggtgatgctgctgcggggccagttgccgcccagcctggccctgcacacagtgctggacctggccgtgggcattgccgcgatgctggtgtttttcctcgtacaggccggtcgcgcgcgctggcacaaggatcgccgcagcttcgcacttcggttcgcagtgttgttgctgctgagcgctggttacgcactctgcgcactgctggccatcgaacgggccgagccggctgcacgtcttgcggcaacaatcggctggagtgcgggcacgctgctgctgtacttcgcgtggatcttcaccttgctgccggctgacagggcgcgcggtggccgcggctcatccgctggccaacgcagcgcctccagcagcacatcgtccagcgcatcctcaagcagttccagcagttggtccgggggcggcggccgcagcggtggcggaggcgcgtcgggcagctggtag

SEQ ID NO: 515894 - DNA, 1080 bp, Stenotrophomonas maltophilia
atgcgcatgagaaccacagctttcggcgtgctgctgatgacagcctccctttgcgcccatgccgacggcgcacgggtggccggcgaacgccacggcagcacaaccgtggccagcgccgcggtgcgcgatgcgcagcaccgcgacagcctgcgctacacggtctggtatccagcgccggcccgtagccgggaaaccgccctgaccatcggcccacccgatgcgccgctgttcgatgtcggccgcgcggcgatggcggctcccgtcgccggcgagcgcctgccgacgctgctgctgtcgcatggcaatggcggcagcgcgcgcatgatgggctggttgggtacggcgctggcgcgtgccggctatctggtgattgcggtcgatcatcccggcaacaacggtgccgatgagatgaccctgcccggcagcctgctcacctggctgcgcgcggacgatctgcacgccgcgttggcggcggtgaaggccgatccaattctgggaccccacatcgacacccaacggctgggcgtggttggcttctccgctggcggctacacggcgctgctggccgccggcgcgcgcccggatctgcaacgtctgctggcattctgtcgcgcgcatcccgacgacggcgtgtgccaaccgcagcaggaagctgccacgcacacaatggaagcacgcctggccgctgcggcttcgcccgcgctcgctccctggatcgccgaggccgacaggtctcgcgcgattcccggcgtgcgggcggtgttcctgctggcaccggccatcgtgcaggcattcgcgcctgaacagctgtcctccttgcggcagccggtgtcgatcctgctgggcgacgctgacaaggttgccccaccggcgagcaatggcaacgctgcgcaggcaatgattccgggtgcgacgctgacgcgcctgccggatgttggccactacgatttcctgtccgagtgcactgcacccggccggcaacggctggcggcgctgtgcagcaccgccgtgccgaaggcgcagacccacgcacagacgattgatgcgacagaacgtttcttcggcgatgccctgcgctag

SEQ ID NO: 515895 - DNA, 597 bp, Stenotrophomonas maltophilia
atgatgaagacgaccattctgttgagcaccctcgccttcgcggcgatcacctccaccgcctgggcacagagctccggccaggcccccgctgcaaggaccctgtcgaccgtggacgcacaggcactgaaggccgaagccaccgggcgtagtttcgatgtgggcggcaaccgcttccgcctggcaccgtcggccaccgtgcagcaggccagtggtggtcagttcaggatcaccccggctgcggaagccgccgcggcaagcactggtgcccgtagcaagcgctcgctcgatgccggcaacaccggtgcggcggcgcggctggatgccggggccggcaagttcgccgcggccgtgtccaatgatggcgcaccggtggtggcgacttcgcgggtcaaggtgttcttcaccgatgcggcctcggcgcagcgtgcggcgaccgccaccagtggcaccgtggtgaaggtgtccaaggcttccggccgggcgattgtcgaatatccgtcggtgaacgcggcgctggatgcaaccaccaccttgctgtcgaccgccggcatcaaggcggccgagccggacgtggtgcagtgggaagaaaccaagtaa

SEQ ID NO: 515896 - DNA, 387 bp, Stenotrophomonas maltophilia
atgttgctgcgtcatcctgtcggcatggcacagcaccacacgcaatcaccgctgttcggcatccggggcccaggacggccccggcaggcgctgtccgtggcgcctgcgatcgacctgcgggccgaataccagttctggcaggtgtacgagcgtgtggtgcagccgctgcctggcggtgggctgcggctggcctggctggtctgccagaaggtctaccgcgaccgctggcagtacccgcacgacagtgacgaggtggcactgtcgcgcgtggtgttcggcgggaacatgacggctgaccgcgcgtcggagctggcggagctccacgcgctggtcagccgtcgggtggcggtgctggccaagcgtgggcggctgggtacggcggcgtga

SEQ ID NO: 515897 - DNA, 906 bp, Stenotrophomonas maltophilia
atgactcgctaccgcaaattgcccctgtcgattcaggagcagttggatctgctcgagcagcgtgggcttgccattggcgataccgccaatgccaatcgatacctgcagcgtgtcggctactaccgtctcatgggttatctctacacccagcgtgttcccggtagtgatcacttccatgaccaagcaaccttcgaggacgcggtcagcctctatgagttcgatagagggcttcgagacctggtgatggaggccgttggccatatcgaagtagcaacgcgaactgtgctcacataccactttgcgcatgcctacggcgccttcggtcacttggagcctcgcaatctgaccttcgctgggcaggagtatgcggattggcttgccagcgtcgagagtgaagtgatgcgatccaaggagacgttcattcgacactacaaggacaagtacagtgcaccggcgttccccaaagttccgatctggatggcgacagaagtcatgtcattggggtcactctctcgcttctacaaagcactgcacaacaaggaacaaaaggttgtcgctggagagatgcaggtcgcagcgcccgtcttcgcgaactggctgcatgtcaccagtgtcgccaggaacgtcgttgcccaccacggcagactgtggaacaaagagttaggcatttcggcggttcgccctcgatctgcggggtggtctgaacaggaagcgccatatgcaccgaatcgttgcttcttcctgttgctactgcttcgcaaacttctgaacggtacgaccgctgatgcaagagattggcgtgagcgtgtcgatactcatctctcggtcggcctgacgagcgaggtccgaacgaatagcctcggggctgcgaaggggtggcaagaccactgcctttggcgggggtga

SEQ ID NO: 515898 - DNA, 495 bp, Stenotrophomonas maltophilia
atgaagaagcacagccttgttgctgcggcggcctgcatcgtggcgatcgccgtggtatgggccgcgtggcccgcgccagcgagtgatcgggagtggtcctaccagaagctgaagcccttcgattaccggttgctgcacggcgacgcgctgggcttcgtttccgccaaggccgtcgaaggctttgaattccacacgcgctatgctggggcgacgtctttcgagatccggtgtaagggcgttgtggtgatggaggtggagagtgcgccctcgcgcgtgctgatccggatgcctgccgatgccgcgtggcgggcaccggatatcgagcacctgcgcatgagcttcgagcgttggctgtttgtgcagcagattgaggggcggctgctggtggagcgtgcggggccatcctgggttgaggcgcggttgaggcgtttcgatgggtcgatgccggatacgcagaggtgtctgtttggggtgccgcgcagtgcttggctttaa

SEQ ID NO: 515899 - DNA, 720 bp, Stenotrophomonas maltophilia
atgcatcctttcagttcggccgttgtcacctactgggatgggctcttccgctacggcatccccgtgccgacggcaagcggcttcagtctggtgataaacccccacctcaccaccgagcgtcgggcaatggtcttggtgacccccaatggcaccatgcgtgccgcagtgtctccctgcattgcctccactgtgggaatcacctcggacagtcctgcgatcacactgcaatggctacgcgaggcgctccacgcagcaggcgtcgagatgcatgcgccagatgtcatctaccacgtgccagtcaccggactttctgcaacgcagggcaacgcctcggctgaggtacgccagttgacgcctgaagatgctgtgctgttcgatggattcatggcacagatatctcagagcgaccaggacgatgcgtccgtggaagccgggcactgggcggcatttggcgcattcgccgagtcggaactattggctgtctccagcctttacccatggggcggcgcggccattgccgatatgggcgtgctgaccatgccccgagcacgcggcaagggtctcgcggcgtctttggtgcgcgcgatgatcgagtatgccggcaagtgcggatatgaagcccagtaccgctgtcagttcgacaacgtggcgtcgaacaggcttgcggcatctctcgggctggcttcgtacggaaagtgggaggtggcgtgctcgccctag

SEQ ID NO: 515900 - DNA, 276 bp, Stenotrophomonas maltophilia
atgcgtacgcttattgaagaccgcgacgaatcgccgttccgcgcttgggtctggatgcatctttcgcgcatgctgggtcgagacctgagccaggatcgatttgaagcgatcaacgaattcggtaggccgtacgacgacgatgtcggcgggccagcgtatgtagggggagacgacggaatcgagctggagccccttgcagccgatgagaacaagcgcgccgaagaggaggctgctcagctgttcgccgaaatcgaagagcactacgaattgaattga

SEQ ID NO: 515901 - DNA, 1593 bp, Stenotrophomonas maltophilia
atgcgcgttgagaaagttcggctcagatcctttaagcgtttcactgatcttcaagttgggcctatacccgtaggggctaagctggttgtgctggtgggaccaaacggttcagggaagagtagcctgctagaggcattcaatcactggcactccctaagggggtggggaagcgtgggagacgctcgttaccttcgcaaggatcaatcagcgcccggcgaggactggacccgagagtcggtcgtggtgtcatttcatggggttgacagcactgcgcgagattttcgagataagttgtattttagaaccgcatatcgcaatgagcctgacttcaatgttcaccagctccagcgggtagagtcgcccgtcgataatccccgggtggatcgcttcatagcgaacgaattctctgtctcgcagaactatcaaagactcgtgggcagcacccttgcaggggtctacaactctaacaactcagggatgctggtgggggaccttcgagatgagcttgcgggcaagatcaaggtcactctaaacaatgtcttcgatgacctttggttttcctcgatcggtgaccccctcaatcaagggtgcttctattttaagaagggtgccagctcggaattccattacaagaatctgtctgcaggagagaaatctgtttttgatttgatactcgatctcgttgtcaactcttcgcactacccagacgcgatcttcttcattgatgagcctgaggctcatattcatactgaaaagcaggcagctacgcttcgggcactgtttggccttataccagaggacgggcagctgtggtgttccactcattcgcttggaatgctgttggaagcgcagaagatcgaatcagagcagccaggttctgtagcgttcttggactttagcaatagggactacgacgtcgagcaagagatactgccttctagtcctgatcggcaactgtgggataagtcactggaactcacacttggcagcctttcatcacttgttggccctaacaccatctacctgtgtgaaggagatccgaatagtccgaaaaacaagagttttgatgctcaggtgcttgagcgcatcttcagcgcttcgcagccgcaaagctcgttcgtgtcggttggcaacgcagatgcagtcatggatgcgtcgggaagcgcgttccaggcgctccgggcggtatttccaaatgcaacaatacggcgtgtcgttgatcgtgattaccgttcggatgaggaggtgcaagagcttaagggaagaggcatctgcgtaaccactgaacgccacctagaatcatatcttctgtcagatgaaattatcggaaagctatgtctccagcgtggaagttgtcaccttacgtctcaggcgctgcggattaaggcggaggcgatgagagagagcgtgacgcgaatgaacgatgtcgacgatgtaaagtcagccgcaggcgaaatggtcaatggccttcggcggctccttcagataagaaacggtggaagcacaacacacacctttctgcgcgataccatggctccgctggtaacggccgacactgcgacgtatcagtcgctgttagctgatctgacctga

SEQ ID NO: 515902 - DNA, 450 bp, Stenotrophomonas maltophilia
atgcccgtattacatcactccctggtcacccttcggttcttcggggatgagctcaatccagacgagatcactgccttgcttggcgcgagcccaaccgccgcgcatcacaagggccagcagctcacaggcagccaacccggcgccgtgcgtatcgccaggaccggaagctggcggctcaatgcggctcggcgtgagcctgaagatctggaagcgcagatcttcgagatcctcgatcaactcaccagcgatctcgctgcatggcagtctctggcaccgttccggccggacctgttctgcggccttttcatggccagcggcaatgacggtgtctcgctttcgccgcgcgcgatgctcgcgctggggcagcgcggcatcgagctcgggctggacatctacgatgccgaggaagaagtagagcctaccgctccgcccgcagcgctcatcagttga

SEQ ID NO: 515903 - DNA, 480 bp, Stenotrophomonas maltophilia
atgatccgccccctcaccctgctgctgtgcctggccctgccgggaaccgtgctggcccagtccgctgccggcgccaccgcgccgcaggccgctggcctggatctgaccgtgccgcaggcgccgatgcgctacctcaatgatccgtccgtacagcaggatccgcccggcacctattacggcgacaagagcggcccgcgcgtgcacgatgacgcgaagatcgccgatgtgactgacgacaaggtcaaggtgtccggcagcttcactaccggcatcggctattccaagggcggcggcaacagccactacaacgcagccacgctgaacctgagcaagaactacaccaccgatgaaggcaagacccgcggggtcaacctcaacatccatgtgagcgagggcaagggcccgggcttcttcggcccctatggcggctactacggccgtggcccgggctgggattacccgccgccgtacggctggtaa

SEQ ID NO: 515904 - DNA, 789 bp, Stenotrophomonas maltophilia
atgaagctgctgagcgcattgctgtggtcgtcactgctggccacgatggccccgtctgcgtgggcgcaggccaataccattccctcgcagccgcacctgctggtgaagggcagtgccgagcgccaggtcatgccggatcgcttcggtgtcttggtccggctcgactcggtggacatgaagaccgaagcggcccgcaggcgcgtccaggaaaatggccgccaggtcatggcgctgttcaagcgccatggtgcagtggccgacagcatcaaggccgagaacctgcaggtcagtccgcagagccggtacaaggatggagagagcgtcttcatcggcgtctcggtcagccagtcgttgagcgccagtttcgctgatggcgaaagcctgcagcgcttcctcggcgcactgcaggcaagcagggaagtacaggtttccacgcagagccctacctattccgcagcatcgaagctgcgcgccgaactgaaggctgaggccgcccagcagacccgcgaatcggcagcgggcctggccggtgcctatggcgcgaaggtcatcggcctgtacagcatttccgacgtcgcccctgactttgcctatggcgtgcaggccggcgattggccacgcggccagaacgggccgagtgcgctcaagaacctctccccgcccaagccaggcccggtgtcggcgccgccgcagggcggcttcaattacagcggcgaagtcattgcctccggccccatcacctacaccgaaaacgtatacgccattttcctgataagcgacggaacctga

SEQ ID NO: 515905 - DNA, 2070 bp, Stenotrophomonas maltophilia
atgtccctgcatccgctgtgccgcccggccctgcttgccgtttccctgtccgtggcctgcgccgcacaggcccagtccgctcccgaacgcagcgcccgcagccgcagcgccaccgagctggatgcggtcaaggtcaccgccgaacgcacccatgccgaaaccggcgccctcggcgatcgcgccctgcgcgatacgccgttcgccatcaccgcagtgggccgtgagcagatcgagcaacgccaggtggtgtcgttgggcgaagcgttcgcgctcgacccgtcggtgaccacccaggtcagtgcctacgccagtggctggagctcgccgatccgcaaccgtggcatcgacctgaactttgacagctatcgggtcaacggcctgcaggtgtcttcgtggggcaccgagtggccgctggaagtgatggaacaggtcgagctgctgaagggacccgccggcttcctgtacggcttcggtgcccccggcggcctcgtcaactacgtgaccaggaagccgaccgacagccccacgttctcggcgcagctgggctggcgcgagcagggcatcatcagtggcggcatcgatgccggcggccgcttcggcaacgagcagatgttcggctaccgcttcaatgcgtaccgggaaaagggcgaaaccttcaacggtggccaggtcgaccgcaaggtcggtgcgctgtcgctggacgcgcgcctgagcgatgcgctcacctggaccttcgacggcgtgttccaggcccgtgacctcagcggcgaagcgccgcagtattacttccgcggcctgacctcggtaccgcggccgatcgccggcgacatcgacaacggcgttcccggcacctactacgacacccgctccagcctgctctcgaccgcgctggactggcagatcaactgcgcctggaaggccagtctcagctatggcgtcaccacctcctggaatgacgtcaacaagatcttcgcctacatcgactcgcccaacggtgactacgacgtcaatgtctacgagctgggcggcaagagcgagtggaagctggcacaggcgcaggtccagggcagcttccgcaccggcaggctcgcgcaccagctggtggcagggctcagtcaccagaccgggctgggctgggaccgcccgtacgaatggaacctgatcggccgcgccaacctctaccagcgttcgccactgcgccacgatgcagtgggctcgcgggtgatgagccgtggcgatgaaaccgtgcagacggccctgttcgccagcgacaccgtcgacctcggcggcggttggtcgctgctggccggctggcgctacaacgactacgaaaccaagggccgctaccacacctatccggtgaccccgacctacgcgctgatgttcaagccgcgcgaggacgtgaccttgtacgccagctacatcgaatcgcttgaagccggcagccgcgtcggcaccggctacatcaatgccggcgacgtgctggacccgaccctcagcaagcagtacgagatcggcgccaaggtggaggcgtcgcgctggaacgccaacgtggccgcgttccggctggagcgtggcgccaccatcgatgcgctcaccccggccggcaagcgcctggtgcaggacggcatcaccctgtacgaaggcgtcgaggccagcgccgacctgcacctgaccgacacactgaccgtcggcggcggcgtgacctggctggacccgacctacgatcgcctgtcaccggacagcgcgtcgcaggaaggcaaccgcaccgccggcgctgcccgctggaacggcgtgctgcatgccacctaccagctgccgtggctggatggactggaaacctacgcggtggcgcgttactacggcgatgtctggtacgacgccgacaacaccctcaatctgcccgactacaccctggtcaacgcgggcgtgggctatcgcctgctggcctccggccatccggtcgtgcttcgcgccagcgtggagaacctggccaaccgccgctactggtccaacgccggcatcggcctgccacgcaccctggctctgagcgtgcgctgggagatgtaa

SEQ ID NO: 515906 - DNA, 1017 bp, Stenotrophomonas maltophilia
atgcttcctgctccccgtcccatcgaagaagtgaccggcctagatccggcggatctggccgcgcagctgcccgggtggaccacgccccgggtgatacgcgggctggtctcgcactggccggtggtggcggccgcgcgcgtgtctcctgccgccgtggcggcccacctggcccacttcgaccacggccagatgccggtcacggcgaccaccgcggcgcccgaggcgggcggccggctgttctacaacgaagacatgagcggtttcaatttccgccgcgagcaggtcccgctgaaagtgctgctggcgaccctgctgaagtacgccgcggtggcctcgccgccgtccatctacgtggcctcgaccacgctggacagcttcctgcccggcttctccgccagcaacgggctgcagctgggggtgaccgacccgctcaccagcatctggatcggaaaccgctcgcgcattgccgcccatcaggatgtgccggacaacctggcctgcgtggcggccggacgccgccgcgtcaccctgttcgctcccgaacaggtgcgcaacctgtacatcggtccactggacttcaccccggcggggcagccgatcagcctggttgacttccacgcaccggacttcgagcgctttccacgcttccgccaggcgttggcgcaggcgcaggtggccgaactggcgccgggcgacgccgtctacatcccctcgctgtggtggcaccacatggaggggctggaggcgttcaacgtgctggtcaacagctggtggcggccggtaccggcatggatggattcgccgatgaacgcgttgatgctgtcgatcctggcgctgcgcgacctccccgaggcccagcgcgcgcagtggcgcgtcctgttcaatcactacgtgttcgatgccgatctgtcgaccagcgcacacattccagcgcaggtacagggcgtgctggccccgctgacagccgacagtgccacgcagatccggcagaccctgcgccaacgcctgcagcgctga

SEQ ID NO: 515907 - DNA, 2991 bp, Stenotrophomonas maltophilia
atgaagacgtacaaggctgtacctcgcaagacgatgctcacgtccgccctgctcgctgtgctgtcggcgccggcctgggcacagcaggccaccggcaccgcgccggccgatcccaccacgctcgatgcggtgcaggtcaccggcatccgcggcagcctgcagtcttcgatgaacctcaagcgcgacagccagggcgtggtcgatggcatcgtcgccgaggacatcggcaagttccccgataccaacctggccgagtcgctgcaacgcatcagcggcgtatcgatcgaccgcacctccagcggcgaaggctcgaaggtgacggtgcgcggcatcggtcccgactacaacctggtgctgttgaatggccgccagatgccggcgtcgaacctgggcaacggcggcggcggcctgtccggctcgcgttcgttcgatttcgccaatctggcatccgagtcggtgtctgcggtggaggtctacaagaccagccgcgccgacaatccggccggtggcatcggcgccaccatcaacatcaagaccctgcgcccgctggaatcggaaccggtgatcagcctggggctgaaagcggtcaacgattcctccaacgacaacctgccgcgcacgctgcagggctcgaacatcaccggcgagctgtcgggcatcttcagccagcgctacgccgatgaccgcttcggcgtggccttcagtgccagccaccaggaacgtgactcaggcttcaaccaggccaccgtggccgagggctgggccacgttcaagggcaatgagcgcgaggactggcgcgccctgccacagccgggccagggctatgccaaccgcatcaccaaccgccctggcccggacgatgtctacggccggccacagaacaccgcctacaacgtcaatggcgtgcagcgccaacgcaccaatgcgcaggctacgttccagtggaagccggccgacaatgtcaccacgacgctggactacacctatgtcgagaacaaggtgcagcagcaacgcagcgaactgtcggtgtggttcaactacggccccggtgacagcacctggaccaacggcccggtggccgcgccgatcatctacagcgaagacatgaccaattcggacgtgtcgatgggcggcgccaagctggccaccaagaccggcatgcattcgctgggcttcaacgtggactgggaagtgaacgacgcgctggacctgtccttcgatgcgcacaactccaccgccgaatcgcagccggacagcccctatggatcggccggcgtgctgggcgtggccgccttcgtgcgcggcaccaccaccgtcgactacagcggcgatctgcccatcatcaacatcgccctgcctcccggtggcgtgcaggcctccgatgcactggtcaccggctcggtgttccagaacagctacaacaagtccaaggtgcagcagtaccagggccgcggtaccttccgcttcgccgactactcggcactggatttcggcatcggccacacccaggtggagaaccgctcggcgtcggccatcatgcagcgcaacacctggggcgggctgggcacgccctcggactacgccgacgacatctggtacgccgacaacatggcccggtacttcaaggccttcagcggccataacgatccacgcctgaccggccagttcctggtgttcgacttcgaccgcctcatcgaccgtgccgcgcaggtgggtagcgcgtccgatccggcctgcccgagctgctattacgcacccaccgagtactccgaagacatccgcaccaccgagaagacccgcagcgcctacctgcagtaccgcaccaccttcgactggtcgatgccgttgcatgtggccgtgggcgcgcgttacgagcagaccgaggtggagtccaacgcactggtgcgtgttcccaccggcatcagctggagctcggccaacgagttcaacatcgactatgccgccgaccgcggcttcgtcgctggcaagggcaagtacgactacgtgctgccgaacctggatctgaagctggacctgagcgaatcgctggcgctgcgcggcagctacagtcgtacgctggggcggcccagctggacgcagatccagagcgggcagtcgctggccgacatcgtacgcacccagggcggcagcggctcgcgcggcaatcccggcctggaaccgttgatctcggacaacttcgatctgtcgctggagtggtactacggcgaggccagctacgcttcggtgggcttcttccgcaagaacatcaagaatttcatcagcgataccatcgtgcgcgagaacgccggcacgctgcatacgccggtgggtggtgcctactggaacgaagcgctggcttccggctgcggcaccaccgacatgccctgcatccgcgattacatcttcaccaaccacgccggtgccccgggtgtgacctataccggaaccaactcggccgggcagaagaccggcaccatcgtcggccagccgggcgacccggtggccggcttcgacatcaccgtgcctgccaaccagcattcggatcacctcgatggctgggaggtggcggtgcagcacctgttcgggcaatccgggttcggcgtggccgccaactacaccaaggtcaagtcggggctgaccttcaacaacctcagcctgggtgaccagtacccgatgatcggcctgagcgactcggccaacgtggtggccttctatgaccgcaacgcctggcagatccgcgccgcctacaactggcgcgacaagttcctcaacggcatcggcggccagggcccgaacccgaactacaccgccgcgtacggccagctggatctgaacatcagctacgcggtgaacgatcagctgacactgagcctggaagcgatcaacctgaccgatgagaccatgcgcacgtactcgcggcataccaacatgctgcgctatgccacccagaccgggccgcgctacatgttcggcgtgcgctacaagttctga

SEQ ID NO: 515908 - DNA, 1278 bp, Stenotrophomonas maltophilia
ttggacacagcaacgaccgttcgcggacaccacatccagggcaacacgcgcgcactggcggtggtcaccgcgatattcttcatgtggggatttctcacctgcctcaacgacatcctcattccgcacctgaaagccgcgttcgcgctgacctgggtgcaggcgatgctggtccagttcaccttcttcggtgcctacttcctgatgtccctgccggcagggcggctggtcgcggcagtgggctacaagcgtggcatcgtggccgggctggccatcgccggtatcggcgcactgctgttctggccggcggcggccgcgcatgtctacggcctgttcctgacggcactgttcgtgctggccaccggcatcaccgtgctgcaggtggcggccaatccctacgttgcgctgctgggcgacgagcgcaccagctccagtcggctgaccctggcgcaatcgatgaactcgctgggaaccactctggcgccgctgttcggcggactgctgatcctgtcggcgcagccgcgcagcgagcaacagctggcgctgctgcccacggccgacgcactggcctaccgcgccgccgaggcgcaatcggtccagctgccgtactttggcctggcggtggtgctgttcctgctggcggcggcgatctggatgttccgcctgcccaccatcgccggtgttgaagacagccgcggcacccagggccgcgtctgggacgcgctgcaccaccgtcatctgcggctgggcgtgctggccatcttcttctatgtgggggctgaagtttccatcggcagcgtgctggtcaatttcctgtcctcgccgggcatcggccagggcatgagcgaacaggaagccaccggctacgtatcgctgtactggggtggcgcgctggtcggacgcctgctgggcgcagccttgctggcgcggctggacgcccgccatctgctgggcgggttcgcgctggtggtggtgcttctgctgggcatcaccgcaaccacgggtggcgggctggcgacgtgggccgtagtgagcatcggtctgttcaactcgatcatgttccccaccctcttcgccctggccatcgcccgcctcggcgcgctcaccggccaggcctcgagcctgctggtgatggccatcgtcggcggcgcggtcattccgctggcgatgggctggctggccgatcatcatggcctgcagctgtcgttcctgctgccggcgctgtgctatctgtacatcgccttctacgcgtggaatggctcacggctgcgggcgccatga

SEQ ID NO: 515909 - DNA, 1008 bp, Stenotrophomonas maltophilia
atgcgcagtcgaatcgaggatgtggccgccgttgccggggtttcgatcaagaccgtgtcccgcgtgctcaaccatgagcccaacgtgcgcgaacagacgcgcgagcgggtgctggcggccgtggcacggctgggctacaagcccaacccgtcggcgcgcagcctggccggccagcgttcgtacgcgttggcgctggtctacaacaatccctcgcgcaactacctgatggagatccagagcggcatgctggaagcctgccatgcgcagcactacaacctgatcctggggccggtcggcaccggccgccgcacccagcccgacctggcagcattgttcgagaactcgcgcccggatggggtagtgctgatcccgccgctgaccgatgacgaggtggtgctgtcgtacctggaagagcacgggattccgttcgcctgcattgcaccgcggcaccctgaaggccgcatcggcgtgcgcatggatgaaaccaccgccgtggttgaactgatcggccatctggtcgcgcagggccaccgccgcatcggccacatcaagggcccgcgtgcgcacggcgcctgccagtggcgccatgccggctaccgccaggcactgcgtgatgccggcatcgcctacgacccgcagctggtggtcaacggccagttctcgttcgagtccggcgtggatgccgccaatgccctgctcgacctggaccctccgccgacggcgatcttcgccgccaacgatgacatggccgcagccgtgtaccgagttgccggcgagcgcgggttgcgcgtcccgcgcgacctgtcggtgtgcggcttcgacgatacgccgatcgccggccacatctacccggcactgaccaccgtgcggcagccgacctcgcacatgggccggttggccaccgaacaactgatcgagcacatccgtgtcgacctggccgggcgcatgatcaccgtcgagcacaccgtgctcgagcgcgaatccaccgcgccgccacgccggcgctga

SEQ ID NO: 515910 - DNA, 2532 bp, Stenotrophomonas maltophilia
gtgaatcgccccacccagacccttcttgccagttgtctgctggctgcccttgccgtccccgccggtgccgcaccggccagtggcgaacacctgcaggactggccgcgcgtgcacagcgcgatcgccaccgacgcggacatcgaacgccgcgtgcagaccatccttgcgcagatgacgctggcgcagaagatcgggcagatgacccaggccgagatcaagacgatcacgccggaacaggtacgccagtactacatcggctcggtgctcaacggcggcggttcctggccgggcatggacaagcacgccggcgtgcaggcctggctgacgctggccgatgcctaccacgctgcgtcgctggccaccgacgcaaagacgccggtgccggtgatctggggtaccgatgcggtgcacggccacaacaacgtccttggcgccactctgttcccgcacaacatcggcctgggcgcggccggcgatgccgaactgatcgagcgcatcggcgaggcgactgcgcgctcggtgcgcgccaccggtatcggctgggtgttcgcgccgaccctggcagtcgcccacgatccgcgttggggccgcacctatgaaagctattcgtccgaccccagcgtgatccgtcgcttcgcccacgcctacgtcaagggcgcgcagggtacgttcaaggatgacggcaacgtgatcaccacggccaagcactatctgggagatggcgccaccgacaatggccgcgaccagggcgaggcgctggtcgacaaggccaccatgatcaatgttcacgcgcagggctactacggcgcactgggcgaaggcgcacagacggtgatggcctcgttcaacagctggaacgaccgcgcggcggggatcgactacggaaaaatgcatggcagcaaggcgctgctgaccgatgcgctgaaggacaagatgggcttcgacggcttcgtcgtctccgactggaacggcatcgcccaggtgccgggctgccgcaacgacagctgcgcacaggcgatcaatgccggcatcgacatggtgatggtgcccgatgactggaaggcgttcatcgccaacaccaccgcgcaggtgcagagcggcgagattccgatggcgcgcatcgatgatgcagtgacgcgcatccttcgggtgaagctgcgcgccggcctgttcgagcacaagccgtccgacagccgctatgccggcgatcccgatgccgtgcagcaccgcgcgctggcccggcgcgcggtgcgcgaatcgctggtgctgctgaagaacgaaggccaggccctgccgctgcgccgcgacgcgcgcgtgctggtggtgggcaagggggccgacaacatcggcgaccagtccgggggctggtcgctgacctggcagggtaccgagaacaggaacgccgacttccccaacgccgattcggtgctggcggcactgcgagcggaactcggcgcagacaagatcagcttcagcgccgatggccagggcattgacccgaaggccttcgacgtggtgctggcggtgatcggtgaaacgccctacgccgagaccaacggcgacatcctgccctccgacacggtcagccacagccgcgcctacccgcaggacctggcggtgctgaaggccgccgcagccaccggcaagccggtggtgacggtctacctgtccgggcggccgatgtacaccaacgacctgctcaacctgtccagcgccttcgtggcggcgtggctgcccggtaccgaaggcaagggcgtgaccgatgtgctggtggtcggcaaggatggcaagcccgcgcacgacttccgtggccgcctgagcttcccgtggccgggcgcgccgtgcccggcgccgatcgaccgacccgatgcgggcaagcctgcgctgttcgcgctcggctatggcctgagttacgccaagggcggcaaggtcgcgcggctcgacgaggccaccccggacagctgtggcgaagtgaccgtgctgccgatcttcaaccgcgccgacacgccgccgttcgcgctgcacgtggccgtcggcggtgccacccagccgctgggcaatgatctgaatgccacgctgcgctggcctgccggcaagccggtggtgcaggtgcgtaccgtgcaggtgaacacccagcaggatgccagggaggtgacctggctggcgcccgcgcagctgattgcgcgcagcacctcacgtcgcaatctcggcgcactggcacgcagcaacggcgcgctgcagttcgacgtgcagctggtgaagcgcccggcgtcggcggtgagggtgaccatgcagtgcggtaccggttgcgagggcggggtggatatcgccccgctgctgggcaagctctctcccggccagaaacagacggtgaccgtgccgctggcgtgcttcgccaggcagggggtggatctgggcgcggtggaggcgccgttcgtggtgagcgcggacaagccgttcgcggcggccttcacccaggtcaagctgaccgccaacacggccaatgccgagggggccgtggcctgcccgtaa

SEQ ID NO: 515911 - DNA, 438 bp, Stenotrophomonas maltophilia
atgagcgcgacgcctgacattgcggccatgcagctgctgctgcggctggggcgttggccggcaagcctgtcgcaggggctgctgctggcggcattgctgctgctcggcatcgagccggggctggcgatgcttgccgccggcctgttgctgctcagcgtggtggcaggaatcgcccaggcctatcacgcgtggcgggtggcgctggatgccagcctgctgcggttgctgcgcgatgaaggcttgaaggatgaggccgcggcgcaacgcatcgaccggctgctgcatgacactggactgcgccgcgcaccggacgcggaaccgccgcggggctgggatctgcgctgggccggcatgcgccgcctgctgctgcgccagtacctgctgacggcggtgcagttggtgctggtactgctggctgtgctgtggccgcagacgtga

SEQ ID NO: 515912 - DNA, 531 bp, Stenotrophomonas maltophilia
atgcgccgacgcctgtttgcccctctgctggccgtgttgctgtgcgcgggcgcccccgccaccgcaggcgagctcagccccgatgatgcggcagccctgcgcgcggaggtgcgcgcgatggtggcggccttcagccgtggcgatgcggcgttcctgatcgcgcgcacgcaccccagcctgaaacggctggccggcggcgacgaagccttcgcgcggatcgccggtgatgcggcggcccagctgcgcagtgcgggcgtggagatcgtcagcgaggacgtcggcatccccggccggacctacgccgccggcgaggaggaagtgtgtttcgtgccgcggcactcactgatgcgggtgcgcggaacggcgatccgcagcaccaccttcatggtggcggtgcgccgcgttggtcatccgggctggacctatctggatggttccgggttgcaggacaacccgggcctgctgcgccagctgctgcccgcactcgaggccggtgtcccgctgcccaagcggcagatcgaagcgttgtag

SEQ ID NO: 515913 - DNA, 795 bp, Stenotrophomonas maltophilia
atgccgacttcctctccggcgcgcgcgccgctctctgcgatcaccattgacgctgcaagccgcgcggtgatccaccagcacaacgccgacaccgtacggccaccggcatcgctgaccaagctgatgactgcctacgcggcgtatgcgtgcatcgcagagaccgggcgttcgtgggacgaaacggtcaccatcgccggcgacgacgtgcacgcggtcgccgctgatgaaacgcggatgggcctgctgcccggcgaaacggtccccctggcgcgcctgctggaaggaatgatgatcgtctccggcaatgacgccgcgctggcgatcgcgcgccacctggatggatcgcagggcgcgtttctgcagcgcatgaaccaccacgcacgccagcttggcctgcgcgataccgggttcgccagcgtatcgggcatcaccacgccacatcatgcatccagcgcgcgcgacatggcggtgctggcggcccatctgctggccgaccatccacagatcctggccattaccgcgcagcgtgcgttcgcgcatggccgcttcagccgaaccaaccagaatgcactgctgggcgatgaaggcgtggatggattgaagaccggctacacccaggcggccggcttctgcctggccgccaccgcctgccgggggctacccgggcaggcgcagccggtgcgcctgatcacggtcgtgctcggttcggacagccgccaggcgcgcgacgcgcgggtgcgcgaacagttggccaccggctttgcaacgctggccggcgccgtcatcgaggcctga

SEQ ID NO: 515914 - DNA, 1101 bp, Stenotrophomonas maltophilia
atgcccagcctgttccgccacctgttgcgtccgctcagcctcgccggtctggtcaccgtgctggtggtgggcctgtcgttcggcgcgcagggccccgccgccggcttcagccaggcgttgcttgccgcgttcctgctgctgttcgtggtgcatggctgggccgccatgccgaccggtgcgcgtgcgttcgccgcgctgctgcaggccgtactggcggtcgccctggtcgccctgcagccgcgtaccggcacggcaccggtgctgctggtggtgctggtcgcgcagctggccgagcattggccggcgcgcttcatgctggttgttgcggtgctggccaacctggcgttgtacgcggtgcttcgccgcagcggcttcatccagccgctgctggtggtgctgctgtatgcgggcttccaggcctttgccgcgttgaccgcccactacgcgcgtcgtagcgcactggcccgcgacgcgctggcccgggtcaacgccgatctgctggcgacccgcgcgctgctggccgacagtgcacgcgatgcagagcgcctgcgtctggcgcgtgaactgcacgatgtggccggccacaagctcaccgcgatgcgcttgaacctgcgcgcgctggcggcggatccggcgctggccgggcgcgaaggattggtgctggccgagcagctgtcgggcgagctgctcgacgatatccgccaggtggtgcaatcgatgcgcgatgatcgcggcctcgacctggccaccgcactgcatgcgctggccgcgcccttcccacgccctgcgctgcaactgcacatcggcgagggtgtgcgcgtgaccgacccgctgaccgccgagaccgtgctgcggctggcgcaggaagcgctgaccaatgccgcccggcatggcaacgcaggcacggtatggctgacgatcaaccaggagaacgcgcagttgcgtatcgatatccgtgatgatggccaacgcgccgagcgtatccgtgaaggcaacggcatcgccggcatgcgcgagcgtctggccgcggtgcgcggccaactggaactggcccgcaccgcgcagggcggcatgcacctgaccgcgtggttgccggcatga

SEQ ID NO: 515915 - DNA, 372 bp, Stenotrophomonas maltophilia
atgaacccgatcctgcacgttgaaatacccactactgacctggaacgggccatcgcgttctaccagcgatggctgcgggtggacgtggatgcgccgatcctgctgcatgactgccgcatggcgtacctgccgttttcggatgacgcagcgggtgccagcatggcgctggtacagggcgcggactaccggccctccgagcagggcgcgcgcatctacattggcgtgggcgatgtggaggccagccttgagcgcgcattgctggccggcgccgaactgcgcttcggcccggccgacgccggcgactggcgcgtggccgagatccgcgacagcgaaggcaaccgcatcgcgctgcagtcgcccgccgttccgtag

SEQ ID NO: 515916 - DNA, 504 bp, Stenotrophomonas maltophilia
atgatgcttgaagcaaaacatggagctcttctggacgaggcccggcggcgtggccacgccaatgtcgcccagctgcgcctgtgcttccagctgctgtcgctgtcctcggcgatcgatcgcgactgcgccagccggctcgcgccgcacgggctcagtgaaggccgcttcatcgtgctgttcctgctgcacggtgccggtggcacgctgccgccgcatgaactggccgagcgcgcaggcgtcacccgcgccaccatcagcggcctgctcgatggcctgcagcgcgaagggctgctgcaacggcgcagcgatgcggaagatggccgtcgcctgcagatcgtgctgactgcgcaaggccagcgcctggccgaacgcctgttcgaacagcacagcaactggatcggtggcctgttcgacgggctggatgctggcgaacagcagcagctttcgcagctgctgcacaaggtctggcagcacaccgatgcgggtcgggagccggcagcatga

SEQ ID NO: 515917 - DNA, 741 bp, Stenotrophomonas maltophilia
atgagcgccgcgatcccggcagagcgccttcgtgcgctcaacaccggcagcaccgccgccacccatctggccgaatgcctggcaatggacttcggtgcactgctgcctgcggtggtgcccatgctgcaggcggccgccgtgcaacgcatgcgtgatgcagcaggcaaaggcatcaccgtgcgcatggcgttggccgcgacgctgctgcgcgaagccgggcagggtgatccgctgcagtggcaagcgcacccttccgacaccgtgcgtggctgggcctgccatctggtcggcggcgacagtgctgcatcccttgcggcgaagctgcaggcgatgcgtccactcgccgatgacccgcatttcggcgtgcgcgaatgggcgtggctggcactgcgcatggacatcgtggcggcaccgctgcaggcgcttgagctgctgctgccgtggacagatgaagcatcgccctatctgcgtcgcttcgcctgtgaagccctgcgcccgcgaggcgtgtgggccacgcatatcgcgctgttcaagcagcatccagaacatgcattgccgatgcttgaagccctggccaacgaccccgagcgctacgtgcaggattcggtcggcaattggctcaacgatgccggcaagacccagccgcgctggctgagcgatctgtgcacgcgctggcagcgcgaacaccacagcagcgccaacgcctacatccgcaatcgcgcactacgttcgctgcggtag

SEQ ID NO: 515918 - DNA, 339 bp, Stenotrophomonas maltophilia
atgtcgcacacgctcatcgagctctacaccgccacgcccgcctgggccgcactgccgcccgagcaacgcaccgccttcttcgaccgcatcggtgccggcatgcagcatttcgacccggcccgcatcacggcggtggcaatgggccgcgttctctccggcgtagcgcacggtagcagcgagcagttctatgctgtctggaggtgcgagagccgggaagacgccgacgccctggtcgaaggcattgctgccaccggctggcatcggtacttcaccaccaccaacgcactgggtgccgacgatggcatggcacagcacctgaccgatctggccgcgttgtag

SEQ ID NO: 515919 - DNA, 213 bp, Stenotrophomonas maltophilia
atgcgcatcctgaacctgtccacgcccctgctggctgccgtgctgctgtgtgcctgccagcgcccgcccgcaccgaacccggaacagccgccggtgccgaaagcgatgtcgcgcgcgatcaacgaaccactggaccgcgccaagggggtgcagaagaccctggacgatagcgacacgcgcgagcgcaaggccgaggccgacgcgacgcagtga

SEQ ID NO: 515920 - DNA, 735 bp, Stenotrophomonas maltophilia
atgaacagactgatctggctggccctggccgtgttgcccggcgctgcaatggccgaagaaggcgtgatctaccgctgcacctccggcagcagcgacgttccgaccctgcaacgtacgccctgcccggccggcagccagcagcaggtccttcgcgtaccggcgccggccaatgccgaaccggccgtgaccgaaccctcaccggtacaggatcccgccgcgaccgccgtttccggggccagcggagcggctgcaccggctgcgcccccgacggcgccacggcgcgcggacgaagggcgcacgatcatggaagcgggcatggtggaagccgaaggcggcgatcagatcctggacagcgcagcgctgcaccacgatgccgaggcgcgtgccgccagcgacgggccgccgaggccgccgctgcccccgatcttccagtgcaccgacagccagggcggcggctacctgcacgaatacgaggcctcgccggcacgctgcgaactgatgaccgtgcagggcctgggcggtgcaacgccggtcaatgcggccagctgcgaagtggtgcgcgacacctgcgaggagctgcccgaggcacagcgctgtggcagctggcagcagcgcttccgcgacgcacgcggccgcgagcgctttgccgcgccggagaaccgcgaacatgcccagggcgagcgcgagcggttgcagggtgtgctggaggccagccattgcccggtgccgggatga

SEQ ID NO: 515921 - DNA, 693 bp, Stenotrophomonas maltophilia
atgaacctgacacgcaccgccctgggtctgtgcctgctgctgccgtggggcgcagcgccggccgccgacgacgtgcgcgtgtaccgctgcgtggccagcaacggtgccgtggccctgcaggacaaaccctgcagcaatgggcggcaggaagtccgcgacctgcagcgcccgcgcgatccgccgccgagagtggtcagcagcgacaccccgccaccaccgcccagcgccacgccggccatcggcgggcgcgaagtgcgccacgtctacatccagccgccgcagccgatgtacgaatgcgtgagcgacgacggccggcgctacaccagcgacagcaacgagggcaatccgcgctgggtcccgttgtggaccagcatctggttgccgcacgggtaccccggcggcggccatcccggtccgcgcccgtccatcggtgggccggtgggtcggcccatcggcggaggcgccgggtatcgtccgcccacggtcggtgtcggcgtggagataccggccggcagcgtgctggtgcgcgacacctgccacgccctgccgcagcaggaagtgtgcgcacgcctgcgtgaccgccgctgggaactggaccgccgctacaacagtgcgctgcagagcgaacgcaccaccatcagcaccgaacagcgcggcatcgacgcacgcctgtcgcaggactgcgagcgctga

SEQ ID NO: 515922 - DNA, 753 bp, Stenotrophomonas maltophilia
gtgagcgagtggttccatgcagaaggcaaccggcagcagggtccgctgccggcggaacaggtggtggagttgttccgcaacaaccagatcaccctggacaccctggtgtggcgcgacggcctgccgcaatggcagccgttgcgcagcgtcgtggacgagctgggcctgatcgtgccggcactggacgcggcaacaccgccgctgacgcctgaccccacgccggaacccgcgccgccgcagccaccggtgctgccgccctccaccccctataccgccacggccgccgccgccggcgtgttgccgccaccgaagaagaagctctccggctgcgccctcaccgcgatcatcggtggtgggttgctgctggtgctggtgccgatcatggccattctggcggcgatcgcgttgccggcctacaacgagtacaccgtgcgtgccaaggtcgccgccgcggccgatgccctgcacccgttgcaggaccaggtgcagcatttcgccgatgaggaaggccgttgccccggcgccaacgacgccggtttcccggccccgggcgacttcacccaggtgggcctgtcggccgtgcacatcggccgcttcaacaacggccattgcggcatcgaagccacactggccgcgccgggcaagcagatcgacggcgacctgctgtggctggaatacgaccgcgacagcggccgctgggaatgcagcggcgagagcgacaacaagtacctgccgccgtcgtgccgcggctga

SEQ ID NO: 515923 - DNA, 1710 bp, Stenotrophomonas maltophilia
atgctgaaaacccgcgcgtcgcgcgagacctggttgttggcggtgatggccctgctggtgctgggggccgggcttggccttcgcgatccgtggccgtcggacgagccacgcttcgcgctggtggccaagcagatgatcgacagcgggcactggctgttcccgcatcgtggcaccgagctgtactcggacaagccaccgatgctgatgtggtggcaggccacgctgtacagcctgatcgggcactggcgcgtggccttcctgctgccgtcgctgctggcggcgctgggcacgctgtggtgcgtggtggatctgggccgccggctgtggacgcggcgggtggggctgtatgcgggctgggccctgctgttcgcgctgcagttcaccttccaggcgaagaaggcgcagatcgacgcgctgctgctgctgttcatcaccctggccaactacggcctgctgcgccatctgctgctgggcccggcctggcgctggtggtggctgggctggttcttcgccggtatcggggtgatcaccaagggcgtgggcctgctggcgctgctgatgctggtgccggcggcgctggccgcggcgctgcactggccgcggctgcagctgcacgcacgcgacccgcgtttctggctggcaccgctggccttcgtgctggccgtggcgttgtggctggcgccgatgctgctggcggcgttggctaccggctcggatgcctaccgggcctacatcgacgacatcctgttccagcagacggcgcggcgctacacccattcctgggaccaccaccagcccggctggtacttcctggcgacgatgccgctgctgtggattccgccgatcctggccttgccctgggcgctcccggcgtggcgccggcgcctgcgccgccgtgacccgcgctacctgctgccgctggcctggtggctgctggtggtgctgttcttttccctgcccgacggcaagcgcgatgtgtacatcctgccggcgctgccgatgttctgcctggcgctggcgccgttgttgccgggcctgctgaagcggcgtgacgtgcaggccgtggtgggcgcgttcaccgcactgttggcgttgggcctggcagtggccggagccctggcactgctgggggacccgggctacgagctgcgtctgacgcacagccgcgggctggcgccgggggcggtcgacgcgctggcgtgggcgattctggccatgggcctgtggggtggcttgagcctgctggccagtggccgccggcgtcacctggcgctggtctcgaccctggccgggatatggacggtgtacagcctgatcggctacccgctgctgaacgattccagttccgcccatgggctgatgcggacggtgggggcccgcatcggcccggacgcggaactggggctggtggcatggaaggaacagaacctgctgctggccgaccgcccggcggccacgttcggcttccagaccccctggtacgcgcagctggcggccgcgacccgctggcagcgactggtgcccgaacgtcgctggttgctggtcaacgagcacgccctgctgtcctgcgtcgaccgcagccgcgcggaactggccggtgtggccaaccgccgccgctggtggctggtgcctgcggcagcggtcagcctgccgtgcgtggccaccccggccgaacgggaacgtgaacggcgcttgcaggaacatgactag

SEQ ID NO: 515924 - DNA, 1539 bp, Stenotrophomonas maltophilia
gtgagcctgccgccgcccctgcccgcatcgctgcccgccggtggcgaggaccatcgcctgcacccgtggtcgtggctgttcgtgctgttgatgcagctgcgccactacttcctgccgctggttgcgctgctggtgttcggccagcgcggtgaccgcgatccgatgtgggcacagctggttccactgtccgcgatcgccgtgctggtgctggtgtcggtgctgcagtacctgagctatcgctaccgcatcggcagcgatgcgatcaccgtgcgcagcggattgcttgcgcgcaatcgtcgcgagattccgttcgcccgcatccacaatgtggaggtgcggcagaacccgctgcatcgcctgttcggcgtggccgaactgcgcctggagtcggccggcggcgcccgcccggaagcggaaatgcgggtcctgaagctggaccaggcgctggcgctggagcgtctggtgcgccagcgcgggcacgcgccacaggccgccgatacccacgccaccaccgacaccgccgatgcaggcgacgggcaggtactgctgcgcctgtcgagctgggaggtggtgcgcatggggctgctctccaaccgcggctggactctggtggtggccgccatcggcgtgctgttccagatcgtgccgcgttcgctgatggacgatgccctgcagcgcggcggccgcgaggcgtttggctatgccagtcatctgcaccccggcgtggccggtgccttcgcgctgctggccggtgcgctgctgctgggctggctggtgctgcgcgcgctgtcagtggtgctgaccctgttgcgctatcacggcttcatcctcgccgagcaggccggtcgcctgaccgtgtcggccggcctgctcagccgcacccgcagcagcgtggcgcgtcgccgcatccaggcctggacgctgcgtgagggcaccctgcaccgatggttcgggctgcgtcagctgcgtatcgacagcgccgccggtggcccatcgcgcgaggaagatcgtgccctgcgcgagctggcgccgctggctccggcgtcgcgttgcgagcagttggtgcagcagctgctgccgcacctgcactggccgcccgcgtactggcaggcggtgccgcagcgcggccggtggcggctgtgcgtgggtgcgctggtgctggttccagcgctggcggcggccggctactggcgctggggtggctggggcctgatcgttctggcctggctgccggtggcattgtgggtggcgcgccagcagatggagcgcatcggctggtacctggatgcgcactacgtggcggtgcgtggcggctggtggaaccgctggtggcgctgggccgagctggacaaggtgcagggcctgcggctgcaacgctcgccgctggacaggctgctgggcaccagcagcctgcagctggacaccgccggtgcacacggtgatgtggcattgaccctgtcctacctgccgcaggcacaggcgcagcaggtgatggatcagctggccagcgcgctggcacggcgcaagctgcgctggtga

SEQ ID NO: 515925 - DNA, 231 bp, Stenotrophomonas maltophilia
atgcgggacgagctggaggatcgctgggactttgcccggtgcgccacgttcgcgttgctgacgcagtctggtgcgggactgtttgaggggggagagaatcggtcggggttggagggagcgaaaagcgacgtagcctggttccgtaaggatctgctgcagatgcaggtgtacgcagaggctgctgaagctcggttgcggcaggtctcgaaggggcttgccgttgatgactga

SEQ ID NO: 515926 - DNA, 450 bp, Stenotrophomonas maltophilia
atggcacccaccatccgcatcgcggcgtcttccgacctcccccaggtcgctgcactcttcaacgactaccggcagttctaccaacagcccgccgatcttgaactggccaccagcttcatgcgtgagcggttgcagagcggtgattcactggtgcttgtaatcgaagccgaagaccacggaatcgtcggctttacccagctgtacccactgttcgattccgtaagtgcacagcgcagtttcattctttatgacctgtacatcgcgaaatcggcgcgccgccagggcctggcccgcgccctgatgatcgcagcgacagacgaagcacgccggcgtggtgccggccggttggaactgcagaccggccgcagcaatctgcctgcccagcggctctatgaaggcctgggttggcagcgcgacgacgcattcttcgtctacgcaattcacccgtaa

SEQ ID NO: 515927 - DNA, 987 bp, Stenotrophomonas maltophilia
atggcgttgggtacgtggatgatggccgcctgcatggcggcggcaggggcaacgtgtgcgcaggccgcgccggcagtcacctcgggtaatccgatcctgccgggctggtatgccgacccggaagcagcggtattcggaaaccgctattggatattcccgaccacttcgacggactacgacgcgcagaccaccttcgatgcgttttcttcgcccgatctgctgcactggaccaagcatgccgacgtactgaacgccagggcggtaccgtgggccaggcgcgcgatgtgggcgccttcggtggtggagaacaagggaaagtactacttcttcttcgccgccaacgatatccagaacgatggcgagctcggcggcatcggcgtggccgtggccgatcacccgcaagggccgtacaaggacctgctcggcaagccgctggtgggcgcgttccacaacggcgcacagcccatcgaccagtttgtcttccgcgatgacgacggcgcctggtacatgatctacggcggctggaagcacgccaacatcgtgcgcctgaaggacgatttcagcggtgtgctgccgctggccgatggcacgctgttcaaggagatcacgcccgcaccggagtacgtcgagggcccgctgatgttcaagcgcggtgggcactactacttcatgtggtccgaaggcggttggggtgggccggattactcggtggcctacgccatcgccgatgcacccaccgggcccttcaagcgcatcggcaaggtgttgcagcaggaccctgccatcgccaccagtgccggccacaactcggtgatccaggtgccgggcagtgaccgctggtacatcgtctaccatcgccggccgctgggagaccgcgcgcgcgaccatcggcagaccgccatcgaacgcctgcagttcgatgcgcaggggcacatcctgccggtgaagatcacccgcgagggggtatcggccgatccgctgcgctga

SEQ ID NO: 515928 - DNA, 426 bp, Stenotrophomonas maltophilia
atggcagacaacggcaacatgacgatcacacccagggccttgtatatcgcaggcgccgtgggtgtgctgatcagcgtactggcgtggtcggtggaatggagcgggctggcctatgtctgcccgtactgccgcgtgcagcgcacggtcatcggcgtgctgggcgtgctgctgctgttcgcgcggcctggccgcatcgtggtgccgtggcttgcctacacgtgcggcggtttcgccttcgtggtggcagcgatgcagcacttcaacggctggaagcgcatttctgccggggaattcagcctcaatgcgcagtggtacatcgacccgtggctgctgtccggctgcgcaatgctgatcctggtggcgcagctgatgctggtgcaggtggcctgccaacgcccgctgcattcccggatggaggtccgctga

SEQ ID NO: 515929 - DNA, 642 bp, Stenotrophomonas maltophilia
atgtccccgacactcactgcctttgccacctcccccgaccgcggccagggtctggcccgtgacatgcgcgtgcgctgggcgctggaggaactgggcattgcctacgacgtgcagctgctcagctttgcgcagatgaagcagcccgcccatctggcccgcaatccgttcggccagattcccacctggcaggagggcgagcaggtgctgttcgagtccggcgcgatcgtcctgcacctggccgagcagcatcccggtctgcttccggccgatccggacgcccgcctgcgcgcgatcatgtggctgttcgccgccttgaacaccgtggagccgccgatcgtcgagcgctcgatggcctgggtgctggagcgtgagcagccctggtatgcgcagcgcttgccgatgctcgatgagcgggtgcgcacgcggctgtcgcagctgtcggcggcgctgggcgctgccacctggcttgacggaaggttcagcgctggcgacctgatgatggtctcggtgctgctgcggctgaaaagcagcggcatcgtcgatgagtaccctgcgttggccgcgtatgtggcgcgcgcaacgcagcgccccgcctaccagcgtgcgttcgccgcgcagctggccgtgttccagaatgcgtag

SEQ ID NO: 515930 - DNA, 201 bp, Stenotrophomonas maltophilia
atgcgtactttcaggaaagtgatcgcggcggcggtgttcgcgttggcctgtaccggttcggtggccgtggccgggccggtggaaccctgcgaccggccgtgctggcgggcctatcaggcgtgcctgtccaccggcggagatgccaccgagtgcgagcaggcgtacaacacctgtgtgatcgatctgtgcatgggcgtgtga

SEQ ID NO: 515931 - DNA, 456 bp, Stenotrophomonas maltophilia
atgctgctggcggtggcgctggcactgggctggagcccctggcaacgcgcgctgcgccacctgcaggccgaaagcctgcgccggcagctggtcgccagcctgtcgctggcacgcagcacggccatcaccgaacgccgccgcgtgtccgtctgtggctcgtccgatggccagcagtgtgaccaggcctggagccggggctggcgggtgcggatcgagccacgcacggccaccgaaggccccggccggctgctgcgcacccataccagccgccaacaccgggtcgagctgcgcaccagcgatcatcgtcccgaggtggagttccggccggatggccgcaacgcgggtaccaaccagtccatcgtgctgtgcgtggacggctacgagcacagccgcgtgatcatcaatgtcccggggcgggtgcgcagcgaacggccccgacagcccgccgcctgctga

SEQ ID NO: 515932 - DNA, 489 bp, Stenotrophomonas maltophilia
atgcacccgcgcccacgcattccttccttcgcatcgccccgccagcagcgtggcgcggtgctgtacttcgcactgatcatgctgatcctgctggcactgatcggcattgccggcatgcaggtcaccggcatgcaggagcggatggcggccaactacctgcgctccaaccaggccttccagaatgccgaatccagcgcgcgtgcgcaggaggcagttattcaggccgcgatcggcagcggcaacatctacgaagccaaccaggaagaatgcagcccggtattcgatccggcgacctgggccgacggcaagaccacggccaccgccatcaacacccggcgcctggacaagtgcgtgacgcgcgggccgatcaaggtcggtgtccccaagaacgaagaaaccgagaacatctaccagatcaccgtgttggccagtgacgacccggccaatccttcttccagcgccgtcatcgacacgatctacatcccatga

SEQ ID NO: 515933 - DNA, 1188 bp, Stenotrophomonas maltophilia
atgcgcgcgccgtccttcccccggtctgccaccggcctgtcgatggtcgagttgatgattgccctgaccatcggcctgatcgtgatgctgggtgtggtgcaggtgtttgcggcgtcacgcgcggcctatcagctgtccgacggcctggcgcgtgtgcaggagaacagccgcttcgcgatggacacgctgcagcgtgaagtgcgcatggccggccatttcggctgcgtcaacgaccaggcgcgcaattcgccggacaacccttcgctgttctccacgtttgcggccgcaccgcatccggctctggatttccagacctcgatccagggctatgaagcgaccgcgaccgggccgggcgacgcggtgaccctgagcgccacgccggggaccggcggcaccgacttcaagccggcgctgccggcccagttcgccgccgccacgcccaaccgcgtcaatggcagcgacatcatcgctctgcgttacctgatgcccgacggggtgccgatcaccggcaacgcaggcagcgacgggcagccggtgttcaccttcgacaaggcgcggctggcggtactcaagagcggtgtttcgaacccgggcctgtatggcgcggccgactgcgccagcgcgacggtgttccaggcccgcgcggtggatgcggccgccggcaccatcaccttcggcgagacacccaacaacgtcggcaacttcacccgtccggtcacggccggccaggcgatgctgcaccgtgccgagagcgccctgtactacgtcggctacgacgcggcgagcgcgcgttcctcgttgtaccgcgtgcgcttcagtgccgtgcccaatggcgcgctggtggccggcgcgccggaggcgctggtcgatggcgtggagaacatgcagctgctgtatggccaggaccgtgaactcaccacgccgtaccctaccggtttcatcgaccgccagggcaccgcggaaaccgtgcaggcctcaaccattccttccggcaatggctggcgccgcgtcggcgcggtgcagctcggcctggtgatggccagccctgatccatccgccgcaccgcaggccgaccagaacgcttcgctgatctcgatgggggtgacgttcactgccccgaccgacggtcgcatgcgcacggtctaccagaccaccatcgcccttcgaaaccgcctcttcggcaactga

SEQ ID NO: 515934 - DNA, 468 bp, Stenotrophomonas maltophilia
gtgaaagcgccccgtttccgttcgccacgtgccgcgcagggtggtttcagcctgatcgaagtgctgatcgccatcctcgtgcttggcgtcggcctgctgggctttgccctgatgcagaccatgaacgtgcgcttcgtgcagagcgccaattaccggacccaggcgaccaacctcacctacgagatgcttgaccagctgcgcgtgaaccgcgcgcgggcgccctcctatgtgggcaactatgcggcgaccacctcgaccaagaactgcctgccgcccaccggcaaggacatcagccgcgacgccttcaccctggactggcgctgccgcctgggcaaggcgctgggcgagggcgccagtggcagcgtagtgcgcaacggcgatcagtacacggtcagcgtgagctggggtgacgagcgctggaaagccgatgccggggataccaccttcactgccaggagtggcctgtaa

SEQ ID NO: 515935 - DNA, 519 bp, Stenotrophomonas maltophilia
atgtctttgcgccgggaaaacggcttcacgctggttgagctgatggtgacggtcatggttctggccgtgctcgccacgatcgcctttcccagcttccagagcacgatccgctccaaccgcatcgcgaccaccagcaacgagctgattgcctcgctgtcgctggcccgcagcgaggcggtgcgcaaccgccgcggcgccggcgtctgcgcctccactgccggcagcgcctgcgacggcaagagctgggccgagggctggctggtctgggaagaccgcaatggtgacggtggcctgagcgccggcgagaccgtgctgcgctacagcgccggcaaaccgggcgtgagcgcagtgggcacgccggacctgtcggtgagtttcgatccgcgcgggcgcaaccgcgcggacgccagcctggatctgaccctgcgcccggacacctgcggcaagcagccgctgcaacgaacgctgcgcatctcgccgaccgggcaggtccggctgctgaaggaggactgcaagtga

SEQ ID NO: 515936 - DNA, 756 bp, Stenotrophomonas maltophilia
atggcatcggtcaggggtacgtccgggtggaccggcgttgcggagtacataaggccgtccgagcggagcgtctacggatatgagacctatgcgatggcccggatggatcagcaactgggggtttacgcgatcaacagcatcgaaggggatctgttgccggccgatgcgcagcctctctatcaggatgccgtcacccggctgggcgtgaagggtgcagacctgcggtacgacttcgtcaacgtcaccattcccgccgaggtgggaatgaatgggttctcgcaactgtcgacctatccccggatccgtagtcatcgcgttgcggagaagatgcgggttcacgaagtgtttgatgcagattcccacgcgctgcgtcggcgggcctgggccagcgattccgggccggtctatcgccaggaagattacgataaggctggacgcttggtgcaggtcatcaatggcggggtgaatcctgacgtaccgatgccggaagacgccatcgctgcagacggattcgatgcacgcgtgctccaagggtcgggcaaaggttacagggtgtttcacttcgaccggcgaggacgtcccgagcgcgtgctggtgtgcgggaaaattgcagcaggcgcggaagctggcgatgaaatgcactgcggcaaaggtgatcgtagcgttgtcgtctaccagaacaacgaggtcactggtttcctgaaggatgcctatggatggcgtgaccggcctctggccgcaggctctccgctctga

SEQ ID NO: 515937 - DNA, 1194 bp, Stenotrophomonas maltophilia
atgttgctgcgccattgcctgttgtgcctggccctcgccaccgctgccccggtgttcgccgccgacatcaccttctgggatacgccgcagcgcggtggcaacagcttcaacgagaacccgcctgaccgtgcctacttccaggcgctgcgggataccggcgcgacctgggtccggctgagcccggacaagtggaaaagtgccggcggccgcgacttcctgatgggcgatgccgatcgctatcaggggctggtgcaggccgacgtggccatcctgcggcgtgcgctggatgacgccaatgcctcgggcctgaaggtggtactggtgccgttgtcgctgcccctgctgcgctggaagcagaagaacaatggcgtggtcgaccagcggctgtggcagtcgatggacaaccatctgcctgcgcagcgcttctggcatgacctggccacggcattgaaggggcatcccgcgctggcggcctacaatctgatcaatgagccggtgccggagtacggtgcaggcctggccgaacatgcctcgaccgatgccatgcggcagtggtatgccggtgtgcaggacggtccgcgcgatctgcgccgcttctactcggcgctgatcgccagcatccgcgaggtcgatgcggacatgccgttgatgctggatgcgggctggtatgccgccgccgatggattcaactactggccagcgccgttggccgatacccggctgctctacagcgtgcacatgtacgagccgtatgcggcgaccagtgcgccgaaccagaagcgcgccacgccgtaccggtatccgggcctggtgccgttcggtgagcacagtgaacgctgggatgccgcgcgcgtgcaggcgtacctgcagcagccgatgaactgggccaggacccacggcatcggcgccaaccgcatggtaatcggtgagttcggctgcatgcggcgctggccggactgtgcccgctatctgcgcgacgtgctggccgtggccgagcagcagcgggttcactgggcgttctacgccttccgcgaagatggttgggacggcatggactatgagctgggcgacacggcgctgccgggctcgtactggcaggcggtggagaagggtgagcctgtgcagccaccgcgttcgatgcaggcgccgctgttcgcgccgatcctgcaacggttgaaagacggggcgcgttga

SEQ ID NO: 515938 - DNA, 2790 bp, Stenotrophomonas maltophilia
gtgagggcagtaccgggcacgctgcaggcagggctgcgccgcagtctgctttgcatcgctctcgcgttcgccgcattgcctgcatccgcgaccgagaccaccggcacactggacatcgatgttgcggctgggccgctggccccggcattgcagcagtgggcgcggcagagtggcatcgcgctgctgttcgacgcgcgcgaactggacggtctgcgcagcagtggcagccacggccgacgcgatgtggcggcggcactgaaggaactggtcgccggcctgccggtcaccatcctgcgtaccccctccggcggattcgtggtgcgccgtacgcgtgccgccgtgccagcgccagccgaggttgccacgcgccccgcgttgtcagcgccacgcaaggcacccgatgtaccgccgcaggtggagctggcaccgatccacgtcactggcagccggctgccacgcacgtcggtgcagaccactctgccggtgaccatcatcgaccgcgacgacatcctgcgcagcggctacggcagcctgttcgacctgctgcggcacctgcccggcatgaacggtcacccggcgatgagcacctcgcgcagtggcgattcgcagtacctgccggtcggcgcggccaccaccaccagcctggacggcatggggccgcgcgccacgctgttcctggtcaacggcaggcgcctgccacgctatccgatggtgtcgctggaacagggcggcctcaccgacctgggcggcatcccgctcagcttcgtcgaacgcatcgaactggtgcgcggcggcgcctcggccatctatggcgccgatgcgatgtccggcgtggtcaacatcatcctgcgcgaccaggccgaaggccccgaggcgatgctgcagaccggcctgagcagccgcggtgacgcaggccagtaccgcgtgcaggcggccaccggcggtgtgcgcgacggcggcgaccgttggtttgccggcgtcgacctgtaccgcatcgagcatgtggccggcgatcgccgcgactggcatgcggaaacctcgcagtacctgatcggcgcgttccagggcaaccgctactggccggcgcgcagctgcgaggcaccgctgcagcgccgcgacgatggctgctggttcgacagcgcacgcccgcgttcgatccagcccgcctcggacaccgcctcggcctacctgcgctaccgccatgagcgtggcgacgggcgctacgcctatgccgaggcacgggccagccacaaccggcagcgcttcgacctggggcctacggcggtggcgatcggcctgtacggtttcaccttcaacagtgtgctgcgcgaggccggcaatgtacgcccacgggtgcgcgccaccgatgcggatctggcgttcgggctcggccgcgaacagcgtgggcgcagctgggacgccggcatcagcgcccagcgcagcgatgtcacgctggccacgtcgggcacggtgcgtaccgagccactgctgcgggcggccgaagcgctcgacttcctgcccggcttcaccacgctgcgcacggatgcggcccagcagctgttcccttccatccgcaatcgcggccgcaccgaacagtggcagggctggtggggcatacagcgcgaactgatgccgttgcccggggggcatgcccagctggccaccggcgttgatgtgcgccaggaacgctggacatcgcatcccgacgcgctgctgagcaagggcgacctggcgctggggctgccgcagcaacagcggcgactgtcacgccgcagcggcggcgcctacgccgaactcggcctgccgctggcgcccacgctgcgcatggacctggccgcgcgcgccgatcgcgatggcggttacagtgcgttctcgccgcgcgccgggctgcgctggagccccaccgcgcactggtcgttcctgctggccagcggacgcggctaccgagcccccagcctgttcgagcagcgccgaccgcccggttacttcggttcaatcgagctgccagcatccagtgccctgcccgaatgcgcacagctcgccggcggtggccgctgcagtgtcaccgccgaggtgttcgagaacgatgcattgaagccggagcgatcacgcagccattcgctggccgcatcgtggacgcccaccgaaacggtctcgctgtcgctgacccacaacatcgtcgagctgcgcaacgagatcctggccctgcaaccggccgatgcggtatggaacagcagcacctgggaactggatgaggacggccacctgcgcagcctgcgcctgtccttcgacaacatcggccgcaccacctcacgcaactgggtgatgcgcggcgagtaccgcattgatgccggtggcaacggccagtggctgttctcgctggatgcactgaagcaacaagcgcttcgccgcgaccgcggccaggacgcggcggtggacctgcgcggccacgccaccccgacgacggccgccgtactcaacgtgcaatggcagaacagcaactgggatgtcgccctgcgcggcaaccaggtggggcgaacgcgcgcctggctgcccggcgcggaatgcccggacgaccagcgcgaactgaaccactgcatgaacccccggcagctacgctggaacctgcacctggcacgccggctcggccctcggatcgtcgcggccgtggatgtgcacaacgtgctggacgcacaaccagtgaactacctggtcggcaacggtgggcagatgccgggactggatgatcccctcggccgctacatgctgctgaccctgcagttccgctga

SEQ ID NO: 515939 - DNA, 1290 bp, Stenotrophomonas maltophilia
atgaccgcgcaacgcagagcgctgatgctgtcactggccctgctcaccggccccgccctggccgccgaaccgcagcaggtcgccaaccagctgctggatcacctgcaggctggccagattgccgatgccgaagcgatgctgaccgcgcagatggcccaggccgtgcccgccgaccggctcggcgtgctgtggaagtcgctgggcaccctgcagcagcgaggtgccgccgaagtgagcacgcagcagggcatgcacctggtggtggtgccgctgcagttcgccagcggccgggtcgtcgcgcaggtggcagtggatgcacaggacaaggtggccggcctgatgctgcgcccggctccggcggccaaggcagcgccgccgcccgccgatgcgaactatggcgagagtgaattcagcgtgccgcagccgcgcggcgcactaccgggcacgctggcgctgcccaacggcaagggtccgttcccggcggtggtccttgtgcatggctcggggccgcaggaccgcgatgagacgatcggcggcaaccgcccgttcctggatatcgcccgcggcctggccagccagggcatcgccgtgctgcgcttcgacaaacgcaccttcgcccgcccgcaggatttccagggcggcacgttcaccgttgatgacgaaaccaccgacgatgccgtggccgcgctgaccgcactggctgccgacccgcgcatcgacgggcgccgcgtgttcgtactcggccacagccagggcggcatgctcgccccgcgcattgcccggcactggccgcaggcgcgtggcgcgatcctgtgggcggcgccggcacgcacgctgctggacctgctgccggaacagaaccgctacctgctgggcctggacggtgacatcactgcgtcggagcaggccttcctggaggcgctcgacaggcagatcgccgccgcacggggcaccgcgccggtggccgccagcgagctgccgctgggagtgccgcagtcattctggaaaagcatcgaagccgttgatgcacgcgccgatgcacaggcactgcgcacgccgctgctgatgctgcacggcggccgcgacttccaggtgccggacaccgactggatgctttggcagaaggcgctggccacccgcaacaacgtgcagtggcgcacgtatccggccctgaaccatatcggcattgccggcactggccgcagctcgctgcaggagtacacgcaaccgggccatgtcgatgcaacgctgatcgatgacgtggccacgtggataaaggcacagcgatga

SEQ ID NO: 515940 - DNA, 660 bp, Stenotrophomonas maltophilia
atgctgtggcccgcggcgatgcctgagcggcccgcccgccacacgctgatctggctgtcggctcacgccgactggcgcgccgacgtggctgcacaggaaccacgcctcgcggcctggttcgcgcagggcctgccggcgatggtggcacgtcgtgccgtggatgatcccgacccgcgcctgcgcctgggcgtaccgctgccgccgaacgaaggcaaactgcgcctcgccctgcgcgtaccgctgcaggatgtacagcgcctgcaactgccgccgactctggacgcggtgctcaccgccggcgtcccgaccgactggcagcaggcgctgcacaccctggcgcgcatcgcaccggcacgcgtgttcggtgcctttgcctggcagcatctgagccgattgccgtatgtgcatccacgctcggacatcgatctgttgtggcaggtgcagacccgcccccaggccgacgcacttgtcgcacatctgaatgcctgggagcacgagcacggccgtcgcgtcgatggcgaactgagcctgcctgatggcggcgcggtgaactggcgtgaatatgccggcgacagccgccaggtgctggtgaagcgcctggatggcgccgcgctggaaagccgcgagcacgtgttcatggctaccggagtggcggcgtga

SEQ ID NO: 515941 - DNA, 858 bp, Stenotrophomonas maltophilia
gtgagcgccgtcgtgcagctccgtctgcccggtgaacgtgcgttcgacagcgcgcgcctggggcgcctggccatcgccagcctgcatgccgaactggcactggcccccaaaccggggctggtcacgccgtttgatgcaggcagccatgacgacatggatgccggcacgttcctgcgcagcctgtttgcgctgcgccactacttcaccgcgatggcacacgccggggctgccgacgcaccgttcgcgcggctgcgcgcgcacggcctcgctgccgaaactgcgatgctgcgcgccaccgggggtatcaacacccatcgcggtgcaatcttcagcctcggcctgctggtggccgccgccgcacgctgccggcgccagcacggccacagcgtgcctgccgcacaggtgtgcctgggcgtacagcactgggccgacgatttcgcccgtgctccactggatgcgcagagcccggggcagcgtgcacgagtgcagcatggcgtgccgggcgtgcgcgaacaggcggcggccgggtacccgttgctgcgcgaactggcggtacccaccctgcgccatgccctgagcgcaggcctgccgcgcgacgcggcactgtgccagaccctgatgcagctggttgcgcacatcgacgacctcaacctgctgcaccgtggcggcatcgacggcctgctctgggcccagcagcaggcgcgcggttttctggaaagtggcggtgccttcgcaccgggctggcaagtgcgcctgcacggcatcggtgaacgcttcgtcgcgcgccgcctcagccctggcggcagtgccgacctgctcgcctgcagctggttcctgctgcagcaggaggccgcatga

SEQ ID NO: 515942 - DNA, 921 bp, Stenotrophomonas maltophilia
atgagcctggctctgctctgtcccgggcaaggcgcgcagcatgcggcgatgttcgagcgcgtgcgcgatctgcctgccgcgcgcgacgtactggagattgccagcgcagcgcttggacgcgacgtgttcgcggcggccgctggtgaatcgcgcttcgacaatgcgctggcgcagccattgctgtgtgcggccaccctcgcgcactggcggggactacgcgaagcgctgcctgcgccggtgctggtggccggctacagcatcggtgaactggccgcgcatgccgtcgccggcaccttcaatgcggacacctgcctggcgctggccgcccggcgcgcgcagctgatggacgccaccggccccgccgatgccggactgcaggcggtgctcgggctggatcgcagtgcactgcacgcgctctgcgatgcgcacggcaccttcgtggcgattgccaatggccatgatcatttcatcgttggcggtgcgcaggcgtccctgcacgcactggccgacgcggcacgcgcacagggcgccgaagtccgcgtgctgccggtgcatgttcccgcacacacaccgctgctggcggcggcggtcgcaccatttgccgccgcactcgatgctgccccgctgcaggccccgcgcctgccgctgctggccggtatcgatgcacgccccgtgcgtgatcgtgcggcgaccgtgcacaccctgtcagcacagttggcgcagaccatcgaatgggcgcaggtgatgcgccaggccttcgagcgcggcgcgcgggtgttcctgcagctgggcccgggcaatgcactggcgcgcatggtcgcgctgtcctatccgtgctgcgagatgcgcgcggtggaagagttccagagcctggaaggcgccgcggcatgggcccgcagcgcgctggagcggctgcggtaa

SEQ ID NO: 515943 - DNA, 435 bp, Stenotrophomonas maltophilia
atgatcatgcgccccctcctggctgccatgctgctggccggcgtgctggctggctgcagcacgccctcgcagacgtcggccgatgagccgcacccgcccaccctgggcgccggcctgagcccggtgccggccttcaccggcggcggtgccggctggcgcatcgagatcgcgtccaccggcaagggcaaccacgatgccagcctcagcgcagatggccgcacccataccggcatgctgcgctatctgggccaacccgccgatgcacccagtacgctgatcgtgctcaacggtgagctgggcaggcagccggccatcgtcgagatcaagcgcgagccgtgccgcaatgccgagggcgtggatacacaggccagcgtgcaggtgacgatggaagggcaaccgcagcgccgcggctgcggccacctggcggtgtactga

SEQ ID NO: 515944 - DNA, 1743 bp, Stenotrophomonas maltophilia
atgggtcgcagggcatcgccaatcagtctgcagacatggctctggatactgggcggcctgttcgtgctgtgcacgctgccattgatggccatcgcgctggtgcaggggacgcagcgcttcgttgaagccgagaccaacctggtcagcctgcgccagctgcgccagaccttcgagctggccaatctgatctcggccgagcgtggcccggccaacagcctgctcggcgcagacccggccgacgcaggcacgcacgcgcgattggccgcgcagctggcggcggcacggcaacgggtggatgccgcgctgctgcagctcgatgcggtcttcggggccgaccctggggaggtggatggccagggcatgctggccgatgcacggcgccggctgtcctcggcgcgcgctgcggtggaccagatcgtggcacgaccacgcgatgcgcggcgggtggaagaggtggagcgtgcgatcaacagcatgttcgccgtggtcgatcgtctgcacctgctgacctcggcacagatcaacgcgctggtgcgcgccgaccgcgaggctgccatcccggcgatgcagggccaggtgctgatcgacctgcgcgaacacggtggccggctggcctccaacgtgatggcgccggtggcggtacccggcgcgtggcgcgatgagcaggtgcgtgccgcgttgcagaccgaaggccgcctgctcgagctgtggcatctggcaggcagccatgagtcggtgttccgcagcgacccgacgctgtcctggcattgggacatggcgcgacggcagtttttcggcgagtcgctgccgatgatcgagcagctgatcgaggaggggcggcgcggccgcccaccgccgtggaccgcggccgagttcaccacgcgctacgtaccgacgctgcgttcgctggaggaactgcgcgacggctatctgcgggtgtcgatcgatcgcttcgagcacgcccgcaaccgcgaggtgacacggctgggggtgctggtcgccaccgcgctgggtacgctgctggtgttgggcggcgccctgcgcatcgcccatcggcagatcctgcgcccgctgctgcaggcgcagaagcaggtgatccagatcgcctcggacacgcccggtcccgagcagtacgccacccatccactggccgagatgcagcgcctgttcgatgccatcgaagtgctgcgcgggagctcgcgtgaacgctcggcgctgaccagtgaactgcgccagctggccggcaccgatgaactgaccgggctgttgaaccggcgcgcgctggaagaaagggtgcagcggcgccatgccgaaggaggcgtggacgccgtagtgatcctgctggacgtggaccgcttcaaggccatcaacgatggccatggccacgatgccggcgacgcggtgctggtacaggtggcccgattgctgcagcgtcatctgcgccgcagcgacagcattgcccgctacggcggcgaggaattcctggtgctgctggccgacggtgacctggccgccggccggcagctggccgaatcgctgcgcgtggccctgcgccagctcgatattgcggtggccggtgatgacgtgctgcgggtgaccgccagctttggcgttgcgcagggcggtaccgatgcgctgggctggcgggccctgctgcgcgctgccgacgcggcgatgtaccaggccaaggcgcagggccgtgatcgggtgcgggtggccggcggtggacgtggtggacgctga

SEQ ID NO: 515945 - DNA, 732 bp, Stenotrophomonas maltophilia
atgaataagccgatctcaagtaccgcactgccgaatctgctcgaagctgcccttccgccgcccgaccccgctctgctggccgccggcgatgccgggcctcccaggatcctgctgctgtatggctcgctgcggccagaatcgttcagccgcaagctggcactggaggccgagcgcgtgctgcgccatctcggctgccagacgcgggtgttcgacccgcacgggttgccgatgctggacagcaccgacaagcaccacccggaggtgcagcgcctgcgtgcgtggtcgctgtgggcggagggccacgtgtggatcagtccggaacgccacggcacggtgaccggcgtgttcaagaaccagatcgactggttgccgctggaggagggcgggatgcgtcctacccagggcaggacgctggcggtgatgcaggtcagcgggggctcgcagtcgttcaacaccgtcaacacgctgcgtgtactggggcgctggatgcgcatgctgaccattcccaaccagtcctcggtggccaaggcctggcaggagtttgacgaagacggacggatgaaaccctccgcgttctatgaccgggtggtggatgtgatggaggagctggtcaaattcaccctgctgacacgcggtcggtcggattacctggtggatcgctacagcgaacgcaagggcaatcagcaggcggccgtgctcgccagcgcttcgggagcggatgcagcgaagtag

SEQ ID NO: 515946 - DNA, 330 bp, Stenotrophomonas maltophilia
atggaaacaaagaatgcaatcgcagccctcaccgccctcggccacgccacccgcctggccgccttccgcctgctgatcgaagccgggcccgctgggcgcatggccggcgacatcgcctcgatcctgcaggtgccaccggccacgatgagtttccacctgaaggaactgctgcaggccggcctggtggaaagccagagccagggccgcaacgtctgctaccgcgccaacttcaacgccatgaccggcctgatcgattacctcacccacaactgctgtgccggctcacccgcgccgggctgcagccccaacgcgcccgactgcgcctgctga

SEQ ID NO: 515947 - DNA, 507 bp, Stenotrophomonas maltophilia
gtgaaccccctacgcgtgctgttcctgtgtaccggcaattccgcccgcagcgtgctcgccgaagccaccctgcgggcgtgggccgggcatcgcttcgaggtcttcagtgccggcagccagccgaccggccaggtcaatccgttcgccatcgcccagctgcaggccgacggcatcgccaccgccgggctgcacagcaaatcctgggatgtgttcgcccatgccgcaccgatggacctggtgatcaccgtctgcgacgccgctgcggcggaaacctgcccggtggtgttcggcgatttcctgcgcacgcactggggcctgccggatccggccgcggtcgaaggcagcgacgccgacaaggcccaagcatttgcccaggcccatgccatcgtgaaggcccggctgctcgccttgctggccctgccggccgctacctggaacgatcgcggtgaactgaaacacgccctggaccggatcggtttcgtgcagcccgcggacccgcacgcatga

SEQ ID NO: 515948 - DNA, 1044 bp, Stenotrophomonas maltophilia
atgagccgtcccgctccgatggggcgcttcgaacgccacctcaccttgtgggtcgcattgtgcatcgcggcgggcaccgcactgggccatttcctgcccactgcatttgccgcgctggcgcgcaccgaagtggccaacgtcaacctgccgatggcggtgctgatctggctgatgatcatcccgatgctgctgaaggtcgacttcggcgcgatgcgccaggtcggccagcactggaagggcatcggcgtgacgctgttcatcaactgggcagtcaagccgttctcgatggcgctgctgggctggctgttcctgcgccatgccttcgccggctggctaccgccggggcaggccgacagctacatcgccggcctgatcctgctggcggcagcgccgtgcacggcgatggtgttcgtgtggagcaacctgtgccgcggcgatgccaacttcacgctgagccaggtggcgctgaacgacgcgatcatggtggtggcctatgcgccggtggtggcgttgctgctgggcctgtcggccatcagcgtgccgtggaatacgctgatcctgtcggtgggcctgtacatcatcgcgccggtgatcgctgccgcagtgctgcgccgcatgctgctggcgcgtcgtggccaggacggcctgcaggccgtgctgcgcgcgctcggcccgctgtcgctggccgcgctgctgctgaccctgctgctgttgttcggcttccagggccgccagatcgtgcagcagccgctggtcatcgcgctgatcgcggtgccgatcctgatccaggtgtacttcaacgcagggctggcctacctgttgaaccggcagctgggcgttgcccattgcgtggccggtccgtcggcgctgatcggcgccagcaacttcttcgaactggccgtcgcgaccgcggtgggcctgttcggcgtgcattccggtgcagcactggcgacggtggtcggcgtgctgatcgaggtaccggtgatgctgtcggtggtccgcatcgtcaatgcgtcgcaacgctggtacgagcgcaggcgatga

SEQ ID NO: 515949 - DNA, 1125 bp, Stenotrophomonas maltophilia
atgccaacacctggaatcgccatcatcggaaccggcatgatcggcgccgtgcaccgccgtgcggcgctgctggccggtgcccggatctgcggtgttgccggctcttcactggaccgtgcacgcgaggttgcgcattcgtggaatgtcgcgcgcgcctatcgggatatcgaagaggtcatcgccgatccacaggtgcaggtcgtgcacatctgcacgcccaaccacctgcaccggccgatggcacaagccgtgctggaagcgggcaagcacgtgatctgcgagaagccgctggccaccaccctggccgatgcgcaggcgctggcggcgctggccgcctcgcgcggccttgtcgccacgattcccttcgtctaccgctaccatcctgtggtgcgcgaggcgcgcgcgcgcattgcacagggcgaactgggaccgttgcacctgatccacggcagctacctgcaggactggctgctggacccggccagcaacaactggcgcgtggacccggcactggggggtgcctcccgcgtgttcgccgacatcggctcgcactggtgcgatctggtggaatgggtcagcagcgaacgcttcaccgaggtcagcgcggcgttcgacaccgtgatcagcgagcgcggcgccggcaccgcgcagagcttcagcgccccggccgccggcggcacgctgcagacggtggccagcgaagatgtggcgatggccctgttcaggaccggcgccggcacgctggcatcgttgacgaccagccaggtctcggccgggcggcacaatcggctctggttcgagatcgatggtgcccgcgccagcgtggccttcaaccaggaagatgcagagcggttgtggatcggccggcccgaccagcgcgaggaaatcttcgtgcgcggcccgagcgcgggaagtgccgatcagcggcggttgtcggtgctgccggccgggcacgcacagggctacagcgcatgcttcgatgcatttgtcgccgacacctatcgcgccatcgacggcgaacgcgccgagggcctgccgaccttcgacgacggcgtgcgctcagcgcggatcgttgatcgcgtcatcgcatcggccaggacgcgcgcctggaccaccatcgactga

SEQ ID NO: 515950 - DNA, 552 bp, Stenotrophomonas maltophilia
atgatgacgtccacgaccccctcttcggccccggccgaaggcgccccgcgcaccgttgccgaagccctgggccagatcgtctggctgctgtcgcagtcgccgctgcaccgggagatgccgctcaaagacctggaatggtcgttcatgccaccgatactgaaggagcagttccgggtgttccggtttggcaccctgccaccgttgccgggcctggacgaagcaagcccggtgtttgccggactcacccggcaggcgctggagcagctgccgttgggagtggcgatctgggccagcctgtccgaggacgccgagcgcaagctggagcagggacagcggctggaactggaggagtggaacagtggcgaccgcctgtggctggtcgagttcatcaccccgtttgcgcagcccggcaacggcctggccgaagccatgctgggtgacctgctgaccggcccgtttgccgggcgcagcctgtccatgcatcgcaccgacccggtgaccgggcgccgtgacagggtcacgctcggaggggtgccgtcgcaggcggcctga

SEQ ID NO: 515951 - DNA, 12813 bp, Stenotrophomonas maltophilia
atgagcggtcgcaccatcacccaggttccgaagcggtccctcaccacgatcgtcaggcggatgaagaccgccagcgcgagcgcctcgattggtgacaacacggcattgatgacggcgattgccgagctgatgcagtttgacgagatgtcgatccgtgtcgcgctcgatggcaccggctggtcggtgatctcagcctccgccgaagagaagagcggctatttcgggatggcgctctatcacgacgcgagcaactccttcatcgttgccaaccggccaacacaggccaaccccgtcgattggcgcgacatcattaccgacgctctggcgacgctgcatattcccacccaacagcagctcgacgcgattgcgtttggaaggcaggcatttgcagacgccaagggaattggactgaacttcagcgatctgtacttcccgggcttctcgctgggaaccgcgctggcgcagacgcagatgatggatctgtacctcacccgggacaaccttccggtggggttcgatatcaatcggatgagtggcgtcggcaaggggtcggctggcttcggtgtgggaaacccgaccgacagccttggcctgatcatggcgatggtgcacggccagggagtgaataccgccgctgcgcaggcattcatccaggatcactacacgcactacgtgcgccaatcggacttcgtgccgggtggtgcgtggaccgccggtggacggctgggcaatgtggtggtgctgccggacctgtacgtgctgaccgagagtgggaagtatgtgatggtgacgggcatcggtgcccacaatggcaccgcctatgacctgtcaatcgacgcctacaagaagcatcaggtcactgcacaggactacattgcggtcatccgcaccgacggcacgctcgcattcctgcccaaggcggacaaggagctcatcctgccatcggctgacttcatcgggcagagccagagctatctgcccaccggctacatcctgaccctcgccgaaccacagggcgacggcgtgaggatcgtcggcgagacgatcaatggcgacgtcatcgagatcgtccgcaccgatcttgatggtgacggggattacgaccgcatcgagcgcgtgctgcaggagaagaccagcggcagtcgcaacttcggcaacaatcgcttcctgatctccggcggcgaggtcagcgacgaggacgactatgtccagaccgcgcaggtgaggatcgacagcaacggagatggaaaagtcgaccagatcgacaacgtcaccacccgcggcaacatccgcatcgaggtcaacaccgtcatcgctgcggatggcacggtgaccaccaccgacgatgtgctgtatctgggtgtgaacatcggttcgatcggttcaagcttcggcagctcgctcagttcggtactgttcgacgacgccctggtcagcagcatcggttcaatcgtgttttccgcactgggcgagaatctggccgaggcgctggcgcagctgagggtgaccgaatcggcgttccaggcattcgatgccgccttccaggatatcgaactggatctgggcgccaacgccaccggcgtggtttcgtcctatctggccggcgagctcatccatgccctcggcctggagggaacggtggttggcgagctgggccagtctgcggcggcgcaggcgcttgggatgatcatccagaacatttccaacggcgtaccggcgctgagcaacatcaacctgggcagcttcaacatcagcacggtggtggccacctggctgggcaccaagctggcctccaagctggtggagttcgataccatcgcagggcagatcggcgcgtcgctgggggcgtccatcggtgccatgattggcgccgccagcgcaggctccagtgcggcgatggggatgcggttcgggtccatggccggcccggtcggcgcggtcatcggtgcgttcgtcggctacattttcggcggcgtgatcggatcgatgttcgggggcaaaccgcgttccggcgccgaggtgacctgggaccaggcctcgggcaagttcgccatcagcggtgtctggcagcgctcgggtgccaccccgacggcggccatcagtttcgcgcagacagtcagcggaacgctgaacaacgtactggaacttgcaggttcacgcctgatcgatcccgcgtccgtggtggccggtggatacggaacccacggcaaggatttcgtctatcggcgcaacgggacggtggtcttcaagacgcgtgatgccgccgaggtgatcggctacggctccctggcggcactgcgttcgctggtgccacagatggcaggcggtgacatctacatcaaacgggccttgtccaacggcctggcgaccacccgtccacaggacttcgattcaacgcagctggtgggcgatctgtccgtggccctggactatggccgctacatggccgatcccagcgtggtcaacgccctgctgtcgaccggatcggcggatgggttcgccgcaggctgggccattaccttcgcacgtgcccgcgagctgggactgcaccggcgcgccgccagcgactggacgggcggtttctcggtgctgatggatgagatcctcgatggcaccgtggacggcatcggtatcgggccggccaatctctacatggcactcgacggcaaggagcgtacgttcacggtgatggccggtgatgagcgcgccggaaccatacgcgacagcatcgaaacctcgatgaaggatgagatcgccggcagcagcggcgcggaccagatctcgctggaaggcaatgtgctggccgcttcggcagcgctcaaggtcaacggcgcggcgatgaatggcagccacaaggtggacgtggccgcgatcatcgatgcaggcgacggcgacgatatcgtccgcggcggggatctaggcaatgatctgctcggcggttccggcaatgacacgctggtcggcggacgcctggatgactggctgctcgggcaggacggtgacgacgtcctgttcgccggcgcggtttccaacatcacctttgcggccggcgatgccgcagcggaggccgcggcgatcgccgtcaacggcggcaacggcaatctgctgcgcggcggcgcaggcaacgatcgcctctatggtggccgtggcgcggactggcttgaaggcggtgccggcgtcgaccggatcctgggcggcgacggcgccgacatcatcagcggtggtgccggtgacgaccgcttcggaaatggcgccgcgctgttcggcggcggtggctcggaccagtacctgtttggatttggcgatggccgcgatgtgatcttcgacgaggcagacggcgcgtcggtggccaacaagggcggcgactcgctggcctggcgcatccgccagatggagcaggggctgctggcacgtggctgggcaggtggcggcgactaccttgccgacggcacggtccgtggcggcgaggatgcgatcgtgttcagcgccggtgttgcgttcgagaacctgcgcatgcgcagggacggcaacaacctggtgatctcgctggtgttcatcgattcggccggccgtgccaagaccaccagtgacgagctggtgatcagcgactggttcgagacgacccatcgggtggaatggctgcggtttgccaatggtgaggaggtccgcattggtgacatgacgtcctacatcatcggcaccgctggatcggacgtcatcctcggtacctatggcgccgacttcatctatggcggcgacggcaatgacgagatccgtggcctggccggcaatgacttcggcattggcggggccggcgacgatttcgttgccggcgatggcgaccaggactgggtgatgggcggctccggcaacgaccaggtgctcggtggcgacggcaacgacaccgtgttcggcgacggtggcaatgaccgtgtgtacggtggttccggctcggatctggtcgtcggtgggcgcggcaacgacgaggtcgtgggcggcgaaggcgatgatgtgttccgctatcagcgcggcgatggcgaagacattcttcttgatgactacgtcgacaactgggatctggtgtgggagaagggcagctacgtcaacggctatgtgcgcaacgccgatggaacggtcagcaaggacggcgtggtgtacttcaatggcgccagctggatcagccacaacgactggaacgacgaggcacaggtgctgcgccgccacatgggcgcgctggatggcgtgatcgcgcgcaacgccggcgttgattcactggagttcggtgcgggcatcgacgtccaggacatcctgctgcagcagatcgacaacgatctgcgcctgaccgtgggccgtgatggcgacgcgggtcgtctgtcgcagtccaccgacacgctgacgatcaaggactggtacgcgctgggcggctccatcgagaatatggtgttcgccgccaccggtcgcctgggcgttgccgcgatgacgctgctgggcggcagtgatggcaacgacaccatcagtggaacgtccggcaaggactggctgaccggcaacggtggtgacgatgtcatcgacggcggtgctggcgatgatctgctcaacggcaatgaaggatcggacctgctcaagggcggtgccggtgcggacatcctctacggcgggagcggcgacgacacgctggaagggggcagcgacgccgatctgctgtttggcgggttgggcaccgacatcgcatcctatgccggcagcagcgcggtcgttgcctatcttggcaacaccgtcggcaataccagccatgccaagggcgacgtgtatgagggcatcgagggccttgccgggggaaacggtgccgaccgactgggcggtgatgcctccgacaacatcctgcgcggtggcggtggcaacgatctgctgcgtggtggagcgggcgacgatgtgtatgagtacaacgtcggcgacggtgacgaccagatcatggacgcggcgttcgatctggaggaagtggtgggcgcggacggccaggtatccggcgcgtacctggcatcgtgggattacctgggcgagagcgcggggcggcatgcgtaccggctgaccctgaccaaccgcctcagcggagaggtggcctaccgcagtttcgatcaggtcgatttcctgttctcgcagcagcaggccacgatcccgccggcttcggcctggaactacggcgtggggcgcctgcagggaacgacctggcgcaacaccgccaacggcatgcagctgctgcgtgaggcgccgcgccaggacgcgtcgggcgacgacctgttgtcgttcggaaagggcatcagcctgtccaatctgcgcctgcgcattgtcggtggcgagaaccagttggacgtggtcgcggcccagaatggatcggtgaagatcggcagtgacggcaatgcgcagatcagcgtggagcgcatgcagctcaacgatggcctcactgttgaactgcgcaatctccgccagctcgcacagggtggcaccgccgatgacgatgtgatcctgggcggtacggcggccgacgtcatcaacggaggagcgggtgaggatgtcctttccggcagcgacggcaacgacacgctgagcggtggcgatggcgatgacacgctggagggcggtgctggcgcggacgtgctggacggcggcagtgaccgtgtgagcctggggcaggcgatccagcctgggcaggcctacggagacacgatccgctacgcctcatccagcgcggcgctggttgccgatcttgccaccggttcgttgttcggcgggcacgccaccggtgacagcatcgtgctgaatgggggtgtcagctcggtcgagaacgtggtgggaaccgctgactttggtgacacgatcagtggcgacgcgcgtgccaaccggctgctcgggttggggggcaacgactggctggacggccgggcgggcgacgacgtgctcgttggcggagacggcaacgatacgctgatgggaggcgacggcgacgatgcgctgtccggcgatgacggcgatgatcgtctggatggcggtgccggcaaggacatactggccggcggcaccggcgccgatgagctgtatggcggcctgggcaacgatcagatcagtggtgacgcgggcgacgacaaggcctggggcggagacggcgacgacacgctggggggacaggagggcgcggaccagttgtacggcgaggccggcgatgatgtcctgtccggcggcgcaggcgacgacctgctggaaggcggagacggcaacgacacgttgtccggcgacggtggtgacgacctgatgcgcggtggtgcgggcgacgacacctatgttgtcgcgggtcatgacggatcggatcggatcgaggattcgctcggtcgcaaccggctggtgttgcaggacgccggtccggaatcggtctggttgcagcgcaggggtgacgacctggtggtgagcgtgctgggcggcggatcgagcgttacgatcgccggctactacaccggggcaggtcgcctgcgggagatcgcaacagcggccggctcgctgttcctggcccatgctgaaccgctgatccaggccatggcgcagctctccacggaggtgccggccgtcctgccggcggccatcgcggcgcagctgacgcgctactggcatcccaccggcaaggccggcccgcagctggccaaccagtcgctgtcgactgacgaagacgtggcactggtgggtaacgtcaatgccgtcgaccatgacgacaacatctccggctacgccgtgctgcaggggccgacgatgggcagcgttgcactcgacgcggccaccggtgcctgggtctacacccccgcagccgatcgccacggcaccgaccgcttcgtggtcagggtcaccgatgccgacggcaataccgccgaccaggtggtggatctggtggtgcgctcggtcaacgacgtgcccagtgacatcctcgccccggggccgctggcggtggacgagaacgccgccaacaacctgtcgctgggccgcttcggccatgtcgaccgggacggcgcagaggatacggccaccttcaccctgatcaatgacggcggtggccgcttcaggattacggccgatggcacgctcagcgtccgcgatggaaccaagctggactatgagaccggcagcgcgcacaccatccgcgtacgcgtgaccgatggcgccggcgcgtggttcgaaaaggacttcacgatcgacgtgcgcaacatcaacgaggcaccgttcacgccgacccgcccgccgaacaccgcaccggttctggccggcgagaagaccggggccggcacggtggtgggcaccttcgtgatcggcgatcccgacaccacgacgccgaccctgcagctggtgaccaacccgggcggcctgttggaggtggtgggcaaccaggtgcgcgtgcgttcgggcgttgcgatcgacttcgaggcgttggccacagcgcagggcgcgaccctggtcgacctggatggcgatggcatcaaggaagtgctgctgaccgccagtgtcagggcattcgacggcgagctggcgtcggccggaaccctcagcttcacctatgccatcgaagacgaaaacgaagcaccaaccgccgtggcattcgcggccacaaccaccagcttcaacgaaactgatcgggtggccactggcacagcgctgcccgcgatcctgctgggcacgctgtcgtccaccgatccggacaccgtggcgggcagcgacttcgccaccatggcctacagcgtttcggacagccgtttcgagatcgtcaacggcaaccagctgcgcctgaaggcgggcgcgatcgtcgactatgaagcgggaagcacggtggcggtgaccgtcacggcaaccgatcgtggcggcgccggattgagcgtcagcaagcagctggtgttcacagtcgtcaaccgcgatgactatctgtacggcaccgcagccggcgaaacactggtcggccaggccaaccgcgacgtgatccaggggttgggcggcaacgacaccatcaacggtggcggtggcaatgacgatctgtacggtggcgatggcgatgacaccctgcgcggtgacgccggcgacgacaaactgtggggcgagctcggtcgcgacaccctgtacggtggcgcgggcatcgacgaactgcgtggcggtgacggcgatgacaacctgtatggcgaagacggcgatgaccgtctgtatggcgatgcagggaacgacattctcgatggcggtgccggcaacgatctgctggaaggtggcatcggcaatgacacgctgaagggcggcctcggcaacgacatcctgcgcggtggcgatggtgacgaccttcttgagggtggcgccggtgccgacacgctgtccggcggtgcaggcgtcgatacgctgacctatgcttcggcaacggccggcgtggtgctgaacctggcgacgggaacccatggcggcgcagcggccggtgacgtgctggaagatgcattcgagcggatcatcggcagtgcattcaacgacaccatcaccggcagcgcgggtgatgattacatcgagggcggtgccggcaatgacacgctctacggtggggccggcaatgacacgctctatggtggtgacggcgatgatctgctggatgcgcaggccggcaacgatacgctgtatggcggcgccggcagcgacatcctgatcggtggcgatgacagtgacgtctatctgatcgatcgcgattcgggtgcggacgagatccgcaattacgattccagtggcgacgacatcgacgtcatcggctaccgcgacatcagtcggaatgatctgtggttcagccgcacaggcgatgatctggtgatctcggtgatcggcaccagcgtggtgaccacgatcaagggctggtacaccacgaccagcgccaatgatcgcgccaactacaagatcgatttcattctggccggcgagcatgccagcagtaccatcaatgccgaggcgctggtcacgctgatggccggccggaccaagcccgccacggtcgccgcttaccaggccctgcatgctgatgcgtccttcgagaaccaatggcggcaccactgggatggcaacggtctgccctcggtcagcgtggtagcgaaccagtcgatcaatgaagatggacaggttgccgtgcagttcaccgtgggtgatgacttgacccccgcatccggcgtgaccgtacaggcgttcgtcctggacgccaccgatctcagttccgcggtggcctggatgaacgcgccgaccatcaccgccggtgccaacggcgagcggacggtgaccctggtgccgaagggcaatgccagcggacgggtggcgatcaagctggtcgccaccgatgcgggtggcctggtgaccgagcgggtgtttttcctggacgtgaaaccggtggtcgatgcgccggtgatcagccgcgcggtgcaggtcggtacgaccctcgacggtggcacgctggccctggatgtgcaggctgcgttgtccgataccgatggttcggagaccctggagatccgcatctccaaccttccgaccgggctgaccctgaacaagggaacgaacctgggcaacggcgtgtggtcgctgacgccggcgcagctggccggccttgcgctggtcggcccggccacgtggtcggccgacctgaccggcactgcggcgctgaccgtgaccgccatcgccaaggagaccgccaccggcctgaccagcagcaagacgcagaccctgtcggtcaccatcaacgcgcgtccgaccgacatcacggtcgaccgggcgttgagcacggtcgaatccacggcggacgcgccggtggccaatggcacggtgctgggcaacttcgcccgcgtcgacgcggacaacgatggcttcaccttcagcctgaccgacaatgccggtggccgctttgcgatttccgcggcgggcgtgctgacggtggccaatgccagcctgctcgactacgagaccaacacgtcgcatcagatcgtggtgcgcgtgaccgacgccggtggcctcacccgcgacaagaccttcaccgtggcggtgaccaacgtcgatgaagccccggcaataccgaccgtctccagccagccggtggccatcgctgccgaaaatgccgcgttgggcggcgtggtgattgccaacctgtcctccagcggcggcaatggcagctacagctatgtgctggagggagactcgcgcggctggttcaccctggtcggcaaccagctcaagttccgcgatggcctggtgctggacttcgaggcgctgaaggccgccggcatgacgctgagcgatgccgacagcgatggccgacaggaggtggtgtactcggtgtcggtgaaggccgtatcaggtgggttgacctcggccggtgcgcgcaccatcaccgtgcgcctggaggacgtcaacgacgcgcctcatggcatcactgccgaccgtacgctcagcatcgccgagaactcgggcaacggtaccgaggtcggcaagttcagtggccaggaccaggatgcgaccgacggcctgaccttcaccctggtcaacaatgccggcggccgctttgccatcaccgcggccggcgtgctgagcgtcgccaatggggggctgctggattacgaggccgccacgtcgcatgcaatcacggtgcgggtgaccgacagccacggcgcgacccgcgaccaggtgttccaggtcggggtgtccaacgtcaacgaggcaccgcgcacgccggatgtcgtgcagcacgtggcgctcaccgccgagaacaccggcgtgtcggggcaggtggtggcgaccttgtcttcgtccgatccggacggaaccgcgccctcgtaccagatcatcaacgacccgtttgcctggttcgtgatctccggcaaccagctcaagtacaacgtgaacagcttcgatttcgaggccgtggcgccgtacctgcagctgatcgacggcgatggcgatggccagctggaggcgtattacaacgtcacggtgcgtgcgacagacggcgcgctggtgtcgggcaaccgcgagatcacggtgcgtatcgaggacgtcaacgaggcgcccacgacctggggccagagcgtgacgctggccgaatcggcaccgggcgccggccagaccgtcttccagttcaccaactggtccgacccggacagccagtggtacaaccgcgaccatcgtttcgccatcaccggcggtgccagcaacctgttcggcatcaatgccaccaccggccagatcgcgctgcacgggcagctggactttgaaagcgcgcagagccaccagatccaggtgacggtgaccgaccgcgccggcgcgtccagcagcacctgggtgacgatcaacgtacagaacgtcaatgagaaaccaacgctggtctacacgcaggacagcaacttcgtctacgtgctctggggaaatgaccaggaagatttctacagcagcgtggtgatcaccagtgcggtggagattctcagtgtgacccagcagtactgggatacgtacaccaacgagacgttctactacgactatggaacgaccacgcgtgcaatctccggcgacgggttcctcaccggctattactacaacggcacgattgccacccgtatcgccaaccgcggcaaccggcgccaggtcaatgaaggcaattggggcgacccgcgcggtagcggtgcgggctattaccaggagacctactacgacacctggtacgagatcgtcgtccagtcggtggacagtgccggcctgtggagcgacccggtcaagttcgtcgtcaacgagttcggcgctcgcctcggccctgtggttctcgatctggacggcgacggcgtggaaaccgtgggttgggcccagagcgccacccgcttcgacatggacggtgatggcgtgcgcgacctgaccggctgggtcgggccgcatgacggcctgctggtgcttgaccgcaaccgcaacggcacgatcgattccggcgccgagatctccttcacgatggatcgggaaggggcgcgttccgaccttgagggcctggcggcgtacgacagcaacggcgaccggcgcctggatgccggcgatgcgcgcttcggcgagttccaggtctggcgggatgccaaccgtgatggcatcagccagaccggtgagctgctgacgttgcagcaggccggcgtggcatcgatcaatctcgacgcgcagcgcaccgggcagacgccgggcacctcgccggacaacaccacctacgccaacggccagtacacccgcaccgatggcagccaggcggccctgtcggacatgttcttcgcctttggcgagcgcgaagaagatgttgatggcgatgggctggatctgaatgccggcgcgggccggaacgggcgcgaccagggcagtggtgacgctgcctccggacgggtgaagcgccgcggcggtgatccgcgtgttgccatggccggcgacccgccggtgccgaccgcggcgccggcaggggtcggtgcgggcgaccgctttgccgccccagcgcccaccgcagccgaacgcctgcaggccgcaccacgttccgccgaacgcccggccatcgaggaggacattccttccggcccggcggcacaacgctcggcgttgcatgacaatctggcgctggcacagaagaagcggttccagatgattgaagcgatgtccaccttcgacgcccagccctacgcacagggcatcagcacggccgcacgcgatccggctgcgctggaactgttgaccgccattcccgactacaggatctcgcaagcatga

SEQ ID NO: 515952 - DNA, 459 bp, Stenotrophomonas maltophilia
atgctggttcccacttccgcgcaggatctgcgcgagctgctgttgtccccgtgttccgaggagcatgccatcgccccgcctgccgtgctgacgatgctggccgatctggccgggcatatcgaaccggtgttcgcgcccgccgcctggctggtgaccgaggacggcatgccggtcggcctgttctcgattacccgcgcacccgagcagggcgtgctcgatatcggctatggcatcgcgccggcacaccagggccgtggtcttgccggccgggccctggccgagctggtggactgggcccggcacgatgcgcgcgtacgttgcctgagcgctgaaacggcggtgggcaacgtcgcttcgcaggcggtgctgcgtcgcaatggctttaccgtggtcggtcaacgcagcgacgccgaagacggtgcactgctgtgctggcgaaggcacgtgacggccgactga

SEQ ID NO: 515953 - DNA, 309 bp, Stenotrophomonas maltophilia
atggtcgtgatgatctatggcttcagcggccgctacaccggcaacggcgcgttcgagtgggacgcgcccagcatcggtgcacgccacagggccatgctgttcctgctgcaggaggacgaacgcgatgcattcgacctcgcgctggccgaatgcacccgcttcgggttcgatgaaatacaggatctgcgttgtggccgcatgcaggttgatgcactcaacagcgacgcctaccgtggctttgccgtcttctacgaagaagccctggaagcgggctcggctctgctctactacccgcagacgcttgcatga

SEQ ID NO: 515954 - DNA, 291 bp, Stenotrophomonas maltophilia
atgagcgccgcaacggcccggcattcccgatctgcactgttgttcctgctcggcgccatcgtcgccgcgctggcatccatgccgctgctgcgcgcgctgggcctggtgcagtggccggtgctggtcatcgcctggctgatcaacctgggcgcagcctggcatctggggcaatgggcgcgccagcaggggcgtccgggctgggcgttcggggtagcggcggcgctcggaacggtcgcttccatcgtggtgtacgtgctgttggcgttgctggggccgaaggccgcgcgctga

SEQ ID NO: 515955 - DNA, 465 bp, Stenotrophomonas maltophilia
atggagttcaacgtacttaccggcgatgcgccggaacggcagcagctggcgcagtggtaccacgcgcaatggggccaggaggccggcctgacactggaacaggaactgcagcggctcaaccgggcgcaggatgcggacggtttcccgcacctcatcgcggccttcgatggcgggcaggtagtcggcgccgtgcagttgaagcggcgtgagatgacggcctttccgcagtacgagcattggctgggaagcgtgttcgttgccgacagccatcgtggtcgcggcctggccggccagctggtcgagcgggccgccgagcaggccgtgcggatgggcgttgccgacctgtacctgcagaccgaagcggcggacggcgggttgtacgcgcgcttgggctggacgccgctgcatcaggccgacaaccaggaccaccgcgtgctggtgatggtgcgcaggctcgccgcatga

SEQ ID NO: 515956 - DNA, 1512 bp, Stenotrophomonas maltophilia
atgacagcagcgcaggaaaggcccgcacgtgtcgtcgatctgcacacccatctgttcaacgcgcggcatctgccgctggaaagcatcatcgccggcgcgatgggcgcgtggtcgagccccttggcccgacccttggcgaagctgctgtatttcctgaccgacacaggcggcgagcaggcggagttctcccgtcttcaacagctgcatccgcagcgtcttcatggtcatggcgggcacgagcagatcgactacatcgcgtcgatcagcaacgtggccagccatgagcttctggcaggcactgcggcagcgccgctcgatgctgacggtctggcggcgctggcggtcgactcaccggaagcacaggccatacgaggctccgagctgatggcgattctccgcgagctggatcaggccattcctgcgaccggtgggcccgagccaggcgcctggccgcccgtcgattccctcgtgcaggaaatgatggcgccggccggtctggtcgattgggcacgccgcaccgtgaagcgcgcgctggaacgcttcatggcaatggtggtgcgtgatccgaccagtacgatcggcaactacgccgagttcttcttcaccctgctgggttcggaggaaacgattttccgtcgcctgcaggcggcgtacggcagttccctgccgcccatggagtacgcccatctgatgatggacatggagctggcgtacccgggcgggccattggccaactatcacttgccgcagcgcacccggaacatgctggaactgcaggccaggtttcctgcgctgcatggcttcttcgcatttgatccgcgtcgcgatgatgcgaaggcgggtggctggcgacagctgctcacatctgcgcttgaggcgggatttgtaggcttcaagttctatccggcgatgggatacagacccgccggtgatgcggtccatgcccgccggatcgacgagttctacgatttctgcctggagcacgatgcgccgatcttcgcgcattgcaccccggtggggttccagaccccgcgcaaggaaggtgcgttcgcgaacccggagtattgggccgaggttctgggcagtcgcaaggaactgcggttgtgcctgggtcatgcaggtgggcagcgtgcccccagcgagcagccggtttcggcgggctgggacgccgaagaggtcgagtggaagaagggcaactacgcctggcaggtggtcgacctgtgcgtccgataccccaatgtctactgcgagatcgggcatctggaaggtctgcttgatggagatatcgctgccttcgaacggaacctcagacgcgcccggcatacgcaggccgagtacggattcatgagcaagatcgcctatggttcagactggcacatgcaggcgatggtcaactcggcccgtccctacctggatcttttcctgcagctgtttgaaaaggaggagtggcgggactacagggaaggcttcttctggcgcaacgcctatgcctacctgcggctgccgcgataa

SEQ ID NO: 515957 - DNA, 147 bp, Stenotrophomonas maltophilia
atgtgggaactgctgggccagatcctttccgttgtcctcagcaatgcgggccaggcgcttggccggttcagtggacgtatcctgctgacgctgatgctggtcattgcgatcggctgcgcacttctggtttcctgtcgagcaggctga

SEQ ID NO: 515958 - DNA, 804 bp, Stenotrophomonas maltophilia
atgcgttccttatctacgcttctgcgtttgttggcgcttgcggcagcgctgtccgttgcccagcccgtctgcgccaaccccgtcgtgatcgtcggtccttcactggaggatgcgttcgaggattcggatgtggtgcttcgcctgaagcggttgctggggccagagtacctggcattccgtcgcaacttcgatgagtcggcggtgccggtgccgctgaaggatggggggctgctgctcgatgggtggaggctggggtttccatcacatcacgcagccgccgtggtggtctatcccgatggcgcgctgcacgcggcctactacaacgctgaagatcgagcggtgcggtacttttccacatcaggtggacggcagcaccgcgcactgttgatctgggcgaagcgatttgacctgccttcggatcattcgccctccccgcaccgttctgtggaaggaaatcccagagcatctgcgctggcagtgccgactgtggaggagcaggcggccatgcgatcggtggccaccgcgatctggtccgccgagctggcttcgggttggaacatgaacaccgaagtgggccgcgttctcggcgaggccaccaagcagatcatggactgctctgcagcattcggcctcgggccgaagccggtgggctgggtgcctggctgggcgtatgttgcaaacacgtcagtccagatcgtcgcttacgtcacaggtgcatcggggcatcgggtctatcgaacctgtgtcattgccaccgccagttgccagcgctcattcatcgagtttgcctcgggcgagttctga

SEQ ID NO: 515959 - DNA, 534 bp, Stenotrophomonas maltophilia
atgtgcaccttcatcaccctgttcctgccgacgtcgtttccacttgatgaggccgccgcgatcatgcagcgcagcggccgacgtctgttcgcccaggcatcgcccagcctgcaggcggcggccggacccggatggcagccgtggctgagtgccacgcactgcgattgcgggacggcgctggcatcggcaggtgcgccgccggaatggaagagcgatgccgaacgctggcggaagaagggctggagcgaggcgaagatcgcccgcgcgcaggcagagcagacggcgcggcatgaacaggatcagcagatggttcgcgagcaggcgctggatgatgccggccaatggctgcagcgcattgatgcgttgctgggcgcgggtgcggcgcgcatcggactgctggtgcgggactacgacggttcggtgggtgcccggcaggccaagccgccggagcgtcgctggtcgcgcgcgcgcctggcggcggccgatctgctggcgttcgagccggccacgttgcagtggatcgagcgcgggtaa

SEQ ID NO: 515960 - DNA, 543 bp, Stenotrophomonas maltophilia
atgtaccgtcaactgctgctggtcgtacccctgttgctgctgggctgttcccggcccgccaccacacaggatcccgcgggcaaacctgccaccgccaccgacgcgggcagcgccatcgcgcccgcagaagccgatccgcctgcgctgcagacgccggccgtcgcgccgttgttcgccgccgtcgatgcggatgccgaggcaccggccgcgctgctggaccgctacgtgatggcgctgctcaaccgcgaccgtgccaccgccgacgccgacgccgcgtggacgttccctcccagcgacgacgcccgtgccgacgatgccgcgctgcgccagctggagggcgtgcgcagcatgcgcctgagcaccgaactgccgatcgcccgcgacggccagcagccatcgcggctgctggaagttccagtgcaggtgcgcgcactcaccgccaacggcaccttccgcttcggcggctggtaccgcgtgcagcccagcgccgatgggcgcgcctggcagatccagtcggcgcaactgcggccatcgctggactga

SEQ ID NO: 515961 - DNA, 450 bp, Stenotrophomonas maltophilia
atgcgcacgccatccccctcatgcagaagatcctcgccctcaagccttgagtggcgcccttcgcggctgcaggctgtggcccagctgtcggtgttgctggccacaccttggctgctgcatgcgtcggatctaccgccgcggctgctgacgcccgccgtgctgctggcctgggcaatcggcctggccgaactggcctggcgcctgcgccgaccgcgtgcacgggttcttctgccggcgctgcccgatccgctgcaggtggcggggcaggacatcgatgccccccgcctggtggtgcgcggcccctggttgctgttgctgtggcgtgaggaccggcggcggcgtcgcctgttgttctggcctgatgtgctcgattccgggcagcgacgtgaactgcgactggccgtggccgcacgcagcgtttcccgtcggccccggtcaatggcaccataa

SEQ ID NO: 515962 - DNA, 486 bp, Stenotrophomonas maltophilia
atgacccgtgcctggatcgggctgggcgccaatcttggcgacgccgcccacaccgtccgcgcggccatcgccgcgctggacgagctgcctgaaacgcggctgctgcaggcgtcacgcctgtatgccaccccggcctggggcaatgaggaccagccgccgttcgtcaacgccgtggcggcggtgctcaccgatctgcctgcactcgagttgttgcaggccatgctcgggctggagcggcagttcggtcgcgtccgcgatccggcggtgcattgggggccgcgagcgctggacctggacctgctgctgtacggcgagcaggtattggacctgcccgatctgaaggtgccgcatccgtacctgcacgagcgtgctttcgtgctggtgccgttggccgaaatcgggccggaactgaaaattcctggccatggccgcgtgcaggatgcagtgatgcgggtcgatgcctgcgggatcgcgccgatagggtga

SEQ ID NO: 515963 - DNA, 489 bp, Stenotrophomonas maltophilia
atgtcccgccttgcctccgctctcgtgctgctcatcgtcgccccgctggcaaccgcagccagcaatccccatgacgtcgccacccgcttctacgcggccctgcagaacagcgggccggatcaagcgctgatcgcgccgctgctgggcgatgccctgcgcgctgccatcgatgcgcagcgcggctatgaacaggcctgcaccgcactggctgcgcccgacgaaaagccgcacatgctggaccagagcccctatctcatggcaccggatcggccggaaacggtaaaggtggggctgcccgcgacgagcggcgatgccgcctggatgcctgtcgagatggcgataggcgactatcgctggaccgaccgggtcctgctgcagaggcagggccaggactggaaggtcatggatatccgctggggccagggcggcagcctgatcgggcggctgaaggacttctcggcttttcgttgtaccaccacgcacgggtag

SEQ ID NO: 515964 - DNA, 780 bp, Stenotrophomonas maltophilia
atgatccttccgtccgcgaatacttcttggaccgggcgcgacaagtgctgcaagcctgagccgcgcaagcagggacggattacggagagggccgagccttgctcggccctgcagttcggtcaaattgacgatttcgtcaaactgccgatgcaggccttaacaatcgagttccggcacagagtcgactatgactcgactctgcccgaacgattcaggcaggtggctgccgcgttcgcaggatctgcgaccgccggccgtatccttccggccatgcttccatcgcacggctaccaaggctttcgcgcagcgccgccaccctctggctgggtccagatgggagacggctgggtgctgtggtggagtggtcgacagattgcactggttacgccggccaaggaccgtggcgtgcgtgtgcacctcgacgcccagaagatgtggcagaccagggatgagcgcgccgccagcatcctccagggcaagcgctacgccgaacgctggtgcgcggccaggctgtatccagaactgcgcctgcgcgcgggcgttgcccggctgctggatgccactccgagcgatccactcgacccgctgcccggtctgccgcctacgcctgagcagcagcaacaggcccggcgcctggccgacgcaacggtcgccgccaccgcacgggtcaaggaagcactggaacctccgaagccgctgtcggcgaccaagcccaggccaagggacgcgcgcaaggcgtgggtgagggcagggctgcagcagatgcggcggggcgtctga

SEQ ID NO: 515965 - DNA, 273 bp, Stenotrophomonas maltophilia
atgaccaccgagatcacggaaatccttgagcgtcttcatgcctgcgaggtcaggatcgaggcgcagcgcggctaccttaaggcgatggagtacgccctacgcgtgtcgttcatgacccatcaggatcccgctgagctgcttgacacctggactcggctgctgccgccaatcgctcgcagccatgaggatgatggaagccccgtgttcgcagctgcgttcgagcaatccctgatagttctgaccgagcaaatcggagcgcagcgaggcccctaa

SEQ ID NO: 515966 - DNA, 306 bp, Stenotrophomonas maltophilia
atggagagtgtggggcagtgcatccttcgccttgtgctggtcgcgatcctgcttggcgtggcatcgtggattacctggggtatggggcgtggtttgccatggccgttcgcgttcccagcggtgtggtgggctctatggcctgccgtccaagagaaggcgtccctgacccctgagagcttcgttgttcgaggtatgaccgagcagttcctgtactggggatccccatactttctttggaccaccctggcggttgggttggtgcttgctgctgcggcttggtggttgtggatatgggataggaactaa

SEQ ID NO: 515967 - DNA, 1818 bp, Stenotrophomonas maltophilia
atgaccgcgcgcatctttgaccgcccggacctggaccagcagctcgggcagaaggcgctgtacgtcgccggcctgttccctggcgccgagccttcggccgcctacgagggccgcctgcagatcaagaacgggatcggcgcctgccaggtgcggcaggtcgacggggaccgcctgcccgaggggcaccgcctgtacgtggaccaggcaacccaggaggtcgtcttggcctggccggcctacgtgtccggcctcgcgccgatcgtcaatcccgggttcgaagccggcgactctggctggatcggcgggccgggctggaagatcgccaccgagaacccgcctaccggcctttgggcggccggctacctcaacacgcaaggcgagtcgcgcatttccagcacctcgcgctactcggtgtttgccgggcaggtgacccacgcgaagtgccaggttcgccagggcgcatcctcggaaggcaacgccggcgcctcggtgatgctggaataccgcaaccttgccggtgaggtgatcgactcggccgagggcaatcgggtcatgtcggccagcaagaaccgggtctacgactccaacgtgaccggcgtagcgccggcaggcgcggcgacgatcaacgtggcgggtaacggcatccgctaccgcgagaacaagattctcttcgtcgacaccttcgagtgggaccacacggtcccgtcggccggcatcaactacgagaagctgttgagcctgtccctgctggtcagcgactcgcgcggtcgcagctacctgtggaagggcacggtgagtgtcgtcctgtggaatggcgcctggcaggcgcgcacgcgcggcagcatggagtggcgcggtgtgccctatgccatcaagtacaacggggcagggcggctgctgatgggcggccacgatgggaacatctggtggtcggacgataggggcgtgacctggacgcgaatcatccagccccccgacccgggaacgccgttctacacgcggtcctttgcctacaacgaccgcgaccaggtgctggtggcctgcggccactatgtgtcgcgcagcctggatggcggcctcacctgggcgcgcagctacacgccgtacgactcggcttggcagttccttaaatggatccccgagtggaacatcttcatcgcagtgggcgctggcgcctacacccgccgaatcctcacgctcaatgctggcggcgccgctccggtcaacaagagcaacacggggaattactatcacgttggctacaacgcggtgcacgatcgcgcgatttgcctgcctcatggcactggcaactacgcggtgtgcacggctgatcccaccgccacggcctggagctatcccacaacccctgccgggacgaacatcaacggccgatatggcttggccagcctgcccaatggcgatgtttgggtttccggcgtggactcaacgaccagcatcaacggctacatggtgtcgcacgatggcggcctgacgttcgggcgacctgttgttccgtccgatctcccgggcgtccccgctgggtacaacgttgccgggttcgtcgcgtacgacgagacgctgcgcctgctggtgatccagccctacatgtcaggccccggcgtgggcagctcccggcagttcatcagccgcgacaacggcgccacgttccaagccacggacgtcccagcgccgctggctggcacgatcatggcaaccccggagggcatcgtgtggtcaccgtcggcgggctgcttcatcggttccgatatcgatagcaatccgatcatctacttcagccgctctgggttgttcaagtag

SEQ ID NO: 515968 - DNA, 1545 bp, Stenotrophomonas maltophilia
atgaccatttccgccaatgaccgccgcaagacctacgtggggaacggcgtcgccaccgcgttcaacgggccgagggcgttcctgtcgagccacatccaggtgttcaccggcacgcacccggtctatcacctggtgccgccggcgcagtacacggtggccgggctgcggcagccggccagcgtggtgaccttcagcgtcgcgccagcactgaatgccgacatcctgatcctgcgcacggtcccgatggaccagccgacggacatcaccaaccagggcgcgttcctgccggagatccacgaagacgctttcgactaccgggtgatgcagctgcagcagctgttggacaacggcatgcagctggtccaggacccagttacaggcgagttcgtctgggacgccaagggcagccgcatcaccaacgtgggcgacgccacggccctggccgacgccctgaacctgcgcagcgcgctggtgctgattgagcagatccagggcggtggcggcacgatcggaatcacgccgcggctgtggacgttcgagggcgacggggaggtgaccgacttccctctggccggcgcggacgtgctgagcccgctgttctacgacaccgcagtcgagatcactgccggtgctgggaactacaaggtgtcccgaccgatcgatgcggctggggtaggggagttcctgatcgtgccaggcgtagatggcgcgccgccggcgattcggttcaaggtgccgctggctgacggcgttcagggcttcacgacgttgcgcggctacgccaggccgtggatcggtgagccgccggtctacacggtcgcgccgcggatcgtcagcgttaccggcaataccacgctggccggggacatgcacaacaccctgatcctggccaactcggccgccccgattaccctgaccatgcgggcgaacaccggcggcagcgccgactggaaggaagggcagttcttctcggtgctgcaggtgggcgccggccaggtgacgctcgccgtcgagggcggcggaccgctcactgtgccgccgagcttccaggccaagacccgcgcacagggctgcatcatcagcggcacctgcattgcgcccgatgccgacgcgtgggtggctgccggcgacctgctgcgcgtggccgcttccgtggacctgcagtgcttcgccctgaccgaccgatcggtgctgatcggctccaacatcggcaccggcgtgggcaaggacagtctgatcctgccctacgggctgatgctggacaccgttgccaacggcggcatctacgccaccctgtccaccgcccaggccaccggcgtggtgttcaccgtggacgtcaaccggaacgggaccagcatcctgtcgacgaagctgaccttcgacaacaacgagcgcagcacgcagaccgcggcgatccccgccgtgtacgaggccggcggcaacatcctggccaagggcgatgaaatcacgatcgacgtcgaccagctcggcaccgcaaacgccaaggggctgcgggtgtacctggtcggccagagggccagctga

SEQ ID NO: 515969 - DNA, 459 bp, Stenotrophomonas maltophilia
atggcacggccgagcaagaagaccgccaagctggtgcaggccatcgtcgaacgcctgtccgaaggtgagccgctggcccagatttgccgggacgagggaatgcccgccgcccgcactgtccgggaatggcagcagacggaccaggcggtttccgccgccatcgcacgcgcgcgcgaggaaggattcgacgccatcgcggccgagtgcctggacatcgccgatgacagccgcaacgactggatgaatcgggctgccgatgctggcgacgagcaggcgctgcagttcaacggcgaacacgtgcagcggtccaagctgcgggtggaaacccgcctgaagctgctggccaagtgggatccgaagcgttacggcgaccgtctggccgttgaccacggcgtgcaggacaacctggccgaccaactgagggccgcccgtgagcgcgcagctggccgcgagtcctga

SEQ ID NO: 515970 - DNA, 252 bp, Stenotrophomonas maltophilia
atggcagttaacgatttggttgctaccggcaagcggttcgagtgcgttgcggaggacggttcacgccacttcgtgttcgagaaacagaaagttttcgatgaacgaaccgcaggcgtccccagcctcaggggggccagcgtgttcttccttgaatcagatggcagcgcagtcactacattgactctaaacgacgccgggttgcgccgcttcaaggcgcctgaccctattggcatactgactcaagttccttaa

SEQ ID NO: 515971 - DNA, 426 bp, Stenotrophomonas maltophilia
atgcagactgactattttggagtctatgtgcgcggcgagctggagcactgggggcgcgagtttgctctgcaccgggactgcgagtatctcggccaccagtccaagaacttgctggcggtgttgatggagcaccacgaaatgcccggccgggtccaaggctacaagccgatggagaccgatccgcgcgcgcaagcaatcgaggacatcgtgaccgatattgccaggaccgacatcagtctggcttgcgtgcttcgcgggtactactgcggctctgggcgacggaaggaggaacgatgggagcaggctcggcagctgctccagttgatggggcagcggccggtttcggtgcgccagtacttggtgatgactgagctaggttttcagcgggtcagagggcgcctcgaggcaggcagccgggcggcctag

SEQ ID NO: 515972 - DNA, 222 bp, Stenotrophomonas maltophilia
atgcacaccgtccaaaccctcgaactgcgtctgcggacagcggaggcgacgatcgaagcgctgcaggaaatgctggtgatcgtgagcaagggcctcatccccggatcccccgcagccgcgacagtccaggagcaactgcggaaggcagctgcatacacggggccgtccgtagcgaagaaggaactggcctccctcgcccgaaccgtggccaacctgcagtag

SEQ ID NO: 515973 - DNA, 249 bp, Stenotrophomonas maltophilia
gtgagccggctccctacccatgccgagcgcatcgcgcacaacgactacctggcgtcgacgtctggcatcaccaccagcacggaccacttcctggcaggtatcgactacgcgagatcggagttcgccggggtcctggcggcagccaaggcagtcctgatcgccagcgatttcggcgatgtgctgcgcgccgagaagcgcctgcgcgccgctctggccgcgtgccaatcggagggcgcatgcgcttcctga

SEQ ID NO: 515974 - DNA, 942 bp, Stenotrophomonas maltophilia
atgaagacctgcacgaagtgcgcggcccggctgccgctgcggttattccccctgatcaaggccgcgtaccagctcttccaccaggccggacgctcctcgtgcgatctgctgaggcgccgtgggcggacacgtcattttattcccggcaccacctggggaaaccacttagcggcgacggatgggaaacgcgtgagctcgctactcatcctgtatcaacttttcccatttcgaatagtcgtgcacgggctgccttccgtgcatccgaaactcattcgcaaaatcgatagcgagggcgaggaagttggccagatactctcggaaatccgcgatatttctttcgtttccggtgtagataaggttctcacgcttattagtcgcagctggggaacctatcttgacgaactgcaaaaagtccttgctcatctggctcagcgtcctgctatatccaacgagcacagccagtctgtctccgatgtcatcctggagggtatgaattctatccaggacttgttcggtaccgggcataagggagccactagcaccgcgcaatgctcgcgcgaattcagcgatgtctggccttttgatttccccctcagaatcaaccggcactttcctatcgcagcgcctgatgaggattccgatctggaccggaagctccgaaacttcgtgcatcaggagcgcaacgacaattcgttcggtagccttgcgattagcgacggattcctcgtgctgttgcagagcaattcccttcgcctcctcggcaatgtctgttgctcgtttcgatgtcttatacgcaaagccggctacgaccgtggtcgcgactgcggcaactgctccgacgccgaccgaaaaccagtcggccaaatttccaacttcttccgcaagcgggcagaactcaattgccataaatcctccctgaatttggagtgcattctgccatga

SEQ ID NO: 515975 - DNA, 477 bp, Stenotrophomonas maltophilia
atgaataccaagaagaccctggcggacgtgcagcccggtgggagggtgaggcttggggatcgtctgccgccgatccgcgaggacgaacccctgcgcggcgatgagcccgttggcgagcagcacgatgcgcgcatgtacaaccgtggttggaattcttgccgcgaggctgctgcaacactcaccgcccgccagccggtgggggagccggtgggtcacatctaccaaggcagctcccgcatcccgcaggcattcctgtccaaggagcttccggtcggaacgctgctctacgtcgccccgccggcgcaggccgtggacctggagcagttccgcgaggctgtcgcggaatggcgatccaactgggcgagctacggccgcacgatgacttcagcaggccgggacacgtcgaaggcacgtcgaaacgtcgatgaagccgaccgcctgctggccctgatcgacagccaggcggtgggcaaatga

SEQ ID NO: 515976 - DNA, 840 bp, Stenotrophomonas maltophilia
atggctgaccagctgctcaccgcccaacggcgccaagccaactctctcgccagatatatcactgactggacggaacgctgcccaatctacgtccattcatcaatcgatgtttgcggcttgcaatgtggagggatccttgctgaggcccagtcgatttacggctgcgacgccttcagcttccacgacgcgcagatcctcaatgatccaagggatagttgctcgcagggctctaaaacctgctctcaactcatcctgggtttcggttccatctcggtacttgtctccgctttgcaagagctcaaacatgccaattgcgcgcacaaagcaggcagctgtccttctgtcgaggtagtggagtcgatcccgcacgcgctccagggacgggaaagcaagtttgttcaatcgcccaaagactcggttctggaaagccttgtccataacgaagacggcttcgctgttctcttgactgagcaagccatggacgtggccgaggaggccggcgttactcgacacctcggcaatgatctgaacgagcacgagcagtcgctcggattcttcacggtatgcctgcttgtttgcctggaatccagcaatttcaactgcggcagcactagcgcggttagcggccctgcccagcctgtacgtgacgaaacccagaaccgccgtggtcacaacggaagcgactcctgctgcaaccgcccatgcctcccattccggaacgcacgtctttcccagccaccaacactggctcagcgcgttaaccatgctcattccaagttccccctgtggactcgccggcattctgccacgccatggcgcgcggagagctgccatggctga

SEQ ID NO: 515977 - DNA, 258 bp, Stenotrophomonas maltophilia
atggctgaccctatcgaccaccgcgagatcggacgtcaactggccagcttggaaggcgtgaacctcacttcggcaagcctcagaacgtgccgcctatgggaggcacgcggcttggcgctcatggcgctggccaggggcggcaaagcggaagcggaaaaggtgatgcgccagttcaagcctctgatatcgccctgtggaggctgcggcgagacggatcccgacaagcgctgcattggctgcctccatgactttgggtga

SEQ ID NO: 515978 - DNA, 249 bp, Stenotrophomonas maltophilia
atggccaagaagaacaaggccgcctcaggcgcgggggcactgtgcctgtcccgggactcgatgcgggaactgtgcggcacgccgtatcgggaccgacagcaggaattcctggtgctgaacgggatcccgcactacaagggcttggacgggtggccgcgtgtgctgtgggccacgctcaaagggggcgacgacgcggaaaccgagaaggccacggccgtcgccggctggcaatcgaacaaggtggcatga

SEQ ID NO: 515979 - DNA, 210 bp, Stenotrophomonas maltophilia
atgactggattctggagcaagcggcaggtgcgcgaccggctgggcttccatacggacgccgaactggcgcacttctttggcataagccgatccgcagtgtcgcaatggcccaaggatggcccgattcctgcgttgcggcagtacatccttcatcagcaatacccgaacctgttcccggtcgtcgaggccgccgaacccgaattcgagtga

SEQ ID NO: 515980 - DNA, 501 bp, Stenotrophomonas maltophilia
atgtcgaaccgcatcgccctgatcctgctgccgctgctgctgttggccgcgtccgcccacacgcaggcggcctcgccgccgaagatcgcgcagctggcctggctgaccggatgctggcagcttgatggtcaccccgaaggcgccggcgagcagtggtccacgctggccggcggcaccctgttcggcagcagccgcagcgtgcgcgacgggcgcaccgtcggcttcgagttcatgcagctgcgccagcacgatgatggtcgtctggtgctgactgccctgccctccggccagaaccccaccgatttcaacgccacccacgtcgatgacaccgaggccgtgttcgagaatccggccaacgacttcccgcagcgcatccgctaccgccgcctggacgaacagcgcgcgcacgcgcgcatcgaggtcgcgcaggacaacccggcacaggcggtggatttcccgatgcaccgcgttgcctgtggtggaccggtgccggcgcgctga

SEQ ID NO: 515981 - DNA, 1077 bp, Stenotrophomonas maltophilia
atgcgtcgctcgtttggacatgccctagccctcgccttgctgttgcctgcgacatcgttgctggcggcaccgcccacggcaccacgcacactcagtggtgaactgcagggggcgccgtggcggctggatgtgcctgcaacctggaatggcgagctggtgatgctggctcacggctatgaacccgtgggcgtgccacgcaccacaccgatgaccgccaatgacagcaccacagcgctgctgggcgcaggttacgccgtcgcgcagagtgcgtattccaaccagggctgggcagtggccgaagcgatcaatgacaccgaacgcctgcgcgaacacgccgcgcgggaactcaagcacgtgcgccatacctggatgctgggattctcgatgggcggtgcggtgaccatcggcagcctcgagcgcttcccgcagcactacgccggcggcgtttcgctgtgcggcgccaacctcagcggcgagcagatcgcggcggacctgctggcgacactggtcgcattcgattattttttccccgccgccgaaggcctgccgcgcagcggcctggtttcgcgggaagcggcagcgctgccgcagggcgcgctgtaccaaggcatcgcccttgccctgcaacgcgatcccgcgcgcgcggcagtgctggcgcagcggttgcaggtctccgccgatgcactggccggcaccatcagcctgcatgcgctggtcctgcacgagctggccacgcgcagcggcggcctgccggtcggcaaccgcaacgtggactacagcggtttcggtgacgacgcagcattcaatgccggcgtgcagcgcctcgatgcggtgcctgccgcgcaggccaaggtgcgcagcacgctggcgctgaccggcgccctgaagcggccgctggtgatccagttcaaccacaacgatcccaccatcgtgccgcacatgcagacgctgtatccgcaactggccaagagtgccggcgctgcgccgttgccgcaggtgctgcctgcggtgggtgaaggtcactgtggcttctccgatgcccaggtcgtcgaggcgctgaaagcggtgcagcgctga

SEQ ID NO: 515982 - DNA, 456 bp, Stenotrophomonas maltophilia
atgcatcgctacctcctgctcatcacggccgcctccatcgttgccgttctcggcatgcaaccggttcgcgcagaggacggtacgcccgcaggcgcatcatcggcgtggactctggtgcggaaggaggccaccgacgagagtgccggcagatgcgcgatctttccgcgtgccccgtcacgcccctatccattcttcatcttcgagccggggctggcgcccaccatcggcgtgtcattcagtgaggtcggcaacaccgggatcggtgtaagggtggatgctcatccggaagcaaatgatcgaagaatcatcctggatcgcgacaccgccgtgatcctcgaacagatccgtgccggtggccagcacattaccgcgcgcgacagcgttgcacgcaacacattcagtacgcacggcctgctgccattgctggacgcttgcgcgatgcaggcgcagccgtag

SEQ ID NO: 515983 - DNA, 1107 bp, Stenotrophomonas maltophilia; identical to SEQ ID NO: 348283

SEQ ID NO: 515984 - DNA, 747 bp, Stenotrophomonas maltophilia; identical to SEQ ID NO: 348284

SEQ ID NO: 515985 - DNA, 1623 bp, Stenotrophomonas maltophilia; identical to SEQ ID NO: 348286

SEQ ID NO: 515986 - DNA, 1263 bp, Stenotrophomonas maltophilia
atggccatggacgacaccgcaccacgccgtggccccgtcgcactcgcggacctgttcgacgcggcgctgaaagaccttgcgcccaggcccagcccgcccacgcccacccccacgcgcatgcctatacctgcgccgtcacctgcaacgccagcagcgtccggcgatgcgttcctcttcagtggcaaccggcatgagaccgtgccgcggcgactgttcctcgatcgccggctgacgccgctggagcgcaacgcctggcaggtgttccggctaatgctcaacgacgacggcgtgacggcattcccgacctatgagcagttacggccctggctagcctcgatgccctgcgccggccaagcctcgcatgaaaccgtggcccgggcgctgacgctactgcgcctgacccgctggctgagcctggtacggcgccgccgcgacgccaagaccggccgcatcctcggcaacctctatgtcttgcacgacgagccgctgacgccctttgaagcgatgcagctcgacccggactacctgcagctcgtcagccaggcgctgggccattccgccaaggccgtgcaggtcgtgggcttgcacaccctccgggaaattggtgaagaccccttgctggccgggcgcaccctgccgtccaggctgcaagtcctggccgaacgccttgccagccggggcatcggggcgcccgaaagttattcacaggagggtgccactcacgattccgaagatggtgattcaagctttcttcggaatcgtgatgaccccacttcggattccgaagcagggtcgaaacccgcgccagacggctctcttcggaatccgaaacaggcccgtacagtacgtagtagtcgtatgaatgaagtacgtactaccgcgcaggcgcgcgcgctgggcgatctgcaatggcccaagcggttcacggatctgaagtcagagcaacagacaggtgccaaggtggcgttgcagcaggtcgatgcttcgctgaggcaggccgtgttggacgaatgggccgcacggtgcgccaaccacggcattcgcaatccagcgggatacctgttcggcatcatccagcgggccattcgtggcgaattcaatgcatgggccaagtccgaccctgcgtcggcgctgaagcccgcaaccagtgcggggccatcaaggccgccggccccacccacgccaccaccgggtaaaccagtgccgcccgaggttgcccgccagcacattgccagactgcgcgagttgtttcgcaagccatag

SEQ ID NO: 515987 - DNA, 978 bp, Stenotrophomonas maltophilia; identical to SEQ ID NO: 348288

SEQ ID NO: 515988 - DNA, 528 bp, Stenotrophomonas maltophilia; identical to SEQ ID NO: 348289

SEQ ID NO: 515989 - DNA, 780 bp, Stenotrophomonas maltophilia; identical to SEQ ID NO: 348290

SEQ ID NO: 515990 - DNA, 246 bp, Stenotrophomonas maltophilia; identical to SEQ ID NO: 348291

SEQ ID NO: 515991 - DNA, 738 bp, Stenotrophomonas maltophilia
atgtcccagaaacccaatccctttctccgtggctactggaatctgaaaatcgtccgcacgctgtgcatcagctacgacgatggaagcccgcatgtctggcgaaccatccacgcgagccaagatcacctctccgacgagaagctggtctcttcgtcctgcatcgtcaccaacgatttcgcggtggtcagcaatggccccgaacccgtgggtgccgaggttctggccgaatgcggcgccggcggagacgtcagcggcgaaggcgtgatcggtgccgtggtctatgccatccatggcgatgactttgacggtcgcccggtccacattggtgacacctattcggccgaggccgcgcgggaattcgtgcagcgcctgaatttcgagacaggctattacagccggtgctgggaaatcagccgtgagcacatcacggtcgatacctggcactacctcgccgacctggcggacctcgccacgccggaggccatgctgttcatcgccttccgggtgccatacagcccggcgatcggcgtcaagctgatttccacgccctggacggaccagaacctggagtacgccgagggcatcaccgccgagcagcttcggcaggagcaccgaaacaagggcatgccggacgacctggcgaacatccttgaactggccggccaggccgacgtgcgcatcctgatcctcgacgccgacgcacctgcgctgctgggcctgccgttggcagagtcctag

SEQ ID NO: 515992 - DNA, 279 bp, Stenotrophomonas maltophilia; identical to SEQ ID NO: 348292

SEQ ID NO: 515993 - DNA, 693 bp, Stenotrophomonas maltophilia; identical to SEQ ID NO: 348293

SEQ ID NO: 515994 - DNA, 342 bp, Stenotrophomonas maltophilia
atgtccaccatcgcttgcgatgtacctcattgcacgctggacgaacccgcctggcgcgctgtctgcaagacagccgccgagcacgcccagcgtggttgcggcctgtcctgggatcactgggtcacgcttttcagctcggagatcgacacgcaagccggtcgattgccgcaggaccagcgcactcaagcgctggagatcgcagcccgggaatgggactacgcaacgcctgccgagcggcaggaaacccaagactggaatgcggagcatggctactgctcgcatgggatcgagttcggctactgcccggccggttgtgatcgcgacgatgacgactgggactga

SEQ ID NO: 515995 - DNA, 312 bp, Stenotrophomonas maltophilia
atggcagcccaagcacttcccatcggccagacatcgagccggcgcttcttcccaggcgagaccgtcgtgacctgcggcgttgacgccctggtccagcaaggccggctcaacccggtgccgtacctgcaccgccacctcaatggcgactggggcgacctcgacgactacgacaagcggcagaacgaagccgcgctggagtccggcgaggaccgcctgttctcttcctaccagatcgcacccggcctgcagctttggatcatcaccgaatcggatcgcagcgtgaccacgctgctgctgcctagcgagtactga

SEQ ID NO: 515996 - DNA, 618 bp, Stenotrophomonas maltophilia; identical to SEQ ID NO: 348294

SEQ ID NO: 515997 - DNA, 1284 bp, Stenotrophomonas maltophilia; identical to SEQ ID NO: 348295

SEQ ID NO: 515998 - DNA, 288 bp, Stenotrophomonas maltophilia; identical to SEQ ID NO: 348296

SEQ ID NO: 515999 - DNA, 324 bp, Stenotrophomonas maltophilia; identical to SEQ ID NO: 348297

SEQ ID NO: 516000 - DNA, 390 bp, Stenotrophomonas maltophilia; identical to SEQ ID NO: 348298

SEQ ID NO: 516001 - DNA, 396 bp, Stenotrophomonas maltophilia; identical to SEQ ID NO: 348299

SEQ ID NO: 516002 - DNA, 1383 bp, Stenotrophomonas maltophilia; identical to SEQ ID NO: 348300

SEQ ID NO: 516003 - DNA, 693 bp, Stenotrophomonas maltophilia; identical to SEQ ID NO: 348301

SEQ ID NO: 516004 - DNA, 930 bp, Stenotrophomonas maltophilia
atgcaaggactgacctttagaactgatcaagattttgaggaaatttgctgctacctcatgagggactgggtcgcgcggaatatgaggtatgacgtgcaattcagaagatacggcggaaatgggcaaaggcagcatggcattgacatttttcctgccgttggcggctactcagtgtttgggcaggcaaaatttgttaatcaactaaactctacagacgttacggctgagttgagtaagaccgattccttccctgagccgattggttgttatgtgattttcacaacggcaaatcgccataccagcataaatcatcatcagttccatggcactcaacacaaaaggctggatggatcgacttttccggttcacgtggtctattggggtgaaatttctgatattagttttatcccacaagatgtctgtaagagaattttcccatcagcatttcaagttgccaggagcgcattaacgcctcagcagatggcggattccatagccacacttcaaaatattgttccttcatatttcaggtctgactttctcgactggctcgaaacatgggacttttcatgtggttacattccatctgtgcattatgacgccgtggacaatctttacattgagttggatcgggtaggatggggaatgaagggtgtcaatgattttttatatgcccaaggtcgcattgacttatctcgtgcgcttccggctggcgatgccttcttttatgctctcactgagtttcgagattcaatatataactacatagcttttgtacgcggacaggatgggcagggctacgttacattgcaaggaatggatgggcgcggcgcaacagatttcccaaagattacagagcagtggagcatgagggcgcgccatttggccaatatgtatcgcgagaaaatccttggtcagcaaattcaataa

SEQ ID NO: 516005 - DNA, 1872 bp, Stenotrophomonas maltophilia; identical to SEQ ID NO: 348308

SEQ ID NO: 516006 - DNA, 873 bp, Stenotrophomonas maltophilia
atgcgatcgatatcatcagccacctccctgcacgtcgccatttccgaggggatcacagtcgctaacgacctgccgttcgtgctattcggcggcatcaacgtcatcgaggatctcgatacgaccctggctgcggctgagcacttcgcggaggtgacgcgcaagctgggaatacccttcgttttcaaggcgtcgttcgacaaggccaatcgctcgtcgatccattctttccgaggcgtcggcctggacgaagggctgcgggtcctcgatgcggtcaagtcgcggttcggatgcccagtcttgaccgacgtgcatgaggttgagcaggccgtgcaggtcgctgccgttgccgacgtactgcaagttccggctttcctggcccggcagaccgatctggtggtcgccattgcccgcaccggtcgggtagtgaatgtcaagaagccgcagttcctcagcccgggccaggtcagacatgtcgtccacaaactgcacgaggctggcaacccgcgcgtcctgctgtgcgagcgtggcacgcagttcggctacgacaatctcgtcgtggacatgttgggcttccgcgaaatgagcgttgccagcagtggcctgccactggtgttcgacgtaacccatagcctgcagcggcgagaagcggatgcgttggcttcgggtgggcgtcgccaacagttgcccgaactcgcgcgggccggcatggcggtcggcattggcggtttgttcctcgaagcacacgccgacccggcgcatgcacgttgtgacggacccagcgctctgccactggacacgctcgaaccgctgctgcggcaggtcaaggcggtggaccaactcgtcaagtcgttcgagcctcttcggatcgactga

SEQ ID NO: 516007 - DNA, 258 bp, Stenotrophomonas maltophilia
atgcctcaggccaacaccccacacatcctcatctacagcactccgacgtgccctgactgccgggcgctgaaggcgtggctgtcccagcagggcatcgcgtttgaagagcgcgacctgaccgacccgaagatttccgcggaggctaagtcacgaaccggcgtgcgcgtggccccgatcacgatcgtcggcgacgacgtgttctatggcaccttcgtgagccagaagccgaggctgatgaaggcactcggtcttcagtga

SEQ ID NO: 516008 - DNA, 699 bp, Stenotrophomonas maltophilia
atgaaggtcaacaagttcagcctcttgttcattgcgggcgccgtcgtggtcgccgccggcctggtggccgtccagaagaaggtggacccgtcgggtgaagcgacgcatgccagcgccagcgcaggtcaccaggggcacgcgatgccctccagcgcttcggccaatgacagcccctccacgaccgcgtatcgcgccgtgaacgaccagatgcacgccgggatgggggcgcagttttctggcaaccccgacgtcgatttcatgcgcggcatgatcccgcaccaccagggtgcgatcgacatggccaaggtggcgctgcagtacggcaaggacccggaggttcgcaagctcgcccaggacgtcatcaccgcgcaggaaggcgagatcgccatgatgaacaagtggctgggcgacaacggccagcaggcgacgaccggcagctcgggcgatgcctcgacggccgcctatcgtgccggcaacgaccgcatgcatgcggacatgatgatcgacttcagcggcgacgcagatgtggatttcatgcgcggcatgatcccacaccaccagggcgcgatcgacatggccaaggtggagcttcagtacggcaaagattcagaggtccgcaagctggcccaggaagtcataaccgcccaggaaggcgagatcgccatgatgaagagctggcttgccgctcggggcaagtga

SEQ ID NO: 516009 - DNA, 417 bp, Stenotrophomonas maltophilia
atgtcgcaacagcaacagccaaaagttcacgacgccagcgacttccctatagtccgactcgaaggctccagcatctacgaaggctacggcgccccctggtgcgcggagatggatgagttcctcgctcgcggcaagccctttatcctcatctacgtcgcaggcgggccggatgaggcacacgacgatcgcgtcatgcgcggtgcttggctgaaaagccacaaggagatgctggacggcatcttgctggcgctcatacatgtagaacccgaaccgaccaagcgagcgcagttggaggaaatgctgccgatgctcgtaaaggcctttggcacgccgcaagccgcgcgcgccagccgtgacgaggcagaggctctgggccggcacgttctcgccggtggtcgcatgaacgattcggtatga

SEQ ID NO: 516010 - DNA, 2208 bp, Stenotrophomonas maltophilia
atgaaaaaatcagaacataaatcgcgtgctacaagcacgaattacgtgggtcgcaaggtcatcggcccgttcagtctcgcgctggtgctggccgcgccaggggcagatgcacaagggctgggtgacccgggaaagggcgaggtgcctgaggctgtaacgctcccagcggtaacggtcaccggggaaacctcctcggagaccaccgaaggttcaaactcctacaccacaccacgcacctctgccgccacgcgactgccacttgccatccgggacacgccccaagctgtaactgtcataacccggcagcacatggaggatcagcagctcaacacaattcaggatgccttagcacagtcaacaggcgtcggctctcgcaccttgggcagcgagcaagtgactttccatgcaaggggcttttctattgatagcttccaatacgacggaatccccaccggcttcgttaatggcgcaagctttctagacacggccttctatgaccgcatcgaaatcgtgcgcggcgccacgggcttgctcacgggcgcaggcaacccgtctgcatcgatcaacctggtgagaaagaggccgacgcgcgagttccaagcaaatgcctcggtgagcgcaggatcatgggacaactatcgcagcatgctagatgtctccaccccgatgaccgaggatggccgtgttcgcgccagaatcgtgggcgtcactcaagatcggcattcatatcaagatcgataccagcagaagaagaacgccttctttggtttagtcgaggtcgatctcactcccgataccgtgctgagcatgggctatgactatcaggacatcaagcccaaaggcgtcacctggggcggcgtgccgctttggtttagcgatggatcaaacacaaattggtcgcgctcgaaatccatggcgcctgattggacccgctgggacaaccggttagaaaacgcgttcattggtatcgaacacggattcgaaaatggctggaaattgaacgcgaccattaccaatcagcgctcgaagtccaatgctcgactcctctcgccgctcggttacccagaccgaaacaccggcttggggatgatcccgctggcgatctctgattcaactccgtccaggcagaacagcttcgatgcaatggtcagtggtccattcgaattacttggccgcaagcatgagctggtcctaggggttctggcgtctcgtcgaacggaggatgaatacaacagtggatttgtttatccttcaatgcctatgccgagtattttcggctatgacggccagtatcctgaaccgaatttcgcagcgaacggtttcaccagcacgcataccactatcgaacaaagcggcatctatggcgccgtgcgcctttccctaacggattccatgaaagctattctaggcgggcgattcaacaactataaactcgacgaattcgacggtagcacacctacgcattacaaaaagactgccaagttcaccccatatgcaggtgtcgtgtacgacatcaacgacacttactcagcctatgcgagttacacggaaattttcaatccgcagtcgtcttaccggaatgtcaacaaccaggtgctcccgccaaccaatggaaaaaacaccgaagtcgggttgaagggtgaatatttagacgggcgcctgaatgcttcgatcgccttgtttgaaacgcggctcgataacttggcgcaggcggaaaactacgcgctaccaaatggtacgtgggcgtatcacacagtgaatgggacaaagtcgagaggtgtcgaattcgacctccagggggaactggccgatgactggaacatctatgggggcgttgcccacttcaattccaccgacgctacgggcgagcggctaagtgcgtaccttccgcgcacaactgcgcgtctattcaccacctatcggcttcccggcgattggtctaagttgaccgttggcgggggggtgacctggcaaagcggcacttaccagagcgcaacaaacccacaaggtgccagcgtcaatgtggaacagaaatcttacgcactagcctccctgatggccaagtatcgggcaacacgcaacatagacctgatgctgaccgtcaacaacctaaccgatcggcgctacacgcttatgagcgggttctacaaccaagtcgtctatggcgcaccccgcaacattgtgctgacgctgaactacaagctctga

SEQ ID NO: 516011 - DNA, 768 bp, Stenotrophomonas maltophilia
atgcgtatgcgctatcattgggtgaatccatgttggatgatcctatctttagagtattccccaatcgcgatgactgatggcaccacacttccgcacgcgccgaggcgctccctggtcgacacgacgattgagctgatccgccgtcagatcgagaatggcgtctggccagtgggtgagaagattccgaaagagcaggaactggctgacatgttgaatgtagctcgcaacaccgtgcgggaagctattcgcgtgctgtcgcatgggcaggtgcttgaagttcggcaaggagatggcacctatgtgcgcaccaatgtcgatcctgtcgaggtcatgcgtcgtattggccgttcgagcctgcgcgagcaccttgcgctacgcagcatgctcgaaaccgaagccgcgcgactggccgctatcaaccgctccaaggcggacttggcgatgttgcgccgtctcctgaaggcgcgcggggaacaaagcgatcatgaatcgtgcgccttgttcgtggacgccgacacggcctttcactgtgccattgcgcgggtatgcggcaataatgcgctgtctgagttgtaccgctacttttcgaactccgttcgaatgaacactctggccgtgctggaggatgaagacttgcctgagcctggcctggatgcccatgaggcgatcgtcgatgcgatcgaatgccaagacccagacggagccgcagaggctgtgcgtaatgtcgtagcgccgctggtcaccgcgctgaatcatcgttcggcgtaa

SEQ ID NO: 516012 - DNA, 456 bp, Stenotrophomonas maltophilia
atgtttcttatcctggccccgttcgcctatagcgccacctcgcaggaagcacaagagccagagaatgtgaaagtggttcgacaataccttgaagcttggaatagcgggaaaaccaatgatatgaaaaaagttctcgactccaacgtcgtctatttcaatactagtaatgaagcatcccgcaccgggccggaatccatcaccgaagtctcgcagtttctgaagcaaattttgcctgatcgaaaaatgaaactccgctcgcaaccgatttcatccgacgatggcgtagcgattgaatgggaattcaccgccaccaagagaaacagtggcgagacgtcaccctccagcacgaatatcagttatttcggtgcgagtttttttcgcgttttgaacggaaaaattgtctacgccagcgattactacaaccacaacaccatgcagaagcagcttcagccgtag

SEQ ID NO: 516013 - DNA, 504 bp, Stenotrophomonas maltophilia; identical to SEQ ID NO: 348309

SEQ ID NO: 516014 - DNA, 846 bp, Stenotrophomonas maltophilia
gtgggctactgcttcgcagccgccgtcaccgccgaggacgcgcttaaggccaaggccatttcctgggtcatggtgggcggtctcgcgggcgccatcatcgggccgcagttggtgatcttcacgcgcgatgcggtagcgggcacgccctacgttggcagcttcctcagccaggcgctgctgccgctgatcgccttgccgatcctgctgatgctgcgcacgccgagccagacccaggccgaagcagtcgccgatagcggtcggacggtgctgcagctcttggcgatgccgcgctatctgctggccgtggctgcgggcgtggtgtcctatggggtgatggcgttcgtgatgacggccgcgccggtggcgatggtcaaccacgggcattcggtggacaacgccgccctaggaatacagtggcacctgctggcgatgttcgggccgagctttttcacaggacgactgatggtgcgctacggcaaggagcgcgtgaccgccgtcggcatggtgctgctcgccgcctccggggtggtggccctgggcgggctcggcctgtcccacttctggggctcgctggcgctgctgggcatcggctggaatttgagtttcatcggcgccacggcgatggtcaccgactgccacaccccggccgagcggggcaaggcgcagggcatgaacgacttcttcgtcttcgccgccacggcggccgtgtcgttcctcgcggggtcgatcctgcacagctcgggctggcaagcggtcaactggatgatcttcccggctttggcgctgatcctggtgccgctgctgtggcaggcagcgcgaaagccgctgcgatcagatccaagatga

SEQ ID NO: 516015 - DNA, 1455 bp, Stenotrophomonas maltophilia
atgaacacgacaacagcggcttccgcacaacagccctccgtcatctatgatctagtcacgataggttccggttcggcggctagagccgcagcgaacgaagcacgtaggctcgacaaaacagtcgccatgatcgaacaggggttggcaggagggacctgtctcaatgtaggatgcgttccttcaaagacgttgcttgcggcggcttctgctcgcatgtctgctgcgcatgggaagttcccaggtatagcgacctcggccgggcctgtcgacttgtctttgcttgtcagagataaagatcaaatgatcgggcacttccggcagtctttccatgtacaagcacccaaggatgcaggtattgcggtatttcgcggcaaggcgacctttgtagcgtcagatgagccagatatcgtagcgctcgtcgtcgcggactcagacggaaacacaaacctggtgtacgccaagcaggtactgatcgccagtggggcagcgccattcattccttccattcctggcctcagtgaggtggactttctcacttccggctcggccatgtcccttgagcaggtgcctgagtccatgctggtcgtcggcggcaatgcgatcggtctggagcaaggtcaattgttcgctcgactgggcagcaaggttgaagtggtcgagatagctcctcgaattgcaccgttcgaggatcccgcgatttctgcggcactggagcaggcgctgtcagcggagggcatcatgttccatactggcgccaatctgacaaacgtcgtaccacacgagagcggggtgcttgcaactgtcgtcgccgaaggacgtactcagcaaattttcgcccataagattctcatagcgacggggcgccgtccggcaactgaaggactcaacttggatgctgtcaatgtgtccaggggcgatcgaggcgaaataattgtggacgaacatctgcgaacctcaaatcctcgcatctgggcagcgggcgatgtcactggtatggctcaattagtgtatgtcgctagtgcacaggggaccgtggccgcgagcaatgctctgggcaacgagcctcggtccctagactacaccgccttgccccgcgtcattttcacgtcgcccgagatggctgctgtcggcatgactcctatgcaggctgaggcggcccaaattgcctatgatgttcgtgaaattccggtttcctttgttctacgtgctattgtaagtcgtcacgacaaagggataatcaagatgatatccgagcgtgagacaggaaggattctgggtattcatatggtaggcgaatctgctggagaggttattgcagctgcaacctatattatctccgcaggacttacggttgaccaacttgcaaaacagtggtctccgtacttcactatggcggagtcgcttaaaaacgtagcaagcagtgcaccaactttggaagattcggctaatggctaa

SEQ ID NO: 516016 - DNA, 216 bp, Stenotrophomonas maltophilia
atgtatatcatgatccggattgctgaattcggcgctgacattaatgaaataacaacccaagaaaagtggcttggattgatcgagaccctgaaacagatcgtcaaaagcatcaagcatggcatacaaggcgtccctacctggcgtcgcttcgtgcaaacgcaaatcgagccaagagaaatactgctgatcacaatattcgacggtcgcagcaattag

SEQ ID NO: 516017 - DNA, 1182 bp, Stenotrophomonas maltophilia
atgaccgaccagagcatcacgcgccgaaacatcggcgttctcaccgccgcgcaggcgctcggcggcgccagcgcgcccatcgtgatgtcgctgggtgggctggtcggccagcagcttgccaagaattcggcctggatcaccttgcccgtgagtctgttcggcctgggtcttgccatcggcaccttgcctgccgccttcatcatgcggcgccatggccgccgcaacggatacgtggtgggggtcggcttcggcgtggcctcgggcctgatcgccgcgttgggcatcatgctggcctcgttctggatcttctgcgccggcaccttcctggcgggcttctacggcgcgtatgtgcagagctaccgcttcgcagccgccgacaccgccgaggacgcgcttaaggccaaggccatttcctgggtcatggtgggcggtctcgcgggcgccatcatcgggccgcagttggtgatcttcacgcgcgatgcggtagcgggcacgccctacgttggcagcttcctcagccaggcgctgctgccgctgatcgccttgccgatcctgctgatgctgcgcacgccgagccagacccaggccgaagcagtcgccgatagcggtcggacggtgctgcagctcttggcgatgccgcgctatctgctggccgtggctgcgggcgtggtgtcctatggggtgatggcgttcgtgatgacggccgcgccggtggcgatggtcaaccacgggcattcggtggacaacgccgccctaggaatacagtggcacctgctggcgatgttcgggccgagctttttcacaggacgactgatggtgcgctacggcaaggagcgcgtgaccgccgtcggcatggtgctgctcgccgcctccggggtggtggccctgggcgggctcggcctgtcccacttctggggctcgctggcgctgctgggcatcggctggaatttgagtttcatcggcgccacggcgatggtcaccgactgccacaccccggccgagcggggcaaggcgcagggcatgaacgacttcttcgtcttcgccgccacggcggccgtgtcgttcctcgcggggtcgatcctgcacagctcgggctggcaagcggtcaactggatgatcttcccggccttggcgctgatcttggtgccgctgctgtggcaggggcggtacggttgcaactga

SEQ ID NO: 516018 - DNA, 387 bp, Stenotrophomonas maltophilia
atgaggatcggtgaacttgcgcgcttgacgggcacccccccggagaacattcggttctacgagcgggagggcctgttgcaagccccggagcggtcacgcaacaactatcggcgctatggcccggcccatgtcgaacggcttcacctgattcgcaactaccgtgcctcgggaatcggcctggatgacgtgcgccgcctactgggttgggcacatgagggggtcctggaacctgagctgctaaggcaggctgtccaaggccatctcgcctgtgttgaggaacgcatggagcaactgatccaggtgaaagagcacctgctcgcattggccctgcacggtgctgcttccgccggggcttccgaggatggaccggctcgcgatggttcgtga

SEQ ID NO: 516019 - DNA, 1506 bp, Stenotrophomonas maltophilia
atgaaaacatctttcgcattcacacgacccgccaggacgctggcgccgctcgccctcgcggcggcgctggctggctgctccatggcaccgaagtatgaccggcccgcagcgccgatcgacacggcctatccctcgggcgcggcctatgtggaactggcggccgcgacgcccgacgacgcgatcacggccgagatcggttggcgggacttcttccgcgacccgctgctgcagcagttgatcggcatttcgctggagaacaaccgcgacatgcacaaagccgcgctcaacgtggaggcggctcaggcgctgtaccgtatccagcgtgccgagatgctgccgaacctgggcgtttccgcccgcggcgcgtcagagcgcgtaccggccgacctcagtaccacggggcaaagcgacgtgctccggcgctacgacgtggccggggtgacggccgcctgggagctggacctgtggggccgcatccgcagcctcaacgaccgggcgctggcgtcctacctggccctcgacgagacccgcatcgccacgcagatgagcctggtgtccgaggtggccagcgcctacctcacgctgcgcgccgaccaggaactgctgcgcctgacgagcgacaccctcgccacacagaagcgctcctatgacctgaccacccaactggtggaagcgggaaattccacgcagctcgacctgcgccgcgcggagatcgcgctgcgcaccgccgaggccaaccgcgccgcctacacgcggcaggcggccaaggaccgcaacgcgctggtgctgctgctgggccagccgctgacgccggagctgtcccggcagcttgacgaggccgtggcgctgccggacgacatcgtgccgaccgacctgccgagcggcctgccgtccgaactgctcgcgcgtcggccggacatccgcgccgccaagcagatgctgatcggcgccaacgccaacatcggcgcggcgcgggccgcgttcttcccgacgattagcctcacgggctcggcgggcacggccagcgcttcgctggacggcctgttcgattcgggctcgcgggcctggagcttcctgccgcagatcacgctgcccatcttccgcggcggcgcgttgcgagccaatctggacgtggcacaggtacaaaagaggatcgaaatcgccaactacgagaagtctatccaggcggcctttgctgaggtggctgacggcttggcgggcaagcgcacgcttgatgagcagatccgctcggagcagctcctggtagcggctagccagaaagcctaccaactagccgagcaacgcttccaggaaggcgtggacgacaacctcaccttgctcgatgcgcaacgcacacagtacggtgcgcagcagaccctggtgcgcacgcgcctgacgcggctgaacaacctcatccacctctacaaggcgctgggtggcggctggactgagcacacggtgcaatcgggcgccaccgggcaaccatccgcccggtcgccgggataa

SEQ ID NO: 516020 - DNA, 3177 bp, Stenotrophomonas maltophilia
atgaatttcccccgcttcttcatcaaccggccgatcttcgccatcgtcctgtcggtgctgatgctgatcgcgggcgcgatcagctatttccagctccccctgagcgagtacccccaggtcacgccgccgacggtgcaggtcaccgccagctatcccggcgccaacccgcaggtgatcgccgacaccgtggcatcgccgctggagcaggcggtcaacggcgtggaaggcatgatgtacatgcagtcccagatgtccacggacgggcggatggtgctgaccatctcgttcgagcagcacatcgaccccgacgtcgcgcagatccaggtgcagaaccgcgtctcacgcgcgctgccccggttgccgtccgaggtccagcgcatcggcgtggtcaccgacaagaccgcgcccgatattctcatggtggtgcatatgctctcgccgggggaccgctacgacccgctgtacgtgtccaactacgcgatgctcaacgtgcgcgacgaactggcgcgcctgccgggcatcgccaacgtgatcatcggcggtgaaggcgagtacgcaatgcgcgtctggctcgaccccgagaaggtcgcatcgcggggcatgaccgccagcgatgtggtcgccgccatccgcgagcagaacgtgcaggtcgcagccggctcgatcggccagcagccgaatgcgtcggccgccttccaggtcagcgtcaatgcgctggggcgcctgaccaccgaagagcagttcggcgacatcgtgatcaaggccggcgccaacggccaggtgacccgcctgcgcgacgtcgcacgcctggaactgggctcggacaactacaccatgcgcggccagctcgacggcgagaacgcggtcggcctgcaaatcctgatgacgcccggctccaatgccctggacacgtccagcgcggtgcgcgcgacgatggagcggctgcaggccaagttccccgaaggcatcgagtacaagatcgcctacgaccccacagtcttcgtgcgcgcctcgctccagtccgtcgccgtcacgctgctggaggccatcctcctggtggtgatcgtggtggtgctgttcctgcaatcttggcgcgcgtcgatcattccactgatcgccgtgccggtctcgctggtcggcacgttcgcggtgatgcacatgttcggcttctcgctgaacacgctgtcgctgtttggcctcgtgctctccatcggcatcgtggtggatgacgccatcgtggtggtggagaacgtggagcgccacatggcgctgggcgaatcgcccaaggatgcggcgcgcaaggcgatggatgaagtgactggcccgatcctggccatcacctcggtgctggcagcggtcttcatcccctcggcgttcctgtcggggctgcagggcgagttctatcgccagttcgcgctgaccatcgcgttctcgaccatcctgtcggcgatcaactcgcttacgctgtcgccagcgctggccgccatcctgctcaagccgcaccacggcgcggccaagcccgatcgtctcacgcgcatcatcgacggcgtgttcggcggcttcttccgccgcttcaaccgcttcttcgatcgtgcctcgaattcctacgtcgggggcgtgcgccgcgcggtgcgcggcagcgccatcgtgctgctgctctacgtcggcttcctgggcctgacctggctgggcttccacaaggtgcctgcgggcttcgtgccggcccaggacaagtactacctcgtgggcatcgcccagcttccgaccggcgcctcgctggatcgcaccgaggcggtcgtcaaggagatgaccaagatcgcactggctgagccgggcgtcgagagcgtggtggccttcccgggcctgtcggtcaatggaccggtgaaccagccgaacaccgcgctgatgttcgccatgctcaagcccttcgatgagcgcaaggacccgtcgctgtcggccttcgccatccagggcaagctcatgggcaagttcagccagatcccggacggcttcgttggcatcttcccgccgccgccggtgccgggcctgggttcgatgggcggcttcaagctgcagatcgaggaccgggcgggcctgggtcccgaggcgcttgcgcaggcacagggccagatcatgggcaaggccatgcaggcgcccgagctggcgaacatgctcgccagcttccagaccaatgcgccgcagttgcaggtggacatcgaccgggtgaaggccaagtcgcagggcgtatcgctgaccgaggtgttcgacaccctgcaggtcaaccttggctcgctctacgtcaacgacttcaaccgcttcggtcgcacctaccgggtcatggcccaggccgatgcgcagttccgcatgcaggctgaggacataggcatgctcaaggtgcgcaatgcagcgggcgacatgatcccgctgagcgcgatcgcgaccatcgagcgcagttccggccccgaccgggtgatgcattacaacggctttccctcggccgacatcagcggcgggccagcgccgggctactcgtccggccaggccaccgccgcgattgagaagatcgtgagcgaatcgctgccggacggtatgacctacgaatggacggacctgactttccaggaaaaacgggttggcaacacggcgatctacatcttcgcgctggcggtgctgctcgccttcctgttcctggcggcccagtacaacagttggtcgctgccgttcgctgtgctgctgattgcacccatggcgctgctctcggcgatcgccggcgtctggctctctgggggcgacaacaacatcttcacgcagatcggtttcgtggtgctggtcggcctggctgccaagaacgcgatcctgatcgtggagttcgcccgcgcgaaggaaagcgaaggggccgatccgctggcagccgtgctcgaagccgcgcgcttgcggctgcgcccgatcttgatgacgtcgttcgccttcatcgctggcgtggtgccgctggtgctggccagcggtgtgggcgccgagatgcgccacgccatgggcatcgcggtgttcgccggcatgctgggcgtgacggtattcggcctggtgctgacgccggtgttctacgttgtggtgcgcaagctggcgctgcgccgcgaagcgcgccatgcccgtggcggcatgaccgaccagcacgcatga

SEQ ID NO: 516021 - DNA, 1308 bp, Stenotrophomonas maltophilia; identical to SEQ ID NO: 422573

SEQ ID NO: 516022 - DNA, 2190 bp, Stenotrophomonas maltophilia
atgcgcgtcgagggcatggactgcgccagttgcgtcggcaagatcgaaacggcgctcgctcgcatggatggcgtgtccgatgcccgcataaacttcaccgcagaaacgctggaattgacgctcgcgtctggcggccccacgcagctcggccacatcgagaagaccatcaagagcctgggcttcggcgtctccgacgtgcgccgccatgctggctcagcacccgcggccccagcagcagcatcgacggcgcgccatcagcgctggtggcagacgaagaaaggcaagcacgtgctgggcctgggcggcctgatgggctcggcctacgcgatcgcgcagttcgttcctggctacgctgaatggatcttcgccgctgcggtgatcgcgggcgtgctgccgttcgctcgcaaagccttcgcgctggctgtgtcaggctcgccgttctctatcgaaacgctgatggtcgtcgcctcgctgggcgcgctcgtgataggcgaggccgaggaagctgctgccgtggtgttcctgttcgcgatcggcgagctgctggaaagcgtggccgccggccgcgcgcgcgccggcatcaaggcgctggcctccctggtgcctaagacggcggtactgctcgatgccgcgggcgggcagcgcgaagtgcccgccgcttccctgcgcgtgagcgaccgcgtgctggtgcgccctggtgaccgggtgcctgcggacggcaagatcctccgcggtgaaagcagcctggacgagtcgcctatcaccggcgagtccgtaccgcgtcaaaaggctatcggtgccgacgtgttcgccggctccatcaacgtcgatggcgtgctcgaagtacaagtcgagaagacggcatcggacaacaccatttctcgcatcatccaactggtggagcaggcgcagtcctccaaggcgcccacggctcgcttcatcgaaaagttcagccgctactacacccctgccgtcatggccatcgcggcgttgatcgtggtggttccgccacttgccatgggtggcgactggggtacctggctgtaccgcggcctcgcactgctgttgattgcctgcccatgtgcgctggtgctctccacaccggcggccatcgcctcgggccttgcggtggccacgcgacggggcctgctgatcaagggtggcaacgcgttggaaaccatcggccgcgtgcgcgccattgccttcgacaagactggcacgctgaccgagggcaagccgcgcatcaccgaggtcctgcccttcgggctgttcaagcatcaacaggtccttgcgcttgccgccgctgtcgagtccggctcaaaccatcccttggcgaaggccattgtcgcccatgccaagagcctggacgtggcgattccccaggccacgggcgcatcggccattgccggcaaggcggtgcgcgccaccgtgaacggcagtgcgctcgctgtcggatcgcccgcccatgcggaacagacggccacgctgacagccgcgcaccgcagggaaatcgacaagctggaggatggcggcaagaccgtggtggtcctgttcgacgaagccagcaagaacgttctgggcctgctggccctgcgcgacgagccccgccgcgacgcgcgcgaaggcgtggcccagctcaacgccatgggcgtgcgctcggtcatgctgaccggcgacaaccgccgcaccgcgcaggcgatcgccggcaagctgggcatcgagtgggaggccgagctgctgccgcaggacaagctgcgcttggtcaacgagatgaagcgtgatgccaaggtggcgatggtcggcgacggcatcaacgacgcgccggccctggcgaccgccgacgtgggtatcgccatgggcggcggcacggacgtggcgctggaaaccgccgatgccgcgctgctcaagagccgcgtcacggacgtggcccacctggtggccctgtcgcgggcgacgatggccaacattcaccaaaacgtcgtattcgccattggcctcaagggcttgttcctggtcaccaccgtgttgggtatcaccggcttgtgggttgccgtgctggccgacaccggcgccacggccctggtcacgctgaacgcactgcgcctgctgcgcttcaagggcgcgcctgaggccaaccacggcgacgacgccgggcgtcccaccaccttgtccgtgccgtctgcccgctga

SEQ ID NO: 516023 - DNA, 342 bp, Stenotrophomonas maltophilia
atggtcatgcccgctgcaggccccgtgatcgtgaccgtggtcatgggcatggccgtgagcatggccatgcccatggtcatcaccgcacgctttgccgtgcgaatgatcgtgcccgtggtcgtgggcatgcccatggtcatggtggccgccgcagccggcgtggtcatgcgcgtgggccgcatggcgcggtgcaggtgctgcggacatttcggacgcgggcagtgcctgcacgtcgaagcccagggaccggattttcttggcaatgtcgcgtgcagtatttcggctacttgtgctgcgcgtcaacgtcagcgtctcatttgtaaaattaacctgtacatttga

SEQ ID NO: 516024 - DNA, 570 bp, Stenotrophomonas maltophilia
atgtccaagaaaattcgctttgctgttctgctttccgcactttttgctgctggagcaaacgctcaaccgttcgccgcagatatgacacggcaacaggtccaagaaaatctgactgcttggaggcaatctgggctggaagcgttgtctcgcggcgaaagcggcccggatacgtccagccctcaataccaggctgcctttcagcgctacttgcaattgacccaaggtgatatgtatcaggcgccctcagcaggaaagactcgtgctgaagtgatggctgatttggaactgtggaaaatctccggcatgcacgcgttcacctcgcgcggaatcaccaccgcttcgcacacccaagcctaccaacaagcctacgagagctatctccagctcaagctgggtgcggcttacaaggctccggtggcattgactcgtgctcaagtaaagagtgatttggcagattggcaggttgcgggaatggctggattctgggctggtgagcagacgcctgatacctatagtgatgcctaccgcaccgcatttgaaacctaccagatgctgcgcaacaaaaaatga

SEQ ID NO: 516025 - DNA, 378 bp, Stenotrophomonas maltophilia
atgacatcccgcaaaaccaccagcgccgctattgtgcaatgttcgacctctaaccacggcacgaccactgatgtcctcgcactatcgcaaagtgacgtcgctgttctggcagagaccttccgcctgctgggcgaccaatcgcgattgaaaatcctgttgctgtgcatgcgcggatcggtcgcagtgggcgacattgctggctcgctagacctgtcgcagtccttggtcagccatcacctgcgcctgttgcgcggcgcgcgcctcgtgcgcggcgagcgccaagccaagcacatcttctacggcattgccgaccagcacgtcagccaggtactccaggacatggcggttcacatttcggaggacagacacgacgattga

SEQ ID NO: 516026 - DNA, 1029 bp, Stenotrophomonas maltophilia
atgtcccaatccaatgcacatgatcatggtcacgaccatgatcacgaccacacccccacagtgaccagcgccaacgagcgcaaggttctggtttccttcttcctgatcttcggcttcatgctcgtggaagctgtcggcggcgtgctgtcgggctcgctagccctacttgccgatgctggccacatgctgaccgacgccgtggcacttgccctggcttacgctgccttccgattcggtcgccgcgcagccgacagcaaacgcacattcggttacctgcgcttcgaggtcatcgccggcttcctgaacgccgtgaccctgttcgcgatcgtcgcatggatcgcctacgaggcgtgggagcggctgcaggcgccgcccgtcatcctcgccggcccgatgatgatcgtcgccgtgctcggcttactgatcaacgtcctcgtgctgtggatcatgacccgcggcgaaaccgatcacgtcaatgtgaaaggtgccatcctccacgtgatgggtgacctgctcggctctgtcggcgccatcgttgcagcgatcgtcatctacttcaccggctggactccgatcgaccccatcctgtcggttctagtagcggcgttgattctgcgcagcgcctggaagctcctggccaagtcgatccatatcctgttggagggtgcgccagaggacgcttcgccggaaaaggtggaacaaggcctgatgagcactgtgcccggcctggcggctgtcagccatgttcacgtgtggcaactcacttccggtcgcacgatggccacgctacacgttcgacccaacgtggacgaggaggcgcgagctgtggtcaagcgcgtcgaggcggtgctgcgagagcagttcagcatcgaacacgccacagtcggaatcgactggaactcggaggctgacgagaacatctgcagcctgcaacccacgacaggccgtcaggaccacagcggccacgaccacagtgagcacaatcatgaccatgaccatgaccactccgctcccggtcacaagcattga

SEQ ID NO: 516027 - DNA, 1038 bp, Stenotrophomonas maltophilia
ttgccatttgtcaccgaggtctggcagatctatctgctgatctttgtcctgcaagcggcatccgccggcttcacgccgactttccaagccactatcccggacatccttcccgatgaagaggactacacgaaggcgctgtcgctgtcccggctggcctatgacctggaaagcctgatttccccgatgctggctgctgcgctgctgaccgtcatcagctttcacaacctgttcgcgggaacagtgctcggtttcctcgtttcagccgcgctcgtggtcagcgtgcggttgcccacaactattcccggaccgcgccgcggcatttgggatcgcacgacccgcggcacacgcatctatctcgctacgccacgcctgcggggcctgctggcgatcagcttggccgtctcggcggcgggcgccatggtgatcgtgaacacggtggttctcgtgaaggcgcgctttggcctaggcgaggtcgaagtggcgtcggcactggcggcattcggaggcggttcgatggtggcagccttcgttctgccatccttactggaaaaggtggccgaccgaaccgcgatgctcaccggcgctaccgtactggtcgtgggcacggggatcggcgcactgctgccgagctatgcattgttgctgccgctgtggttgatcatcggctttggctacagcgtggcgcaaacgccatccggccgtcttctgcgccgctcggcccatgccgaggaccgtcctgcgatcttcgcggcacacttcgcgctgtcgcacgcctgttggctcatctgctacccacttgccggccgcttcggcgcggtcatgggcttgccatcgaccttcattgtcatgtccctggtcggcttggccggcgtggcgctgacgctctggctgtggccggccagcgacccttctgacgtggcgcatgaccaccccagcttgccgccggatcaccctcatttacgcacacacgcagaccaaggcaggcaccatcaccagctgattctggatgacctgcaccgtatctggccgaaaggatag

SEQ ID NO: 516028 - DNA, 1092 bp, Stenotrophomonas maltophilia
atggcgctggaagcctccaccaaaactgatcggttcaacaaccgcaacggaaagcgcgaatatgaagtcggggtggctattcccctttggatgcctggtgagcgcgcctcgtcggcacgctgggcggacgcggaaagcctcgcgctatccagccggatgctggccgccaagctacgcacggccggacaggttcgccaggcatggtgggcatggcagcgtgcccaggccgaattggtggcggcgcaggatcgcacccgcagcgcggacgagttggcgcaagatgtggctcgccgggttcgcgcgggcgacctggcgcaagccgacagaaaccaggccgatggcgccttggcgtcggctcgtagtgccctggccattgctcaggccgaagaaatcacgcagcgcgaggcgttgttggcactgaccggcatcgagagtatcccgtcgcaggccgattccgcgcagccggagcagtcaggtgtccgagttcaaccggcatcggcacagccgtccggcgcgttgttgggtaaccaccctgcgctgctggaactgcagcacaaggcgctggcggcccgccgctctgcggaactggtgtcccatcagaagtacgccaaccccgaactgaccctggcgaccacgcgggatcggggcggctacggcgaacgctacaaccagacgatcacggtgggtgtgcgcattcccttcggtacgggtagccgtcataccgagcaattgtccagcgccaatgcgcaggcactggaggctgagtcggcactcgcggcccagcgcacccggctactctcggaaattcgaactgcccaatcgcgcgaactggcaaccagcacccagatgcaggccgcttcggagcgccagcgactagcccaacaaacgcgcaccttctaccaaaagtcgttcgcgatgggcgagacggacatgccgacacgccttcgcatcgagcaggaggccaccgaggccgagcgcgcggcgctgctcgccaaggtggagcatgccgcggccatctcgtccctgttgcaggcacaaggcacgctgccgcagccgaccgagactttcactgacatctccggcacgcgctga

SEQ ID NO: 516029 - DNA, 552 bp, Stenotrophomonas maltophilia
atgtcgcaatcctctttctggcgtgcagctgccttgtccagcctcctgcttggcagtagcgcaacgtgggccggcgacggccatgaccatggcgaagccgctcctgcccccgcagcggccgcgcttccgcgctttgccgcagtttccgatgacttcgaactggtgggtgtgctgaacggccagcgtctcacactctacctcgaccatgctgccgacaaccggccggtgaccgatggcgagctgaccctcgagctgggtggtcaacaggtaaaggtcagctcacacggggttggagagttcgaggccgatctgactgagccgctatccgatggcgagacctcaatcatggccactattactgcgcagggccaatcggacctgttgacgggcgttctcgatgttcatagcgaagacgccgaacacgagcatgccgtcgcatccggccgtgtggtcgtactaggtggcggtgccgcagtcctcggcgtcggtgtcctagcgtgggcgctgcgcagacgtacacgcaccaacggtgcactgcgaggtgcagcatga

SEQ ID NO: 516030 - DNA, 1116 bp, Stenotrophomonas maltophilia
atgaagcgcaacttccgtttcctaatgacgacggccatggcggctgcattggctctggctgctcccgcgttcgctcacgacggccatgaccacggcgacgaagcgccggctgcgtcttccaatggcccccagcgccagcctgatggcagcgtgtttcttccgaaaccgtcgcaacgtcagatcggtgtacgcacccagctgatcaagcaggagcccttggcccgcagccatgaactggctggcaaagtaatcatggacccgacgacaggcggcaaggtccaggcaatggtaatgggccggctggtgcccgggccggatggtctgccgcagatcggccaatccgtgcgcaagggccaggtgctggcttacatcgaaccggccagcggtgtgctggagcgctcaggccagatggcccaggttgccgagctgcgtgcgggccaagcgctcgcgcagaagcgcttggcccggctgcgcgagctgtcggagaccgtgccccgcaaggagatcgaagcagccgaaagcgaagtgaacagcctgaccgaacgcgcccgcgccttgagcgggggcctcgccggcagggacgtactaaaggccccagtcagcggcgtcatcgcatccagccccgcagttgccgggcaggtcgtggatgcgcgcgaactggtgtttgaggtggtcgatccgacccaactgcgcatcgaggcgcttgcctacgatccggcaatggcacagaacctggccggtgctgcactcgcagtaggcggtcagaaggtgccgctgagcttcgtcggtgccgccagcagcctgcgcgagcaggccctgcccatgctgttcaagggcaccagcgaaagcctctcgcgcttggcggtcggtatgccggtggtggtcttcgtgcaagaggcgacgacggtacctggctaccgcgtgccttccggtgcgctgatgaagaaccctgccaaccagaacatcgtctgggtcaaagaccaggccgagcgcttcgagccgcgtgtcgtgaacatcactcctttggatggtgcatccatcgctgtcacttcgggcctggcggacggcgaccgcgtggttgtcgagggcgcgtccctgatcaatcaagttcgttga

SEQ ID NO: 516031 - DNA, 3147 bp, Stenotrophomonas maltophilia
atgttcaagtggcttctcgaaaatagcttacgaaaccggctcctggtcatcatcggggcgctggtgctgatggcgtatggcgcgttcaccctgacgcgcacgccggtagatgtctttcccgatctcaacaagccgaccgtcactctcatgacggaggctggcggcatggctgccgaagaagtcgagcaactcatcacgttcccgctcgaaacggccatgaacggcctgcccagcgtcgaaagcgtgcgctcggtctccagcgccgggctttccttcatctacgtgacatttgactggaagaccgacatcttccgggcgcgccagatggtctccgaacgcctgacgtccatggaggaagggctagccccgggcgtgacgcccactatggggccaatcagctcagtgatgggcgagatcatgcagattgcaatccccatcggtgccaagccctcagggcagaagaacgcagccccgccgctgtcggccatggacactcgcgagtacgcggactgggtgctacgcccccggctgatggccatacctggtgttgcccaagtcatcccgatcggaggcgaggtccgtcagttccaggtccagcccaacaccacgcgaatgtcagagctgggcgtgactgcgtccgatctggatgcggctctcaagggcttctccgcgaacacttccggcggcttcctggagatcaatggccgcgagtacctgatccgcaacctgggccgcacgtcccgactcgacgacctgcgtaacctgcctctcgcggtgcgtgcgggccaacccatcctgatccaccaggtcgccgatgttcagtttgcgccagccatcaagcgcggcgatgcgggcttcgagggcctgccagccgtgatcctgggcatccaaaagcagcccacggccgatacgattgcactgacccgctcgatcgagtcagcgttggcggacatgaagggctcactgccggctggcatggccgagccacaggtgaccttccgacaagccaacttcatcgaggcgtccatcagcacgctgcaaggcaagctcatcggcgcatcggtcttcgtggcggtgatcctgttcttcttcctgggcactttgcgccccctggtgatcgcgttgaccgcgattcctgcctcgatcttcgtgaccgggctggtgttccactatttcggcctatcaatcaacaccatgacgctcggtgggctggcgatcgccatcggcggtctcgtggacgatgctgtggtcgatgtggagaacatcatgcggcggctcaaggaggaccgcacccgccaccctgagaaccggctgacgcccctggtcatcgttgccagggcctcgatggaggttcgctcggcgattctctacgccacgatgatcattgtgctggtgttcctgcccctgttcgcgctgccggggatggaggggcgcttgttcgtgccgctgggcatcgccttcatcgtctccacgctggcctcgctgctggtctctgtgacggtcactccggtgctttcgtactacctgctgcccaagatgaggacgctggaccatggcgacactcggcttctagcctggttgaagacgcgctatcagggcggcctgcagcgggtcttgcagcggccgcgtgccgcccttggcatggccgctgtggctgtcacactggctgtcgccgcggtgccattcttcccgaccacgttcctgcccccgttcaatgaaggaacgttgctggtgggcctgcgcctgaatcccggtgtgacgctggccgaatcttcggcgcttgcccagcaagccgagctgctggtcgcgcaggtgccagaggtgcagcacgtgggccggcgcagcggacgggccgagctggacgagcatgccgaaggcgtgcatgtcagcgagctggacgtgggcctgctgcccgcctcggagctaaagcgctccatggaggagatcaccgccgacatccgttcgcgtctggctcacttgcccggctccatcggcattggccagccgatctcgcaccgcatcgaccacatgttgtcgggggtgcgctcgcagatcgccatcaaggtgttcggcgaggacctggacgtcctgcgcgggcaggcggatctgctgcgcgccaagctggccggaattccggggcttgctgacctggagatcgaaaagcaggtcctagcgccgcagatcaaaatccgcgtggattatgcggcggcgggacgctacggcgtggccgcaccgcaaattctgtccacgctgcaaagcctggtcgaaggcgaaaagatcaccgaggtcatcgagggcaaccgccgcttcgcgctggtggttcgcctgcccgagcaggcgcggtcgattgagggcttgagccgcatcctcatcgacacgcccatgggtcgggtcccgttgtcgcgccttgccaccatcgaagacagcgacggccccaaccaggtcagccgcgacgatggccgtcgacgcatagttttgtcggccaacgctcagggacggccgctgtccgaagtagtggccgacatacgcagcgtcgtccaagaagtgcgcttgcccgaaggctacttcatcacgctgggcggccagttccaggcacaagaggaagcctcgcgactggtgggcctgctgtccatcgtctccctgacgctcatgttcgtggtgttgtacacgcgctacaagtcggtcgccctatcagcgctcatcatggtgaacattccattggccctggtcggcgccgtgttggggctgtggctgtctggccagccgttgtccgtggccgccctggtcggcttcatcacgctcgcgggtatttctgtgcgcaacggcatcctgaaggtgagccactacctcaacctcatgcgcatggagggcgaggacttcgaccagaagatgatcgtgcgtggctcgctcgaacggctttccccggttctgatgaccgcgctggtcacggccttcgcgctggccccgctgctgttcgaggcgtcccgacccggtactgagatcctgcaccccgtcgcggtggtgatcttctcggggctggtcagctccacgctgctagacaccttccttacacccgccatgttctggctgttcggccgcaagcctgccgaacgcctgctggacgaccgcgacgcggaggcattctga

SEQ ID NO: 516032 - DNA, 399 bp, Stenotrophomonas maltophilia
atgtctgttcgatttcgttccctcacggctggcaccgccctcgccctggcatccgtcaccgccttcgccgcaggcgaccatgaccacgcgcatgaccacaagccgctgcatggtggcgtcgtgaccgaagtccgggacgtggactacgagttggtcgttcagcccgcagcagcgcaactctacctgcgcgaccacggcaagcaggtcaatgtaagcaacaccaaagccaagctcacactgttgaccggctcacaaaagcaggaggtgcaactcacgcctgccgcggacggaagccgcctcgaaggcagcgggaccttcgccgcagccaagggcacgaaggccgtcgtccaagtcgaacgtgggggcaataccgcgagcgcccggttcgttctgccgtag

SEQ ID NO: 516033 - DNA, 1428 bp, Stenotrophomonas maltophilia
atggaaatgcatttcgacgtcattgttatcggtgccggcccaggcggatacatcgcggccattcgcgctgcccaattaggcatgaaggtcgcttgtgtagatgcctggaagaacaaggacggaaagccagcacctggcggcacctgcaacaacatcggttgtatcccttcgaaagcgctactgcagtcgtcagagaactttgaacaagccaagcaccactttggcacgcacggcatctccacgggtgatctgcgcatggatgtgaccacgatgttggaacgtaagaatcaggtcgtgaagtccagcaacgaaggcatcctttatctgttccgcaaaaacaaggtccagtttttcaacggcctggcgtctttcaccaggactgtcgatggtggcttcgaggtgagcgtcgccgccgatgaggctgttaccttggttggcaagcagatcatcgttgccacaggctccaacgtgcggccgctccccaacctaccgttcgatgagcgggtcgtgctctccaacgacggcgcgctggacatcgcggctgtgcctgatcggttggccgtcatcggtgccggcgtgatcggcctggagctgggctccgtttggcgccgcctgggggcggatgtcacgatcctcgaaggcttgcccagcttcctgccaatcgtcgaccaagccatcgccaaggaggcgaagaaggcgttcgacaagcaaggcctgaagatcgaactaggtgcgaaggttcgcgaagtcaatgcaaccgaggctggcgtgactattcactacaccgacagccagggccagacgcagtccttgcaggcagacaaagtgatcgtggctatcggccgtgtgccgaacaccgaaggcctgaatccggccgccgtgggactccaattggatgagcgcggcgccgtactggtggacgatgaatgccgcaccagtgtgcccggcatctgggccatcggtgacgtggtgcgtggcccgatgttggcgcacaaggcggaagaggaaggtgtcgcagtggccgagcgcattgccggccagcacggtcacgtcgatttcaatacgatccccaacgtcatctacaccagcccggagattgcctgggtaggccgcaccgagcagcagctcaaagagcagggcaccgcctatcgaattggttccttcccgttcatggccaatggccgcgcgcgtgcgctgggcgacacgacgggcctcgtcaaggtgatcgccgattctgccacggacgagatactcggcgtgcatgtagtcggcccgcaggccagtgaactggtggccgaggccgtgatcgccatagcgttcaaggccagcagcgaagacatcgcccgcatctgctttgcccatccgaccctctccgagacgttcaaagaggcctcgctggccgtggacaagcgcgcgctcaacttctga

SEQ ID NO: 516034 - DNA, 357 bp, Stenotrophomonas maltophilia
atgaatacaagtaagccattcagtaccccaccgaaggatcccagcgccaatttggaatcgctgtcacagaatgacgtgaccatcttggctgagacattccgcctcctgggtgacccgtcccggctgagaatcatgctgtgctgcatgaagggctcatcctcggtcggggatatcgctgaaaccctcgaactctcgcagtcgctggtgagccaccacctgcggctgctgcgcggtgctcgcctggtcaagggcgtgcgccaggccaaacagatcttctatgaggtggcggacaagcacgtgaaccaggtgctgctggatatggccacccacatcgcggaagaccacaacgacgagtaa

SEQ ID NO: 516035 - DNA, 2526 bp, Stenotrophomonas maltophilia
atgtcgaatttcaactatgggaagcacaccatgagcatggcaacaacgagtagtgctggcggccaagcagcggcaatcagcctgcccatcgagggcatgacctgcgcaagctgcgtcggccgagtcgaggccgcccttgccaaggtcgagggcgtggcaagcgtgtctgtcaatctcgccaccgagcgagcggacattcgcctgaaccgtgctgtcgatcgcatggcgctgatccaggcgatcgagaaggtagggtacgacgtgcctcagggcaccatcgagctggcgatcggaggcatgacctgcgcttcgtgcgtgggccgcgtcgagaaggcgctcaaggcggtgccgggcgtcactgaggctgtggtcaatctggcgaccgagcgcgctaccgtgcgtggtgtggcatccgtgcaggatctaatcgcggctgtcgataaggtcggctacgaggccagccctgtcgataccagcatgcaggccgacgaggaagccgccgagaaaaaggacgccgagcgcgccgaactcaagcgcgacctgaccctggccgccgtgctggcgctgcctgtgttcgtgctcgaaatgggctcgcacatgattcccggcatgcacgagtgggtggcttccaccatcggcatccagcagagctggtatctgcagttcgtgctgaccctgctggtgctcgccattccgggctggcgcttctacgagaagggcttcccggcgctgttccgcctgggtcccgacatgaactcgctggtcgcggtcggcacggccgcggccttcggctattcgatggtcgccacgttcgcgcccagtctgctgccggccggcacggtgaacgtgtactacgaggcggccgccgtcatcgtggcgctgatcctgctgggccgctttcttgaggcacgggccaagggccgcacctccgaggccatcaagcgcctggtcggcctacaggccaaggaggcgcacgtgctgcgcgacggccgcatcgtggacatcccgatcaacgacgtggcgcagggcgacatcgtggaagtgcgccccggcgagcgcgtgccggtcgatggtgaagtgaccgagggccgcagcttcgtggacgagtcgatgatcaccggcgagccgattcccgtcgaaaaggcggaaggcagcaccgtggtcggcggcaccgtcaaccagaagggtgcgctgacgctgcgtgccaccgccgtgggcggtcagaccatgctggcgcagatcatccgcatggtcgagcaggcgcaaggttccaagctgccgatccaggccgtggtggacaaggtgacgctgtggttcgtgcccgccgtcatgctggccgccgtgctgaccttcctggtctggctggtgttcggcccgtcgcccgcgctgtccttcgcgctggtcaatgccgtggcggtgctgatcattgcctgcccgtgcgccatgggtctggcgacgccgacctccatcatggtcggcacgggccggggcgctgagatgggcgtgctgttccgcaagggtgaagccctgcaactgctcaaggacgccaaggtggtggccgtggacaagaccggcacgctgaccgagggccgcccggtcctgaccgacctggagattgccgacggctttgaccgcaaccaggtgctggcgaaggtcgccgccgtggaatcgcgctcggagcatccgatcgcacgcgccatcgtcgagtcggccgtggaaggtggcatcgcgctgccgacgatgacagacttcgattcggtcacgggcatgggcgtgcgcgccaccgtggacggcgcgcgtgtcgaggtcggtgccgatcgcttcatgcgtgagctggggttggacgtgggcggcttcgctcgcacggccgagcgcctaggcaacgagggcaagtcgccgctgtacgcctcgatcgacggccggctggccgccatcatcgcggtggccgatccgatcaagtccagcacgcccgcggccattgccgcgctgcaccagctcggcctgaaggtggcgatgatcaccggcgacaacgcgcgtaccgcgcaggccatcgccaagcaactgggcatcgacgaggtggtggccgaagtgctgcccgagggcaaggtcgaagccgtgcgccggctgaaagccagccacggccagatcgcctacgtgggcgacggcatcaacgacgccccggcgctggccgaggccgacgtgggcctggccatcggcaccggcaccgacgtggcggtggagtcggccgacgtagtgctgatgtcgggcaacctgcagggcgtgcccaacgccatcgcgctgtccaaggcgaccatcggcaacatccgccagaacctgttctgggcgtttggctacaacacggccctgatcccggtggccgctggcgtcctgtaccccgcatacggtgtgctgttgtcgccgatcttcgcggctggcgcgatggcgctgtccagcgtgttcgtgctcggaaacgcgctgcgcctgcgccgcttccagccgccgctggcggcggataccgctcattga

SEQ ID NO: 516036 - DNA, 480 bp, Stenotrophomonas maltophilia
atgaacatcggtgaagcatccaaggcctcgaaggtctcggccaaaatgatccgctactacgagcaaatcggtctgatccctccggctgaccgcaccgattcgggctaccgcgcctatacccaggacgacgttcaccggttgcatttcatccggcgttcgcgcgacctcggcttctcggtagccgagatcacggacttgctgggactgtggaatgacaagtcgcgccagagtgctgatgtaaagcgtctggcccagcaacacatcgacgagttggaccggcgcatcgagagcatgctggagatggccgcgacgctcaaggcgctgatccggtgttgcgccggcgacgaacggcccgactgcccgatcctgcacacgctggagcagcccgataccagtgacaacaagcccgaagcgcgcactggcgcagtgccgcgccgcgcgcgagccaacgcagcaggaaaaaagccgcgtgcgcactga

SEQ ID NO: 516037 - DNA, 339 bp, Stenotrophomonas maltophilia
atgcccaaaatcacagtcttgccccatcctgaactggctcccgagggagccgaactgaacgtgccagcaggcacttcgatctgcgaggccctgctggacaacggcatcgagatcgagcatgcctgcgacatgagctgtgcctgcacgacctgtcactgcatcgtgcgcaaggggtttaattctctaaacgaagtcgaggagtgcgaggatgatctgctcgaccgggcctggggactggaggcgcagtcgcggctgagctgccaggccatcgttgcgaccgaagacctgaccgtcgagatccccaagtacacgatcaaccatgccaaggagaaccactag

SEQ ID NO: 516038 - DNA, 759 bp, Stenotrophomonas maltophilia
atgtctgcgcccaagctagccacgctctaccgaatggtcatgcccggccatacctgcccctacgggctgaagtcgctcgatctgctcaaacgcaagggctacgaggtcgaggacaaacacttggcgagccgcgagcagacggatgcgttcaagaaggagcatggcgtcgagaccacgccccaggtcttcataaacgggcggcgcgtgggcggctacgacgacctacgcaaattcttcggcatgtccgtgaaggacaagaacgccgtgacctacacccctgtgatcgcgctgttcgccatggcggccgcgatggcgctggcggcgagctgggcggccttcggccagctctggagcattcaggcggcagagtggctcgtggcctttgccatgtgtctcctggcgctgcagaagctcaaggacgtggacggcttcgcgacgatgttcctcaactacgacctgctggccaagcgctgggttcggtatgcctatttctacccgttcgcggaggccatcgcaggcgtcctgatggtcgcgggcgtggggatgtgggtgtcgattccgttggcgctgttcatcgggaccgtcggggccgtgtcggttttcaaggcggtctatgtcgatcgccgggaactcaagtgcgcctgcgtgggcggggacagcaacgtgccgctggacttcgtgtccctgaccgagaacctgatgatggtggcgatggccctgtggatgtgggccaaggtcgcctaccttgggatgcactga

SEQ ID NO: 516039 - DNA, 195 bp, Stenotrophomonas maltophilia
atgcaattccatctcgaagacatgacctgcggcggctgcgcccgcactgtgacgaaaacgatccaaacgatcgaccccaacgccaagatcgttacggacccgccgacccgccgtgtcgaggtccagacctcggcctcgcaagagcagatcgccgcggccctgagcgaagctggcttcccgccgcgcgcgcagtaa

SEQ ID NO: 516040 - DNA, 510 bp, Stenotrophomonas maltophilia
atgcctgattcctgcgtggtgaaagaaatgagcacagaaatagtccttgatggtacggatagacgccttattgatgcattgcaacgcaatggaaggtccaccttcgacgaactggccgaacacgcaagcctgtcgtcctcggccacgctgaggcgggtgcgccgcctcgaagaggctggcgtcatcgccggctatgtggccctggtgcaccccgaacgcatcggcctcaccctcacggcctacctgaacgtgcgcctcgaaaagcactctgattcgcacaagcgcaaccccatggacgtgttccgcgcgtcggttcagaactggcccgaggtggtggagtgccacgcgctgaccggcgacatggactacctgttgcgggtggtcgtcagagatatggcccactactcccgcttcgtgctcgatacgctgctcaagcaccccagcgtgcaagactgcaagaccagcttcgtgctggaccgcgtgaagagcaccacggccttgcccctatga

SEQ ID NO: 516041 - DNA, 1089 bp, Stenotrophomonas maltophilia
atgaccgacctttttgacaacccgatgggcctgtgcggctttgaattcgtcgagttcgcctcgccgacgcccggcgtgctggagccgctgttcgagaagctcggcttcaccgaggtggcccggcatcgctccaaggacgtatcgctctaccgccagggcgacatcaacttcatcgtcaaccgcgagcctaaaagccaggcggcgtatttcgcgggcgagcacggccccagcccctgcgggctggcgttccgcgtcaaggattcgcacaaggcctaccaccgcgcgctggagctgggcgcgcagccgatggacattcccactggcccgatggagttgcgcctaccggcgatcaagggcatcggcggcgcgccgctgtacctgatcgatcgcttcgaggacggcaagtccatctacgacatcgacttcgaattcctacccggtgtggatcgccgtcccaaaggccacggcttctcgatcgtcgatcacctcacacacaacgtctatcgcggccgcatgacgtactgggccgacttctacacgaagttcttcaacttccaggagatccgctacttcgacatcaacggcgagtacaccggcctggcttccaaggcgatgagcgcgccggacggcctgatccgcatcccgctgaacgaggaagcacgccagggcggcggccagattgaggaattcttgatgcagttcagcggcgagggcatccagcacatcgccctgctgtgcgacaacctactcgatgcgctcgaccgcgtgcagatggccggtatcccgctgctgaccgcccccaacgacatctattacgcaaacttggaaaagcgcctgcccggccatggccagcccgtgcccgagttgcaggcgcgcggcattctgctcgacggcacgaccgaaggcggccagccccgcctgctgctgcagatattctccgagccgctgcttggcccggtgttcttcgagttcatcgagcgcaagggcaactaccgcgagggcttcggcgaaggaaacttcggcgccttgttcgagtcgatggaacgcgaccagatcaaccgtggctcgttggaaatcaacccggcctga

SEQ ID NO: 516042 - DNA, 894 bp, Stenotrophomonas maltophilia
atggaacttcgtcatttgcgctgcttcgtggctctcgccgaagagctgcatttcacccgtgctgcggagcgcttgcacatcgagcagccgccgctgtcccgcacgatcaaggaattggaagacgaactgggggtgctgctctttgaccgcgatcggcggggaacgcggttgacgccagcgggtaccaccttccttcaggacattcgccggctgttcaccaacctggagcaggcacgagaaaacgtcagggcgatcgccgcaggcctaagaggcagcgtgcgcatcgccatctccgatggcgccatcgacccgcggctgtctgcacttcttgccctgtgccgccaggaggagccggagatcgaaatacggctctccgaggtcaccctggcggaacagttgcgggggctgcgatccggcgacttcgcgatcggtttcgcacacactgcggacgtcggcgacggactggtgacggagcccatctggcaggacccgctggtggtgaccttgccgatccggcacccgttgctggcccacaaggaagtgtcgctacgtgaactcgtgagttacccgctggtgatgtgcgatccgcagctttgcgagggctactgccgcgaattgacccggctgctacatcccctggagcgcgagtccaccatcgttgagcatgtctcgtcgctggacatgatgctcacgttggtcggagctggttacggcatcggcttcgcaacggcgacccgaatcgcggtatgccaacgtcccgacgtggtgatccggccgttggcgctcgattcggccgtcatcatcacctacctgcttcggcccgaaggcggtagcggactatccgttcccgtagagcgcttcatcgagcgtttgcgttcgccaaagagcgattag

SEQ ID NO: 516043 - DNA, 309 bp, Stenotrophomonas maltophilia
atgacgcttctgcgaatgcagaagcgcactattcggcctggacggcccgccggagtaaccacctatgagtccgcaccggcgttggcgttcgggcaagcggtgcgagccgctcgcctggatcaggggattgctcaggatgagttcgcgggcttggcggggatcgcgcgttcgcacatgggcaagattgagcgcggcgagcacatgccgacactcgctctcattctaaaaatttccctggctctcaagatcagctcggccgaactgatgacggccacggagcgcaacctctaccttcagggcgatgcgtga

SEQ ID NO: 516044 - DNA, 642 bp, Stenotrophomonas maltophilia
atgcatgacgtcatcagtccgcccccgaatttcacactcgccatagcgccaggtgtaccgtcttcacggctgtcggcgctgcttgcactgcagcgagcgcaggagccgggcgtcgcgatggccgtgcgtgaagtttcggatcaagagttgatgacgggcctgcaggagggccgctacgacgcgggactatctcttagcggtgcgggggatcacctgacgagtagccggaggctatggtgcgaaagcatggccgttgcgataccaccgcggtcccgcttagttaaccaggcgaagctcaccatctcagatcttcaggattatccaatctatcgctggcgggtggaggcttgccccttgctggacgagaggttggcctccctcatgccagtggaccaagagaacatcctgtctgcaacttcattcgagatgatggcgctgtgggtctcatccggctacggcatcggcgtatgcgcgcaatcgcgcatcgagcgtgcccatcaatgggggatcggcatgcgaccgctcgccgatggcccctacaatatcgtgacgtacctccaacggccccacgcgcaagccgattctgctgccaagcggttcgagcgtagagcgctacagattgctggggaaggtgcaaggtga

SEQ ID NO: 516045 - DNA, 2397 bp, Stenotrophomonas maltophilia
atggctgtcgatcgatccggtgcaacggtgttggggggcggctgcgccgccggcctggtgctgggcgcgctggcctgcgtgcagctgccgacactgccgccactgtggctgtgtgccgtggcggcggcgtgcgcgctgtgcgcctggatcctgcgctggcgaggacgggtgccggcggctgcgctgttcggcctggcctggaccgcgctgcacgggcactgggcaatgcagcagcagcttgcgccgggcgcttcggcgcaggatgtcgtggttcgtgggcggatcatcgacctgccgcagcatcgctccggccagacccgtttcctgctgcgcgtggacgatgacgaccgtctgccgttgttgcggggcaagcgcctgcaggtcagctggaatgatccgtggcggggtacggccgcaggccaccgtggtggacgccagcagctgcgggccggcgcgcgctggcagctggcattgcgggtgcggccaccgcgctcgaggatcaatcccggcggattcgatggcgagcgccatgcgctgctgcaggccatcgccggcactgccacggtgcgcgaccccgctggcgcacgcgagctgcaatccgcgtttggcctgccagcctggcgcgagcgcagcagcgccgccatcgccacccaggtggccagctctggcgcgcgcttcgtgcaggcgctggcgctgggtgatacgcgaggattgtccgatgccgactgggagcagctccgcgcgctcggcctgacccatctgatcgccatttccggattccacgtcggcgtggtcgcggggctgggtgtgctgctgtgccggctgctgtggtggctctgcccgcagctgggccgccactggccccgacaacaggcggcggccggcgctgcggcggtggccgctgccggttatgcggtgctggctggcggcgcgctgcccacggtgcgtacggcattgatgatcggcctgctcgcgttggcgcgcggcggccggcgcccgcttggtgtggcgcacggggtgtcgctggcagcgttggcgctgctgctgccgtcgccactgtcggtgctgtcggccggcttctggctcagcttcggcggggtgctgtggctgctgtggtgcctgccgcaggcgccaccgcaggggctgcgcgaacggctgcacggcctgctcgccgcgcagggggtggccagcctggggctgttgccgttgggcatcgcgttgtttggcggcaccgcccggctgggccccctggtcaatctgccgatcattccctggtggagcctgctggtggtgccgctgtcgttgctgggtaccggcctgcaggcgttgcatgagggcgcggggcgctgggcatggcgggctgcggcgtgggtgttcgacctcagctggcgcgtgctgcagccgctggcggtccatccagaggcgatgtggtggctggccgaggcacccgcctgggcggtaccagcggcgctgctgggtgttatctggtggttgctgccgcgcggcgcaggcggtggcctggcgggcgtgttgttgtgcctgccgcttctgtggccggcacgtgaagggccgcggcagggcgagctggaactgctggtgcatgacgtcggccagggcacggcggtgctgctgcgcacggcgcggcatgcgctctggtacgacgtcgggccaccggccgggggcgacagcaatgaacgcaccctcgtgccggcgctgcgtgcgctgggccaggccatgccgcagcaggcggtgctcagccatgaccaccaggatcacaccggcaatctgcccgctgtgcgccggcagcatccgggtctggcgctgctggcgcccgacggcagcgccatcgccggggcccggccctgccgggcaggcctgcgctggcactgggatggcgtcgacttccaggtgctgcatcccgccgctggcaaccggcaggccgtgaatgagggcagctgcgtgctgcgcgtggcgggagcccatggcgtggtgctgttgcccggcgacataggccgggttgccgaaacggagctgttggcaacctcttcgccgcagttgcgtgcggatgtggtactggtcccccatcacggcagcggcggcagttccagcgcgctgtgggtggcggcggtggaaccacggctggcgctggtctcggccgggcaccagaaccgcttcggccacccgcggccggaggtggtgcggcgctggcgggcgcagggggccgaggtggtggccaccgccgagtccggagcgatccgcgtatggcttggcgcacaggggctgcagctgcgtgaacagcgtatccacgcgtcccggtggtgggatgccgctgggcgggcacggtcggctgctatcctatcgccgatcgaacaagcggccgttgggccggagggttga

SEQ ID NO: 516046 - DNA, 309 bp, Stenotrophomonas maltophilia
atgccgatgcttgccctgatgctgctgttcaccggcctgttcggcgaccacggcgggcccgccgaagtggcagtgcgtcaacagatccaactcaacgagacggccaccgcgacgccacagcgtgatgacaccgcgtccgcgctgcagctcttgccgctgcgcgaggaccgggtgctgcgatttggatgccagggccgcacgaacggaccggccgagcgcgcctatgtggcgcagctgtggcagcgtgtggatggcgagtggcggatgcagcgtgcaatccgtgtcgagatgttggccgctgggcggtag

SEQ ID NO: 516047 - DNA, 483 bp, Stenotrophomonas maltophilia
gtgagggcgctgcttccggtgttgctgggcgcggcgatggctctggccggctgcacgccagcggccccgcccggtacgcgggtgggggcggaccgcccgccacttcccggggtggatgtgcgcctgagcgcggtcgatgcggccggcaagggcgtgccggtgcagtggcaggacgagacattgacgctgcgcgagcccccgattgccagcagcgcggacatcgccgatgtgcgctctgtgcaggatgactacggcctgacggcgctgcagatccgctatcgacccgaggcgcaccagcgcctccacgatggcacggcggccatggtcggtcagcgtatggcgatcagcgtggatggccgggtgctgatggtggccacggtgcagggaccgttctctgaatcgatgaatctgagtgggttggccggtagtgatgccacggcgttggagaagcacatcaccgggtctgcgccggtggagcggtag

SEQ ID NO: 516048 - DNA, 945 bp, Stenotrophomonas maltophilia
atgcagacattgccggtgccaggcaggcgcagatgggccggggtgatcaccgcgctgctgctgtgtacggggtgggccgtgcaggtccacgcggaaggccgcgcgcgcggcgccattacctacgcctccccgcagcaggcgctggccgcactgcgtgcgcagccctcgatcagcgagcggcaggagaacgactggatcgtgttgtacgatccggccgggccggtgttctggtccgtgaccacgccggccaatggctggcatccctcgattgtccggcgcgagctggtggccgaagacggtcaggtggccatgcagatgtcggtgaagtgcggcgtctccacacctgactgtgatgcgctggcgcagagcttccaggcgagcgacgagcgtctgcggcagcgcgccgacgtgcagacgcaggccgcacagtcgctggcagcggaggatgcgtcggacgagcccacggctgcggaaatcggcgagaacgcccgtatccgcgaggcgatcttcagtggcgaggcaggtggcctgaagctcgccgactatccggtggcgaaggtctacagggggccagccgctgcgctggacatgagtacgcgtgaagcgcgcatgttcaagacacggatgtcggcggcactgaaggacggcaaggtcgagttcgcgggcgagtacaccgtcgccggctggggctgcggcaccagttgcttctcgcagaccttcatcagcctgcgcaccggcaagccgctgccgcagagcctgggcggggaactcggcccgaacatcgtcaggatcgatccgcacagcgcgctggtggtggccgaaggcagcgagtacgacagcaactacgacaggaccggtcactacgcctacttctatgtgctggaagggcatacgttgaaactgctgcggaaagtggcggtgccggagacgctgggcgaggactga

SEQ ID NO: 516049 - DNA, 474 bp, Stenotrophomonas maltophilia
atgaaaacgcgcctgttgcttgccggtggcctgttgctggccctgaccggctgcaccacctacgactacgtcggcggcggacgcagtggcagctactaccacggcgcgccgtcggtggagtaccgctacccggccggctatccgtacaactacggcccctattacggaggctacggcggctattatggcggctacggctatccgtactactcgcgcccggtctaccgcccgccgcacaaccaccggccgccgccgcgtccgccgggcaacgggggcgagcatcggccgccgccgcgcccgaacaatggcggttcgccctggcgcaacatggactcgatgcgacgcccgccgcaggcggacatgccccgaccggcgccgccggcacgcccggcgccggcaccgagcgcgccgaggatgaacggttccccctggcgcaacatggatcgtgggacgcagcgcacacttgagcgctga

SEQ ID NO: 516050 - DNA, 1617 bp, Stenotrophomonas maltophilia
atgcggattgaccgcctggacgtagtgctgcgtgcacgcagcggctgggaggcgatggagctgggcagcgccctggcccgccgccatgcccgcgcggtatggggcagctggctgctggccagtgcaccgctgttcgtgatcttcaatgcagtgggttggtggctggatgccttcggctgggcgtggctggccatgtggtggtgcaagccgctgttcgagcgcgcgcccctgtacgtgctgtcgcgcggcatcttcggcgaaccggtgacggcggtgggcgccctgcgcgcgcaacacagctggggccacagcggattctggggttacctcggctggcgccgcttcagtgtgctgcgcagcctgtgcctgccggtgaacctgctggaaggcaatgcgccgaaccagcgtggcccccgccgccgcgcggtggccgccggtgcggccggcgccgcgacggcgctgacggtgctgtgcatggtgttcgaagcggtgttggtgtccggcgcgatcggcgcggtgttcatgttcatgccgctggagctgatgtccgaatcctggcgcgcggcgtgggacgtgatcggcaaggacacgccggcctgggcacgcttcggtttcaacctggtgtgctggctggcctcggtgctgatcggcccgttcttcgtcggtgccggcttcggcctgtatctgaaccggcgcacgcagatggaagcctgggacgtggagatcgcgctgcgccgcctgcgtgggcgcctgctgccggtcgccccgacgctggccctgctgctgtgcctggcactgccactggcggtcgggccggtgcacgcgcagaacgcagcgcagagcgcagaagaggccagcgagacgggcctggacgacacgccggacgaggaagccgccacggccgacaatgacccggccaacgccccggcgaccatctttggcaccgcaccggtggataccgcagggttccgccaggcggtgagccgcgcctatgaagatccactgcagcgcccgacgcgccaggtcacacactggaaaccgatcgagcaggccgaggaaaagaaaaaggacgacaaggcgctgcagcgcgacagccgcaacaccggtgagcgcaaggcccgcagcagcggcatcgcctggctggcgcgcctggccgagtggggcctgtggggtctgctgggcgtgctgttgctggtgctgctgctgaccgcccgggtgtggctgccgtggctgcgtggcagtggccggcgcaaggtcgttgccgcgccagaagtggtggaagatcacctggaactgccggccgtgctgccaccggatgtggccacccaggccggcctgctgtgggaccaggggcggccgcggcaggcgttggccctgttgtaccgcgccagcgtgcgtaccgtgggtgagcgcagcggcatcgccctgccccccggcgccaccgaagcgcagtgcctgcgcgcatcgcggcgcatgcccgaggctgccgaccgtgacctgttcgcgcgcatcgtgcgcatgtggcagtacgccgcctatggtggccgcctgcccaaccgcagcgacttcgatgcgctggccgcaacgctgcgccagcaataccggtggcaggcatga

SEQ ID NO: 516051 - DNA, 1185 bp, Stenotrophomonas maltophilia
atgagcccgcgcctgttctggtcgttgttgctgggtgtgctggtgctgcttggcataccgctgaccatcctctacctgcgcacgcacgagcgcgtgaccgagaccatcaccctgcccgcgcagggcgaggccgcctacaacccgctgtatgtgctcggccaggcgctgcgcgccgacggtatcgaggtgcatgcacggccccggctggagctgcagcagatggcactgggccggcacgacacggtggtgctgctgcaggacagcagcgaactgcccgcaccggtggcgcgtgcgctgttggcctgggccgggcgaggaggtcatctgctggtgcgcaccccaccgccggccgaagatgacgccggcagcacgcagggccccttgctggaccagctgggcgtggacagcctgttccagcgcagcgagtgccagccgtttcatgtgcaggatgatcccggccacgtggaattctgcacaggccggcgcttcaccctgggctttgccgccagcgcgcaggccgagcgtcgctggggcagcgatcacgacctggtgttcgcacgcctgcgccatggccagggccgggtgagcgtgctggccgacatggcattcatgcgcggcgaggtggattcgcctgctgcgcgcctggcggccgccgccggcaacgccagcgacggactgcacgatcgtgcgcaccgcgacctgacccgttacctgcttgatccgaactacggcaaaggcagcgtctggctggtctatgccagccgcccgccgtcactgtgggcacgcgtgttctatcagggctggccgctgtgggcaccgctgctgctggccatcctgggctggctgtggggccgctcgcaacgcttcggcagcctgttgccatcgccggtgctggagcgccgctcgctgctggaacacgtgcgcgccagcggtgaactgctgctgcgtttcggccagggtgcgcgtctgtacgacgccgtgcacgccttgttcctgcatcgcctgcgcctgcgcgcaccggtcgccgccgcactggagggcgcaccgcgcgaacaggccatcgccgaactgctggcctggccgcgcagccgcgttgccagcgcactgaccccgccaccaccgcatgattcctccgccctgcgcgagcgcatccgcttgctgctccagatgagatccctgctatga

SEQ ID NO: 516052 - DNA, 384 bp, Stenotrophomonas maltophilia
atgcagattgagttctattcggagtactacgatggcttgatccatggcgtactgtccgatgaaggccgtctgttctatgccttctgcatccacgccgatttcccggatgccggccaggaccgtgcctacggggtgatcccgatcaatgccgtcgaagaccagcaccttcgctcatgcctgctgcaggcaggggacggggcactggatgccttcttccgctccgcattcctggacaggcacggcgtggtgctggaaggcgatccagagtcgtggagcagcacgggcctgcgtttcgaaacccgtggagatgcctacgcggctttcgtccgtcgttcctcgctggaggtgctggtgagtgcaggggcgcggatggaggtgcgctag

SEQ ID NO: 516053 - DNA, 138 bp, Stenotrophomonas maltophilia
atggctgactcatccaggctgcgttcgttgtggatggaaatcgcggcaaagcacaacgtctgcatccccgcagggggcgtcaaccacctggacgcagtggatggcgatttgctgatcgatcattgggcactgtgctaa

SEQ ID NO: 516054 - DNA, 612 bp, Stenotrophomonas maltophilia
atggggcagctcctgccttggttccagcatttgattggctggaatgtcgccactctatttctccgattgagtggcgaaaaggcgcgggtgctgcatgtaggcgacaaggttggacgtttggccatggccgacaaggtaatcatcagcatccacacgaacttagttacgattctgatacggctaaggcgcgccttcgcacgaacccgcacggcggcccaacggagatcgatggtcatgtccgaaatcgcttgggggttcccgatcacagggaacagggtaagtgaggcgctaagggccaacttcggtgcggagaatatgtggctgatagcgcacatggatgttccttcggcaacagatgcgccaacggccttgaatgaccttcgagatcggatgacgaacggaccggtacaggcatccacggcggatctctgcgatgcgctgacgggcgctccgcaggtctgggttctggacatccggctctcacacgacaacgacgtacagctctacatcgaggacggggaggtgttcgaggtgaacctggaccggacagatgctccaagggctcctgatcgatttcgcgacccggaagtgaatcaggatgaagatggctga

SEQ ID NO: 516055 - DNA, 366 bp, Stenotrophomonas maltophilia
atgtggtattgcgcacatgcaattttctactacagctatgtaggtcagagctcctacgtagttcatgagaacgtctaccttgtttcagaggatgatgaggacaaggcaatgctgcgggcgctgggattggcggctgagtacgaacaggtcggtgaaagtagccatctggagatcgaggggcagaaggccgagtaccgattcgctggaatcagaaagctgatttcggttgactcggatctggaagattcatcggagctgcgggagttgacgggtgaggttacctattccgtatttgaggtggccaatctttctgatgtggaggctctcgcggctggggtggctgtatcagtcaactatcgagagtag

SEQ ID NO: 516056 - DNA, 525 bp, Stenotrophomonas maltophilia
atggctgcaggctcatcgaaagatcttctgcatggaacattgtctgatgcgcagccgcctgacagtcctattgtggctgaaggctgggctgggattgctttcgacagaaatcgccatgagtacttcgcccctgaagacatatggattgcgtggttggatgtgcacctgggccgcccatcttccttgaaacagattgagattgtctcgttcaaggatgtcgaagcggatagggacggattctttgccgcgcccagcctttgctcgttgcatgaattccttgccgaggatgcgcgcttccttgctgaccactatgtactgtcccgttcgagtgagtgggtggttcgtctcgatcaggatgtgactctcttcgcggccaaggtggattttgtttcggaagtgctggcgcgtttgggtggcctgacggatgtgatggcacgaatggtcgaagactttgatccggggacgggggatcctgtggggttgaatggatttctccttgagattaccaagggcctgcgaagctag

SEQ ID NO: 516057 - DNA, 312 bp, Stenotrophomonas maltophilia
atgaatgagcgtcctgttccggaagcggctctggaagatgagaattcagttgagatgcttcgagtgtggattgctgcaaaagcgctccattgctcgatgaaggttggactgtacaaagagacctccaggatctcggaagagaaggcatggggcgtgatcctggcagacgttgcgcgccatctttcgaaggcgcttgagtcgggttatggcgtggatgcgcggattgcgctcagtgcaatcagggaagggttcaatgatgaactcaatgagccgacctcggacgttgatgggggcttcttgacaaggaactga

SEQ ID NO: 516058 - DNA, 1368 bp, Stenotrophomonas maltophilia
atgcaaatgtatgcaatcaggagtgtggtcgtcccgattgtgcttgcgctggcgttggtcacgcccgcgatggccgttgaacccctcgtggagacgctctcatacgcctcacttgtcgaagccgaacagacgttgcggaggcagggggacgacgtggtatgggtacgtcgggtccgcgtgaacgaggcggccctggccgcagatgagatcaccgtcgatctccacgatacggttctcaaccttgttcgcgatccttcccaacccttgttcgagactacgcagagtgtgagctaccggccagtgggcgacggaggcgtccaacgcgaggtgcgctcgctctcaagtatgcagtgggtgggcacggtgaaagtcgcgctccggagcacggaaggaaagtcaggggagcaacgcgtgagaatctggtcggacgcttcgggaacacatgcaagattcagcctcggcgtctggcactacaccctcgacggtgatcgactgataaagcgtgacgtgcgccatgccctgcgcgacgagcgcgacgatgtaaaggaccgacgacccgatcgaccggctcccggtgttccccttggacttgcctctggtcggagtggggaaggtcaggatgtcatccgggtcgcgtacggatttgcgacaggcgcactggcgagcgggctggatcctgcaattgagcagttccgggttgcggtaatgcaggctaattccggattcgctgcaagtggcattgaactggagttgcggacggtggcatacgcggtccctggatacagcgaatccacgcttgatcagaccttggatgacatggccgaaggcaagcaggggccactatggttgttgcatgcggcccgggagggcgagcgtgccgacatcatggtgatgatcatcgatactggcacgggcgcttccgcatgtggacttgcccagcaggtactggccacccgggaaacagctcttgtcgcgattgagcgcagatgcctggatcaacacactcttgcgcatgaggtcggccatctgccgggggcagatcataatcccgaaaatgcgacacttgatccgcccagattcgcgtacggtcatggctatcgtttcaccgagggggctgcgcctggctggcgaactgtcatggccctggagtgcactggtcaggtctgcccgcgggtgaatctatggtcatcctcgatgaaccagcatgaggggatgccagcgggatcgaccgatcttcatgacaacgcaagagtcctgcgcgaaacgaagggcatcgttgccgatttctatcccgatccgccatcccagagccccgacgtctcatatccgccgcccgtgacgtccggccggttgtcgccgtcgccctga

SEQ ID NO: 516059 - DNA, 516 bp, Stenotrophomonas maltophilia
atgaccctgccaccgcccattcccagtcactgcacccgacccgccggatggtggagccggcactggcgctgggcgatgcccctgaccgtcgtgatggtgttgggcgtggccggcggcatcgtggcctggagcgtgctgcgctggagcgaggcggcacgcgagagcccgccgatgcgcgaggcgctgcggcgcgccggctgcagtgtcgaactggtggaagcgttcggcgaacccctgcgtaccggatcgatgccgctgggcagcatgcagaccgcgatcgacggccagcgcgacgtcggcctgaccgtggccctggagggctcccgcgcgcacggccggttgttcgtgcagggcagccgccgcgatgacgtatgggattacccggtgatgtacgtgctgggcgagaacaagcagactttcgacctgagcgcgctggatgacgatgaagcggcggacgaatgcgcgctgcaggaatgccgtgatcgcggtgggtgcaaacctggcatggcgatgtag

SEQ ID NO: 516060 - DNA, 732 bp, Stenotrophomonas maltophilia
gtgctcgcttcccagctgcgcgtgcccggacgacgccgcaccgcgcgccaccagcatgtgcgcggccagttgctgggcgcccaccgcggcctgctgcggatcgaggccggcgacctgcactggctgctgccggcggggcacgtcgcctggattccgccctcgctgccccacgcactggtgggcgcggacgggttcgatggctggagcctgtacttcagcgctgcggcctgcatggaactgcccacgacaccgcgcattttccagcccagcacgctgttgcaggccgcgacgatgcgggcgctgcaatggcagcaacgggcactggacgcggcgcaggaacgcctggccggcgtgatcgccgatgagatcactgccagcacaccgctaccgcttgccctgccgcaaccgcgcgaccgacgcctgcggcggatcgccgccgcactggcgcgcgccccgcacgacaaccgcagcatcgaggactggtccgccagcggcgggctgtccagccgcagccttgcccgccattggctggccgagaccggtatgacgctgagccagtggcggcagcgacttcgcgtgctgctggcgttgccacacctgctgatgggtgagtcggtgatccgtgttgcgctgtcgctgggctacgacacgcccagcgccttcatcgccgtgttcaagcgtgagatgggggtaacgccggcgcggtatggaaaaggggacggaggggattaa

SEQ ID NO: 516061 - DNA, 711 bp, Stenotrophomonas maltophilia
atgcccagacaagcgcgcctgatgttggccggctacgcctatcacgtgacccagcgcggagtgaacagaggtgcaatcttcgtcgacgatatcgaccggcagctgttcctgcacctgctgcgcagtgcattcgacaagtaccacgtagcgctgcatgcatatgtactgatgggcaaccacatccatcttctggccacgccaacgacgccgctggggctggccaacgccatgcgcgtgcagggcaacaactacgtgcaggccttcaaccagcggcatggacgcagcggcccgctctggcagggccgctttcattcctcgatgatcgataccgatgcctatcttctcagtgtgtaccgctacatcgaacgcaacccggtccgggccggcatggtcaccgctgcggaagatcatccgtggtccagcgctcagggccatctgaaccagcgcgatgatcctctgctgacgccgcaccccgccttcctggcgatttcgcccgacaccgaacgcagagccgcactgtatgcgcagttcctgcgtgatacgggcgcgtctgccgacgtgcctgccatccgtgcccatagcagcaggcaacgaccgttgggggacgcagccttcctgcagagggtggaagagacccttgggcgatccgtggtgatgcgggccaggggacgtcctcgaaaaacggggacggaagaggcaaatacgacttaa

SEQ ID NO: 516062 - DNA, 1527 bp, Stenotrophomonas maltophilia
atgcaaagacaccacctcgcactggccaccatgctggccagcctgatgctggccggctgcagtccatcaccctcgggcaatgccgagggcggtgccgatgcacccagccgccgctacggcacgctggcattccagccctgcacgctgtccagcgaaggcgccagcgccaacgtcgcggcccaatgcaccacgttgcaggtgcccgaagaccgcgcccggcctgacggtcgccgcatcgacctgcgcatcgcctggctggagtcgggcgacaatggcgccagccaagccgatccggtgttcttccttgccggcggccccggccaggccgccagcgaagtggcggtcatcgtcgacaccgcgctgcgccaggtccgcaagcagcgcgacatcttcctgatcgaccagcgcggtaccggcggctccaatcccctgacctgcctgggcgcggacggcaagccgctgcccatcgacgaggaggccgctcccagcgaggccctgctgcgcgactacgcccagcgctgcgccgcatcgctgaagggacgcgccgacgcgcgcttctacaccaccagcgaggcgatcgccgacctggacgcggtacgccaggcattgggcgtggaccagctcaacctggtcggcggctcctacggtacccgggtggcccagcgctatgccggcgcctacccgcagcacacccgcagcatcgtcatcgacggcgtggtgcccaatgagctggtggtcggcggagatttcgccaacactttcgaagacgcgatcacgctacaggcagcgcagtgccgcaagaatgcggcgtgcagcaagcgtttcccggtcgataccgctgcccagctgcgcagcgtggttgcaaccctgcgccgtgcaccggtaaccgtcgactatcgcgacccgggcaccaacgcgccacgccaggacgtgctgagcccggacagcgtggtgggcttggcgttcgccttctcctacgtgccgcagttctcctcgctgctgccgctggtgctggatgaagccgcacagggtcgctatgcaccgctggcatcgctggcgcgcggtgccaaccgcagcatggatttccagatcaaccgcggcatgcagtggtcggtgatctgcagcgaggatgcaccgcgctatcgcgcaccgcctgcgaacccagaccgcctgttcggcaatgaagtggccagtgcgttcttcgccgcctgcccggtatggccgcaccagcctgctgcgccggccaatgccgatcccttgcgcagtgaggtaccggcgctgctgttgtccggtgagctggatccggtcaccccgccgcgctacgccgaacaggtcctcaagggcctgcccaacggccgcgcgctggtggcccgcggtcagggccacggcaccctggctgccggctgcatgccgcgcctgctcggccagttcatcgacaagaccgatgccaaggcgctcgacgccagctgcctggacacgctgagctacgtgccggcgttcacctcgttcaacggatgggaaccatga

SEQ ID NO: 516063 - DNA, 528 bp, Stenotrophomonas maltophilia
atgcacatgtggtacctcggtggcatcgaccaccgcccgttcctgcacctgttcgagaagagcgacacggcgttggccgcactgggcatccagcgccgctgggccggcgcgcacggcggccacccctgccgggtgggactgagcgatccgccgccgggcagcgagctgctcctgctctcgcatgtccatctgccgctgcactcgccctatcacgcgtccggcccgatcttcgtacagcgcggggcgacccgatgcgtgctgccgcctggcgaagtaccgccctatgtgcagcgccggatgatctcgctgcgtgcctacgatcacgccgcgctgatgcgggaggcgcagatcgccgcaggcagcgaggtcggtgcgcagctggatcggctgtttgccgatccggcggtggccttcgtccagctgcacaacgcggcccacggatgtttctcgtgccaggccgatcgggtcgctgtggcatccgcgccgcgtgaccctcatgacgtgatcgatggcacgccggtcacgtga

SEQ ID NO: 516064 - DNA, 927 bp, Stenotrophomonas maltophilia
gtgagccagtcgttgcgggccggcgcgctgccggcgcgggtgctgatcctcggtctgggctggagcggacgcgtgctggccacgcacctgcaggcgcagggcgtacacgtggccggcacagtgcgcgacccgtcgtcggcgccggacgatggcctgctgcggcatccactgcgcagcgacaccccaccgtcacctgccctgctcgatgagatcgcacgggccgacgccgtgctgtgcagcgtgccgccggatgccgagggcgacccggcactgcgccttctgctgccggcactgaagggcagcccggcactgcgctgggtcggctatctgtcgtccacgtcggtgtatgccgaccgcgccggcggctgggtggacgagcgcagcgcagccgatgccaccgacgtggccggcgagcagcgcaggcgcgccgaggcccagtggcgcgcccttgcggaagaacgcggtatggcctcggcggtgttccgcctgccggggctgtatggtcctggccgcaacgccctgctgcaactggccgagggccgtgcccgccgcgtgatccgcccggacctggtgttcaaccgcctgcatgtgcaggacctggcaaccgtcatcaccgcagcgatgcagcgacccaccctgcaggggctgtacctgcccagcgacgacgcaccggcaccgccgcaggatgtgctggccttcgccgcgcagctgggcgggtttgcgctgccccctgccgtggcctgggacgatccggtgctgagcccgacgctgcggcgcttctatgagagcaacaaacgcatcgatagtcgtggcacgcgccaagccttgggctgggagccgagatttccaacgtatcgggaagggctgcaggcgctggccgcttcgctcgccgggcatggcccggcgctaccggacagctccttgtag

SEQ ID NO: 516065 - DNA, 504 bp, Stenotrophomonas maltophilia
atgaaatcgatgctcgtcgcggcccttgccgcggctttctgctgcgtgcctgcacggtccgcgcacgccgccgatgcaacacccatccgcattgccgccgaggtaccgtaccgggccgaggtcggcggcgagctgatccggcaggaatgcgaattcggccgcgacctgagcagcagcatcgtgcgccatgccggtggccgggtggtggttgccgcacccggcgaagacgctggacgccgcctggacatcgttgtgaccaaggcgcacgccgccggcgggggcgccatttcagggccgaagtgggggcgcatctatggcgaactgaaggaagatggccgcgtggtcggcaatttcagtttcaagcgcaccaccagccggcccttcaccttccgcgcctgcaccaccctgaagcgggtggccgaggcactgggcggcgatgtggcgcgctggctggaaaaccccacgctcgatccgctgatgaccgaagagatcgcggccaactga

SEQ ID NO: 516066 - DNA, 444 bp, Stenotrophomonas maltophilia
atgtacagctacgactaccgcatttccctgggggtgcagcaccctgaggtctccagcgccgacatctccgcccggctggggctggaacgggggtttttccgcgatataggcaccgacctgcttgacggtgatgggcacttgatccgggtacatggcttcacccgggtgagctttgaactggctgctggcaaggacggctggctgatggacgcctggccgctggtggtcgagatgctgcaggcacgggtggaggtgatccatgcattgaaccaagaaggtgccgacgtccgcctgcgcatcgccgtcttcggcaagcaggcctgggccgggtatgaactggacgacacgctggtgcggctgatggctgatctccgcctgggcttccatgtggaaacctatttccccgatcctccggccgaccccgggaccgacgacgacgcctga

SEQ ID NO: 516067 - DNA, 561 bp, Stenotrophomonas maltophilia
atgccagtccccccacccgtctccctccgcgcggcagcccctgtcaatgactgggtacgcccggtggccctgtcctgcctctgggtgtcggccgcctgcaccgtcgccctgctgctggtcacgctgctggcctggccgctggtccacagcgaaatctggcaatcactggcgctggacgcctggcacatcggcatggatcgcaccgtgttgtggctgctcggccacccggtagcggctttgctgctgaccgccctggcctgtgccctctcgaccgccgccagctggggcctgctgcgcctgaagcagtggggcctgtggagcttcatcgccctgctgctgctcaccgccctggccaacttcatcgtgaccggttggttggacggcgtggccgcaccgctgctccacctgctcggcgattcgcccgaggcgctgcgctccctgcagatccagcgcaggctgttcaccgccacgatgtacgccgcgtcgttggcgctggcactgctgcagggcggcgtggcctggcgcctgctgcgcccggacatccgcgcgcggttccactag

SEQ ID NO: 516068 - DNA, 978 bp, Stenotrophomonas maltophilia
atgcgcctactgaccctgctccccgcgctgctgttgttggccgcgctgcctgccactgccactgctgccgccgatgcactgcgctgcggcgagtaccgcagcaccgatggcagcatggccctggtgttcgaatcatccaccaccggttatcaggcgctgcacggccaggaacgcgcgccgctgcgcatcgaccgcagcgccggcgatctgcttctggtgtttctcgacgacggcgtatccaccgccctcggcgtggctgctgacgggacgcatatcgacgacggtgtggccgactacacgctgcatcgaacccaggcctgccaacgcgcccctgcgccccgcgccgacggctgcctggcccgccctgcgctgtgcattgcgcggctcgctgaggcgcctccggaacaggcccagcgcgcgtgcgaggaaggcgtcggcgccggctgctcggcgctgctgcgccactttctcgctacgccgaccaccgaggccgggcagcaggacgcgccattgccggccgcgcagcgcgccacgctgcagcggctctgcctgcaacggcgcggtggtcgcttctgcaccggggtggccgaacagcagttgatcgcacgggaaccggcgctggccgtgcaggccctgcaggtcgtctgcgatgcaggccgcgtcagtgcctgcgagcgcactgcgcccctgcttgaactcggcgccgacctgcgcctggtgccggcccggcggctgccctgcggtcgctaccgggctgaaggtggcgtgatcgacacgctcgacttcggtgatggcacgcaggcgcgtctgcacgaaggtgccgttcatctgcagcagaacggtgaaacccttgtgttgcgcccgctcggcaacggcgacctgctcggcatggatgcgcagaccggctaccagcgctaccggcgcgtgcctggcacgtcacaatgcacgcccccgcgcgaggctcgtgatctgccgtag

SEQ ID NO: 516069 - DNA, 195 bp, Stenotrophomonas maltophilia
atgcgcttactgcgatcgcgccaccgctggctggcctgggcgttgctgctggccacgcctctggccgctgcccaatcaccccagtgcggcctgttcaaggccgatgaaggcagcaccacgctgcgcgtcatttcgcccaaccggggcgagcagaagcactacggcagcgcgccatcgcccgtcgttttccagtag

SEQ ID NO: 516070 - DNA, 1398 bp, Stenotrophomonas maltophilia
gtgaacctcgagtacggcctgcccagcgaactgcaggtgcgtgatcgtggccgcagcgtcaaggtggatggcacacgctacaccctgcaggcgccggcaacgtgcgccgctgcggctacgccggcagcgggcagctgcctggccgatgcggcagcctgcctggacaatcgccgcgacgcgacgccgatcgcgctggaagcggcctgccgcgaaggcgtacccggcatgtgcctgcagctggccgagcgttggcgcgaagacgccacaccttcggccgttccggacgctgcggcgcataaggcgctcctcgatgccgccctggccggcatcgagctgccggccccgtgccgcgaggggggcttccaggaccagacgcctgactgtgcagcagcgctggaagcagatccggcgttgcaggagcagccgatcaaggccgcaatgagcgcgatgctggacgaagcgatcatgtcgctggcagccccatccgcgccgatcgtgattccgtccgggcagcgtcagcagctactgcagttgtgccagcaggttccgcatgagcgcttctgcgcacgtgtggccgagctggcctgggaatcgggcgaccacctgcaggcggtgcaggcactggcgctgtcctgcgcaacaggcggtgaaggcgccgcctgtgtgcatctgccggcgctgcaggcactgggcccttcgctgcaaccacaaccggcggtcgcgctgccctgcggcagcttccatgccgatggcggcctgatggacacgctggaattcggcgatgccggcctggtcggcgtcggctggaacaaccagctgcgcgcccgtgttgaagacggcgacatccgcatccgtcatgacaagggcggcgacttcgtgctgcgcctgctgccgggcgggcagctcctgggcatggatacatggacccgctaccaggtgttcagcagcaccggcgagggcccggccagttgcagcgcgccgaagcagtacacggtgctgccactgccgcaggactgcccgcaggcacgggccgacggcggtgccgagctctgctgcgcgcagggcaggctgcagggctgcaatgtgcttggcaatcgattggcgatgtccgggaagtggcagcaggcggccgaccactacgtgacggtatgccgcgccggcgtgcgcgaggggtgcgagaacctggtgagcgcccacgaacacagtgcccaggtggatgcgcatgccacactggagcagctgtgcgaagccgacggcagcgggcgccatgtggcctgcgacgtgctggagaccggcaactggagcgcactggagctgggccgcgccctgcagaaggcgatgcaggaggctgccctggatgaggccccggcgccacgcacctccaaccacaagcgctga

SEQ ID NO: 516071 - DNA, 1521 bp, Stenotrophomonas maltophilia
atgttccctgcggtatctcttcgcccccgcgctgcgggctggcgcgccctgctgttgctcgcactggcctcggccagcctgccggccgccgcgcagtcgatggcctgcggcacctacacgcaggacgatggccatgccacgctgaccatcgtgagcgaagcacacggcttcattgccggcccctaccaggccaccgagcagcttcggttggcgcgccaggacaacattctggcgatgggaaacctctccactggcgcgctggagaaccgcgagttcagcgacgacgaccgcaccatcaccggcggttaccacgatttccacctggaacgcgccgcagcctgcaaaccggtgccggacatggtggaaggcagctgcaaggccaacaccagcgattgtctggaagccctgccccgcgccgagccggcgcagctgcacgcatggtgcagcgagggcatcgaggtcgcctgcaacaccctgtatgaccactaccagatggaggccgaccgcgagcgcccgcagctgaccggcaccgaaccggtaatgcccgacatgtgccgcgaagaatcaccggcctacgaggcggacagctgcatggccatggtcaaggtcatggccggcgagttgatcgggcgctcgatcatgggcctggacaagtcgcgcagggcgccgctgacggccgcgcagctggatgagctgaccgccctgtgccggcagcagcagggcgagacgttctgcgacaaggtggccgatgccctgtggaccggcggacgcctgcagccgtcgctggacgcattgcagcgctcctgtgcgcagcgcgccgaagcgtatgcctgcactccggccaaggcgctggcgccgctgtccgggctgggcgcggcatcgctggcggcggtgcctgccagcgcattgccgtgcggccgctatgaggccacaagcggcctgctgtcggagttgcgctttgtcgacactgggctggtcgaggtgcccgggctggatacccgcctgcgcgcgcgcctgcaggacgggcagatccacatccgccgtgacgtcggcagcgatttcgtactgcagccgttggccaacggcaaccttgccggaatcgaccgcgaccaccgctatgcctacttcgtgcgcaagccggccgccgctgatggcagctgcacgccgccgctggcattcgtggagatccccatgccgctggactgcccgaccgtcggccgcaggaacggtgccgaggcctgctgcagcgacggcaagctgctgggctgcaaggttgccggcgaagcacggtacaaggcagaaaagtgggccgcgtcgctgccctatttcgagacgctgtgcagcgccggcgtccgcgaaggctgcctggccatggcagaggtgtacgcgaagacagcggacccgaagattccgcaggccatggcggcactgtgcgccaaagacggcaagggcacccatgtggcctgcgacgtggacgccacgcgcaactggccggcgctgaaggccgcagccacgccctga

SEQ ID NO: 516072 - DNA, 750 bp, Stenotrophomonas maltophilia
atgatctgtagtctttcgcgtggcgtgctgctggtcgccatggccacctccgcaggagccaccagtgcggcatcgacttcttcggtgtcactggtgaccgcgtccgagcaggcgtcgctgatcgagacccggcattccggcggcgaaggtgccgctgtcaccacgttgaagacgcagtacttcgccaacgaggaaatgtcggtcggctgggacgaccagcaggtgctggtgctgtgcagggaggcggcgtacctgaaaatccctgctgccaagctcaagtccgggccgttgagcgccgaacagcgacagatgatcgtctatcaggcattgatggccggcatgggggctgtcgcgggcgtgatcgggccagcgggcgaggtggtggccgtggctgatgacggcagcgagacccgcagcgttggcgagaacagttgggcgtacggtgtcgagcgccatgaggtgatcacccagcgcctgccggatggtgcgcttcgggtccgcacccgcaagaccgaaaccgtgaataccacgccgaaggcgggtgcggacgacatgttcagcaccgaggacgaccaggcggcgcggctttcggagctggcgcctgtgggtagctggaccgaagtggtggtccatggcggcacgcgtgaggcgcacgtggatccggcaatgtcgctgaagggctgggtctcgatgggggacgaccaggctgcgacggtggccgaggcgcggaagctgcacggctgcaagtag

SEQ ID NO: 516073 - DNA, 2337 bp, Stenotrophomonas maltophilia
gtgagacgcggcagcgcactccgccagcctgcgttgattgcactgctgctgacgctgcttctattgcccggcgcggcggccgaggatgccacgctgcaacactggcctccgaacggccatgtccgggtggccatgccgccgtccctgcgcccgatgccggccgcactgactgacaacgcgtctccggcaacccttgcccatggctatgcggagatcgtgtcccggcatacccgcctggtgtttgaagagatcccctaccccagcatcgaggcttcaatccacgccgtctgccggaatgaggctgaactggtgatggtgttcggcggcgccaggcaccgtgcacccccctgccctgacctgatcgcgtccggcgcatatcccggcggggccacgctgctggccgcacgttcgggcacgcgactgccacgcgacgtgcacgaactgcacgggtggacgatcgcggtggtccggggcgggccctttgcgggctggctggccgcacatcatccgcagattcagctgcggcattttccggatcggcacgccacgcttgccgccgttgcagcgggcctcgccgacgtagccatcggcctggaaagcaccctgcgaccgatggtccgtcgtcacttcaatggcagcctgcaactgcaaccacttgaaagtgacttctcctccgacctgcatctgctggtgcgtcgccagaacgaagccctgctgcgacggatcgacaaggccgtgcgtgacatcacgctggacgagcacgccggcctgctgcatctatgggccgagcaggcgttgccagcctccctcggcgaggcgctgcgctgggcgcggcaaccgcctgcgcttgcctgggtggcgctgatccccctgctggccgccctgcccttgttgtggcgcctgcgccatcgcctgcgcccaggcagcgatcggctgggcgcacgtgcggcgggcatgatcagccacgaaatgcgcaatgcagcccaggccatgctcgccgcgatcgagttgctggcacagtcgccgctacgccgcgggcaaggcgagctggttggcgttgccaaggccgccggccactcgcttcgcgctttgctgaatcgggcgctggacttctcgcgagtggccgccggcacgttcactccacagcctcggccttgcgatgtgctgggcctgtgccagcaagtgctgtatgccattgaccctcaggctcgccgcaaggggctgcggctgcagtttgcggcgcctgcggcgccctcgcccagcgtaatgatcgacccggatgccctgcgccagatcgccagcaacctgctgatcaatgccgtgaagttcagtgatgccggcagcatcgagctacgcctggatctggtgccgcccgcgcggccgcgcgaactgctgctggaggtcatcgacagcgggatcggcatcgcgcctgacacgttgaaaaccctgttccgccccttccaccagggtgccggcggcaagcgtcgcggcggcagcgggctggggctggccatctgccgcgagctggcccgcgcgatgggaggcgaactgaccgtgcacagcgtgctcggcaaaggcagccgattcatcctgcgcctgccggtgcgcgccaccagggcaaccacggatccggcaccagctcgcactgcggcagccccgctggcggggctggcgctgttgctggcggaggatcacccactgaaccggcgcgtggttgccgaacagctgcgacagttgggcgccgaggtgtgcgcggtggctgaagccaccgaagcgctggccgaacaggcgcgccaccctcgcagcgtgatgctgcttgatatcgggcttcgcggcatggatggccatgcgctggcaggagagctgcgacgacagtcggacacgccgttgcgactgatcgccctgtccgcgcgcaccggacgcaggcatcttgaacgctgcagggcatcaggtttcgatgccgtgctgaccaaaccgctgcggccggcgcagctgctgcaggcgctggaactgcacgcaccgcagggagtcgcacccgacgaagcaaccgccgcaaccgacagcctgctggctgcctatctgagcgacatgggcaacgaactagggagcattgaaggctgcctgcgcgatcacaacgcgcccgcactgcgccaccatgcacatcgactgcaggggaccttgcagatgctcggcgcccacgagcaggccgcactggcggccgcactctgggatctggggcagcgtgccacgccggactggagcgcggcgcggcagctgcttgaacgcctgcgggattggcacggcgcccgcacggcggatgccctgccatcgccctga

SEQ ID NO: 516074 - DNA, 669 bp, Stenotrophomonas maltophilia
atggtcaccacgcctgcgggcgccgatcacctcctgcgcatgaatggatttcctgcaccgcgccccctgcaactggcgcttctggatgaccacgaaatcgtccgtcgcggcaccgccctccatcttgccggcgaccgccgcttcaccatcgtcgccagccatacccacagcgacgatctcatcaacagcctgcggtacgcccgggtggatgtagccatcatcgacctgaccctggccccgggcgaccgcgacggcgccgagctggtggcgctgctgcgcgagcagtttcctcgcatgccgctgctggcattcgcaacgcacctacccaccaccaatctcaatcacctgatcggcacgggactgagtggctttgtcagcaaggccgagccactccacgctctctccgacgcgatcctgcgtgttgcgcagggcttgacccgcgtgccgccggatttcaccctggccatcgggcgccacgagctcacccgcaacgagcgcgaggtcctggacctgctgttggagggattcaccctgtccgagatcgccctgcgtcgccatcgcagcatcaagaccgtcagtacgcagaagatcgccgcgttacgcaagcttggactgcgcagcgacattgaagtctacgccatgcgtgaacgaatgctggagctgcggtga

SEQ ID NO: 516075 - DNA, 291 bp, Stenotrophomonas maltophilia
atgcggccggcgcatcctggcgatgccattgagctgtcgctcaagagtcagggttcgacgcgaggtgcggatctatccgtaaagatgattgcactggccgatggcagcactgcgggcgtccggaagcttcggctgaatgcgggtaatgctgccgcgccgaaactggtgtttgagccaggcgagccctggcgggtcgggcggtatttgtttgaagtcagcctcaacgggaagttggcgggaagccaggagcttgagatattcccagtcgaaccggccgctcccgagcagtga

SEQ ID NO: 516076 - DNA, 447 bp, Stenotrophomonas maltophilia
atggcacttttcaaaggcaaggctcagtgcgccagttgccattccctggatggaactcacgagttgagcgacgggaagtttcatcacgcgagcgtgggcttcgagcgcattgccggcaatctccgaaatctacagatccagttggaggatgcacgcgcagcaggccagccgctgggaaccctggttctcacggagaccgatattgcggagctgggccgctttgctgtgagcggcaaccccaaggacatgggggcgttccgcaccccgagccttcgcaatgtagcccgcactgccccgtatatgcacgacggcagcatccagaccctggatgctgccgtcgaacacgaactctactatcgaggactgaccaccgggcaaccgatcagcctgaccattgaggaaaggcatgatctcattgcattcctgcaagccttgagcaacccgtaa

SEQ ID NO: 516077 - DNA, 6720 bp, Stenotrophomonas maltophilia
atgagcctgatcgtacttgcgcttgccgcccaggcatgggcaacaagctatgtctatgacgccaatgggcgtttgactgccgtgaccaatgacgcgggggaatctgcgcgttacgtatacgatgtgatgggcaacatccagaaggtcgagcgctttgcagccggcgagctggtgttgttcggcttcagccctggccgcggtgtcagcggtacgcctgtgcgcatccaggggcagggtttcagtgctgagccgactgccaacgcagtgcgttttgggggtgtcagcgcggacgtgctcggggccagtggtagcgaactgcaggtggtggtgccgtcaggcgcggttaccggcccgatctctgtaacggttggagcgcagtcggtcaccagccgcacggactttgtggttgatcaatccagtcgtacaccaagaattgatagcttctcccctcagattgtttccgttggggcgaaagtcaccctgctgggtgaatcgttgtacccgcttccacatcagactaccgtccgcgtaggcacgcgctcggcgctggtcgcgcgtgctgcgaacaatgaggtggaattttcggtgcccctggggggcgccagttccagggtgagtctgtccacgccctatggtttggccgtcagtgatcgggatctggtggtgttgccttctggtgtcacggcggctgagatcgctgccgtacggcgcgttcaggcagacggtgtggagatccctctgtccacccagaacgccggccagcaggtggccctcctgttcgatgctgagctgggtgagcatctcgacgtccagatgtcggcaatcacggccggcaatctggcttacacgctctacgatccctcaaatcgcaaggtggttgacggtaccgcaacgacctcagaccccaccgtgctactgccgcctgcggcgaaagcgggaacgtacctgctgctgatcaagccttcgcaggggcccgccagctggaagctggccatcgagcgcagccgcatgatcatggccgacggcgaaacgctgccgcttgcaacgacgattgccggtcagaagaagcgattcatcttcagtggaagtgtggaccagcggctgggactggggctggaggggctcactctctcctccggaacctcgatgtatgccaccgtcatgaatcgaagcaacacggtggtcagcgcatcctgccttcccagctacgacggatgtcagctcaatattcgggcaccgcagacggcgatctacagtgtggtctttgctccgagttcaacggcgcagaccttccaggggaaggtgacgcttaccaacgatctccgcatggatcttcagcgcgaaacgcccctgcagttggttgtgccgcgacgggggcagaacgccaggctgctgttcaacgcacaggccggggagtctctgtcctttcaggtcatgggccaggcgacgctgcctgccggtcgatacgtcaactacgcggtttacaagccggatgggaccctgttctccagcgcgaatgtcaccacccatcagttcttcaatcttccaagcctaccgcagacgggtcagtacttcgtatttgtcgatgcagactttggggctgcctctaccgctcgcgtgattcttagcgaaggccgaggaggtggtggggaagtggacggcgaagtgggtgacttccagaccgagtccggtgggcagtctgtctacttcaatttcaccgccaccgaggtggatcagcgtcttggcatagggatcagcgacctgaccctgagcaatggaaactatgtctgggtctacgtcttccagcctgacggcacctccctgggcacaaccacgtgttatcagtccgacggcgggtgcggcatcaatgttcgcgcaaccaaggtcggtcgctacagcgtcagggttgagccgctcaacgcgacacagaccatgcggttgcgggccttggtgacaacggatctgcatgcagatatcgcccgcgagtcgccctatcagctctcgacgagccgtcgtggcatgaatgcgaggctctacttcaacgcggaggcaggcgagactcttggcatacagatcgccggccaatcaaccgagccgtcggcgaagtacgtttcgtatcaggtctacggccccgatggcgcgctgctgaccagtgtcaactccgcaggttccgatacgcttcgcctcccgacgctctctgcttcgggacggtacatgctctttgtggatccggcccatggtgccacgctgcagagcagaattaccctaacctcggggcggcagagtggtcttgagatagacggcacagcgggtggatttgtcgcccccgtcgcggggcaaccagcgctcatcaccttcaccactacgatcgcagaccaacggcttgggcttgggattcgagatctgcagctgagcactggctcgtacgctaatgtgagcgtgtatgggccaagcggagatctgctcgtaagtcgtgcatgccaactcagcgatggtggatgcgacctcaatatccgtgcgcccaaagtgggtactcacatggtggttgtcgcgccgcagcttgcatcgcaagcgatgcgcttcacagcatttcttagcaatgaccagatcatcgatctttcccgtgagcaaccactcagcctgaacatctcccggccgggccagaatgcacgcctgaagttcagcgcgaacgctggtgacaatctggcgctccagatcagtggtcaaaccagtacggcaaatcgaacggtctattacaccgtctacaagcctgatggaaactcgctcacaagcatagggaccagcgctttcgaaagcctgaagatgatgaacttgccggctgccggagaatacttcgtcttcgtggatccgagctatggcgccacggttcaatcacgcgtgctgctgacggctggcaacggaactagtccggtcatcgacggcgagtcgggccaggtcaccaccgcggccggagggcaggcaacattcaccacattcaaggtcgatgaggtcgatcagcgcctgggtatcggtatcagcgatctgcagctgagcaatgggagttcggcggtcacggtcacgcttgcgaggccaaatggcgggtcagcaggtagcgtcacgtgctatcagtcccaacagggatgcgatctcaatctgcgtgcgccggaggccggcatctacggcattgtgatgacgcctcatgaagccaatcagacgatgagctactcgttgacggtcagcaatgatctgcgtcaggtattgtcgcgggagacggcgcagacgttgaatattgcacgtcgtggtcagaacgcccgcatgacgttcaatgcccaggcgggagaaacgctggccctgcaggtcgcagggcaggtaacgcaaccggcaggcaggcaggtcgtctacggtgtctacaagcctgacggtacgtccctgatcagccgaagcacgtccagcttcgagacgctgaatcttccgtctcttcctgtcagtggcgagtacctggttttcgtcgatcccaactatggatcgacggctacgtcgaaggtcaccctgacaacgggggcagggggcggaacagagatcgacggcggtcagggcgagtttgccaccacggttccagggcagcccatctacatgaccttccaggcaactgcaggcgagcagttgggccttggcatcagcgacctggctgtctccaacggaagttacgtcagtgtggcggtctatcgcccgaacgggaacacggctgccagtgctacgtgctacgtgtcggatcaagggtgtgcgctaggaatcaatgctgtagagagtggaacctacagtgtggtgaccacgccgcagagtgccagtcagacagtgcagtacaaagccaccttgtcgcgtgatctgcgcattccagttacgcgggatgttccactggatcttgtgatcgcgcgccggggccaacgggcacgcctggggttcaacggcgaggcgggcgataccctctcattgcaggttgctggccagagcacgcttccggcaggtcgatccgcctactacagggttctcaagcctgacggaaactcgctggactcgttcagtgcaacggggcacggttcgctggaaatgcggttgccggtatcgggcgcttaccaggttctggtggagcctcgctatggtgaaaccttgaatagccgcgttacgttggctgtcggtaacgcccaggccgttgacggagatcccgcctccgtagagacctctcttggcgggcagtctgtccgcgcaaccttccaggcaacggcaggccagaagctcggaatcggcgtgtacgacctgtctctgtcatccggctcatatgtgaatgtcgctgcgtatcgtcctgacggaggtctggccgcaagtacgagctgctacgccagtcagcaggggtgcaagctcaatgtccaggccaaccagtcgggcatctacagcatggctgtcgtgccaacctcggccaatcagacgctttcctacaagtggatggtgtcgcaggaccgaacgggtactctgactgccaatcagccgctggatctggtactgccccgtcgaggacagaacgcgcgtctgagtttcagtggtgcggccggagaatccttctctgtacaggtttcagggcaatcgacaactccggcagataggtccgtctactatcgcgtctacaagcctgatgggacttcgctgagttccttcagtacgacgaactttggggcgttggagctgcgtcttcctgttgccggcgagtaccagctgttcgtcgactcggcatatggggagactgtgaccagtcgattgacgcttgatgcgggtgaccctcagtcgattggtggtgagcccgccgcagtggagacgactcatggtggccaatcaacgcgcggtactttcgatgcggtggcggggcagcagcttggagtcggcatctatgacctcagcgtgtcgtccggcagctacgtctacgcaaccatctaccggcctgacggcagccagttgaccagcgccaactgctacgtttccaacaagggctgcaaactcaacgtatccgtcaacagcaccggccggcacagtgttgtaatcacccctcagtctgccggccagacattcgcatacacatggctggtctcgctggatcaggtcggagtactgctgccgaacgaacccctgaatcttgtgcttccgcgtcgcggccagaacgcgcggctcagcttcactggtgcggcgggggatgcggtcgctttgcaggttgccgcgcagacgacattcccggtagatggaacgatctactatcgggtagtcaagcccgatggcggcacgctggtgacgatgggggcaaccgggcatggctcgcaagagttgcgactgcctgttgcagggacctaccaggtgttcgttgacagcacctatgggcagactgtgagcagccgggtcaccctcgcttcgggcgcagtccagctgatcggtggcgagcctgcagctgttcagacccagcatggtgggcaatcaacacatgccaggttccaggcaaatgcagggcagcggctgagcatcggcatccatgacctcaccgtatcctccggcagctatgtgagcgtcgcggtctatcgccccgatggtgccgcgtttaccagcacgacctgctcggcatccaatcaaggctgcaagctcagcctggcgccaacggtatccggaacctacagtattgcggtcactccacaatccagtagtcagaccttcgcctacaagctcacactctcgcaggatattgaaggtgtcctgcaactggatcggccgcatgatctttcgatcggccggcgagggcagaatgctcgattcacttttgacggccaggccgggcagtggctgtcgttgcagatcgcagggcaggtgacgctgcccgcggagcgcaccatctactaccgcgtataccggccagacgggacccagtggacgagtacctatacctcatcctttgaggccttgcgtcttccggtcttgccggcaacggggcagtactcggtggtggtcgactcaacgcatggcgagtccctgcaggcgaggctgacactcgcctccggtgccagcggactacgtcttgacggcagcgacgccagcatcgtgaccgacctgggcggccaggaggtattcctgacgtttggggcaaaagccctgcagcgcgtcacggtgggcctttcgaatctccacgtctcaagcgggacctacttcgccgcctccctccatgggccggacggcgtgacctcaagtgcaaactgttacccgcagaatggaggctgtcagatgaagctgacagccaacgttgatggaacctaccggctgtacgcccggccagtttccggcaatcagcagatcggcttcacggcgacggcatccacggacgtgaccggtgtgctgaggaagggtgcaccgctgttgctctcgctgccgcgcgtggggcagaacggttggctatcgttcgatggtacaggtggtgaaaagcttgccatgcacttcaccgacccggtgacccagccgtcaggcggcaacgtctactgtgtgatctacaagccagacggcagtgcactcaccggcgcgaacgtcactgcgaaccaggtgctgcaactgccggcactgcccagcggcggaacctaccgcatgatggtcaatccggactacggaagacctctgtcaatgagtatcgagttgaagtag

SEQ ID NO: 516078 - DNA, 4131 bp, Stenotrophomonas maltophilia
atgcacgaaggcgtttggacgccagggcaggacaacttgggcgaccattggcgcatgctcggccggcaaccggaactttcctacctgggattcatgccagccttctacaaggcacttggtaagactgccctggccggaacggtgctgcgcaccgatggcgtgccagtggccggtgtggctgtcagtgtgggttccaacagcgcccggaccaaccagagtgggcagttccttctgtacgatgtccctgccgggcgccagcgcgtctatgtcgacggtacgactgccaacagtgctggctatgagtacggacagttcgttgcgggcgtggatgtgaaggagggtgagctcacccaggtcccgttcaccatgtggttgccgcgcatcactgagcgggacaagatcaagatctcctctcccagtgccaaggacctgacgcttactcatccggatctaccggggatggagctgcatcttcctgctggcacggtgattcgggatcagaagggcaagatcgtgacagaagtggcgatcgtccccacgccgatcaaccgctcgccctatccgctcccggcgaacttctccatgtacttcaccctgcaacccggcggcgccgttctgcagggtcttacgccgaaagctggcaggggagccactgtccactatccgaactacgaccgtcatccagaagggacgcgtgccgacttctggctctacgacgccatggaagggtggcgtgtgtacggccaagggcgggtaaacaaggaagagactcagttcgtcccggagccgggagttgcgcttcacgaagtggtgagctttggtgcggcggtcagtccgaacgacccggctccggaggaggggatgcctccagacccgcaggagtgcggcgaatgcaatgccggtaccggcagcaacgcgacagcgggtgacccgattgatcttcgaacagggcgattcacataccaggaaaccgacatctcgattgccgacgtgatgccgctgatcctggggcggaactatcgacccagcgattcggtgaagcgcgagttcggcatcggaactggcgccggcttcaactatcgcattgccaggaagaacagctatgcccagatgcagctcgtacttcccaacggcacacctttggtgtttcagcagacctcgggaagtgaggcctacggcacctggcgctacaacggaaagcatggtttctcgggcgccgtcctcgcctctgaaagcgagggcgggtggaagtaccggctgaaactgcgcgacgggagccagatgaccttcgagcagtacagccccaatcgaatcaagacggttcaggaccgctttgggaacacgatcgagtaccagtacgatgcgggtcgtgtgagccggatagtgtcgccccatgggcggcatattgacctgaactacgatgcccagaaccggatcatctcagcggttgatccactcggtacgacatggcggtacgagtacaacgccttgggtatgctggcgaaggtgatctatccggacagttcgttccggcggtatggatacaagacctatggaaaggcgccggttcagcagcatctcctgaatgagatctacgatcaacgagggaatcggttgctcttcaacgagtaccaagagactgatctgatcgggaccggcgtgatcaccactggggaggtggttcgtcagacgctggccgatggagcggtgtacgcaattcagtacgatcatttcgatggcacgaacaatgggacactggtcacccatccagatggaagtcagcggcgcgtagtgttcaacggtggcctttatccggcatcggatacgctggcctacggcacgtctctcgcccaggagtataaatttgagcgggacgcggacgggcgcatgctggcccggatagatccactcggcaggcggactgagtaccagtacgatggagaggggcaactcgtgcgcacgacgaggctggctggtactccgggtgccattgagtcgcgagcaaccttcaacgcggagggtcgggtgacggcgttgactgatcctttggggcgcgtgacgcacttcgagtacgatcgcgggtgcttgtcgaaagtcactaaccccttgggccatagcagcacatttggttgcaacagctcgggacagctagaaaccctgaccgatgcgctgtcaaatacgtctttcgcatactacgtgggagccgatctggccgccacgcgcgatccattgggccgcggaacgacctatcgtcatgatgcgctggggcgtgtgatcgccagtgaagggccgaatggtgagctggtgcgctcggagtacgacccgcaggggagaatggtcagggcggttatggcggcaggtgaggtagtcgaactcgcttacgacccgaatggcaatctgacagatgtcttgcttccccataacggggggctttcctacgatttcgacaatcgaaatcgcatgatcaagagaaccgatggtcttgggcaagtcgagacgtgggcctatgacgttatgagtcggcctacaaggtacaccgatcgacgtggattcacgagtcactacgaatacgatgcgctcggtcgtcatatcctgaccacctatcacgacggaacgaccgttgcgtccacctatgatgcaggtaaccgaaggctgtcattgaatgactcggcgtcgggtgtcctcgcctgggagtacgacgggctagacagaatcgtgagggtcgtcagcgcacaaggcgaggtgaattacggctacgatctggtcggccggcgcacctcgatggtcgcggacaatcagccggagatgcgatacatctatgacgacggtgatcgactgattggtcagcagcagctcggtgaggtggttgagtacacatatgactcagtgaaccgaagaacgagtatgacgctgcccaaccaggtgagggcgggctatgcatacaacgaaggaagccagctgactggccttgcatggagccgcggggggcaggcacttggtaatcttggctacgcatatgacaatcggggtcttgttgtttcccagaccggaaccttctcctccaagtctctcccaagcgctagcattggagagaacagcttcgatgacaatcagcggcagacacgctacaacggccagacgttgacctatgacgccaacggcaatctgctgacctacgaaggtcgcgtccttgagtggaattcccgaaatgagcttgtgcgcgtttctgaggctggtgaagttgtcgctgagtacaagtacgatgggctcggtcgcagggtgacgaaagccgaaaagggggtggtgactagctatctatacgacggcttgactgctgtacaggagacgcgcggcggagctcgtaaccctgtttttacaggcctgggagtggatgagaggttcgctcgcaatgcggggggggagcgggcgtatttcttgacagaccatttgggaagcacgatcgctctttcaagtgcttcaggagatctgcttgtcgcgtacgatgccgatccatacggtggctcaagcagtacccaaggctacgacaacccgtataggtacaccggtcgcgagctcgacgagaacggcctctactactatcgcgctcgctattaccattcaggcatggggcgattcatctcagaagatcccatcgggcttcgtgggggggtcaatatgtacgcctatgtaagcggcaatcccgtcagcgcaattgatccgcttggcctaaggaatgtgcataagaccgccgtggcagttggtaatgctgtgaatgccgggcggctcttttccgtgggcacgctgcgtgttgcggccggtcttggattggaggggacgggcgtaggggctcctgccggatccgcgaccctggggctgggagtatggaatctcactagtgggcaaaaagcatgggcccgcgcgcagcagcagtgggctgaagcggcatgtgaggatagcagcaactacacgaggggcgaggttatcaagacatattccggacttctcccctggggaaccgagaccgacgatcctaatgagcctttctggatcgaggtgctggagcagcggatcagggatgcccggagatctccgtgggagtttattcaggaagtggggacaatgggattatga

SEQ ID NO: 516079 - DNA, 843 bp, Stenotrophomonas maltophilia
atgagccatgtgcttaaggcaaaccccgagctgggcgcggatggcttgggaagcggcttcgtcttcagcgctccagccggacgccgccacttcggcacgtgcctgggcggcgatggccgcctcgcgtgcactgcgacgggcagactccccacgccggtcgaggcaccacgaaacgagctttgcgctgccaatcgatacggccgcaatggccgccagcagcacgaaggaaatgagcggatcgatcatcccggccccctgccccaagcccccaagggaacccgccaacagccttggggtgccggtggcgggtgtgatgtatctacatcacgcgccgcatgtaaactgatcccatcacgtcgtgtcaataggattcatcacatgaacgcccttgcagaacttcttgacgcagtgcgggaacggtcgggactcccgtccgacatggctttggcgacgaaattgggaattcagcgacagacgctgcaccaagcgagaaagggcgtggccggtctgtctgatgagcgaattgcgcagctctgcgagctgggcaagctcgacggtgccgtgtggctggcgaagattcacgccgagcgagcgacgtcgccggtggagcgcagggtctggcgctcagtgttggacaggctaagcgcggcggcggcagtgctggtgctcgcagtgatcgcagtgccaggcgccgcacgcgctaaagccattgaatcacaaggcttttccggctccgatcagccgcattctgtatattatgttccaaggagctcagcggtggctggcacagctccctggctcctacactgccatggagctcgatcgtgcgttatcggaaactga

SEQ ID NO: 516080 - DNA, 279 bp, Stenotrophomonas maltophilia
atgcccatctgcaccgtaaagaccgccgctgttgatgaacagcgcaacgaaaagcacggcaccatcatccgctcccagatggtcggcctcgacctcggcaacggctatgagctgccgttccgcgtgggtctcggccagcgcccgccgtatccgcccggcgtgtacgacattgatccgaaatccttcgcgctgtccccgtatggcgatctgacgctgaagcggtacgtggacctcgttccgctgcaggccaaggccgcagccgtcccggcgaagccgtaa

SEQ ID NO: 516081 - DNA, 1377 bp, Stenotrophomonas maltophilia
atgcgctgggtatacgcgcacgtctttgttgcggtcgcgctggtggtaatgggcttctggccggaggctgcgtctgcgcgcgatactgttcaatgcactagtcagcgcaaaccggtatgtacgatcgccgaggcgaaagccgagtgccaaggctacaacccgcttccctatgacaacttcgtcaagatcatcagtcgtagttgcgaggtagatcagcgcggtagtgacaatgggcgagtgactcttatcggaaccttcgagcgtcacaacggtgcagtggtcgtgcactacaaccaaacattcgaatggctccaggactgcaagaaggagcctagctacaccggcaccggaccatggtctacggagggcgccgcgcgttctgggtcgttggggtgtcgcaacagctgcgacggattctggggtaagaatgcggattccacatacacgtgggaaagtaccggcagcgtctgcccaaacgacgaaaagaagaactgtgaactgctgggcgccagctactactggaatccaatcttgcgagtttgcgagccgcctgattcaaagtgcaagggcggcgcgaagccgaattcgctcggtcaatgcgcgcccgagccgtgccccgaaggcatggggcagcagcccgatggaacatgcaagaagaaggagaacgagtgcccggccggtcagattcgttcacccgatggcaagtgccttcccggcgacggtcagtgtgcaaagggcgaagtgcgcggccaggacggaacgtgcaagaaggacgcggacaacgatggacagccggacccggtaaccgatgagtcgttcagtggcggcgacgattgcaacgctccgccgtcgtgcagcggctcgcccatcatgtgcggtcaggctcgcatccaatggcgcatcgactgcaacacccggaagaaccgaaatatcgcgggtggcacctgcgcctccatgccgatctgtacgggcgacaaatgcgatgccatggagtactccgcgctgctcatgcaatggcgatctgcctgcgcgctggagaagctggcgcagggttctggcaacgggggcggcagcgagaatgccgatgtcaaggcgattcgtgacgccctgaccggcacaggaggcgcggtcacaaccgcaccggatcggccaagttccgacgtatgggcgccgcgcagcggcacgccggtaaagcctgacacgggcggatacggctggggccgcagctgcccgcagccgcccagcttcgaagtgttcggaaatgtcatccagatcaacacagcaccgctctgcaactggctgattctcggtagctacttcgtaatggggctggccgccttggcctcgcttcgcatcatcgcaactagggacgcttga

SEQ ID NO: 516082 - DNA, 1272 bp, Stenotrophomonas maltophilia
atgcctatcgaactgttcaccggtcagccgggcaatggaaaaacggcgctgatgatggagcgccttgtcgccgaagcaaaggcggcgagccggccgatatttgctgctggcatcaatggactcagtcctggactcgccaccgttcttgacgatcccacgcgctggaatgagatagacccgaccgttgagggtacgtgcgtttgcggcatcgagttcaccccggatggaacaccgattccacggccaccgcacgctcatactttggtgccggatggctcattgattttcgttgacgaagcgtggaagtacttcggccacttgcacaacgcaacgaatcagaagacgcccaagcatgttcttgcgttgagcgagcatcgccatcgcggtatcgatttcgtctggacgacgcaacagcctaaccagctttatccgttcatcaggggtctgatcggctcccatgcacatgtggttcgccgcttcggaaccaagatgatcgatgtgtatcgctggggcgagttgaacgaggaaatcaagtcgtccgccaagcgtgagcttgcacagcgcacgacacgcctgctgccgtcgcagatatacgggcagtacaagtcggctgaggtgcacacgatcaaggcccgcattcccttcaaggtgatgctgttgccggtgctggcggttgctgccatcgttttcgcctatctggcatacacgtcgcttcgtccctccagcttcgtcggtggcgaggggaaagagggggcgcaatcggcgtcagccgatgcggccccttcgcccttccgtccagcgggagccaaggaaggtgcgccgcgctggccgactgccgctgcatatgccaaggatcacctgccgcgcatcagtaccatgccttggacagcgccggtctttgatgagcggcaagcgcgttcggatccgcagttgatatgcatgtcgtcgttggaggggctggacgctcagggggttcgtcaggaggccagttgtcggtgcttgacggagcaggggactgcatacgaactcagccagccagaatgccgcacgctggctcggaacgggccggtctataacccctatcgggagcgttcagaagagcgcagcgtccagcgtgttgaggatctcgatcaatctcggccgagtgcagcaacgggacgtgtcgggggtgttgcccagcacgttgaacgttccatgggcacgtttccagagtcgccgtcctatcgatctgattcctacatgaccacggcgccggggccgaacaagctgtga

SEQ ID NO: 516083 - DNA, 627 bp, Stenotrophomonas maltophilia
gtgaccagtagcgcgcgcgaactgttgaagtggctggccgtgatcctcatgaccggggatcacgtcgccaagatcatctacggcgggtacgtgccaggcatcagtgaagcggggcgggtggcgtttcctctgttcgcgctggtgatggcctacaacctcgcccagcccggcgccgacgtggccaagtccgtccgcaggttggctctgtggggcgtcattgcccagccggtccacacgctggcgttcggctactggttgccgttgaacatactgctcacgttcgccttgtgtgctgccgtcgttcacgccgctggccagcggaaatgggttgccctggcattcgccgcggcggcgctgccggtgttcgtggattaccagtgggccggggtagggttcgtgttgctggcgtggctcggattccgaacggcgcggccggggctgatcttgggggcattcgtgcccctgtgcgcgttcaacgggagcctgtgggcgcttgcggccattccggtggccatggggctatcccatgcagcgtggcaggtcccgcgtggccggtgggccttctatgggtactacgtggcccaccttgcgtgcatagggctgttggcgcctatactgcggccatga

SEQ ID NO: 516084 - DNA, 339 bp, Stenotrophomonas maltophilia
gtgcgtgatcgcaacctaaccggcccttgggccggtttctcgtttaagggtggccgactggtcacgcccgagggccgcgagctgctgcccgaggatctggcctggctctcgctcacagctgcgcaagcgcaggaatggcgtcggatgatggagagcggtcgcgcgatcggcaagacccggaagcccttgtccttcaatgccgccagtgtggtgaacctctccgatgccttggcccagcgcaggaaaaagcggtcgtcggtggcgatggctggccccgacgccgagccaccggcagctgtcctaccggtgccggggccgaaacaccgccagcgcgtgtga

SEQ ID NO: 516085 - DNA, 171 bp, Stenotrophomonas maltophilia
atgagcaggtatccgtcattcgctgagttggctgagttcgatatgggccttgccgcagtgaccgcctttgtggccctggtagtcgggctggcgatcattttgatagtcattgagcaggcgtggctggcacttcgctactggttcaagcggcggaagggcaatgtccgatga

SEQ ID NO: 516086 - DNA, 2157 bp, Stenotrophomonas maltophilia
atgatcgcgccagatgtccaatgtaaacccacgctgggcgaggtccaacagatcatcgaggacttcgatgcaatccatccgccgcaagacgagcgcgccgctgcggaagccatcggcatcgcaacccagggcaaaggccttgcgcagtggtcaggccttgtccacgagcgcctggacacattgagtgctcccgaccagtacggagtgcgagagcatctgcgtgacctcacaaccgagcttatctatgcgcacgtgctttctgatcggccgttcgagccgctaatgaagacattgggtgcagctagctcgatctccacaccgctcggtgatcgcaagtcctcggaaccgatcgaatggacgaacttgatccacgccgctcgcgtgcagtcgatcttgacgcagcggtacgttgaccacctggacatgcattatccgcgtgagttcgcggttgcgctcgcagcgcgacgccttcgcgaccgtggctttcctgtggagcagaaccgcacgcatcttcgcctcgggcaacaagctgaagaacggctgatcgcacgcttggatgaactggtcaacgagctaggtggactgaatttacttcggcggctgttccaaaaggccgctgcaacctacgatgccagctcggagcgctacatgatcgtcagggatacgagggttgggcgcccgcgtgcgcccgacttcccatggggttacctcatcgcattgggcgccaagcacctctgtcgccgcaatggccgcaggccttctgatgaggcttggcaagaactcgtcggtcttgcgacagatcttgccaccctccatgacgtgcaggactacgcaccgccaatatttgcgcagatcccgaccgaaaagctcgttgccacgttgacgagacgagcgctctacgactcgattcacacctttccgcaactacgctcaagcgatgtgctccgcatgcttcgaccgctattgggtgcaattccctcaggccaagcattcggccccggctggacgacagatgacgtgttcgccgtcatcgagcggctgtacttagccataggagattgccgcggcccgctcactctcgaccttcgccacatcgccaagaccgttccgggcgtggcgcctccgctggccaaacgcatcctgctcgacgttctatcacacccctcgacgggcccaaattcgaagttctgttttccgaccgatcaggccgtgcgaggcgaagacccgctaaccggtccaggcaacagcctatacttgcgccctctgatccggctggatagcagacgcgcaataatcgtagatcgctccgtggccggcccgggcatggtagaggcggtgctaagtgctgttcgcagccaggtaggtgccgattctttccagggaaaggtgattggtgcaggagccgaggctctcattcggcacgagttccagcggcacggcattacgcttcacaccggcgactacgacacaccaatggctcatggcgaatgcgacgtcgttatcgatgaacccggaaatctggtcttcattgagtccaaagcaaaggccctcactcgaaacgccgccagcggcaatgacgtcgatgtactgctctcgctcgccggtagcgttgttgcggcgatggaacagtcttttgggcatgaggtgcagctgcgaaagtacggcaagattgagctttacgatagggatggtcgcaagccgatgcacactttgacgtggtcgggtcagaccgtcgatcgcatcgctttgtccctgtacgactttggattcttccaagatcaaactgcgatatcgaagttgatctggccaatgttgaatgctcgctacggagcgattgactctgcagtccaaaagactttcaagaatcaatttagaacgctgaacgaaaaggtgctgccaaagctcacaagacatcttcagatctggaatgagcttggccttcagaaggaagacccgttccttcttggcaattggttcctgagcgccccgcagctttttgcactgctcgacggaatccagggcccggccgagttcttcgagcgactcgaatgcctgagaaacctgacgtatcaaagctacaacttccaccatcaactccagcatgccttatcccttaggacgaaacgggatgcgagtggcaacgcgggaatgccctga

SEQ ID NO: 516087 - DNA, 384 bp, Stenotrophomonas maltophilia
gtgggctggcgttgggcggccacggcgctgtgcctcgcagtggcggtggcgccgcccgtcctttggctatcgccgtccgtgcccgagcggctggcattccagggcatcgcggatgatcgcttttcgcagctgcgccggcaggcgatggcgttcgtggaggcccggcaaaagcagggcttccggttcgtcgagacgcagcggggtgcgtcgttgcagattcactgcaagggcgttccggtgctgtggctggagcggcggttggagcccttggactacatggaacaggtgctggttggggtgccggagccggtcttgatggatcgggtgttgttggcgatggcgggtgatgtggctggggatgcgcgttgtgagggttggtcgtag

SEQ ID NO: 516088 - DNA, 381 bp, Stenotrophomonas maltophilia
atgatccagggcaagcgaaatctactgctggtggaagaccagctcgacctggcggctctcatggaacaggcgcttggagacggaggcagccaggtaacccacgcctatagtgtgtttgatgcaatggggctgctggagacgcagacctacgatgttgctgtcctggatgttgagcttcgtgacggcgtggtatttccggttgctgatcgcttggctgaacttggcatcccatatctgttcgtctcagcggtgtacgaccagctggtaccactacgccatcgccgcgccaccttcgtggccaagccatttcacattgaccagttgcaggaagcactacagcgcgtgacagggaagctgtgcatcccatcaggcgcacactga

SEQ ID NO: 516089 - DNA, 252 bp, Stenotrophomonas maltophilia
atgagtcataccggcattttcaagatcaccaacctcacctaccggctgggcgcagagggcgggttggcccgtgcgctgcagattgaagccacctgcacggcctgcggggcggccagcgtctggagcgagcaggacatggaacatgtggccggcggcacggtgctggcctgccctgcctgcggcacgcggcaggcgatcagcaatgccggcttggtgagttgcccgccagacatgcgccatccccagcgttga

SEQ ID NO: 516090 - DNA, 816 bp, Stenotrophomonas maltophilia
atgaaccgatggttgttgctggcccttgccgcattgccctgcgccgccggtgccgtggtggtccgtcacgacgttgacgatgcccgctaccgcatcgaggccgccgcgttcccggcactggccgacatgccgggcgaagggcatggcgttctcattgcgccgcgctgggtacttaccgcagcgcatgcggcaccgatggaaggcatgggcgcaaccgtcgccatcaacggggcgaactacggcgtcgaacgggtcgttctgcatcccggcttcaagcgcatgccggaagccctggggaaagaggccatggccaccggcagcgcgtcgaggatccatgcgttcctggccacctccgatgacatcgcgctggtcaggttggcaacgccggtcaacgatgtgcagccggtcgcactctatcgcggctccggtgaggccgggcaggttgccgcgctgatcggcaagggcgctaccggcaccggcgccattgggctggtgccgggtgggtcgcatcgcatgtcgctgcgccgggcctgcaacgccattaccggtggcaatgatcgctatctctggtatcgcttcgacgcgccgccgcaggggctgccgctggagggcgtgctgggcagcggcgacagtggcggaccgctgctgatcaccgtggacgaccgcccgcaactggtcgggctgggctcgtggatcaccgccgtgcccgagcatgcgctggaagcgggcttctacggccagatggtctacaacgtccgcgtctcgcgctacatcgactggatcgagtcggtaatgagcgagagcccccctttgtag

SEQ ID NO: 516091 - DNA, 870 bp, Stenotrophomonas maltophilia
atgtccgcattgcttgccgcgcgggcgcgcgccttcatcaacgccttttcattggaagtcagcgccaaggcgctgccggcgctgcgtgaacaggctgcccgcatcgcacccggcacgctggtctccatcccctatctggccagcgaagacgacgaggcacggctggccgcggcgcgcacggtgcgcgaactgggctttgcgccgatgccgcatgtttccgcacgccgcgtgccgtcgcgcgcggcacttgagcgcttcatcgtccgcgccgtcagcgaggccggtgccgagcgctgcctgctgattgccggcgatctgtccacgcccgctggacccttcgcagacagtgcctcgatcatcgctaccggcatcctcgagcgcgccggcatcaagtcggtcggcatcgccgggcaccctgagggccacccggcgatgggcgatgcgcagcgctggcgggtgctggcgcacaaatgccaggccatcgaagcacgcggtatggcgccgatgatcgtcacccagttcgcgttcgatgccgacctggtgctggcctggctgcacgcgctgcgtggccatggcatcagccatccggtgctgctgggcgtgccgggccccgccagcattgcgcggctggtgcgctacgccacgatgtgcggcgtgggtgccagcacctcgatgctggcccgctacggcatttcaattggccggttgctgggaaccgcaggcccggaggtgttcgtggatcgccttatgcagggcttgcgcgacgacgatggcccggtcagcccacacatcttcccgttcggcggtgtcgccccctcgctggactggatcgacatgtatcggcagcgtggcaccccaggcaaccgctga

SEQ ID NO: 516092 - DNA, 1200 bp, Stenotrophomonas maltophilia
atgaaatccgcacacaggttctgccacatactcgccttggcgctgctgatgccgctgtcggcgcgggcggccacggccgatgatgcgcttgccacgatcgaccgcaacgcccgtgcagcgcactccgatgccgtgctcgtcaggcacgacgggaaaaccctgctggaactgaagcctgcgtctggacaggacagcgttcatctgatgtcagccaccaagtcggtgatggcgctggccatcgggctgctgctggacgacggcaagctggcctcgatcgatgaaccggtcagccgcatctaccccgaatggaaacagggccagaagcagcacatcaccgtgcgcatgctgctggaccacacctcaggcctgcagaacgtggccaatgccggccaggagctggaaggcgcgccagacctggtcaagctggccctggctgcggagttgagccatgcccccggcaccaccttctcgtacaacaacaaggctaccaatctgctgccaggcatcgtgcagcatctggctggtcagccgctggatgcgtatctgcacgcacgtctgttcaagccgctgggcatcacccactacgcgtggatgaaggacgaggccggcaccccgttgggcatggccggcctgtcactgcgagcgaccgatctggcggccatcgggcaactgctgctggatgacggtgtggcaccgggtggaacacgtttgctgagcgcgcgatcagtagcacttttgaccgctgagagtgcacgctcgcccgacgtgggcctgctgtggtggcggattccggcttgggagcgctatcagctgaagccgcagctggccgatctgttgtccgaacgcggggtggaggccggcgtgcaggcggccctgcagtccaccgccgggcgtaccttcgacagcaagaacgcgctggtcgctgccttggccgaaccactgggtcctgagtggccgcaacgctatggcaccgaaatcaccgggcgcgggctcaagctctccgatctctacgacatcgcgcgtggcccggtcgttggctatgccgccaacggctatatgggccagtacctgctggtcatccccgagcagcgcgtagtggcggtgcggctgatccacaggcgtgatacccacgttgcgccacgcgacgactacggcggcttcttcgcggacgtcctccagctggcgcaggccctgcgctga

SEQ ID NO: 516093 - DNA, 1236 bp, Stenotrophomonas maltophilia
gtgaccgaactgccagttgcccctgccatcgccgcgcgcgcggagcgcggtctggatggcctgaacttcttcctcgccgacgtccgagacggactggggccctatctggcggtctatctgctggctgtgcaccattggcagccggccagcatcggtgcggtgatgacggtctcggcggtggtcgccctgctgacccagaccccggccggtgcgttgatggaccgcatcgcggcaaagcgggcggcgcttgcgctggccgcgatactggtcaccggcacctgcctgctgttgccgtggatgcattcgttcacgctgatcgcgttgacccaagcgctcagtgcagtggccgctacggtcatcgcgccggcgatcgcggccatctcgctgggtgtaggcggtccccgcgccttcgcccgccggatggggcgcaatgaaaccttcaaccacgccggcaatgcagtggccgccgtgctggccggtgccctggcctatctgtggggcccggtggtggtcttcccgctgatggcagtgctgaccgtggccagcctcgcggcgctgcgttcgattcccgggcaggcgatcgacaaccagcgcgcacgcggcatggacgctgccaccgacaccgatcacgcgcccgcgtcggcacgactgctgctgcatgaccgcaacctgctggtgctggccgcatgctgcgcattgttccatctggccaatgccgcgatgctgccgctggtgggccagaaactggcgctgagcgctcccgccctggccaccacgatgacggccgggtgcatcgtggccgcgcaactggtgatgatcccgatggcatggttggtcggggcgcgtgcagacacatggggacggcgcccgctgctgctggcaggcttcctgatcctgccgatccgcgcggcgctgtaccccctgtccgatgcacccacatggctgctgggcgtgcagttgctggatggtatcggcgcgggcctgttcggcgcgctgctgccggtgatcgtcagcgacctgaccgaaggtaccggccgcttcaatgtcacgctcggcgccgtgtccacggtgttcggcgtgggcgcggcattcagtccgggcctggcaggcctggtggtgcagttcgcagggtatgatgccgccttccttgcacttgccgtgattgcagcgggagcgttcctgctggcgatgcgcgtaccggagacgggccgcgcatccgcaccgcagcgcagctga

SEQ ID NO: 516094 - DNA, 1167 bp, Stenotrophomonas maltophilia
atggacgccacaccgaacacggcccgaaaccgatggaggcttcacgccgtcgtcctgtccgccgcactgctggccgccggctgcgccgatacagcggtgccggcccaggatccgggtgcggatatcgaagcggtggcccagaccctgatcgagcagccattgctgcactcggcctcgatcggcgttgtccaccgtggccagacgttcatccgtcatcgcggcgccatgcagtccggaaaacccggtgcgccgaccgatgccaccctctatgagatcggctcgttgagcaagaccctggccggcacgctggtggccaatgcggtgctggaaggcaagctggggctggatgacgacgttcgcacctacctgcagggcgactatccgaacctgcagtaccagggcgcgccgatccgcatccgccacctgctgacgcacaccagtggcctgccgaacatgctgccggagcgcgcgaacacgatactggccgacttcaccgatcaccgcacaccggctgagctcaatgccctctacgccggttacggcaaggccgatttcctcagcgatctgcacgccgtgcggattccccgggcgccgggcaaggagtacgcgtactccagcgccggatcccagttgaccgcgcacatcctggaacgggtctatgggcgtgactatgaggcgctgcaacgtgcgttcttcaacactgccgctggaatgaccggcgttacgatcaccctcggtgacgccgacgcatcacgacttgcggtcggctaccacagcgacaatccggtgccgaccacacccatgccggagttgccatggggcgcatccggcaacgtgaaggccaccgtgcccgacatggtgaagtacctgcagttccaactggccaacgggccggtggtgaaggagtcgcaccgcgccctggcccggttcgacgacgaatccagcatcggctacttctggaacatcgttgccggcgatccgctgacgggcacctactatgcccatcatggcggcgtgccccgctcgcagtgctacatctacatcatgcccaagcacgacctgggcatcttcgtcatcaccaaccagagtggcgagcagaccgcgcacgccatggaagcggcgattgacaccctggtcgagcggatcggcgcgcgcaaccggcgatag

SEQ ID NO: 516095 - DNA, 474 bp, Stenotrophomonas maltophilia
atgagcgacggcgcgctgcccgccgcgcttgcgcccctgcagcaatgggccacacgtgagcggctgggacgcgccacgcagctggcgcagtcgcgcattgatgccttcgccgatgcaactggcgaccataactggatccatgtcgacccggcgcgggcgcgcagccacctgcccggcgggcagaccatcgcgcacggcttcctgctgctgtcgctgacggtggaggacgacgtggcggccctggccggcttccctggcattgcgcatgtgctgaattacgggttgaacaaggtgcgcttcctggcaccggtagccagtggggctgaagtgcaggtgcgctcgcggctgctgtcgctgcaaccgcgccagcccggacaatggctgctgacccagcacaaggcggtcgagcgggttgccgatggcgcgctggcagtggtggctgagcagctgtcactgatcgtgctggccggctag

SEQ ID NO: 516096 - DNA, 3330 bp, Stenotrophomonas maltophilia
atgttgacgccctctgtcgtcctgttcgcctgcattgcgtggaccgtactgctgttcggcgtggcgctgtggggcgagcgccgcgggcatcggctggcccgggtctggccggtgatctatgcgctgtcgctggccgtgcactgcacggcgtggacctactacggggcagcctcgcagggcgtgcaatggggcgtcccgattccgccgacgctggtcggcatggcgctgatctttgccttcggcctgcccttcctggtgcgcctggggcggctggccaggcagcacaacagcgccaccatcgccgacctggtggtggcacgcctgcgcgccgaccaggggctgggcatgaccatcaccctggtggcactgttgggcatcattccctacatcgcgctgcagctgaaagcggtcagccagggcctgggcgcgctgctgggcgatcgcttcgcgcctgcgggctggcagctggacatgtcgttctggttcgcgctgacgatggctgcgttcaccctgctgttcggcgcgcgcaaggcctcggccaccgagcacaatcatggcatcgtggtggcgctggggctggaatcgatcctgaagctggtggcgttgctggccatcggcctgtacgccgcgcattcggtgcagcaggctggaacgccgctgatgcagaagatggcgcagctgccagcgccggtggtgttgccggactacctcaccatggtcgcgctcggtgcgatctctgccttcaccctgccccaccagttccatgtgggcgtggtggagctgcgccagccgtcggacctgaagacggcgcgctggatgttcccggtctacctgctgctgatcggactgccgtcggtaccgatggcgctggccggcagcgcggcgttgccggcgtcggtatcgccggatctgtatgtgctggccctgccgcaggccgacgggcaccacctgctggccctgctggcctatctgggcagcctgagcgcggccaccggcatgatgatcctgtccggcctgacgctgtcgatcatgctcggcaaccatggcttcggttcgcgcctgctgggcgggatcgaacacggtgtggccagcgccgacctgcggccgcgcgtgctggcgttccgccgcgccggcatcgttgttgtgttcctgatggcgtggctgtacagccgcgcgatgagcggcaccgaggcgctcagcgacttcggcctgatgtcgttcaccgcgctctcgcagctggcaccggcggtactgctggcggtctatcgctcgcgcacgccctccccggcgatcatcgccggtatcgtgctgggctcgctggcctggctgtggctggtgctgctgccgatggtgatccccgccgcatcgccgtcggccgacactgacgcgctgcactggctgagcgtggtctcgctgcgcctgcagccggggcatatcgcgctcagcatgggcgccagcctggcggtcaatctgctgaccgtggccctggtggcacgcgcggtgcggccggcattgccgccccgccaggacgcggtggcggcagcctcgttgcgcaggaccgcaggtcgtttcctggggcaggaacgtgcgcgccagttgatgggagggcacgccggacagctgctggatgacgatcgggtcacggccatcgaacgcgagctgacggcggtggtcggcgctggcatggcccggttgctggtcgaagcggcacgtgacggcggtgccgccccgctggaagcggtcacccgcgcggtgggtgaagccacccaggtactgcgcttcaaccagcgcctgcttgaggcggcgttggagaacatgagccagggcatcagcgtggtcgatgcgcagttgcagctggtggcctggaacagccgctatgccgcgctgttcaagttcccgccggagctgttgcaggtggggcagccggtggtgaacctcactgcgtgggcgctggggcaactggacatcggcaacgcggccggtgattcgcccgccagggcattgcagcgtcgcgtggcgcacatgcgccgcggcacgccgcacctgtccgagcgtgtgttcccggatgacacgatcgtggagatccgcggcaatccgatgccgggcggcggctacgtcgccacgttcaccgatgtcaccgccttccgccgtgccgaagatgcgctcaagcgcagcaatgaaaccctcgagcgccgcgtgcaggagcgcaccgcgcagttgcagcatgccgtgcaggaggccgagcgcgccaatgtggccaagacccgcttcctcaccgccgtcggtcacgacctgatccagccgctgcacgcggcgcagttgctgaccgatgccatgtcgcagcacatcgaatcggagttcctcgacagcttcctgcgccagatccgcagcgcgctggattccaccgatgacctgctgtcggggctgctggacatctcgcgcctgcaggccggcggactggtcgccgatccgcgaccgttcgccttgtcgagcgtactggacccgctggcccaggagtttgccgtgcttgccgcagcccgcggactgcatttcggctatgtgcgcaccggtgcctgggtccacagcgatcctttgctgctgcgccgggtgctgcagaatttcctggccaatgcgatccgctatacccgccacggcggcgtgctgctgggcgtccgccggcagagggagcggttgtcgatcggcgtgcacgacagtggcgccggaatcgcagcggagcagcaggcggttgttttcgaggagttccatcgggtcgaccgcagcaacggccagggactgggcctgggcctgaccatcgcccgcggcatcgccgacctgctggacgcaccgctacaggtgcgcagtgcgccggggcgcggctcagccttctcgatcagcgtggcacgcgccacgccaccggccatgccaagcgccgtgccggcggccatcggcaacagcaccctcaagggcgttcacgtgctgatggtggacaacgacgaagaggcgctgcaggcgctgcggcagctgctgctgtcgtggggatgcgaggtcactgcagtgacggacgtagcagccatcgggtcctcggcgcagcaggctgtgctgtggctgttcgactaccacctggatgatggcgataccggcgtggcgctgtggaagcgccaggcggccctgtacgggccccgccccaccgtgatcctgagcgccgataccggcagcgccacccgcgacgcggtgcgggcggcgggcctgtcgctgttgagcaaaccgttcaagcccctggccttgcgctgggcgatcaaccatctgctggcaacggccagcaccacctga

SEQ ID NO: 516097 - DNA, 1644 bp, Stenotrophomonas maltophilia
atgccatccacctctgatcacactacaaatgcctatccgctgctgatcaagcagctgctgctgacgccactggcggtgagtccccagcaggagatcgtgtgcggcgaccatgtccgcttcgactaccgcacgttgcaggagcgcatcggccggctggcgggcttgctgaccgcgctgggcgtgcgacagggcgataccgtggccgtgatggactgggacagcaaccgctatctggaaagctacttcgccgtgcccatgctcggcgcggtgctgatgatggtgaacatccgcctggccccggaacagattgcctatacgctcaaccacagcggcgcgcgggtgctgctggtccatcgcgagttcctgcccttgctggaaagccttgacgggcagctgccggacatccgcacgcgcgtgctgctgcaggatgacgaaggcccggtgccggccggtttcgctgccgagtacgaggcgggcctgcgccaggctacccccgttacggattttccggagttcgacgagaacacccgtgcgaccacgttctatacgaccggaaccaccggcctgcccaaaggggtctatttcagccatcggcagctggtgctgcattcgctggcggcgatggccgcgctgggcagtgccgccagccagggccggctgcaccgggatgatgtctacatgccgatcacaccgatgttccatgttcacgcctggggggtgccctatgtggccacgctgctgggcatcaagcaggtctacccggggcgctacctgccgggcacgctgctggcgctgatcgcgcgcgaaaaagtgaccttctcgcactgcgttccgaccatcctgcatatgctgctggagcatcccgccgcagcggataccgacctgagccgctggaaggtgatcatcggcggcgccgcactgccgcgttcgctggcacaacgggcgttggcgcgcggcatcgacatcttcggcggctatggcatgtccgagacctgcccgctgctgaccctggcccagatcgacatcgacgccgctgacgggccggagcaagcgctgtcgctgcgcaccaaggcgggcattccggtgccgctggtcgacctgcgcatcgtcgatggcgacctgcgtgatgttgaccacgacggcatcgccaccggcgaggtagtggtgcgtgcgccctggctgacccagggctatctgcacaacccggacgcctcggccgcgctgtgggacggcggctatctgcataccggagacatcggcaacatcgatggcggcggctacctgcgggtcaccgaccgtatcaaggatgtgatcaagaccggcggcgaatggatctcctcgctcgcgctggaggacatcatcgcgctgcatccggcggtgagtgaggtggcggtgatcggcatcgccgatacgaaatggggcgaacgcccgctgccgctggtggtcacccacgccgacagcgaggtgagcgaggccgagatcatcgagcaggtggcgacgcgcagtcgcgccggcgacatctcccgcttcgcgattcccgaacgcgtgcagttcgtggcctcactcgagcgcaccagcgtcggcaagatcaacaagaagaagctgcgttgcctgcacgatccggcggtgagaagccctgactga

SEQ ID NO: 516098 - DNA, 270 bp, Stenotrophomonas maltophilia
atgcgctatctggtcgtactcgacccgcaatccaccaccagcaagtgctacgccagcaaggggccggacggcacctggtttggccagccctgcgtggtgtgctccgagcttgatgcctcgcaccccacctacctgttcgcggcgcgctcgttcatgcatggtgcccgcgccatcaaacagcggatccactttccgcatgaagcggtggcattcgtcatcgaggacgagcacgaaaccggcagccacatgggattccgtcagctggcctga

SEQ ID NO: 516099 - DNA, 1221 bp, Stenotrophomonas maltophilia
atgaagaacggaattctcggtggatcgctgctgctggttacagcgctggccacgccttttaccagtttcgcgcagagcggctcgctcaagagccaggccaaggcggcagccaaggagctgcgcagggtgggagagccgatggatcgctgcaatctggcggccaccaccaatgacacggcggtagtcaccagtgtttccggcggcaacgtactgcagccgggcgaccgcctgcttgccctcaacggccaggatttggccggcaaatccaaggatgcagtgggtgtcgtgctcaggggcatcgggcccgacctgaccgtaccggtggtggtggaacgcgcaggcacccgcacggagctgtcgctaccgtgtggcaatgcccggtcgcgcatggaggcggtgctgaacggcctggacgccgccgcgagcggtaattaccaggcgtgcgccgatacgctcagtgcgcgcaaggatctgggtggcagcatggccgtgctggcagcgcagtgtggagaggccgccaagggcatcggcccgtcgcggcaggccgaactgatccacgaagcgctgaagcagcgaatcgccgaggcccagtgggagccggacgcgcgcagcaacatgatcgacgtcatgcgcaagcagcgggtgcagatcgaaaagtaccttggccaggaccgttacgcggagctggtggcagcaaccgcgcgttggccgggggcggaaacgctctacaagcgcaccgaaatcgaccagagccagttccgccgcattgcccaggaagcggtgcgtggccgcctgttcgacccggaatcggcccgcatcgacatgccctatggtttcctgcgcgggagctggaggccgctgctgcagaaggccgtggatggttactggacctgcgggacggtgaacgccaagaaccgcatgggcggctacgtcggaaccaatgcgtttgtcgtggttctgggtgaagacggccaggtgaaatatctggagatgggcaacagccgcgaactggacctggtgggtacggcgtgcgccaaggccgtggcctcactgccgccggcaccggcggaaaccgcgacgcgcgcaggcggcgccggcagcgcaggctcgcttgccgatgaactgaagcagctggccgagttgaaggccagcggcgcgctcaccgaggccgagttcgaagccgccaagcagcgcgtactgtccaacggcaagaccccatga

SEQ ID NO: 516100 - DNA, 441 bp, Stenotrophomonas maltophilia
atggaatcggcacatgctcacggagacgtgcatgggaaggcgcagggggccgcgacgaaggactatccccattacctgaatacaacaacgcaatccgaagagcgcgtctacctgcgcgtcaacctgaccctgttgcgcaacgcactgcgcggtaactcgctttgggcggacacggccttccagcgcgatgacgaaaccttcaaggcgtggaagtacgacggcgccatggcgacgatccttgagggcgcgccgatctacaccccatggttgggcagcgaacacggacgggtgcgcatcgtcgatggacggcaccggttgtatgcgctcatcgatctgggctactcgcacgtgcggatcgtaaccgacccctggcatgccccagtcctgggcgcactggtcgatccggtcgacagtgcaaaggaccacaacgcgcaaccgtag

SEQ ID NO: 516101 - DNA, 561 bp, Stenotrophomonas maltophilia
gtgaacgttctccagcgtattgccactgctgcaggtttcgccgtatttgcttccgccgcgacggtcagctttgcggccggcccggtcatggtcggtggtgcggagatgtatccgacccgcaccatcgtcgccaatgcggtcaactccaaggaccacaccaccctggtggccgccgtgaaggccgccggcctggtcgacaccctgaatggtgcaggccccttcaccgttttcgcacccaccaatgcggccttcgacaagctgccgcccggtacggtggatgcgctggtgaagcctgagaacaaggcccagctcacccggatcctcacttaccacgtggtgcccggcaattacagcgccatgcagttgatggccgatgcccggaagcatggcggcaaggccaccctgaaaaccgtcgaaggcgagccgctgaccgttgcgctgcacgacggaaagctgtggcttgtcgatgccaagggcggaaaggccgcggtcagcattgccgacgtcgcccagtccaacggcgtgatccacgtgattgattcggtgctgatgccgaagtag

SEQ ID NO: 516102 - DNA, 486 bp, Stenotrophomonas maltophilia
atgaagtggagcacgcaggcgctgggcgccctcggatggttcacgatcacctttgccgccgctgcgctcggggcgtgggcgtccacttcggcggccagcttctacgccaccctcgcactgccggcctgggcaccacctgcaagcctgtttggcccggtctggaccctgctctacgccatgatggcggttgccgcctggctggtctggcgcgaacgtggcacagcagcaacccggcctgcgctgacgctctatcttctgcagctcggcgtcaatgcgctctggagctggctgttcttcggctggaggctgggggcgctcgccttggtcgacattctgctgcttgtgatgctggtggtcgcaaccctcatcgccttcgcgcgcatacgcgcccttgctgcggtaatgctgctgccctatctgggctggatcacgtttgcctcgacactcaacctcgcggtgtggcgcgccaaccccggagtgctgtga

SEQ ID NO: 516103 - DNA, 588 bp, Stenotrophomonas maltophilia
atgcctactcccaccccgcccccgcaaccgcccttggcggcccttctcagtgttgtgctcaagacgcatacccgcgacgtgcatgatcgcctggaccagcacctgctgaagcagcgtatctttgcctcccgcgaacgctatctttgctttctgcgtgtccaatggcacttccacgaggcggttgcctccctcgaccgaagcgcagatgccgcagcgggacgcctgcagttgatagtgcacgacctcgctgatctgggcgcgcgaccgcccaccgcgcatggctggcgaccatcgctgcacgttgccagccccgccgcagcgctcggttggcattacgtggctgaaggctcgacgctgggtgccgccgttctgctgaaggcggcagcggcgctgggcctgcacggccgctacggtgcgcgccacctggcgccgtcaccactgggcgtcgccgaatactggaggcgcgcacgcgagcggctcgatgcggtcgcactggacagtaccgggcaatcgcaggcctgtgccggcgcctcggatgccttccagttcgtacgccgctgcgtggatgaagagttcagtttcgaatga

SEQ ID NO: 516104 - DNA, 2400 bp, Stenotrophomonas maltophilia
atgcatgatggatcacgccgcagcgagcgcctgcgtatcctcatgctggaggacagtgcgcttgacgcggagttgatctccgcgcagctgcagcgtgccggcctggagttcgaggccgagcggctgtggacgcgcaacgccttcatcgaggcaatcgacagccggtccttcgacgtgattctggccgatcacgtgttgcccggcttcgatggcgatgccgccctggcactggctcgtgagcgggtgccgcagacccctttcatctttgtctccggcaccctgaccgaagagctggcagtgcaggcgctgacccgaggcgcgcgcgattacgtggtcaagcagcgcctgcagcgcctgcccgatgcgatccgtcgtacccagcaggaagcccgtgagcgcaaccagctcgcgcaggcgcaggcggccctggatgacagccaggctcagctgcagcaggtcaccgacgcggtgccggcactgatcgcccagctcgacaacgaacaccgctaccggttcgccaacaagagtttcctggactggcacggcatcagcctggctgaactgctcggccgcacggcgcgcgaggtcagcggcatttccgcgttcgaacacgccctgcccagcctggaacgcgtgctgctgggtgagcgcacccgcttccaggttgagctggtgcatcgcagtggccagtcgcgcttcgtgcagatggactgcgtgccgcagcgcggcaccgatggcaacgtggtcggctacatctgcctgggcagcgatgtctcgggcctgaaacaggccgaactggcactgcgtgaggacaaccagctgcttgagcgccaggtacaggcgcgcacggccgagctgcgcggcagcaagcggcgcctgcaggcgatcttcgaatccagcttccagcaccaggtgctgctggacctggacggccatgtggtcgatgccaacgtggcttcgctggcctccgtcctggccgagaagcacgaagtggttggccagcgtttcgggcaatcgccgtggttcgccaccaccgacgacgtcggcgccaggctcgaccgtgcagttgccgaggccgcgcagggccgcagctcgttgcattcgctcgacctggagctgcccaccggccggcgcagtttcgacttttcgttgcgcccgctgctcgatggcgacggtgcggtcaccgccgtggtatccgaggcggtggaaaccaccgcccggctgcaggccgagcacgcgctgcgccagtcacagaagatcgaggctgtgggccagctgaccggcggcatcgcccacgatttcaacaacatcctgaccgtcatctccggcaacgtcgagcacgccatgctgctgagcgagcgcgccggcgagcccggcctcatggtcagccgcgccctggacaacgcgctgaagggggttggccgcgccgccagcctcacccagcggctgcttgcattcgcgcggcgccagcccctgcacagccaggccaccaacctcaatgatcgcctgatggacatgcaggacatgctgcaacgtgcactcggcgagctggtgcagctggagatccgcgcagcggccgatatctggtgcgtggagatcgatgtcagccagctggaagcctccgtgctcaacctggcggtcaacgcccgcgacgcgatgccgcacggcgggcgactgacgatcgaggtcgacaacagccacctcgaccacgattacgccgccctgttccccgatgcactgcccggcgagtacgtgatgctgcgggtgcgcgacaacggccacggcatggacgccgatacgctggcccgcgtgttcgagccgttcttcaccaccaagcaggtcggccgcggcaccgggctgggcctgtcgatggtgcatggcttcgtcaagcagtccggcggccacgtcctcatcgactcggttgaaggcggtggcaccagcatcaccatgatgttcccgcgctcggcgctggcgcttcccagtgagccgacgccggcgctgcccgggctggccggctacgagccacgcgaggaaacgatcctggtggcagaggacaacgacgatgtgcgcgcgcacaccgtggatgcgctccggctgctgggctaccgcgtactggaggcgcatgacgggccgtctgcactgcgtctgctggaacggccggacacccgggtggacctgctgttctcggacgtggtcatgcccggcatgtcaggctgggagcttgtgcgcgaagtgcgtgagcgctggccggaggtggccgtcctgttcacttcaggctacccgcgcgaccatgatgcggttggcagccaggggcgcgtggccgccctgctgcccaagccgttcacccgcagcgacctcgcacaggccgtcaggggggcactggacggcgcggcgcactga

SEQ ID NO: 516105 - DNA, 693 bp, Stenotrophomonas maltophilia
atgggcgacgcagggcgagtgcgggttctgctggtcggcgcaacaggcctggtcgggcagggcgtggcgcttgcgtgccagcgctctgccgaggtcgctgcgctgacggcgctggtcaggcggccgggcggtctcaagggggtcggcagtgagcgggtcgtggcggatttcctgcgcatcgatgcgcgggtcgatgatctggcggggttcgatgcctgcttctattgcgccggcgccacgccgatcgggacgggcgaagatgagtatcggagggtgaccttggacaccaccgttgctgttgcccgcacttgggccgatgcaaatccccagggcactttcctgtacgtatccggtgccggtgccaatccgcgaagccgcttgatgccgttgcgggtcaagggccaggccgaggaggcgctacgcgcactgccggtacgtaccgtcatgctgcgtcccggaggcgtgcggcccgtgccaggaaccggcacccgtcatgctctgctgaagcccctgtactggggcggtgcaccgttgatgaagctggccggggcgctctcgccatcgctggtcaccagcaacctcgcgctgggacgggcgatgatcgcgctggccggcatgcaacgcccaccgcaggcggtggaatgcgatgagatcaaccggatcgccgccggaaggggcgatccggccggctga

SEQ ID NO: 516106 - DNA, 675 bp, Stenotrophomonas maltophilia
atgagcccgcgccatcacctgcacgaatccaccctgatgagctacgccgccggcgccttgcctgcgcccttgagtgtggtggcaggcgtccatcttgagcaatgcccacactgccggcagcgactgcgtgaggccgaagccatcggcgcggccctgctggaacagacccagccggtgacgcaggaatcgcggcatgcgcagttgcgcggcgccatgctcgcgcagctggacctggccggcgaggccgccccaggccgcgcgccctccccccgtggccgcgtcgagcccggcgctgatcccgatgccttgccggtatcgctgcatccgtatttcggccgctcgctgcgcagcctgccgtggcgctggatggcgccgggcgtacattgcatccgcgccgagcagatgccgtcgctgatcatgctgaagatcgcccccggcaagtgcctgccgatgcacagccacggccgctcggaactgacccagattctgcagggctcctacaacgatgcgctgggcctgttcaccccgggcgacatggccgatctggatgaggacatcgagcatcaaccggtgacggctcctggtgtgccctgcatctgcgtctctgcgctggatgccccgctggtgttcagtggctggctggcgcggagaatccagcgctttgtgaagctgtag

SEQ ID NO: 516107 - DNA, 624 bp, Stenotrophomonas maltophilia
atgtaccctgacgccgcccccacctcccttgacttcgacaccgcccgcatcgtgtccagttcccagcagccgaataacgagccgatgaactggacaggcgacatggagggtgtcgcgcgcctgcgcgaccgcgactgtttcatgcgcatctacgaccacttcatgccgcggctgtgcgtctacctgcgtggcctgggcgcacccgctgcggtggccgaggaactggcccaggaatgcctgctgcggctgtggctgcgtgcggccgatttcgacccggcgcagggcgcactgagtacctggctgtaccgcatcgcgcgcaacctgcacatcgatcgggtgcgccgtgagcgcggctggatgcaggtgcaggcggcggtggatgaggccgccagcgccgatctggtggagcgcagcagtgcagaacagttcgccgaccagatgcggcttcgccagcgcatcaatgaactgcctgccgtacaggcgcggctggtgcgcatgtcgtacttcgaagccaagagccatgccgagatcgcgcaggcgctggggatgccgctgggcacggtgaaatcgcacctgcggcgcgcattcctgcagctgcaggcgagggtaggggggggcgcatga

SEQ ID NO: 516108 - DNA, 768 bp, Stenotrophomonas maltophilia
atgcgtactgtctggctcctgctgtgcctgccccagatggcctggtccgccccgatgctgcgaaccgagggggtggccagcctcgccgatggcacgccggcctatcgtgaggtgcactggatgcaaagcaccgaggaaggtgccgaacgctgggtacagtatctgtgtccggagggcgcccccttcgcccgcaagcggctgccctccagccacgtggtgcaggcccgcggctatcagctgcaggaccggcgcagcggccaggaggcgagcgtgcgtgtggatggccccaaggtgcaggtgtcatggaaggaatcgcagtccgccacgccgcgctcgggcgagctcgcgctgcccgagggcgcggtggtcgatgccgggttcgacgccgcgatccgcctgcattggcaggcgttgatgcgcggtgaggtgctgcgcatgcccttcctcgtgccgggtcggcagcgcttctttccggtcaaggttgtccaccgcggcgcggtgcgctggaagaacatcgccgcgcagtccttcgaggtgggcctggacgcgtggtatggaagcgtcgcaccgcggctggcactgacctatgccgatgccgatcgacgcctgctggaattccgcggcaccagcaatctgcgcgacggccagggccgctacccgcaggttgcggtgcgctttgccaccgccccggagccacgcgacgaagcgcagtggcggcgcgcatgggcacagccgctggtcgccacctgcgctgttacggagaggtga

SEQ ID NO: 516109 - DNA, 1278 bp, Stenotrophomonas maltophilia
atgcgcattgccattgtcggatcgggcattgcagggttggccagcgcctggtggctgcacggagaacatgaggtcacgcttttcgaggcgggcgaccatctgggcggccacacccatacccacgaggtggaagtcgatggcctccaactggccgtggataccggcttcatcgtcttcaacccgctgcattacccgctgctgacggcactgttcgacgaactgggggtagcctcgcagccgaccacgatgagcttctcgatgcacagcgagcgcagtggcgtggagtacaacgccacctcgctcgacggtctgttctgccaacgccgcaacctggtctcgccgcgcttctggggcatgctctcggatctgcgccggttctatcgtgatgcgccacgattgctgaccgaggccgaagggccgacgctggggcagtacctgcgcagccagcgttacggcaacgccttcgtcgaagagcacctgctgccgatggcatcggccctgtggtcctcgcccagcgcgaccgtggaggcgtttcccgcccgctacctggcccagttcatggccaatcaccagatgctgcagattcgcggccgctcgccgtggcgggtggtcagtggcggctccgcgcggtatgtcgatgcgttgcgccagcgctggcgggtgcatgaacggctgaattgcccggtccattccatcgagcgcatggcgcacggggtgcgggtgcgcagcgctgccggcctggaggacttcgacgaggtgatcctggcctgccacagcgaccaggcgctggcgctgttgaccgatgccgacaccgccgagcgcgaggtactgggcgccatccgctaccaggccaacgaggtggtgctgcataccgacgcctcgttgctgccgcgcaaccgcaaggcctgggccgcctggaacgcccatgtgccgcgcgacgccgctggggcctgtaccgtcagctattgcatgaacctgctacagggcctgccggggcgcacgccgctggtggtcacgctcaaccgcagccaggccatcgacccggacaaggtgctgcgcactctgcactacgcccacccggtacacgaccacgctgcggtgcgcgcgcagcagcgctgggtcgagctgcagggacggcgccatacgtggttcgccggggcctactggggctggggcttccacgaggatggcatccgcagtgcgcgccaggtggtggatgcgttgcgcggtcagatgcagcaacgtccggtgccggtaccgggagaggtggctgcgtga

SEQ ID NO: 516110 - DNA, 768 bp, Stenotrophomonas maltophilia
gtgagcgccagtgccctctacttcggccaggtggtgcatcgccggcaccagccgcacccccatcagttccgttacccgatcgcgcagctgctgctcgacctggacgagctggagtcggtgttcgccggccgctggttgtggtcggtgaaccgccgcaacctggccgagttccgccgcagcgactacttcggcgatgcggccaggccgttggccgatgcgattcgtgatcatgccgcagccaccctcggccatcgcccggctgggccggtgcgcctgctgacccatctgcgttatggcgggcacgtcttcaatccggtcagcttctactactgctatgccgccgacggcagcacgctggagtgcatcgttgccgagatcaccaacaccccatggaaggagcgccacgcctacgtcctgccggcggcgaccgccagccgcgaaggcgcttcgctgcgctggcagttcgacaagggcttccatgtctcgccgttcatggccatggactgccgttacgactggcgcttcagcatgcccgggcaggatctgcgcgtgcacatgcaggtgctgcaacacggcgtgcgccagttcgacgcgacccagaccctgcggcggcgcccactggacgggcgcggcctggcgcgcgtactggcctgctatccgttgatgaccgtgcaggtggtggcggccatccattggcaggccctgcgcctgtggttcaagcgcaacccggtacacgaccacccttcccttgccgagaagccacgatga

SEQ ID NO: 516111 - DNA, 1260 bp, Stenotrophomonas maltophilia
atgaacgacgtaacccccgccgtggccctgccccggcctggcgccctggatagcttcctgcgccggcgactgctggcacaactggcaccgatgcgtggtggatgcctgtgtgtacgcgatgcgctgggcgaggtctggctgggggaaacggacgccgcgctgcgggtcacgctgcacatcgacgatccgaccttcttccgcagggtggccgcgcagggcagcgtcggcgccggcgagagctacatcctgggcgaatggcagtgcgatgacctggtcgggctggtgcagctgctggtgcgcaaccgcgacctgctggacggcatggagcacggcccggcccgtatcggcggctggctgcttcgcggatggggccggttgcgccgcaacagccgcgaaggaagccgccgcaacatcgccgcacactacgacctgggcaatgacttcttcagtctgttcctgtcgccggacctgatgtactcctcggccctgttcgccagtgaatccgaatcgctggaggcggcctcgcagcgcaaactggaacaggtctgccggcagttgcagctggggcccggggaccgggtgatcgagatcggcaccggctggggcggtttcgccctgcatgccgcccgccatcatggctgccatgtcaccaccaccacgctttcggccgagcagcacgcgttggccaccgagcgcgtgcacgccgctggcctgcaggaccgcatcacgctgttgatgcaggactaccgtgacctggagggacaattcgacaagctggtgtccattgagatgatcgaggccattggcgcggagtatctggacacctacatggccaccctgcagcggctgctgaagcccgatggccttgcgctgctgcaggcgatcaccatcgaagaccaccgctacgaacaggcgcggcgcagcgtggactacatcaagcgctacgtgtttccaggcagcttcattccttcgatcaacgcgatcatggccgccaagacccgctccagcgatctgcagctgatcgcccagcaggacttcggccattcctatgcgctgaccctgcgcgcctggcgccggcgcttcctggcccagcgggcggcggtgcacgcgcaggggttcgatgagcggttctgccgcctgtgggagttctacctggcgtactgcgaggggggcttcctggagcgctcgatcggggtctcgcacctgctgatggcgcggccgggtcaccggcccagcctggcgccagggcgggaaggctga

SEQ ID NO: 516112 - DNA, 543 bp, Stenotrophomonas maltophilia
atgcgccggccctgggtcaacctggtgggcaaccagctggtctggctgtgcgccgtggccggcgcgggccgcggcttgcagtggcctgcgctgctgggtgcggcgttgtacatcggcagccagctgtcgagctctccgcacgtccgcctggacctgcggttgatcctgcttgccttggcgtgcgcctggctggtggatgccagcgccgccgccagtggcaccgtgcgctatgccgcagcgccgctgggctgggcgccaccaccgtggatcctggcgctgtgggcggcgttcgcgatgacgctcacctcgtcgatgcgcttcctgcagcgccatgccgcgctgccgttcctgttcggcctgctgctggcaccactggcctatctttccgccgcgcgcggcttcggtgcggtgcagttcatcgcaccagcctggcgtggggtgctgctgctcggcgcaggctggagcatcgcgctgtctgtgctgtgccttgccgcccggcgctgggcagcggcgacgccaccgctggcaggagtgtcaccatga

SEQ ID NO: 516113 - DNA, 786 bp, Stenotrophomonas maltophilia
atgagcgcgctgctgtgggtgctgctgtatgcggtgctgatcatgtgctggggctgggcctggcaacgtcgccaccgcaacatcggcgtggtcgatgtgctgtgggccaaaggcgtaggcgcatcggccctgctgctggcggtgctgggtgacggcgcgctggcgccacgggtaactctgggtgtgcttggcggcctgtggggcagccggctcgcgctgcacctgtggcatcgcgtgcgccatgaaagcgaggacgggcgctaccgctacctgcgcgagcactggcagggtgatcaacggcggatcttcggcttcttcatggcgcaggcgcttctggtggccatgttcgccctgccctttgtggccgctgccgcccatccgcgcccgggcctgtcgccctggctgctggcggccgtggccgtatggctgctgagtgtgggcggtgaagcactggccgaccgccagctggcacgcttccgcgccgatccggccaaccagggccggacctgccgtaccggcctgtggcggtactcgcggcatcccaactacttcttcgaatggctgcactggttcacctacgtgctgttggcggtgggttcaccgctgtggtggctggcctggaccgggcccctgttgatgtacgtgttcctgcgctacctgagcggcatcccgtttaccgagaaacaggccctgcgcagccgcggcgacgactatcgcgattaccagcgcagcacgccgatgttcttcccgtggtttccccgtcgtacccaggagcagccagaatga

SEQ ID NO: 516114 - DNA, 1074 bp, Stenotrophomonas maltophilia
atgaccgccaccgttgcattgcccgccaacgacacgaaagagaccggcctgatcggctgggccgagcgcggcctggtgcccgatgcggcgctgcgcgcgggcatccgccgcctgtgcgcgcagcgactgcatgaagaaacacgcggcggcatcgaggcgcagtccgcgcgcttccggcagcgcattgccgagctggccggcagcgcggtggcactgcataccgacgcggccaatcgccagcactacgaggtgcctgctgccttcttccaggcctgcctgggtaaacgcctgaagtacagcagctgctattacgccagcgggcaggagagcctggaccaggccgaggaagcgatgctggcgctgtatggcgagcgcgctgcactggccgatggccaacagatcctggagctgggctgtggctggggctcgctgacgctgtggatggccgagcgttatccagatgcgcggatcaccgccgtttccaactcgcacagccagcgcgagcacatcctggcgcagtgcgctgcacgtgggctgggcaacgtcgaggtgctcacctgtgacgtcaaccagctggcgctgcccgacgcacggttcgaccgctgcgtttcggtggagatgttcgagcacgtacgcaactacccgcagctgctgcagcgcatcggccgctggctgaaggccgatggcgccctgttcgtgcacatcttcgcgcaccgcaccctgatgtacccgttcgagaccgatggcggcgacaactggatgggccgtcacttcttcaccggcggcctgatgccggcggccgataccctgctgcatttccagcgcgacctgcggctggagcagcgctggctgctcgatggcacccattaccagcgcaccgccgagcattggctggccaaccaggacgcggcacgcgagcgggtgatgccggtgctgaccgccacctacggcgaggccgccgcccggatctggtggcagcgctggcggatgttctggatggcctgtgccgagttgttcggctatgacggcggccagcaatggctggtggcccactacctgttccgccctcgctga

SEQ ID NO: 516115 - DNA, 534 bp, Stenotrophomonas maltophilia
atgcgcctgttctccttgcttccgttgctggccgtgggcctgttcggttccggctgcagtgcccaggacacccgtgcgctgccacgcccaccctcggtggatgtgccacgcttcatgggcgactggtacgtgatcgcgcacattccctcgtggccggagcgcgaggcctacgacgcgattgaaagctacgcgttgcggccggacgggcgcatccagaccaccttcacctatcgcaagggcagctttgccgccccgcagcggtcgatgcacccgatcggacgcgtggagaaggaaggccagggcgcggtctggggcatgcagttcgtctggcccatccaggccgagtacatcattgcctggctggacgatgactatggccagaccatcgtcgcgcgcagcaagcgcgactacgtctggtacatggcgcgcacgccgaaggtgtccgagcaggattaccagcaggccgtgcagcggatcgcgcagatgggctacgacgtgggcaggctgcggcgcgtgccgcaatcgattcgatag

SEQ ID NO: 516116 - DNA, 987 bp, Stenotrophomonas maltophilia
atgaaccaggtctatgtcgctttatgggatggcgaccactacctgatcacccgcaagcgggtgttcaacagctggtggggcagcaacgccgtcgtcgtgctctctgccgaggcgatggtcgcggtgctggccatctgcacctccggtaccgcggccaccgaacagcagtggaaccaggcggcggacctgttgtccgatgccctgcgcgccgctgattccgtggcgcgcgatggcgagcgttcgctgccgcagaccggcgacgcgctggcgcaggcccgcgacaacgcggatcacagggcccccattgccgaggtggcattgcagaccctggccgcgcttgagttgctgtacaccgagcgcccggagacaccgccgcctggaagtgtggcgcgcaccaccgtggctgagttgtcggcggcgttgcagcccgaggcgggaaccgcgccggactgggccggcgcccaggtgctggccgcgcgcctggtggtggaggttcgcgaatggtcggatgcgatcgtgccggtgctggtcaaccaagccggccagtggtcgttgcccggcggtgggcgcctgaacgacgaatggcgcgagcacaccgcacgccgcgagtttgccgaagagctgggcatctggctgtcgcagggacacgctgcgtgtgacctgcgtgcacgtgtgtttccggaaggcggcggcagtttctcgctggtccgcttccgcaccacaccgcacgagctgcaacgggttgcggatctggccgcgcgcaacacccgcggcctgctcggcagtgcgcgccctgcggcaacggctgtttcggactgggaagtggacaccgccgtgctggtcgccacccgcgatctgcgccggtatctcggtgtgcgcataccggtatcggtaccgggtgcggcccgcgcgttggcgcgcgcccggcgcagcagccaggccatcgactggtacggcgcgatcgccgcactgctggccccgcgctga

SEQ ID NO: 516117 - DNA, 1863 bp, Stenotrophomonas maltophilia
atgaaagaaagcacgccggaacgcgaggcgcgtcgccacatcagcaagcagttgaccgcgcagatcaacaacgcccaggcgtacccggaggtgcgctcggtggtggtcaaggccctgtcggacatcaaggaccgcctgcgcagcctggtcagcacggtccgccgcgactacaacctgaggcctgagcaggcgctgctgttcttctacgtaaaaggtggcaacgccctcgacgcgttgatcgaacgcccggcagagccgccgccgaccctgttcgacttcggcaggtccgactgggacacccaggtggtgatcaatccctggattccgattccggcccaggacgccctgcacggaggggtggaggacatcgtgatcgaggtgatgggcccggccggtctgaacatcgcgctggagatcagcctcgccccgcccgcgcagaaccccttgtgcggccaggtggtggatctgaccacggtcgacatctacgttccgccgggccaatcgtgcctggtgacctgtgacaacccgcagaccttccgcaaggtctacgagcgcgaccgcgccgggctgcatctgttcaccagcacgccgttgaagggtatcggatcgaccaaggcagcgaccgcgccatccaatgcgccggtgctgccggcgccggcgccgcaggtggtgccgccggtgcaacccgcgccagcacccccacctccacctgggatcattctcaacgatggcatcaagccgttcgtgctgtatcgcctggggtatacctggcatgcgcgttgggtgaaggatccgcgcgcacccaccggcgatgatccagtgacgccacggccgatcctgatggaactgatcgatgtcaccacgccgcgccgcgacacggttgaagccatcacggtgtggtcggacatcgtgcgcaaccatctggtgatcaccgaagatgccggtgccgatgagcgctggcgcttgccgctgcccagcatggagtatcacctctgggaaggcttgacgatgctgtgcgagatcgcggcctatccgaactggcccggcgccgacaagctggacaagcgccgccgcaacgtgcagcgcatccacgactggtatctgaatcagcagcgtgatctgtcggtgttccagcgggtgatcgacggcatctccgccacgccggtccataccgctggcgctgactgcatgaagcaggtcgatgcctgcatgacggcggtgaaggacgccatgcgcgacgccatggcaggcgtcgaacagggtgcgctgaccgtccggcaacggaatcagctgatggcggggcgccagtggggcatgcaatggatggaaacattgctgcagcgcctgggcgcccccctcggtaccgcctgcggtttcagcgatgacctggcgctggtggcaacactggcgcagaacccctacctggacctcaaccgggtgccggtctccggcgtggactacgcgatggtcatccgcaccgactacgccacgctgtgccgtgcgacgatcgccaactgcatgcaggcgctggactggattgacggccggcacgtgaccatcgaagacaccctgcactcgacggtgcgccccaccggcatcagctacgagcgcacgctggtgatcttccacgccaagcgcgcgccctcggcacgcctggccaaggcgatcatcaccctgaccactgccgatgcggtgggctgcccgttccgtgactcccccaccgggtccggacaggtcgccccgctgctggacatggacaaccagcgcaaggttgccgcgtcgatcatccagggcttcgtgcaaagggccacgctgtccaagcagcacgaggcgatccggaccctgctgccacagccgctctga

SEQ ID NO: 516118 - DNA, 1305 bp, Stenotrophomonas maltophilia
atggagttgcgacgttacgcactgatgtgcctgttgccttgcgtgatcgggcgggcgggcgcggttgaaacaccgatggccgatgctgcggcgcatgctgttttcagggaagccgatgcgctgtgtcgcgctgacgacggcgcgctgtggggcgcatcgctctgtggaccgatgatgctggtcgatgccgccagccgtgagctgaaggcatcgcagcacgatgcacagggcgccctgagcgcgcgtggcgcggtcttcgtcggccagctgccccccgatgcactggtggccaacaccgccatcgactggtccggcacacgctggacacaactgctgtggccactgccacaggatgacgcgcggcgccgcacgttgctggcgcacgagatgttccatcgcctgcagccggcactacccatcgccaggccggccgaaggcggtaatgatcatctcgacaccctcgatgggcgctatctgctgcaactggaatggcgcgcactggccgccgcactgtcggccaacgacggcgacgcccgacgcgtcgcgctgagcgacgctctcgccttccgggccgagcgccatcgacgtttccccgcggccgcgaaggaggaggcggcgctggaattgaacgagggcctggctgaatacaccggcgtgcgggtcggcaatccgacaccggccgcacgtatcgaggccgcgctgcacgatcttcgcgcacacgtcgacgaccgcagcttcgtccgatcgttcgcctatgccaccggcccggcctacggcctgctgctggaccaggccgcaccgcgctggcgcagcgcgctcggccagcacgcccgcgatctcggtacgctgcttgcgcaggcgtcgcgcatcgaaccagccctggacgaaccggcgatgcgcgcggcggccaaccgctacgacggtgcagcgcttcaccgcgctgaaacgctgcgcgcgcagcatcggcaggcacagattgaacgcaaccacgcgcgtttcgtgaccgggccggtgctgcggctggacctgcgccgcatgcgcatccagttcgaccccaacagcgtgcagccgttgccgggcagcggcgcggtgtatccgacgctgcgcctgaccgatgactggggcacgctgcaggtgaccgacggtgcgctgatgcagagcgactggaaagccgtgctcgtgcaggccccggcaacgggcgggccgcttctgcagggtgacgggtggtcgctgcagctcgcgccgggctggtcggtggtggccggtgcacgcgctggcgactacatgctgaaggcgcagccctga

SEQ ID NO: 516119 - DNA, 231 bp, Stenotrophomonas maltophilia
atgagccgcggcagctggtcgcgaccggtgcatcgctggacctcgatcgtgttcactgtgacggtgatcgccaatttcatcgcccgaggcctggggcagggggagccggcggcgtggatcacctattcgccgttgccgccgttgttcctgcaattgttcaccggcctgtacctgttcgcgttgcattacgcaggcagacggcgcagcaccgcgcccggtgctgcggggtga

SEQ ID NO: 516120 - DNA, 462 bp, Stenotrophomonas maltophilia
atgagccagagcccggaactgctgcgccgcctgctgcgtgccaaggaccgcatggaccgtgccagccacgaagactggccggtctcgcgcctggccgaggtcagtgcggtgtcgaccgcgcatttcgcgcgggccttcaaacaggccttcggcctgccgccgcatcgttatctgctcagccgccgcatcgagcgggcggtggcgctgctgcgcgagaccgatctgccggtcaccgagatcgcggcgcagaccggctgggccagcctcggcaccttcggccggatattccgtgacatcaccggcgacagcccgggcaatgtgcgcctgcgcgagcggtccggccatgcaggtgccgatcacgttcccgaatgccacgcccgcgccgcgcagcgcccggacctcaacatcgcagttttggagaagcgtcgccgccaggcggttgctaacgtggactccacctga

SEQ ID NO: 516121 - DNA, 1041 bp, Stenotrophomonas maltophilia
atggatcgacggcagttcctggcctccctggccatcgcagcggccgcccgtgcgctgccctccggcaccgcgcccgcaggccccggcgaggattggcgctggctgcagggcaactggcgggtgcgccaccagcggctgaaggagcgcctggtgggcgatacgcgctgggagtccttcgctggcagcagtgcggtctggctgaccctgggcggacggggaaccatcgatgacaacgtgatggctctgccttcaggcgcctatcgcggcctcggcgtgcgcgcctttgatccggcgtcatccacctggtcgatctggtggatcgatggacgcaaccctgagcgcatcgagccgcccgtgcgggggcgcttcgacgcaaacggcggcaccttccatggcaccgatcggctcgacggaaggcccatcgacgtgcggttccgctggcacgacatccatggcaaggaaccttggtgggagcaggccttctccgccgatggaggcatgcactgggagatcaactggcgcaactggttccgccgtaccgctgcggcaccagctcccctttcgacgctacccgatgccccggctgatttcgacttcctggtgggccactggaacgtccaccatcgccgcctgcgtgcccgcctggcaggcagcgatgcctgggagcatttcaacggaaccctgcacaactggccggtactgggcgggtacggcaacgtgggcgacaacctgatggacgtgcctgccgcgccagtgcgcggaatgggcatccgcgcctggaacgcgcgcaggcggcactggctgagctggtggctggatggtcgcgcacccacccggatcggcgcccccctgcgaggcgccttcgagcgcggtgtcggaaggttcttcggtgaagaccagcacaacggtcacgcggtgcagacacgcgtggtctggtcgcgcatcaccccacggtcggcgcgctgggaacaggccgcctccatcgacggtggacgcagttgggaaaccaactgggtgagctatttcgagcgacaggcatga

SEQ ID NO: 516122 - DNA, 882 bp, Stenotrophomonas maltophilia
atgaaggcgctgctggccacggtgctgctggcatcgacagtgctcgtgccctcaccctcccgggtgctggagttcctcgatccggtcgaacgtttcgcgcccggcgttgcatccacgcgctatgacgaggtgcggctgacgttgagccccgacggcaacaccgcgctgtggttcagccgcaaccgccccggcggtcccggcggccatgacatctggatctcgcggcgcggtggagagcgctggcgaccggcgacgccggcgccgttcaacacgcctgggcgtgatttcgatcccgcattctctgcagacgggcgcgtggtgtacttctgttcggaccgcgaaggcggccagggcggtgacgatctgtaccgggtcagcatggatggcgacggccgcttcggccaccccgagaatctggggtccgcagtgaacagcgcagcagacgagttcgcgccgatgctctcgccggacggtcgtacgctgttgttctccagcgatcgggcgggcggcgccggtggacatgatctctacagcgccggcatgcaggacggggaggctgcgcctgcgcggcggctgccaggagacatcaacaccgccgcgcaggagttcgatgctaccttcctcgacgatggccacacggtggtgttcgcgcgcgccctggacttcggcaaggcaccggtccgccagttcatcgcctccgcatacagcggccgctacggcgcgggccagcccttgccctcgccggtgaacgaacccactggcgacagctacggcgccatgctggatggttcgcacccccgcacgctgacctactcagcacgacgtcccggtggcgaagggctggacctgtaccgggtccgctaccgcatcgagccgccttga

SEQ ID NO: 516123 - DNA, 537 bp, Stenotrophomonas maltophilia
atgccgtctcaacagttgctggcctgcgcctgcggccaggtgcgcctgaccgtcacgggcagccccatcgccaccgtcgaatgctgctgcgacagctgccgcagggcgggtgtgcagctgcagtcgcggcccggcgcccccgaggtgctggggccgcatggcgagacgctgttcgtcatgcatcgcaaggatcgcgtcagcattgacgcagggcactccctgctgagcgcgctccggccatcgacccagggcggcagtcgtcgcgtgctggcacgctgttgcaacacaccgctgttcctggagttcagcggcggccactggctgagcctgtacggactgctttggcccgcatcggcaagaccggccgtggaaatgcgcacgatggtcggtgaccttcccgattcctcggcccttcccaacgatgtgccgaacctgaagacccgctccctgtgcttctacgcccgcctgatgaaagcatggatcgccatgggcctgcgcagtccgcgaatcgagatcgccggagaccctcatggctga

SEQ ID NO: 516124 - DNA, 309 bp, Stenotrophomonas maltophilia
atggctgagtccgggcggatcgagatcgagagcatcaccacgcccggccacacccagcgcgtggatcgcgccaagtacatggccatgcgcaatgccctgctggacgcgctgccaaagcaaccgccggggatgacggtggcgcaggccaagcaggcgctgctgccggggctgcccgcatcgctgttcccggccggtgcaacggccggatggtggttgaaggccgtgcagctggacctggaagccaagggcgtgatcgaacgtgtcccaggcaaaccgcttcgactgttcaagcacagggccgcggactga

SEQ ID NO: 516125 - DNA, 531 bp, Stenotrophomonas maltophilia
atggacggcactaccctcattcgcagcctggcagccgcactggcactggcctcgttgtcggctgcccccaccgtcggcgcctccggtgcccgccagggggtgaaggcgcagccgggcgaaattgtcctgctgcgcgatgtggcggcgcggccggcataccggatggccccgccgggcatggccctgatcgccgacccgaagccccagcgcgaaattgccacctcactgggcaccggagccgcaggcggcggaatggatgaactcagcgaggaagactacgccggcatgggcgccggccgcagcgccgggcctgcagcgccacacggcaccaccgtcgagcgggtgacccagcaggccctgggcggcacgctcggccgcagcagcgagggcatgctcggcagcagcctcggtggcgccatgagcggtccactgggcgcggtcggcaacagcacacgcggcatcggcgataccgtccgcggtgcgcttgcgcagttcccgctgcagggcccggccccggcaggtggcaagtga

SEQ ID NO: 516126 - DNA, 750 bp, Stenotrophomonas maltophilia
atgtttcgtcaatgttgctggatggtcctgctgctggcgacgcctgccctgccgatccgggcagcggaggccgcccccggccggggcctgaccgagattccagacccggaactgaacctgatgcgggggcgctacaccgtgggcggcaacacggtggcctggttcggggtgaccatggtgtcgcagtggcaggccggcaatggcgccgcactgcagggcgcactgacgctgggcatggatttccgcggcggcggcgccccccggctgagcttccagcccagcgtgcaggtcaccgcggccgatgcgccgctgccggacacctccggccgcagcatcgacagcagcgggctggccaatgccagcggactggtgcagagcgtacaggtggccggcgacggcaacgtggcgcgcaatgcgaccacgctgaccgtgcgcgatggcgccgtgcccgccggcttcaccgacggcgcgcattcggccagcacacagcaggccggcatcaatgccactgcggcattggatggcaaccaggcgcgcctgctgctgcaggtggatggacagggcctggtgcagcagtggatacgcaacggcagtgtcggccagggcattgccctggtgggcgatggccagagcgccagcaaccagctgcggctggagctggtacgcgataccgcgggtggcaacctgccgttgagccagaacgtggcccaggcgattgcactgaaccgcggcatggggccgggccagtaa

SEQ ID NO: 516127 - DNA, 291 bp, Stenotrophomonas maltophilia
atggcatttccaaccgcggtaaacgaccagatcaccgactcggtcacccaggccaacaccaaggtgttgggcgatgcgcccgccgtggcagtgggcaatctctaccaggccaccgcacaggcgctggccaacgccgcccacaacgccaccaacgcgcagcagcagtcctacgtgaccgcgcagtcggcgaccaccatgggcgtggccacgctgtactcgatcgataccgccaccaccgccgtggccagcaaggaaatcctcagcacccgcgtgcgcgggctgggttcctga

SEQ ID NO: 516128 - DNA, 1080 bp, Stenotrophomonas maltophilia
atgagcgttttcattgacggtcgttccattcctcacctcggccagctcggtccacgcacccggcgcgtgctgcacttcatcgacggcggccactactggctgcaatgggcgatcgattcccacgagcaccgctacatgttcgccgacgaaggcgcgatgctggacggcgtacagcagggcctgcatggttcgcgcatgacgtggttgccgcaggctggcctgcaggtcagccccatcaagctgctcagcctggggaacgacgaactggatgtgctgcgccagcttgaaatgggcccgtccagcagcccgctcgtcaacgagactcacgcggtactgacccgccacggtctgctgagcaacacgcagctggaggccttccgcccgttcctcgtggccgtcgacgccggcgatgcgccgctgctgcgccagctcgatttccgtgagtcgctggcgttgtaccagctggccgctgagcagcgcagcgcgggccaggcgaccgaggcccaggccgaggcagcgcggttcgccctgctgcatgcacgcaggccaatcgaatttgccgactactatcgcttctaccagcgcgtgcacccgaccggcagcagcagcgaactgcgcatggaacgcgctacgcatgcgctgcagacgctgttgccgatgttgttcggttacctggatggtccgcagctgcccagcctgccgtcgccggaccaggtgcgcgcggcgattgccgagaccctggccgcgaaccgccagatcggctacgcgcgcatctcgctggcggcgcaacaggtcgccctgttcctcaacgatggttcgggtctgccgccggacggtgaacgcctgcgcgaggccacacgacggcagctgcgcagcgcgcaggtcttcctcaatgaacatccggttgcccgtggccagcttggccaggatggggcaagcctgctgttcgcgatcgatggttccaaggaacaggcgcgcgtgcaggtggaggacaacgtcattaccctgcaggactatcggcgtatccgtcatttcacccacgatgaagccgagcagggcttcgaggcgggcgcagtgtga

SEQ ID NO: 516129 - DNA, 237 bp, Stenotrophomonas maltophilia
atgaccttcccgaccccgctgccctcaccgcccaccccggacaacccgggtggcaagacaccgatgcagatcgcgcaggagatggccgacgcggccatggccgccagcgaggccggcatccgcgcggcgatggcggtctcacatcaggcggtcgaggccgccagcgaagcggcgcggcgtgccgacgaggcggccgaagaagcggtccgccgggcaaccgaagcgaacgccaggtag

SEQ ID NO: 516130 - DNA, 1494 bp, Stenotrophomonas maltophilia
atgcacaggcaagtcagtgagatgttgcagcgcgcctatcggccacaccggtccctgcccgatctgctgggcgcgttcgtgaaggagttttcgcagcatcaggccctgcgcggtgggcgcgtgcacctgcgtggcaccggcaccggcagcgcggaggacgccgcgactgcagcgccgccgcaggcacccggtgacagccaacgcgtgccgatccgctacgggggggaggtgctgggtgagctgcagctggagggagagcccggccgcctggacagccgggcgctggcgctgggcgagctgttcgcgcaccgttgtgcgcatctgatcaagcgctacgaagcgcaggcctgggccgagcaggccctgagccggccgctgctgctggtcggtgcctgtgacgcgctgaagcggatggaggagtttgtcgagcgcgcagccgccagtcgtctgccggtattgctgcgcggtgagttcggcaccgagaagatggagctggccgcggcactgcacagcggcgggccgagacggcgcgggccgttcgtggagatcaactgtgcgcacgcccagggtgagccggccgactggttcggtcgtgccggcggcggcaccctgtacctgcatgaagtggatgagctgcctgccgctttgcagggccagctttcgcacagcatccgcggcatgcaggcggcaacggtcgacgccgacccggtgcacgccatccgggtcatcgcttccaccagcgccgacctggaacagcgcgtgcgcgagcggcagttctcgcgtgcgctgctggccggcctggaattcctcaccgtggacattccgccgctgcgcgagcgcaccgaagacatcggtgccctggtggcgcgctcgctgcagatgcatgggttcaacccgcaggtcatcggtggtgacgtgctggaaaccctgcgcagccaccactggcccggcaacctgctggaaatggaacgggtggtggtgcggctggcggtgatgaccggtggacgcagcatccatcgcgaggacgtgctgcgccacgcgccggggctggtggccagcgccgatgcagcgcctccagtgccggtattggcggcgatcgacccgcctgcggccgaggccacccggcaggacgacgcggtggccgcgccggcctcggcacatgaagggctgcatgatggcctgaaacgggcgctggcctatctgaaggaccatgccgccgagccggtgacgctgggtgacctggcccgccaggcgcatgtgagccagtcgcacctggggttcctgttccgcagcgaactgggcaccaccttcaagctgctgctgcagcaactgcgcatcgaacatgccaagcagctgctgcgcggcggccagcgcctgcgcatcaccgatgtcgccctgcaggtcggcttcggtgacctgagccacttcgagaagagcttccgccgggtggtcggggtgagcccgcgcagctaccgccgcacgccggagcaatga

SEQ ID NO: 516131 - DNA, 267 bp, Stenotrophomonas maltophilia
atggaacgtaccaccggcaccaccacggccccgaagaactacctgatgtgggccatcctgagcatcttcggtggcttctggccgttcggcatcgtcgccacggtctacgccaaccgcacctcgtcactgctggccgccggccagatcggtgccgccaccgtggcctcgcgcaaggcactgcgctggctgatcgcttcgttcgtcacgctgccgttgtgcgtactgctgctggtgggttacgcgctgatcctgcgcgctggcgcctga

SEQ ID NO: 516132 - DNA, 885 bp, Stenotrophomonas maltophilia
atgcctgttggattcatcggcctgggcgtgatgggaacgccgatggcgggtcacctggcgcgctcaggcaccgccgtgctgggctggtcgcgctccgggcgtacctatcctgctgcgcaggcggcgggcatcggggtgtgcgcatcgctcgacgaggtgttcgcggcgtgcgacaccctgatcctgatgctggcccatgacgaggccatcggcagcgtgctggaccgccacggcgcggccttccgcgaacgcgtgcagggccgcctgctgatcaacatgggcaccagttccgccgcgttttcacaggccttgtgcgaacaggtgcgcggtgcgggcgggcgctacgtggaggcgccggtgtccggatcgcgcgtgcaggccgaggccgcacagctggtcatccttctggccggggcaccgaccgatattgagcaggccacagccctgctggcgccactgggccggcaatgcgtcgcctgcggcccggttccgtcggcgctgcgcatgaagctggcggtgaacctgtacctcatcacgctggtcaccgggctggccgaggcagtgcacttcgccgaaaagcacggcatcgcgctggagcgcttcgccgaggtgctcaatgccggcccgatggccagcgacgtgtcgcggatcaagctggacaagatgatccgcgacgatttccaggtgcaggcatcgatcaccgacgttctgaagaacagcggactggtggccggtgcggcgcgcgaggccggcatgcacgccgcactgatcgaggacagcgacgcgctgttcgcccgtgcccagcagatgggtctgggtaggttggacatggccgccgtactgctggccgtccgtgccggacgggccggcaccgaccggcactga

SEQ ID NO: 516133 - DNA, 609 bp, Stenotrophomonas maltophilia
atggctgccgtgcttgcccgtacctgcctgtccgcactgtgctgtctggccctgcccgccctggcccaggacgcctcgttcggcgtcggccaacagaccacccgcaccgaccagactacacagaccagcagcacccagacccagagcgctgacgtctccgccgccggcaacagtggtgcgatgaccacccagaccaccacacagggcagctcacataccgagtcacgcagcgaaagcagcggcatggatgtcgaggtcggtttccacgaccggagtgacgactgggggcatgagcaccgccgcaatgaacccgatgtacgcgacggcgatctgttcggcccctggacgctgggccaggaaaacggcagcagctgcaccatcgaactgaagaacaacgagtggtttggcggctacagcgcctacgtgcccgccggctgcccggacggcttcttctcggccaaccgctggctgctgtcgggcaaccagctgctgctgaccgataccaacaacaccgtgctgggccgattccgtgcctccggtggggggcgctggtccggcgcccgcgaatcggacggggcgcgcctgtatctgaacccgacggggcgctga

SEQ ID NO: 516134 - DNA, 1191 bp, Stenotrophomonas maltophilia
atgttgcgcaggctgcatctgtttccggccggcattgcctgcgcactgcatgccgccctgctgctgcccgccctgtctggcgccggcgcggcctccgcggcgccggcgcttgccccggttgaggcgcgcgtaccgttcgccccctcgcccttcaatggcagcgacggcgcgcgccacctggcctatgaactgcacatcagcaacttctacggggataccggcgcgctggcaccgcagggactggaggtgcgtgcagacacctcggcatcgccgttgctgcagctggatgctgcggcattgtcagcatgggcgcgtccggccgccgcagaaggcgcaccgttgtcgatcgctgccggcaagcgcctcaccctgttcatctggctgagcctgccagccgatgcaccgcttccgcacgttctcagccaccacatcgatttcaccacggacaagggcgccaccgtttccctcgacggcgctgcggtgaccgtcgctgcgcagtcaccgccgcagctgggccctccgctgaagggagggcgctggctcgcgcacgaaggccccggggcggcgcagtcgcatcactggggcagcctggtggcggtgaacggtgcgctgaccatcccccagcggttcgcgctcgatctggtgggggtggacgcacagggccgtgcggtgcatgccgctcccgagcgcctgcaacacacgcgccaccaggactgggtcggctatgcggcaccggtcatcgcggtggcccacggcgtggtgcgcgatgcccgcgatggcgaaccggagcatgcaccgctcaccgcgcagccggagcccacatcgcttaccgaagccggcctgttcggcaactacgtggtgctggaaatcgcgcccggcgtgttcgccagctatgcccatctgcgcaagggcagcatcaaggtcaggcccgggcagacggtgcagcgcgggcaggccctggccgaactcggccaatcgggtaactcggcggctccgcacctgcatttccagctgagcaacagcgtgcacttcgagggctcggaggggattccctatgtcttcgatcgcttccagtacttcggtccggaatcggaggcgcagctgttcgggcaagggccagcctggaacagcccgtcgccgcagccacgccggcagcagctgccgctcaacgatgtggtgatcggcttctga

SEQ ID NO: 516135 - DNA, 603 bp, Stenotrophomonas maltophilia
atgagtacgcaacccgatccaacacaggcgccccgtggccggccgcccaccatcacccccgagcgtctggccgacatcggcatccgcctggggctgcccggcctgaccatggccaccgttgccgccgaactggcggtgagccaggccgcgctgtacaagcgcgtggccaatctggaggcgttgaaacggctggtggccgatgccgtgttccagcgctggcagatcccgcgcgcatcgcgtgatgccgcgggcggactgcagggctacctgctgacgtttgtggcgtcgctgtgcgaggtggtgaaggcgcatcccgggctgccgccgtatctgctgcggcgttcggtggcgaccacgccgatgctggaaaagatcgccgcccaccaggtgcatgtggccgaggtgtacgggctgccgatcgacaaggcgcgttggttgttggcgaccctggcgttccactgcatcgccggtgccgacaccatctacgcgatcgccgacgatgaggatggccaggtcatcaccgagttcaggcagggtctgcgtgcgctggtgatcgggtcgttgcaggtcttgaaagaggacggcgcggaccgatcgccgtga

SEQ ID NO: 516136 - DNA, 2694 bp, Stenotrophomonas maltophilia
gtgagtgaggtgacggcacgtctgtacacgctggctgacagcctgcattttgaatcgccggaccgctaccggccgaccgatgagtatgcagcgatcgcgcgcagccgcttgccatccagctggacgatgcaggcgcggggcttctggaccacctgtcgtcccgcacagagcgtagcggccagccacgggtggaagatccatctgtccagtattcctgaaaacgccgaacgcacactgtctgcgatcctgccggtggtgctggaggccggcgtggcgttcaagttctgctccgatcctttcatgctcgggctttcgctgggcaagggatggtcgcgcttccaggtgggcaagttcatcacgatctacccgcaggacccgcagcagttccaggcgttgctgccacagctgcatcaggccacctgtgatctggccggcccgcatgtgctgaccgatcgcccctacgccgacagcacggtggtctactaccggtatggcgcgcatgccggcgtatcgcggccggatccctacggcagtctgcagcagggctacccgctcagtgacggcgcatggcaggaagacgtgcgtggcccggcattccggctgccgcccggcgtcatcgatccggtcacccgcgccgccgaagcggcgccgcagtcaccgcaggggccgatcaccctcaacgcccgctatgaagtgaagggggtgctcaagttcaacggcaccggcggcatctatcacgggcgtgataccgccaccgggcgcaaggtcgtcatccgcgaggtgcgtggcttttccgccgccgatggcaccgatgtacccaacggtatggtcaatgcgatccagcgcgaggcccggatcctgcagaaactgtccgggaccggacgggtgccggtatatgtggacctgttcaaggaatggaacaactggttcctggtccaggagcagctggaggcgatcacgctgtgggacagtgcgatggcgttctacttcgccgatgaggatcagcggtcgcgcgacggttttgagcgtatccgcacgaagatccgccagatcggcgaggcgctgcagtgcgttcacgaccacgacgtcgtgctgcgcgacctgacccgcagcaacgtgatgttcaccgctgatggggaagtgaagttcatcgatctggagttcgcgcacgagatcggtgtcgactcgcgctgggccaagggctggacgccgggctacgcctcgcagcagcagttggaagcgcagcgccctacggtgcaggaggatcactacgcgttcggcgcgctcattctggacatgatcaccttctgtgcctccggcctggatctgtgccgacaggccctgcttgagcgcaagctgcgccaggtgctggatgatctgggcctgcccgccgatctgcacgagatcgtgacgggcctgacgcttcaggacgtggatgaacgctggagcatcgcgcgtgcgttggcgcacctggccaaggcgccggcgcccgcaccggacagattgatgttcccgacacgcgcgcaactgctggaggtggccgcgccggcagcgcagacgcgagcgcgcattgctgccgtactggacggctacgaacgctacctcgcctcgacctgcgatctctcacgcagcgatcgcctgtggccggcgggcctgcagatgttcatgaccaacccggtctcgctgcagttcggcgcgaccggcgttgcgatgttcctgttgcaacggggcggccaactacagccggctgtgctggactggatcgaacgcggcgccaccccgcaacgatgcccgagcggcctgtactccggccgcggcggcgtcgccttgctgatgatgtgcgcaggccgcccggacacggcgcgccgcctgctggccgagatcaacgatgacccggccgcgcgggtgctgcccgggctgtacttcggcgccgcgggactgggcctgctgaatctgcacgcctggcggtcgttgcgcgacccggcctaccttgaggcggctgcgcgcatcggcgatgcgttgttgcagcaggggcagcgcggtgccgtcggcctgtactggaaggcaggggaccgcaccggcctggggctgggcgatggacagagtggtatcgcgctgtttctcacctatctgggcaaggcgaccggcgcgcagcgctatctcaatgccgccgccgatgcactggatttcgatctcgcccatggcctgcgcattgccgggagaacggtatggcccacgcacgttgaaagcggaccggccgcgccggccagcccgcatacccgtttcggatcggcaggcatcggcatggcctgcgtgcgtcacttcgtcgctaccggcagtgagcgtttccgcgaggcggcgctggactgcgcgcattcggtgcggccacgggtcaccaacaagatctggcaggacagcggcaatgccggcttcggtgagttcatgctggacatggcgcattttctcggcgatgagcgcttcggccatgccgccttctaccaggccgaggcgatcctgccacacgcgatcgactgcgagggaggcatcgcctttgccgggccggcacactatcgcctctgcaacgacttcggcatggggggctccggcattggtgtgttcctggatcgactgcagaaccgccgccgtcgcctgctgatgctggatgaactgctgtcgccggcacctggcgcatga

SEQ ID NO: 516137 - DNA, 297 bp, Stenotrophomonas maltophilia
atgaccggtttccgtttcgttcccgccgccctcgttgttgcagccggcctgctgctgggggcgtgttccaagccacaggagcccagcaagaccgccgccgaagaggtaacccaggtaaagctgattccgccgtatgaatcgctggacaaggacaaggacggcatcgtcaccctcgccgaggtcgatgcggtggcacccgattgggcacaacgcctgcacgcctgcgataccgaccgtgacaagacgctgacccgcggcgagtacgacgtgtgcaggaacaccagcggttcgcactga

SEQ ID NO: 516138 - DNA, 393 bp, Stenotrophomonas maltophilia
atgcagggcgaagcacgcgggacctttgaggtgactctgttgccgatcggcggcaacgacggcccgatcggcgtgctgtcgatcgacaagatcttccatggcgatctgcagggcagcagcgtcggccagatgctggcattccgcacgccggtggaaggctcggccgggtacgtggcgatggaacgggtgaccgcggtactggccggccgcgagggcgctttcaccctgcagcacaacgggctgatgacccgcggcacgcccgagctgagcgtggtggtggtgcctgattcgggcagcgatggcctgcagggcctggccgggacgctggagatcagcatcacccagggacgccacgactaccggctgctgtacagcctgccggatgcgggctag

SEQ ID NO: 516139 - DNA, 1488 bp, Stenotrophomonas maltophilia
atggcacctgccgagctgcaggatgcgctgctgaccatggatgtggtcgaccagctgcgctaccgcaatgccgagatgaaggcactggccgacagtggccacgacaacgcgacgctgaagcaacgcctgctcgagctgtaccgctcgcagggcatcgaggtttccgacgagatccttgaggccggcatccgggcccagcgcgaacagcgctacgtgtacaccgcgccgcgtggctggaaggcgtggctggccaggcgctggatcgatcgcaggcgggtgctcagatgggcgctgatcgtcgcggcggcgctgctggcactcggcatggtgctgctgcttgcgcgcggcttcggcgccttcgtgcgtgaggccaacatcgagaagaatgtccaggtactcaacgccagggtcaccgcgcagcagcaggccatcggtctcgctcgccacgcgctggccgcgcaggaacaggcgctgcaggggctgttgccgcgtaccacggccagcggtgagcgcctgcaaccgctgaccgagggggcacaggccgcgctgtctgaagcgcagcggcgcttcgccgaggtgccggcagcggacactctgctgccaaccctggtgcgccgcgaccaggtcacacgggtcagccacggcagcacggccaccgccggccaggccgctgattgggtggaacagcagcgccaggccgccgagcaggcgctgacgcgggcacagcaagccctgccggtactgagcgaacgggtcggcacgcttggccaggccgccgatgcaagcgaactgctcgatgccaccaacctggccgccaaggccgcacggctgaccccggatgccgaacggctgcgcgcccgcatctacaccgacggcgacgtggccctgcgtgctggcgacatcgcaacggctggccaggccacggccaccctcaaggagctgatcggcagtgccggcaagctggccgcgctcaatgagcgcctggcccagctcaggaccgacggcctggccaccggggttgccggcgacgaccgcaagcgcctgcagcgtgcgctggatcatgcggccaccctgatccgcgtcgagacactggccgacgccgggccggcgctggaccaggtcgccgggctggtggcgatgctgcagcagaccctggtctaccgcatcgtcaaccgcgacgatgagcgcaccggcgtctggcgatacaacgagaacgccaatggcgggcgcaactactacctggtgaccgaggcgctggacgaatcaggcaacgccgccaccatcaccgtccgcaacgaggaaaccggcaaggacgaacaggtcacgctgtttggcgtgcgcgtgccacaggccacctacaaccgtgtggcggccgacaagcaggacaacggcatcatcgaagacgaccagatcggcagcaagccgcgcggcagcctgtcgccgcgcttccgcatgcccaccaccggcggctacatcacccaatggtga

SEQ ID NO: 516140 - DNA, 1437 bp, Stenotrophomonas maltophilia
atgagtgacttgaataccgcgttggccgacgtcgaagccgagatcgccgacctgcaggcccgcctggccagccagggcaaccaatgccgggagctggtcaaggaacaggacgtgctgcgcgagcagacccgtgccgatttcgatgcactggcccggctgcaggccgaggccagcaacgaggttgaacctgccgttgcccgcgatctgctgctgcagtcgcgtgccgacctggaccgccgtgaacgcaaaggccgtacgctggacgacgaactgaagcggctgctggatgaggagcaggcattgcagcagcgctcgctcgatgccgcagccgcgcgtgatgccgccggcgagcggctgcagcagctgcgggatcaggtggaggccacactgcgcagtgacagcgacttcctggcccagctggacacgctgcagctggcacaggcgcgatgggataccgctgagcgcatggccgcttcggcccatgccgaacatgacgccaaggctggtgcctaccaggccgacccgatcttcatgtacctgctgtcgcgcgacttcggtggcagcggctaccgtggctggccgctgctgcgcaccgtcgatggatggctggccgagctgtgcggctacgaccgtgcccgccgcgagtaccgtaccctgaccgagctgccgggctacctgcaacagcatgcggcgcaggcccgcgaagaggccgagcaggcgcacgccccggtacaggccgcccgcgattcagccgcggcgctgtccggtggcggtgtgctgaccagcatcctgcgggatgcgcagggtgccttggcccaggcactgctggacgaacagcggcaacgccaggcggtggatgcccagcaggcgaggatcaccgacttccgcagctggtccgacaccgagggccgttcggtgctggtcaccctggcgcgcgccctgtcctcgcgcaacctcgacgatctgtaccgccgcgtcgccgcgactgccacggccgaggacgatgcggtgctggagcggatccatgcccgtcgcctgcgcctggcagagatcgaaggaagcgtcggccagcacacgagcgacatggagacgctgaaggcgtcgctggcatcgctgcaggccacccgccgcagctaccagctggcgctcgatgccgagcgcagcagctatcgcgccccggcccgcagcgtcgccgagccgatcatgacctcgctgttcgccaccgccagcagccgcccgcggcgctccagcaccgcctcttccggcggcctgttcgattggggatcgagcagttccagcagctcggactcccgttcgagtttctggtcgggctccagttccagcacccgctcggactccggttccagcagcggcggcttccgcagcggtggcggtatcagcggcggtggcggcttcaagaccgggggcggcttctag

SEQ ID NO: 516141 - DNA, 1179 bp, Stenotrophomonas maltophilia
atgagcacacccctgcgcctgccggcgctgcgccagcgcgatggccaccacgcccgggtcacctacgaagaattgttcttcgatctggtgtacgtgttcgcggtcacccagctcagccaccacctgctgcaccacctggggctggccggggtgatgcagacgctggtgctgtggtttgcggtctggctgggctggcagtacgcctgctgggtcagcaactggttcgacccgcaggcgccgcgcatccgcgggctgttgtttgccacgatgctgttggcactgctgatgtcctcgtccattcccgaggcctttgccgaccgcgcctgggtgttcgccggggcctacgcgacgatgcaggtgggacgcaccgcttttgtgctgtacgaggtgggaggcacgcatgcgttggcgccgaacttccgccgcatgctggcctgggtgtgcgtgtcggcctgtttctggctggccggtgcggcggccgagggccatgcacggctggcgctgtgggcgctggcggtggcctgcgagtacgtttcgccgatgttcggttttgcctttcccgggctgggccgctcgcacacacgcgaatggaccatcgaaggtgggcatctggccgagcgctgccagctgttcgtcatcgtcgcgctgggagagacattgctggccaccggcggtgtgctcagcgaggtggagcactggcgcggtgcggtggtgtctgccgtgctggccaccttcgccggaaccctcgccatgtggtggctgtatttcggcatctccagcggcgacgccaccgaggcgatcacccatgccgacgatccggggcggatgggcgccaacttccactatgtgcatgcgctgctgatcgccggcatcattgccaccgcggtcggcaacgacctggtgatggaccacccggaggcggcggtgacgccggcgtacgccgcgctgatggtggctggcccgctgatctacctgctgggcagcgcgctctacaagcgcgtggtgtatggccgggcgccacgctcgcatctgtacggcgccgtggcactgctggtgctgggcctgctgctgccactgacccacctgctggcagccggctggttgaccagcctggtgctgctgggtgtggggttgctggatacgcgactgaagcggcgcatccagcaggcaagcggctag

SEQ ID NO: 516142 - DNA, 267 bp, Stenotrophomonas maltophilia
atgcacgtacttctggtcatcatcgccggtgtgctgctgctggcggtgttcatgctgttcgggcgtctctggagcgtgggcagctcgcagttgccggcggcgttgctggccttcgttgccacctggctggtgctggcgctggccaatctgtgggtgggggtctaccgggccggctacgctttcagggaagaggtgccgatcctgctgctggtgtttgcggtgccggcgctgctggccggtcttgtctactggcgcctggcgcgctga

SEQ ID NO: 516143 - DNA, 843 bp, Stenotrophomonas maltophilia
atgaagccggtgcctccaccgcagccgccgaccgagccggttgccaccgagcaggtgctggagcagcaccgcgacgcgctgaagcagcgctttccgctgccgccgccggccgccctgcagcgccgacgcggcggacgcatcgcaaagaccgtcctgcccgcgctgctggtggccatcagcgccgtgtgcatcgccgacccggcctggcaggtgcgcgactaccagaccgccgtgggcgaacggcgccagatcacgctgcccgatggcagccatgtgctgctcgatgccggtacccggctgcaggtacgccgccacctgcgttcgcggcaggtgctgctggcacagggccaggcgcgcttcgacgtgcagcattcggcgtggcggccgttccaggtcgaggccgggccggtgcacgtgcgcaactacggcaccgtgttcgatgttgaccgccagggcgacctgagcgaggtgaccctgtggcgcggtgaggtcggcgtgcgcgtggagggcggcggcgccgaacagcggctgaagcctgggcagcgcgtgctcgcgcaggcgggctcactgtcaccgccggagccggtcagcccggatcgcgccgactggacccgcggccgcctgcagttcgatcgcctgccgctgtccgaagtgctgcgcatcctgcagcgctatcacgaccgcccgatcgtgctggacgatccggcgctgggcccgttgcaggtctccggcgtgttcgatgccgaccgcgccgaaaccgccgtggcgctgttgccggagatcctgccggtgcaggtgcttaccgccgccgacggcagcctgcacctgcgcgcgcgccggtga

SEQ ID NO: 516144 - DNA, 810 bp, Stenotrophomonas maltophilia
atgcaggcaatggccgaccatacgatacccactggcgccgccggttccgatgcgggctggaccttcatttcactgcgcccgcaagggcagcatgcggcgctgcgccgcgctgttgctgggctgggcgggcagctgctggcgctgtcgccctggcggctgcagcgcctgcatggcacgcccgtgctgcgccagctgcaacgcgcgctgaactgcgatcgggtggtgttcaccagtccggccgcggtagccgccgccgcctcgctgctgcccctggccgatgcccagcgcagcccgtggctgaccgtgggcgagggcacggcgcgcgcgctgcaggcgcagggcgtggccgaggtgcatgcaccgcagcggatggacagcgaaggcttgctagcgctgccggtgctggccgaggtgcagggcctgcgcatcggcctggtcaccgcgcccggcggacgtggcctgattgccgcccgcttgcaggccgccggtgccaccatcgagcgtgccgatgtctaccagcggcgcctgctgcgcctgtcgccgcgcgcgcggacgcgattgacgcattcagccgcaccgtgggtgctggcggtaagcagtggtgacgcgctggatcacgtctggcagcagctttcgccggcgttgcgccagcgcctgcaggcccacgcccgcgtggtggtggccagcgatcggctgggcgagcaggcgcgcggccttggcctgcaacatgtcgtgcgcagcgccgggcccaccgctgaacagttggtggcggctgcacacgccacgctcaccggcccggcagcgacctga

SEQ ID NO: 516145 - DNA, 450 bp, Stenotrophomonas maltophilia
atgcgtatctgcctgctgttgttcgccctgtgcggccccctgctggcaaccgcaagcccggccgccacccggctgcctgatgccgccctgcccgcgccgctggaacgcgtgctgcgcgattacgagcaggcctggcgcgcggctgatgccaaggcactggctgcgctgtttgccgaggatggttttgtactgcagagcaaccagccaccggtgcgcgggcgcagtgccatcgaggcggcgtatgccggccagggcggcagcccgttgcggttgcgtgcgctggcctacgccgtggaagagaacaccggttacatcatcggtgcctacagctacggcaacaacgcgggcgataccggcaagttcacgctcacgctgaagcgcgtgggtgatgggccgtggttgattttctcggacatggacaacggcaatgcgccaccgcgtgcgcgctga

SEQ ID NO: 516146 - DNA, 531 bp, Stenotrophomonas maltophilia
atgtctcaaccctttgttggcgaagtccgtctgtttccctataacttcgcgccggtggggtggttcgactgtgatggccggctgctgcccatctcagagtacgaagtgttgttcaccctgatcggcaccacctacggcggcgatggtgtttccaccttcggcctgcccaatctgtgtggacgcgtgccggtgcaccagggcactggcggtggtctgggcacctacatagtgggccaggcggccggcagcgaatcggtcaccctgaccaccgcccagctgcccgcacacactcatgcgttcaacgcggtgaattcggcggccagttcgccatcacccggaccggcgttgcagctcggtgcggtcagcggcgacacactctataccgacagcatcaccggcctgggcagtggcaacctggcgcccgcctcggtgagcgcggtcggtggcagccagccacacgacaacaccatgccctcgctggtcgcccgctactgcattgcatgggccggcgtcttcccgtcgcaaggctga

SEQ ID NO: 516147 - DNA, 504 bp, Stenotrophomonas maltophilia
atgtcggaaccctttctcgggcagataatgcccgtggcgttcaacttcgcgcccaggtctttcgctttctgcaatggccaggtgctgcccatcgcgcagaaccaggcgctcttttcgctgctgggtgtttcctacggcggcaacggcacaaccaacttccagctgcccgatctgcgcagccgtacgccccgcggatccatcagcggcaccaacaccggtgaacgccagggcgtggagaacgtaaccctgctggccacgcagattccccagcacacgcacgttttcggcggcaccaccgccgacggtacaacacgcattccgcagggcaatgtgctgctcggaaaaaccgggacgcagaatgtctacggcgcatccggcggcgcccagatacctctgaacgtgctcgataacagcggccagacgcagccccatgcaaacctgcagccatacctggtcatcaatttctgcatcgcactcagcggaatctacccctcgcgcaactga

SEQ ID NO: 516148 - DNA, 5856 bp, Stenotrophomonas maltophilia
atgtggcacgcagagtcgatgcatcgcgacgcgatgcgccatgggctcggccgtcgtttctggggccacctgggagccatcctgctgctgggcgctaccctcgccctgcccgatatcgcacgcgcggcgtgcgcaaccttcacgccgcccaatgccagcgccggttcaccgatggctgccggcagtacgatcgtcattgatgcctccagctgccagggcgttgcaggcttcggcatcggcaacgtgaccacgccggccggcaacggtacggccaccgtcaccagccatgccgcctcgaagatctcctatgcccacagcggcaacggatcgaccaccgacacctttgccttcgacgacggtaccggctcgcacaatgtgctggtcaccgtgtacatccaggccgccgcatcgccgatcacgatttcgccggccaccgtgcccggtggaacggtgggcacgccctatgccggtgtcacgctcagttccagtggcggcaccctgccttacagctatgccgtcacatccggtgcactgccggctggattgacgttgagcagcggtggcgtgctgtccggcacgcccaccacgcagggcaccttcgcgttttcggtcaccgccaccgacagcacggcgggcacgccgctcaccggcacggccagctactcggtcaccatcgccgcaccgaccatcagcgtgaccaacgcacctggccctgcagtgatcggtacgccgtactcgttcaccttgaccggtgccggcggcacggcgccctatacctacctcctggatggtggcaccaccctgcccgccgggctggtactggccagcaacggcaccatcagcggcacgccgacggcattgggcctgaagaacttcaccgtgcgcatcaccgacagcagcacgccgacgccgttcttcgcggcggccaacctgtcgatcaacgtgcagaacgtcattccgccggtggccggcgcggccagcgccaccgtggcccatggcagcagcaacaacccgatcacgctgaacatcaccggcggcaccgccacctcggtcgcggtcggcacccaggccacgcacggcacggccaccgccagcggcaccaccatcacctacacacccactgccagctattccggtccggacagcttcacctacaccgccaccaatgccggcggcacctcggcgccggccaccgtcaccatcaccgtgtcgccggccaccatcagctacgcaccgtccagcccggcagccggcacggtcggggtggcctacagccagtcgctggccggcgccagcggcggcaccgcgccgtacacctatgtgatcaccagcggcagcctgccgccgggcatcaccctggccagcaatggcacgctgtccggcacggccagcgccaacggcaccttcaacttcaccgtgcgcgccaccgacagcagcaccggcaccgggccgttcagcgccaccagtggcccgctgacgctgaccattgccgccgcaacgctcacctatgcaccggccaacccgccggcggcgacggtcggcgtggcctacagccagtcgctggccagcgtcagcggcggcgtcgcgccgtacacctacacgattgcatcgggcagtctgccggcgggcatcaccctggccagcaacggcaccctgtccggcacgccgagcgcaggtggcagcttcaacttcacggtcagcgtgaccgacagcagtggtggcagcggaccggtcagcgccaccagtggcccgctgctgctgacggtgaatgcaccgacgatcacgatcaccccgcccacgctgccaacggtgagtgccggcgtcgcctacaaccagaacctgaccgctgccggcggtagcggcacctacacctatgcggttaccgcaggtgcgttgccgccgggtgtgaccctgtccactgccggcgtgatcagcggtacgccgacggctgcgggcagcttcccgctgacgatcaccgccaccgacagcagtggcggcagcggcccctacaccggcagccagccctacaccctcaacgtgactgcgccgtcgctgacgttgacgccgccggcgggcagcctctccggcacggcgggtgctccgttgaacgtgcctttcagcgcgggcaatggcaccgcgccgtatacgttcgacatcagtgccggagcattgcccaacggcgtgaccctgtcgcccaccggtacgctgtccggctcgccgacggagtccggtcttttcaccttctcggtgcgcgtcaccgacagcaccactggtaccggcgcgcccttcaggcgaacgcagaactacgtcctgtccatcaccgcgcccaccatcacggtgtcgccggcgggtctgccgcagccggcggcgggcgttgcctacaaccagatcatcaccgccagctccggccagccgactaccttcacctatgccatcacggcggggcaggtgccggtcggtctcagcctcgacgctgcaacgggtgaactgagcggcacaccgacccaggccggtccgttcagcttcaccgtgactgccaccgatggcggtggcttcaccggcaaccgcagctatggaggcacggtcagcgcgccggtgctgtcgctgtcgccgagttcgttggcaggcaccgccgccggtacggcctacagcgcgaccttcgttgccagtggtggcaacccgggctacagctaccagctcaccggcaccctgcccaacggcttgtcgttctcgtcgtcgaccggcgtgctcagcggcacgcccacgcaggccggcaccttcagcttcagtgtgagagcgaccgacagcaccaccggcaccggcgcaccgttcttcatcgtcaacaactacacactggcggtgtcggcaccgaccgttgtggtcgatccgaccacgctgccggcggcgaccggtggcgtggcctactcgcagacgatcacggccagcggcggcaacggcacctatagcttcagcctggtcagcggcgcgctgccggccggtatgacactgagcagcgcgggcgcgctgtcgggcacgccgaccgtggccggcaccttcaacatcaccgtgcaggccaccgacggcaacggcttcaccggcagccgggcctattccctggtggtcaacgcaccgaccatcacgctggcgccggccacgctgccgggcgggttcggcggtgtggcctacagccaggcacttgccgccagcggcggtgtcggcagctacacctacagcctgtcggcgggcgcactgccgccgggcatcgcgttgagcagtgccggcgccctcagtggcacgcccaccagcatcggtagcttcaacttcaccgtcaccgccaccgacagcgtcggcttcaccggcagccaggcctacaccttcaacgtggctgcgccgacgatcaccctcacgccggcgacgttgccagcggcgaccggcagcatcgcctacagccagccgctgagcgccagcggcggcaatggcggctacacctacagcctgaccgccggcacattgccgccgggcattgccctgagcagtgccggtctgatcagcggtacgccgaccaccaccggcagctacagcttcaccgtgcgcgccaccgatggcttcggcttcaacggcagccaggcctacaccgtcaccgtgaacgcgccggccatcgtgttcgtgcagaccaccctgccgggcgggcaagtggcggtggcctacagccaaaccgtcagcgcgggcggtggcagcggcagcttcacctacagcctcagcgccggcgcattgccgccgggcatcgcgctcagcagcgccggcgcgatcagcggcacgcctaccgctgccggcagctacagcttcaccctcaccgccaccgacagcttcggcttcagcggcagccagccgttcaccgtgggcatcaaccagccggtaccggtggtggtgaacgatacggccactacgccggccaatgcagcggccagcatcgacgtcaccgccaacgacaccggcccgatcaccagcattgccatcgcgcaggcgccgtcgcacggtacggcgacggtcaatgggctcaacgtggtgtacacgccggccagcaacttcttcggcaacgacagcttcacctacaccgccaccggcccgggtggcacctcggcggcggccacggtcagcgtcagcgtgacgccgttggcggtgccggtggcggccgcgcagagtgccaccgtgctggccgggcagtcggtgaccgtgcaggccgaggccggggcgatcaatggcccgttcactgcgatcaccatcagccgcgcgccgtcgtccggcacggcggtggtgcagggcgccagcatcgtctacagcgccgattccgatgcctccggcgtggtggacttcgagtacacgctcagcaatccgttcggcgcctcggcgccggcgcggatcagcgtgacggtcaacccacggccggtggcccccgcgctcaccgccaccgccattgccgggcgcgaggtcactgtggatctcacctccggcgcgcgtggtggcccgttcaccgccgcagccgtggtctcggtgtcgccggccgatgccggcagcgccaccatcgccgccagcggtgccggctatacgctggcgttcacctcggcggcgaccttcggtggtgcggtgcgcatcacctatacgctcagcaacgcgttcgccacctcggcgccgggcacggtcgatgtgatggtcaagccacgcagcgatccctcgcgcgatgccgaagtgctgggcgtgctggaagcccaggccgaaggtgcgcggcgcatggccatcggccagatcaacaacttccagcgtcgcctggaaagcctgcgcgcgggcggtgctgcggccggcttcagcaacggcatcaccttcagttcggccagcagccagcgccgcacgccgcaggacgatctgctgcgcaagggcatcggcgccagcggcgaagcgctgtcgatgatcgacgaaccggcgttgcagggcggtgtcgcgcctgctgccggcacggtcgatggcttcgcgttctggaccggcggtgcggtcaacttcggcacgctcaagcccggtgccggcagcaacggcatcgacttcaccacctccggcgtcagcctgggtgccgaccgccagatcggcccgtcgctgagcctgggcgccggcctgggctatggccacgatgcctcggatatcggccgcaacggcagccgcagcaccgtggatggctacagcgtggccacctacggcagcttccatcccgaaggtgggttctacgtcgatggcctgctcggctaccagtggctgaagttcgacgcgcgccgcttcatcaccgacaacggcaataccgcctacggcagccgcgatggtacgcagtggtttgcttcgttctccaccggctaccagcatcgcagcgatgccctgctgctgaccccgtatggccgcctggatctggcacgcgccacgctggatggctatcgcgagcatggtgacgaggtgtacgcgctcgactaccagcggcagacggtcaacaccagcaccgccaccgccggcgtgctggcgcagtggctggtgaagcgcgactacggcatgtggacgccgcagctgcgcgccgagttcggccacgacatgcagggctccagccaggccttcatgcgttatgtggacctgatgtccgggccggtgtaccgcgccacgctcgatcgccagtcgcgcaaccacacgctgctgggcgctggcatcggcctgcagacgctgaagggctggacgctgcgcgccgagtaccagaaccagctcgacagcagcagccgcgacaaccagggcatccagatcagcgtgcagaagaccctgccgccgtga

SEQ ID NO: 516149 - DNA, 675 bp, Stenotrophomonas maltophilia
atgaaaattcgaacgattgcgctgtcatcgacgctcgcactgctggcagcctgcgggcaggcaccagaaacagctgtcgaaacgacgcctgtggcggccgccgccgcacccgttgaaacgccggcggccaccgccaccgtggccgggaacgaagcgtccatcgaacagggcgtggacccgtcggtgtgggacaacgaaggcgagccggaagatcccggcgccggcggcgagctgacctgcaaggacaatccgctggcgacccatttcttcaccctggtcggcggcaacacggtggacgactgcggccgcaaggacccgaaggtgctggccgcgttcgatgcgttgatgaagggcacgcaggacgccgaatccgccgacaaggacatcccgccgctgcgcgaacgcctgttgagcgggcccagtgggccaggcgagctgacggtgctgcagggcgaaccctggtggttctacaccgcctgccaggcccacgactgccctggcacggcgttggcgatgctgtactcgcccacgcagacgaagatggtcgggcgcctcaccgcgcgctgcaaggtgtggtggctgggtgagcccaatgccgaacagcgcgcgctgattgaacgcgaacggccgctggacgaagcgttgctgaagaacgaaggcgatgcctgcgagtaa

SEQ ID NO: 516150 - DNA, 1023 bp, Stenotrophomonas maltophilia
atgctcgccagttcgagccctttggggaacctgatgaagctgtcatccgttgcatcacacgttgcgccgcgccgcctctacggattgctgcaggtattgctgccctggatcctgtttgcttcagcgctgcccgcgcaggccgccgctcgcgcgcctgccgccgaacacgtggtcatccagaccggggatgtcgcgcgcttcttccaggtgcttgatgccaaccagggacggccgagcgcgcaggatctgcagcgccattacctggatccgggcagcaaggcattgcacggtttcaccgcaagccgcatcggttcgatggaacggctcgcgcgcgcgatccaggacaagccggcgctgttcgagaaggcacgccgctgcgcgactgccctgcccgccgtccgcacccgcgtcgccgccgcgctcggccggctgggcacgctgctgccggaggcacgcttccccccggtgacggtgctggtgggccggggcaacagcggcggtgtcaccacgcccgagggtgtggtgatcgggctggaagcgctgtgcaacgcagactggatgcaggccgatgtgagcgaccgcttcgtgcacctgatcgcccatgagtatgtgcacatccagcagcccggcgcgagcgcggacgttgcgcaaccgaccctgctctatcagacgctgctggaaggaggcgccgagtacgtggccgaactgatctccgggcaaccggccaacgcgcatctgcgccgctggacccagggccgcgagtgcgcgctggaacgccagttcgcccaggacagcgccggcaccgacctgtcgcaatggctctacaacggacccggcgatgaaacgcgtcgtggcgatcttggctactggatcggttaccgcattgcggctgactacgttgcacacgcgtccgaccaacgcagcgcgattgccacgctgctgaacgtgcgtccggacagtgcgccggcgctgctggctgcaagtgaatggcgcccggcgtgtgggccggtgggaaacaggtag

SEQ ID NO: 516151 - DNA, 1401 bp, Stenotrophomonas maltophilia
gtgatccgggcaaacaccctggtccttgcaggcgcggattttcagcacctgcaaggacatctgttccctggagacgggctggaggctgcagctattcttgtctgtagtcgcgtgacgaacgaaggcgtaaagctcctggtaaaagaggtggtcaccgtaccccacgccgaatgcgaaaggagcagcaggcgtcttacctggccaggggactacatcgataaagccatcggcatcgcggatcaggaggatctctccctggttttcattcactcccaccccaacggatacgaagatttctctgatctggacgacgagtccgaccgtgagatcatccccccagtcttcgcgtcacgtcgcagatcgcatcctggaacgatagttcacggcagcgcaatcatgctgccatcaggcgccattcgggcaaggctgtatggcggcaacgggaggtctgaacccgaaacggtcaacctcgttgccatttacggatcggacgtctacttcttctgggatgaccagccgttgacggccaatagacccctggccttctcctcccaaatgacggccgagcttgggagactgagcgcagctgttattggtgtatcgggcacgggtagcatcgtggctgagcagctcttgcgcatggggatgggtcagctgattctggtcgactcggaccatgtcgagccgaagaacctcaacagaatccttaacacgactccagatcatgcgcggaacggagatttgaaggtagaggccttcaggtcagctgcatcgttgatcagtcccgatacagacatcattgcagtgcctcgagatatagggtgtcggatcgctgtggaggcggtagcgcaggcagacttggtcttcagttgcgttgatagtgaagaagggcgccacgtagccgaccgaattgcacgagcaatgcttcagcctttgttcgatgttggagtcactattccggtaaggaagccagggggaaagaccaagattgctagcattgcgggacgcgttgattacgtctatccgggcagcccaacattgttagatcgagaggtatacagcgcagccgggcttcgcgctgaagatctacgaaagcgcgacactgctgcttatgagcagcaagttcaagaaggttacatgcctggagcaaacgaggaggcgccctcggtaatctgcgtcaacatgcgtggagcaagcgcggtggtcctagaggcagtggcgaggctttaccactatcgcgcggacgctaacgagggcttcaaccgatccgagtttgatcttgtcgtcagcgaagacacggaagaatcctttcgggacctcactaccagcgagatgctgccactggcatacgggctacgcaagccgctcttggggatgccagctcttgaggatgaggcatga

SEQ ID NO: 516152 - DNA, 1101 bp, Stenotrophomonas maltophilia
atgaccgacgacatctcgcaacagtcacaccagcctccggataaggccactgtggtcgtaaatgaccgctcgtatgttgtagctgatgctacgcctacggggcgtcagattctcgcgaccgccggcctccgtccggagaccgcttatgccctgatcgcctggcctgctaccgggcctacccgtgagattggcctggatgaggtgctccacctccgccattctgaggagcctgctacgttcttcgccgccgagtccgacggcgtgtcttacttcatgctcgatgacgagcgtttcgcgtgggccggcccgctgactctgaagatcaccaagcggatcggtcggattggtcccgaaagggaggtctggatcgagcggcagaacgtccctgaccagcccttccatcaggaagtaactgtcgatcttgctgctcccgggctcgagcgcttctacactaaagtggctcgccgtacctggtacctcgacattcagggagagcgcaccgagtgggacaagcagctagtgcctgtgcgggaggccatggaagcggcgggtgcagatctgaccaaggagtacaccatcctgttcaagtttgttggcggcaagcgcgaaactgtggaactgaccgacacgcttgacttgggccgcgaagggatcgaaaggctgtggtaccggccgcgcaaggtgaacaatggcgaggctgccagcatgcggcgagcatttagcttgctcgatcaggatgtggagttcctggatggcactgcttggggctggcagaccttcgacgaaggccgccgctggcttgtagtggactcatatccacttcctgctggatacaccacgaacgcgtgcaggattgcagtggaggtgcccgctcaatatccgaccgctgagatcgacatgttctactgtcacccgcctctggccctcgccagtggcgtaccgctcgctgcgtgtgaacacatcgaaaccattgatggactgcagtggcagcgctggtcgcgccaccgcgatccgaccgcgccttgggtgccgggcaaagacaacgtgcggactcactttggtttggtggaagagtcgctcggccgtgaggtgggggcgtga

SEQ ID NO: 516153 - DNA, 255 bp, Stenotrophomonas maltophilia
atgcagcaggtagtgcccgaactcatgggcgagcgtgaagcggattcgtcctgccgactggatctgatcgttgtagccaatcttccacttgctctggcttggatgttttacaagcatcccctcaaagccaggagctaccagcgctttcacgctggaaattggttcgcccgggaatcgctgacgagagtactcaagcgcaagttctttcacatccactggaaagcgttccgcccccagaacctggttcaacagtga

SEQ ID NO: 516154 - DNA, 165 bp, Stenotrophomonas maltophilia
atgtcgctcagggaacacgtctatgtgtctggaggcaactacggctatacgctggccatcttggaacttcctgaagccatcccaagatgggaacgggaagacgaaggcgtcgatgaagatctccttgcacctatctcgagccccaattggcggcgtaaggggtag

SEQ ID NO: 516155 - DNA, 1377 bp, Stenotrophomonas maltophilia
atgactccgattaccctcgcgcgctttgacgccctaggtggctactgccggctggggccagcgatgtggcttattgaggagtgcggctggtacgagtctgacgacggacggcttctaggactgatcttgcgcgaccgccaagatggggactatcaaggggtgctgttcgcccgggaccgagcagagcgctttcgttgggtgcacggaacctccttctttgatgagccgggtttggcgctagacgagcttcgtagacagcaagctggcgtttcagaaggtcttgaagaggaacgtgagcaaggggatgagccttcggaggcaatggacttctttgccctgcgcgttccgcaggcgcgattgcatcctagctttcaatcgctgagtaacagtagcggctacagtccggcccgcgagttgatcagttctatgatgcggtggcacgaagacatcgacgggaactacgttgagcagtttcagtccaatgcttttgacgctcgccttctggagctttacgtattcggcctgctagtggagaacaggttctcactcgatcagacaaacttcgcgcccgacttcatggccaacgatggaattgctgagattgccattgaggtcaccacctgcaaccccacactggacggttttggtaacgccgtgcctgcgccgcagccgcggtcacgcgaagagcagacgacctacctgaaagagtacatccccatcaagtttggcagcgcgctaacgtccaaactacgcaagcgctactgggagctgcctcatgtagccggcaagccgcttgttttcgtgattcaagactttcatgcgccagcttcaatgatgtttgctcgcactggcctaagcatctacctctacggatacgactaccagtggcatcgagacgaggatggcaacttggagattttgccgcaaagggtcgtcgagcatcgttggctaaacaaggtcatcccatcaggtttctttgatctgcccgaggcagagaatgtcagcgccgttcttttcaacaacagcgcgactctgagcaagttcaatcggatgggttctgtcgccggcatgggctcggaacacgtacgaatgttccacattggtacggccctagatcctgatcccaatgctgccgaaccactcaagtttgcaatggaagtagatggggactacgaggagacttggtccgaggggcttgaggtttaccacaatccccgtgcacgacatccgctcgatccagatcactttccctctgccgttcatcaccaactgcagcgggatggaatgatgtcaaccaaatgggacggcggtttccatcccctcgcatcgatcacccagatcctcacagttcgaggggagccgaccgcgaccgaatag

SEQ ID NO: 516156 - DNA, 366 bp, Stenotrophomonas maltophilia
atgcgcgggcatactgtcagcccaccggatagcggattccgcatgcagacctccctttgcgcttacgtgcagcaggccgatggcaacaccgtgcaggtggtgcttgtggacaccaccgcgcagccggcgctgggtgcgcttggtcttcagggcgtgccgccaatcctgcatgcctgtgtcgccgacgatgctgccaaggcccgcatgttcgtcgcgttgcgtgatctgggtgtggccttctcggcgggacgcgagtggtgcccggccgaggtgttcgcctggctgcgcgaacgcggcctgctggaaggcgcgtacctgcgcatcgcctggacgggcccgcagcagttccagttgacccgggcgtag

SEQ ID NO: 516157 - DNA, 414 bp, Stenotrophomonas maltophilia
atggctgcagcaggacacaggaacggcgcacgccgctggtggcggccgctggctgctttgttcggtgcgctggcactgggcagcggcagcgtgtccgcgcaggaggcacctgcgcactggatggcctatgccgctgccgtaggtgggcagctgcagcagcgcctgcagcaggaacaggacccgcaggcgcagcgtgtgctggcgtggctgcaggcgcacccggacatgccggcaccgctgccggtaagcctgtggatcaccgccgatgggcgcatttcgaagctggcattcgacagcctgggtgatgcccaggtggatgccgatctgcgcgcgacgctgcaggccagcccgttgccggcgccaccggcggacatgcgccagccgctgcgcctgggcttggtgcttacccggtag

SEQ ID NO: 516158 - DNA, 3615 bp, Stenotrophomonas maltophilia
atgggtaggtgggctgttcgtgggctgctcctgctgctggccatgctggtggtgcccggtgcgttggcacagggggcgtctggtctgctgccactgagcccggtgcagcgccagtacctggcggcgcatccgaccctcgtcgtggggcagtatgacagcggttggccgcccttcgaatccctgcgcgagggccagcaggtcggcctggggccggagtacctggcgctgctcgccggtcagcttggcgtgaaggttgaaggccgacgctatccggactggccttccgtgctggatgcggcctgccgtggcgagatcgacgtggtgatgaatgtcggtctcagcgccgaccgcacccgttgcatggtctataccgccgcctacggcgaagcgccgctggcggtggtcggccgcccccgtgacctgcgtgcctccgaggcgccggacctggacgggctgcgggtggtgatcgagcaggatttcctgaccgccccgcaggtgcgggcacgcttccctcgtgcccgccagcttgtcgcaatcaacacgctgacggccttgcagatggtcagagacgacaaagccgatgtctatatcggcaatgcttttgtcgctaccgagttgatcgccagccagcgcctgcagggcgtggtgctgctgcgacccagcgatctgccccccgagcggctgcatttcggggtgcccaacagcaagcaacccctggccgaagcactggatctggccctggccgcgaccagccaggcccagcgcgatgcactggaacagcgctggttgatgccgccgaagtggtcggcgtcggcccagctggcattgagccaggccgagaagcgagtgctgcagcaaccgctgaagatcggcttcgcgccgaacgcggcgccgctgtcgttcaccggcgaggatggccagcccagtggcctggcgggcgagtacctgcggcggttgatgcaggccggggccaacctgaagacccaaagcagccacgactggtacgaagtgcgtgaaaaggctcgtcgtggcgagctgcaggcggtgatgggcatcccttcggactcgcgctacctggggccggagtgggtgttcagccaacccttcatcagcgtgccgaacgtgatcgtgacccgcagcgatggcggggtcgtgctgggcctggccgatctgcagggcaagcgggtgctgctgtctgacccggagcgcgtgcgcggctatgtgctgcagcaggcgccgcaggcccggatcatcgccgcgcgcagtgccgaacaggccctgcagcgcctgctcgatggcgaggccgacgcctatatcggcaacctggcgctggtggaccacctgctgcgtgatcgcttcccggggcggctacaggtggccgcgcccgccgggttcaatgaccagctggtgctggcggtcgaacgccgccatgcggcgctggccaccaccttcgaccgcctgctgctgcagatgacccccggcagccgggaggcactgcgcagcacctggctggccgtggaataccgcagcggcgtcgactggagccaactgttgagctggggcatacccgtgctgctggtgctgctgaccgcgttgctggtgcatgggatcggctactggcgcctgcgccgcgaggtggccgggcggcgccagctggaacaacgcctggccgaggtcaccgacaacctgccggcggtcgtctaccaggcgcgccgaagtgccgatggcattctgtcgttcccgttcatcgcaggcgatctgcaggcgctgttcggcatctcccggcagcaagccgagcaggacgcgcgggcgctgctggcctgtatcgaggaggacgaccgcgacgacatcgtgcgtgcgatcgagcaggccgcgcgccagttcgcgccgctgacgctcgagttccgcctgtgcggcgacgacgatccaccgcgctgggtgcgcagccacgcccatccctatgccaccgaggaaggcgcggtgacctggagcggatactgggtggacgtgagcgaggcacgcctgcaggccgatgcgctggcggcggccaaggccgaggccgagcaggccgccgagaccaaatcgcgcttcctggccaccatgagccacgagatccgcacgcccatgagtggcgtgctgggcatgctggaggtgctggcgcattcgccattggatgccgaacagcagcgcatcctgggggtgatcgatgattctgcgcagatgctgcggcagatcctcgacgacattctcgactactcacggctggaagccggagcgctgcgcctggagccggtgccgcaaccgctgcggccgctgctggagagcgtgtgccggttgctttccgcgcaggccagtgcacgtggcctggcgctgcaggtgcagatcgatccgcagctggcggcggcgcacgaagtggacggtgtgcggttgcgccagatcgtgttcaacctgctcagcaacgccatcaagttcaccacgcagggcgaagtacgcctgcagctggatgtgctggggccgacctcggacgaaggcgtgcaaccgctgtgcctgagcgtgaccgataccggcatgggcattgcaccggagcagctgcagcacctgttcgagccgttcacccaggtcggtgtctatatccagcgcgaccatgggggtaccggcctgggcctgagtatctgccagcgcctggtgcagatgatggagggcgaactgaccctgcaaagcgccctgggtgaaggcacgcgcgctgaagtgcgggtatcgctggtggaagccggcagcgaggatgccgccgcgctggtggccgagcaggaccaggccgcgctgctgccggccgcgctgcgccaggcacgggtactggtgatcgaggaccaccctaccaaccaggcaatgatggcctggcgcctgcagcagctgggcgtaccctacgtgctggagggtgacggccagcaggccctggaccggttgctgaccgagtcgttcgatctggtgatcaccgattgccggatgccggtcctcgacggattcggcttcacccggctgctgcgcgaacgtgagggccgcaatggccagccacggctgacggtgctggccttgaccgccagcgtgctcgacgacgatgcgcggcgctgccgtgaggcgggcatggacgcggtgctggccaagccgttgacgctggcagcgctgcgcgcggcgttgctgcgctggttgccacaggcccagggacagcgacgggcccagccacacgcgttcgctgcgccgctgcaggagtgtgccgacgacagcgcggtgatgcccgacctggcggcgctggagcggcagttcggctcacgcgcggtggccgagcagttgcgcgacagcctgctgcaggccagcgaaagtgatctgggcgccgtgctgcatgcggtgcagagcggcgaccccgcaacggcggcgttgcacctgcatcgccaggccggtggcctgggcgcggtgggtgcggcggcgctggccagcgaagccggcgtgctggtcgaacgcctgcacgccgccggtggatccgatccgacggagctgttcgcggcggtcgaggccttcgtggcacggctgcggcaacagctgcaacgcctggctcactga

SEQ ID NO: 516159 - DNA, 1086 bp, Stenotrophomonas maltophilia
atggcacggacccgggtcggcatcatcttcgggggcacctcctccgagcacgaagtttcactgcagtcggcgaagaacatcctcgacgcgctcgaccgcgagcgcttcgagccggtgctgatcggcatcgacaagcagggccagtggcacctgagccagccagacaccttcctgctcaatgccgaagatccggcacgcattgcgctgcgtccttccggcaccacgctggcgctgcggccgggggccgggcaagcgccgctgcaaccagtgcaggcgtccaccgcgctcggccagatcgatgtggtgctgccgatcgtgcacgggccgctgggcgaggacggtgcgttgcaggggctgctgcgcatggccggcctgcccttcgtcgggtcatcggtactgggctcggcggcggccatggacaaggacgtggccaagcgcctgctgcgcgatgccggcctggcggtggcgccctgggtatgcctgcgccgccatcaggccgcgcaggcggacgtggcggcactgatcgcgcagctggggctgccgctgttcgtgaagccagccaaccagggctcgtcggtaggcgtaagcaaggtgaaggacgcgcatgactttgctgccgcactggaactggcgctgcgccatgaccacaaggtgctggtggaatcggccgtggtcggccgagagatcgagtgcgccgtgctgggcaacgcgcagccacaggccagcgtgtgcggtgaagtggtgctgcacgatgagttctatgcctacgacaccaagtacatcaacgccgacggtgccgaggtggtggtgccggccgatatcgatgccgatacccaggcgcgcatccagcggatcgcgctgcaggcttaccagacgctggagtgtgcgggcatggcgcgggtggatgtgttcctcaccgccgagggcaagatcgtcatcaacgagatcaataccctgcccggcttcacccgcatcagcatgtatccaaaactgtggggcgccagcgggctgggctacaccgcgctgatcacgcggttgatcgagctggcgctggagcgccatgcggctgacaaggcgctggtgtaa

SEQ ID NO: 516160 - DNA, 579 bp, Stenotrophomonas maltophilia
atgctgcaggcgctcaaggatgagctggcgcgctttggcgccgacaacgacgcgcgcgagatcgagcgcggtcggcgcatgctcaacatcacgcccgataccggtgaattcctgtcggtgctggtgcgcttcggcaacgcacggcgggtactggagatcggcacctccaacggctattccacgctgtggctggccgaggccgccgctgccgtcgagggccatgtgaccacgctggagttcgccgaggacaaggcggcgatggcgcgtgccacattcgcacgcagcggcctggagcagcgcatcaccctggtccacggcgatgccggttgctggctggcgcaggcggccgaagccagcatcgatctgctgttcctcgattcggaccgcgaacagtacgccggctggtggccgcagctgcgccgtgtgctgcggccgggtgggctgctggtggtggacaacgccacctcgcatgcagcacagatggaaccgctgcgggcgctgctggccgcggacgtggacttcagcaccagcctggtgccggtgggcaacggcgaactgctggccgtgcgcaacgcctga

SEQ ID NO: 516161 - DNA, 2514 bp, Stenotrophomonas maltophilia
atggacggcatccaggattcccttccggtgcagagcccgcaggtgcggaccctgttgttcaccgacctgtgcgactcgctgcagctggtcgagcgcatcggcgacatcagcgccgctgagctgttccagcagcacgaccggctggtgcttggcctgcagcagcgctggaacggccagctgatcgatcgctccgacggcctgttcatgctgttcgagcgcaccatcgatggggtcggcttcgccctgtcctaccagagcgcggtggatgcgctgggccgcgaacgcggcatcgtgctgcgcgcgcgcgccgggctgcacgtgggcgatgtgctgctgtggaacaacagtgccgaggccatggcccacggcgccaagccggtggaagtggagggtctggccaagccgatggccgcgcggctgatgcagctggcgtggccggggcaggtcctgctgtcggccagcgcggaaaagatggcgcgccgggccagcggcgaactgccgtgggcggccgatgagctgcgctggaaggaccatggctgctggcggttcaagggtatcagcgagcgccaggaagtcttcgagatcggcctgcggggcagtgcgccgctgcgcagaccgcgttcgggcgaaaaggcctggcgtgatctgccgctgtggcggcgcccggccgccctggtgaccgaggctgcgctggcgttggcgctgggcgtgctgctgtggacgctgctgcggccggcaccggccatcgcctttgccgagcgtgactgggtgatcgtctcggccgtgcacaacgccaccgcgtacccgcagctggacagcagcctggagcaggcgctgtacatcagcctggggcagtctcggttcgtcaacatcctcagcgaactgaaggtgcgcgacaccctgcagctgatgcagcggccgccgcaggcgcgtctggaccgcagcctggccatcgaagtggcgctgcgcgatggcgtgcgtgcggtgctggtgcccagtgtgctggagctcaacggcaaggtgcgggtcagtgtcgaagtggtcgatccgcgcagcgggcagaccgtctacacccgctttgccgacggtcgcgggctggattcgatcctggcctccaccgaccacgtggtcgcggcgctgcgcacggacctgggcgaggccctgcgcgatgtcggccgcgaccagcggccgctgccgaccgtggccaccgcgaacctcgatgcgctgcatgcctatgccaagggcgtggacgccacggcggcagcgcgctatgacgacgcgctgatgttcttcgaacaggccacccggctcgaccccgggttcgcctttgcctatgtcgggcagatgaacatccagcacgccaagggcaacctggagcaggccgccgcgctgtaccagaaagcggtcagccagcgtgcgcacctgaccgcgcgtgaccagctctacctggacgcgtgggccgccgatttccagggagctccgccggcacgcatcgccgaccgctggcggatgctgaccgagctgtacccggatgatccggccggttggatgaactacgccaagatcctctacacccagggtgactacgacggcgccctggccgcggcgcagccgttgctggcccggcagcattctcgccgtgcactggtgctggtgttcgtggcgcgggtgcagctggcgcgtggcgagatggccgccgccgaagccgccctgcgtggcgcacgtctgcatccgggttggaacggggatgcgatggaaccgctgctgctggccctgtcgggtgatttcgatgcggccaatgccggctttgcggcaatgcggtcctccgggctgggagcgcgcatgctgcgtgcggcggtgctgggcatgcaggatcaccgcagcgaagcggccaatgacatgcagcaggcggctgcgcagtgcacgaccggctcgggtctgtgcgacatcctggcgttgcaggcgctggcctggcgtggccagcagccggtgtccgccgcgtcgcaggcctaccagcaggtgctcgaccggacattgcaggcggttgatcgttcgcagccggcgccggcacggcgcaacgcattcatcgcgcttgccgcggcctaccacgccgtgcgcgccggtcagggcgcggtggtggcgcagcgacgggaggcgttgcaggcgctgcccgaacgcgatgcagacccgcgcctgcgcgagctgtggaacctgttgcaggcgcgcatcgcgctcgaccagggccggctggcgcaggcccagtcgctgctggcccagcaacctgctgcgagcctgttccagtggcgggtgctgcagatggacctggccacggccagcggcgaccacgccacggccctgcgccacgcacagtggctgcaacgccacgtaggcctggcatttgccgaggatgttggcgactacgcgctgcttccactgaacgcgatggacgtgcagcggttgacggcgatccggcccgcgccgctggcggacaagggcgcgtcagccgcgccctga

SEQ ID NO: 516162 - DNA, 285 bp, Stenotrophomonas maltophilia
atgtctgcttcgcccctctccgccgacgttgtccggcagctgctggaccggctgtccagcgatgatgccttccgtgccgaatttgccagggatccgggccaggcgctgctagcgctcggcgccgacgaggaaaccgtgcgcgcctgccatacacccctggcctcgctgggcggcaaggcggagttcgccaaggccgctgcgcgcatgcaccagctgctggacgtgcgcgccgcgttcaccgtgccgttcctgttcgaagatggcctgccgggcctggatcagtaa

SEQ ID NO: 516163 - DNA, 1164 bp, Stenotrophomonas maltophilia
atgagattccgtcgttgccggacgctgttcgtcgagccggtggaacgccccgccttcaacctggatgcgctgctggccggtggtacgggcgtgcagctgcaaccggtgctgcaggtacacgccgcgcatctgccgaccgtgcaggtgatcgatgcggccagttgtgcatggttgctggcctgcagtgccgaacgctggcagtcgttgccgcaggcgccggaggcacgcagccgcgtgctggcgctgctgcagcaggggctgctggtcagcgatgacccggcccacgccgaggtgttcgcggccgagcaggagctgcgcgacagccactggtggccgctgtcggccctgcattaccagcagtcgtgctgggacggcgtggacagcgtgcaggacatggagcagcaccagctggtgacggcccgcgatctggtgcgcagcttcggccacccgccgccggaagcgccgccgcggttgcccgacgcggtgccgctgccgcattgtcaggatgacccgctgcagccgctgttgcaggcacgggccacctgccgcaacttcgatcgtgcccgcgcgttgccgctgccgttgctggcgcgggtgctgcaacaggtgctgatggcccaggcacaggtggaaaccgatccgggagtgcgcttcctgaagaagaacgtgccctcggccggcagcctgcatccgctggaagcctatctgctggtgcgcaacgtggaggggctggcgccgggcctgtaccactaccacgcgctggcgcatgagctggggcggctgcccggcccggtggacgatccggcagcattgggcctgcggctgctggccgggcagcactggttcgccgatgcgccggtgctgctggtgctggtgtgccggttcgaacgcaactactggaagtaccgcaaccacgccaaggcctatcgcgcggtcacgctcgatgccgggcatgtctcgcaggcgctgtatgcggccgcgaccgcacagggtctgggcgcgttcgtcaccgccgccatcaacgaagccgaggccgggcgcgcgttcgggctgcggccgatggccgaaggcgcgctggccatctgcgggctgggctggcgcaaggccgaaaagaccaccgcggaactggatccgggtggccacgtgtggccgctgccgggctga

SEQ ID NO: 516164 - DNA, 1449 bp, Stenotrophomonas maltophilia
atgcgccgccgctcccttgcccttgccctgtccctgctgttgccggccagcgccttcgcccaggcccagccgcaggccgcaccggccccggtaacgccggccgcgcgcggcagcgccaccgtggtgctgaccgccgcgccctcggactggcgcgcgctggatggccagcgcgtgcgcatcgccgcgccgctgaccctggccggtaccgacggcctggaacgcttcggcgagctgacggtggccttcgacggccgcctctggcagccgaccgaagtggccgcgccgggcaccgcgggcagtgagcaggtgatggccgacaaccagcgccgccgcctgctgctggacgacggcaacgatgcccgcgaccccggcagcgtggcttatctgccgggcaatccggtgctgcgcaccggcatgcagctgcgcaacgtggaaggcaccgtgcgcgtggacgcacagggccgtgcccgcctgcaggtggacggcgcgttgcagctgccggaactgcagcgcccgccggtgccgaaggtgccgggcagcctgcagatcgccgcgttcaacctggagaacttcttcaatggtgatggccagggcggtggcttcccgaccctgcgcggcgcgcgcacgctggacgagcacaaggcgcaggtggccaagctggtggccaccatcagcgccctggataccgacatcgccgcgctgatggaactggaaaacgacggctacggtccgcagtcggccatcgccgaacttctggccgcgctcaatgcactgccgcgcaccgacccgaacgacgaatgggtggcggtggatccgggcgaaggcccgggcaccaatccgatccgggtcggcatcatctacaagcgtgggtcgttcaagccgctgggcaagccgctgacccggaccgatggcccgtttgccgaacacagccgcgcgccgctggcgcaggccttccagggcaagggcgcgccgttcatggtggtggccaaccacttcaagtcgaagggctgccgcgatgccagcggtgccgatgccgaccagaacgatggccagggctgctggaacgccacccgtgtggaatcggcgcgccagctcaaccagtgggtgaatggcgaagccgcgcgcctgaaggtgaaggacatcgtgctgctgggcgacttcaatgcctacgcgatggaagatcccatccgcaccctgcatgacctgggctggcaggacgcgttcaaggtggccaaggtcgagcacccctacagctacgtctacaacggctacagcggccgtcttgaccacgcgctgctgagcccgggcatggccaagcgcctgcgcggtgccgccgaatggcacagcaatgccgacgagcaggacgccagcggctaccagggccgcaacgtgcagggcccgtggcgcagctccgaccacgacccgctgctgctgggcttcgacaaataa

SEQ ID NO: 516165 - DNA, 642 bp, Stenotrophomonas maltophilia
atgcccgcaccctccgaccttgtggccttcgccctcatctcgctgggcatggtgcttactcccgggccgaacatgatctacctggtctcgcgctcgatctgccagggccgcaccgccggcttgatctcgctgggtggggtggcgctgggcttcgtgttctacatgctgtgcgcggcgctgggcatcaccgccctgctgatgaccgtgccgctggcctacgacacactgcgcatcggtggtgcgttgtacctgctgtacctggcctggcaggcgctcaagcccggcggccggtcgccgttcgcggtgcgcgatctgccgccggacagcccgcgcaggctgttcgcgatgggctttctgaccaacctgctgaacccgaagatcgcggtgatgtacctgtcactgctgccgcagttcctgcacccggaaggccatggcagcgtgctgatgcagtcgctggtgctgggcttcacccagatcgcggtcagtgtcagcgtcaacgccgtgatcgcggtgatggccggcagcatcgccggcttcctggccgcgcgcccgacctggcaggcggtgcagcgctggctgatgggcacggtgctggccgggctggcggtgcgcatggcggtggaagggcggcgcagagcgtag

SEQ ID NO: 516166 - DNA, 933 bp, Stenotrophomonas maltophilia
atgcccttcaacctgctgctgcttcctttgctggctggctatcttgttctggcccggagcaacatacgtgcgtattcgacagtacggctgagcaaagaacaattgcttctgcatgcatctctatctggattgatgctgttggtagctagccggatctcatgctatttcgccaagaaggcttggctggggcagttgctgggcgaaacgctttactccatcgccccgtttccctatgtcggaaccgctttgggaacattggtgcttgcaggtgcgcttattgcgctcagtaatttctttgtcgacgaatcactggcagcgcggtggctctaccatcgtggaaattatgacctgatgagcgagatcctctggcgcgcactgctgggcgattcgcagcgttcggtccctggtccggccctcttcacgtgcagagtcgcgaagagcgttttgactagcactttgtgtgctgtgtcatggacgcagtggtggcggctgcctagcatgatcgcggtcctgcaaagattccggacaatcgagcttttctcgctcgacgcaggggatacctcacgatcagtaatgctgcagatgcgcgatggcaaggtgatcgtcggattcgtgacccagatcaaagtgactacggcagtacctgattttgtgatgatcgctcccatctggacgggttacagagatggtgccagcaaccaagtcgtcaagtcggttgtttacggtgcagtcctgcagtcgggccaggcatccggaaatctgaaccgggtgattcgtgttgacgacattgcttggggcacgctcttcgattccagtgcgtttgattttccctcaacggaaacatgcagcgccccgacagggccttcaacgaagcctcgcatacgtcttaaatcccgatccgtagatctgccgagcgaaagacagccggcctag

SEQ ID NO: 516167 - DNA, 897 bp, Stenotrophomonas maltophilia
atgaggctgttccgatacgccactgcggtggcgttgttgctctgtgcgcagggagcgcacgcgcaggtgaagcagatacaagatatcccgtgcgaagggtgttcatacgctcagatgcaggcggccgcgctgtcggacgtcgacgtcggcggtgcactggtaaccagtatttccactggagagatacggaagttcgtcatcctgtgggatcgcaggatccaggagctgccgatcgaacaggacctggaagactacttcgtagccctggtccgcttctggcacgcgaatgggcgcagccttgaaatgaactacgacgttgcatcgaacacgtggagactcccccagcaagcgatggcgactgcacgcgtgcgacgggcactggcggctcccgccgcagaccggccggttccggcaaccgtatacgatgcattgcagagcccggccaggatgaacaacgcgatcgagcagttgaatgcctcctggctcgcccgcgggtatgcggcgcacatgacgttcgtcaattcggtgaggggaaagaacatctcgctgactgcgggccgcccggtgactaccctgaacttcgccgatggttccaggatcaaggcctcctacgacatcgagatgaaaagctgggcgcccattcccggcaccggccgcgacgttcacgggaacccggttccagagaccaaagcagacgttgccaaggacggcaagccggtggtgtacgagttccccggtggcatcaccagtgacgcctacatggacttcagtcgctacctcttcgatctgggcgtgcgccccaacatcggcccgggcgacaaccagatgatctgcaccagcgaagtaatggacgccgacatgcgggtggaggtcaggtgcatgggccgcaggcactga

SEQ ID NO: 516168 - DNA, 243 bp, Stenotrophomonas maltophilia
atgcagcaacgcacctatatcgaactggtcctggagttgttcggcttcatcagcctgtgcatggcgatgacgacctccggcaccccggtgctggtttttggtctcacgaccatcctgctcacggtatggatacccttccaacggcgcgagattcatcgcttcacccgcgccgtgtcgattgcgctggtcattgcgtcagtagccaggatcgtcattcatttcctacccaatccatccatctag

SEQ ID NO: 516169 - DNA, 582 bp, Stenotrophomonas maltophilia
atgggcaatctgagattgagagagtggcaacggctggacttctatgatccgaagccagtattgatccagctgcgccagatggagacaagcggcgtgctcgatggtctgccggcgaaggtgaagcacctgcgaactagagagctaaaaccgtatttggagcgtcgacaatgcgccatcttcgcgtacctgatgggaaaggtaacggggacgcttatcgcggttgcctactctgaacagtcggactatgacgcggtcatgcggtggcgactcggggatgaggtgcggtatagccctgtgcagatgaaggagcttccacccgacatgggagcaggaacgaaggatctacagcagcagatcgaccgtttgaaggtcagatatccgcgatccggtgatttaacggtggccatccacctcaaccgcaacatgcgtgtgctggtgagcgagctggatctgtcggggctgaacttgggcggattgtggctcttcggcgcagaagacgacggtgccaatcggtggcgggtcgtcggtgacttgctgtcgccgaacgcaagcaccgaggtgttcgactacccgtacgaatag

SEQ ID NO: 516170 - DNA, 246 bp, Stenotrophomonas maltophilia
atgtcgcagcgcgttgatgacgggacctggatcgcgttgctggatcggcatcgcaatggcccgggtggcccttcccggctgtgcaccagctatgagcagggtcgcgccggcgctgagctgtgggtggccaggcatgaggcacggctccgcgaggaggtggcaaccatcaaccgctggcgggaggctgtgcgcgcgaacaggctagccaagttgaagaccccgccacccttcggctggatgggataa

SEQ ID NO: 516171 - DNA, 672 bp, Stenotrophomonas maltophilia
atgtcagagtggctgggtagttgcacgctattagcaagcgtggtcgtgcaaacaactgttgagggagctgccaagccagagactacttggctgcaggcttacggacagctcataggcgtagcgataggctccgtcctgactggcgtggtagcggttttgctcgcgtttttgaacaaccgaagcagtgacctcagactgcggatgcagcagacccacgatctgcagcgcgagaaccaacgcattacgcgagataggcttgaggagctctacgtccttgctgggcactggatatccgcccttgagcagtacggaattctggggctacggctcgcgagaggtctgctcacctacaagcagtacgtcgatcttcagctcaagaatggggagaagtcccaggtccagaagtcgcgcatggaactgctgctagacgtgtatggatcacccgaggtcaatgactcggtagcagcggttaaggaggcccaaagcgcctacttcactcggattcattccgtagagctgattgcccagagtcctgataggttgagcgaggtcgtagtcagtcatccgcctgcagatgccgagctctacgcgaagctcgatcagcttgctggcgacgtcggcaaagcaggaaggaagcttcttgcggctatcgccgagcaggccaagagctag

SEQ ID NO: 516172 - DNA, 348 bp, Stenotrophomonas maltophilia
atgtcgcccttcatcaacaccgcctggccccgcttcttcatgggcgcgctgcccatcgccgtttttgccgttctgttgagcagctcgatcgatgcgtcgccgtaccgctggctgatgcaggcgacgctcctgctgacacccttttcgcttctggtgttcctcgggttcggctggcagcgtctgcgcaaggcacacgctgcgtatccgatcctgaccagcgaactggaccgcatgctggcggcactgatcggcaacgtgaaggtggccgcgctgtggttcggcctgaccatcgtcggcatgttcgctctgatgctggcgtgggtgctgctgtacaggtccggcggctga

SEQ ID NO: 516173 - DNA, 450 bp, Stenotrophomonas maltophilia
atgaaacatgcattcattggatctgcggtactagtgatggccctgggcacactgcttgcggcaggcgccagcgcatcctcgcaacgcatcacccatacggtgacctcggatgcgtttgcgatgcagaccacaggcgcacgtcaggtgctggactgggtggcccaacgcgtgcgcccgtcgttcgccccccagggctacggccatgtgcaggtggaacggcgcgcggtctcggtagggcgtgccgctgcgcgttcggatgaatcgatcccgggaaagctgccggagcagggtctgcccggtgagatctaccgcgtggagaacctccttcccgacggctccacccagagctgggagttcacctgggtgcaaccctcctccgggcatggcggtggttgggaaatcaccgcctacacgtacaagaagggcaacgacccggaaaacccgcgctga

SEQ ID NO: 516174 - DNA, 357 bp, Stenotrophomonas maltophilia
gtgatcgcggccaccggtgcaatgccggtggccgctgcgtctgcggcctcgccgctgatgtggatggcggtgatgctggccgccgccaccgcgctggcctggctgctgcgccgccccgacgcgcaggcggcgtggccgcgcatcggtttcggcatcaccctgctggtgctctgcgccgcgctttcgctgcaactggcgatggacctgggcagcgggcacagttcgctgcaactgcgctggagttcccgcccgggccccctgcatgacgtcggcctgcgcacgatggtggtgtgctatctggccgcactcgcggcagccggctggggcgcgtggaaactgctgcgccgacgacggtag

SEQ ID NO: 516175 - DNA, 678 bp, Stenotrophomonas maltophilia
atgccacccgcctttccgcctgtgcttcccgatcgaccacgacgcctggcgttgctggatccgcatccggtactgcggttgggtgtggaagtgctgttgcgccagcacgccagcgtgcaggtgcggctgagcctgtccagcgaacgccatctgctgcacctgcttgagcgcagcccgacctgcgtggatctgctgttgatcgacgcgctgccgatgggcgaccagggtgacggcctggccttgctgcggctgctgtcgcagcgatggccgtcattgccggtgctggtgctgtcggcgcactgcaacgccagcacggtgaactccgcgctgcgcgcgggcgcacgcgggttcctgtccaaatcaacgccgccgcatgtcctgctgcgcgccatcgaggtggtggcgcgtggggggcgcttcgtgccgccggagctgcgcaccgcactgcacctgccgcggatccgcaggttgcctacacccgcactgccgcccctgagccggcgcgagcgcgaggtactcggcctggtgctgaagggcatgacgaccagcgaaatggcgctgcgcgccgggcgctcggccagcacgatcagctcgcagaagacctcggcctaccgcaagctcggcatccggggcgatggcgacctgttccgcttccgccatctgctcgactgtggatga

SEQ ID NO: 516176 - DNA, 627 bp, Stenotrophomonas maltophilia
gtgcaaccgcgcatcatcatcgccgacgaccaccccgtcgtcctgcacggtatccgcatcgtgctgcaggcccatctgatggacgtggtcggcgccgcccgtgacggcgccgggctgctgcacctggtggaacgcgaaacctgcgacgccgtgctgaccgacctgtccatgcccggcaccggccctgatggccccgagctgatcggtgaactgcaggcgcgccacccggcgctgccggtggtggtgctgaccggcgcccgccatccgggcctgcttgatggcctgttgcgcgacggcgtgggtggcctggtcgacaagtgcgccgatttcggccagctgccgcaggcgctgaacgcggcgatggccggccaggtcttcgtttcgccacacctgcgccaccaccttgaagcgcgcgacctgatgttcgcgcgtgagccgtcggcgctgtcggcgcgcgagcaggaagtgctggacctgctggcggccggcttgaaggtcaatgccattgcggcccattgcggccgcagcccgaagacgatcagccggcagaaggctgaagccaagcgcaagctgggcctgcagaccaaccaggaactgttcgcctatctgcagcgccggcgcgattga

SEQ ID NO: 516177 - DNA, 621 bp, Stenotrophomonas maltophilia
atgccacgtgccagcgtggtctgctccggcaggcctgcgcccatccagtcgttggcgccgcggatgccacggttcaggaccttgcgcaccgccgtgccgatttcacggtcgccgcgctggttctgccagaccatcgcgttccagcggtgcatgaagttgcggcagatatcgaacaccgccgggccctgcaggcgcgcgtgcacgtcctgccacggcatgcgcggctggcggccactgtcgagcaggcgctggatgcgatccaccggctcgttgatccacttcaccagcgattcccacgcttgtttggccttgttgaacttgttctcgatctcgtcatatttggtcttggcatccttgaccagcgagtcaggatcgcgcacgtatcccacaacggtggtggccgtcttgatcgggcccagaatgacgtccttgatcgcggccttgcgctcgtcgacccactcgccgaacttcttcgcctggatcttcgtgaagccttccaccgcacgcccggcggcggcagccgcctcgccgacgttcagcttgaccgcttcgtcggcggcccggttggaggcggcgatgacgtcggcgtattccttttcgatctcggtcaaccacccttga

SEQ ID NO: 516178 - DNA, 3183 bp, Stenotrophomonas maltophilia
atggatgcttcacacgcgcgagtcgcactcgcttcgctggccgggctggagcccgagcgccagctgcaccgtctgcaggccgagggcctgcccccgttgctcgttgaacaatggtggggccacgagcgcctcggtgacggattcgattactgggtggatgtgctgcatgtggatgccggcctgcccatcagtgagggacccgggcgcaaggcgacgctgatcacccggctggatgacggccaggaccatgtccgttgcggttacatcgccgcgatgcgcctgctggataccgacggggggctggcgcgctaccgtctgcactgtgtgccgtggacctggctgctggggcatgcccggcacagccgtgtgtaccaggcgcgcagcgtgcgcgagattgtcgaggacgtgctgggcgggcatgccgaactggcccgctggcgctggagcgatgatgcggtggccgacctggccgccgcaccggcgcgcagctactgcgtgcagtaccgggaatcggacctggccttcgtgcagcgcctgctggccgaagaggggattgccggtgccttccagaacgacgccgagggcgcactgacgcttgtgctgttctccgacagcagcgcgcagccggaaaatccgcagtcggcccgcgacggcggtatccgcttccatcgccatgacggcaccgagcaggccgatgctctgcaggcactgggcgcgcgtcggcagctgggcagcaaccggctgtcactggtcaccagcgattacaaggggccggtcgtccgccatgcgcagctgccgttgcagggcgccggccacagttcgcgcgaagtctacgatccggctggtgcgcatgccttcgccgacgccggtgatggccagcgacgggcccggctggccgccgaagcccatgaagccgggttgggcggatggtggggggcgggcactgtccgcagcctgcaggcgggctggttcatccgtgtgctggctacgggcaccggttcggcgccggtgatcctgcccaccgagatactccatcatggctgcaacccgctaccggtcgcgcaagggcgcgatcagccgcgtgcggcgccgccggcccgctggctttccgccagcgtcgcgctgcccggtgcgccgctggaagcaagcccggcgatgggctacgccaaccggttccgtgccgtcgaccagcagcagcgctggcgtccggtcctgctcgacggcaccgggcagcggctcaacccgcgcccgatcgcgcccggtcaccagagcgccacagtggtgtccggcgcaggccgcgacgacgccgacctgcatgccgacagccagggccggatacgggtccgcctgcatctgcagggggcctccgatgcggctgccacctgctggatgcgggtggcacaacgctacgccgggccgggtgtaggggcgcagttcctgccccgcgtgggccaggaagtgctggtgggtttcctggatggtgacatcgaccggccgctggtgctcggtgccctctacaacggccgtggcgacgccggtatcgcccccacgcctgccggggctgccgcggcggacagtggcagcagtatgttcaagcaggctgccgacaaccgtccgagcgcgcagggcaacgcggccggtggtcacgcgccggcctggcacgccatggccgccggcgacgaccagcatcggcacgccggtgcgttgtggggcatccagtcacgggaatggtccggcagtggctacaaccgcctggtcttcgacgataccgatgcacagctgcgcctgcagctggccagcagccaggcccacagcgagctgaacctggggcacctgctgcaccaggccgacaaccatcgcggttccctgcgcggtgagggcgtggaactgcgcagcgatgcctggggtgcgctgcgcgccgaacgtggcgcctggttgagcgcacgcccgcataccgcgttgtcgccggccggcgaagcggtgcccgcaggcgcgctgctgcagcaggccaccacgctggcggcctccagtcacaacgtggccgcggtccaccgcaccgtcggcctggccagccatgcaccgccggacgacagcgccggcctggccggcctgcagcggattgcccgtgccgtcgtgccagggcagagctatgaccaggcccgcgcaggcagcgatgaccgcgccacggccggcaacatcccgcacacccgtgaacccacgctggggctgcatggccatgccggtctggcgatggtcaccggtcagggcctgcactggagcagcgcctgccaggtggtcctggccagtggccagcacagtgacgccagcgtggccggcaacgcgcgcctgcacgcgacgcaggcggtcggcctgctggccgccagcggtcgggggtttgccggcgatgcggcattgaccctggtagcggggcaggcagcgctggacgtccgcgcccagtccgctgcgatcaccgtgcagtcgcgggcggcgttgcgtgccgccagcgcccaggccgcagtcgagctggccgcgccgcgcaccctgcacatcgccaccgccggtggcgccagcctcaccctggaaggtggcaacctggtggtgaactgtcccggcaccatcaccgtccatgccggacagaaatccttcgtcgggcccgcgcagctcagctacgcgctcccggacatgccgaccagcaccctcagcgagcagattccgaagctggccttccgcctgcaggacattccgggaccacaggggcatccgctggcaggccagccctggaagatcgtgcgtacccgccaggcgctggacgaggacatgcgtgatggcgcgctggtaccaggcaactgggccgagaccgttgccgaagggcaggccgacgagcagggcgaggtcagcctggatgacaccctgtgcgcgaagatctggaacgatgccggccggttcccggggcgcctgttcctggtgcatgggatcgacgtgattcccctgcagcgtccgcgcccctacagcagttcgccgggcgtgcgcgccaccatggacacgctcgaagcgatcaactacggcaagaccctggccgaccttcccgatgacgcggcgctgcatgcctaccggcagcgcgccgagtacgaattccagtcgcacatcgacgccgacccggcccagcgcaaggagatccagtga

SEQ ID NO: 516179 - DNA, 1695 bp, Stenotrophomonas maltophilia
atgtcgataccgtcccttggaaccgggtcccgcggcgaatggatgctgacagggaacgtactcgagggagaagtgcgattgaactggtggaatgaaggcctgcaactgaagttgcgcatccatccggcagggttggtcctggcggcgttctatgcggtcgcatgctgggcgacgcgacagttgtcactggatcagttctacctgcccgcaggaatacgcgtggcggccgtgctgctctgcccgccacggctgtggccctatctgctgctgggcgagtacgcctacttcgcgcagatgcgctatccgatgatcgacaaatatggcgcggcctgggtcgtgttcgcatcggcatcgctgatgcctgcggtgatgctcattacccacctgtgccgcagggcattggcgcattcggtcaatgcccgcctgctggccatcgcactgctgtcttcagtcgtggtcacgctgctgaacgtaggtttctcgcaactgctgtggccgacgccgccggccgattcgctgctggccttcgtttctcgcgcgatccgcttcagcgtcggcgatttcattgccatcctgaccgtcgcgccgctcgcgctgctgtgggccaaacgcgatgccgaggccggctggaaaaccctgttcaccgggccggcggcagttgctttgtcgttgatgtcgctgctcgggattaccgcaaccctgattccttccgaggccagtgcactcaggacctccctgcagctgctgatgggcctgccggcgattgcgctgacctgccagtatggctggcgtggcgctgccatcggtgtgcccgcactgaatctgatcatcggcctgacgacccccaagccgtatgccgccgccttcgatgcatcggccttcaccacgcagcagatcatggccatcaccggtgtcgcgctgctgctgctgggctcgcgcatcagccactaccatcgccgctatcaacttcgcgaggtcggcgagaagaacgccatccatctggcacgcagttcgcagatggcgagcgaatcggatctgcgcgaacgcgccatccacctgcgcaagctcggcgatggcatcgacctgtcgctttcggaagtcatcaactggctcaacacccacggccactcggccatcgccaacagcttgacccacacggccaacgtgcactcccggctgttccgcgaacaggccagcatggtctatcccaccgcactggagcagttggggctgtatgtcgcgctgcaggcaggcggcgtacacgcggcgtgggtcaatacccaccgtgtggtcgagccgcgcctgtccggcgatccctgccggctcagcctggacctgcagctggcggcctaccgcaccctcatcgacgcggtgtccctgctgttgaagagcgaaccaggtcagatcgtggtgcgggcgcggtgcagccgcgcggggcagcaacgcggcatcgtgatgaccgtctcgttgctggacccgcatcgcgctttatccgccgccactgaaggcaaggtcagggaacgattggcaggccggacgctggcattcggtggctcggtgcactgccgccacaaccgcatcgtcatggtgctggtggaaccggtcgccaggacgcgacgggagtcggtcgaaggcgcggtgttcggcgccagcatcgcctctccggcctgggacgggcggcaggccgaagcctga

SEQ ID NO: 516180 - DNA, 465 bp, Stenotrophomonas maltophilia
atggtgctcttcattttccctgccgaggaggcaaacgtgcgaatagttaatgttggtgcaacgctgggtgtggtcatcgctgcctgcctgccaatgtcggctttggcccagtccgatgatcacggcatccgcagcatgagcgagcgcggtctgggcgaggcctttccggcgtcgaccaatctgagtgaagacccgtcgtggctggtctacggtttccagcgtgatggaatctcgtacttccaggtcaatgacctcgccggtcgcgtgcaggtcatcatcggcaacgccgatgcgacgttctgggagcttccggccggcaatgtgcaggtgccggtgtcgctgccggggcagccgctgccggtgcccgccaaggcgacccgttcgctggtctatcgcggcaatggcttcgtgctggtgcgctacagcgccgggacgcgcgtgttctgggccattgaagcgcagtga

SEQ ID NO: 516181 - DNA, 1599 bp, Stenotrophomonas maltophilia
atggccggggcacgggcacgctgccccggcaacggaggctcgcacttggatcgtttgaagaacgtcgttgaactgagcgtccggatccggccggtcgggctcgcgttggcggcactctatgcggccagttgcctggcctcgcgccagttctcgctggaccagttcttcctgccggccgggatccgggtggcggcgctgctgatcgtgccgatccgcctgtggccctacctgctgctgggtgagtacgcatacttcgcaacgctgcgcatccccatgatcgacagctatggcctggcctgggtcattctggcctcgacgctgctgatgccgatggcgatgctggtggtctacctgcatcggatgagaatgccctccgaggccgccaccggtctctggctgctgtcgctgatcttcggcacggcactgttcgtaccaggtctcaacctgggcatttcctatgtgctgtggtcgaacccgccgccaagcaacctgctggatgcggtcgaccggacgatcttcggccacttcgccgccatcatcaccctggtgccgttggcgttcctgtgggcgcggcggcatgccgatcccgaatggagcacccgttttgccctgccgaccgttgcagcgatcctggtgatgctgatcctggggctgggcatgcagctgacagccagcagcgcccacaccacgcgaacccatctggtgctgctggcggcgctgcccgccatcgccctgactttcatgcatggatggcgcggcgcggccatcgcaattcccctgctgaacctgccgttgcatggcgcaacgccgagcaccggcctgccctcctcgttcgacctgggcacgttcgccacccagcagaacatggcggtgatgagtgtcgcgctgctggcactgggatcgagcatcagctatcaccaccaacgcgcccggtcccgcggcctggccgaagaaaccacgttgcgcctgacccgcagttcgcaccagaccagcgagcgcgagctgcgccagcgcgccacccatctgaagcacctgggtgaaggcatggacagttcgctcaacgaaatggtcagctggctcagggcgcagggccaccatgcggtggccaacagcctgcagcacgcctgctcggtgcactcgcgcctgttccgtgagcaggccagtctggtctatcccaccgggctggagcaggtcggcctgtacatcgcgctgcaggccggtggtgcctgcgagatctggaacagcacgcaccgcgtgacgccacccaggctggcgggcaacccctgcctgctgaccgtggatctgcagctggcgatctaccgcacgctgatcgaagcggtctcgctgctgctggagctggagagcgggcaggtgcgcgtgcgtgcccgcagcggccgggcaggcgatcgccgtggcatcgtggttgtcgtgggcctgctcgaccgcagttgcacgctgtcggccggtaccgcccaccaggccgtcgaacgcctgtccggacgcatgctggcctatggcggagcgctgcgctgccgcggcaatcgcctgcggctggtcctgcatgagccggccgtgcacgcttcgcaggcggcagcctga

SEQ ID NO: 516182 - DNA, 756 bp, Stenotrophomonas maltophilia
atggctgaggctcccgccacgctgcgcgcacagcagcacgccttcaccgcgcatctgcgcgacccgcaggcggtgtccgcaccggccgggctggacccgcgccgggtggcggtgtatcagcgcctgctgttcaacaacctgctcggcctgttgagcactggattcccggtctgcatgcgcctgctcggcgaaccggcctggaacacgctggtgcgccactacttcgccacccaccgctgccagacaccgttgttcaccgaactggccgccgagttcgtgcagtggctgcaggcgcagcccacgctgccgcatccggcgctggccgaactggcccactacgagtgggtggaaaccgccctgtaccagttgtccgccgaacccctgcccgcgcctggcgatgtcgatccgttgcgggtgccgctgcagcgctcgccgctggcctggccactgctgtacgggtggccggtccatcgcctgggtgccgaggatgcgccaagcgcgttgccgtccgaaccgactggcctgctggtgcgccgcgaccccgacggtgaggtgcggttcgctgcgctcagcccactggcggtgcacctgctgtcccggatcggcgaacagcctggcctggatggccatcgctacctccagcagctcgccaccgaccatggcctgggcgccgatgcgctggccgaacccggtgccgcgctgctgcagcagttcctgcgcgccggcgtgatcggcccgcttgctccaccgcgctga

SEQ ID NO: 516183 - DNA, 885 bp, Stenotrophomonas maltophilia
atggaaatgcaacaccgcactggacgcaccgccgtactggccgccctgctctgcctgggcctggccgcctgccagaccctgcccgcgccttcgcgcctgcctgcggcccagctgcaggcgctggaacgccgcggcaacgacggcagtttcgagggggcctgggaaaccgcacagaccttcgaacgcttcaacgatccgcgtgcggtcgcctactacgagcgcgccgcagcggtcacgccctggaccttccacaacaccaaggcagaacaagcactgggccggatctggacctccggcgcgctgcggcatgccgacagtccgcacatcgatcctgcacctgtgctgcgtgcctcgtggcgacgcggcgagcgcgcctatcgggccgcggcgaatcacggcaatccctacgcgttccaggaactggctgctgcctatcgccagcagggcgacgcgcagcaggctctgcgttgggacctgcgcgcgatgatctaccagcgctatccgagccgctcctcgcgattgccggatgccgtgacgccgcaaggcgatgcggtgcacccgctggtcgcccgcctccaacggcgtgcggatcgcggcgacgccgaggcgcaggtggatctgggggcattgctggaaagcggcgtgggcctgccgcgcgatccggcggcagccctgctgctgtaccagcgtgccggcgagcagggcaacgtgtttgggcagtacttcgccgggctgctgctgggccggagtgcgccgggtgtggagaaggataccgctgcggcggccggctggtttgccagggccgaggcgcagcacttctacatggcggcgccgagttactgggaaaaggcgatcaagccgccgttcttccttttctcggaatag

SEQ ID NO: 516184 - DNA, 867 bp, Stenotrophomonas maltophilia
gtgaccgcgccgcaggacctggcgcagtctgcgatctaccggcacccgtccgacagcctgttcgggcgggtgctgccgcgcctgctgcacgcggtgcaatggacctggctgcgccgcgcgctgtcgcggcgctggccgatgccggcgctgctcagcgacgtgcgcgacgtggtctacgtgagctggtgggtcgatgtgcgccatgcaccgccgccaccgccgagccatcactacgtggtgcatgaagggcgcacgccgtacaccatcctcagctaccgccacggtcatttcgggcccgcactggccggcccgctgcgcgcattgatgccgtcgccgcggcagagcaactggcgctggtacctgcgccgtgacgatgatcctgaaggcacaccggtcgtgctgtttgatcgcaacgtgatggaccagctgacctgcgtcgctggcgcgcgcgcgttcagcgatgccatgcagccccacctttccgcccgcttcgcgcatgtgctcgacgccgatggcgcgggccacacattgatcgagagcgggcagggcagcgcgccggcgttgcatctgcgctggcaggctgccgcagggtggagcgtggccgggtggtcggccgccttcggtggcgatgctgccctgctgcgtttcctgacctgccaggacgaggccatcgcccgcacctgcgaccaccgctgggccagtacccgcattgccctgccggtggccgtcgacaccttgcagccgctgtgcctttcgggcgaactgcagtgcccgcgcctgcaggcgatgggtgtggcgcttgaatcgggcctggccttccgtttgccgagggtgccgttccgggtcgtgtccgagcgcctgttgtga

SEQ ID NO: 516185 - DNA, 699 bp, Stenotrophomonas maltophilia
atgcgtgtggcgctgatcctgctggcgtcgctgctggccatgcccgccgctgcactggacctgtcccccaccaccctgcagctgcccgtcgaaggcggccgcaccgagctgtggctgtacaaccccgggcccggccactggcagggccaggtgcgggtgctggcctgggaacaacaggtggatgccgaacggctgcggccgaccgggcagatcctggccagcccgatccagctcgatctcgccccgggcatccgccagcgcgtctggctgctgcccggccgacccgagcccgtggccggtgaacaggcctatcgcatcgtgctggagcccagccgggccggcctgccccgctactcactcccgctgttccgcggccaggccgcaccgcaggcgcaaccccgcgtacaggcccggctcgacgccgacgcgtcgcagcctcatctgcgattgaacaacgccgggccgctgcacgcccgcctgcatgacctggtgttcgttgccgaagacggccagcgcaccctgctgctaccggggctggccggctatctgctggccgggcacgaacgccgctgggcgctgccgccccggccgaacggctaccatggcgggcgtttccaggcccatctgcaggacggccgccaggtcgagctgaccgcgccggaccccacaattgcagcgggcgcgccaagcgggctataa

SEQ ID NO: 516186 - DNA, 870 bp, Stenotrophomonas maltophilia
atgaaatccctgctgctttcccttgtggccggcctcgcgctggctggctgctcgctgtccagcgtgagcttcgagatcgacaaccccaccgacagcccgctgcaactgaccctggacggcaagccccatgccatcgggccgcacgcctcggtgtcggtgtcgctggcgccgggcgaacaccgcctgcatacccaggcgctgggcgacgtgcagctggtggtctacgccgacggccagggcgggctgatcaacccgaccctgtccgagtacgtggtggtcagccaggtctacgccgatgccgggcagcagtacggagaggccaacaacgagatcgaccttgacggggtcgccatcgaaggtccgttcaccaaggtccacggcctgttcatcgaaaaggactggcgctacggcgcccacgagaacttcccggacagcgtgatcaccacccagcagcaggccggcatcgagcgccgcaacaagctgttcagcgctgttgatttcatcgcctacctggaaaaggagaacgaggaaccgggcagctacctggccgccaacccggccggctaccgcactccggaggacccggcaccgttcaccccgaccgtgctgccggcgctgcacccgcagttcgaggcgcatgccgccgccgcgcggcagtggcacgcgcgctacctggccgcggtcgatccgtccgaacagacgcgcctgaagaaggagagcttcaaggtcagcgtggacttcgtgcaggccagcgcggccgccggccgcgacctgcgcccggccgaccacgagcagcgcaatgcgttccagtcggcgctgggccaggccaccggtatgtcggcggcagtgcgcccggccagcaagggctga

SEQ ID NO: 516187 - DNA, 1392 bp, Stenotrophomonas maltophilia
atggatgaacgaactgtgaacgaatcacccctggttgagtcgcgcgtgccggttgccgaggtcgatccagcaccggaagcgacagcgcgcttcggccgactgcgcgagcgtaccgacgagctcgaattgttcatttccggcctgctggcgtttgcgctgttggcggtgcccggttacctgtttgatgcctgggcgcgcagcagcctgcacaccgaaggcatgtacttccaggtgctctggtttggtttcagcatcagcgtaggcatgtgctacgtactggcggtggcgctgatcgcgcacctgaccgtgcgcggctactggatcgggctgatcgggttgaaatcgcactttcccaagggcatcgactgggagcggctgcagcacatgggcccggtatcgcgtgctttcctcaaggcccgcgacggcggcctggacggcagcatcgagcgcgccgaccgcctggccacgctgcttttctccaccacgctgctggcggtgcagacgctggcgggcaccctggtggttgccgtgctcacgctgtgcgcggcgatggcgatcagcgcactggccgggggggcggagcgcgtcggcatgacggtggtggcaacggtgctgaccagcctgttcgcgctcgcgctggtgccggcggtgctggaacgtgccattgcacgccggcagcggcgcggccagtcctccgatcgtcagcaacgctggctgcagcgctttctgggggccatgcagcgcattcccctgctgcgtctgatgcaggcgatgcagttgacgttgcagagcaacctgcgctcgcgttcgttcatggtggcctacctgctggcggtaatggtggcgatggtgctgggcggagtgcaggtgctggggtcgctgaagttctcgctgttcaaccgttatcaggtgatgaccgatgaagcggtcgaacacggcatgcttagtgcgcactacgagtcgctgcgctccgcgcacgatcagctgttgccgtatccgatgattccgtccgacacgatcagcggttcgcgactgcgcgtgtttattccgcatcggccgcagcgtgacaacccgctggcccgccagcactgcaccgcgctgccgggcgcccgcaacgaagcgaccggcatgcaggcggccaatgcggcagtggagtgcctgtcgcggctatggcaggtgcagctggacggtacgccggtggatctgcacgacttcatgccgatggagcgtcgcgacctcgacatgcgtggcctggtgggctatctgccaacggctgggctgacgccggggcggcatgatctgtcgctggtatggaatgcggagggcggcacgcgcggaggtgatcgtcgccgcgagttccgcatcccgttctggtacgccccagacccctaa

SEQ ID NO: 516188 - DNA, 1266 bp, Stenotrophomonas maltophilia
atgaaccgcctccgccagttcactgccaccaccctgctccccctgtccggcgccaccagcgccgcccccgccccacactgggtcgccagctggcaggccagcccgcaaccggtgtgggacgccgatttcctgttcccgaccctggtgccggagacactgcaggaccagaccttccgccagaccgcgcgcatcagcctgggcggcacgcgcctacgcatccggctgagcaatgcctatggcacgcagccgctgcgaatcggtggcgccagcgtggcgtcgcagccaggtgcaacaccgcagccgctcagtttcgacggccagcccggggcgttgatcggccccggccaggaacggttgagcgacccgctggcactggtcacggacaaccgccaggcattgcaggtgagcgtctttgtgcctgggccgacagcggttcgcaccttccactgggacggccgccagaccagttggatcgcccccggcgaccagagccgggcacgcgacctcagcgatgccaccgccaccacggcccggctgttcctgaccggcatcgatgtcgaagcgccggccagcgcacgcagcgtcgtggtcatcggcgattcgatcaccgacggcgcgaccgccagcctggaccaggaccagcgctggaccgaccacctggccgtacggctggcgccgcgtggcgtggcggtggtcaatgccggaatctccggcggccgcctgctgagcgacggcatgggggaatccgcacgggcccgcttccagcgcgatgtgctggatcagcgcggggtggccagcgtgatcgtgctgatcggcatcaacgacatcagctggcctggcacggccttcgcccggcggcaggcccggcccacgctggcgcagctgcaggccggctaccgtgccctcgccgcgcaggcacatcgacggggcctgcgcattctgggggcgaccctgccaccgttcgccggcgccctgcccggcacgccgctggacgactactaccacccggacaaggacgcgctgcgccggcagctcaatgcctggctgcgcgcgagcagcccgttcgatgcggtgatcgacctcgacgctgccctgcacgacccggccgatccatcgcggatggccgccgcccatgacgccggcgaccacctgcacccaggcgacgccggcaaccgggcgatggccgaggcggtggatctggacgccctgcttggaggtcaggggtcggccggggtcagatccctttgcgccagcaaagagctctga

SEQ ID NO: 516189 - DNA, 1089 bp, Stenotrophomonas maltophilia
atgcgcttcagcttccgcactctgcgattccgtggcgcgctcgccgtgctcgcctgcctgctggcgatgccgtggtgcgcgctccaggctgccgaacgcccttactcggtggaggtcggttacagcccggcgctggatctgttcaatctgctggacaacctgccggactggctgcccggatacacctcgtcggtgtaccagaaggagtggcagcgacgcttcgggctggatgatcaggatcgggcgctgctggccggctatgcagccttccggttgcgtacctcgccgctcgcgcgcgatgaggtgaaatcggctacaccggctgaccgcctgttcgcgggggccgacacccgcaccggcgatccctattcgcgccatttccttgccgctcggaccttcgatgccggcgtagtcgcggcccttgccgggctggacgggaaagaccagcggctgctgcggcagtactacgcgcacttcgcaccgcgtgcggcacagctgctggcggcgcaggcacccttcgcggcgcagcaggccgcgctggtccggcaactggccgcgcctgcggtcgtggacctggccgaacagatgaaggcgttcttccacgtggatgactcgcctgccttccaggtccgcttcgtctggtggccggaggcggggcggacccaggccaagctgcgcggcggctacatcctgctgttttcgaccttcgagaccgaagacgactgggcacccatcgtgatgcacgagtacagccactacctttcggcaggacagccgctgacgcagcggcgggcgctggccgacgcattcgttgcggcatgtccggctgcgctggcgttgcccaatccgctcaatgcactggaggagccgttggccatctactggggccagtaccggttcgagcagcaggtgcggggacaggcgctgccagtggcgtcggcctggtacgtgcagccacacgccgatcgcgccgccaaggcgctggccgcagcctttcccgccaccgaatccgccccgtcgctgaaggccgggcgcctgttgcaggcggcggcgtctgcctgcggcgcgagcaaggacggggcgccttga

SEQ ID NO: 516190 - DNA, 189 bp, Stenotrophomonas maltophilia
gtgtacttgaacggtgtcgattccaagcgcctggccaaggcttggtcggtgaccgaggacaacgagcatgccaacaccgaagagccttggcacgtggagcacatcgacaagcaccacactctgcgcgtgatcgcaggcgacgactacgagggctattcggctgcggtgaagtgccagttcagccggtaa

SEQ ID NO: 516191 - DNA, 795 bp, Stenotrophomonas maltophilia
atgcgcagcatcttgctcaccatcgccatcgccgctgcgttcacgtgctctgcggccgacaacagatcgcgggaaacatgtgacctgcagctcgagggtgttggttcgatacggttacggggaaatgtcctgtctgtcaccgatatgcttgcagcgtcactggggcccaaggatgagttcgagagcagtgccgcctaccagcagcgcgcggacaaggtgctgcaggcgagcccgattgccaacggcatgatctgtttcaggcaggattcggcggtcaccacgttatacgatgcggaccggcagcgcctgaccgtgtatctcatcaacaagtcgttgaatctcactggtgccaaaaacgacagcaagatctactatgcaatgccgcttactcggaaaattctgaagcgcgagaagtatcgggccgaaaacgcattcggggccggggcgatggtggataaaacggtactccagacggtgaacgtcgcgttctccaagaaggatatagacgcattagcctccagtgaagaagtcatcaatactggcgtcgcgttacggttggagctcgatgccagcccggagctggcgcgatcgcttaataacaacacctcgttggtctaccagatcgagctgatcgaacctttcgtgcttgcctcccgccgctggacaccgcccttgctcagcagcccattcgaaagtgtagatcaacagacgctgttccctgcgcggttgattgctgtttcggtgcagaacgagaagactggtgccatcgtagccaccgtgccgatggctcactag

SEQ ID NO: 516192 - DNA, 1224 bp, Stenotrophomonas maltophilia
atggatgagcgtgcagcggatgcggaggtgatgtccatcgacgacctgcttgagcgggtacgtcgtgaagggccggtgctgcggttccagaatgatgtggtgggtattttcgatccggcgctggcggtcaggatcgacaaggccaacaccgaccggcatacggtgcccgactcgttgatcgattttctgggcctgcgtggcaagcaggacccggtggcgtggcgcgaggtacgcacactgttgagcgagcaggctgggcgcctggccgcgcccgcgcagatgcgcgcgctgtatgaacgcatgcatgcgtttcttctgcagcgtgcggcgcgtccgcaggatctgggtgggttgagctggtgggcgatatcgcagtcgttgttgccgctgctgatcgacgggctgagtcgtgccgatgttgcagcgctcatcggcgagcagaagacccgctacaacgccatcgtgctgcagaacttctcgtggtggcgccggatcatcgatttccatctctcccgccgtgccgcacgcaccgtctcgcggcacatccggcgccgggcgcgcgagccgcagccgcgcgaggatttcctgcactccctgctgcccctggtgccacgggtgggggcggatcgggtcgcctacctggtatcgatggtgctggccggcatgtcgggcctgccgggcatcactgcggccagtctgctgtacgccatgcatcgtttcccgcagtggcacgcccgcatccgcgaggaaacctcggcgctcagcctggatgaactgtacgcgctgccgatcagatcgctgccgtgcacctcgcgcttcgtcaaggaaacgctcaggctctggccgggtctgttcgccctgcatcgtccggcgtcgcatgacatcgatatcgagggcgtctgcatccgcaagggcggtgcgtacgagttgtcgtcctacttccagcatcactcccccgacttctgggaggcgccggacagcttcgacccggaccgctggttgccggagcgtcgccagtccaacaagggcgcctatgtcccgttcggattctcctcccgcgcctgcatcggaagcgcggtcgggcacgcccagctgctgctgttctgcgcgctggtcacgcgtgatttcgagttgcaggtgcaggcacagcccacgccgtggatgcagctggaaggctttgcgtatccggtcgatttcgtcggccggttgatcccgcgcggctga

SEQ ID NO: 516193 - DNA, 264 bp, Stenotrophomonas maltophilia
atgacagacgaaaagcgagacacccagcgcatgttgttcggcgatcccgggctacccggcgccgggctgtcggtggcggtcgtggcgttgatggtgctggcgacgttggccgcagcagtcggtttcctgcggctggtcgattcgatgctgggcctggggctgatcgggatcgcggtgttcctggccatcggcgcccggatctgccaggcacgcgatcagcaccaggcactgtaccggctcttgtcgcggcgggcatcgctgtag

SEQ ID NO: 516194 - DNA, 492 bp, Stenotrophomonas maltophilia
atgcgctggaagaccttgtgctgtgccgccatcgcactgcttgtcccgttacccggcctggcacgcgggccacatgtggacctgatcgactacccgcagccggaggccaactgggaccgggcctacggtctggaagcggccctggcacgcgagttcaacgcgatctgcgccgatacctggtgcgagggcgactacagcaactaccgggtaatggaattccgctgcgccgtgctggcccaccggggcaccgtacagcgctgcgtctgggtgatcgccgccagcgagctttcggtgcacgccgacagcggggaggtacaggtcgacaacgggcgctggacctgccagttggcattgcagcccggcgtgcccgtcgaggcgttccatgccgcgctggaggcccccggtggcctgaccgcaccgctgcccggcctcgaccacgggctgttcgaggtgctgcccgcctgcctgcggccgctggggagggcaggctga

SEQ ID NO: 516195 - DNA, 483 bp, Stenotrophomonas maltophilia
atgcggatcatccccgaatcaaccctgcgggtcgcgatgctgcttctgatcgccggtgccgcgcaagcgggtcctgcgtacgtggacgcgcgtgattaccccgcccctgccatgggccatgagcgatttctggccgccgaacgccgcctggtgcgcggcttcgacaatatctgcggcgacaccttctgcgaggggcagtactacaacctatgggcgatgcgcctgcgctgttcggtgcggcgcgataccggcgtggttggaagctgcgtctggacctttgccggcagtgatacctgggtgcgcaacatcggccggatcgacgtcgatctgggcagctatgcctgtgtgctgccggtggcgcccggaaccccgctgagccagctgctggaggtgtgggaggcgggttcggcggacgacgccttgcatgcgccgttgccgggcaccgggcagaacacatacgacgcgctggtcgattgcctgtag

SEQ ID NO: 516196 - DNA, 918 bp, Stenotrophomonas maltophilia
atgctgcccgccgccaatgacgatgccctggccgaacaggcccggggctggatcgcgtggttggcctcgggcgaccacagcgacgcgcgcatgcaggcgttcgagcgctggctggcacagccgggccatcgccgcgcgttcgagcacgagcgcgcgctgtggcgcggtgtcggtccgcgcccgcaggcggcccgcgccgtgcggcgtcggccgcaacgcctgcgctgggcgatggcggcggcggccgcgctggcgatgctggtggcctggccggaagcctggttgcgactgcaggccgaccatcgcagcacgcacgtcgtacagagcgtgcacctgcccgacggcagccgtgcggtactcgatgccgacagcgcgatcgccgtgcacttcgatgcagatgcgcggcaggtggagctgctgcgcggtcgtgtctggttcgaggtcagtccggatgcgcagcggcgattcagcgtgcaggccggcaacggcgtggttgaggacatttccaccgccttcagcgtggcccgcggcgatgatcgggtggaaacccaggtcgggcagggcagggtgcgcgtggccagcccggccgatggcggttggacctacctgaaggcgggccagcgtgcggcctatgacgagcacagcgcagtgacgcgcctggccgacatggcggctgacagcgtgggcgcgtggcggcagggcgagctgctgctggagcaggccagtgtcgccgacgctgtgcaacgggtcggccgctaccgtgccggcccgaccttcgtgcgcggcgatctgtcgcggctgcccgcagtgagtgccgcgctgcgcatcgatcgcccggaacaggcgctggatgcgctggcagcaaccgccgggttgcaggtcacccgcttgccgttcggtgtcgccatcgtccagtag

SEQ ID NO: 516197 - DNA, 363 bp, Stenotrophomonas maltophilia
atgtggtactgcgcacacgccattttctattacgagagccaagggcaggaatcgttcctggtgcatgagaacgtgtacctgatcagtgccgataacgacgagcgcgctcttgagaatgcaaacgcgcttgcttgcgggtatgaggatctgagcggccgcctgatgggggaagacggtgaaccgtccctctatcgattcgccggaatccgcaagctgatatcggtagagactgatgaggacactgccgagggacgcctgcactccggtgtggaggtcacgtactccgtcatggcggtggatacgttggatcaggtgagacgtcttgcccgtggtgatggcgtggaagtgctgtaccaggaatag

SEQ ID NO: 516198 - DNA, 603 bp, Stenotrophomonas maltophilia
atgcagatcgatctgttgctgctggatgtggatggcgtgctggtgcggtaccagcgcgcgcagcgcgtgctgcagcttgcgcacgcactggacgtgccgacgcaggcggtgcaggccgcgctctacgacagtgggctggaggcggcgcatgacgacggcacgctggatggccccgcctatctggagcggctggccttacaactgggcaggagcgtggatgtgcccgcctggatcgccgcccgccaggccgccagccacccgcagcaggcagtgctgcaccggctggaaaggctgcagctgccgatggcggtgctgaccaacaacggcgcgctgatgaaacaggcgttgcccatcctgctgccggaactgttccctgccctgcaggagcgtgttttctgcagtgcggatttcggcctgcgcaagccggcaccggaggtgttcctacgcacgctggaaacactgggtgtggcgcctgcacacacgctgttcgtcgatgacctgtttgccaacgtgcgcggcgcacgtgccgccggcctgcacgcggaaaccgtgcgcgacggccgtggcctcggcaaggtgttgaagcgctacgcggtgaggtag

SEQ ID NO: 516199 - DNA, 2280 bp, Stenotrophomonas maltophilia
atgtcagctgtcttctcccttacctccgccgacaagaaccgcctggccgccgccgagctgccaccgcgggtgcgcgatctgctgggcgcgctgatcggcctgtgccggcaggcactggccgcgcccctgatcctgaccgtcgaagcattggaacagaccctgctgcacgatgccgaccgcgcccgcaatccggcgcagcaggccgaccttatggcccagcgcggccagctgcatgcctttgccggccacttcccggatcgcgtgctggatgccctggccgagtcgctggcacggctgcgcgaaccggccagtgccggcgcgcctgccacgcccgcgccggccctgccaggcatgcagggcctgtcgctggtcgccgagcacgacgtggatcgcgacctgctgctgaccgaaatggtacggcgcgaaacccagcgctcgaccaacgcgctgaatctgctgggacaacgcctgggcgtgctggccgccgcaccggcattcgaaacggacaccctgccgctggcaccgcaggcgctgtgcctgatcgtgcgccggctggccgaacaggatgcgcttggcgcggagatccagctggcgctgtaccgcagcttcgagcgccaggtgctggagcgcctgggcgacgtactggatcgcgccaacgccctgctggcccagcacggcatcctgccggggctggtctacaccccttatctggcgcgctcctccagcacacggcggatcatcacccagtcggtgggcggcggtcgcgccacgcagccggcccggcaagcggccgcaccgctgaccggttggaacggctccgcccccgccggctcgtggtcgcatctggtacaggacaccgtcaacgacgctggcagtgccgctgtcgtcggcctgactgcctccaccggcggtgccctgcatgagctgctgcagcaggcccgccacgcagccgccgccccggttgaaaccggcgccgtccccagcgccgccgtcgacgcggtgctcgctcgcctgcaggcccagtccagtgccgccaccggcgtggccgacctgcaggcagcggtggtcgcccagctgcgcagcgagcatggcgcccaggcccagctgggcagccacgaccgcgacaacctcgacctgctgcgcatgctcatgcagcaggtgcagcagcggcagcgccccgacccggtaccggccgccctgctggcgcgcctgcaggttccgctggcccgcgcggcaatggccgaccccggcttcttcgtgcgcgacgagcaccccgcgcgcgagctgctcaaccagatcgccgaagtcggtgcgcactggctggccgacgatgacgtcgacccacagctgctgcaacgcatggcgcagagcgtgcagggcctgctcgcccaggatgcccgatcaccggacgcattcgccgctgccaacgaagacgtgcagcagcaccagcgcgccgcagcgcaccgcgccgagctggctgagcgccgccatgtcgaagcggcccgcggcaaggaacgcctggagctggcacgccgccaggccaatgcacagatcgaccagtgctgtgatgcacagcagcccccccgtttcgtgcagtccctgctgcgccaggcctgggccgatgcgctgaccctgacccgcctgcggcatggcgacgattcgccgcaatggcaggagcgcctgcaacagaccgaacgcattgcggcggtcaccgcccaggccgtcgatgccgccgatggcaccgatgccgcgctggccgccgatgtggaagccgcactggtccaggtcgggtaccacgccgaggaggcggccgccgttgcacggcgcctggccacacccggcggcgaagacgaaacgacctcacgcaccgaactcagtgcccgcctgaaagcgcgtgcgcgcctgggcgagcacgccgcaggtactgacaatgccgcagccccaccaccgcttccccgcagcagtgcggaagaggcggcctaccagcagctttccagcctgccgttcggcagctggttcgatatcgacagcggcgacggcagcgtgcgacggcagcgcctgtcctggtacagcctcctgaccggccatgccctgttcgtcaatccgcgcggacagaagatcgccgagaccgacctggacacgctggcgcggcagctcagcgccggccacgcacagctggtgaccgaagaccgtggccggctggtggaccgtgcctggcaggccagccttagcgccctgcgcgcgctggctggcggccgccgcaaggagacgcacgcatga

SEQ ID NO: 516200 - DNA, 1914 bp, Stenotrophomonas maltophilia
atgatcgtcggcacggccgggcacatcgaccatggcaagacccgcctggtacgcgcattgaccggcatcgagaccgatcgcctgccggaggaacgcacgcgcggcatttccattgagcttggttacgcctatgtgccggtcgatgcgaccgccacactgggcttcgtcgacgtccccggccatgagcgcttcgtgcacaccatggtagccggcgccactggcatcgacgttgccctgctggtggtcgccgccgacgacggcgtgatgccgcagacccgcgagcacctggcgatcctgcagttgctgggcgtggatcgcggcgcggtggcactgaccaagatcgaccgggtggatgtggcgcgcattgcccaggtggagatccagattgcggcactgctggcgcgtacgtcactgcaggatgcacccgtgttcgcctgcaacagcctggatgccgatgatgcgggtgtcgcggcactgcgctcccacctgcacgcgtgggccgccggcaccgacagcgcgcacccggctgaacggcaaggcgaactgttccgcatgccggtggaccgcgtgttctcgctggcgggccacggcacgctggtgaccggtgcggtgcatggcggtgtgaccggcgtcggtgcacacctgcagctgatgccggccggcaacgaggttcgcgtacgcagcatccatgcacagaaccaggccagtgaacaggccatggcggggcaacgctgcgcattgaacctggcctccatcgcccgcgatgcgatcgaccgcggcgactggatcgccgatccgcgcgcactgctggccaccacccgcgtcgatgtgcgcctgcggctgcctgcgctggcggcgccgttgcgcgattgggcaccgttgcacatccattggggcacgatgcaccggcaggcccgcgtggtgctgctggaacacgacgatcacggcaatgggcagctcgtgcagctggtgttcgatacgccagtctgcgcgatgtgcggcgatcgcttcattgcccgtgattcagccgccacccgcacgctgggtggtggcatcgtgctcgatccggatccgccacaacggcgccggcgcagcccggcgcgactggcctggctgggggcgctggagcagctggcggccggcgccggcagcggcccgctgctgcagcaggcgcccgccggtgtttccctcgccgccctgcaacgctactgccggcgtgcgatcgagcagattgaattgcccgaggacgcacggcgcatcgcgacccgccaagacaccgtcatcattcttgccgcgcactggcaggcgctgcgcgatcaggtggtcagctcgctgcgcgattggcatgaacggcgcccggacgagcccggtgtcgacagcggccgcctgcagcgcagcaccctgcccgctctggcggtgagcctctggaacgcgctgctgcaggacctgctcgacgatggcagcgtgcagcgcgtgggcgcctggtggcgcctgcccgggcacgaccatgcgccaccggagcgcgaacgcctgctgctgcaacgggtgctgcctcggctgcatgccggcggcttcgatccgccctgggtgcgtaccgtggccactgatctcggcctcgccgaggatgagctgcgcgctgtcctgcgccgggcggcggcacgcggcgacctgttccagatcgtgccggacctgttctatgcaccggcgcgtatcgccgagctggctgccatcctcgcgcagctgtcacatgccaccggcactgtggacgcggcggcgttccgcgatgccatcggcctgggtcgcaagcgcagcatccagatcttggagttcttcaatcgcgttggctacactcgacgcgtcggtgaccaccatcggccgcgcggcgacctgcagtggaacgccccgcacggttga

SEQ ID NO: 516201 - DNA, 1425 bp, Stenotrophomonas maltophilia
atgccacgcacccgccctgccccggcatcctcggctgcgctgccttcgctggatcggctgctgcgcctgccggcgctgtcggcactgatcgaaggccacggccgcagccgcatcacccaactgctgcgctcgcaggtgcagacgctgcgcgaacgcatcagcgccggtgcgctttcggccgagcatctgcagcaggcaaccgagggcccggcactggttgcggcgctcgaggcggtactggctaccgatgcccgccagagcctgcagccgatgttcaacctgaccggcaccgtgctgcataccaacctgggtcgcgccctgctgccggagatcgcggtgcacgcggtcacccgcgcaatgaccgcgccggtcgatctggagttcgacctcgaccgcggtcgccgtggtgaccgcgatgcgcgggtgcaggcactgatctgcgaactcaccggcgctgaagccgccaccgtggtcaacaacaatgccgcggcggtgttgctgctgctcaacagcctggccaaccgccgcgaggtggtggtgtcacgcggtgaactggtggagatcggcggtgccttccgtatccccgatgtgatgcgcagcgccggtgcacggctgcgcgaagtgggcaccaccaaccgtacccacccggccgatttcgccggcgccatcaacgcgcgtaccgcgctgctgatggaggtacatgccagcaactacgccatcaccgggttcactgccaaggtcgacactgcggcgatggccaccattgcccacgggcacggcctgccgctggtggtggatctgggcagtggcagcctgtgcgacctggccgccttcggcctgccatccgaaccgacggtgcaggacgcgctggccgccggtgccgatctggtctcgttcagcggcgacaagctgctgggcgggccgcaggcgggcatcatcgccggccgcgccgacctgatcgcacggatcaaccgcaacccgctcaagcgcgcactgcgaatggacaagatgagcctggctgcactggaagcggtgctggcgctgtaccgcgaacctgagtacctggcgcagcgcctgccgaccctgcgtacgctggcgcgcacgcagcaggacatcgatgcgcaggcacaacgcctgctgccgccgatgcggtccgcgatgacggacgactaccgcatcgaagcggcgccaatgcacagccagatcggcagcggcgcgcagccgctggcgcagctggccagcgcgggattgcgcatcacctgtacgcgtcgcgggggactggaccgtttcgccaagcacctgcgccaactgccgcagccggttctggggcgcattgccgatgacgcactgtggctggatctgcgctgtctggaggacgcagacgaagccgatttcctcgcccagtggagcgcgctgcaggcatga

SEQ ID NO: 516202 - DNA, 492 bp, Stenotrophomonas maltophilia
atgcacatgctcaagaaggccgcgctggctgcagcgttggttaccgcttcgctgtcggcgaacgccgcccagaccaacattaccctgactgccgaaatcgacaacacgctcaccctgctcaaggccgacggcagcgccatcgccgatgcagtcaagctgacctacaacccgacccgtggcctgaacccgtggaacgagcgcgtacgcatcttttccaacgacaccgccagcgacgtgcaggtacgcctgcaggcgccggtcgagctgatcccgggcagcgcatcgggtgccaacgtgccaatgagcgtccgcctgggcggcaagccgctgtcgacaacgccgattgagttcaccgcggccgagttgtacgacggcgcgatccctgatgcctcggtcgccatgaacctggacatcgcccagaccacgctggccacgcttgccgccggcagctacgaaggcatggccagcatcgtgctgaacgtcaagccgtaa

SEQ ID NO: 516203 - DNA, 2724 bp, Stenotrophomonas maltophilia
atgaaagctcccgcacccgccgtcacccggctggcggtggcgctcgccttgtcgctggccacgccgctggtcgcggcgcgcggtgtccctgccggtttcgaggatctggtccatggccagaccgaacaactcgaggtaagcctgttcgggcgctctgccggcctttcagcggtgcgcgtgacgctggacagcgtacagctggaagcggcggagggcgtcttgcaggcgctgggcctgtcgcccgaagcacaggcggcactgctgcctgcgctgtcagggccgttgccgcgcaacagccacctggcatgccgtttcggtggcgccgaggcgggctgcggctatctcgatccgcccgaggatcttcatgccgtgcgcgcgctgtacgacgagggcgaaggcgccgtacggctgttcgtggcccgccactggattccgggtgaacctgcggtggaacgcttcaaccagatctccagcaatgtcgagaacgcattcctgcaccagcaggtgctgaacatcagtggcggccgtgactaccaggcggccagcgcgcagggcattggtacgctcgggctgttcaaccgcggccatctggccgccgagtggaacttcaatcaccagcgctaccgtcatcatggcggtcgctcggacgtccagctcaacagcggctactaccgccacgatcttggaccgcagcactatctgcaggccgggcgcatggaccgtcgcaacctgtccagtccgcagggtggcacgttcaacttcagcatgctgccgctggatcgcttccagggaatccgcctgggaacgacccaggcctacgtcaacgccgacgctgccgtgcaggccacgcccttgacggtgctgctggcacgcgacgcgcgcgtggatgccttcgacggtgagcgcctgctgcagaccttctacctgcaggccggcatcaaccagctcgatacacgccgttttccatttggcacctatacggtcgcgctgcgcatctacgaagacggtgtactggtgcgcaccgaggacgcgcctttcgacaaaggcggcgactggaccaacagcagcgtgcagtggtttgtacagggcgggcgccgcgacgagcgccgcgatgaccgtttcgatggcgagtcggccttcctggccggcgtgcgcattcccctgggccgtgacctggcgttgaccgccggtgcagccgacatgggaggccatcgttacagcgaggtgcgcctggatctgcgccatgcatttcccacccaggacatccgtgcaagcgccagcctcatgcatggcagtgacggtagccgtggacaacagcaacagctgtcctaccgccgccgtgcctcctggaacgtgtatcaccagcggcagcgtggcaccgcgtgctggcaggaggatgacgcgcgtgaccggctgggttgcacggactcgttgagcgcatcgatggcattgccggtggcatcaggcagcctctacctgggatacacgcggcgccagagctggcgcccgggccgggattggatggacggcatcgatgaccccgtgggcggcggcgtgccgtggttgccaccgtcgcgtcccgaactggaccggcggatgcaacgtgcccgcacgtggcagacgagctacagcgtcagccggcgctggagcgagttcagcgtatcggcgcggctgggggcctggcaccagcggaatgatggcgcggccggcagcagccttgatcgcggcatctacctcaatctcagcctgtcacgcctgcagcggcgtgagccgggcctgtcgcagcgtcgctatgcggtggatgtgcgccagccccggcatgcgcgcccgcagatggagtacagcgccgcgcagacgttccggcaggagcatgacagcgacttccgcgaagcgtcgctggagctgcgtggcagtaatgatgatcgctatggcgccattgcggcggcacagctgcagaacggaacaggccataccggcgctacgctggcgacctaccggcaacagggccgcagcgagatgtcctacagcgccacccacagctcggggttcgcgctgggccggcagggcttctactggggcgatggcatcggcagcgaagccggcctggccgtgcaggtggatgatgcggacgacgttgatctgaccggcgtggcggccgaactgcaggtgggggggctgcgcagccagcgcctgcagttgggcgagcgccggctgctgccactggcggcctatcaggcgcatcgggccgagctgcaggacgtgagcgcgctggacagcagcgctgtggtgcgcgtggccggggcggtgggcgcacggccgctgttcctcgcaccggggcggttggctcgcctgccggtaccgatcgaagtgacgtacacgttcatcggcaacgcgcgtgacatcgcaggggtaccgctgggcggtgcacgcatcctaaatgcgcccgtcgcgggcaccagcgccaatggcggcttcgtggcggacttcccgaggcgcgagaagtcgttgtacctgctgcaggacgaccgcctgctgcagtgtccgctgcaggtgcgtgagcgccgcagcgtgctgctgctggtaggcgaggtgcagtgcgaagcactggcggtggcacaactgcctgccgatgtcaggcagcaggcgcgggtgacccggctgctgcaggaacaagccctgatcgcggccacgccgcagacggctgccgtgggaggcgtgccatga

SEQ ID NO: 516204 - DNA, 1131 bp, Stenotrophomonas maltophilia
atgaagcacttcacgggctgggtgatggcgctggcctgcgccattggcatgttctcttccaacgcgttcgcgcagcgcccgccggaagtacatcctgccagcgaacgccgcgacatcgtgatgtcgtgggatcgctcggcgatgccgggggacatcgaactgtgggcgccgcggaccatgctggcgtacgaccataccgatctctccctgcagttcggagcgctgcacctggtgtgcaacccgggcaacggagataccgggcgctgccctgccggcggccaggccgacagcacagcgggcctgcgcagcatcccgctcagcttcgtcgaagaacgatcgcagatgagggccgagctgaacgtacgggcggggctggagcgcgcgctgtcgggccgctcctgcctgggcaactactggcagaacctgattctcgcgccctggtccacgcatgccgttggctgcgccctggatgagccggccggcaccggggcacagctgtccatcgcgtccagcgagcttcgcaagctggtcgcgggcatctggaccgcgaagctggaactccatgcgaatgtccccaacggcagccggctggcaacgtattccttcgatttctcgctgaccgtcaccgaccgcaacgcggtggccgtctatctccccgagttcgacaacgcgacgccgagcgtcggccttgacctgcgctacaaccctttcgcgcagaccatcgagggcaggaaggtggtggacatgtgcctgtatgacggcctcggatcgcagagcctgtacctcggcgtgactgcgcgcgacgtgggtgcaagggcacctggagcgacaggtttttcggtatggcaccgcgacggcgggcgcgatgaacgacagcgggtggactacaccgtcgcgctcgatcacaacggcgctgccgtacccatgtccaacggcgtggagcagcagctgcagggcatcgacagcgcgcgtctgcgcctggtgatcctgcccggaatgaaccagccggtgttctgcgtccccaccccgatgaccctggtcacgccgcgctttcccagtaccagcaaggacgccggctactacgaaggccagctgcaggtggaactgcgcgtgccgaccgcaaccccctga

SEQ ID NO: 516205 - DNA, 702 bp, Stenotrophomonas maltophilia
atgagaaaccttgccctgcgctacctgcctctttccctgctgctggtcctgcccagcgcgcaggccaacctgaccgtgcacccgatgcgggcgtccgtggatgcacgcaagggcacgcacatccgcgtgtactcccagtccacccagccgcagtacgttcaggcgtcgctgaagcgcatcgaccaagctgccgatgcggatgagcaggaggtggacatcgagccgagtacggcggccattgcgatcacgccggcgaagttcgtgctggcaggcggtggcaatcgactcatccgtgtgatcccgctgcagcctgtacagcgcgagaccgcctatcgcgtctacttcgagggtgtgcgggggccggaagaaggcacgcttgccaccggcaacagctcggccagagccagtctcggcgtgagcctggtgtggggagccctggtgaacgtggtgcccgccgatgggcgggtcgacgtgcaggtgcgcgacaacgtgctgcacaacgccggaacgttgcgcctgggcatcaccagcgtggccgattgccaaggcactcgctgcacggcgcacgtgctgtcgcggagcctgtaccccggcagccaggtggccctgccgttcgacctgcagcccggccacagcgtccagctgcgctatcggctcacccgcgatggatatcgcgagcacgtgcagacgcttaccccctga

SEQ ID NO: 516206 - DNA, 2589 bp, Stenotrophomonas maltophilia
atgagcaagattccgcgccccccccgcttccgcatgcaggccggcattccccaccgccggccatgcgactccgccgcgccgcgcagatggatggccgtgaccagtcttgcgctgggcctggcgattgtccttccggcctgggccggcaacgagcgtgatgaggagtatcagcaggatgtgccggttgccgggacggtgttcccggtggcgttgttcgccgctccctccatgcagccggccgccgccgtatccagtctccaccaccagagtgcgttgactgtagacacgacgtaccagaactccacggtgtccggtaacaagagcatgatcctgggctcacgctccagcatcaatggcaaccgcagcaatgtctacggcaccgaaagccatgcacgtggcgatgatcacgtcgcggtcggctacgccatcaacatgaatggatcgcagggcaccgcgataggtacacgggctgcgaccaacggcgtgggtgcaacttcactggggcacgatgcctatgccaatggccagaacgcgatctcgatcggcagcggatcgcgcgcccagcatgtcgaatccatcgccatcggcgccaactcggtgaccaccggcagcaaccagctctccgtaggcaacagcacacgcaagcgcaggatcgtcaatgtggccgatggcaacgtgaatgcatccagcagcgacgctgtgaccggcaagcagctcaacaccaccaataccaatgtgaccgcggccaggaacgcggccaacgcagcgcagagctcggcgaatactgccttgtcccagaccaccgcgctgcgaggcttgatcaatcaggtgtcgacgagtggaaacgtgcgcgtgggcgcggagaacagcggtctcgtgctcgacatccgtaatcgatcgaacgcgaatcgaaaggtcaccggtgtagccgatggcacgctgagcaactccagcaatgacgcggtgaccggacgccagctgcacgcgacgcagctgacgatcgatgaccagcgccggcagatcgccgcacataacctgcgcatcggcgacaaccgcatcgacctggagcggctgcgtgccgagttcgaggacttcgacccggatctggagggtgtcgtgcgattcggtgcagatggcaacgtggacgccgctggtggcgcgatacagcgtgttgccgctggtgacgtgtcgtccgcagcaagcaccgacgctgtcaacggtgggcagctgttcgccacgaatgaccgggttcgcgcgctcgaggatgtgggccggttcttcaggatcggtaccgatgacgaaagcgagcccgcggccgcaggctggttcggcgtggcaatgggcgaatcgtccgaggccagtaccgggccggggcaggaaggcgggaccgctgtggggagcttcaccaaggcgctgggcacgaattcggttgcgctggggcgtgcggcctatgtacttgcgggagccacggatggattcgcactgggggcgaactcgcgtgtcgagacccgggccggcgtggcgctgggcgccgcttcccgcgtgggcgcaggcgcggacaatgcggtcgctctcggctatggctcgtatgccgatcgctccaatgtggtgtccgtgggcaacctcgggttgaagcggcgcctgatcaacgtgaaccgtggcattgacgggcatgacgcagtgaccgtcgagcagatgcgcctctcgctgttcaccctgggtggcggcgccgatgtcgatgccggcggcggcatcatcgccccgacctacaccgtgcagggcgctgaacaacgaaccgtcggtgatgcgctggccacccttgattcggccatcgtcaccggcggccgtcgtatcgaccaggtcgaaacccggcttcacgcaatgttccaggatgccggccatctccgcgccgatggccgggaccagatcagttttgcaggtgccgatggcatggtgttgtccaacgtggccaacggcctggtcgccgctggcagccgcgaagcggtcaacggtggccagttgcatgccgtgcagcagcaactgaatggccgcatggacgggctggagcagcgtgtcgatgaccaggcgcagccgcgcgcgttggcgatgatgtcggcaccgcctggcgaagagggggcgccagctgcggacatcaacggagcgccaccgattgcgtccgcagcggagggcgcagcgccagtgcaacagactgcaccgaagaaggacgccaccgcctcgcccacgccgcaggtcgacaccgctgagctggagcggatgctggcccgcgccaatgagtacagcgacggcatctcccgcgaggtcgatgcgcgcctgaacaggatggacaagcgcttcaaccgcatggcggcgatgagcagcgcacagagcgcaatggcgatgaacactgctggccttgccacctacaaccgcctcggtgccggtgtgggctacagcgatggcgagtcggcgatggcggtcggttaccagcgcgtgctcaacgacaagggctcagccaccttcagcctcaatggtgcgttcaccaacagtggtgaacgcaccttgggcgtgggtgtgggtatcggctggtaa

SEQ ID NO: 516207 - DNA, 810 bp, Stenotrophomonas maltophilia
atgacgccccggcgtggtgcgcgtaacaagccccgccgtgccggggcactggccgaggagatggcagtgtaccggttcatgagccgctttatcagctaccgtagctattacctgtggcgtgcgcgctatcgctactacacccggcatctggatcgatggtcgctgttgagcgcgtcgtgcctggccggcgtggtgctggtgctctggtactacgcacgggtggtcggtctgccaccaccgcgcgtgcatccggatgtggtggccgtgcgtgtggagagtgtctcgcgcgaggcgatccatcgcatcgtgctggtccgccatggcaatggcagcggcggcgatcccttcgcgacgccggaagcggtgcgcgatggcacgctgcgcgcgatgcgtgtgcgccaggtgctgcagagcgagatgctctggaagctgaaggccaatctgctcgcggatgtcgccgagtacatcgatgcgacggacggctgcttcccttatgactgcaaccgggtgctgcatcacctgcaactgctgcgccgggccgaggcggagaacagggcgatcaccgtcggcctgcaggcgatcctggaggtgccgctggacaggatgcccgacctcagcggtggcgagcgggtacgcgtacgcagcgcatggtccgatgggttcggtgacacgcatgaccagctctggctgctgggcgagctgcaaaggatgcacgcgcggatgatgctggagtacccgcatcgcgcagcggcgccatggatggcgcgtgttctgcacggcgatgcactggacccgcacctgctctggtaa

SEQ ID NO: 516208 - DNA, 450 bp, Stenotrophomonas maltophilia
atgagtgccaacctgccgctgcgcgatgtgcagctgccgccggcaccgccgtggtggccgccggcgccgggctatctgatgatcggcggcgtgctgctgctggtggtggcggtgctggcccttatgtggtggcagcgccgccgtcgtcgccagcgctggttgcaggtgttcgatcaggaactggccaccgccaccgatgccacagcgcaactggcggcgatcgccggcctgctgcgccgtgccgcgcggcacgcacagccgggcagcgaatcgctgcgcgacgatgcctggtggcagcgcgtggatccagccggcacgttgcccaacgcgcgccgtcgcctgttggccgaaggcgcctatcgcccccgcgtcgacgccggtgacgtggcagcggtgcgcagctgggcccgcgagcgttatctggcgatgctgctggagcgccgccgatga

SEQ ID NO: 516209 - DNA, 624 bp, Stenotrophomonas maltophilia
atgcccggcgaaaaagcatcagtgccaaccaaggttggcacctaccagggtacggcggcacgctatgctgtgccgatgaacgacgattcccgtttcctgcgtgacctgcaacgccgccagtcagctggcgagcccctgcgctatctctgcttctggggccaccagccaccacgcacgggcgtttcggcgtcgtgtttcagccaatggtacgacgcaggcttcaacatcaatggtgtgcgctaccccaccgccgagcacttcatgatggctggcaaagcgcgtctgtttggtgccaccgacatcctcgaacaggtactggccagccccgcgcccgacacagtaaaagcgctgggccggaagatcgagggcttcgatgaggctgtctgggcgcaggcgcgctacgggttggtggtcgaaggcaatcgggccaagttttcgcagaatgcggcgctgggcgatttcctgcgtgctacggcagaccaggtcctggtggaagccagcccggtggattttgtctggggcatcggcctggccaaggatcacgtcgatgcgcacaacccggcgcaatggcgcggattgaacctgctggggtttgcgctgatggacgtgcgggacgcgatgtaa

SEQ ID NO: 516210 - DNA, 1896 bp, Stenotrophomonas maltophilia
atggcacccgcgatatcgcattctgtagagccgagccatgctcggctgaacacctgcacgccgaccgtgacagccgccgagcatggctcggcgctacagaagcgtgggcgctggaacccggccaggcatggcctggctctactgctggcggctccggccgttcatgccggcggatacctggaacttgaccctgccgggctgagcccggcgcagcagcaggtggcgacgcagaccctggccgacgtgcagtcgctgctgcccgatggcctgctgcgcgcgttgccggcacaggtgcaggtgcgctggagcgacgatctgccggcggaggtgcacggccgtgccttcgctggcggcattaccctgcgccgcgacctgcttgcagacgccctgccgggggcgcgccgggcaaggcgcagcgcgctggtgcacgaactgactcatgtggcagatcgcagcggcgcggcatggtcgcgcagcccgcgttggcgcgatctggccgggtggcagcgcaagccctggcatctgggccgcggcgacaacgacttccgtgaccgccgcccggatggctatgagctgaagagtccggccgagtacctggcggtgaatgccgagcatttcgtgctcgatgccgatttcgcctgcaggcgcccggcgctggcgcagtggttccaggcccatttcggaacgccgccatcattgccgcggccgcagtgcgcgacgacgctgccgctgctgcaggccgaagccgaggagggggcggcgtcgctgctgcagttggaccctgcacgcgtctacgcggtggactacctgttcgccgagggcagcgcacagccgatgagccgttggggccacagcatgctgcggctggtgatctgccggccggggcgtgcgcggggtccggactgccggctggatctcgagtatcaccgcgtactgtccttccgcgccttcgtcggcgatgtgcagatctccaactggcgtggactgaccggcggctatccctcgcggctcttcgtgctgccgttgcagcaggtggtggatgagtacaccaaggtcgagctgcgtgggctgcaatcgctgccgttgcagctgcaacgcgacgagatcgccagcctgctcgagcgcaccgcgcaggtgcattggagttatgacggccgctactacttcgtcagcaacaactgcgcggtggagaccgccaagctgctgcaggccggcgtgccacgcctgggccaggccggcctggcgcagttgaccccgcgtgggctgaagcgccgcttggcacggctgcaggtgcttgaccaacaggtgttggccgatcgcgatctggcgcaggcgcagggctactatttcgcctcggcgcgtgaccattaccagcagctgttcggcgtggcggccgcgcagctggccttgcccgcacgcgatgtacgcggctggctgaagctgccggcgcggcagcgcgcgccttggctgctgcagggcgatctgcgcgccagcgccggcctgctgctgctggaacaggccgcgcaacggcgcgccgaactgcgcgcccgcgatctgctcaagcggcgcctgctggcggcagcggacagcgaccagacccgcgcattacgcggcctgctggaacagagtgggcagtggctgcgcccggcatcgttgttggccgacggcggctacggactgccgcaggccgatgagcaggtgccactggcgcaggcggtggcggcgatgagtgcgcaggcggttcccggttggcaggcgctgcgcgtgcagcttcgccagcagctgccggcgaagcagcgtgccgagatggacgccatcgatgccaacctggctgcactgggcgcacacctgcgcaggcaggcggcgacgccggctactggcgaggcagctcgatga

SEQ ID NO: 516211 - DNA, 393 bp, Stenotrophomonas maltophilia
atggaacggaacatcattgatgatctgcacgaacgccagctggcggtgctggagcagcgcctgtgccaggcgttgctggaagatgaccgcgaaacactgaccgcgctggtatcgccggcgttgttcatgatggaggccaacggcgggcgcatgctcgagctgccatggctgggcgattggctggccggcaatctgcaggtcaagggactgcaggtgcaggcggtggaaacgttgttgtgcgggcggctggcgttgctgtccagtgatgtgcgattggtggcgcactggcgcggccgtgagcatgcaatggggctgcgcctgctgcgggtgtggacctgcagttccggtgccggtggcgcgcagctgctgtcgatggcggtgctggctgcatga

SEQ ID NO: 516212 - DNA, 687 bp, Stenotrophomonas maltophilia
atgcgtgtagttcccggtctgttggccgcttccctcggcctggcgctggctgcctgccagccgccgtcgtctcctgccgcgggcggtgatgcggctgcaccggcaacgccgcagcccagcgccgcgagcggcggtggcagccaaaccacctaccagtgtggtgacctgagcgtgcgcgccaccttcaacggcgaggacgcggccacggtggtgattggcgatcgcacgttggcgatgacctccgaacgtgctgcgtcgggtgcgaagtacgctgaccgccagggcaacagcttctggacccagggcagcgatgacggcctgctcagcctgaagggcgagccggaccgcgagtgccatgcagtgcaggcgacagaaggcgatggcagtgccggcgttgccgccttccgtgccaccggtaatgagccgggctggatggcggtcgtcgacggcgacacgccggggctgcaggtcgaagtcgattatggcgagcgccgcttcgacgtggccgcgcccaccgcaggtgcagacggctggagcggcaaggcggctgacggcaccgacgtcaagctcagcttccagcgcaccacctgccaggacgacatgagtggcgaagccttcgaggccaaggcgatgctgacggtggggacccgccagtaccatggctgcggcaatttcggcgcgaagtaa

SEQ ID NO: 516213 - DNA, 441 bp, Stenotrophomonas maltophilia
gtgccgactaagcgcctggcgctgatcggttgcctgtccctgcttgcggcgtgctcgccgcaggcagcggtcagcgccgccgccgtcgcgccgaacgccgcacccacagccgggccgccccccgctgccgactgcccggttcctgccgacgtgtatgacgccgacgacgtgcgcatctactgccagatgcccagcgatgtgcaggccttcctcgcgcgcgaaaacacctgccagcactttgccggcgaggaaccctacgacgacgagcgccgccgtgagctggaagtggccaatgccgagtactgcgaaggccgcgagaagatcttcaccgatctggtcgcgcggcatcgcgacgactgtgtggtccgccaggcactgatcgcgatcaacggccgctacgacctggtgttcgagctggacctgaagccctgcgagggctga

SEQ ID NO: 516214 - DNA, 402 bp, Stenotrophomonas maltophilia
atgctcgatcatcttggtttgaccagcgccgacctggcgcgcagcaaggcctttttcctgcaggcgctggcgccgctgcagatcggcgtggtgatggaagtgaccgccgagcagaccggcgcccacgatcacatcggcttcggcagcgacggcaagccgttcttctggctaggcaatggcggcaccgccagccagggcgtgcacgtggccttcgcctgcgccagccgcgcccaggtggatgccttccacgccgccgcgctcgccgccggtggccgcgacaacggcgccccgggcctgcgcccgtggtaccacccggactactacggcgccttcgtgctcgacccggacggcaacaacatcgaggcggtctgccaccgccccgccggcgaggtggcggcatga

SEQ ID NO: 516215 - DNA, 462 bp, Stenotrophomonas maltophilia
atgaaatccgcaactgttttcagtaaatgcgcgaagaagacaggctttgccggaacctccaccacccgctaccggctgctggaaggcgcctcgctggtgatcaatcaccagcgtgccagcgagagccgagggttctacgtcaatgccgggctctactttgcagagctgcttgaacacccgcttgagccttgcgatctggagaacgccttccggtaccgcaccagcattcccacgccccatgtcgattggcggatcgaagagacgccagggttgcgccggcgcttcacccagcaggatcttgatgacctgctcgaggcgggcaatcgtgacgcgatgaaatgcctgctgctcgatgccctggccgacgtggccggcttcgcggcaacccacggcaaccgcgaagcggtgcgccggttgaatcaggacgggagcttccgggcgatcatccgcagagaggtctga

SEQ ID NO: 516216 - DNA, 396 bp, Stenotrophomonas maltophilia
gtgcgcatctccgaggtcagccggctgaccggtgccagtgccaaagccatccgcctgtacgaggcacgtggattgctgccgccggtgccgcgcgtgaaccgctatcgcgactacagcgaacaggacgtggcatgggtgcaactgattcgccaggcgttggcgctgggcatcacgctggccgcgatctcgcgcctgcaagcatccgacggccgactcgactggccggccgtactggccttgctggatcaacagcgcaagcacattgccggcgagcgcgcgcgactggagcaggttgacctcgccctgcagcaggtcagcgatgaactacggcagtggctgcattccggcagcggcgactgcgttgtggccgccagcggctgcgccaccggcgtttga

SEQ ID NO: 516217 - DNA, 1041 bp, Stenotrophomonas maltophilia
atgcgcccgctgtatctctgtgtcctgttggccgcgtcattgccggccgctgccgccccttcggcgcccttccccttcacccaccacgactggaccctggcctgcgacaacacccgtacctgtcgcgcggcgggctaccagcaggacgaaggtgatgcagcgccagtgtcggtactgctgacccgcgccgccgggcccggccagcgcgtcgacgcgcagctgctgctgggtcagtacgacgaggactcgccgaggcccccggcgcaggcgcagctgcagatcaacggcaaggatctgggccgcttgcagctgcagggcggcggcgccacgctttccgccgcacagaccgatgccctgctggccgcgttgacccgcagcagccgcatcgtggtgatcggcaacggccagcagcgctggacgctgtccgaccgcggcgcctcggcggtgctgctgaagatggacgaattccagggccgccttggcaccacgggcgcactgatgcgcaagggaagcgccagtgaaggcaaggtgctgccggcactgccggtgccggtggtggtgctggccaagctggcacccacgcgcgccggcgatgccgcgctggagcagtcgtctgcgctgcgggctgcgttgcgcagcgcgacgccgggcgatgactgcagcgcgatcagcgccgagggcgatccgatgatcagcgagccgcaggaactgagtgtcacccgcctgtcgaaggacaaggtactggtgtcgacgctgtgctggcgcgccgcgtacaacgagggctacggcttctgggtagccaacgacaaggcgccgttccagcccgtgctggtgaccacctccgggaccgacaacgacggctccaccatcagcgcctggcagaagggccgcggcctcggcgattgcggctggaccgccgactggggctgggatggcaagcgcttcgtggcaaccagtgaagccacctccggcctgtgccggatggtgaccgccggtggcgcatgggaaatgcccaccgtcgtcagcaggatccagcactga

SEQ ID NO: 516218 - DNA, 4560 bp, Stenotrophomonas maltophilia
gtgagcatcgccgccaagcatttcgatccgcagctgggcatcgacatccacatgtacgcggtgccgccgtgcccgctgccgacgccgcatatcggcctggtgctggatccgttcgactacattccgttcatcggctcgaccatcaaggtcaacggtgtgcatcgcggcaccgccggtaccggcggcctggacatccacattccactgggcgtgtggggaccgccgctggctgcgccgatggggccgcagttcgacggcgaagaaatcttcatgggcagccgcacggtgtcggccgatggcgagccgttctcgcgcttggccatgccggtgctggactgcaacctggccggcatgatcaacccgttccgggtgaagaagccgaagaagccgctgcgtgcgatgtcgctgccgaccggcctgaacgtggccattcccaccagcgtcaaggtgggaggaccgccgacggtgtcatggactgcgctggcgttccgcgccgcgttcgccggactgggcaagctgcgcaagagtgccttcttccgcaagaagatggatgcgtttgccaagtggcggcgcggcaaatggggcgatctgccctccggcttcctgaagtgcaaggtgctgcgtgccgagccggtggatatccgcgatggcagcgtggtggtcagccaccaggacttcgacattccggggcggctttccttcgcctggcagcgcagttatggctcgcgccgcgcgggcgaacccggcttgtgtggcgccggctggcagacgccggccgatattcgcctggaactgctggacgacggcagcgtgtggttgtccggtccggaccaggccgcgttcttcccggagctgccacccgctgaaggcgaggccggggcgatcctcgatttcgtcgatggcgcgcgcctgctgcgtcggcgcgggcagtggcaggtgcgcttcaagagtggcctgaagtatgtgttcggcggcgaactgccggcaggcgtgagcgcgctgccgaatccacagtcctggccgatcgagcgcatcgaggacgcgcacggcaaccactggcggttcgagcgtcgcgacggccatctggtgcgcatcgtcgagagtggcatcggtgacctgcagggccgtttcatcgaggtggaggcgcgccatggccgcatcgaccgcatggcgctgcatgacccggccaccggcctggcgcatccgctggtgagctaccgctacagtgccgacggcgatctactggctgcagtggatgcgctgggcgcgccgcgcacctttgcctacgagcagcaccgcatggtgcggcataccgaccgtgtcggactgtcgttccactacgcgttcgacgcgcagggcagggtggtgcattcgtggggcgatggcggcctgtacgattatcacttcgagtacgacgcgctgctgcgcgagacccgcgtaaccgactcgctgggccacctgagcgtggtcaagtttgacgagaaccagctgccgctgtgcgagatcgatccgctcgatggcgtgacgctgttcgagtacgacgatttcgggcggaccgtggcggtgaccgatccggagggactgcgaacggcgtttgcctatgatgcgcatggcaacctgatctgcctgacccgcgccgatggcacgacgatccagatggagtacgacctggacgaccacatggtgtcgttgcggacgccggatggcgtcgactggcaacaggcatatgacggccagggcctgctggtcagccagaccgatccgttgggtgcgaccacccgcttcgactacgacgcacagggccagttggagtctcagaccaacgcgcgccaggcggtcacacgcctgcgctatgaccgtcatgggctggtggctgccgtcattgatgcgctcggccatgagagccgcttcgagcacgatccgctcggcaacctgctgcgccaggtggatccgttggggcaggccagtcgctacgagtacgacgccaagggtcgcctgctcggcacgattggcccggacggcagcggcgtgcgctgcgagtacgatgccgaagatcagctggtccgctacaccgatgaagtgggcgcgcagacgcggctgcagtacgtgggcatcggacagatcggcaagcgcctgcaggcagatggccacagcgtggagtaccgctacgacaccgaggagcagctggtcgcggtcatcaaccagcgcggcgaaacctaccagctggtgcgcgatgcgctgggacgcatcgtcgaggaggtggactactggggccagtcgcggcgctacagctacgatgctgccgggcgactgacggcgaccctggatccattgggtcagcgcatcgccttcgctaccgacaagcttgggcgcatcacccgcaagacgctgccggatgtgcgccatcctggccagcaggtacaggagcactttgtctacgacgtgcaggggcagattgtcgagctgcgcaaccccgcacgtacggtgaagcgcgtgtatgacccgctgggccagctgctggaagagcagcaggatggtttccgcgtgggctatggctatgacgaagtgggcaaccgcgtactgcgcgagacttcggccggtaaccgggttgcgtttggctacgacctgcgcgaccaaaccgtatcggtagcgatcaatgacgaatcgccgatctcgatggagcgcgatgcgctgggccgcaccacacgtgagcagctgagtccgcacttgcagcgcgagttcacctacgacagccgcaacctgctgacctcgcagtcggtactgaaggatgctgcgccgctgttcgagacgcgttacgactacgaccgcagtggcaacctcaccaggcgcagcgacagcgcacagggcgtggacgagtaccgctacgacgcgatcgggcgcctgctgcagcacatcgacccgaagggaagggtcgagcgctacttcaacgacccggccggcgaccggctgcgcaccgaggtgaagcaggtgcaggcgcggaaggtggtaggcggcgacgatgacgacctgaccacctggacgcgtgaaggcacctatcagggcgtgcactacgtcttcgaccgggcaggcgatctggtgcgcaagggcgcaccgcagggggatgcgccggatgacctgacgcttatctgggatgccaaccatcggttggcggagagccgccgcaacgggcaatcaacgtactacggctatgacccgctggggcggcgcgtgttcaagcgcaacccgacgcagaccacgtggttcttctgggatggagatgcattgctgggtgaagtgcagcaggccaatgacgccgaagaggcggcgccggtgtgggtggggaatgtggcgagcctggtggaggtcaggcgtcggcagcggcagttggaaaagctgaatgagcgggtgcgggagtatgtgtactacccggggacgtttgtgccgttggcgttggttggcgctgtgcaattgagctgccagcaccgtgcaagtactgtggcaaccgttgtcgcgccaagcgctgacgtccgatccaaggaggagcttgagggcccgctgcatcaagcagagtcgaagttgaatcagagcgccctggggacgctcggagcactgggtggcagcgcgcccagtccacttggtgactcaaaaaagctgggacatggttcccttggaactgggctggcgctcaacggcaccgccggcttgggttcgcgtcctgacgcaaattcccgcgcggccacaccccaggcgacggcggccggaagtacacgggcatcgccgccgcccggacttccgcaagcgggattggaggggccaaaggaggtttcggcgagccaatcaggcctcctttcaatcttccatcttgatatcaacggttttccgatgcggatgaccacagtttccggtgacttgatctggaggcgtttcgcgggatcccgtagccctgttgcggcggcgccaggccttgttgcaggcacggagctggagttgcaggggcagtatcgagacaacgaaacgggccttctttacaatcggcataggtactttgactccgagatcgggcagttttcatcgcaagatccgctgggtctcgctgcgggagacaatctctacgagtttggcccaaacacgctgggctggtctgacccattggggctgagctgcagatctaccaagaagctgcagagcttcgtggatcaagcggtccgcgagctggtagccaaccctaagatggctgagtcgctgatgagcgaaggcagctatcgccacttgaagaatggcaccaacctctacgccgcaagctttggtaaagcggttgagcgtcgggttgcccagctggtcagggaggatccaaatctgaggaacactattctgcacactggtctcgccagggggagcaatgggcgattcatttcgagccctgacttcacgcgtacgaccgggcgccccaaggtgtgggacgttactacgaatgcagatgtgccagcacacgcggatcgctacggagatgatgctgttacgtatctcacgtatgatgtcgtcaagggactccccttctag

SEQ ID NO: 516219 - DNA, 699 bp, Stenotrophomonas maltophilia
atgcagaacattgatgatcagcagttcagaatggtgttcgatgatggcggcaaggtcttcgaggcacttcgagtaacgaacagcagttttgataactgcgggatgtcgctgtcaaaacgaccttcgaggatgagtctggttcgcaatgtccatgtgtcgaactgcaaggtgattaattccgagattggtccgacagtgatcgaggatgtccagatcgacggattggaagtgaatccaattcttctcttctggtcatgcctttttaggcgtgtgtcattttcgggcaagattggaaaaataaaaatcaatcttgagccctttgcgttctgcactgatgcaggtgttctcgcggcgttcgcagagcagcgtgcggcattctatgaggctacggactgggcgctggatatcagtcgggcaaaatttgttgactttgcgtgtaagggggttcctcttgctctgaccaagagggatccggaaacccaagtcatcatcaggaagcgggacttccatgggctcgacatgttggggcgacagttcgcggacgcattcccggagacgcacacgaggctgagcattttcagcgactcgaatgccgaggaggtactgctggtggtgcctttggctgctgccaagaagcgccgggaagactgggtaggcggaattgcggagttgaggcgcttgggcgttgtttcagagtag

SEQ ID NO: 516220 - DNA, 693 bp, Stenotrophomonas maltophilia
atgatcctgcgcggcgcattgagctgtgtcgttaagaaggcgacgtccccgcgatctttcgaggtttgcatgcagaagctgacttctccccgttcgtctgtcttctcatatgatcctcgatgggtagaggttcgcttgggggctgagtccgcgctctactacatgggctccaattcaagcttctttgtcgatcaggatccaatgggaggccgcattcaggcccctgatgcagatgtcctggttgatcagccggctgggacgctgagattggtgtcggccgataggggcgagcccgtcgagtacgttgtgtccgcggtgagtggcttcgatcatctgattcttgggcttgtatctgcgctgttgaaggccccgggcctgacagcaggcgctgccgatgacaagattgatgtggcctgtgagaatggcctgataagagcttgctacatcacccgtgtgttcgaaggggatgctcccaggtcgctacgcattgttcgtaagggcgaaggggttcatgttgtcattccgagcccccgatatcaggcccggatcacctccctggctttggatggaagcgaacttctcattgattgtgacgacggagttacctggggaaggatgctctcccttcctcagcccatcttggggttcttcactgaagtggtagacaatctgcgggaagctgcgggtggatga

SEQ ID NO: 516221 - DNA, 987 bp, Stenotrophomonas maltophilia
atgttccagacgcattggcacctgtggttgcagcagaccttcgacagcggctggatgctgtcgctgatgcagttcatcagcctgctcggttacgaaatggcctatacggcgctgatcctgctgtgcgcgttcggtgcacgcctgcgtgccgggctatgcgtgatgctggcggtgctgctgatggcctgcgccacccacgcgatcaagcagggggccgccctgccccgcccttcggacgtggacgcacgtgtgctggataaaggagttccgtcgcatccgttcgtggtcgatggcggcggccatgcgttctggtcactgcccgacgcgcaggccaccgcgatactgcgcgcgcaacctgatgccgattacggtttcaacagcggccatgtcggtgtggccaccgccgcctgcgttggcctgctgctggccttcggcgtccgccgccgctggctgcgctgggccctggtgctgggctggccactgctgatggcgttgtcacgcatgtacctgggccggcatttcctcgccgacgtactggccggctggctgatcggcatcggtgtagccctgctggcctggcagctgatgccggagctgcgtgcggcgcggcgatggcagttgccggttctgctgggcctgggcacgctgctggcttgggcggcggcaaccacgcgctacgtgccagtaggtgaggccgggcggctgctcgcactgggcctgctggtggcgtggctgcagtggcgcggctggccggtcgatccacggggcgttgcgcagcgggtagcacgcgtggtcggcgtggtgatgatctacctgctggcgcgaccggtcattgattggctggctgacagcatcccgctgcccaatgccccggcaaccgaactgctgtggcagaccgtcggtacgttggcggtcctcggtggcggcgtggcgctggcgcggtggattccgcgccaacgcccgccgatgccagagcgcccccggtag

SEQ ID NO: 516222 - DNA, 1005 bp, Stenotrophomonas maltophilia
atggatacgccaagatttctttacaagtacatgcctttgagggaagagttcttcagtaatacgatgattcgtgccacgcctgcgcgcggtctcaatgatccttttgagatgcagttcaatagggtgcaggtgcgggatgcggtccaggcgcttgccaaatacttcaatgctggcggcaattcctgcggcgagatcgacgacgagtatgttcggggtcagatggaggcgctcgagggtgagttcgataatctaggggttatctcctttaccgaggatttcgacaatcccttgatgtgggcacactacgcggatgagcaccgggggatggttgttgagttcgatatgagcaagccgctctttgctggatcatgtgttcagggtgaagctggagcgcgcatgagtcggtttggagatcgatttccctccagtgctttcgagtttccagagaaggtgagatacaggagggagatgccggcatttgacaggtctgaatacgccgatcccgattcttccaatgagtttcattggaggaagttcagtcgggcgatactcttcacgaaagcaattgactggatgtacgagaaggagtggcgctcggttgtcgagctctgtgaagccgattccattgcgtccgatgattgcattcatatccgcggtgtatgcgatgggctcgatgatgtcgagctcaccgagccggacgtcgggcgcatcaatgtctgctttccgattggatttgagatgcaggacgatgtcggtgacttcggtgtcaggaaggaagttcatcacctttccgcgaattccgatggtccggtgatccacttgttcagggtggatccggcggccataagcgcgatctattttggtcgacgcgcggatgagcgggaatgcctgaaggtactgaaggggaatcgtcacctcgatcatgtggagcggatattcaagatgcgcgtcagcaacagtgaatatcggttgacgcccgaaccccattcgaagttttggagatga

SEQ ID NO: 516223 - DNA, 225 bp, Stenotrophomonas maltophilia
atgaaacgacttctctgttgcctgttgctgtccgctgcggttccgctgcgtgccgagccgatgccaccgccgatgcagcagctcgattttccggtactggcggtgggtgacatcggccagttccgcgtgcgggtcgagtgcggcgccgtggcggatctacggcgtctggccgtagggcagtgcatctgtagagccgagccgatgctcggctgcggttggcggtaa

SEQ ID NO: 516224 - DNA, 1425 bp, Stenotrophomonas maltophilia
atgaacacgcacaccgtgctgccccgcgcagcgctgtcggtcgcgctcggcctgctgttggccagcggccctgccggagcgcagtctgccccggccccgttgagcccggccgaactgtcggcactggtgcagcagcaggcgctgcagatccagcagcttgaagcgcgcctgcgtgccgttgaaggcgcacagagtggcgtaattgcggccgcggttgcaccttcgccggcactggaaacccgcgtggccgcgctggaatcgagccagtccaaggcaccgaaggtgtcgtggtcgaagggcgcacccgagttcagcagcgctgacggcaacgtggcgttccgcccgcgtggccgcctgttcgttgatgcgtcgagcactgacggctcgtcggtggccgaccgcaacatttccggcaccgagatccgctcggtgcggctgggagccgagggtcgttacggcattctcggctgggcggtggagggcgacttcgccgacaacgcggtggcctggaaatcggtctatgccaccgtggaccaccacctgttcggcctgccggccgacctgaccgtgggcaatcgcttgaacgatcgcggcatcgacggctccagcagcacgtccaacacgccgttcccggaccgcaacgtggtgggcacgctgatgctgccgcagcgcggcctgttcggcgtgggcctgaccgagcgcgtatacggcaaggcctggcacgccagcctgtcggtggcgggcaatgacctgaacaatgccggcaccgacaacgacagcctgacctgggccacgcgcgtgcactggaacccggtggccagcaaggcggccaccgtgcatctgggtgcatgggcgttccacgaagagatcgccgccggtgccagcggtgtgctgcgcagttcggccatcgccgggcacttcaacgatctggtcaggatcgccccgggcaccctgaccggcgccaagcgcagcaacgcctatggcctggaagcggctggcttctttggcccggcctgggccaccggcgaatggggcacgcgcaagctgcgcggggtcgatgccggaggccgctacaacctggaccatcaggcctgggcggtgtcggcgggctggttcctggcaggcgccgttccggcctattcaggcaaggccggcacctggggcaaggtgaaagtggccgacccggtgacccagggcggcgctggagcctgggagctgaaggcgcgctatgaggacgtggactacggcgagctgcccaccggcggcaccggccacgcgtggacgatcggaacgaactggtacctgaacgactacagccgggtgatgttcgaggcgatccgctggcagacctacaaccgcagtggcagcgggcagggcagggacgagggcacgacggtcaatacccgcctgcaggtggcgttctag

SEQ ID NO: 516225 - DNA, 489 bp, Stenotrophomonas maltophilia
gtgctgtggtcgccggcccagcaggcctggctgcaggccatgggctacgccgtctaccacgacggccagctggctgccgagctggatgccgcgctgcagctgagcgtggccaacgccgaagcccgcgctgcgccgccggccgggcccgcccacgtggacgatgcggcccacgaacgccatggcggcgccgcacctgcggcgcgcccggaacgcccggcaccgccgcgtcgcgagcctccggtcaccgcaccggataccgcagcggccacggcacgtccgttgcccagcggcaacgcccggcaaccggtggtgcgcctgccggaccggctgcagatcgccttgctgcgtgcgtcgggctgcaacccgaacgacccggccacccaggcgctgatggacagctggccgctggaccagctgcgccacgatccggccgccaagcgtgcgctgtggccgcagctgcgtgccctgcgcaagcggggggcagcatga

SEQ ID NO: 516226 - DNA, 2049 bp, Stenotrophomonas maltophilia
atgagcctgcgccagacactgtacccgctgctgcgcgccgcgttccgggcgctgccgctgccacaggcacagcgcgaccggttgcgcgcgcggctgctggcgcggcatgccgattgggtgccgccgccgccgcggggccagcgcgatgccgagcgtgcgccggccaacgcgcaactgcgctggcgcgccgacgaggcggccatcggttaccgcccgcagctgtcgcaggcgctgccttccacgctgccggccaccctggtcgccttctacctgccgcagttccataccttccccgagaatgacgcgtggtggggcaagggcttcaccgaatggcgcaacgtcacgcgtgcactgccgcagtttgaagggcacgtgcaaccacgcctgccggcggacctgggcttctacgatctgcgcaaccggcaggtaatgcgtgaccaggcgcaacttgcggccgagcacggcatcggcgcgttctgcttctatttctactggttcagcggccgcaccctgatggaagatccggtgcgccagtggctggccgatgacagcatcgaactgccgttctgcctgtgctgggccaacgaaaactgggcacgccgctgggatggccgcgacgaagacatcctgatcggccagcagcacagcgccgaagacgatctggccttcatcgcccacgtggcgccgtacctgcgcgaccgccgcgccctgaaggtcgatggcctgccgatgctgctggtctaccgccccaatctgctgcccgacgcgcaggccaccggcgagcgctggcgccgctggtgccgcgaccacggcatcggcgagatccatctggcctacgtacaggggttcgaacgtccggatccgcgcgacatcggcttcgacgcggccatcgagttcccgccgaacatgagcaatcccggctcgttgtcggcacagcagtggctgctcaacccggagttccatggcgatgtgcgcgactggcgcgaactggcggccgacatcgctgcacgcccgctgccggactatccgctctatcccggtgtgaaccccgggtgggacaacgaggcgcgccgctccgggcgtggccgcgtgtacctgcacgcctcgccgcgcggctaccgtgactggctgcgcagtaccgtgcatgagcgcctgtcgacggcagcgcagaaccagcgcctggtcttcatcaacgcctggaacgaatgggccgaaggcgccgtactggaacccgacgcacggctcggccacgcctggttgcaggcaacgcgcgaagcgctgtcaccggcaccggccgggaatcggcaaccggcggtacacatccatgcctggtatctggaaacgctgccggaggtgctgggcgcgctgcgcgaggcgtcgctgccgtggcggatcatcgtgaccacgccggcgcatcaggtcgaggcggtccagcaggcgctgtcggcacaggggctgcagggtgaggtcagcgcggtggaaaaccggggacgcgacatcctgcccttcctcgaagtggccgagcggctgctccaggatcaccacgatgtggtgctgaagctgcataccaagcgctcaacccaccgcgccgacggcgatcaatggcggcaggaactgctgcaacggctggtacagggcgggcgcgccgcacgcctccacgccgccttccaggccgaccctgcattgggcatggtggccgctgagggccacctgctgccggtgagcggttttgtgggcggcaacggccccgcgctggcgcgcctgcaggcccggctgggcctgcggcaaccgctgcaggccagccgctttgcggccggcagcatggggtggtggcggctgcgggcgctgcgcccgttgctggacgcacacctgtatcgcagtgacttcgaggctgaacacggccagatcgatggcaccctcgcccatgccatcgaacgtgcactgggcgcctgttgcgagcaggccgggctgcgcatggtcagcgcagcggcgtgcctgggcgagcccgacatcgacgacggcgactacgcctacgcacggcgcagctga

SEQ ID NO: 516227 - DNA, 1122 bp, Stenotrophomonas maltophilia
atgaacctgctgtttccactggggctggcggcacttgccgcctggttgctgccgctgctgatccatctcgctcgtcgccatccgtatacgccgttggatttcgccgcactgcgttggctgcgcgcacagatccggccgcgccagcgcatccgcttcgatgattggccgttgctgctggtacgcatggtgctgctggccgcgctggcgctgctgctggcgcggcctgcgttgaccggccccgcgccggtccccgctgcgtggacggtggtggccccgggcctggatgctacggcactgcgtggaacggccgaggatggcaactggcactggctggcacctggctttcccgctgtcgatcaggcgccacctgcatcaaccgcctccctgcccagcctgctgcgcgagctggacgcgcagctgcccgcagggacggtactgaccgtgcatgtgcccgatccgctgcccggcctggacggtgcacgcctgcagctgtcgcgcgatgtgcaatggaaaccgcacccgcttacggtcaccaccgcggcggttgcagcacccccgccgcgattgcgcgtgcctgccgatgcacccggtgccgcccggcattggctgcacgcgctgcagcgggcctgggccgtgcaggcgccaccggcaccgttggcggccggtgccctgcccgaacccggcgagatcggcacctggacccgcaacgatgcgctgccaccggcctggcaggcgtggctgcgcgatggtggcacggtactgaccgccgccaagcccaccgccgaggccgcggtactgctgcgcagccctgaaggcacaccgctgctgtggcagcagcgcatcggccacggccgcctgctgtcattgcccggcgactgggacatcgccggcaatcccgcgctgcgcgatcccgggctgccgcgttcgctgctgctggcgctgcacccgccgccgccaccgcgtctggccgatgcggcagaccacgcgccgcagcacgcggcattgcctgcggcaacacctccgctgcgtgaacccatcgcctggctgttactgctgatcgtgctgctgttcgcactggaacgctggatggccagcagcgcccgccgcagggtgcctgcatga

SEQ ID NO: 516228 - DNA, 1809 bp, Stenotrophomonas maltophilia
atgaacgcctccggtttgaacctgtggattgcgctggcactggccctggtcgtggccatcgccagcgtgcgccagttgcgcgcacgcacggcgcatcgtggtcggccgtggatcattgttggattgcaggtcgtggctgcaacgttgctgtacttctgcctgctgccaccgagccatcagcagcctgcggcgggcctggtggtgctcagcgccgaggccgacaacgccggcgcgctgccggccagcgacagcccgctgctgctgttgccggaggcgacccatgtggcgggcggccagcgcgtgcccgatctggccaccgcgctgcgccagcatccggcgtccacgctgaccctggtcggtgccggcctcagcgcgcgcgatcgcgacgcggtgctgcccggcgacgtgcgctggcaaccggcgcccgcaccgcgcggctggatcgcactgcagcccccggccgatgtcgccccgggcgcgcgcttcgaggtgcaggcgcaggcgcgcggcgtggccaacgccaaggccgaactgctggacccggccgacagcgtgattgatcgcgcggatctgcccggtgacggtagcgtgcggctcagtggcgtcgcccgcgctgaaggccgcagtgtgttccgcctgcgcctgctcgatgccagcggtcacgtggtggacaccgtaccggtgccgcagcagacgctgccagccgcaccgctgcgcctgctggtacgcgccagtgcaccggggccggagctgaagtatctgcgccgttgggccaccgatgcgggcatccgtgtgcaggtgcaggccgataccggcgccggtctcagcgtcggcgatggcgcggtgtcgcttgatgcggcctcgctggcccgcgctgacctgctgctgctggacgaacgcagcctggcggcattgagtgcagcccagatggccggcgtgcgccaggcgctgcgcgatggactgggcgtgctggtccgcagtgccggcgcaccgtcggccggggcgcgccaacgcctgcatgatctgggcctgccgctgcggggtgacggcagcagccgcgcccttgaacttgcgggcgatggcgaaagcgcgatgctggccgctcggcgtggcccgctggccgccggcacgttgccaacccgcgacggcgaggacgccgaccgcagctcgcacagtgccaccctgcccgcgctggaagcactggtgctgcaggcaccgggcagcaaccctctgctgctggaccgtggcggcaacaccgtcggcggctggcgcgcggtcggcaagggccgcatcggcctgctgccagtgaccgacagctggcgctgggtgctggccggtcgcgatgatcgacatggcgaactgtggagcggcgtggtcgccacgctggcgcgtgcgcaggccagcggtgatgcgctgtggtcaccgcagtcgatcgcctgggcaggtgagcggcaggcgctgtgtggggtgcaggcgccgctgcaggtcttcaacccgcgtggtgacggcgtgccgctgatcgtcgatggtgcgacatcggccctgcgctgcgccggctggtggccgcgcgaagcgggctggcagcgcctgcgctacggcgacagcacggtctggcgttatgtgttcgacccgaagcaggcgccggcgctgcatcggcaggcgatgatcgatgcgaccacgcagtcgctggcatcgcacacctcggccgacacctcggtcatgcagccggtaaccggctcacgctggccctggtggctggccttcgtgctgtgcgccgcgttgttgtggtggctggagcggcggcggtaa

SEQ ID NO: 516229 - DNA, 1098 bp, Stenotrophomonas maltophilia
atgtaccgacctacgttgcccttgctgctgctgttgctggccgccctgccggtggctgccgctgcggcaccgctcgacaccgccaacgagcagacccgccggctgatccgccagaccatgcaggacgagcgcattcccggcctgcaggtggccgtggtcaaggacgggcaggttgtgctttccgaggcctttggcctggccaatgtcgagaacggcgttgccgcctcgcgcgacacccgcttcccgctgaactcggccaccaaggcctttaccggcgtggcggccgcacagttggcgcagcagggcaggctggacctggatgcaccgttgtcgcgctatctcgacgccctgccgcagccctggcagagcgtacgtgtgcgccagctgctggcgcacacctcgggcctgccggacatccttgatgcgcaggggctggtcggcggtggcaccgaggcgcaggcctggcaggccgtgaccgcgcggccgatggacgccgctcccggccagcgcttcgcctacaaccagaccaactacctgctgctggcgcggatcatcgcgcggcaatcgggcatgccctacgagcgcttcctcgccggcagccagttcggcatcgccggcatgtcccgcaccaccttcggcgacagctacgacctggtacccgatatggcgacgatgtacagcctcgccccgcgcgtgaccgaagcggtcgacacgccaccacggctgtcgcactggttctacgacgttccgccttcgctgtgggccggtggcggcatcctcaccaccgccgatgacacggcacgctggttggccgcactcaccgacggccgcctgctgggtgagcctgcgcgcgcgcgcatgtggacagccgagccccttgccgacggtcgcgccggcccctggggcagcggctggccggtgctgcagacggtgccggaccgccaggtggccggcatcggcggcgcgcgctcggctttcatcgtctaccccgaccgcggtgtggcagtggtggtactgaccaacctggtcggtgccaacccgcagcggttcattccgcgcatcgccgatctttatgcgcctgctgcaacagcgccctga

SEQ ID NO: 516230 - DNA, 2415 bp, Stenotrophomonas maltophilia
gtgaatgccgtcggctcccgcgccgccgctgtcgccgccgtcatggcattgctgatgctgccggatcaggcgcgggcgtccagctgtgagcatcccctgcaggtggcctggccgtcggaccggcccccgctgtcctcgcgcgagcaggggcaaccggtggggctgcttgcgcatcagctgcaggcgctgggtacgcaggtcgcgctgcattcggtgcctttgccggcggcggcgctggccgaccggcagctgccggcaggggtgcaggcggtgctgggctggccgcgcgcgcagctgccgcccggctgggtggccagccaggcctacctgcaggtgccacaggtgatcgtgcgccgccagggcgcgccagtggtgctgggcctggaagacctgcgcgaccgcactgtggccagcccggaccgggtgccgctggcagcacggctgaccgaacaggcccccggcgcgcagctgctggcgccggcgccgctgggcgacgccctgtccctgctgcgcaccggattgatcgatgcggtcatcgccaatctgggtgaagtcgaagccgcgttgcgggcgatgccgggcgatccgctggtgattgcggcaccggcgggtttcgatgacgcgctggtgctggcagcagtgccggcctgcgccggggtcgtggccgcgttcgaccagcagctggaacagcggggcaacgcccagcgcgcagtcatcggccaggcatggctgccgcacccaccgcgcgcgcgcggcaccacctcgacgctgcgctggctggtgccgacctcgctggtgctgcttgcgctgatactgctgcacgccttcggctactggcgcgtgcaccgtgaaagcgtccgccgccgcgcaatggagcagcggctgcgggaggtcaccgcgaatctgcccgcggtggtctaccaggcgcgccgcacggcctgcggccactacagcattacgcagatcgcaggcgacgtgcaggccctgttcggggtcagcggcgaggctgcgcgggtcgaccacaggcagctgcttgccgccgtccatgccgacgatcgcagccgggtgatggattgcatcgagaacgcggcgctgatgcgcggcccgatcgatgtgacgttccgcaccggcgtcgcacaggactggcgttgggtgcgctcgcagggacggccgctgcgctgtgacgacgccagcgtggaatggagtggctactggatggacgtcagcgaggcgcagtcgcgtgccgtggcactggccgaagcgcgccgtgccgccgagcaggcggccctggccaagagtcatttcctgacgaccatgagccaccagatccgcacgccgatgagtacgctgctgggcatgctcgaacgcctggccgacagccggctggacgaaggccagcggcaggccctggccaccgtgggcgatgcggcgcagatgctgcgccagatccttgacgatgtgctgcatggccaacgcttgcaggccgcgccgctgcaactgcgtcccacccacctggccgcgctggtgcagggcgtgcagcagctgctgatgccggtcgctgccagtcgtggcctgcacctgcgcaccgagctggacccggcgttgcaggcctggtcactggccgacggtctgcggctgcggcagatcctgttcaacctggccggcaacgcgctcaagttcaccctgcacggcggtgtgacgttgcggatcgaggtggtcgcgccgcgcgacggtggccagcggctgcgcctgcaggtggtggacagtggcgtgggcatcagcgccgaacgccagcacgccgtcttcgctgccttcgaacaggccgagacctcgaccacccgccgctttggcggcagcggcctgggcttgtcgatctgccgcgaactggccacatcgatgggtggacagctgcagctgcgcagtgtgccgggcgaaggcaccaccgtctggctggatctggacctggcggccagtacggcaccgcagcagacggtggtggccccgcccgtggcggcccccgcacttccggcggcacgggtgctggctgccgaggatcatcccaccaacctggggctgctgacccagcggctacgtgcgctgggcctgcaggtgcaggcctgcgtcgacggacaccaggcctgggcggcctggcaggcgcagccgttcgatctggtgatcaccgattgccacatgccgggcatggacggcttcgcgctggcacgcgccatccgtggcgagaccggcggcaatggcgcgcgcgtaccgatcatcgcactgaccgccagcgtgctggagagcacgcgcgaggcctgccgcgccgccggcattgatcatttcctggccaagccggccgaaacccgggagctgcacgcgctgctggccgcgctgctggagccggcctcagtgcgccagtag

SEQ ID NO: 516231 - DNA, 738 bp, Stenotrophomonas maltophilia
atgtcaccgatcctcttcgcacggccatggcggcccaccgtctgggtcgtgctgttgctggcggcagtcgcagcccccggccaggcctgccagacccagccggtcgcgtcgatcccgccggcgctgctgaccgaaggcttcctgcaggcccaccccgatctgtactggcgcgacctgggccagactgcctggcggcgcggccggccggcacaggcactggcccgcttccagcgcgccagcctgtacgccgacaagccctcgcaggcgctggtggcacggatgtaccaggaggggaacggcacggcggccgacccggtactggcctacatctggatggacctggcggccgaacgtggctaccgcgacctgctggtcgagcgcgagcgctattggcagcgcctggacgccgctcaacagcggcgcgtattggccgaaggcccggcgctgtacgcacgctacggcgatgcggtggccaagccgcgcatggaaaccgtgctgcgcacggcgcgcaacagcatgaccggcagccgcaccggcttcgtcaatccagggctgcggttggcccttgccgaaggaccggaggccgatcgcccagtcagcggcgacgactattaccgcgatgcgtattgggatccggccgcgtactggtgcctgcaggaccagatctggcagcacggcagccgcagccagagcgtcgaggtcggcccgttgcgcaccgtcgaagatccggcgcgctga

SEQ ID NO: 516232 - DNA, 729 bp, Stenotrophomonas maltophilia
atgaagggaattcgcattgcatcggtcctgctgctgatcgtgtcgatcgccaccaccgccggcgcgtccgattgcccgctggaggaaccgcgcccgatcccggacacggtactcaccggcggcttcttcgacgcccatccggatctgtactggcgcagcctggcacagcgcgccgagcgcaaccggcaaccggccagggcactggagtactaccggcgttcggcgcgctatgccgacaagttctcgcaggcgatggtggcgcgcatgtaccagcagggcagcggcactgccgccgacccggtgatggcctacgtgtggatggacctggccgccgagcgcatgtaccacgacttcctgctgctgcgtgaacactactgggcgcggctggacccgtcgcagcaggcacaggcgatcgcgcgcgggcagcaggtgtatgccgactacggcgaccgcgtggccaagccgcgcatggaacaggcgctgcgtgacgggcgccagcggatcaccggcagccgtgtcggctatgtgagttcaggcctggtcgtggttcagcgccgtggcagcgaggcggatatccgcacaccgggaagcatcgtctacgacgaccgctactggcgcgccgccgactactggtgcctgcaggacaactactggcggccggcacggacgccccaggtcgacgtcggggtgccggccgtggtccgcgacggcgagccggggggcgactag

SEQ ID NO: 516233 - DNA, 204 bp, Stenotrophomonas maltophilia
atggtttacttctacaacaaggcgtcctcgctctaccaacgtgtgagagagtgcctggatcacgtggacgacacttctgcgtttgagtactgcaagggctacccggattccatcgagttccatctcatcggaatggtggtctcgtttctcatgatccttgtgataagtcactacaaggaggccttcaccgtgaacaggcgatag

SEQ ID NO: 516234 - DNA, 306 bp, Stenotrophomonas maltophilia
atggggggtgacatgatcattcgtgtttcaggggcggtgccggcatccaacgccatggccgggcgcgagggcacctgccagctgcacttggtgtccgcggcgaccggtgaacacctgaatgccagagagatccgggggcaattctccacgacgatgatggttgtctcaggcccggcaccgacgcactacgtcttcgttgccgactgcggcgatggccgcagcttcagctccaggaccatcagcatcagcagccggcgctcacacagcaggactttcgagcttggaatgcttggcgaaagccagtga

SEQ ID NO: 516235 - DNA, 420 bp, Stenotrophomonas maltophilia
gtgaaggcctggcgggccgcggtcggcgcgttgctgttgacggccggtgctgcctcggccgccaccgtgcaggaccatcgctgcctgagcggcggtcgcgatgaccgcatccatctggaatggcgctggctggatgacggtggcgccgatgtgcgctacgccggccagcatgagcgcctgacgctgcgccgggttgcgctggagaccacggtgctggccgaagatcgcccctaccagttcgacagcgtgtgggaagagcgcatcgacgggcgcctcaacggccactaccggttgagcacccagggcgcgctggtgctggagttgagctaccaacgcgcccgcgacggccgcaccaccgccttccacgatgctcccgaggcctggcaggaacacggctgccactggcccagcgcccgatag

SEQ ID NO: 516236 - DNA, 606 bp, Stenotrophomonas maltophilia
atgctggaactgtacggaaaaccgacctcgatcaacgtgcgcaaggtgctgtggctatgcgccgggctggatcagccggtgcagcacgaaccggcaccgccagcggatctgctggccgcgctcaacccgaaccggcaggtgccggtgctgcgcgacggagacttcgtgctgtgggagtccaacagcatctgccgctacctggccgcccgcgccggccgcgacgacctgctgccggttgcgctgcaggcgcgtgcgcaggtggagcagtggatggattggcaggccagcgacctcaacagtgcctggcgccaggtgttcatggcccgggtacggcaacacccggactacccggatgacgcccgcgccgaggccagctgggcacagtggaaccggctgatgggcgtgctcgacgcgcagttggccgatggccgggcccatgtcaccggcagtgcattcaccctggccgacatcgtgctgggcctgtcgacccagcgctggcgcagcacgcccggcgacaggcctgcactgtccaacgtggaggcctggttcgagcgcctgcaccaacagcccggtttcgccgaatacgtcgacaacggcgtggcctga

SEQ ID NO: 516237 - DNA, 432 bp, Stenotrophomonas maltophilia
atgcgtatgctggcggcctgtccgccgcgttcgggtgccgccatgcattctcgcctctgtatcagcctgctcctgtccgccgtgctcgccgcctgcagcagtgcgccgccggctccacctgctgcggacgcaaccgacagcccgcaggccgccgaggcctaccaggaggcacgcgatgtcgactgccaggccgccggcggcacgctgcaacggctcggccgcctgcagcggttgcagtgcgtgattccctatgccgacgccggcaaggcctgcagccgcaagagcgattgcacgggccagtgcctggccaccggcgaagtggccgccggcatcgccaccaccggcacctgccagcgcgatgcccgccagaacttcggctgccgccagcgcgttgatgagggcaaagcgcagggcacgatctgcgtggattga

SEQ ID NO: 516238 - DNA, 876 bp, Stenotrophomonas maltophilia
atgcaatcgactccggacatcagcaccggcctgttccacgggcttgaggcgtggttggtaaggactcccgccgccactgccgccatcagcgtgttcggtggacagctgctgtcattcattccggaaggacagccggacctgctgtggttgtcacccacgcgcgccgcgctgccgacgccgatccgcgggggcgtgccggtgtgctggccctggttcggtcgccaggaccagggcgatgatgtaccggcgcacggcctggtgcgaaccgcgcgctggcagctgctgcaggcccggtatgacgatcacggtgcggtggaactgcagctggcgcctgtggatgtcagtgcgtccggcctgcgcatgcagatgcagctgcgcatcggccaccagctgcgccagcagctgaccaccgacaacatcgggtcctcgccgctgaccttcacccaggccctgcacagctatttcagggtgggcgacgccagccgggtcgaggtcgatggccttgacggcctgcagtacctggacaaatacgaggagggcgcgccgccgcgacagcagcagggtccatggtcgctgcgtgaccggcgtgaccggcgtgacccgggccgtagcgaccgcatctataccggcgctgctggccactacctgctgcgcgatccggtgctgcagcggcagatcgagatccgcagcgaaggcagccagaccctggtggtctggaatcccggcgccgacgccgcagcgaaaatggccgatgtcggcgatggctggcgcgactatgtgtgcctggaagtggccaatgccggaccggagcggattactcttgcgccgggcgcgcgccaccagatggcgcagaccctgggcagtgcctcacagtga

SEQ ID NO: 516239 - DNA, 771 bp, Stenotrophomonas maltophilia
atgggccgcatgcaggatgcgcagtggtggtatgccaacagcagacagagcgagggaccggtggacctggccgggctgcgccgcctgcagcaggacggaaccgtgaccgcgcgtacgctggtgtggcgggagggaatgccgtcgtggcgaccactggccgaactggatccatcggtggccgccgccgagccggtcgcgccttcgccggagcctgctgctgccactgcggtcgccgtcgcagatcccgccgacccctatcgcgcacccgcaacggcgcccgtcgccacaccggcgggagggctggacggtgacatggccctgtatgccgccgtggtcgggggcaacttcccgatctaccgtcagcgctggcggctggaccagggggttgccgatggccgcggcacctggcactggccggcgttcctgatcggcgtgatctggatggcgtaccgcaggatgtaccggctcgccgccatctgggccggcacactggtgttcttcagcattgccgaaatgctgctgggggtgcctgaaggcctgtcggtgatcatcaccctggggctgaacaccaccgctgcgctgtatgccaaccgctggtacctggcccactgccagcgcgagatcgcccgcgccagggcgcaggctggaggcgatgaggcacgcctgcacagtgtgctggccgcgcgcggcgacacccatgcgccggccgcggccatggtggccatcgtcgtcgtcgcggtgatactggtggcgcaggggcttgccggctga

SEQ ID NO: 516240 - DNA, 486 bp, Stenotrophomonas maltophilia
atgcgctggccgtggtctgcagtgccgccgccacggcttgaggatgcacaggccgatgtgttgctgcaggatctgctgtcgcgcgatggccggcgcgtcacggatgccgcgcgcacgctcgcacggttgttcagcacggcatcgctggaggcattggcgcggcatgcggagctgatcgagctacgctgtcagggccttgaactgggtggcatgctggtcagcaaccaggcacacctgcaggcggcgctgcgacgattgcgctattggcaggcgcgcgagggttgcctgtgcgcgctcaatcccacctacccgttcttcgatccgcgtcgtctgatcgaacaagggcagatgcagctgctctcgttgcaggaggctgaggatggttggggcgattgccacacggtcacctgtgcacactgcggccaacgctggcaggcaatcgaccgcgaataccattatccgtggtgggaatggaaaacggcatga

SEQ ID NO: 516241 - DNA, 672 bp, Stenotrophomonas maltophilia
atgatcggggccaggcaaaccgaccagggatggggcgtggatatctggatgaggatgattccggtggtgctggcaggcctgttgcccgcggccacggtgttggccgcgaagcccgctgctgacaccgcgtgtgcgccgctggccacggtttccggacttcgcgatgcgaacgtgactgcattgtcgatgcagccccgggacggtcgctgcgtggtagaggtgacggcgcacgacggcaaggggctgcttcggcagcgacagatgctggaggtgctggtgcagcatgcctgcgccgcatctgcggaggtgacggtagacagcctgcggccatcactgctgctgcgcacgccgaagcgatgtgccgcgcgcagcagccaggacctgttcgccggcgaaggtgtgccctggatgcagccgcgtggcaagctgcagcgctatccgcgcgaagccatggagcaggggctttccgggcgcagtctgctcaaggcgctgatcgattcgcagggcgtagtggctgcggtgatcgtggagacctccagtggccatgcggtgctggacgaagcggcggtggaagagctgcgcggttggcgattcgtgcgtggcgataccggaagcccggtgccggcgctgaccatcgtgcgcgtgccgatgcggtatgagtttgtggaatga

SEQ ID NO: 516242 - DNA, 912 bp, Stenotrophomonas maltophilia
atgatccagcaacgcaccctcaagaacacgatccgcgccaccggcgttggcctgcacagcggcgacaaggtctacatgaccctgcgcccggcaccggccaaccatggcatcgtgttccgccgcgtcgatctggacccggtcgtggaagtgccggccaaggccgagctggtcaccgaagtgaccctgtgcaccggcctgacctgcaacgacgccaagatccagaccgtcgaacacctgatgtcggcgctggccggcctgggtgtggacaacatcatcgtcgaactgtcctcggccgagttgccgatcatggacggttcgtccggcccgttcgtgttcctgctgcagtcggccggcatcgtggaacaggatgcgcccaagcgcttcatccgcgtgctcaagaccgtggaagtgaccgagggcgacaaggtggcccgcttcaccccctacgagggctacaagctgggcttcaccatccagttcgaccacccgatgatcccggccaagcagtcgcgccaggaaatcgagttctccacgctggcctacaccaaggaaatctcccgcgcgcgcaccttcggtttcatgcgcgacctggagtacatgcgcgagcgcaacctgggcctgggcggttcgatggacaacgcgatcgtgctggacgagttccgcgtgctcaacgaagacggcctgcgctacgccgacgaattcgtgcgccacaagatcctcgacgcgatcggtgacctctatctggccggtggccaggtgctgggcgcctatgaaggtttcaagtcgggccatgcgctcaacaacaagctggtgcgggcgctgatggccgacgccacggcctgggaatgggtcaccttcgagtcgccggccacgccggatccggttgagtacgccacgccggcctacgcctga

SEQ ID NO: 516243 - DNA, 1086 bp, Stenotrophomonas maltophilia
atgttgtatgaactggctcgatggttgcagcagttggagagcctgttcgggctgttcaactaccagacgttccgcgccatccttgccgcgctgacggcgctgttcctgtcgctgtggctgggcccggcgatgatccgcaagcttgcccagttcaagggcgggcagccgatccgcagcgacggcccgcagacccacttctccaaggccggcacgccgaccatgggcggctcgctgatcctgcttaccgtcaccctgtcggtgctgatgtgggccgacctgcgcaatcgctacgtctggctggtgctggcggtgatgctgtgcttcggcgccatcggctggtatgacgactggatcaagattgtccgtcgcgacccgaacggcctgaagtcgcgctggaagtacctgctgcagtcgatcttcggcctggccgcgggcatcttcctgttccagaccgccgacgtaccggcggcgctgaccttctatatcccgatgttcaagtcggtggcgctgccgctggccggcatcggctttgtggccatcgcctacttctggatcgtcggtttctccaacgcggtgaacctgaccgatggtctggacggcctggccatcatgccgaccgtgctggtggcctgcgcgctgggcgtgttcgcctatgcctcgggcaacgtggtgttcgccaactacctgcagatcccgcagattccgggggccggcgagctggtgatcatctgcgcggccattgccggtgccggcctgggcttcctctggttcaacacctatccggccatggtcttcatgggcgacatcggcgcgctgtcgctgggcgcggtgctgggcacgatcgcggtgatcacccgccaggagctggtgctggtgatcatgggtggcgtgttcgtcatcgaaacgctgtcggtgatgatccaggtcgcctcgttcaagctgaccggcaagcgcgtgttccgcatggcgccgatccaccaccatttcgaactgaagggctggcccgaaccgcgcgtgatcgtgcgcttctggatcatctccgtcgtgctcgtgctgatcggcctggccacgttgaaggtgcgctga

SEQ ID NO: 516244 - DNA, 1242 bp, Stenotrophomonas maltophilia
atgtggtgtggcgttcttccacggctgtgggtagccgcgttgatggggaccgtggcgggcactgccgcagcggcacaggtatcgatccaggccagtttcgcgcccagcgcgctggaacccacgcgcaacgcgttcaccaatgacacgcccaatggtggtttgtgcacgcggcctggcctgtgcagtccagacgagaagagcgtgcagctccccttctacgtgtcctatggggcgttcagccccagtgcggatctctcgaaccaggcgttgttcagggtgcccagtgcatggcgcaaagtgcagctcgtgcatgcggcgaccggccgaaccgcggaaacggagtggcgcgtgtcgttcttcggttcaacctatcgcctaccgcgcagcgtgcatgacatcaccgggcaccccaacgtgtcgcaggggcatcacaatctgtggcagggctacgcgtggaactacgcgccgccgggctgcgggaacatgaactatgcagaggtcagcctcttcattctccgctacggctggcgtttccccgagtccagcccgacctgcaccaagcgcaccaacttcgcgttcgaggaaggaatgctgctgaccgacgtgagcatcggctacctgatgcggtcaccgaatccgctggccatggaatcaggcgagtacaccggccagctgcatctcaggctgggcccgggcggtgacttcgacttcggcaacaatgcccgtccgtccgatagcgagttgatcatcaatttcacgctgaccgtttcccacgagttccaggtcaccttcaccgaggcgaacccgaaggtcagcctggcaccggtggggggttggagccagtggacggtgcatggcaaggcgccgccgcgcctgcagcaggaactgccgttcctgctgaccagttccaatgagttcagcgtcaagatgcgctgcgagcatgacgtgggtggccagtgtggcattgccaacgctgccacgcgggaagtcgtgccgatcgatgtggacgtgacgatgccgggcatgcgcgcgatgcacagcggtgggttcgcgcagaacacgccgttggtcagcgagcgaagtggccaggtcgcgccacgcttcacgccgaactcgtatcttcagaaccgacattcaagattgcgcttcgccgccagcggcccggccgtggcggagatgctgaaggcaccgcagtcgcgctggcacggcgatgtaaccgtggtgttcgattcggagccgtga

SEQ ID NO: 516245 - DNA, 2439 bp, Stenotrophomonas maltophilia
atggtgccccgccatgcccgcgccgaagcagcactgcatacgctgcagcagcaacgcgagcgcatgccggccgagttccgtgagcatctgttcggtacgccgttgagtgtgcgggtggaactggatggcaccttccttggcgatgccgaggtcctgctgcacgaagacaaccgcttgcaactgctggctttcggtgacagctacgacagcgcattgccggcggccgagcgcgagcgctgggcggcctacctggccgagccggtgccgttggggaagcagtctgcagcatcgcaagggctggcggcgctgcactacagcctgggcaactcgctggtgtccctgctgagcagcgacggccaccgcgccactgcgggtggacgttacctgcaggtgccggcgcagggcagtaccgggctgatgctgcgcaacagcctgacctacagtggcggcgagcagcaggacaatgccctgcgttatggcgccgatctacagggcagcctggggcaatggaccgcgctgggcagctaccagtactaccgttcgcggctggcgggcgacagcgacggccactacgtcagcgcgctgcacgcgcagcgcgaattcaaggatcatttcctgcgcgtgggctatttcctgcccacgttccagggggtgacccggcagccgcgggcgccgggcacacagaactacaccagcctgggtttcatggccggttcgtcggatgtactgctggccgacacggcgggcgaggcggtctacccggtgtatgtcaccgccagccgcgaaggcgtggtcgagatctaccgtgatggcaatctggtcggcacgcaggcggtggcgccgggcatgcagacgctggatacccgccgcctgccgggcggcatctatgaggtggaactgcgcgtggttgaagacgggcagatcagctcgcgcgagatcgccaccatccacaagccgaaccactggcgtgatgcgagccgtcgttggcgctacagcctgttcgccggccgccaacagggcctgctggacagcggcgatgacgcccagcatggcaaggccgccgcaggggccgtagtgaactatctgctgcatccgcgtgcagtggtcggcgccagtgcacagcgggtgggcgaacgccacagccttggcgcctcgctggactggcaggccagcgaacgcttcaacctctacaccaatctttatgactccaacgatgccggtcgtggcgtcgatgcgcagggcctgttgcgctacgcgcgcgggtcgctggtggcctcgcacgcgcgcagctgggtggaacagcgtgaccgcgtggtgggccgcgacggccagccggcgcgctgggagacccatggcggctggcaggacagcagtgcgctgtcactcaaccatcgattcggcgacgcccacagcctgaccctgcgcgtgggtcacagccagggcttcaacgcgggcaccagtgtggatgcttcgtactggcggcggcagcggctgttcggcagcgatgccagctggcggctgtcggtatacgaccgcccgggcagcgacgtcacgtcctcccgccgccaacggggtatcgacttcaccgtcagccttgcattgggtaacccggggcgccgctacaacggcagcctgggcagccgtaccggcgcagccggccagcgcgatctgtacgccagcctcaacgtgcagcagcagctggacgcaccttggctgcagagcgtacatggcaccgccagcgtcgaccgcaatgggctggggctgggtgcaggtgcctacatggaccggcagcagttccagggcgatgtgcaggtgctgcgtgcctccagcgatggtcgcctcagtggcagcgccaatctggaaagcacgttggcgttgggtggcgggcacgtggcgatggtcgggcgcgggcagaccgccagtgccgataccggcatgatcgtggatctgcattcggattttccgggcctggcgctgcgtgccgatgacagccgtgggggcggcgtggtgctgcggtcgggacgcaatttcgtgccggtcagcgcgtatcgggaagggcacgtgcagttcgatttcaacgaccaccatgcgcacacggcagcgatccaaccgtccacggtccgctatcacctcaacaagggcggcgtgatgcatgcgcaggtggatgtgctgcgcacctatacggtgatgggccagatactcgacgccgatggcaacggcgtgcgtggcgtgcatgtgatcaaccacgccagccgcagcgtcagccaggacgaaggcttcttcacgttggaactgagtgcacgcgcgcccgtagtggagctgcgccatccggatcagcacagctgcacgctgacgctggacgaagcccgctatccgcgcgagggcgatctggtgatggtgggcgggctgcagtgcccgccgcaggtggcaggaaaatga

SEQ ID NO: 516246 - DNA, 486 bp, Stenotrophomonas maltophilia
atgaacctgaagaaggtcctgctctccaccgccgccgccctggtcattgctccggccgccagcttcgccgccgatttcccggtcacggtttccgtggaggccatcatcccggcggccgatggcctgcagatcaccccggtcggcgggtgggatgcgatcacccagaccatgggctgggacatcgcccgccaggatctgcgcccgatcagccagcagatcgacatgcgcagcaatgcggccatcgaaggctacctgaccaatgatgcggcgctgacctccggtgccaacctgctgccgatggccgtgcgcgtgaacggcaagacgctggccaccggcgcggcaggcaaggtcgagatcctcactgccgccgaggccgcagccagccagcgcgttgcggtggaaatcgccaccaccaagccgggcaccggctacgtggaaggcaactacgccggccaggtctacatgatgttcgaaagcaccccgtaa

SEQ ID NO: 516247 - DNA, 741 bp, Stenotrophomonas maltophilia
atgcatcgcctattcgtcgcgatccatctcctgttgcttgctgcgacggcacacgcagcgcagccacagatcagcgtaggtacgctgttcgactacatggagcctggccgcagccagctgctcaagcgcgtgcgcaacagcggcgatgccaccgcgtacgtgcgggtggaggtcacccgcatgcatttcgacggccagggcaatgtgaccgaaacgccggtggatgctgccgcgttggcacgcaacgaaggcggtgccagtgggctgatcgccagccccagccgcatgatcattcccgccggcaatggccagcaggccacgcggctggtgttccgtggtgatcgtacgcaggagcagtactaccgcgtgcgctatgtgccggtgatacccgatgctggcgagttctcgctcgatgccaatcaggcagagaactaccagcagggtgtgcaggccggtgtcaacgtgttcaccggctacggcacggtggtgttcgtaccgccggctgcgacgcgctacgacacgcagctgcacggccctcgcgtttccaatgccggcaacgccaccgtggtgctggacaacctgcgccaatgcaaccgcgcgcgacccgatgagtgcagcggcggggtgaaggtgcatgtcttccccgggcgccagcacacgctggccgaagaggagggcttctacagccgcttcgacctgttggaagggacccagcgccgcaccatcgacacccgcaactga

SEQ ID NO: 516248 - DNA, 2400 bp, Stenotrophomonas maltophilia
atgaccctcgcccgtaccgcacgcccgcatggcatgcctctgcaacgcccgctgctgcgcagcctcctgcttgcgctggccgctggccctctcggcgctgcgatggccggtgagctcgatggccagacagccgaagttgccgccggtgatccggtcgaggcatggcgtctcatcaatggctcccatctgaccgtgcgtggtggcgaaaccgagcagatccaggcagaggatacgtcgcaggtcattcttgaccgtgcccaggtgagccgcagcggcaatcagattgccgccatccagctatgggagcgttcctcgctggttgccgattcgtccaggatcaacggcgaggtggaactcagaggcggcaacacctcgctgacagtcaaggacagcagcatccgcgtgtcggcagctgatctcagccccaacgccgcaaagtcggtaggcgtaggtctgtcacagggtctcgacgcgagcacccgcgataccccatatgccctgatcgatggcacgtcgatccacgtggacgatctcgcctcacccgctcgtccccataacagtggcctcggcgtgcgcatgctggtcggccagatggacatcgtcaatcgctcccgtattgtcgccgccaacgtgggcgccatgctgtggggcgagcgcaacggcgacggcatgctgcgcctgcatatcaacgactccacactgcagtcgggccgtggtgcggcgatccaggtgatgccgttgttcgacaacacctacgacatcaccgtcgccaacggtgcgcagctgatcgcaggcgacggcacgctgttgcgcgtcgcgcgcgagggcagcgttcttgccgcgcggaccgacgttgacttcacggtggacgatgcccgtctcatcggcaacgtcaccttcgaccccacctccgtcaccaacggcacactggatgtgatgctgcgcaacaaggcacagatcgacggccgattcttcaacgtcaccaccgccagcatcgatggcgacagtacctggctgatgaccggcggcagcaatgttggccacctcaccttgggcgctaccggtaccgttgcactgggcaacgccagtaccttcaacaccctcaacgtagaccagttcaccggcaacggcggcaccctgctgttcaatacggtgctgggtgacgacacgtcgctgaccgacaaactggtgattgccagtgatgccgacggccaggccaacgtgcgcgtgctcaatgccggcggtgccggtgccaggaccgagcgcggtatcgaactgatcgatatcggcggtgcctccaacgcgcagttcgatctgctcggccgtgccgtgggcggccagtacgagtacttcctggtgaaggatgccaacggcaactggtacctgcgttcgcagaccggcgccggcccggacccttgcctggtggaccccaccctgcccgagtgcaagccgattgacccggtggacccggtggacccgccgccgccggtgctgcgcccggaaaccggtgcctacctggccaaccagttcgcgctggatcagatgcttcgccatacctatcgcgaccgccagggcggcggcactgccaacgacgatgtgcgcggctgggcgcgcgtggacgccacccacagcacgctgggtgcggtggatgaccagctggacctgcgcgtggaccgctcgcgcctgcagctgggtgcggacgttggcgtgttcgatgagggccgtggtcgcgtgggcctgatgggcacgctggcacagtcgcgctcgacctcgcgttcggacatcaccggctacagcgcacgcggcaagctggacggtggcgcactgggcgtatacggcaattgggcaaacgatgcgctgtatgtggatgccagcgtgcagcgcggccagttccgcaaccgcgtgcagggcgaaggcctggccgaggaacgctacgactcggacctgtggcagtcgtcgctggaagccggctaccgcatcggcatcggccagatcggcagcgctatgctgagcctgcagccggaactgcagctggtctacaccgatgccaagaccgatgtgcacaccgaagccaatggcaccgtggtgcgtgcgctggaccagagcgggctgtccggccgtgcgggcctgcgcctgcagggtgaatcacgctcggcagtgggtgcctcggtcagcccgtacctggccgccaattggtaccgcgatagtgccggcaatggcattgccttcgatgatgaagtgctgaaggcgggcattccgcgcaaccgctatgaactcagtgccggtgcacagattcagttccgttccgggctcagtgcgcggggtggtttcggcgtgatgcacggtgacagcggctaccgggaggccaccggcagcctgagcgtcgcgtaccgctggtaa

SEQ ID NO: 516249 - DNA, 2136 bp, Stenotrophomonas maltophilia
gtggatgatgccgcgcaggtacttcccggccatccagcagagtcctggcgactgctgcaaggctcgcacctgcaggtcaatggtggcgaaacacttggcatcgaggtgttcgatggttcctctgttgtcctgttgaatgcagtggcgcgcctgcctgaccagtccgggcagtacaccacgattcagctggcaggcacgtcgtcgctggcagcgcacgactcttcgatcctcggtagagggctggtgctggcggatgcggcctcggcgcaactgttcggcagcaacgtgcaggtcacccgcgcgacgggcctgggcgcgttcgacatgtactcggtcggaatcgacctgactcacagcaccggcgcagtatcaggggcgcgagtggagctggacgccactcacgtccgcgttgaacagactcaacttcagaatccgggcagctccggtgtcggcctgcgcatggctcaaggccacgttgtagtacgtaacggctcccacatcgatgcagaccatattggcatggtgctgtacagcaccggtgatgatctgaccagcagcattgtgatcgatgactcgaccgtcatcgctcgcaccggcgcggcaatccgcatcgccacggttctgctcgcgccggaattcgatatcacggtttccaacggctcccggctctggggcggcgatggccatctgctgcaggtgggctcgtttgttggcgtgcctggcgcttccagggttcgcttcagcgtggacgacgcacagctggcaggcgacgttgccagtgacgaagccagcgcacgactgggcacgctggacgtattcctgcgcagcaaggcgcagatcgatgggcgcttcatcaacgtcaccaatgccagcatcgacagcggcagcacctggctgatgaccggcgacagcaacgtcggccacctcaccctgggcagcaccggaacggtggcgctgggcaacgccagcaccttcaacacgctcaacgtggaccagttcaccggcaacggcggcaccctgctgttcaacaccgtgctgggtgacgacacctcgctgaccgacacgctggtgattgccggcgatgccaacggacaggccaacgtgcgcgtactcaatgccggcggtgccggtgcgaagaccgagcgcggcatcgaactgatcgacatcggcggtgcgtccaacgcgcagttcgatctgctcggccgcgccgtcggcggccagtacgagtacttcctggtgaaggacgccaacggcaactggtacctgcgctcgcagaccggcgccggcccggacccgtgcgtggtggaccccgccctgcccgagtgcaagccgattgacccggtagacccagtggacccgatcgacccgatcaacccgccggtgctgcgcccggaagccggcgcgtatctggccaaccagttcgcgctgagccagttgctgcgccacagctaccaggaccgcaacggggccagcaccgccaccgacggggtgcgtggctgggcgcgagtggatacccaccagagcaagctcggtgcggtggatcaccagctggacctgcgtgcggaccgttcgcgcctgcagctgggtgcggacatgggcgtgttcgacgagggccgtggccgtgtgggcctgatgggcaccgctgcacgcagcagcgccgcgtcgcgttcggacgtcaccggctacagcgcgcgcggcaagctggacggtggcgcgctgggcgtctacagcaactgggccaacgatgcgttgtacgtggatgccagcgtgcagcgcggccagttccgcaaccgcgtgcagggcgaaggcctggccgaggaacgctatgactcggatctgtggcagtcgtcgctggaagccggctaccgcatcggcatcggccagatcggcagcaccgcgctgagcctgcagccggaactgcagctggtctacaccgatgccaagaccgatgtgcacaccgaagccaatggcacggtggtgcgtgcgccggcaacagcggcctgtccggtcgcgccggcctgcgcctgcagggtgaatcacgctcggcagtgggtgcctcggtcagcccgtatctggcggccaactggtaccgcgatggtgcgggtaatggcatcgcctttgacgacgaagtgctga

SEQ ID NO: 516250 - DNA, 531 bp, Stenotrophomonas maltophilia
atgaccgttgaactgtcgaccacgccgacgtctacctgccgcctggctgtcctgctggcgctgctgtcgatacccctgatggcgagcgccgactcggtggtactggatatcaacggccgcctgctgccaggaacctgcacgctgagtgcgcccgccatcgcgctggatccggtgagggctggcgttctcagtgttggtggcaacgcattgaaagccggccagctggagttcaccggatgcattggcgtggcgcaggcggtgttgtccttcgatggcctacccgctgatggtgacgccgatcgttggaagaacaccgcagcggccgacgccgccaccggcgtatccatcgtgctgctggaaggggctacaggcaatacgcatctgaagcatggcagcaccggcatcgtggttccggtcagtggaaccggcgcggtctatccgctgcgcgcaggctactaccgcccagacaaccggggcgtcaatgcgggccaggtgcaggcgtccatcaccgtcaccgccgcctatcggtaa

SEQ ID NO: 516251 - DNA, 2508 bp, Stenotrophomonas maltophilia
atgagcctcgcattggcgtcgaccgctacgcaggcagcgccggcccccgcggttgaattcagcgagggcttcctcatcggtggacaggccatcgacatgcgtcgctatgccgagggcaatcccctgccggtgggcgattaccgtgtggacgtgctggtcaatggtcgattcctggaaacgcgcgacatcaccttcgtcgccgccggggacaatcacagggcccagccttgcctgcctgcgcccatgctgcgaagtctggacctgcagacgcagcatctggccgcgctggaggcggccgacaccgcgtgcatcgatctgccgacgctgatcgaaggcgccaccgtcgccttcgacagccatgcgttgcaactgctgttgaccattccgcaggccgcacaggcacgcagcgcgcgcgggcacgtggcaccggaacaacgcgatgccggcatcaccgcaggcttcgtcgactacaccgccaaccacaaccgcagcaacggccaggccagcagctacctggggctgcgtgcaggcgtcaatctgggtgattggcggcttcgccaccgcacctcgttcagccacaccgcagccggcacgcggcgggccgtcatcagcagccatgcgcagcgtgatattcctgcctggaacagccagctgctgatcgggcagagcaacaccggcggcgagctgttcgacagcgtggcctttaccggcgtgcgcatcgccaccgacgaccgcatgctgcccgactcattgcggggcttcgcaccggtcgtgcagggcatcgccgagggcaatgcagtggtcaccgtgcgccagggtggcatcatcatccacgaagcgaacgtcgcgccggggcccttcgtcatcgacgatctctaccccacgcacttcggtggtgatctggaggtcaccgtcactgaagccgacggccgcagccagcgcttcaatgtcaatttctccgccgtgccacaggccctgcgcgccggtgcttcgcgcttcagcagcacggcaggcgtgctgcgcgatgccggcgtgcagagcgaacatctgcggtttgccgaaggtacctacgcgcggggcctgagcaatcgactgaccgtgcttggcggcagccagattgcacagggatacacggcgttactggccggcgcggcgatcaataccggcatcggtgccttcggtgcggacgtgacccactcgcgcgtgcgccagcccggcgtggggctgatcagcggcaacagctaccggctcaactaccagcgctatgtggccgctacgggtaccaatttcgggctggccgcctaccgctacagtacgcagggcttctttaccctgggtgacgccgcccgttcccgtggtgattcatgggacgtgggaggccgagcgcgccagcgttaccagctgaacttctcgcagagggtgggcgagcgcagcaatctctacctcagtggcggccatgtcgcctattgggacatcgcgcagcgccagaacgatttccagctgggcttccagaccaccgtggggcgtgccaacgtcggcctgtccgcattgcgctatcggctgggcgacggcgggctggatacgcgctacgccctgaccctcagcatgccgttgggccgcagccaccacgcaccccgggtcagcagccaactcacccatgccgcaggtggccaacaggcgcagctgggcctgaacggtgccttcggcgagcgccgcgcgctgaactacacgctttccaccacgcgcgggcaggggcaatcgaccagcagcaatgcctacgccacctaccaggcgcgctgggcccagctcaacgccggctacagccgcgccggcacgcgcagcagccagaccttcggcgctgccggcagcatggtggtgcacccgggaggcctcaactttggccagccagtaggggagggcctggtgctggtgcatgcgccgggtgcgcagggcgcgcgcgtgggcaacggccacgacatccgtgtggcaggcaacggctacgccttgctgccgcatgtcacgccctatcgctggaaccgcatcgacctggagccgtccggcttgccgcttgaggtcgaactgctgcagacctcgcagcgcgtggcacccactgccggcggcatcgtgcgcgtggcatttgaagtgcggcgcgagcgtacgttgttcatcgatgccaccgatgcgctgggccagcctttgcccttcgcggccaggctggaggatgaacagggcacaccgcggggagccgtgggccagggcggcgtgatccatctgcgcggcccgcaggacgagggcacgctgatcgtcgatccccaggggccgcaccgttgccgcctgcactaccagatgccgagcgagcccgacgcctacgggctgtcctggagccaggcgatgtgccagccgctggcgccggatgggctgcgggtggggcgtctctccacccatgatgcgttggctgaggaatcagcggcgcccccaccacatgagccgaatcttcatgaccgttga

SEQ ID NO: 516252 - DNA, 1065 bp, Stenotrophomonas maltophilia
gtgcaggccgcactccgtcatgccgtcgtaaacctgctgcgcaagcaggattccctggagtccctcgtgaccatccctctacgcgatgtatgtgctgcttccccgttactgctgggactctttgttgccggcgaaagcctggcggcgacctgccagcccatcagtggcgatgttgatctgacccagatgatcgatgtggattatgtggccgagccggaccgctatctcggaaccgcccaggcggaccttgtcttcacatgtgattccggggcgaccattaccacggtcactcccagcctgctgggcatgcgctacgtgcgcgatatcaccgatcggggcgcagcgtacgagcttgcatcaggttcgccgctcttcatgttcagtgcgagggcatccgcctgtgactgggtagaggaaaatccaggtgatccgccggtgtggtggtgcaatgaagctgaacagcctatcgggaacacgtttcgcgatggtcagcctggcgatctctacgcctatggcttgagtggggaagtacgcgtcaccctggttgtcgatatctattcgcgtggtggcggcatgaccgatgtgccgatgcgcaacgtcggcttcaccaccacgcagtggaacaccttcaacggccgccacaacctgaacattggcgtgcgcttccgggcgcagacctgcgcggtcgccgcacgcgatgtggtgcttgatcccatcgacatcatggacctgcatacgcagggcagtggcggggagatgccgttcgagatggccgtcacctgtgccgccgccgggcgtccgctgagcctggaaatgctcgatgccaacgacccgaacaacgtcaacagctggttggtgcccgccacgggttcctcaaccacgggcgtggcgctgcagctgatgcacaacggtgcgccgctgcagttgcaccagcagtgggtgcagggcagcaccggtaccggaaccgtccaggtgcccttcagtgcgcgctacctgcataccagcgacccgttggcgccaggcgccatccgcgccgaagccacgttgctggcgaactacaactga

SEQ ID NO: 516253 - DNA, 513 bp, Stenotrophomonas maltophilia
atgtccctgaaaaccaagatcctgacgttctcgctgctgtccattaccgccgccccggctttcgccgagcgcctggaaatcaccggtgaactgatcacctccacctgcacggtcggctccaccggcggtgccatcaccgtgccgatgggcaaggttgatctggcctcggtcaatgcagccacccgtgccggccataagaacttcaccatcaccctcgactgctccggctctggcgcatcgcaggatgtcggcgtgcgcttcggtggcgtgcaggatggcagcaccggcaatctggcactgactgcgacgtcgaccgctggcaacgtgggtgttgcgctgtacgacagcaccggcaaccagcagcgcgtgggcgaagaccccaccgtgtgggtcaccatcccggccaacggcaacggccagctggactacagcgcctggtatgcctcgccggccatgaatgctaccgccggtaccgccgacgcctccggcgatttcgtggtgctgtaccgctga

SEQ ID NO: 516254 - DNA, 723 bp, Stenotrophomonas maltophilia
atgagtatccgcgcatcgacgtggatggccgcgttcgtcgcggcctcgctggccgttcccgcatcggccgccatcacattgcagggcacgcgcatcgtccatgatgcgggcaaggctcgcgacatcacgatcaaggccagcaatgtcggcgaacagccggcgatgacccaggtctggatcgacaatggcgacagccatgcccggccggagaacgtgcgcacgcccttccggcttacaccggccgacccgcgcctgttgcagccgcagcagggacaggcgtatcgcatcacctatgcgccgcgccctgcggacacgccgctgccgaccgatcgcgagtcggtgttctatttcaaccttctggatattccacccaagccatccgatgcgaacggccagaatgtgctgcagttcgccgtacgcacccgcatcaagctgttccaccgtcctgcagggctgcagggcaacgtgcgtgatgcggcggcggcgcttcagtggaaagccggtgccggtgagctgaccgtacacaaccccagcgcctatcatgtgtcgctgagcacgttgacgctggccgatggtcgacgcgtggaggtggacatggtggcccccggtcaaacgatcagcttcccggtaaccggcgcagccgcactacccgatcgcctgcagttccagtggctggacgactacggaacgccgcgcgatcaccatgccacgatgggtggatag

SEQ ID NO: 516255 - DNA, 489 bp, Stenotrophomonas maltophilia
atgggtacggcatccttgctctccattgcaggcctgcttctgttcgcaacaggcaatgcgtccgcgtcgggacggcttaccctcagcggcgaggtcaagcaggccacgtgcgtcctgcagggcagcaccatcaccgcaccctccgtgcgtgcggacctgatcgatgcgccaggcagcggacacgatttttccgtggaaatgacctgtccactggcgggaatccagatcgacctgaccctgcgcgatgccaacgatgcgggcaacaccgggcatctgctgacccgcggcgccggctcgaccggctctggctggacgctggggctgctgcgcgggggaagcgccgtggccttcgccacgccgtggaatcatggcccctccgtactgggcgagaaccgtatcgcgctcacggtcgtttacgtgcaggagtcccccaccctcgttcctggccaggtgctcggccgcgctacgctggaagcggcctatcgttga

SEQ ID NO: 516256 - DNA, 624 bp, Stenotrophomonas maltophilia
atgcgcaagatcctgatcgccgccgccttgctggccgcttccccgctggccgccgctgctgaaggcctgagctacacctacgtcgagggcggctggacccaggcccgcaccgatgacaacgacttcaacgacccgaagatcgacggtggctacgtgcgcggttcgttcgcgctggccgagcaggtgcatgtgttcggtggctggtcctacgcctccaattcctacgactacccctacggctcctacaagctgaagctgagccagccggagctgggcctgggctaccacatgccgtggaccgaccgtctggacttcaccgccgacgtcgcctggctgcgccagcagtccgagatcacggtgcattcggacttctacggccgcctgcgcggaaaggaccacaccaacctggcccgcgccaccctgggcctgcgcggcaagccgtcgccgaagaccgaagcctgggccaaggccggctacatggatggcggcaaccacttcgaaggcacctgggtcggcaccgtcggcggccagatcaacttcacccggacctggggtctggtcggcgagatctccggctaccgcgacgtcacccagtactccgccggcgtccgcgccagcttctga

SEQ ID NO: 516257 - DNA, 606 bp, Stenotrophomonas maltophilia
atggggctggcagcactgttgctggccccggtggcagcccacgccagcaccgatcccgccctgcaggtgttcgacctgtacgcgcaggtgatcgtgcacggagacccggccgcgcaggcatcgctggcgcgttacctgccgggcgaccaggggccggcaatggcgaccgcgctggccaccatgagccacctggaccaggcccccgagctggccgattggccgccggccgccgcggctgtgcgcacgcggcagcgatcggtacggtgcagcatcgacagcgtgcgctacccacaggccgcaatggccgacgtttcctttcgttgtcgcctgcctgacctgagtgcattgctgccggtgtatcggcagcatccggtgccattcaatggaccacacccgccgcagatggcaataccgctggcaacggcgtacacgcggatgattgcggtggcaccggatcgcgagagcatcatcggcgtgtcgttccagcgcgatcatgacggcgctgcctggcgcatcgtcaacccgacgccgctgttgagcgcggttgccgatgccttcctgccattctttgaatggaatgaacacctgcccgacgaggccagatga

SEQ ID NO: 516258 - DNA, 600 bp, Stenotrophomonas maltophilia
atgacgccgcgcctgctgttcttcctgctgtgggttgcttcgaccgccgctgcacagacgcccgcaccgacaccggagcagagcttcgacctgttcgcgcggttcatgctggaaggtgacgccgacgccgaagcgcggatcgccgccttgaccggcatgccaatgcgcaccgaacgctgggaagatgcagtggaccggatggtcgttggcgaggcatccgcggacaacgcgcgcacacgcgctggccgcgatctttcgcggcaggtggcgctggcactgcggcagacccactgccgcagcacgggcagcgaacgccacgatggtgacgacctccaggtcgccatcgtcgcgtacacctgccaggtacccgactacgcggcgatggacaaaggcacgccggacgacacggccagcgcgccgggcgatgagggcgaactggcaggggttcagcacgtaatcgccctgctgcaacgcgctcccaggcgcgtccatgccgacagcgtggtcatggcacgcctcaatgaggatgatgtctggacaacgcaggatatgcccccgctgcagcagtggatcgaattgctgctggcgctgccggagtag

SEQ ID NO: 516259 - DNA, 432 bp, Stenotrophomonas maltophilia
atgcaatcctggcgccgccgacacggcctctacctgcttctccacagccttcttttttccattccctgcgcgttggccggcctgttgggtgcgctgctgctgctatgggtatgggcgcatggcggtgacaacagcgcacttcttggattgcttgcgatgtggggtgtgctgtccgtgacggcgatcccgcttgttttccagctggcaaacacgtggcagatgcgcggaccggatggattgaagcccgccgcgccagtgctgggaacgctgtttctagtgtcagctgctcaggctgtgtgcgcgttggtgatgacagtttcatgctttggagtggatccgatactgctgatactggcaatcggttggggggctccctggatcagcctcgcctgccacttccgatggctgtcgaaggccagcgggcgccagtga

SEQ ID NO: 516260 - DNA, 435 bp, Stenotrophomonas maltophilia
atggatgaaagcggacacaagcgcatggtggcagtcggcggcctgctgctcggactgccggcccttgccgccgcaggcaccgtcgcggtgctggggctgatggtcgtggcggacgggaagtatctgtccggcaacgaactcacggtgctgctgctgtggtcgtcgggcggcgtcatcggcctgctgtcgtggttgtggctgagcggtgtgttcctgcgccgtggccgcgccggcctgcggcaatcgtcgcctgctgcgtgggtggggttggggctgggcgttctggcggcattggccgtggtcgccgtcacactgcacctggtgttcaagcagggcgaattcgctcttttgagctacctgggcttgggcccgccgtttctactgccggccgcacatctggcgtggttgcgttggggcgcaaccgacactgtgtga

SEQ ID NO: 516261 - DNA, 2625 bp, Stenotrophomonas maltophilia
atgagcagccgcgtctactacctgggctggagccgaatgcgcgagcgcgtccatgccgcgtggccgacgcgcgccgtgctgtggctgttgcagctgatgggctgggcgttgctgcggctggagggaccggcctggcaggcactggcgccacgcctgcgcacggcgtttccgcaggtgcagggtgaccggcgctggcggctgggtgacccgctgcgcctgctgatccaggccatctggctgtcggtggtgcggctggtaccgaaggcttccaggcgacggctgcgcctggccgaagcccgccgccagcgcattgccgagctgcgcggtgcggccgggcgcggccgcctgcgctacctgcgcgcgatgcgcgatgcgcccagcgaattctggaacagccgcctggcccactggttcgggcaacgggcgcgcgcgctgtcgccacggtcgcggcagctgctgacgctgctgatcgggctggccacgctgggattggccgtgctgtgcatcacccagccgttcacctatgtcgcacagttcgtattcgtgctgctgctgtgggccatcgcgctgctggtgcggcgcatgcagggccgctacgccacgctggtgctggtggtgctgtcgatcaccgtgtcctgccgctacctgtggtggcgctataccgccacgctgaactggaacagcaccttcgacctggtctgcggcgtggtgctgctggcggccgagacctattcctggctggtgctgatgctgggctacgtgcaggtggcctggccgctgcggcggcgcccggcagcactgccgcaggacatccggcagtggccgacggtggatgtgctgatccccacctacaacgaagacctcgcgctggtgcggcacaccgtgtacgcggcgatgggcctggactggccggccgacaagctgcgcatccatatcctggacgacggcaagcgcgaggaattccgcgcattcgccgtgcagaccggggtcaactacattacccgcagcgacaaccgccacgccaaggccggcaatctgaaccacgcgctgacgctgatcgacggcgagctggtggcgatcttcgacagcgaccacctgccggtgcgctcgttcctgcagatcacctgcggctggttcctgcgtgatccaaaactggcgctggtacagaccccgcatcatttcttctcggccgacccgttcgaacgcaacctgcaggtgttccgcagcgaccccaacgaaggcgagctgttctatgggctggtgcaggacggcaacgacctgtggaatgcggccttcttctgcggctcgtgcgcggtgctgcggcgcgaggccatcgatgcgatcggcggctttgccaccgaaaccgtcaccgaggatgcgcacactgcgctgcgtctgcatcgcggtggctggaactcggcctacctgcgcattccgcaggcggcgggcctggcgaccgacagcctgggcgcgcacgtcaaccagcgcatccgctgggcgcgtggcatggtgcagatcttccgcatcgacaacccattgctgggcaaaggcctgagcctgttccagcgcttctgctacgccaatgccatgctgcacttcctggccggcataccgcgcctggtgttcctgaccgcgccactggcgttcctgctgctgcacgtctacatcatctacgcgccggcgctggccatcctgttgttcgtggtgccgcacatggcgcacgccagcctcaccaatgcgcgcatccagggcaagtaccggcgcccgttctggggcgaggtgtatgaaacggtgctggcctggtacatcgcgcggccgaccacggtggcactgttcagcccggggcgaggcaagttcaacgtgaccgacaagggcggtacgcaggccggagatcgcttcgactggcgcgtggcgcggccgtacctggtgctggcgctgctcaacgtgctgggcctgtgcttcgctgtgtggcgcttcatgcacgggccggccgatgagcgtggcacggtcgtggtcagctcgctgtgggtgctgtacaacctgctcatcattggtggcgcgctggccgtggccgccgaagtgcagcaggtgcggcgcacgcaccgggtcaccacgcgcctgccgatggcgctgcagattcccgatggccgtcgtctgcgcggcgtgctgcaggattactccaatgatggcgtcggcatcgagctgggcgaggatgcgctgctggccgaaggcgagcgcgtgcaggtgctgctggggcgtggacgccgcgagttcgcgttcccggcccgcgtgcagcgcaccgtcggccatcgcctgggcctgttgctgctgttcgagagcgagcgccagcgcgtggagttcgcccagtgcacgttcgcccgcgccgatgcctggctggactggcatgccggctaccagcccaagagcctgccgcgcagcctttggagcgtgctggtgctgggctggcgtggttaccggcggatgggcgacttcacgccgttcgacctcgaccgtccgatgcattggagccgtcgcctgctgcgatggatggccagctttgccccgcaacgtccgcttccttcccacccggctgacccagccgctgatccagggcttcgtccatga

SEQ ID NO: 516262 - DNA, 756 bp, Stenotrophomonas maltophilia
atgagcaccgtgctgtcgctgcagggtatccacggtggaaccggggtgaccacggtgctggcggcactgggacagggcctgcatgcccagggcgtgcgcgtgctgctggtcgagtgcagtcccgatcagatgctcggcctgcatctgggcctggcggccgatgtggaggggggctgggcgcgcgcgctgctggagggcagcgactggcgcgatgccgccttcgcctgcgcgccgggcctggccgtgctgccgtatgggcgggtcgatgccgagggcgcgatgcaggtggaacgccacctgcacgacacgcccaccctgtgggctgaccggctgccacaactggccagccagttcgactggctgttgttcgatctgccgcagcggctgccggcccatgcggctgcgatcaaccagcacgcatgctgcaccttgccgctgcggctggcctgcgtcgacccggtcagccatgtgttcctgcagcgccagcgcgacgacgatcgcctgttgctggccaaccgctacgacccggcgatcaccgtgcagcgcgatctcatgcagctgtggctgcatgcgcacgcgcgtcggttggtgccgcagccgctgcatgaagatgcccaggtgccggcggcgctggccagcaagcagccgctggggcggcatgccgccaactcgctggccgccgccgatgtcgatgggctggtgttgtggtgcctggccgaagccgcgcgccggcagggcagggcaggggagggctga

SEQ ID NO: 516263 - DNA, 180 bp, Stenotrophomonas maltophilia
atgaccaccgaccagcagctgtggaccctgatcgtcgcctgtgcactggtgatgattccatttggcgtgatgctgggcagcctgtggcgtgccctgcgccgcagcgttgcgcgtgcgctgccaccgcgccacctgcgccgggttggcgtgcgccggcgtgcaccgcggggcgctgcatga

SEQ ID NO: 516264 - DNA, 1488 bp, Stenotrophomonas maltophilia
atgcgcagcggcggcctgtactgggtggttgccgccggcagcgcgccgaccgatctgctcggtgccggcgtgctggccgctgccgatgcactgcacgacgccgtgctgatcaccctggggcgtggtgccgaaccgatgctgtcgctgttgccggccgcacaggggccggcgcagctgcgcctgttccagcgttcgcaccgtggcatgcagcaggcactgcgcggtctggtcggcgatctgccgcgcaccgcgtcggcacagacacgactgagcctggtgcagtttccggttgcagcgctggatggatgggatgacgcgcgcctggcacgctggtgcgcgcaactgcaggcgtgggccgagcaggcgcgccaggtgctgctgttgttgtgccacggcgaagtggccaccctggccccgcgcctgctggcattgaaccgcacctgcgcgggcgtggcccagctgcatccgcaccggggtgcgctgcagctgctgctgcactactggtccaacagccacggcgtggtcgcccagcagtcctttggcgtggtgcaggagggcaacgcgctgcaccatcggcgcagtgacgatgccgtcctcgcccccgcccacgatgtcagcggcagcgaccgcgatgtgttcctggcccaggccgaggtgctggagggtgcgccaccgctgtcggccgcatggcgcctgttcgatggctggggtggcctgctgccggcggcactgcaggcgcgcgaggcgaccgtagtgctggccatcaccgaaaacgcccaggtcgatgcgctggcgcggctgctgcatcgcctgcgccgcgagcgtggcaacgcgttgaagctggtcgtgcgtgagctgcaaccctgccttcgttatgccgatgagcgcctgctgatgcagtgcggtggcagcctggtggtgccggccgatacgccgttgccgcgcctgttgaccctgcttgagaccgtgcagcggcagcgctggcagggccagcttgccgacgatccggaaccgttgatccgtgcccaccgtcctcccgcgctcagtggcctggtcaatgtggcgcgcttccgccagattgccggcgagcgcatcgaccaggatggcagcgcggtggagagcgccgtgctggcgctgcaaccggttgccgggctgcgcgccgagcagacgctgcagcagctgcgcatccgccgccagggcgatctggcctgcatctatcgcggccaggtacgcctgttcctgttcggttgccgtcgcgatgccgtcgagcaggcgctgggcaacctgttccgcctgccgtggcgtgagctgttcgatggctaccagcgcctggccgaatatgacatcgcagccatgaatgccagtggcagcgatcccgacgccgatgtgctgccgccccctccggcggcactgccggtggtggccgcggccgtggaagggccgtccttcaccgctccaacgccgctgcggctgggagattccgcatga

SEQ ID NO: 516265 - DNA, 789 bp, Stenotrophomonas maltophilia
atgaagcgtgagcagatcagcctgcgtaccggtttcctgctggccctggccggctgggccggtgccgtctggttggccaccctgttcgggctgggtagccgtctgccgcaggccggcggcgatgccgacgcggcgccgccgctgcccaccctggcgcccctggccgccgaacgcatggccagtgccgacagctacagtgccatcgcagcgcgcccgctgtttgccgaagaccgccgccctcgtccgtacctgctgggcggcagcgagccggcggccagcgccgcgctgcgcctgaccggcgtgctgctcagcggcgaattcggcatggctaccttcagtaccgagcagaaccgttcgctgcgcctgcgcctgaacggagaggcggtggacggttggcagctggtggccctgcagccccgccaggcaacggtgatcgggcccggaggcaaccaggtgctggaactggccgtgttcaatggccagggcggcgagccgccgaccgtgctgcgtggcgccaacggggttccccctgcggccagcggtgccgtgccgtcgccggttccgccaccgccgccggcagcggccgcacctccggcgcagacggcacaacgcccggccacggccaccgcggcaaccccggccgcacagacacctcccgccgacaccaacggccccagcgaagcgcagatgcaggccatccgcgaacgcatccaggcccgtcgccgccagctgcagcaacaacagcagcaacaaccgtcgccgcccccgggcgatggcaccaaccgatag

SEQ ID NO: 516266 - DNA, 1887 bp, Stenotrophomonas maltophilia
atgaccttgaagaggatttcgaacgtgaccaacaagcagacctttcgcatcaatgtgctggctgccgccgtgctgtctctgacggtgggcgtcggtgccgcgcacgcggcaaccccgggcgtggccaaggagccgtcgcgtctggccagcgctgcccagcagagcgtggacggcgtcatcgtcaagtaccgcagcggcaccgccgccgccagtgaccgctcggccaagctgtcggtggtccagtcggcgctttcgcgcgccatcgtcagcggcggcaacaccagccgtgccactgcgctggccccgcaggtggaacgcaggctgggcaccggcgccgatctggtgcggttgaagtccaggctcggcaatgccgacatgcagaaggtgctggccgaactgaacgccgatccttcggtgcagtacgcggtggccaacgtacgcctgcagcgctcggacctgcgcgcggcgaacgcccagcccgcactggttcccaatgatccggactaccagcgcctgcagtggaacttccacaacgccaccggtggcgtgaatgcgccggcggcatgggacgtatcgcagggcgagggcatcgtggtggccgtgctcgacaccggcatcattcccaatgtcccggacttcggcacgaacctgctggaagggtacgacttcatcagcgacaaggaatcctcgcgtcggccgaccgatggccgtgcaccgggcgccaccgattatggtgactgggtggagaatgccaacgagtgctacaccggctcgctgcccgatgacagctcctggcacggcacgcacgtggccggcaccatcgccgaagtggccaacaacgggtcggccgtggcgggtctggcgtacaaggccaaggttctaccggtgcgcgtgctgggcaagtgcggtggcaccctggccgacatcagcgatgccatcacctgggcatcgggcggcaccgtgcagggcgtcccggccaatgccaatccggccgagatcatcaacatgagcctgggcggtggcggtgcgtgcgatccggcctaccaggatgcgatcaacggcgcggtctcgcgtggcacgctggtggtggtggcggccggcaatgaaaccgacaacgccgccaactaccgtccgtccagctgcgccaatgtggtggcggtgggcgcgacccgtgtgaccggtggcatcacctactactccaattacggcacggtggtcgatctggccgcgccgggcggtggtggcagcgtggatggcaacccgaacgggtacatctggcagatcggtaccgacgccacccagggccccaccggtggccagtggatctatatgggcaagggcggcacctcgatgtcctcgccgcatgtggcggccgtggccgcgatggtgcagagcgcgctgatcgccaagggcaaggagccgctggcgccggccgcgctggaaaccctgctcaagcagtccgcgcgtcgcttcccggtcaccattccggcggcgacgccgatcggcagcggcattgtcgatgccaaggccgcactggacgccgcgctgaaggagccgtgcaccgagaactgcgaaccggaaggcatcccgctgaccaacaaggtgaccgtgggtggcctggccggtgcggccgccagcgaaaccgtgtacaccttcgaagcggcagcgggcaaggcgctgagcgtgctgacctacggcggcagcggcaacgtgtcggtgtacctggcccagggccgcgtgccgaccgccaccgacaacgatgccaagtccacccgcccgggcaataccgaaaccgtgcgcgtggccaagaccgtggccggcacctattacatcaaggtggtgggtgaggcggcctacagcggggtgagcatcctggcgacccagtaa

SEQ ID NO: 516267 - DNA, 369 bp, Stenotrophomonas maltophilia
atggcgcagatgggggtggcaggcaaccaggcggcccatgccgccgtgccgaccaaggtcggcagctaccctaggcaggtagcgccgggccatgcccggcgagcgtattcagcccagatcgacgtgaaggcggtgctggccgcactccagccactggaacaggcaaccgaccatctcaccgtctcgggtcaggtgttccagcacccagtcggcgtcgcccgggttgacctccgccacgtccggccggacctgatcccggatgggcagcaggtcctcgccagcggtgtagaacggcccgcggcagcgcagcgtccgcggctggccgcagccgcctcagacccatcggccgcttcgaaggcggtcgcgtag

SEQ ID NO: 516268 - DNA, 489 bp, Stenotrophomonas maltophilia
gtgacgtccattccgccattccatcctgccctcggcgtgctgctgctggcgtcgttgtccggcagccacgcgcctgcgcaggtgcaggccgagtgggaggcacgtgggcgtgccgatggattggcgcgaccggacaccccatgccaggatttcctgcaggcgatggggcggaagccggcagggctggaatacctgggctgcagtcaggacgacgtgtcctacatcaagcccatgcaggcccactaccgcgttgccggcgcacgcgccgagcaggtcgaagcgtatctgcatgagacgttcggaatgccgatgttgcgttacacctgctgtggctggagcaatggcgggccctacagctggcgcgaaggtgcagacacggtgaggtaccggatcgggatgggcgtggagtcgctgccgcatccgcgcagcgagtggcgccgcatcgaagcattcaacgtcacggtggaggtgctgcggcagagtccgtag

SEQ ID NO: 516269 - DNA, 834 bp, Stenotrophomonas maltophilia
gtgaacgctgaggccgatccagcggcggctggcagatggttggcgagcgtgtgccggctgcggttcgacgtgatgctgtggttgtcgttgtcattcgtgctggtgggatgcgggtccgacaggaaaggaccagaagctgcacgactgcaggggcgcatcggtggtgtcgcgctggaggtgcccaggcaggatgtgtggatatgggagacggatcgggacgcgcaggccgagcccgcgtccacctgcggcgcgacattgcgcagtgtttccatccagctgcgttggccggagatggcgccgcgcaatgcgcggacccgacaggactacgaccggcatgactcggtggggaacggcgattcgaactggatcgacatcggcctgaaccaggccggcgagggcgagaacatcacgctgcagcagatacgggactggggactgtatcgcctgcaccatcaggaactgcccgccgtggtcacattcgatttcggtcgtgacgcagcgcttggactggagatggcccgaccggcgctgtcggagcgccgaagcttcaactggaaccggatcacctataccgacagcctggacccagcacgcgcacccactgtcctgatccgctgcatgaccgggccgcaatacgcacctccgcagtggacgcccctgtgcgaggcctcgcttgagcagcctgggctgcggaatgtacgcaccaccattgtttaccgtcagaacctgctgccgcattggcgggagatccaggccgatgtccaggcctatctgcaacgcatcaggtcccattgccctacacaccggaacgtgaaggagattgaacgtggttga

SEQ ID NO: 516270 - DNA, 288 bp, Stenotrophomonas maltophilia
atggtggcgcaggctcctgctcacgcccagccgctgcccgccgaactggcgcagctgggcatcatcgccggcatgccctatgccaaggccaagcgcctgctggatgctgccgggtggcagccagccgcggtggcgggcgctgccgaaccgctggaaggctttccggaggttcgatgccagaaaggcggcacgcagtgcgcgacgaccttcgaaaagagcggccagcagattgcggtgcgggtgggcatgaccctggccgggcagccgttcgtgcagggtgccgactga

SEQ ID NO: 516271 - DNA, 984 bp, Stenotrophomonas maltophilia
atgatgatcgttcccgcctactgggccgaagcccgcgtacaggcccgcttccgtggccgcgcgctggtcgtgcgccgcttcggctggtccgatgagggccccgccgaagcccaggcacatgccgatgcccgcgccaacgaggcactcaacgccatcgttgccgggcagccgctgccgcgccgcgaggtgcgcagcaattacggcgtggaaggcgtgccgatccgcgaacagatcgtgcagcgcgatggcgacgtggtgatcacccgcaacagctacggcgcgctgtgcctgaacagtccggatgtgttgttcgccgacatcgaccacgcgcctgcgccgggcggttgcgtgatgccggccctgatcgccgccgcggtgctgctggccggcgccatcaccggcaccctgctctggcattggctggtcgggctggtgctgggcgtggtggcactgctgctggccaacgcggcagtgctggcacgccggcggcaacgcctcgccgccgccggcggtgccgaaggcatcgcactgcagcgggtggcggccttcagcgaacggcacccggactggcacctgcgcgcctaccgcaccccggccggcctgcgtctgctggcgatgcacgcgacattcctgcccgaagacgagcagctgcaggggttgttcaaggccctcggcaccgatgcactgtacgcacgcatgtgccggctgcagcactgcttccgtgcgcggctgacccccaagccatggcgggtcggcttgaagtaccgcatccggccgccggtggcggcctggtccgccgagcaggccagcaacctcgaccgcctggcctggatcgccgagtacgagaagaagagcgccggcttcgcggcctgcgcctatctgcgcagcttcggcgataccacgcgggtgcatgccaaggccgaacatgtgcgcgaactgcacgaccggctgtcgcacgcgcaggaccgcctgccgctggcatga

SEQ ID NO: 516272 - DNA, 783 bp, Stenotrophomonas maltophilia
atgcgtggatccatgctgcttgccgctgccatcaccgttgccatggcgctgagcgccccgctgaaggcggccgaacctgcggcggtcaatccgctgctgctgaagccggtcgagcagctgcgcccggacgaggtgcgcttcatgcagcagcagctcgccgattggccgcagctgcagcgctatcgcgacgccaacgctgcgctgcctgccgctgtgcccggccagccacgcgtggtgttctacggcgattccatcaccgaaggctggggcagggaaggcagcgcctcgttctttgccggcaagggctggctcaaccgcggcatcagtggccagaccacggcgcagatgctgctgcgtttcccgcaggacgtgctggcgctgaagccgcaggtggtggtgatcctggccggcaccaacgatgtcgccggcaacaccggtccctccacgcaggcgatgatcgaagacaacctgcatgcgatggtggatctggcgcgcacgcacggcatcggcgtggtactggcctcggtgctgccggtcagcgagtacccgtggatgccgggcatcacgccggcgccgaaagtgcgtgcgctgaacgatgcattgaagcgctacgccgaggcgaagcagctggtctatctggactactacacgccgatggccaatgcagtcggcggcctcgatccgcagctggccgaggacggtgtgcatccgacggcgcagggctatgcgcgcatggcgccgttggcagaagcggccgtcagccgcgcactgaagcagaagtag

SEQ ID NO: 516273 - DNA, 780 bp, Stenotrophomonas maltophilia
atgaagaacccgcgccattcttccaccagtgcattgaagctgcgcaggagccgtggcagcgaagtcgtgcgtgcgcggcggcacctgcagcagcgtggttggccgcggctgcagatggccctgatcgttgcgctgaccggcgccgccgggttcctcgtctcacatctgctgcggctggccggtgtagaggccatgctgctgcgctacccgctggcggtactgctggcctacggcgtgttcctgctgctgatgtgggtctggatccgttggcgctgggacaacgtgctcgatgcgctgtcgtcggaggtgggcggaggcaccccatcggcacacggcagcgccgcgcaatcgccgtggagtgatgtcggcgggcgttccggtggtggcggtgcgtctgcctcgtggaacgagtcggcagcgcagagcggggttgaggtgagcgaggtgccgctggccggactggccgaagacgaagccgggctgccattgctggccgtcctcggcatcgtcgcggtgggcgcagcggtcgtgctggtcagcgcatgggtggtatggtcagcgccgctgctgatggcagaactgctggtggatgcggccatcgccggtggcctgtaccggcgcatgcaaggcatgcaggagcagggctggtggcgggtatgcgtgacgcacacgatctggccgctgctgggcctgctgttgttctttgcgatcgtgggctggctggcccagcagctggtaccgggcgcggccagcctgctggaagttttccgcggggtgtga

SEQ ID NO: 516274 - DNA, 135 bp, Stenotrophomonas maltophilia
atgctcggctgctcttcattgcaacagcagaagacccacgctgcgcgcgacagccgagcatgggctcggctctacatggatgccgtgggcggccatacgctgccgatgggtgacgtggcgcgcccgacctgttaa

SEQ ID NO: 516275 - DNA, 1431 bp, Stenotrophomonas maltophilia
atgaaccgacagcttcgccatagcgttgccctgctgtgcctgcttccgggcgtcgcgttctcagccccgtccggcgtggccacccggttggacacgcagttgcagaccaaccgcgagcgctacggcatcgccggccaagcggtactggtcgcacatgacggccaggtgctctaccagagcgccagcggcgagcgtgacccggccatccatgcgccggccaccgtcgattccattttcacagcgcagtcgatggccaagctgctgaccagcacgctggtgatgcaactggtggaccagggcaaggtggatctggatgcaccggccagccgctacgtgccggacctgccggccgcctggcgaacgatcagggtgcgtgacctcctcaaccacagttcgggcgtcgccgagtactacgaccgggtcgacaatcgctgggtgagcaagggctacagtggcgtcgcgccagatcttgcggccgcgctgaaggtggcggccgccgcgccgatgcagttcgccaccggcagccgcgtgcagtacacccaggccaactacctggtgctgacggcgttgctggaagcgcattaccgcaaaccctatccggccatcgcgcgcgagcgcatcctgcagccgctgaagatgaccagcacctcgtggggcgtggccagcgtgccggcccagcgcgcggcggtgccgtacatcggcaaggacggcgcattgcagcccgccaatgaagacccgtggccgagctacggttggggccatgccgacctgcagaccaccgtgggcgacatgaaccgtttcctgcaggcactggccgccggcaagctgctgcgcacggccacgctggaaacgctctggcggccacagacgctgagcggcggcggcagcaatttcttctccaccggctgggacaccacccgcagcgatggctacacccaggtcggccaagatggcggcacccgtgtgcgtgcgcggctggcctacaagggcacgctggccgacggctactgggtgttcgtgtacctgaccaacggcagtgcgcgcaatgtgtggtcgagcacgttggtggaaagcacgatggcggtggccgcaccgggggaattcccgcatgcggtgctgtccgagcgattgatcgcttatgcgctggatgatgatgcaggcgctgcgcacgccctgcgcgcgtggttgcgcgacagcagcggcatcgcggccagcgaactggagcgggcgatcaacagcgacggctacgccatcctcgcgagcctcggcgcgcgcagggcgctgaaggtattcacgctcaacaccgagctgtatccgcagtcggccaatgtctgggacagtctggccgagtgccatgccgcgctgggtgacaaggaaacggcagagcggctctacgcgaagtcgaaggcgctggcgaagccttcgccgtaa

SEQ ID NO: 516276 - DNA, 561 bp, Stenotrophomonas maltophilia
atgactgccaccacccacgagaaccttcattcgacgcacgacagccacgcgcagcagcggccgacctcgccctggatgtggatcgcgctgatcgtggcgatgttcgcggctgcactgctgtggctgcgccacgccaatcaggacgacgtggcaccggcgccggtgggcgagcggatgctgcccgctgcggagcagccactggtcgatgcggccgtgcctgccaacgggcaggcggctccggccgctatccagcgtcgggcagcgccggcggtgcgtaaccgcgaggcgcgcccgctggccagcaacagcaagccgacctacccggcaacggcactgcgcaatggcgtgcagggcagcgtggtggccagcctcaatgtcgatacccgcggccatgtgaccaatgcggcgattgtttcgcgcagtggcgaacgcagccgtgatcttgatcgtgcggtgctgagcaccgtgcagaactggaagttccagccggccatccatgagggccgtgcggtagcgagcgtggtgcgggtcccggtggacttccgcaccgagcagcgttga

SEQ ID NO: 516277 - DNA, 2754 bp, Stenotrophomonas maltophilia
atggaatggcgcccctcgggctggggccagcgtgtgacccgctcgccggactggcgactgcggctggatggcgagcatgtcgagcttctgattggaggccggcagtactcgcagcgcgtggatcacaaccagcgcgtgcgggtgcttccgggcgtgttgtgggccaaggtggcgctgcagaccgaggacggccaaacgctgtccgtggatggcctgccgaaccgccaggcttcccacctctcgactgctgtccagaacgtgctctttgcgcgcaccacgcgcgggcgcaaggcgctctttgaggagatccttgagcagatccagtcatggctgagcgcggcggacgcgatgaccgatcggggtcacgccagccgccgctggatcacccacgagcaacagcaggcgctgctggctgaacggcctgctctgccactctccccagatgagctggagaggctgtttctcgatgcgaacgtgcacgacgacctgcgctccagccgccatctggccgcgatggaagcactcaatgactggcatcgggattggcccgctgcctgggccgaggccaacgaggccatgacccagcgcgagctggtgctggccaaggacctgctggaccacgtcgagagcaggccactgaccgaagagcaggcgcgcgcggtcatctgcttcgacaaccgggtacaggtggtggcctcggccggctccggcaagacctccaccctggttgccaaggccgcctacgcgattgatcgcggcttcgtcgagcccgagcgcgtgctgatgctcgccttcaacaaggacgcagccgaggaactggaagcgcgtgcgcagcgcgcgttccagcggcttggcatgaccgacgccgtggtggaagctcggaccttccatgcgctgggcctggccatcatcgccagggccacggggcgcaagcccgatatcccggattgggccactgacgccacgctgggcttcaacaagctcgccgaactggtggacgacctgaaggaccgctcgagccacttccgcacccagtgggacatgttccgcctggtgttcggccgcgaccttcccccgttcggcgccgagatgctggccgacggctacgaccgcgatggcacgccctacatccgcaccctgcagggtgagcgggtgaagagtctggaagaatgcgtcattgccgactggctgttctacaacggcgtggcctacgactacgagcggcgctacgagttcgataccgcgaccgacacccaccgccagtatcgcccggacttctattaccccgacgccgcgctgtatcacgagcactttgcgctggatgccgacggtcagccgccgaagcatttcgccaactacagtgaaggcatgcactggaagcgccagcaacatgctgcgcgcggcacctcactggtcgaaacaacctcgtttggccttcgtagcggccatgcgctgcagcacctggcgcgggcgcttggcgagtctgatgtcgaactggacccgaacccggaccgcgcgcttcccgaacagggcgcaaagccgatgccggacgctgacctgatcgggctgatgcgcacgttcatcgcccacgccaagagcaactgcctgacgctggaggacatggccgggcgcctgcggcagatgcccgaagaccagttcaaggaacggcaccggcgtttcctggagatcgccgggccggtcttccaggcctgggacaacgcgctggccgacgagcgcggcatcgacttcgaagacatgctcaacatggccgcagggctgctggaacagggccggtacgagtccccctacgagctggtgatggccgacgaattccaggatgcctcacgcgcccgtgcccgcctctgccgcgcgttggtcagtcaatccggtcgccatctgttcgcggtgggcgatgattggcagtcgatcaaccgctttgccggtgccgatgtttcagtgatgaccggcttcccggagtggatggcgcaaggccaggtactcaagctggaacagaccttccgctgcccgcaagcgctgtgcgatgtttccagccgcttcatcagccgcaaccccgcgcagatggccaaggcggtccgctcggcgacgccggcggtgggcccggtgctgcaggcgttccagctggcccgccgtgaggaagtgcaggacggggttcgccagtacctggccacgctgcaccagcaactgctgtccggcgcattgcctcgcggccgcaccggtcgcgtgacggtgttcattctgggccgctaccggaatgagcgcagtgccttgcctgcggactggaagaccgcgtttggcagcacgatggaggtcgagttcctgaccgcgcatcgttcgaaggggcgcgaggccgactacgtgattctgccggggatggtgaatcgtggcttcccgagcctgcgctcggatgatccggtactttcgctggcgatgcccgaaggcgatgccttcccgctgggcgaagagcgacggttgttctatgtggcgctgacgcgtgcgcggcgctcggtggcgatgttcaccctgcagggcaagcactcgccgttcctcgatgagctggtgcaggacggcgtggtggaagtgacgagcctttcgggtgtggcgatcaatgaggaacgctgcccggtatgcaaggtgggggtgttcgtggagcggaatgggccgcatggggctttcagatcgtgctccagctatccgttgtgccataacaagcccaagggtggccgccgcgcatga

SEQ ID NO: 516278 - DNA, 708 bp, Stenotrophomonas maltophilia
atgaatccacgcacttgggcattctccatcaaaggcccgcgaagctcgattgaatgcctacccagaacgtgcccgtggtggtcgctgaaagtcgtccacgtagacggcaccgtggagcgggaagcgtctattcccggttcggaggccttcacagactacgaccatcacaccgaccttgcgttggaaatcgttgttctgatgaatggagttgcagtctcctgcggacactctggacttatcgaaatagacaagcacgttgagtactgcgaagcaggaaagcggacgccaactacgccgctcaggctcatcatcaagaatacgaatctaggtggattcggcgctacgccccaagcgttgccgggtcttgaaaatgcatcaatcgagaacatcggaaccataaagaagttgatgctctattggggccagtcgaactcggaaacctatgagggactctacaagatctacgaattcatcaaaacatcctacccgcagctactggatgagatgaaacacgaaatcagcagaaggaagatttcgcagcttactcagacctgtaacagcatgtcatcaggaccgacagcacggcacgccgatgtttcgcaccctcccgtggagcgcccgatggagctttcggagatcaggcgaatcgtccgtactctttccgatgcgtttctaaagcacctgaaaggcacctcggccattcgatga

SEQ ID NO: 516279 - DNA, 669 bp, Stenotrophomonas maltophilia
atgacacggatccgtaccctgcaccagcgtgcattgccctttgcgctgctgcccctgcttgccgcgtgccagaacgaacaggtcagtgcattcttcaatcctccgcaggacgttcaggccagcagcgaattccgcatgagtaccccgccggggctggtgcacagcaacctgctgtcctcggcagcggtgaacgacggccaggcccgggtggattcgggcgggccgggctatctcgatatccgctttttccccatcacccatgccgatgcgctggataccatgggcccgcagtggccgtcctcgcagcgcgacagcgatcccgatctcggcaacgtcgatttcagcagccacttcgtgtttctggtggcgcacccggaactgaccggctacgccgcgatgcgcagcggtcaatacgccacgttcttcagctcggtgaaggttgcctacctggacgaccgcgtggtggtgcatctggatgcgtcgcggctgggcgacatcagcccgatggcactgctcggcagcccgtgggccggcaagctctacacgcttgagcggcgtggccgcaagcagttggaggtgaagctgtacgacaatcgctaccagttcacgctggtgccggaggtggtgccgcaggtggtgtctgagattccgccgcccagggtgagctga

SEQ ID NO: 516280 - DNA, 645 bp, Stenotrophomonas maltophilia
atgaccccgccccctggccgccgtgagcagcgcaaagccgagacccgacaggtgatttccgacgtcgccaccgggttgatcatcgagcgtggcttcgaagcggtgtcgatgtcggacattgccgaggccgccggcgtctcgcgcaagacggtgttcaactacttcgccagcaaggaagacctggtcttcgaccgcgacgaagaggcgcgcgcactgctgcgcgaaggcatggccgagcgcagcagcatgacgcccctggccgcgttccagtcgctgctatgcagcctgctgcacagtggccaccccctgctgcggatcaacgctggcgccgcagcgttctgggccacggtggccgacagcccggtgctgatcgcgcacgcgcggcgcctgcaggcgcagctcaccgacgatctggcgcagttgatggccaccgcggccggtcgcccaccccaggatgccgaggcccggctgggcgcggcgatgctgctggcctcggtggtggccgcctacgaaaagggcctggccagccacgcgctgggcgaggatccgcgcgaggcgatgctgcagttgatggtgcgcggcgccaccggcgtgctggtcgcgctggccggtaccccctacaccgaccccggcgcacgtccatag

SEQ ID NO: 516281 - DNA, 1599 bp, Stenotrophomonas maltophilia
atgtggtacgacgtggttattgccggagcgggtccggtcggcctgttcctgtcctgcgagctggccctggccggctgttcggtgctggtgctggaagcggccgcatcgccgcagtcgccgctgaagcgcttgccgttcggtctgcgcggcttgaatgcgcccaccctggaggcgctggaccggcgtggcctgctcgaggcggtggccgcgacccaggtgctcaagcccgacaagggcgcaccgccacccggtaccgcgcattggttggcgcagtcgcggccgctgggcggtcactttgccggcatcccgttcgctctggacaacgttgaccgcgggcgctggccgtatcgcctcgctacaccggttggcacccagatggcggtggaactgcacgcgctggaaaccgtgctgagcgaacgcgcggtcgcgctgggggtgcgcatcgaacgtggctgcgcgctgcaggccgtgcaggcgggcgacgcggaagtgaccatcgagaccgccgccggaccggtgcgcgccgcctggctggtcggctgcgatggcggccgcagcaccgtgcgcaagcagtgcggcttcagcttcgccggcaccgacccggagttcaccgggcattcgttgctggtggaactggacgacccttcggtgctgacgccgggccgccagtacaccgcgcacggcatgtgcaatttcaatccgcccggcgtgctggcattggctgatttcgatggtggcgcaggccatcgcacgctgctcgatcgagagacggcgcaggccctgctgcggcgcatttccgggcgagaggccaccctcaccgcgctgaagctgcacagcacatggaccgatggtgcgcgccaggcgacgaactatcgcaacgggcgcgtgctgctggccggtgatgccgcgcatgtgcattcgccgctgggcgggcagggcctgaacctgggcatcggcgatgcgatgaatcttggctggaagctggcggccgtggtgcacggtgaggccgacagcacgctgctggacagctatggcgccgagcggcatccgatcggcgcgcgggtgctggactggtcgcgcgcgcaggtggcgctgatgcgacccggtgcgggctcgcgtgcgctggcggcggtcatggccgacctggccgacaccggcgatggcgcgacctacctggccgaacgggtctggggtgttgcgcagcagctggacctgggtgaagggcatccgctggtcggccgcagcgtgccggacttgcagttgggcgatggccgtcgcatgggcgaactgctgcgcgccggtagcggggtgctgctggtgttggacgccgattccgcgctctgcgagggcattgacggcgcgttgcatcgcctcacctgcatggcttcgccggtgcacgacacacttggtctgggcgcggtgctggtccggcccgacggcatcgtggcctgggcctgcgatgccggtggcgatgcgacggggctgtccgaggcgctgcaacgctggttcggtgtgcccggcagaggcggcgctacacccgcaccggcacaggcgaacgctgtcgcccggcctcggtcatcaccgccgccagctgcttga

SEQ ID NO: 516282 - DNA, 1734 bp, Stenotrophomonas maltophilia
atgctgcgtgacctccccgcgctgtcggccatgcatccttttcccctttccgtctccacgcccgaccagctggcctaccgcctgctgcaggacagcgactgggcgcgctctgccgccgcagccagcgccccgcccgaactgcgtacgctgctggcgatgattctcgactctcccgagccgctgtggattgcctggggccaccaggacaagacgttctttttcaacgatgcctacctgccgatgctgggcggcaagctgcacggggccatgggcaatggcctggaacaggtgtgggccgatgtctggcaggtggtggcaccggcgattgacgatgcgtttgccggcaccagccgcagcttcaacaatctgcccctgatgatggaccgcgacggcacgctgcgggaaaccttctggacgttttcctattcgccgctgcgcgttggcagtggcgcagtggccggcatcatctgcgtggtcagcgaacagaccgagcgggtgatcgagcgcgaccggcacagccgccaggtcgcggccatcaccgaacaggcacgcgaggcgcatctggagctggtacgcgcgcgcgaacagctgcggcagtcgcagaagctggaggccatcggccagctcaccggcggcgtcgcccacgacttcaacaacctgctgcaggtcatcaccggttcggtggacatgctgctgcacacctggcctggcgacgatccgcgcctgcgctacatccaggccatcggcagcgcctcggacagggccacgcggcttaccgcgcagctgctggcattctcgcgccggcagagcctgtccccggaggttttcgatctgtgcgagagcgtgcaggcactatcggacatcatcaccaccgtgctcggtgcgcgcatcacgatgcgggtgaacctgcctgacacgccgttgccggtgctgctggaccgcacgcagctggataccgccctgatcaacatcgcagtcaacgcacgcgatgccatcgatggccagggcagcgtgacgatccaggtcgaacaggtcaccgcagtgccatcgatccgctttgccgcaccaatgaagggcgtgttcgccgccatcagcgtgaccgacaccggtaagggcatcgatcccaccgtggtcgaccgcatcttcgagccgttcttcaccaccaaggatgtcggtgcaggaaccgggctcggcctcagccaggtgttcggcttcgtcaagcagtccgagggcgaggtggatgtgagcagcgaacccggcaccgggacgcgttttacgctctacctgccgctggcccagtccagcggcgcactcccgcgcccgctgtcacagccaggcctggtgcatggccatgggctgtgcgtgctggtggtggaggacaacgtggacgtggccgagttcgcggtcggtgcgctgcgcgaactcgactacaccgtggtgctggcgcgcaatgcagaccaagcgctggctgcgctggaacaggatgctgcgcgcttccatgtgatgttcagtgacgtggtgatgcccggcaccaacggactggacctggcccgcaacgtccgcagccggttcccggatctgccgatcatcctcaccagcggctacagcgaactgctggcgcgtgacccggggcatggcttcaccctgctgcgcaaaccctattcgctcaagcagctggcggcggtgatgaccgaggccgggcgacagcgttcgcctgtgccggtgcgggtgtag

SEQ ID NO: 516283 - DNA, 288 bp, Stenotrophomonas maltophilia
atgggcaacgatgcggcattgtttcctgccgagctgtccatgcctgacgcgatccaccctgtcatcagcgcctttgaggccgtgttcaacctgtccggtggaatcgagcgcattaccgcgctgaccatcacctgccgccattgcgcggaaaccacttctgccggcgaagacagcctgctgcatctgcccggcggcgccctgttccgctgcgagcggtgtggttgccatcaacaggtaagccatgcacgggtggccgattggcctttgcccacgttgctgggcgtgtga

SEQ ID NO: 516284 - DNA, 270 bp, Stenotrophomonas maltophilia
atgcatcacccctccgcccccacccgccacgacgccatcgccctgcaggcgggcgtgctcggtagcgtgctgggtctggggctgttcaaggccattgcattgtcggcgcttgcgagtgggtcgctgctggtgatcggcatttggctgctgacctgcgccctgctggcggcgtgggcctttgcggcgtgcctggcctgcctggcgctgagccggcgcgtattcgtgctgatgctggtgctgtgcagcctgctgctgatctgcgtcgcctga

SEQ ID NO: 516285 - DNA, 660 bp, Stenotrophomonas maltophilia
atggactgggtcgtacaggcacgcacattggcaaaccaggcccatgccggacaacaggacaaggccggacagccctacatcgaacatgtcgcgcgcgtggcggccgcgatcgatgacgatgacaccgccaaagcggcggcgtggctgcatgatgtcgtggaggattgcccgcagtacgcgccgcagctggcggcctttccggcgccgatccgcgacatcgtgaccctgctcaaccggcacagcgccgccgatgccccgcattactacgcggcgatccgtcagcatccacgggcattgaaggtgaagctggccgacatcgccgacaacgctcatccacgccgcttgctgcagctgccgccggaggtggccgaccgcctgcgtggcaagtacgccgccgcattggccgccctcggcacccgcagcgcatccaccaccgtgcccgatccggcatccacccgcctgcggtcgctgatggaggcggcacgtaccctggttcagctggccgacgaggccggtgcacacgcctctgcccgtggcgaggatccctccacgcatgcgcaggcgctgatcagggtgcgtgacatcgtgctggccgaactcgaagcgcagatgacgccggaagcgttccttctctggagcgacatgtacacgctggcctga

SEQ ID NO: 516286 - DNA, 507 bp, Stenotrophomonas maltophilia
ttgaatttcatcatccgcgctgaaactccggccgacatcgacggcatccacgcgctgacggctgcggccttcgccacggccgaacacagcagccacaccgagcagttcatcgtcgacgcactgcgcgcacgcggtgaactgtcggtttcgctgctggccgtggacaacgggctgctgctcggtcatgtggcggtgtcgccggtgacggtttccgatggcagcaccggctggtatggcctgggaccgatctcggtgctgccggcgcggcaggggcagggcatcggggccgcgttgatgcgcgccgccatcgacgcccttcgccagcagcatgcgcgcggctgcgtgttgctgggcgagccggcgtactacggccggttcggcttccgcgccgaaccggggctggtactgccgggcgtgcctgccgggtacttccaggcgctgtgcctgcaaccgccgctggcgcagggagaggtgcgctactcaccggcgttcgatgcgaccgcctga

SEQ ID NO: 516287 - DNA, 768 bp, Stenotrophomonas maltophilia
atgcgcgcgctgatcgtgcttgcccatcccgaaccgcggtccttcaacgcccatctggccacgcaggccgccgaacagctgcgtcgcgccggcatcagcgtggaggtggttgatctgtacgcggagggcttcgacccctgcgaggccgcccaccaccatcggcagcgcctgcaaccggagcgcttcgatgcccagcgcgagcagcggcacagcgccgaactcggcaccctgcctgccgatatccagcgtcacctgcaacagctgcacgccgccgatctgctggtcctgcagtttccgctgtggtggttcgccgcgcccgccattctcaagggctggctggatcgtgtgctggtctatggaccgatgtacaacagtcggcagcgccacgaacacggggtgatgcggggcaaacgtgcactgctcagcgtcaccaccggctcgtcggctcgggcctgcgcggtcgatgggcgcgaaggcgataccgggctgctgctgtggccgttgatgtacagcctgcgctacatcggcttcgaggtgatgcagccgcatcgggtgcatggcgtgcgctcggggctcgcggcgcaacgcgtgcaggcgcacgacgacgcactcgtcgccgccgtccagggttaccgggaacggctggcgcactggcagcactggccgaccgtgcccttcaacgacagccaggactttgaagacggcatcgtgctgcgcgcgcaggcggccgcgcacagcccgttcatccgccaccgaagcggtgagtga

SEQ ID NO: 516288 - DNA, 630 bp, Stenotrophomonas maltophilia
atgcccgcgtccgcacttccccccttcagctgtttcgacggccatcgcctggtcgcctccggtaccccggcagtggccgcgctggcactgaagcagctgcgcgccgaccacgccgccggtccgctgctggtgttcgacaacgccaccggccgcacccgtgatttcgacacgcgcggcagcgatgccgaactgttggcgcggctggccgatacctttgcaacggccgcggaggccgatgccggaatcgctccggaagacgcgcctgttgccccgcgtggccgtggccgcccgaagctgggcgtggtggcccgtgaagtgaccttgctgccgcgccattgggcgtggctggccgagcagcccggcggggcttcggtggcattgcgaaaactggtcgaggcggccagccgggccggtgccgacaaggaccgccggcgccgcgatgccgagcgtgcctatcacttcctgcagaccatcgccggtgacctgccgggcttcgaggaggccatccgcctgctgttcgcgcatgaccgcgcaggcctggaagcggcgttgcgccgctggcccgaggacgtgcgccgccacgcgctgcgtctggccttcgacgaacctgtagacagcgccgacgactga

SEQ ID NO: 516289 - DNA, 801 bp, Stenotrophomonas maltophilia
atgaacaccacgatccgcacgcttccgctggtgcttgctggcctgctgccgatggccgccgctggccagttgccgaccgagcgcgttgctcctgcaccacactgcctggacgcacgtgacgtacagcaggtcgagcaggagaccgcaacggccattgccgttcgcaatggccagggccaggcgtatcgcatcgatttcagcgccgcctgtcccggcatcaatgatgccggcacgctgcggctggaggcaccgtcgggctgggcctgtggacgccccagcgagcaggtggtggtcgatggacgccgctgcgccgtggccggcgtcactccgatcgacaaccgtgaattcgccagtacggcgcgggccagtggacggcaatatgccgccacgctccccagtgtcacggtaaccgccaagggcgaggcgcggcagccgcgcagccgcacccgccagaccttccaggcgtcgccggcgttctgcttcgccagccgccatgtacgcagctggagcgaggatgcacagggcgtggtggtcgaaaccaacccacgccgcagcggcgggcaccgtttctaccgggtcgaactggccggcagctgcccgatcctggccggcgccacctcggtgtatttccagtccggcttccagaatggcctgatctgcggcaatcccggcgaccgcatggtggagacgccgtcggacattccaggtgacctgcgctcgttcaccccacgcttcatgcgaccggcctgcccggtgctggcggtgtatccgaaggacgtccccgaccaggcctcgcgctag

SEQ ID NO: 516290 - DNA, 414 bp, Stenotrophomonas maltophilia
atgagccgcgcgatctgggccgcaggcctgtccggcgcgctgttcggcgcggggctggcactggccggcatgaccgacccgcgccgggtgctcggcttcctcgacgtggccggcgacttcgatccgaccctggcctgggtgctgggcgcggccgtgctggtcagcgcgctgggccagcgctgggtgctgcggcgcacgcagccgctgttcgccacgggtttccagcggcccgcgctgaccggcgtcgatgcgcgtctgctgctgggcgcggccctgttcggcatcggctggggctgggcgggctactgcccgggaccggcccttgccgggctggctgtggggtcgcgtgaagcgctgtggttcgtgcccgccatgctggcaggcttctggctgcacgcgcgggtcacgcgctga

SEQ ID NO: 516291 - DNA, 438 bp, Stenotrophomonas maltophilia
atgaacgtgccatgggcggcactggccggtggcgggctgatcgggctggctgcggtgctgttgctggcgaccaccggccgcgtggccggcatcagcgggatcgcggccggcacgctgcgccccgcgcagggcgagcgcggttggcgctgggccttcctgctcggtctgctgctggcagcgggcgcagtgctgtggtggcaagcggcgcccgggcagccggcgcgcgcgctgatccgcgatgcgctgccagcctggcagctggtcggcgcgggccttctggtcggcttcggaacccggctgggcaatggctgcaccagtggacacggcgtgtgcggcatggcgcgtggttcgcgccggtcattggccgcggtgctggtgttcatgggctgcgcgatgctgaccaccttcgtgatccgtcacggcggagccatcgcatga

SEQ ID NO: 516292 - DNA, 321 bp, Stenotrophomonas maltophilia
atggcccgcgccccgctcgacgccaccgcgatggccgaacatgccgcgcatgcggccgccctgctcaagagcctggcccacccggcgcgtctgcaggtgctgtgccggctggtggaaggcgaagcgccggtaccggaactgcaggcgttgaccgggctgagcgcatcggcgctgtcgcagcatctggcggtgctgcgcgcactggacatcgtggcgacgcggcgccaggcacaatcgatccactaccggatgatcgaaggcccggcactgggcgtactgcaggcattgcacgccgcctactgcggcggcccggcacgctga

SEQ ID NO: 516293 - DNA, 591 bp, Stenotrophomonas maltophilia
atgcagaacctctggttgtccctctccgccctcggtgacagccgctggctcctgccgatggcactggtgttgctgctcaccctgccgcgcaccgacagcgacctgaaagggcgatggttgagcgccgtcgcagttgccgccggcgtgacactcgcctcaaagctggccttcatgggctggggcatcggcatcagccgcctgcacttcaccgggttttccggtcatgcggcactgtccagcgttgtgtacccgctggtgggcgtgctgctggccggccccggcagacccgcgcgcgcaatcggcctgatgactggcgtgctgctggcgatcgccatcgcctggtcgcgcatccccctgcacgcgcacagtctgtctgaagtcatcgcagggctgatgctcgggctgggctgcagtgcatacgtgctgcgcggcgcactgcccgcccgccgaccgactgccgtgacggccacagccgccgtgcttgccggactgatcctgcccctcaccctgcccgacatccagacgcatcagctggtcatcgcactggcaaagctcatctcggggaaggctgaaatcttccagcacccctga

SEQ ID NO: 516294 - DNA, 1254 bp, Stenotrophomonas maltophilia
atgagcgagtgtcgcaagggcgatagcttgtatgcagatatccaggccttcaagagttcgggcgtcgcaaccgagaatggcctgaactatgcgcgggtggtggcaccatacttgtacgaccctactttgaagggggcgttgaagctcctggcactgtcttatggctttggaatcaagacgtgcgctgcaggtgtcagtgcgccgacgcatcttgtcttctacgcttcgcgggccaagaaacgtcgtgactatgacttcattatcgactcgatcagactgaatctgggtgagcgtgcgtcctacgccgaggcgcgagacgctgtctcgccgctgcagtggctccgaacactccgtaacctgcgtcgtggccttcagatggcccgtgggctctctgcgtctttctccaggcgatgggtcgttggctctctcatcgccagaatgaagagtattgcgccgcgccttctcgcttcccttccttccgggcaccacactctggtgactttctgcgatgcgcatgcaatcgagaatcttgtgactcaggcagagaggacgcgcgggtcgcgaacgatcaccaaccagcatgggcagtatcgcgtgttggacgcgacaaacatgagtgcggatgcagaggcctacgcgaacttcatcagtgatcgaatgattgcctggggagaggcgaccgtcggtgagtttcagaagatggggtactccagggatcgcctgagcatcgcgggatggattcggcctcagagcgtgcttcggctggaacgaggtcggaagaatgcttttggcgtaatgctgaacgggcagaatggaaaggagtcgaatcgtgcacttctttcggctgcatctgtcatcgccgaggctttggatcttgcttatgtcgtcaggcttcatccgtggactgcgctgagcgagtaccgcgatgctgtcgattcgcgttgccagaaactgattcatgcttcgcttgaggagtacgcaggactcgtggatttcagtctcgcccatatgtcgggcgcggtcgttgaactgttgaatcagggccaggcggtctacctgctggatgatggaagactggctgatgtgtttcgaaggcctggtctcgcatggggttcggggctggccatcagtgaagccgttatccaggaccgtcagagtccggatctcctcctgcgcaggatcgatgagcttgcccgttggtacaatgatgactctgagcagctggagaggcttgccagagtattgaggagctga

SEQ ID NO: 516295 - DNA, 1281 bp, Stenotrophomonas maltophilia
atgaatcctgggcgtttgatctcggttctgcggactctgcttctgcgagggctcggttcgggcgtctcggtgctcttcactgtgctggtttcccgctatctggagaccccggatgctgcgttgttcttcgttctcttcaatgccagcgtcattgcggcggtctgctttcgttggggtgtcgatgaagttgtcattcgacgggtcgccgccgctcctgtggacaagcgaaacgctatcgcggtcggcttggtaatccaggcgcatcgccgggttctgatctgggtgatagccgcctttctgctgggtcttgccctcctgctgccttcggtgcggcatcactttggtggagtcggctacctggacttcgccttgatggtgacggcctctggattgattgcgtgtgcttcagctgctgctcgagttctacagggcgaaggccgtacagatgctgcgaccttctatctgaatatatgcacgccgtccttgacattgatcgggctgttgtgcctgcttctgctcgataacgcagtcggtgcccggcagctgctctggtgctacctgctggctgctgttgtcatgtatggcgcggtcgtgcccatgcgtttcggtcggaacgttctgcttggcctgctgccgggaggggcgaaggtagttgctgacgcctctgatcgcgctggcgccaaccgcttgggcgccgttgtgttggcccagcaggcgttgggttggagtgccgttgcgatcattccgatcttctacggtgattcggcttatgccggcttcgtggtctcgcagaagcttgcaacgctgatcagcctgctgatgctggcgatcaatttcaccttctcttcccgattcgcggccctgcatgcgcaaggcaacctgcaggagctgtggaaactcgtccgcctttcctcctgggcgattctgatcgccagcgccgcgatcctcacgggggcttggttgttcatggggcctatcctggattacgcccgggtctcaacggacttcggcggcatcgtcatcatcatgatgattggacagatggcgttctccatggctgcgctgtacgccgttgtgctgagcatgtgccatcaggagaagttcctgctttggatgcagctcggcatgaccatgctctttgttccgctgctcgttgccgtgtgcgcgacgggaactctggttgccgcatcgtgggtgttcgtcgtggcgtactccgctctggcgtgtgcgctcttcttcaatgtccgacggctgacggatgccggggtgaggcattcatga

SEQ ID NO: 516296 - DNA, 1173 bp, Stenotrophomonas maltophilia
atgatcgcaacctatgctctgcttgttctcaagaccaggagcctcggtcttcggcgggagtatctgggctttgccgcggctttggcctgtctgtccctcatgggtgcgttgttcaacgatgccgcagcgggttcgcgggcatccgtgtttctggtttcccttgcgaagatcatgcttttcatgttcttcgttgtgttcttcacgtccatctataatctgctgggaagatccgtcaacaaggtcttctcgatctatctgaaggttgcatacttctttgctgcattaggggtgctgcaggagctggtcttcgtcatgcttgacgtcgacatgcttgctttcctgtcacctggatcgaagaggctgggctcacatctcggaatcgcaggcctaagtgtcgagccggcgttctatgcatgtgccctcctgcccgcgggtgcgtaccacgtttcgcgattcgtgcagagattccgaatctcgttcaagggcgcgatcaccgtgctggccatcgtgctctcgacctcagcgctcggatacatcggtctgttcgtttcggccgcggcgacgttcattgtgggctttcatattcgccgattctggattctgtttctctcggttccgctcgttcttgttctggccatcaaggtaagcagccttgacttctttcagttgaggtggaacgacactgtctcagtgctgcaaggcggcgagcttacgatggaggacggaatgaacctcagcacgtactcgaatgccgtcaattcgctgatatcccttcgttccttcgctgacaactacggcataggtgtcggtatgggcatgtacagcgccgtctttgatgagtacatctctggctacgaactcccggcctatcgagacgacattcccggtagaggctcggcaacttcgctgttcgcacgtgtaactgcggagctcgggctggcgggctggctgctcctgttgacggtgctttactgggcgtggaagaacatgcgggcggcggatgacaaagcgatggcaatcgcctatatcgccacactctcgatcattctgctccggatgggggagtactacgccaacggtgttgtactggtgttggtgatgatctacctctcccgggctgcggatcggcgagtgccacggcttcaggggaagggaacggaactgtcccgatga

SEQ ID NO: 516297 - DNA, 2211 bp, Stenotrophomonas maltophilia
atgaccactgattcacgttccatcactcaggatgatgcagaagagatcgatcttcgccagctgctcggtaccctggtcgatcacaagtggtggatcctgctcatcaccggcgcgttcctggtcgcatcggtcgcctatgttcttctggccacgccgatctatcgcgccgacgcgattgtgcaggttgagccgaagacgccctcgctgccaggcttgacggacttgagccaatcgctgggcatcaatgccggcaccgcagaagcggcaacagagattgcattgatcaagtcccgtgcggttgtcggcagtgctgtggatgcgctgcgactggacattgagatcgttcccaggcacctccctttgatgggcgggtacttcgtgcgccgcgccgagaagcgcgctccaggtgagctggcggacccgctgctgggtctgtcgagtttcggttggggtggtgagcagcttcggatcttccagctggacgttcccaccgctttgctgaccaccgacctggagttggtggctggagagggcgggcgctacgagctgtatgacgaagatggtcagcgcctgctgtcgggtgaagtgggcaaggctgccagtggcaagggcgtgacgattcaggtcgagacgctgaatgctcatcccggcatgcggttcaaggtggtgcgtcatcgccacctcagtgtcgtcagcgaccttcagaaggaaattggagtgggtgaggccggaaaagactccggcattctcacgctgacctacgagaatgcggattccgacctcgccaggaacttcctgcagcaggtggcgcaggcctatgttcggcagaacgtcgagcgcaactctgctgaagcgtctgcgcagctgactttcgtcaaggaacagttgccgaacgtccgtaaccaggtcgactccgcccagaaggcactgagtgcgtatcagatgcgcgcaaactccgtggacctgagcctgcagaccaaggggctgcttgatcaggaggtggccgttgaaaccagcatccagcagttgcgcctgcaacaggcggaaatggaccgcaagttcactagggaccatcccgcgtaccaggctttgatgcgtcagatcggcgatcttgagtcgcgcaagcacggcttccagggccaggtgaaacagcttccggaagcccagcaggaacttctgcgcttgacccgtgacctgcaggtcagcaacgagatgtacaccgcgatgctgaatcaggcgcagcagctggatgttgcgcgtgccggcacggtgggcaacgtgcgcatcgtggacgctgcggaggtcgatgccaccgagccggtgaagccgcgaaagggcatggtcgtgctggtaggggcgctgttgggcgccttcctctccatcggtctggttcttctgcgccagctgctcaaccgtggcgtcgaagacccttcccagatcgaagagatcggcctgccggtctatgcctccattcctgtcagcccggggcagcagtccgactcggtgcgcggcaagttccgcgccgatggcaagctgcacctgctggccatgaaggatccggcagacctcgcgatcgaggcggtgcgcagcctgcgtacgagcctgcacttcgctcggttggaggcgaagaacaacatcgtgctgatctccggctcaagccccaacgccggcaagacctttgtctcctcgaacctggcggcggtcatcgcgcaggccggccagcgtgtgctgatcatcgatgcggacatgcgaaagggcacgctgcacaaggcgctgggtgcaacccagacgccgggcctgtctgacgtgctggttggcaaggcgacgctggaggaggccatccgcaccgttgacggcttggggaatctgagcttcatctcgcgcggtgacgttccgccgaacccttccgaacttctgatgcaccgcaacttcacggaactgcttgagcaggtcgagaagcagtttgatctggtcatcatcgatacgccgccgatcctggcggtgaccgacgcggcgatcattgcccaccacgccggcacctgtctgctggtggcgcgtttcggcctgaatcagcccaaggagctgacacttgcccgcaagcgcttcgagcagaacaacgtccagttgaagggcgcgatcttcaatgcggtcgagcgccgtgcgaccggctattacagctacggctactacgagtacaagtcgacccggtga

SEQ ID NO: 516298 - DNA, 888 bp, Stenotrophomonas maltophilia
atgcgggcggcgctgctgatgctcggcagcacgatggcctttggcctgatggcggtcgccatccgctacgccacgcgctacgtgccgacccaggaagtggcgttcttccgcaacgccttcggcctgcttgcactgctgccgatgctgctgcggccgggccgcgcgccattgaagacccagcagctgccccgctatttcgtgcgcagtgcgatcgggctggcgtcgatgctgtgtgcgttctgggcgctgggacacctgccgttggcccaggcggtctcgctctcatactccacgccgctgttcgtcaccattgccgcggtactttggctgggcgaaaccgtgcgcgtacgccgctgggcggcggtggtggtcggcttcatcggcgtgctggtgatcgtgcgccctggcaccgccggcttcaccgctggcagcctggtcgcggtctgcgcggccgtgctcagctcgctggtggcaatccagatcaagcagctgacccgcatcgacagtgccgacaccgtggtgctctacacctatgtgttctgggtgccgctgtcgctggtcccggcgctgttcgtctgggtctggcccaccggcatggcctggttgtggctgctggccaccggcgtgcttggcaccctgggccagctgttgtggacgcgcgcactgcgcctgggcgaggtgtcagcgctgaccccgatcagcttcctgcagcttccgctggtgaccctgtgtggctggctgctgttcaatgaaaccgtcgatcgctggacgatcctcggtgccggcatcatcctcgccgccaatgcctatatcgcccatcgcgaagccgtgctgtcgcggcgtgcggccagcgctgccgcctcagccgcagccaaaccggccgagtag

SEQ ID NO: 516299 - DNA, 1044 bp, Stenotrophomonas maltophilia
atgcatggcctggatctggcgcgctatctggctctggccggcatggtgctggtcaacttccggctggccatggccgttcctgcggaaggtgacggttggctggccggtttcttccacctgctggagggcaaggcctcggcgaccttcgtcacgctggcagggctgggcctggtgctggccacgcagcgcgagcgatgggggccggcaacgctgcagacctggcggcgcgcgatggtcctgctggtgttgggcctgctcaacctgaccctgtttccggccgacatcctgcactattacgcggcgtacttcgtgcttgcagtgctgtggctgcacgcgtcggcgaaggtgttgctggccagcatcgtcggcctggcggcgtgctcgttctgggcgctgctgcgctgggattacagtgaaggctggaattggcagacactggagtacgcgggcctctggcaatggcctggcgcggtgcgcaacctgctgttcaacggtttccatccagtgctgccgtggctgtgcttcttcctgctggggatgctgttggcgcgcctgccgctgtcggtaccccgggtgcagcgggcagtgctgatgctggggcttttgctgatcgttgccggccacggtgtgcagcatctggcgcaggcaacgccctggcaggtgtggctgggaacgcagccgatgccacccggtccggcctacctgctgaccggcgctggtgcggcgtgttcgctgatcgccacctgcctgctgctcacgcgtcgatgcccgggtgactggatggaaccgttcaccgccgcagggcgcatgaccctgaccctgtatgcaggccacatcctgctgggcatgggcacactggaaagcctgggcctgctggacggcagcgcttcgttgggggcggtgctgttgtgggcgctgctgttcctgatgctggcgacgggcgcagcgtggctgtggtcgtggcggtttgcgcgtggcccgctggaagcgttgatgcgtcgcgtcgcgggccagccctcagcgcgccccggcacgacgttgtga

SEQ ID NO: 516300 - DNA, 621 bp, Stenotrophomonas maltophilia
atgtacgaacgttcgttcagtatctgcgccatgaaccgcatcgaccgcaaccagcaacgcatcgcccagatcctgcaggcggccctgcagtgctttctgaccaagggcttccaccagaccagcatgcgtgacatcgcgcaggcggccggggtcagtctgggcaatctctacaaccacttcccgggcaagcaggcgatcatccttgcggtggcggtggccgagagcgaagagctggcgccgctgctggcccggttggcggcagccgacggtgagcgcacgcaggtagtggccttccttgaggcgttccacgcgctgtgccggcagccggagtgggcgacgctcgccgtcgaggtccttgccgaatgtgcgcggaccccggaagtcgccgccgcgttcaacgccaatcgacggcaggtgcagcaggcgctggccgatgcactgctgcgcatggcacagcgcgaacgccggcggcctgcgctgacaccggcgctgcaggcgcaggtggtgctggatgccatcgagagcgatgcactgcgccagggccttttccaggccggtggtacgcagggtgacgcgcttgatcctggcccgttgctggcactgctgggcgcacgcgggtga

SEQ ID NO: 516301 - DNA, 810 bp, Stenotrophomonas maltophilia
atgcgcatggatgaaaccggacccaccccgagcgggatgccgttgccgcaggcgtggcggcagactctggccgaggcccgcatcgaacggcaatcgatcggcgcttcgcgcgcggaggttgcccgcgtgcatcggcacgggcaggccgatgctttcctgaaatcggaagtgatcgacgccttcagcgaacttggcgatgagatcgcacgcctgcgctggttgcaggcacaggggcagcccgcgccgacggtgatcgccaccatcgaggaagcagggcgccgctggttgctgatgagcgcgttgcctgggcgagatctggcgtcgtcgccggagctcgcgccgcaggcgttggttgaggtgctggccgatgccctgcgtggcctgcacgcgctgccggttgccgcctgtcccttcgaccagcgcattgctttgcgtctgcaggctgcggcagcgcgggtgcagggtggcctggtcgacgccgacgatttcgatgacgaacgcctcggccagagcccgcagcaggtgttcgccgaccttcaggccacccggccggaacacgaagacctggtggtgagccatggcgacgcctgcctgcccaatctgatggcggtcaatggtcgcttcagcgggttcatcgactgcgggcggctcggcgtggcggatcgttaccaggacctggcgttggccgcgcgcagtctggtcgacaatttcgaaggcacccgttgggtggcgcccttgttccagcgctatggcctggttgccgatgagcggcggctggcgttctaccggttgcttgatgagttcttctga

SEQ ID NO: 516302 - DNA, 501 bp, Stenotrophomonas maltophilia
atgacggaattcaatttcaccctgaagtaccgcgtgccggacgtgtacgacgataccgatatcctggagcagcgcctggcggcatcgggctgcgacgatgcgctgttgggcatcgggcgtccgggcaggatggcgctggcgttctgccgtgaggcgtcgcgtgccgatcaagcgctgcagtcggcgctggaggacgtgcagcaggcggtgccgggcgccgaactggttgaagtaagccccgatctggtggggttgaccgatgtggccgacctgctggggatgtcgcggcagaacatgcgccagctgatgctggcccacccgcagtcgtttccatcgccggtgcacgaaggcagtacgtcaatctggcacctggccgacatcctcggctggttgcaggcgcgtggcagcggcaaggtcagctcggaactggccgagctggccgccgttgcattgcagctgaatctggcccgcgaagggcgcaggctgcagcccaaggcatag

SEQ ID NO: 516303 - DNA, 495 bp, Stenotrophomonas maltophilia
atgtcgcacccactttcgaccctcggcgttgtgcataccgccgtcagcttggttccagtgctcgccggggcgtatggcttcatccgccatcgcgcgatcgatcctgccacgcgctcaggcaagctctacctgtggggcctgctgttgtcggtggccacatcgttcacggtctccagtacgggcgggttgaaccccggccatgcgttcggggtgatcgtgctgctggtggcgttcggcggtgtggtactggcacggctgcgctggcttgggcgtgcggcgcgctatctgtccacattcgcgctgtctttcagcttcctgctgtcgctggtgccgggcgtgaatgaaacgctgacgcggctgccggtgggccatcctgttgctgctgcgccgctggcgccggtgatccagcagacgctgctcgggtgcttggccgtgttcgtgattgggtttgccgcgcagtgctggcggattcatcgacgcgtcccccgttcctga

SEQ ID NO: 516304 - DNA, 930 bp, Stenotrophomonas maltophilia
atgtcggttgaagcattgtgcgaacagctggttgccatcgaccgcagcagtgcggggcaatgccacctgctgatgcagccggcggaagatcgatgcgagcgcgatgaggccttcgacgcgttgctggaatcggtcgggatagcgccggttcccgtcgccattcgacagataccgaaggccctgtggccgtgcctgatccccctggacctgggcaaaggcacgcattccctgttgtcgggccaggcggtggaaatggcgatggcgcagcgctcggtgtcgtcgttgctggctgcgcgcccacaacgtgcgtgtgcgtgggtatggacgccgttgctgacaccacagctggccaggcagctggccgagcgtgcggtcgcgcactgcccgcatgcacagggccggaagcggtggttgcgcttctacgacccgatggtgacggatctgttcctgcagtgctcatcgcgctcgcaacgggcgtatcggtttgaaggtgtcaccacgtggatgtttctggatagatggggggagtgggctatcagcaacgccgtggcgcctgcactgcccggtgaccttgccgtgtcctggcccgagctggaatccatcggtgcattgaaccaggcgtggatcggcgcgctgcaagccggaactgcgccggatcgcgccacgttcgcgcaggtgcagcgcagtgtcggagaaggacgccgtagtggtgtgtccagcggtacggatctggatctgttcgccgcgcatgcgctctcgatcgggcctcagttccacagggatccctcggtccaggcactgctggcgcagatcgcgcacggtgagcggtacggcgaactcgtattgcggcttgaagacgcggagtggcagcgcatccgcgcggcgtcatcggcagacgcatctgcaatcaagggagggaaatccacatga

SEQ ID NO: 516305 - DNA, 2925 bp, Stenotrophomonas maltophilia
atgacgacgcacgacgaggatggaaacaacgcgagtggttcctacgcgggtaccagcaatagggggatccgcagcgaggccggccaaacgatatccgaccttcctgctgtaaccgtggtgccatcggaatcgccgagccgcttggtttgcgacatctgtcgctccactggactggccatcctgccggtgcgctacacggtggtgcctgccagctgcaacgtgggccttggtggcctgtcgcccgcttacgccagcgatgttgatgtcagtgcggcgggatacacctacgcgctcagaacgttgcgccagggtctgctgtacctgtactacgagcagggcccttacggtccggaatactgggaatgctacgccatcgccgagaacggcaccttgtggcggcaacccaccgcctacagtgcccgcgcgatcgcaggcggtggcctgcccagctgtggccgtagtggccacgatccggtgcgcacggagttcatcaccatccaacgccccgatctgtgcggaacggtctggcttgcctactcccaacacccctggacgccagcgacactggatcgctatggagctgatccggccctgcgcgccgagcggatgcagccgatcgagccagccaggtggatcacgtcggcgagggcagaaggcgatcaagcgccattgaaggatgccgccgggctggcctcgatcatggaatatcgatggctggacaacccctcaggtgatccgccagaccttccgtacagcagtgcgctcccgggtgcctccaatccggacggagcgcttcgcaaggcgcggctgcacgcgcatggaacgcgttacccctggtcacggcgggactatcctcgcagcgaaggtttcgacccgcgtcaacagcgttttgaacgcctgcagcaacacagcagcaacgggcgcattggcagtgatcggcaggagtacccgcccatgctgctggggctgtgggatgcggttggcgtcgtgcacgagctcagcggctattgcaacgacctggttgcctgcatcaaccagttcaagagcgagcgcgagctggaagtcagcgctgttgaccagatcgaacagatctcgcgcctgctggagctcaatggtgcggtaatggcagggaactacgcggcacagacggtgcgcgaagtggagcgtcagcgccgcctcggcaatccctcgcttcccccatgggatcccaaggtaaagctttccgaggaggagaagcgggaactcgcgcgggagtatgaacgccagttcctgccgctctacctgaaggacgcccaggacgcgtggaaaaacaagtactggccactgattgacgagccccgtttcaccgcgttcaagaggaacatggacgcgatgacgcaacaggtacgcgaccggctgggaccgaagatctcggtgctggttgcgtggctccgccatgatcttctgctcgcaacgctggaggactttgatggtcaatctgcggcgcagggagtgtggttcgaggagatcattgccgacgccatcgcggtgcttggcatgcacgagatcggccgaacgctgttgactgaactggctggcgatctggctgtgaccggaagatcgtccttgctgtggcgagtcattgcgcagaatcaggacgctgccaggctggagctgcagcagacgctcagggcggctgaggctggggccaacaccgtgctgtccgctgcaggtgcgagctgggcggcctttgtgtccgggacggcgcatctgaagaccttcatctccaactatcgcaagattgaggctgcgcagaaggaggcagtgccatccaccgccagtgcccgcatccttcgcaacagcggcattgatcgatttgtcaccaccaccggcgcgttcctgctgaatcgattcccgatgaagggcatccaggacaccgccggcaatgccatggtccggttcgtgcttctgacgcgggcgttgatggagcgcgatgaggccgtcagcctggtggccgaagaactgagcagcggccagcagggcaagcgttacttcctggagcgtatccagttctatcgcgccaagggcagcgcgctgccgatgcagttcgcacttcgggacctggagctgcatcacggtgcgctggcgatgcgcacgcgttggcaggctgcggcagaaagcagccgcaacgtggtgcgcctgaactcgctgaccggcgtgctggaaatggtgaacttcatccatctggccacgaaggtggacaagcagacgcgagactatgcgacgttattggcttctggaatgtcgcttgtggctgtgtataccggtgtacacgaggcggtggcgaaggagttttttggtgtgggtagcgccagtgccatacggatgaaggttgccggaagtgtgatggccggggcgggtagttttattggggcgtactacagtctgtcggactttaaagatcgacttgaggatgagcggcactggactgctgcggctttgctgatgaaggcggcgctaacatcggcgatcggtactgcgaattttctcaccgcgctagcttattcatctcccgtagttgagcgccatttggggcgaaattcgttgagcttgggccttcgtggattgagggctgggctagaggctgccgccgcgaaggaaggggagttcgctctgtctagtcaggctatgaaacgccttggtagttggatattgcgcctgagcggctgggagattgcattggcattgattgtgattgaggtgatggtgtgggctatcagtccgagcgatctcgagaagtggtgtgagtccaacgtattcgggaggggagctagtaaagttctgggcacgggtagcggcagcaggaacagacaagtggccgttctgaagcagaaggacgcatttgacaaagcaatcgggaaagtagctgcgagatcgcagttgtga

SEQ ID NO: 516306 - DNA, 729 bp, Stenotrophomonas maltophilia
atggaggttccgagcagtagtccgctcgatacggaggctggtgtgatctcaggacttttcgttgaacatgcgttggaggatgttctgtcccgttctgacgatcgagagcacatggccgcagcaggtgtagttgcagctgcgctcgggttgagtgggccatcggcaggcatggcggtgatgtcaggcgaaggggcgccggagccagtggtgcgagtcaggttcatgctgggagaactatcggtatctgcgctgctgtggaactggccattcagggacgggcagagggttcgagtggtgggcaagcgacggcccgatggaacgttctttgcgatttccgtactggacgaagaccagaggctgatcgtttcctatccgcacgtcacggcgggcagtgcctcgcactggctgcgtgtcttctgggtctccttggggatctcagtagtttggtgggggggcgcagccgctctcgcaactgcctttgtctgggaagttaaatccgatagcaagttcgaagtcatttctggcgcctgcgttgccggagccataatttttggcgtgatcggatggaggatcggacgtcgcttatctagatttgcgaggatggcagatatggtattcgctgcgctggactggagtaatccaaagaagataaaccttagagcccgacggttcggtcgagcgcgagagggtgatggttccggtgttggggatacctacttcaggtactga

SEQ ID NO: 516307 - DNA, 747 bp, Stenotrophomonas maltophilia
gtgagtactcaaaggcgattgcggacacctggcaaagtgctgttcgaaacagatgccggtgtcatttccaacctgcgggtcagacacgtggtgcagaacgtcttctggcgcgacggggatcgcgaaaagatggcggccacgggcgccgttgccgccgcgctgggcctcagcggtcccgccgctggcatggcgatgatgtccaatgaggaaacgaaagagcccgccacgagagttgaattccggtttggcgaaatgctggtgaaggggctgttctggaattggcccttcaatgagggcgactccgtgcgggtggtcgggcgtcgggacaaggcggggaacttcattgccttgtctgtgctcgatgagcagaagagactcatcgtctcttatccgtatgtcagttcaggtagctgggcccactggatcgcggtggccaggtactcgctggctctatctgtacccttgtacatgatctacatcgtgttttccctgatcaacgccctcacgggagacggactggcacccctggagatgatcgcggatgcgtacttgatatgcgttctggtttgcttctaccttggatccagaattggccgccatttcacgcggttcgcaaagatggccgatgcgatattcgaaacgctgggttggcccaacgcaaagcgcatcaatctgaggcgtatcaccaagcagaagcgtcagccgggcgaccatcccgcgctgggcgatacctatttcaggtactga

SEQ ID NO: 516308 - DNA, 411 bp, Stenotrophomonas maltophilia
atgcgctatgtggctgtgcacacccgtgcgctgatgtccggcatcaatcttgcgccgctggtggatgtactgctggtggtgttggcgctggtgatcaccaccttgccgatggcgcagacgacagcgttgcggccgttcgaacagcgtacggtatgtccgccgggccctggccacgcgttgccggcatcggttgcactgcgtctcgacgcagccggcggcctctactggaatgaccagccattggacgacccggcattgcagcgtgccctggcccagctccagcggttgccaccggggctccagccctcgctgcacctgaccaccgccgacagtaccgactacggcgacatggcgcgggtgctgctcgccatccaggaccatggccttcgcgtcaccgcgcagggctactag

SEQ ID NO: 516309 - DNA, 417 bp, Stenotrophomonas maltophilia
atgcactcccctgcacagagcttcatcatcaacatcgacgtgcccgacctgcccaccgccgaagcgttctatggggccgcctttggattgcgcgtcggccgccgcctcgggcccggtgcggtggaactgctgggcggccccaccccgctgtacctgctgcggaacgaccacggcagccctgccaccgaagacggcgacgtgcgcgattaccagcgccactggacaccgttgcatctggactgggttgtggatgacatcgaggtcgcgctggcgcgtgcggttgcggccggtgcgatcctcgaacaaccggttggcgagcgccgctgggggcgcatcgcggtgctggccgatccgttcgggcatggtttctgcctgatccagtttgtcggcctggggtatgacgcgctggtggaatga

SEQ ID NO: 516310 - DNA, 678 bp, Stenotrophomonas maltophilia
atgagcgcactccctgacatcgaacaggccaccgggcaggtcttcccccctttgttcaagcaactgcatgcagcgggccggttgagctggggcagcccccacccgcaatggtccgaagcggtgtttccgtcgctgcaggccgagccgccggtgctgctgtacgcccaggactatgagccgctggaatctgacgagctgctggaggcgtggcaggagctgaccgcggaagatcactacaatcccctgcgcgccgacctgcagctgctgccgttcgcgcgaaccggagcaggcgacagctactgcttctggagcaacgcgcccggtgttgccgagccgccggtggtgctggtgtggcatgacgatgatcgtgccgatgtgctggccgccaattaccaggacttcctgttccgcaagatggttgaagcggttgccgaatacgagccgccgtactcgctgctttcgcacggcgacctggccgggaatctgcagcgctggttgcagacccaccagtcggttctgcgcagtgatcagcacgcggcgttgcagcacctgtttgctcgcacaggcgacattgcagaaggagccatcagcgacgacgacgcgcaggccatcgttgccgaagtgatcggcttcgatcagttggacgcgtcgttcgcctacgtgcgcgaggatgcctga

SEQ ID NO: 516311 - DNA, 1446 bp, Stenotrophomonas maltophilia
atgccggtagtgctggcgctgctgtatgtgctctgccatggcctggtgctgaccctgtggccgggatcggcgggtgcggggtccttcgttttcctgaccggcgcccccgtgctggccgcagcggcctgcctgtggcgtggtcagcgcgaccgcgcggcgctgggctggcgggccacggcgctggccctgctgctgtgggccggcggcatgggcgtgaacatgctcgatgcccttggcgccgatcgcgccgacatcactccgcgggtgagcctgcttctgtatgtgctgtacggcgtgccgctggtgttcatcctggcgcgtgcgcgccgtgagcgctggtcgatcagcgtgatcgacggtggcatggcggcgctgctgggcgtgctgttcttcgtgcatacgcagtcgttcgccgaccgcatcgatatcgacaaccaggccatggcgaacatgcagcgcatgttcgacatccagaacctgtgcatcgccgtctttgcggtggtgcgctggctggccggcgacgtgcccgagcggcgcagcttcttccgcgcgctggcgctgtatgcgctggtctacctggcggtggcgttctacatcaaccactacaccgccgagcagtcatttggtgcctacaacgacctgctgatcgacctgccgttcctgctgttggccgtgctggcgctgcgccaggcaccggcgcccggcttcgtgctgcacccccgcctttcgcggctggtccaggccggcgggccgatcatcctgccgctgctgctgctggtggtcggcaccctggtggtggaccacgcgcgatggctggcggtggccggcttcgtggtcgccacactgggcttcagcctgcgcagtaccgtgctgcagatggatctgctggagcgccaggcgggactggatgagctggcccggcgcgacggcctgaccggggtggccaaccgccgcgagttcgacacggtgctgcaggccgaatggaaccgggcgcggcgcaacggcagcgaactggccctgctgctggtcgacatcgaccacttcaaggcgttcaacgaccagcacggccatccggccggcgaccgttgtctgcaggctgtcgcggcggtgctgaagacaacggccggccgcgccggcgacagtgtggcgcgctacggtggcgaggaattcgcggtgatcgtgtccggaagtgcattgtcgggggtgctggcgctggccgagcgcttgcgcgaggcggtggaggccctgccgttgccggaaggatcgatcagcatcagtgttggcgtgggctatctgcatccgcccgcgctggccagcgccgatcagctgttggccgatgcagacgccggcctgtatgccgccaagcgcgctggccgcaaccaggtgatgctgcacgcgcacgttctcgacgatgagggcaacgcgcacggcaccctggactgctga

SEQ ID NO: 516312 - DNA, 414 bp, Stenotrophomonas maltophilia
atggcctcccgcgctccgttgttccccacccgggtcagctaccgcgccttcggtcgtcagttcggccacggcgagcaggcgctgctggcggcgatccgccagctgcgcgagcctggcctgcgggccgagggcctcatcggccttggcgatctcggcctggaccggcagggctgcgatgcgtttctgggcttgttgccgctgctgaccacaccttcggcgccgatcgacctgctgcggcccggctccccgttcatcgcggccagcgaactggacctgctggtctgcctgctgcgcatcgcccagtggcggcgtgcgcgcccgcgcgcggacgacccgctggcgccgctgcgtctgcagctggcgcgctgcgcccaggcggtgcaggcggcgaacctgcacctgcggccacgctag

SEQ ID NO: 516313 - DNA, 1242 bp, Stenotrophomonas maltophilia
atggacggcaacgggggcagggacggcatcaatgacgatcggccgggactggaccatctggcagtggtggcattgacgctgctggtcggtggcagcgtgatcgcgctggtcgggcagcacacggccgcgcaggccggcccggcgatcgtgctgagcctgctgctggcgtcgctcggggcgggtatggtgctgtgttgcctgcaggatctgctggcgcggcgacctgatgcgccgggtctgcacgggttgctggtggccggctgggggccgcgggtggccggcgtgctgggcgctgtgctgctgctggagctggtggtgaccgcggcgggtgcggcgcagtcctccgccagccacctgcacgcggtgctggccctgtacgggttccaggccgatcacacggtaccggtgcagctgaccgccgcggtgggattgctgatgctgggcgcgaccgtgctgctgcccgcgcgggtggtggcgctggtggcctgtgccctgctgacggtgaagatcggcaccgggctgctgctgctcacgctggcggcgcggtatgtgcactacgcgcactgggttccgtggctgccggacgccaccgcaccgtatcgcttcggtctgggcggcgtgctggccgctgcggtgccgctgctgggcgtgtttgccagcgtcgggctggcgctgggctttcccgcgctgcggcggcaacacggacgctggcaacccagcgtactggcgctggcgtcgttgatggcgatgctgtggctgatcctgctggcggcgctgcaggccggcctgatcgagtttccggcgctggccagcacgcggccgctgtcggtggccctgcagagccatccgccgttgcagtggatgttgccgctgctgccgttggccggcgccgccggccttgtcgcgttgcagatggtgctgttgacgctggcggtgcagctggcgatggcactgcggcctgcgccgcacgccgctgcgtggcggccacggctggtggcggtggtgatgtctgcaacgttgctggcgctgtgggtaccggcgggggcgttgccggcactgccgggcgcagccgcgctgctggtgatgggcatgctgtgcctggcggtgctgcgcccgcgcccggatgcagccgggcagggtccgttgcgctggccggcccggacaatgccgctgttggcgccgatggcggcgctcctgtgcctgctggcggcactggcacggctgcgggcgtggccgggctga

SEQ ID NO: 516314 - DNA, 492 bp, Stenotrophomonas maltophilia
atgcaaaacaccagactcctgatcggccgcaattccagcgtcggcctcagctacatcctcaccacagttgtgaccggtcgcgctcccctgtttgccatcgacgccgtcgccgtcctcgcgatccaggaattccaacaactcgatcgggaaggtttcacccactcaatcgcgcacgtggtcatgcccgaccacatccactggctggtcgaactgcgcgcggggacactggaaaccatcatgaagcgtttcaagtcgcgcacagccctgcaggcaaaccggttgctggggcgagtcggtcgcttctggcaggcctgctatcacgatcatgcgatccgctctgacgaatcgttgcaccagcatgcgatgtacctgatgggaaatccgatcagggccggactgacgactcggctggggcagtatccccatgcatggtgcgaatgggagctcggggccttgtgtgagcggccagatgacgtgagcaccggtggatag

SEQ ID NO: 516315 - DNA, 1797 bp, Stenotrophomonas maltophilia
atgcaacaggaagtgccgttggcccggggcacgcgccgcatgatcgtgctgatcgcgctgctgcagggcctggcgttgtatgcgatgcaggaactggccgagcgctggcaggtccgcgatggcgtctggcgctactgcgcgtatgcgtggctgctgaccattcccaccgcactggccctgaccgtggtcgaggtgaaggaccgccgcctctggcagcatgccgggctggcgtcgctgctggtactcgggctgggggcctgggccgcctggaatctacagggagcctccggactcaaccccacaccggtgctgatgccgctgtccgtttgcctgggcatcggcgtcttcattgcgctgccgtggtggcagttccgcctgcagcaggggcactggaatgccagctacacggccctgttcgagcacgcctggcagaacgggctcacgctggcgctggcgggcgcgttcaccgggttgacctgggccttgctgtggctgtgcgccgcattgttcagcctgctgcgcgtggattttttccagcagttgttcctgcacccggcctttgtggccctggcgaccggactgctggccgggttcggcctgttgatcggccgcacccagcaccgtgccatccagatcacccgccaggtgctgtttgccgtctgccgcgggttgctgccgctgctggcgctgattgcgctgctgttcgtctctgcgctgccgttcaccggcctggcgccgctgtggggcacccgttctgcggccagcctgctgctggccatggccctgctgctggtcgcgttcgccaacgcggtctaccagcacgacagcgatactgcggtgtatccgcgcggggtgcgccgcctggtggacgccggcctgctgactctgccggtgtacgcggcgctggcgctgtttgccatcggtctgcgcctgggccagcacggcatgaccgtggatcggttctggggcctggcgaccgcactgctggtggcaggctacgcgctgggatatgcgctggccgtgctgcgccggcagggccgctggctgcagggcctggaagcggtcaaccgttggatgtgcgggctggtgctggcgatggcgatactcggcagctcgccgctgatcgaccccatccggctgaccctggccagccaggtaccgcggttcaccgcgcagcccgaccagatcaccggtggcgatgccagcatgctgcgcttccagctggggatacgcggcgtgcgcgcgctgaacaatctgcagcagcagccgggcgtcatcgccgacccgcacgcgcgcagcgtgctggccgaggcattgccgcgtcccaccggaggacacgatgtgcctgcgccctccgccccacgttcgctggaccagctgcacgcacgcatcatcgtggccaagggcagcccgatgcctgccgacgactggtggcaggcgctgctgcatgcccgccggatcggtgccgatggctgcctggacatcgatgaggaatgcatctcggtgcgtcgtgatctcgaccaggacggcgaagacgaggtgctgctgtgccggatttcgccctatctgccgcccgactgcacattgcacgtgcggcacgagggtgcatggcattcggcgggaagcgtatcgttcccacgacacagcagcgcacaggcgcagacgctgacccgtgcactgcgcggcggcgggctggaaacacggccatcacgctggcccgaaatgcgcctggagggcattccggcacagctttcccttgatgaagacgaaggccgcgaggaggcggctgcaccatga

SEQ ID NO: 516316 - DNA, 678 bp, Stenotrophomonas maltophilia
atgcgtgaaacggcgcgcgtgatgttggcaatggccgtgctgttgcaggtcggttgtgcgcgtactcccgagtccgccgccccggccggggactgcgacgatccgcaggcgcatgcctggtatctactgccaccgcctgcacagaggcgcagcagggacccgcttccgttcatcgatttcaccgggtttgcaagggcgtcataccgcgaccggttgcgggatctcgatggcttgccggagccgtcgttccgctgcggcagcgtaccggtccaggcgtatcgcttcgtctgggaacccgcgttcttcccgggtgtggtcatacgcgcgcagcgcaacgcagcgggccaggcgtggatcgtcgggcgcagtgcacgcgatttcgagattcccgcatcgccgtccgacggcccagccaccctcatcaagggcggggcgtgtcctccaccgcgcgcgctgagtgcggaagaatggaaggccattgccagcgcgtttgcgctgctgcagggcgaagattcgagcgctggacttgatggctcatcgtggattttcgagtctgtggtggacggcgagcagcgctggttcgcgcggtgggtgccgcgggatccgacgttccgcaatgctggcaggatgatggtggaactggcgggatgcgccgataccctgcaggcgatggaatga

SEQ ID NO: 516317 - DNA, 174 bp, Stenotrophomonas maltophilia
atgtggctgctcgaccatctctggcccggccgcaggcccgtgcccgccccggttgccgccgagccgccggcgatgccccgccggccctggctgaaacgccccgcgcgggccggccgcagcggcatggcgccctggcagaagatcgccgcaccgccgcggcgcagtcgccactag

SEQ ID NO: 516318 - DNA, 438 bp, Stenotrophomonas maltophilia
gtgcgtcattctgtcctccaccgccggttccaggccctggcttggcttgccctgctgctggtgctgctcgccccgctggtgagccgctggctggcgcacgggcacgtggccgcggtggtgccggtggcggcgatggatcactcccagcatgcgcagcacgcgatggagggccatcacgaccatcacgcgatggcgatgccgcacggcgaggctgcaacgaagccgcccgccgatccccatgccgatcatgagatgggcgtggattgcgattactgcctgatcgcagcgcggttgatcacgttgttggtagcggcgttgttgctgctggtgccgatggccgcggtgtgccgcgcgctgcgcggtgcggtgcaggcgttgccacaacgcgtcaggggcacattgggagcgcgtgggccgccggtcttgatggctgcctga

SEQ ID NO: 516319 - DNA, 408 bp, Stenotrophomonas maltophilia
atgaccaaccgcaccgccgtccatccccgcctctacgctctgatcggcgacatcgccgccgacgtgcccgaggacctcgcacgcgagatcgagtgcgctttgcacgaacagcatctgcccgtgcagtcgcctgccttcttctcttgcctcaatgccatcaaccgcgccgacggcgatgacggacaaccgtgcagcagcctcaccctttgcgccagcaatcacgcctcgctccgccgctcgctgtccgggctcagtgcattgctcgacctgctgcaggcgggcgatcgagcgcgcgccgagggtggcgcgggccagcagttgggtgccttccacactgatggactgatcgtggccgcgcgacaactggtgcgcgaggcgcatcactgcctctccggcggcgaggcctga

SEQ ID NO: 516320 - DNA, 570 bp, Stenotrophomonas maltophilia
atgtcactggtcctggcctccacgtcccgctaccgccgcgagctgctgcaacggctggggctgccctttgactgcgcacgcccggaggtggacgagacccccctgcgcggtgaggcaccgcaggtccttgccgtgcgcctggccgccgccaaggccgccgaggtggccgcccgccatcccggcgcttgggtgatcggctcggaccaggtggcggacctgaacggacagccgctgggcaagcctgggacggccgaggcggcctgcgcgcagctggcggcgatgtccgggcagacggtgcgcttccataccgccatcagtctcacccgtcacggagaatcactggccgcgctcgacatgaccgaggtgcgcttccgcacgctggaacgggcggagatcgcccgctatgtggccgctgaacaaccgctggactgcgccggcagcttcaaatgcgaaggtctgggcatcagcctgttcgaggcaatcgacaaccgcgacccgagcgcgctgatcggcctgccgctgatcgcgctgtgccggttgctgcgcaaggccggattcgcggtgccgtag

SEQ ID NO: 516321 - DNA, 1128 bp, Stenotrophomonas maltophilia
atgagctcgactgacagcgcgcacgccgcatgcgagaactgcaacaccgccctgcagggtcactactgccatcgctgcgggcaatcggcgcacaacccgctcaagcacgtgggccatgccatcgaggaggtgttcgaatcgttctggcatctggatgggcgcatcttccgcacgctgcgcgatctgtggatacccggccgcatcgcgctgaactacctcaacggccgccgggtcggctatgtacagccgctgcgcctgttcgtgatcctcacgctgttcaccttcttcatcggcaagctgttcgtgcatgtcgacgatttcggcatcagcagcggcggtggacacgacgccctgtttgcccgcgccacgaccgtcgaacaggtcgatgcgctgcgcacagagcagatcaccctgctcgaacggcagcaggccgacgcggccacggccggcccggccgccttcgcgatggccagggcagcgctgaatgctgcggcggcccaacgccgcgccgagctgaccggcgggcagcaggatgccggcagcgaggacaacgcccccggcgggggttcgttcttcagccacaccgtcaacggcaaaccgtgggacgccgaccgcaatccgatcgtcattgctggttggccacagttcgccaacaaatggctcaacaagcgcctgcagaacggcaacgccaacatccagcgcatgggcggcaagaccgatctgtacatgcaggcgatcctgaccgcgctgcccggcgcgctgttcttcctgatgccggtcttcgcactggtcctgcgagtggcctacatcccacgtgcgatgggctatctcgagcacctggtggtggcgctgtacagccactgctggctgatgatggtgctgctggccacgttcctcatcgccggcctgggcacggctttcgcctcgccagcgttctcggcggtcagctcgtggctgtacgcgctgctgtggctggccgttcccatctacctgctgtggatgcagcaatgcgtctatggcggcaacaaggtgctgaccctcgtgcgctatctcatcatcggtggaatctacctgtgcctggtgagtttcgtggtgatgtacgcaacgctggccggcatttcggcgtaa

SEQ ID NO: 516322 - DNA, 444 bp, Stenotrophomonas maltophilia
atgacactccgactctaccggcacacggatgccaacgcctgcctgtcgatcttcgagggcaacgtgcccacgtatttcgcgcccgaagagcgcagtgatttcgaacgcttcctgcgtgagcaggcgatgggctgcgcgttccaggtcatcgagcgcgatggccgcatcgtggcctgcggtgggctctcgcgccgcgacgatggcagtgccggcttctgctggggcatggtcgaacgcgcgctgcaccggcagggcatcggccgcgaactggccctggcgcgcctgcaccaggctgaagcggatcggttgatcacccgcatcacgctcagcaccagccagcacacccaggggttctacgccggcctcggcttccaggtgacgcgggtggtagccgatggccacggcgccgggatcgacgccgtggagatggagcggagggtgtag

SEQ ID NO: 516323 - DNA, 390 bp, Stenotrophomonas maltophilia
gtgagcggcaccggccagcccgccgacgcggcactggccgctgaactggaggcattggaacgtgcgctgcatgcaccgcaggtgcgcgccgacagtgagcgcctggctgcattgctggacgaggatttcagcgagatcggcagttccgggcagtgttatggccgtgcggccgtgctggcggagatcccgctggcgcgggcgcaggtgctgatcgagtcggatcggtacgcggtgcggctgttggccgatggcttggcacaggtgcgctaccgcagccgctatcacgtcgatgggcaggcgcagcgctgggtgctgcgcagttcgctgtggcgccggcacgcgcaggggtggcgggtgttgttccaccagggcacgccggaggcacggtag

SEQ ID NO: 516324 - DNA, 606 bp, Stenotrophomonas maltophilia
atgctgcgctccgacgccggcgatgccacggcaacctacgagatccatctgaccatcgagcagtgccagaccttcacttcggaccgcgccgacgtactggctgactcggccgccagcgtcggtgcgggcggctggttcctggaacgatccgagcgcctgctcaaggagtgcgaatcgctggcgctggagcgtgacatctaccacaccgattggctctccaaggctgctgccatgggctcgcaggaagccatgcgcgcctactcgctctctcccgagaaggtcatcggctcactggatgacgccattcgggatccggcccggctcagccaatggaaggagaccgcgctcaactatctcgatgcactggctgcacagggaaacatttccgcactcggtgatctggaaagagcgtacgccgccggcagcttcacccaacccgaccctgtgcgcgcctgggcatacgcgcgcgcgttgcagagggtcaacccgcgcctggtcacccatgacgatctgatgcgctacgagaaagacctgactcaggaggagaaggccaactcacgaacccttgctgaaaacatctatcagaactgttgcatcctgaaatag

SEQ ID NO: 516325 - DNA, 945 bp, Stenotrophomonas maltophilia
atgagcacggcattggccagccccgcgctggaacaggccgccgagtggttcgcactgcgcgagcacggatggaacgaatacgagcaacagcgctggcaggcctggctgcacgccgatgcgagccacgcccacgcttggcaccgggtcgagttggtctggcagtcgttcgcaccgctgtcggcccccgccgccgcaaaggcgctgggcaccgctggccatcggcgtcggcaggcactgcgcggtctcggcggtgcactcggcatcggcgccgtttcgctgctcggcctgcacgcgctgcaccttcagcgtagcgtgcacacgcagcgcaccggcgccggccgcaccgggcactggacgctggccgacggcagccagctgtggctcaacgccggcagcgaagtggcgatccgcatgggcgacggccagcgcgccgtgcatctgctgcgaggcgagttactgttgctgaccggtcacgcagctgccttcgacggcctgccattgaccgtgcacgtgcccggcgcccgcctgcagccgatcggcacccgtctcgcggtaggccgcgaggcccagggcagccgcctggatgtgtttgaaggcgtggtgcgctgcctgccgcagttcagtgcggcacgggatgtacccgccggcagcgccgtgcagatcggcccgatgggcggacttgcaacggtcgagcccgatccgctgcgcggcgattggcaggacggtcgcctgcaggtgcaggacactcggctggtccgcgtcgtcgaagagctggcccgccaccatcgcggctacctcggctgcgatcccgctgtcgcagcgctgaaggtcactgctgtgctgccgcgactgcacagcgcacaggccctgcagttgctgacgcgtgcgctgccgatccgcatcgaacagcgctggccgtggtggaccgtcgtgcatccgcgttga

SEQ ID NO: 516326 - DNA, 828 bp, Stenotrophomonas maltophilia
atgacccgtacatcccctgttgatcagaacgccctgtggaacggcccaggaggccaggtctgggtcacccagcagtccattcttgatggcctgttccaaccgatggccgacctgctcgccgccgagttgccgcagaccgtcacgcacctgctggatgtcggctgcggtaccggtgccagcctgctggccgcggccactgcccgcccgtctgcccactgcaccggcctggacatctccgcacccatgctggcgctggcccggcagcgtgcggacagagccgggctggaggcagacttcatcgtggcagatgccgagcggcacccgttgccgtccgcgcacttcgactggatccagtcacggctgggtgtgatgttcttcgaggacaccgccgcagccttcagcaacctgcatcgcgccgcacggcccggcgccggcctgcgtttcatcgcctggcgcggcgccgacgaaaacccgttcatgaccaccgccgagcgcgcggtgggcaatgcactggcgctgccgccacggatggcgggcgcgccggggcagttcgcctttgccgatggccagcgcgtgcggcacctgcttcaggtgtctggctggaagcaggcggaagtggtggcggtggaggtaccgtgctcgatggcgcgcgacgatctgccggcctacgtcggccagctgggcccggtgggcctggcgctgcgggcactgcccgaagcggagaccgccgcgctgcgcgaccaggctctggcggcattcgcaccgttcatcgagggcgaccgcgtgcgcgtggacgccgcctgctggttgatacgcgcgcgcgcctga

SEQ ID NO: 516327 - DNA, 546 bp, Stenotrophomonas maltophilia
atgacactgctgggattgttggccatcggcgtaagcctgcggatcgccatcagcgatctgtatgcccgtcgggtgcccaacgcctggctgctgacggcatgcgcgatctccattgcactgatcatcgccggccagttcagcgcaccgcgcctgccgtggggttcccacgtcgccggcgcggtgctcggccttgtcgccctgctgccgttctacgccatgcgctggatgggcgcaggtgacgtcaagttcttctcggtgctggggctgatgctgggctggcaggcattgctgccggtctggatcgccgcaagtctggccgcgggcctgcatgccgtgctcattctggtgtcgcggcagctcggcgccgtccttccactgggcctgcagggccaggtcgaccgcgccagcgcgcagtggcagtcgcacccggcgctgcgcgacatgctggccgcccgccagggacggcgcggcattccctatgccgcgtacctggcactgtcggccatcggctgggtcctggtacgcacctacggagacgtgtcatga

SEQ ID NO: 516328 - DNA, 1041 bp, Stenotrophomonas maltophilia
atgctcaaattgacccgcatcgctgccatcggcctgatcggtctggctgtgctgctggcgctgatcgccttcatgatcgggcgcaagccggatgcgcctgccacggtcgccccgaccgcgcacggcccggccgagacgatcaccgtggtggaggccgtggcccgcctgcccgcaggcgaaccgatcaccgccaacgggctgcgcctggcgcaacgcaccacaccggtggccggtgcggccacctccctggccgccgtggtcggcaaggttcccgtgcaggacatcgccgaaggcaccgccatcagcggcagcgcactggcgcagggcttctcgctgcagctgcggcccggcgagcgcgcacttgcggtgccggtggacgagctggtcggcgcgggcaaccgcatcctgccgggcgatttcgtcgatgtcttcctgaacctgcgcaatgcccagcccaacgtcagcagccctggcgaggccgcgcagacccgtctgctgctgtcgcgcctgcgcgtactgagttacggccagcaggacatcgcacccgtcgccatcgaggccaccgacagcaacggtaccgacgcccgcaacgacccgcgcgcggccgatatcaccagcggcagcaccagcagccacggtagtgccagcgaagccacccaaccggcacgcagcgcggtgctggcggtgccggtggccgatgccaaccggctgctgctgggcgcccagcagggcaagctgttcctggcgctgcgcaatcccgccgataccggcctgcccgatcttgccctgtttccgcagtcgcgcggcgtgattgatccgatgcgcgggctggatgcggagcagcaactggcgctgcaacgcccggaaaaccatgccttcgcgggcctggacagcgatgcgctggccggtcgcggcgccgcgccggcgcgcaccgccaacgatggccccgcccgcgcgccggctccgcgtcgcagcgccccgcgtgcgtcgggcatcgaaatcatccgcggcgacagctctacgccccgcggctccctctga

SEQ ID NO: 516329 - DNA, 894 bp, Stenotrophomonas maltophilia
atgcctgccctgcgcaccacctgcctgcttgccttcagcctggccaccttggccagcggctgcgcctcgaccacgcccaagtacctgcgtacgcccaccctggccgctcccgaacccgccccgcaggacagccgcaacgcctacctggagctgatcgggcgcatgcagctgcagggcgcctggtatgcctcgctggcccacgtcgatgcgttccgccaacgctatggagaccccccggcgctgcgcctgctgcaggccgacgcactgcgcgagaccggccaggctgacgctgccatcgccctgtatcgcgaactgtccagcggtccgcaggcggcggccgccgcgcacgggttgggcctgatcgccgcccgtcgcgacgatgacaccggcagcgaacaggcgctcgaacgcgccacccagctgcaaccgttgaataccgactatctcggcgatctcggctacgcccgcctgcgtgcgggccggttcgagcaggcccgcgagccgttggccaaggcgctggaactgtcgcccggcaacgccaaggccaccgccaacctggcgctctgggcagtactgcgcggcgacagcgccaccgccgagcgactggttgcgcagggcaacctcaacgaggacacccgccgcagcatccagcagcaggcccagcagatccgcctgcgcctgcaacagcgaagcgcatctgtggcggcagagacaacggcccccgcgcgcgccgtcgccgtccccgctgccgtatccgagcgagccggcagcagcaaccgggtcgcctccgaaccgcgccgtgagcagcgcgacacgcgcgatccgcagcgcctgcccccctcgatgctggagcgattcagcaccgccacccccacaaccgggaatacgccatga

SEQ ID NO: 516330 - DNA, 459 bp, Stenotrophomonas maltophilia
atgaccgcgacgcctctgattcgacgcctgctgcctgcgctggcgtgtgcgctggtcaccagcgtcgtgcatgcccagcagccgccgctgaccgggcagatgctgggtggcccggctccggcaccgactccgcagccgatgcaggccgatacagtggcaacggtggatctgaccacaccgggcgcgccgccgccggccattgcgtcggcgccgccggccgaggccgcaggcagccccctgcccacgcctcgccgcgaaccgctgcgcgacggcgacaccacgcgcaacctgttccgcctgcaggcgtccgggcagcgcgccgggcagcggctgccgatcctcggcgaccaggccacgctgagctacgcccgttatctgaagagcttcgaacacgagattcccgacttcttcgaaaccgatgtcgccaggtccaaggacgcatcctcatccggacgctga

SEQ ID NO: 516331 - DNA, 333 bp, Stenotrophomonas maltophilia
atgcagcgcctgttcgtgatgtttcccgaccgtggcccgggcgtcggcctgctgtggttgcggttgtgcgtggccgccaccctgtgcctgcctggaacgcagggcggatggctggcgctgctgtggctgctggcggcggcgatgctggtgctgggcgtgttgaccccgttggcggctgcgctggctgtccttggcctgcaggcgcaggcgatgccatggccggtggcgctgctgccgctggccctgctgccgctcgggcccggtgcctattcgctggacgcgcgatggttcgggcgccgcgtgctcggccgtcggcctcccccattcgggtaa

SEQ ID NO: 516332 - DNA, 630 bp, Stenotrophomonas maltophilia
atggatgtcagggtgtggagtgcgatggcagtggtggtcctggcaggctgcagcggcagccaggcgggcagcgtggacgaggcggaggtgcccggtgcggcggcggtgcgatcccagtcggtcgcagccagcgatgctggatcaccgcgtgcggcaacagcgacggcaacggcgggcgcaacggctgcccacgggtacgcgaacgtggagggtcacttcctcgagggagagcgcctgctgatggctgacggcggggtgtctgcgcagaagagcgaggcggtgttggggtccgacaaggcattcgcgcaggcgatcggccagttcgagcgcgacgcgtccagccgcccggaggtgcaggacctgacgggtctctacaaggccgccgcgacccggctcatcggcagggatggcacgctggtgtcctttgcctgcggctacagcctgtgcgtcggcgagatccgcagccgtaccgaggaggatttcagcgcctggtccgaggcgttcggcatggacaaggcgagcccggtctacagcctgaccacggcaccgatgacgtggggcagggaccagcacggcgggcgtttcgtgttttcggtggacccggccgccaacgcaatcacaggtcagtag

SEQ ID NO: 516333 - DNA, 600 bp, Stenotrophomonas maltophilia
atgaacaacagtgcccaaccttcctgcctcccgcccctgcatccggtccggcgacgccacctgctgcacctgcaggccgcaccggtgaccctgcgctccttcctgcgcaccgacctgccccgctggcgcatcttcgatgacgcccggcggcgtggccacgtgcacgtgcctggcatcgatgaggaagcgcggttcctcgcaggcatgcaccgctcctgcctggaatacgaccacgatcagctgcagctgggcgtattcgacgacgtgcatggaaccctgctggaccaggtgcacgtgcgcctgcagtccgcgtatgcgcgttgcgcggaaatccagtcactgcagcatcggcacgcctatccgcaggcggcattgcaggcgctgtgcgcgttcctgttcgagaacgtcggcctgcatcgcatctacgtgctgctgccgccgtcatgcacctcgccgttcgccgacgccctgcgtgccaccggcttcgaatgcgaaggcgtgctgcgcgaccagcacctggacgccgcgggctggcacgatcgccagctgctggcattgaccgcgcccggatggcgcaatcgccagcaggcgatacgttag

SEQ ID NO: 516334 - DNA, 864 bp, Stenotrophomonas maltophilia
atgcgcagggactgggattttcctccacttgcgctgccgccactggacgcggaggcgcagcgtttcgtgctgctcgatggcgcgcagtgcgatcagccgttgcagctgttgcgtgcgctgccgtgggcgccgctacggttgttcgacggcctgctggccgacggcaccgatgatgccagcgtgttcctggcgcggctgccggcagacatcgatatcgaccgcttccttcagcgggcggcggcgcaggcgcgttcgccgggcctgctcagtgtgatcgaaacgacattgaccggtgaggcactgcagcagcgcctgcaacggcgcctggatgcctgctaccccaatggcaaggagttcctggcacgcttctttgatgcgcgtgtactgccctggtgggtgcaggtgctggatgaggcgcagtgccgtgccttcctggccctgggcgaatgctggtggtatctgcgccatgatctgcaatgggcgcggctggagctggccgatgtcgtgccggatccgcatgacccgccgtgggtactggaggcgccgcagcggcgcgcgctgatcgacgccagctacccctataccctgatcgaccatttccagctgaccgaccctgagctgttggcgcgcctgccacgcgcgcgctggtacaccttcttccggcgcgtggtggcgacggccgcggcggcaggcattgaggacagccgccgcgtggtgatggtggcgacctgggcgctgctggccggcatcgatctgggcgaggatccgacctggcagcagcgcctgcaggatttcgccagtggccggcgcagtgcggccgatatcggcaatgaagtctggcccctggaagaaagctgggattga

SEQ ID NO: 516335 - DNA, 2775 bp, Stenotrophomonas maltophilia
atggaagcgattcgcaacctcatggtgcaggcagccggccttgatgccgacagccgcctgtatcggttggagctacccggcctgccagcggtcgttgtcgatcactggcatggccatgacgccctctcgcaggggcggcatctgacgattgatgtactggcactggatgcttcgctgccgctggccgattggctggggcagcccgcgtgcctgcatgtgcggttggccgacggccagccgtggccgcgccacggcgtcattgccgatgcgcgctgcaccggcagtgatggaggcctggcacgctaccgaatcaccctgcgcgactggacctggtggatggaccaggcgcggtgcagccgtgtgttccaggagcagagcgtgcgcgaaatcgtcgatgccgtgctgcaggggcatgcgccgttggcgcactggcgctggaccgacgaggtcgatgcgttcctggcggcatcgcggcctcgcagcttctgcgtgcagtaccgcgaatcggacctggccttcgtgcagcgcctgctggccgaggaagggctgggctggtgcgtgcaggaagcgcaggacgccgctgcggggcatggcatgctgctgttcgccgattcgacggtgctgcctgaatcgcaggagtcacgtagtggcggcgggatccgcttccaccgcgccgatgccagcgaacccagcgacggcgtgcagcggcttgggcaacaccgacgactgcatagtacgcgggtgcagctgcacagcagcgattaccgcagcgtccgctcgctggcagggcagctgccgctgcagggcgacagcgaggcgccgcgcgaggactacgatgccatcggcgcacatgccttcgccgatgccaccgagttgcagcaccatgcccaccgggtggtcgaggccatggaggcgcaggcgctgcaatggcagggccgtggcagcgtgcgcagcgccgatgccggccaggtgtgggtgctgaccggcctgccgggcgagcggccggcggagctgatgctggtgagcgtagagcatgccggcgtcaacaatctgccggttgatctgcgccaggcattgacggcagccgaagccgtcagcgcagagcgcgacacgctcgcagcccaggcgcgtgcccatggttacagccaggcattcaccgcgcttgcgcgtgaccgccactggcggccggtactgcgcgatggcaccggtgcgcggcgcaatccacgccccctggcccccggctaccagacggcgatcgtggtggccgggcagggcagtgccagcgatgaagtgcatgccgacgcgctgggacgggtacgtgtgcggtttcatttccaggacggcgcagagggcgccgacagcgcctggttgcgggtcgcgcagcgctatgccgggcccggggtcggcagccagttcctgccgcggatcggccaggaagtgctggtcggcttcctcgaaggagacatcgatcggccactggtactgggcgcgctctacaacgggcgtggcgaggccggggtggcgccgacgccggcaggcgccagcgccgaagccgataccacgccgtttgcccaggcccgcgatggtgcaggcagtgcgcaggccaacctcggtggtggccaggcaccggcctggcatgcggccgctggcggcgagcaggcgcaccggcatcctggtgcgctgtggggcgtgcagtcgcgcgagtggcagggacagggctggaaccggctgctgttcgacgacagcgaccagcagctgcgcacccagctggccagcagccagcagcactcggcactgagcctgggccacctgcggcaccaggccgacaatcatcgcggcagcctgcgtggcagcggctttgaactgcgcagcgatgcatggggcagcgtgcgcgggcagcgtgggttgtggctggatgcctacgcgcatcgtgacctgcaaccggcaggatccgcggcacagccggcggcactgcttcagcaggtggcgacgctggtgcaacagcaggccgacgcggcgcgcacccacctgaccgtacaaccggcctcgcatctgggcgtgcagtcgccgcagcgctccaggctcgacagtacgcgtgcgccggtgccggtgctgctggccagtgtgcgcagcacggtgccgggggcggatctgcaggaggccactggcgccgccgcgcagcgcagcggcgatgcaggcgacggccgtgtgccgcataccggcgacgcgctgatgggcctggccgcgccggagggtgtggtgatggtggcgggccaggggctgcattgggcccagggtgaaaccctggtgctgggcagcggccagcacagcgatgcgacggtgatgggacaggcgcgctggcatgggcggcaggcgatcggtgtgctggcggccgccaagaccggcgccgatacccggacgccgacgctgacccttgccagcgccacgcagcagctggacatcctggcgcagcaggaccgtgtggcggtgcaggcccgacagtcgctgcatgccgccagtgcgcaggccgctgtcgaacttggcgccgggcgtacgctgcacatctccaccgcgggcggcgccagcgtcaccctcagtgcaggcaacatcgtcttcaacgcgccggggcgcatcaccgtgcacgccgggcgcaagtcgttccttcccggcggcggcggtcgctacccgctgccggtgttcccgcagtcggtatgcaaggagtgcctgctgctggcggcgcagcgggcctcagcgctgaccccgaagggaggctga

SEQ ID NO: 516336 - DNA, 618 bp, Stenotrophomonas maltophilia
atgcagaactggatcggacgctcggccggcgggcttgcgctggcgctgtgcctggcggcgccgctggcacaggcgggcgagccggtcttcggcggctggcgcaacctggactcccgcgacggcgccgagccagcgttgcgtgacatcccgttcgcggtgctgccggcggccgtggccagcgatgcgcgcttctcgatctacgaccgcgagagcaagcggctggtgtgctgcctgcaggtggccagcgccgaactggacgacaccgcgctgcgcaaggtctatcagctgcccgagcagtgggtgaccgacctgcgcaatggccgcagtgcggcgcggccctggccgacgcgggtctatgaaatgcgccgtatcggcgagctggtcgactacgttttcagcgatgcgcccgaggcctacagcgacctgggcgggctgctgctgcccgccgacgcgcgcctgctgcccgatggcagcgtgaagacgggtgcaacctatcgcctgcagttccgcagcacgccgctgggcgatgacagcagcgcgctggaccgcttcaccctgcagccggcgcagggtgccggcaagccggtggtggttgaagtctcctacggaacctattga

SEQ ID NO: 516337 - DNA, 615 bp, Stenotrophomonas maltophilia
atgcgcagtcgcgcgagcacgcgcgtctcgccggggagagtggccgtgtgcccgctgctggtggcctgcctgctgccattggcagcgtgcaggcaggcacccgcgcagacggtcgaacaggccgacgctgcacgctccgcgcgggccgccatcgaggcgcagatggccgccgacgcgcatgccgcgcagggagcgccgccgttgccgggtgatccggaccgcaccgaaacgctctttgacggattgctcacctgccagcccaagggctggtatctgagtgcagagtccgggcggccggccaatccctatctggcccgccacgcgccgcagccctgtgagcgcgatgaggccttcgggatcgcctacttctgcgtcaatgccgatttccacggtctgccggtctacagggtggtgacccacctcggcaccgcgcccacccccatcggtctgctgatcgatctgcccgtggagcaggcgcgcaggcgtgcacggaaggcgctgggcaccgagtttccgcgcgatgcgcggagcgcgcgcggtgagcggccgcagctggacccgcagggtgacaatccacagaaatcgcagttgctgtgcacgccggactgggcgtag

SEQ ID NO: 516338 - DNA, 1833 bp, Stenotrophomonas maltophilia
atgaatgaacgcacggcgactggcgcgcagcccatgcccgccaatggacagcgcgcattgagcggcgctgaggcacaacgacgggcgaaggcgatggcgtgcctgcgcgagaaggggtcgcagtgccagggccaggtgcatgtgagcatctacttcgatggcaccggcaacaaccgtgagtgggcaggtaccttcgtgaccggcaagacacgcgccacccgcacccagcttgcgcgcaacggccacagcaatgtggcacgcctgtacgacgccagcctggccgaaccggagaacggcttcttcagcgtctatgtgcctggcgtggggacgccgttttccgaggtgggcgataccaaccaggatggcgacacgctgggcggcggtgccgcacgctacggtgccgatcgcatccattgggcgatcctgcaggtcatcaattcggtgcatcagtacctcaaatccagtgatctgatcagcccggctgaagccaagatcctggtcggttcgatgagcgaaacgcgcctgctggaagggatgacgcgccgcgccatgctgaccggaatcgcgcaacgcctggaacaggtggtgaaaagccaccagcgtcgcgtcacctccgttcacgtgtcggtgttcggcttctcgcgcggtgccgcgcaggcgcgggcgttcgtgcatcggttgtatgaaaccgccgaggcctggggcagcggctgtggctacaacatcgccggtgttccgctctacctcaatttcatgggcatcttcgacacagtggcttcggtgggtgttgctgccatgagccgggtgtcaaagggcaaatgggactgggccgcaggtgacatgatgagcattcaccccgaggcccggcaatgcgtgcatttcgctgccttgcatgagcagcgcatcaacttcccgctggatctggctaccagcgggcgcgaagtgctttaccccggcatgcattccgatgtcggtggtggctattcgcccggcggccagggcaaggacttcgtgtccggcgcagcgaacggcaaggccaaactgtcacagattccgctgatcgacatgcatcacgaagccatcaaggcgggcgtcatgatggagacgatcaccgagctcaaccaggacccggcctatgccacgcatttcggctgccatccgcagttgatccgcgactacaacgcctggctgaccggccatggggtgcccgcaggcgcgcacacgcagcagattgcaggacactgccggcagtacgtggcctggaagggcaagcgcctgcccaacggcccacagagcctgctgcagcagccgttcttcaagcagtccgatgcagaggaccaggtggatctggccaacgcgcagcgcgactttgccaatctggtcaccgagctggcgcagggcaagagcgacatggcggcctaccgcggtcagctcaatgaaagccagaagcgcatcgacgccgggcgcaaggccgggcgtccggtgttcgagccgacgccgcgagcgtccgccgcggcctacacctacgccggcattcccgccgagaccagtgcgctgctggacctcgtgctcaacgcgacgccggtgccggatgtcagcaccacgctgttcgacaattacatgcacgattcgctggccggcttctacatgatgaagtggacggagctgaacatcccgcgcctcaacacctatggctatctgcgctatcgcgaagtgttcagtgtggccggcaggcgggcccaggaatgccgcgatccggcgaccctgccaccagcgaatgttccgtccatcggcggcgcgttccagcagcttggaacggcaatgggaggctga

SEQ ID NO: 516339 - DNA, 486 bp, Stenotrophomonas maltophilia
atgattgtgcacaagatgcgtgttccgccgctgtccgccctggttgcactgcttctgctgccggtactggccgcctgcaagggccagcctgcgtcaacaccggtgggggtgcggggctacaaccacaccgacaaccacgttgcgcagttccttgtgaacggagggagtggtggatcggcgtggccccactctgaaggtggaactgtctgctgcgcagtgctgccggatagatggactccggatctgaaggtggagatcgaatggacaaccgacctggaaacctaccagaaggcgacggtacccatccccaggtacaacgaggttggcagtctcgcggttcacttcctgcgcaatggtcaggtcaaggtattcgtgaccaacctgatactggggcacccggactatccgttgacgggaccggaggcgccgctgcgtgagggtgagaatcccgtgtgggagcaccttcggcggccgcccaccagttga

SEQ ID NO: 516340 - DNA, 486 bp, Stenotrophomonas maltophilia
atgattgtgtacaagatgcgtattccgctgctgtccgccctggttgtactgcttctgctgccggtactggccgcctgcaaggggcagcctgcgtcgacaccggtgggagtgcggggctacaaccataccgaccattccattgcgcagttccaggtgaatggtggaagcggagggtcggctcgacgtcactcggcaggcggcacggtctgctgcgctgtcgttcctgaccgatggactccagatctgaaggtggaaatcgaatggacaaccgacctggaaacctaccagaaggcgacggtatccatccccaggtacaacgaggttggcagtctcgcggttcacttcctgcgcaatggtcaggtcagggtattcgtgaccaatctgatactgggacacccggactatccgttgaccggaccggaggcgccgctgcgtgaaggtgagaatcccgtgtgggagcaccttcggcggccgccggggggctga

SEQ ID NO: 516341 - DNA, 885 bp, Stenotrophomonas maltophilia
gtgatccatcgctatgccgtgatcgacagcgcacagagaccgcatttccatgcgcggctggagcgcctgggcgcgcgctatcggtcgttgttcgagggcacggccgaagcgggcctgctggatatcgcgccgttgctggtggcctggccggaggcggcgcacaccgcgctggacacggagatcgggcagatgggtgcgcagaagccgggtgtcagcctgctgtggagcgcgctggaactggatgaactggcgcgccagctgcgcgctttccatctggccagggtgcccgagaagggcggccgcgaaatgctgctgcgctggtatgacacgcgcatcctgccggccctgcttgacctgttgcggcctgatcagcgtgcggccctgctggaaaacgtgcagcgcctgcagtacttcgatcgctttggcgaactgcagcaatggccactggacgcaatgagcgaagcgggtctgccggcactgccgcctttgcgcctggacgagcatcagtacgcacgactgctggacgcgtgcgagccggatgtggcgatcgcgcagctccgccgggtgattcccgatgagatgaaaaaggtgccgtaccgatcgctgtatccgttcatcgtcgaccacctgcaggacacgattgcccacggcgtggaccaggtggacgatcacgtgcagtacctgctgctggcgctgtatacctccggcgcctgccgcgcgcatcctgccgtgcaggcacggttggcgcagcacgcaggaacctgcgaggtgcctttcgcggactgggcatcggccctgccggaagacatctggttgaccggcgttccgctgtgggacgccgcccgcgttgcgtcgcaggccgttgcggcaccctccaggacctga

SEQ ID NO: 516342 - DNA, 2784 bp, Stenotrophomonas maltophilia
atggatcagctgaattacctgatgacgcaggccgccggtcttgatgacggccagcgcttgtatcgtctgcagtcgggtgcgtttaccgcatgcaccgtggaacgctggcgtggacgtgacgcgctgggcgaggacgcatggaccgaggtcgatgtgctggccaccgacgcgggtgtggtattggctgcgctgccggccacgcgcgccaccctgatcacccggctcgccgacggcgggcaatggcagcgcagcggcctggtggctgatgccgcccggctcggcggcgatggcgggctggtgcgttaccggctgcgactggtgtcctggacctggtggttgcagcacgcgcgccacagccgcgtgttccaggagcagagtgttcgcgccattgtcgacagcgtgctggccgggcatggcgatatcgcgcgctggcgctgggccgaaggcgttgacgccttcctcggtacgcgtgtgcgcagttactgcgtgcagtaccgcgaaagtgatcgcgatttcctgcaacggctgctggccgaagagggactgggctggcggctgtatgccgacgaagaggcgccctgcggtaatggcatggagatcttcgccgacagcgtcgcgctgcccgaagatgctaccagtgcgggaatcggcgtgcgtttccatcgcagtgatgccaccgaaaccagcgacagcgtgcaggccattggcctgtgccgtcgcctggccagcaccaccgtcagtgtgcagagtgacgattaccgccaggtccgcgcgctggcagggcagtcgccgatggacgggggtggcagcgagtcggtgcgcgaagatttcgatgccgtcggcgcctatgctttcagtgacagtgcggccgcgtcgcgccaggcccggttgctggcacaggcgcgtgaagcgcacagccggcactggcaggggcacggcacggtgcgcggcctgcattcgggcagctggctgcgcctgcagcaggcccccggtgccacaccgccggaattgttgctggtcagtgtcgatcacgccggcatcaacaacctgcctaccgacctgcggcgcagcctggaggatgcgctgggcgtggcgccggccgacggcgaggacaacgcgctctggcagcaggccgaggcggtgggctatggcaaccgcttcgatgcggtcgagcgcagcctgccgtggcggccacggttgctcgatggcaccggcgcgcgcctgaatccacgcccgaccgtgcccggctaccagaccgccgtggtggtggctggccagggcagcaccggcaaggacctgcatgccgacagccacggccgcgtgcgcgtgcgcttccatttccagcagggccagggcgatggcgcccatgacagcgcctggctgcgtgtagcacagcgctatgcgggcccgggggtcggcagtcagttcctgcctcgcatcggccaggaggtgctggtgggcttcctcgacggtgatatcgatcggcccctggtgctgggcgcgctctacaacggccgcggcgaagccggtgtggcgcctacgcctgccggtgccagcgccgaaggcgacgtgtcggcctacggccaggccgccgatgcatgcaacagcgcgcaggccaatctcagtggcggccaggcgccggcctggcatgccggcggtgccggtgatcaggcgcatcgccagggcggcgcgctatggggtatccgctcgcgcgaatgggacggtggtgaaggcagcaaccatctgctgttcgacgattccaaccagcagctgcgtacgcagctggccagcagccagcaggtttcgcaactgacgctgggccacctgcgccaccaggccgacaactacgttggcagtgtgcgtggcaccggcttcgaactgcgcagtgacgcgtggggcgcggtgcgggcgccggcgggcgcgtggttcagcgcctatggccggcgccagaacgcaccggcgggtgaagcggtgcaaccctctgcgctgcttgcccagctgcagacgctgggcgagcgtttcacccgcgccgcacgcacgcatgtaaccagcccgctggcgatgcaggagggtgcaaaggcggccgggcaatcccggctggtggccgaccagtcgccggttccggcaatgctggccagcgtgcgtaccaccactggcggcgatgagttcgaggccgggaaaagcggcgcgaccgagcgcaggcctgacccgggccagggcagggtgccgcatccgggcgacccgcttctgggtctggcggcaccgcagggactggcgcaggtggcggggcaaaccctgcattggagcaatggtgagggcctgctgctggccagcggtgctgaaagcgaagcggtggtgatggggcaggcacggcttcatgcggggcaggctatcggcgtgctggcctgcgtcgtcgagggggccggcgccggatcgaccgcgctggatgtggtggccggcagtgaaatgctcgacatgcaggcgcacgcagatcagatccggatccagtcgcgcgctgcgctgcggggtgccagcgcgcaggcgcccgtcgagctggccgctgccacggtgctgcgtgtggcgacgtccggcggcgccagcctgaccatcgcaggcggcaacatcaccatcgactgccccggaaccattaccgtgcatgcggccagcaagtcgttcgtcgggccggcgcagcaggggtatccgctgccgcagttcccgcgcagcagctgcaagagctgcattctcgacgcgatgcgccagggaacaccgggagtgctggtgtga

SEQ ID NO: 516343 - DNA, 1437 bp, Stenotrophomonas maltophilia
atggcgggatggctgggcaaggcagcgtcggtggtgatggtcttcatcgccacctgggtcgcaacgattctttattggcgcaacagcggcaccgtaccgaccggcatgcagatgctggcctatctgggcctgctgccggtcggcctgagtggcgccggcttcatgctgcgcagtgcagcgcggcgtggcgccgatgcagcattggccaaggccggcgatgacgcgcccggaccggcaacgggcgcggcccgtcctgccgcagagcctgcgcagcaggtgccggccgttgcgctgctggccggcgaactgaagctgggcgtcgacctcgacccgcaggcgctgctggcggtggcggcagcgccgccacgtcccgccctcgatggccgcttccgcgacaactacaacctgccgctgcggatgagcgctgcgccgggcctggacgaattcgaggtgctgcaggtgcgccaggacggcatcgataccgccgcgcacgagcgccgcgcactggcgctgttgcagccggtgctggagcggctgttggaggtcgccttcacgacgctgccggagatcgaagcctccgaagaagtggtggtggccggcctgcgccgccgcgatgagcagcgcgtggagaatgtgctcaccctcgaattgctggtgccgggcagctggtccgatgcgctgcggccgtgggtgcaggactggctgctgcaacaggcgcgcacggcaggcctggatgcgcgccgcttcgacgtatgcgtcaccacgctcgacggcgcgcgcgaggtgtggccgcacctgcagcgggtgatcgacgcgctgcatgcgtcgtccgcgccgcgttggcatctgctgctggcggcgtcgtcgagcatcgatccgggcatcgtctctgcctgggaggccagcggtgtgctggcgacggccagggatcctgacgggcgcgtgccgggtgaaggcgcctcgggtgtcctgctggccagcacgcacgccgcgcgcgagggggatggccgcctgtggcggccgcagctggtgcgcgccgaacagattgaaggccagcgcccggccgagcagcgccgccagctggcggcgttggcaagccagtggcatgcggcgctgggcgctgacagcggccaggcccggttcgtactgcacgatgccgatcatcgcggcgatctgatggtggatgccgccgccatcgccgcaactttggcccccgatctcgatttcagtccgcagagcctggccctggcgctcagcgccggcgagctgggcccggtactgccggtggcccagctggcgctggcccacgcacaactgcaacgccagagcgaacccgtgctgctgctcggcgtggccgacaaccagcaacgcctgttcggcctggtcgacccacttccttccccgacgctggcggccgatgcgccgtcggcctcctga

SEQ ID NO: 516344 - DNA, 1188 bp, Stenotrophomonas maltophilia
atggtgcgcagtcgtagccagcatgcccgcatgtccgctgatcgaatcgctctccgccgtttcacccaatggttgccgttcctggtcctggtcgctgtctgtgtggcctggtggtctccgctgggcgtggttgtcgcccttgccgcgtgccttgcagtgggcggcgtgctgcagcgcttggatctggtcggtgatgttgtaggcggcgcacggctgcgctcgcgggcgcagcggccctttgctccccggccgcccatccatgatgttctgttggagtggggcgagctgggcatgggagggccggcctacagcacccagatgctgcgcgatggcgccattgtggaaggcgtgtctaccggcggcagccatgatgccagtggcgagtggcagacgctggcgggcagcgcgctgcgtgtggccagtggctacattgatcgtagcgaagcggtgatcgtctacgacgaagcggacaagcgggtgatgcacctgcaggcgatggtgcccagcctgttctggcaggtactgcacgagcatcggcagcgtggcggggatgccgaagctgcgatgtggctgcgtggtcttcccagccgatcgaccacgctgcgcccctgtcggggtctatggctggaacaggggcatccggcgctggccgccgggctgccgcaggcattgcggcatgtcctgcctgatgcccgggtgctgcaggccatcccgctgattcccgacgacctgcgtctgaccgcgcatccgaccctgttcacgcgcatctgtccgtacgccctgtgtcttgatggcgaacgcagtgaccgccatgcctgcgatctggatacggtgatcagcagcccggcggggcgatgcgtggtggtggcgggcagcgtgcttgatggggatctgcgtcccatcgagggcgtgtggctcctacattggcaggggcattggcaggccattggccgccgtgcaatgggcggcagcggcaaggcccggagtggagcctggatcgacgtgatcgaagccgccgatgacggcacgctccgatgcgaggcctacgaggaacgctgggagtttgacgacatcacgcgttgcccgacagtacacacgtcgttggaacttcctgtggagtggcgggacactccgttggcactgcgggttcgcaatggacgcttcagccttcgcatcccttctccctga

SEQ ID NO: 516345 - DNA, 483 bp, Stenotrophomonas maltophilia
atgcagcgcatgatttccctcaccctggtgctgggcctggccctggccaccaccgcccaggccaaatccgagaaggccagcgtgaagctcgatggcagcgcgccagtggccgaacagctgcgcaacgtggaaaccgccatcaacagcgacgactacagtgagatcgggctggaagacaagagccttgtgcagcaggcggtggtgcgtatccgcgaccggatgggcgagcacgagcgtgttgagcagctcagcccgaatgaccagaccgcggtcttcaacgaccaggaagtgatcaacacgatcctgacccgggcccgtgccgacagccgcatggtctgccgccgcgagcgctcgaccggcagcaacatgccgcagagcgtctgcatgaccgtcgcccagcggcgcaaggcgcaggaggacagccgcaaggtgctcaatggcatccagagcttcccggcggacgacaagaacttcaggcgctga

SEQ ID NO: 516346 - DNA, 417 bp, Stenotrophomonas maltophilia
gtgtcacaccatgcccgttacccgaacctgcaccagttggttggcgattcggtcagccagctctccaccgcggtcgcccagcgcgtcgaggatgtgctgtcccggcccgatggcctgatgccgatcctgatggcacagatggacgtcgacggcttcaccgcagacgctgcgcggcgcgccggcttgaagcccccgcaggccggcaccccggccggcttgaggcacaccgtggcaggcatctccaccttgacccggatgatgtatgccgcgcatatcgcgcgcacccgcggaggtccgttgcaggtcgtgccaccggatgccatcgaaggcctgctgttggccgcgcgcgagctgacctgctacgcgcagcagcaattgcaggccgaaatggcccgtggcgcagcaaccctgcaatag

SEQ ID NO: 516347 - DNA, 438 bp, Stenotrophomonas maltophilia
atgaagaaccagaagggcttcaccctgatcgaactgatgatcgtcgttgcgatcatcgccatcctggccgccatcgcgctgccggcttactcgaactacaccaagaaggccaaggtctcggaagtgatcctggcggcttcttcgctgcgtaccgacctgtcggaatacgtggccagcaacaacaagctgccggacaacaagtggcagccggacttccagccgaccaagtatgtgaagtcgctgtcgtgggatggcaaggccatcatcgccgaggctcaggcgattggtgacggcaacatcgacggcaagaccatcaccctgaccccggactccagcaaggtggccaacggcgtgatcccggaatggacctgcgaaggctcgatcgacaccaagttccgcccgggttcctgccagggcaagccggcagcctcgctgtaa

SEQ ID NO: 516348 - DNA, 876 bp, Stenotrophomonas maltophilia
atgggtgcattggcggttctggtgccgaaaatggagttcgacctgggcgctcaactgtatgaagcctatgcctcggtcagcgtcgaggccggggccttcctgctgcttgcgctgatcctgcagcgccggaacattgcaggcatcctgcggcgcgtgtggccacagggcgcccgcgtgaacctgctgtgcctggcgctggaggtggtgctgctgatgccgcttctggggatgctgctgatctggatgtatcgggccagccggggctggcagatggcctggaccgcggagctgtggaatgcgctgccggcgtggggcgtgctgctgatcgtgctgttcgtggccgacggcatcagttatgtccggcaccggctcgaacatacccgctggttctggccgatccatgcgatgcaccacagcgatcgcgagctgagctggttctcggcctatcgccagcacccattgaaccggctcaatgccgcgctgatcgatatcggcattctgctgctgttgggcgtgccgctctgggcgatctatgccaatgcgctggtcaggcactattacggcctgctgacccatgccaacgtgccatggacatttggatggctggggcgggtgctggtctctccggcgatgcaccggtggcaccacgtgcgccagggggagggcgtcggcaagaacttcgcgacggtgttttcagtgttcgaccaggcattcggtacgttctacgtgcccagcgcgtgccgcgagccgaccgggctggacgaacctgggcacaacgcgttcctggtccagatgtgcaacccattcatcaaggcagccacggcgctgcgggtcatgacggtggtgcggcagcagcctccacgcatcgaggagtga

SEQ ID NO: 516349 - DNA, 1194 bp, Stenotrophomonas maltophilia
atgacctcaaccgtttcccgcacccggcccctgctggccaccctcgccgccaccctgctggccctgcccgttgcggccgcggctgccgagcccggcgatctgctcacggcagccccctatcgcgccgactgggtgccgtcgaaggcggcccaggcgtacctgctgagctatcacacccccgatcacagcgggcggctggcccagggcaccgggctgctctatctgcctgccggcaccgcgccggcgggcggctggccggtggtctcctgggcgcatggcacccagggcattgccgaccactgcgcgccgtcggtgtccggccccacccgccccgagcgcgacgggcgcttcctggaccacttcctcggccagggctatgccgtggtcgcagctgactaccagggcctcggcagcccgggccagcacacctacctgcacgtgcgcaccgccgcgcgcaacagcatcgacatggtcaaggccagccaccagttcctgagcggcggtcgcctgtcgccacgctgggtgtcggtgggctattcgcagggggcgtcggcggcgctgagcgccggccaccaggcggccgactacgccggccccgccctgcagttcaagggcagcttcaccgccggcacgcccacggccgtggaaatcaccgcgttggtgatgaggcccgacagccgcaccgccaatccgggggcactcaacgcctaccacgcctacctgctcgatggcctgctgcaggtggcaccgcagatcgaccgcgtgctgagcgcgcaagggcgggcccgtatcgcgctggcccgccagcactgcctgaccgaactggccgcgcagctggagggcgccagcaccggcgagatgttcagcgcaccgttgacctcggtgccgggtatctggacgctgctgcacgactatctgggcgtgccacggcacgggttcacccagccgctgatgctggcccacggcacccgcgaccaggatgtgccctacctgactaccctgctgtacgccgccggcctggccctgcgtggcgagccggtggccttccggcagtacccggtcgaccaccgcgccacgctggatgcagcagcggccgatgggctggccttcgtgcacgcacggctggaagacagccgcttcgaccaagcagccgaattggcgggtgtggaacaacagctcgacgccgcgcgatga

SEQ ID NO: 516350 - DNA, 507 bp, Stenotrophomonas maltophilia
gtgctggggccggcgttcgccaccctggccggcccggtgcgtgcgctgcacgccacgccattgccctgccgttacctggggcaggcgcggatcgagcgtggccggcactggctggtgccgctgctggctgcgctggcacgcctgccgcataacggcgacgggctgcctaccgaagtcctgttcagcgcacacgggcagggcgaacgttgggcgcggcgctttggtcgctggccgatggtgtcgcggctgtgggcgcaccagggatatctgcgcgaacagctcggcgcggtgtgcttcgagttcaatctgcaggtccgcgagggcggcatcgaatggtcggtgcggcgggtctgggccttcgggtgcgtgccgttgccggcgcgttggtttggcggtgtgtgctgccgcgaagcctggcacgagcagcgctacactttcctggttgatgtgaccttgccctgggcaggagccctgatccgctatgaaggctggctcgaaccgcagtga

SEQ ID NO: 516351 - DNA, 438 bp, Stenotrophomonas maltophilia
atgaaggctggctcgaaccgcagtgataccgccgcagatgccggcagtgcggtgattgtctttgatggcgtctgtgcgctgtgcaaccgctgggtgcgcttcctgctgcggttcgaccggcagcggcggtaccggttcgcggccatgcagggcgcgcagggcagtgcgctgctgcgccagcatggactggacccgcaggatccggcgtccttcctgctgctggatgcgcacggggcgtggaccgataccgatgcgatcctgcgtgtactggccgggctgggcggtgtgtggcgcctgagcggcgcgctgcgtgtgctgccgcgcgcctggcgtgacgcggcgtatcggatgctggcgcgcaatcgctatcgctggttcggacgccacgacgcgtgccatctgccggcgccggaacacagcgcgcggttcctggattga

SEQ ID NO: 516352 - DNA, 1302 bp, Stenotrophomonas maltophilia
atgtccgcctacgaccgtttcatcgaagatgccgcaatacgcctggagctgggccatcgcacccgttgggtggtggacgtgatcagcgcctgggtggactcgcatcccgacggattggcaggcctgcagcggcggttcgaacaggcgggcctggccgcccgtttccactcctggcgacagtccgccacatcgctgcggctgccgatcgtggccagtgaactggagcgcgcattgggcgcgcacacgctggcgatgatcgcccaccgcagcggcatgtctccgggatcgttccgcgtggcggcctgccatctgctgcccggcgtggtcaccctgcgctcgggcccggagggcgccacccacccggccctggcccggcgcgcgcacggcacccgctcgcccaggcgcatggccggctgcgtgccctcgcgcgcgatgtacggcatggcgatccgcagcgtgctgtggatgctggcggtcgccaccgtgctgggcctgaccacctgggtgctgctgaaggcgcgcacgccgctgtggaccgtgcaggacgttccgcgtgagcacaccgcgcgactgtccctgcatcaacacggcacgcaggtgcaggtcagcggcagcctgcccagcgaaggcgagcgacgccgcgcctggaacgcattgcgcgccgtgcacggtgcctcgaacctgtacggaggcattgcactggacccgcgcgcgcagtcaccccgctggctggaccgcctgattgccgatctcccccatctgaagggcgacggcctgcacctggagttcgccggcatgcagctggccatcgataccaccgccatggaagacgcacagcggcaggccatctcgcggcgcctgcgccaggactttccgacgctggagatgagtggcctgtggggcccgggcctggccgcgctggcgcagctgcccgccggcgtcgacaccgcgcaacgggttgccgcactgaaccagacgacgttgaagttccatgccggttcgtccgagctgaccggcgactcgcggcagaccgtgcatgcggtcgccgatgcgttgcgcggtacaccggccggcctgcgcgttgagatcggcgcgcacaccgacagcgtgggtcacgccgaggccaacctgcagctcagccagcagcgcgccgaggcggtatcacaggcgttgcaggcgctgggcgtcccagccaccacgctggtcgcggttggctacggacaggatcggccaatcgccgacaatcgcagcgacagcggccgcgcacagaaccgtcgcatcaactaccgcctgctcgactga

SEQ ID NO: 516353 - DNA, 858 bp, Stenotrophomonas maltophilia
atgaaacacagggaatgcgtgttgggcgtggtgctggcaggactgctggcaccgtgggcgcaggcccgtggcgacgacggcgaaacgctacggttccaggtcgccgcgcacgtgcaggcgcaggccgacccccagcaggatggcagcatcgcggtgcggttctcgccgtcgggcaagcgccagtcgctggcaggcgcggccgatgccgacggcaattcgcggtggtcgctcgaagacgtcgatttcgatggctacccggaactggtcgcgcgtgcctctgtgggcatggtcaatgaagcggtggcggtgtaccggttcgatccgggcagtgcctcgtatcgcgcgctgcaggccgaaacgcacggcaacgacagctgcgttgacctgatggggctgagcgtcgacgcaaagacccgcaccctgaccagcagctgccgcagcggcccgatgtggtacaccgaccagtatcggtttgcgggcgcaaagctctatctgtaccgcggcgagcgccttctgatgctgggcggtacgctgaacgcggccctgcattgggtgcagaccgacgatcaggggccgttggcagtctggcgcacctatgatcctgccggccatgggctggaaagcgcgattgccgatggcctgggcgtgccacccgagggaccgttgcgtggccagcaggcctccgtgctggcggcgcgcgtgtttctgttcgaccgccccggtgcatccagcaccaagcgttacctggtgcagggcgaccgcgtggagatgctggatgaacaggacggttggatgaagctgcgctaccgcaacccgaagcagggcgtggtggaggggtggatcaacgtcaatgattga

SEQ ID NO: 516354 - DNA, 318 bp, Stenotrophomonas maltophilia
atgctgtgccccgtgtgcaagacccagaccctgcagatggccgagcgccatggcatcgagattgattactgcccgagctgccgaggtgtgtggctggatcgtggcgagctggacaagatcatcgagcgcgccaccgagggcgccgccgccgtaccgccgcccgcgccggtgcagccgcagcaggtaccaccgccggtgatgcaccgtgatacccgtcatctgggccagcgctacgaggacaaccgtggccagcagtacggccatgggtacaagaaaaagaagaaggacagcttcctgtcggagctgtttgatttctag

SEQ ID NO: 516355 - DNA, 663 bp, Stenotrophomonas maltophilia
atgagtgtttccctgatccggccgctgctgttggcggccgcgaccctggccgtttccgcctgtaccagcgtgggcacccagaagacagcgccgccagccgtggtcgaaacggtttcggccgaggcggcgcatgccgaagcggcgcgcgtggccgcgctgcaggcacagccggactgggccttccagggccgggtggcggtcagcaagggcaaggacggcggcagcggtcgcatcgactggaagcagcagggtcgacactacgtggtcgaactgagcgcaccggtgacccggcagagctggaagctgagcggcgatacccagtccggaggtgggcgcctggaagggctggcaggcggcacacgcgagggcgaggacgcccagcagctgctgctcgacgccaccgggtgggacattccggtcaacccgttgcctgactggatccgcggcctggtggccgctggcgccgatagtggcgcgcaggcggtcgaacgcgacggcgaaggccggccgcgccgcatgcagcagatgggctggcaggtgcagtacctggactggtacccggccgacgcagcgcgtccggcgttgccgcgcaggatcgaggccagccggggcgatgccaaggtgaggctgctggtggaccagtgggggcagggcgctccatga

SEQ ID NO: 516356 - DNA, 336 bp, Stenotrophomonas maltophilia
atgcgtgaatcgttgatggcgtgcctgcgcgccgccctctcccttgctctgctgctgtcgctgccgtcggctcgcgccgatgagacgaccaagcaggaagacgccgcgccctgcatcgaagtgcaggtcaacggcgagcgcgtcccggcatgggagtgcctgcaacgcaagctggccccgcctgcgaacgcggccaaaccggcaacgctgcccgaggccgaacgcgtgatgcggttacctggaaaccagcgcatgcagtacaacctggaaggcacgcggcagcgcatgggcgatgcctttggtcgctcggtagtgccgcagcgacctgcgcgctga

SEQ ID NO: 516357 - DNA, 519 bp, Stenotrophomonas maltophilia
atgatgaaacaaaagcgtcagcggcagctgctagcgtgggcgtacacgaaggtgtcgatggtgcggaacatggatggcaagcgctgggatcgcaatcggatgttgaccctgttggcagccacgctgctgctggcggtggtggtctattggggcgtgaccctggccgcgccggtagcggcggccgccgccagcgaagcgcacgccgggcctcccgcacggcccgccttcgatgccgctgcaagcgtgccgctggtgcggctgctttcaccgggcgcggtgcagaccgacgttgtcgtgctgggcgtgatggccggcgaccacgcgccgctggcgctgctttcggtggatggccggcccgccgtggcctatgcgcctgggcaacggctgggcccgtctacggtgctggccagcgtcagcgccagtaccgtggaactgacacaggccgggcagtcacgcagtctaccggtgcctgggctgcccccgatgccgaccgatggcatcgtgccggccgcacggtag

SEQ ID NO: 516358 - DNA, 447 bp, Stenotrophomonas maltophilia
atgcagcgcattccgcgcggcttcacgctgctggaactgatggtggtgctggtgatcatcggcatctgcacggccggtatcggcctggggctgggcagcctgctcgaccccagccgccagctgcggcaggaggctgaacggctggcgcagcgcctgcaggtggcgcgcgacgaggcgcgtatcgatggcagggccctgcgctggcaggccgatgcctccggctatcgattcagccgccgcgacggcgcccactgggtggacgtgcagcgcgacgatctgctgcggccgcaacgctggcaggcggcgggcgtcacggtacagcccgcaaccgccatcgaactgagcccggagtggatcggggttccctgggaactggcactgtcgctggatggccgcaacgtgcgtcttcgtgatgatggcagcggacagttgcaggtcatgcaatga

SEQ ID NO: 516359 - DNA, 363 bp, Stenotrophomonas maltophilia
atgaagcggaacgcgggcggattcaccttgattgaagtactgatcgcactggcgatcgtgtcgatcgcgttggccgcggtgatgcgctcggtggccgtggccaccgacgatcaatcgcgcctgcgtgatcgtcgcctcgcgctgctgtgtgcgcaggatcgctggcaggaactgcgcctttccgggcaggtgccgcagcaggggcagcagcgctgcgtgcaggggcgcggcagcttcctggtactgcaacagctggggtcgggcgcagacgggcaagcgcagctggaactgagcgtggttgccgaggatgcgccggcgcaggcgctggcacggctgcagctgccgtggacatcgccgccatga

SEQ ID NO: 516360 - DNA, 528 bp, Stenotrophomonas maltophilia
gtgaccactcgtgctgcgcgcttcggtgattcgctggccggcctgtcgcagcgctggcagcgcctgccaccgcgcgagcgtctgatgctgggggtgatggcggtggcgctgctggccgcagggctctggtcgttctggctggagccgctgctgaagcagcgcagccactggcaggccgagctgccgcgcttgcaggcacaggcccgtgcattggctccgttgctgcgagcccgcgagcgccagcaacaggcgcagggccagcgcccgacgctggcggggctgcgcaatggcatcaaggtggccggtcttgccgacggcctgcacatcgaagcgcgtgaagggcgctggcacctgcaggtgcaggccgtgcccgccgacgcgctgtggaattggctgctgccgctgctggccgacccggccatcgagcttcagcagctgcaactgacacgcacaggggatgcgaacatgccggcggcacggatttccggaaacatcgtgatggcgctcgctaccggtggccatccatga

SEQ ID NO: 516361 - DNA, 1164 bp, Stenotrophomonas maltophilia
atgaacgctcagctacgggtacgcctgccggtgctggaacaactgcgtgccgacagtccggtggcgtgggcgctgatgcgcaaaggcgaggtgctggcgcatggctgtgacgccctggcggtgctgggccagcggcacccgcggggcgaggtgctggcctgcctcgatgcgcacgatctgatcctgctggagctggcgctgccgccgctgtccgggcgccggctgcaagcggcgctgcacggcgaagtggaagcgatgctgctcgatgacctgcaggacgtggcgctggcgcatggcagccaggccgtcgatggcacggtgccggtggcctggcttggccagcaggcagtcatgcaggcccagcaggtgctcgccgccagcggattgcagctgcgtgcgttgtatcccacgccgttgctgctgccgtgggcgccgggtcaggccacgttgcaggcctgtggtgaacacctgctggtgcgcagcgggcgcgagcgcggcttcgtgcagtggtgtggcggacgtgacgcagcggcggtgatgcaggcgctggccgcgcggcttcagcagaccggtgcacacacggtgcaatggatcggcagcgtgccatcggcatggccgacgacgctgccggcaacggcggtcgggcagccacagcaggcatgtggaccgttgcccggctggtctctgcctctgcctggcaacgctcggcaggcgccgcggctggcgatcgggttggcgctggcggcgatgctgctggcagcgcttggcctgcagttgcaggtgtcgcgctggcgcagcgaaggcgaggcgctgcagcaggacatggcacggcagctcagtgcgcacttcccggagatcaccgaggtggtggacccggtgctgcaggcgcggcgggcgttggcggtgccgctgccggcagtgccattgccgccggtgcagcgccaggcggccagcaccttgcaggcgatcccggcgctggcggggcgggtgcgtggcctgcactaccaacccgggcagctggaactggaactggatgccgatgcgcaggccgtggccgacgacgctcagcggctggagcagtggcaacaggcgacgcaggcgcagggcctgcagctggcgcgcgagcgcagtggacgcctgcgcgtgagcggaggcgggcagtga

SEQ ID NO: 516362 - DNA, 906 bp, Stenotrophomonas maltophilia
atgtcaccccggaagcgttcggttcggtttgcccctcagcgcggcatggcggtgatcgtggcgatgctggtggtggcgctggtggcggtgatcgccaccgccctgctgacccgccaggccgcccagctgcgcgcgctgcgtggcgaccagctgcgcgcgcaggtgcgcatggcggtggatgccacattggagcgcgccgcgcagcagctgcgtgaggatgtgcgcgagcagctgaccacggtccgcagtggccggtgggcgcgcccgttgcagttgcaggcgccgttgccggtgcagctgcagctggtcgacgcgcagtcgctgttcaacctgcgcaacctgctcgcgcacggccaggccgatgccgacgcgcgccgtgcgttcgtggcgctgtgcagcagccaggggctggagcaaggagcgtgcggcagcgctgccgactacatccaggcgcgcctgcgtgatggtgatatgcaggcccaggcgccgttgccacgtgagtcgctgatcgaacaggcgctggccggttccgacccgatggtcgtgcaggcgctgtcgcggcgcacggtggtactgccggcgcaaacgctgatcaacgccaataccagtgacatcagcgtgctgcaggccgttgcgcccggtgtcgagcgcgggcggctgcaggccttgctgggcgaccgcgatggtggccattggctgctcaaccgtggcgacatcgccaaccgactgcaactgagcgacgaacagatggcgatgcttcccctgggtatccatagtgaatggtttcttgcggtcggccaggtgcaggccgacggcagtgcggtcgagttccgcgcgctgatctggcgcgagtaccgggatgacggggtgcgcgtgcagcgggtgtggacgaggatcggtgcatga

SEQ ID NO: 516363 - DNA, 561 bp, Stenotrophomonas maltophilia
atgctggaactggatcgccacctgagccagtcactggagcaggcgcggcacgcgcccttgaatgtgcagcgttacggccacccgtgggtctgggtgctgtccagtgacgcctgggccgatgccgcacgctgggccacactggacagcagttcgcacccgctgatggcgctgcgcagtgccctcgatctgcagctgcacccttggcccgacgcggccatgagcgctctgccacttgaggcaggcaacccgcgcacgctgcagcgagctgcactgctggtgatgcttcagggcctggacagcgcgcagcgcgtttacgacgacctgcgctaccaccaggcttaccggcagttcatcggtctcgaccacggcacggcctggtcgccgatgcagtgtgtgcgtctgctgcacgcctgcacgcagccactgctgcgcgactgcatcgacagcgcgctggccgccgttccaccgcatctgctggaggcggtgtgccgccagcgtgcgcgtggcacgccagcgcaggcacctgcgcagcgaattgcaggcggatgtttatcgtactga

SEQ ID NO: 516364 - DNA, 552 bp, Stenotrophomonas maltophilia
atgcgcaacgagaccatcggtgtgctggatctgcgccgcaatctgtcggcgttgctggaaaccacgcaacgacggccattgatggtgcatcgctacggctcgccatgggtgtgcgtggtgtccgacgcgctgtggcagcaacaggcggtactgctggacttcgatccccagtcgcatccgttggggatgctgctgcgccttcagcaacaggccttgccgctggctgaaggcggtgtgctgccgcccgcagcgcttgcccgcgcactgctgctggcaggcatgcacggcgtcgacacactggcgcagctgcacgagcaggtgctgcaccatcggctgtggcattggttcgtggccggctcccgtggcgtgatggaccgatggcggctgccagcgctgcgcgttgcgatggcggcgtgctgcgacgacgcaggcatgaccgatgcgctggccgcgttcgccgcccgcagtgatgtggcgatgctggcgcgccgctgcggtggcgatgcgccacggctggagcgcgaagcctgcaggcggatgacgttgcggtga

SEQ ID NO: 516365 - DNA, 684 bp, Stenotrophomonas maltophilia
gtgttctacgtcagggggctgaatggacaccgtgcgatcagaacgtggaggctggccatcgccggatggctgctgctggcctctgccgctgcggtcgcgcaggacgcggttcacgcctacgacatgcccgcgcagccgctggaacaggccatcgagcgcttcagcgtcatcagcgggtggtcggtgatgtacccgggcgatcttgccgcaggccgcagcagccatgcgttgcgcgccagcctggcgccgctgcccgcgctgctggccctgctgcaggattcgggcatcgaggccgaggtgatcggtgagcagcgcgtggtgctgcgacggggttcgcagccgatggccgacgcagttttcgacggcgggcttggcgaggccgagcgccggcgccgttacggcggcctgcagcagcgcctgcgtgaagcgttctgtgatgaccccgggatctcccctggcccctacgccgcgacgctgcgcttcggtgtcgacagcaaaggccgggtgcaggcgcccgaactggtgtccggcagtggcagtgcccgccgtgacgcgcggctgctgcaggcgctgcagggcctggtggtggcggccgatgccgccgcgctgccgcagccggtgacgctgcagatccgtccttccggcaccgaccacgactgtggccggcgcttgccccttccatga

SEQ ID NO: 516366 - DNA, 1530 bp, Stenotrophomonas maltophilia
gtgaacgccctgccagcacactcgcccatcagccgcctgctggtgggcttcgcctccgagtcgggcaatgcccgcgccctggcccagcgcctcggcgcgggcctgcaaccccatcagccgcaggtgcttgcgttcaacgacatcgatgtggccagcctcggccagggcgatgtactgctggcgatctccagttcgttcggtgacggcgaaccgccggccaatggcgaacagttcttcgaagccctgcggcagacgccgaccctgaacgggctgcgctacgccgtgttcggtctgggtgacaccggctacccccgcttctgcggcttcaccaaggcgctggacaacgcactgagtgagcgccaggcgcaaccactgctgcaccgcgtggacgccgaccgcggctacgagcagttcttccagcaatggcagccggtgctgggccaggtgctgcagggcgacctgggcgctggtcgtgacctgcgcctgcaggtcaccgcctatgctgaagacaacgcctttgccgcgcgcgtgcttgaacgccgccgtttgaacagcagtgaccctgccgcctggcatctgcaactggatatcgccggcagcggcatcgcctaccgcgcaggtgacaccctgcatgtggtgccggagaacgaccctgcgctgctgcaggggctggcggactggtacggtgatgccggcgccgtggccacgctgcacgaccgcgaactgcgcctgctgggcaagggtgtgctgcgcgaagtagccaagctcggtggcagcgaggagctgaagggcctgttgaaggtcagccagaagcgcgagctggaggcctacctgcacggcctggacctgctggatgtgctgcacgaccacgccaccccggacagcctgccgctggcacgcctgcgcgagctgctgtcgccgtgcctgccacgtgcctattcgatcgcctcgcacccgcgcgacggccagctcagcctgtgcgtgcgcgaagtgcgctacaccctgcgcggtcgcgaacgctgcggcaccgccaccggcagcctgctgcatggcggcacgcatgcccgcgtgtactgccgttccaatcccgacttccatcttcctgatacggatgaagcgccgttgttgctggtcggtaccggcaccggcattgcaccgctgatgggcctgatacaggaagtgcaagccaatgccggccaacacgaggtgcatctggtgttcggcgagaagcatcgcgcgcacgacttcctgtaccgcgagcagctgcaggactggcaggcaggcggtgtgctggccggcctgcataccgcgttctcgcgcgatggtgccgagaaggtctatgtgcagcatgtgctgcagcagcgcgctggcgaggtgcgcgacgtgctcgcccgaggtgggcatctgtacctgtgcggcaacaagcgccatctggaaagcgcggtacgcgacgccatcgatgccatcggcgatgaaggacggtgggatgagctgcgcaatgaaggccgcatccattgcgagctgtattga

SEQ ID NO: 516367 - DNA, 549 bp, Stenotrophomonas maltophilia
gtgagcgggaccatcgacggcatcgtgctggccggtggcctgtccacccgcatggggcgcgacaaggcgctgctgcaatggcaggggcgcgccctgctggaacacatgcagaccctgctgctgcaggccggcgcacgacgggtctggatcagtggtgactacccggctttcggtggcgtaccggacagcgtcgcgcgttgcggtccactgggcgggctttacagcgtggcgatgcagatgtcggatgggcccgcctgggtggtgccggtggatacgccgctgttgtgcgcggcgctgctgcaacggctacgcgcggaaaccagcacatcctgcacggtgtttgccgatgaaccgttgccgatgcggttgcagatcgatgatcattgccgatgcgtgctgcaggaactgattcaagatcccacggcgcgccgttcactgcgcgcgctgcaggagcacctgggcgtgacccggctgccccttgcggcggaggatcgcgccctgctgctcaactgcaataccccgtcggagtgggagtccatcgcaccatga

SEQ ID NO: 516368 - DNA, 225 bp, Stenotrophomonas maltophilia
gtggccggaacgctacctgctgcccggacgccgcttgccctggccgacggcgatggtgcgcttgccgggctgcgggtggtgcacgaagtcctgctggccgccaagcgcacccggcagaacggcgagcccgaccagtacgtgggcgatcgggtgatggaaggactgaaacaggcggccctcgcactgggtgcgcaggcggtggtgcggttgcaggtggatgcgtga

SEQ ID NO: 516369 - DNA, 534 bp, Stenotrophomonas maltophilia
atggcccgttcgttgaagattctcctgatcgccatactgcttgtgggcgcggcggtattcgtctggaactacaccacactgcaacagcaggcccatgacgtacgcacgacggattcacgcaatgcggggatcaaggtattcacgcactatggctacttcgtcaacccgaacgtgctcgtgttcgacctccgtgcactgtccggcgacaacagcccggtggatgtgacccggacactgctgcagtttgccgaacgtcagaagcatcgcaggttcgaccgggtcatcctggcgtacaagggaaccgcaaagttcgagctgaagggcgactacttccataccctgggcaacgactacgagcaccagaatccggtttatacgctgcgcacgctgccggagaacgtgtaccaactggacggcacgccggctttcggcacctggaccggtgggctgctgggcgtggtcggcaaacagatggaagatctgaatgcgatgcacagacagtggtatctggcggagtacgcgaccggtggctga

SEQ ID NO: 516370 - DNA, 471 bp, Stenotrophomonas maltophilia
atgagcagccatcgcctacgtctcggccgtcactccatcatcggccaggcctacgttctgaccacaacgacgcatcagcgtcgccggctctttgaaagcaacgccaccgccggttgcgtgatcgatcaattccactacatcgaacaacgaggacttgtacggtcgctggcctgggtggtgatgccggatcacgtgcattggatgctggagctgacgtctgcgaacctggccgatgttgcgcgccggctcaagtcctccagctcgctggcattgaaccggctggccgatcgtcggggtgtggtatggcagtccggctattacgaccacgcgctgagggccgcggagtcgcttgagcggcaggccctgtacatcatggggaatccgaccgaagcgatcggggagtatccgtttgcatggtcggtttggtttgatgccggccagcggccggcactaccgaggaagggcgggtga

SEQ ID NO: 516371 - DNA, 453 bp, Stenotrophomonas maltophilia
atgccgaggatccgccccgcccacgtcgatgatctgcccgcgatcagcgcggtatgcctggccgccttcaccaccgccgtcgcgccttccgtcagcgaggtcggcatcgcgaccttcggcagcgtcgcgaccgccgatgcattcgctgcgcgcctgtacggcgacaaccacatcctggtggccgagcacgaaaaccgcatcgtcggcgtggtcgaactgaaggaaggccggcacctggccatgctgttcgtcgatcccgactgccagggccagggcatcggccacgcgctgttcgaggcgatactgccgcaggtgcgcgaaccggtactgacggttcgcgcctcgctcaacgcggtgccaacctaccagcgctacggcttcgtgctggacggcgacgtcggcgagttcaacgggctggtgtaccagcccctccgctacgccgcgccccggtaa

SEQ ID NO: 516372 - DNA, 762 bp, Stenotrophomonas maltophilia
atgacgtcttcctcccgtgttgtcctcattaccggcggcagccgcggcctcggccgcaacgccgccctcgcgctggccgccgacggcgccgatatcgtgatcacctaccgcgcccaggccgaggcggcggccgaggtggtccagcaggtgcaggcactgggccgtcgcgcgcaggcgctgccgctggacgtggccgacagcgcagtgtttcctgacttcgcagttcgcctgcgtgacgcactgcaggcgtggggagccgatacgctgcaggggctgatgaacaatgccggcgagggcctgtacgcgccgatcacagacaccaccgaggcccagttcgaccatgccgtggcggtgcacctgaaggggccgtacttcctgacccaggcgctgttgccgttgatcgccgatggcggccgcatcctcaacgtatccagcgggctggcgcgcttttcgctgccgggcagctcggcctacgccatgatgaagggcggcatcgaggtgttcagccgctacctggccaaggagctgggcgcgcgtggcatcagcgccaacacgctggcaccgggtgccatcgagaccgacttcggcggtggccgggtgcgcgacgacgcgcaggtcaatgcgatggtgtcgtcgatcaccgcgctgggtcgtgccggccggcccgatgacatcggtccggtggtggtggcgctgttgtcgccgtccacgggctgggtcaacggccagcgcgtggaagcctccggtggcatgtttgtctga

SEQ ID NO: 516373 - DNA, 909 bp, Stenotrophomonas maltophilia
atggaccgcctcgacaccctgcgcgtgttcctgcgcgttaccgagctgggctcgttcacccgcgccgcagacagcctcggcctgcccaaggccagcgtgtcgcaggccatcgcccgactggaaaccgacctgggtacccagctgctgcaccggaccacccgccgcgtccacctcaccgccgacggcgcgcagttgcagcagcgcgcgcacgatctgctggacgacatggaggaactgcagaatctgttccggcgtcagcccagcgaactgagtgggcgcctgcgggtggacatgcccggcggcatggcccgcaatgtggtgatcccgcagctgccagcctttctggcgctgcatccgggcctggaagtggaactgagcgccaccgaccggcgtgtggatgtggtacgcgaaggcttcgactgcgtgctgcgcgtgggccatctggacgacagcagcctggtggcccgtccgctcgggcagatgcgcatcgtcaacgcagccagccccggctacctgactgcacacggcgtaccgcaggtgctggccgatctggaccagcaccacctggtgcattacgtcggcactctcggccagcgctcgccgggttttgagtacttcgacggccagcgttaccagagctggccgatgcgcggcgcgctgaccgtcaacagcgccgatggctacagcgccgctgcgctggccgggctgggcatcatccaggtgccggaactgggcgcccgcgatgcactgcgcactggacgcctggtggaagtgctgcccgactgcgtggccgagccgatgccggtccatctggtctatgcgcagcgccgccacctgccccgccgtgtcgaagccttcatgacctggatggccggcgtgctggccgcggagctgcaacgcccgggttga

SEQ ID NO: 516374 - DNA, 504 bp, Stenotrophomonas maltophilia
atgctgtgcatcggcctgcgcgcgcaggtgaacgcggactgccgcgtgctgctgctcggttcgatgccgggtgtggcgtcgttgcaggagcagcgttactacgcccacccgcgcaatcgcttctggccgatcgtggccgacatctgcgggttcgctgcggatctggactatgcgcaacgcctgcaggcagcgaaggccgccggtattggcctgtgggatgtgatcggccgctgcgaacgacgcggcagcctggatgcgggcatcgtgcgtggcacggaagtccccaatgcgttgccggaactgatcgcgcagctgcctgagctgaagctgatcggctgcaacggtggtgccgcgctgcaggcgtaccagcgctgggttctgccccacctggcggccccgccaacgctgctggcactgccctccaccagcccggccaacgcggcgtggtcgttgccacgactgcgccaggcctggcatccgctggccgccgtactggcgacatga

SEQ ID NO: 516375 - DNA, 534 bp, Stenotrophomonas maltophilia
atggctggaagcgcccgctcaagaagtcctgagccgcgccttccgcgcgccgatgaactcgacgcgctgccggccatcgagcagcgcgccggagggctgttgaagggtcatgaggcgtatgcggtgtttgccgcgcatggcctggatctgcgggcactgcacgcaggcctgcaccgccgccagctatgggtggtggatgcggctgacggtggcatcgccggttacctgctggcgggcgaactggcaggtgagttccacatactgcagatggatgtggaccctgcgcatgcgcggcagggccatggtcgtgcgttgttgcgccatgtactggcacaggcgcgggcaggcggctaccgatcggcggtgctgaccacgctgtccgacgtgccgtggaatgcggccttctatgccagcgaagggttcgttaccgtagcggaagcggagtggggcgcggcgctgcaggcagtgatggccgaagaggccgcgttggggtttccgatgcatctgcgggtggcgatgcggctgctctggtag

SEQ ID NO: 516376 - DNA, 393 bp, Stenotrophomonas maltophilia
atgcgcgcctgcacgatggcgttgatgctgcttctgccactgccggcgctggccggcggtggcagcgcgcagacactggaatggcgccaggacgatgcgcgcttgtcgctgcgctcgaccgagggccaggtgcatgtggaggcggctaaaccggaggcacgcttcggcgtgcgccacggcgaccgcatcctgcgggtgaacgataccgccgtgcgccgggtcgagcatctgagcgaggccctgcgccagaccaccgcaccgaccgtgtacctgttgctgcggcgcgacaagcgcgagctgacggtaccggtggatgcggtcgcctggcgcctggcgctggtcgccccgccaccacctccgccgccgccgccccctccggcgccgcagcgctga

SEQ ID NO: 516377 - DNA, 462 bp, Stenotrophomonas maltophilia
atgaaaaagctgcatggagtcgcgttggcggtggcaatcagtgcgctgtccggttgcgcgagcgttccgatgaccgagaagagcgtggtggatacggccaagaccttcccggcaccgcaggacggcaagtccggggtgtacgtgttccgcaacagtttcgtcggcaaggcactgaagaaggacgtgctgatcgatgggcagtgcctgggcgaaaccgccgacaaggtgttcttctatacccaggttgccggtgaccaggaacatgtgatctccaccgagtcggagttctcgcccaacgacctcaagctctttaccgaagccggtcgcaactacttcatccagcagtcgatcaagatgggcgttttcgttggcggcgcgaagctgaccgtggttccggaagcggaaggacgcagccaggtgatgcagctgaagatggcccagaacgggcgttgctcgaagtaa

SEQ ID NO: 516378 - DNA, 1695 bp, Stenotrophomonas maltophilia
atgttccagaatgcgagaagggaattactgggcccgctgcatagcctgctgaagcggccgctggagttccgcgcggtggacagcattgagaggcatctgcgccggttgcttgaaacacgcccggactacgacgcattgtgtgagcttgcgcgctggtacgacgcacagcgggcggccgtattgccgctgttgccggcactgcatgcaaagttgcaggatcggctctccatcattctgcctgccgctgcctgtgtagatcgcgtcgcgaccagcgtgcggcacgggcagggcggcgcggagccgttcccgcaatgtgcgcaggcatcggcgcagatccagctggagcgcctctccgacctgctggagctcgcacagtgcggagcgggcgatccatcgcaggacgacgttgtatgccagaccctgcaggtcatgctgctgagcgaggcgcttgcgctggtgctttccggattggcgtgcgcctcccggcagagtgacggatcgctgctgcttgaacccggcgatgaccatagcctgggtctgcttaagcaggtctggttcgcgcggtggctggacagcaacagcgagatggcgttgatggttcgcattgccgagtgctccgctcaggccgcaggtcgttccacgcaactggatgagttgctgacccatgcggtactggaccgggcactgaccgttacctgggcgtttctggaatcggatgccaccttgcacagaagcatggcctttgcccatgatgctgctcgtctggtcgttttcatgctttctcgccatggagcaggagagatgttcattggacgagcacagctgcgcgaagcagacctggatgatgtcttgcagaccatcctggcgtggcagtcaaaaggattgagaaccgattggatggtggtgccggggccgacgggctacatgctggccggtggctgggacaaggcgctgcgctgcgtgctggtgcagttcgcgcagtcggtcggtgagaccgagctgctgcgcaggctgatcggcggtgatggattcgaacggagctatatccgaagccgccttgaacgccagctgatccagccgcagcgctattccgtccacgagggaatccagaagcaccatgtgctgaaggatccgccagccgatctggatgtggaatacatccttcacgactcgctgttgcagcatcactacttcattcaggccaagcacgccgccaggggcgaggtggggtatctggacagcgtggtcgcggcgctgcagaaggatctcagcgatggcctgcggcagttgcgaggggccaaggcctgcctggaagatggccggctggagcccctgtgggcgtcacgcgggttgtcgggcgtgaccgccgccaacagcagtttcctgctggtccacaacatcgcgcatcttgacctgcaggtgaccgacgatggcatcgcgctttacgactggcggacgctgcggaatctactggatgacgcggccgtcactgtcagaaggcctggggagcaggaggtccttcggcgcgctgcttcaccactgagcgtcgccaatccgatggatgtggtgcacacgttgctgtccgaacacggcatctatgcgggagccggacaggccgcgtgggcacccttggccgtcaccagttcgatggagctggtggccggccgtgtgcatatgcgcgccttggggatctga

SEQ ID NO: 516379 - DNA, 603 bp, Stenotrophomonas maltophilia
atgaatagcgtggataaagccgtcgaggcgttcgagcaccggtcgcaggccaacctcaccgcgatcaacaacatcgtcgacgccgccagaggacagcagaagaaggctcttgaactgctcacctcgctgagcgctgcggagcagcggatcagcgagcacacccgacgggtggaggctgcagtcaaaaacactgtcagcgcgcttgatcacaaggtcaacacgaccgtcgccgcacttgccgcgcagaagctcaccgaggcggatgagcagctggttgcatcaacgctgaagctgacagaggccgctgaccgcctgcgcacaatgctgaggggcaccctggtggcgctcgtcatcgtggtcgtcctcgttgccgttgccttcgtcgtgctgatccccggcaaagccgagatcgaccagcgccgtgctgaactgtcgaagctggacaacgaaatcgcagtgaaggaagcgctggtccaggcgaccatcagccggtgcgacggaaggccctgcatccgcgtccgcccggggccggactacacgcgcacatcgccggatcagcgtgaagaagccttcagggtgatctggctgggcgacacccgatag

SEQ ID NO: 516380 - DNA, 741 bp, Stenotrophomonas maltophilia
atgaagctctacgaaaacgtggtcatcggaaacttcctgttcgcgctcggtttccatacccatcgcgtcgcccccgccagcggcacattaccggtgatgatcaacctgctgcagcagacgcccgaagacaagaaccttggcgatgtcctgcttcagctccctggcacagtacgcctgctggagttcaaggcgcgcagcgggcgcaagcgcaaggagcggcagcggcaggcccagctggcaacggcgctgtccggcgacaaccagcatcttgaagccgtttcgcgcgcaatccattggtacctcgaatcagacataaagccgggctcgggctcaccgtcgttggccaagtgcctgttcgttgcctacctggacgccttcaacaaggccaaggccgcacacacgtcgctggaagacatcgcctcggcgatggccgacgaaggggcagatccggcagcggcgattgaaccgtccctcgtcggcaactatctgtcgctggtcaggttgaccgtgggtaacggtgaaaccggagcgggaggcatcgtcatcaactgcagtgccaatggccttgcgttcgccgagctgacggacgtcgccgatctcaagctttcgcacagggcgtggattcagaaatgcgagattgaacgggggagagcgctttccatggtgcacgagcatgaccagcagaaacaggaacagaaacagaaacagatcgccattccctctcaggaagcaggccgttga

SEQ ID NO: 516381 - DNA, 324 bp, Stenotrophomonas maltophilia
atgaccgcacgttccgctcgtcgccctgcaactgaacgcgtcagccagcgcgtcgacccacgcctgctgcgcagcgttcagcaggtggccttggccggcgtggccctggtactggtctggccggccgcgcgtggcagcagcgactggctcggctggctgccgatgtggctggtgggcatgccgctggtggcgtggtgggcgctgttgcgctttccattgccgcgcccggggtggctgcggctggcgcggcgtaccggtggacaggcgcgtcgccctggccgtggcgcggcccgtgtccgccgtggctcgacggccacggcctga

SEQ ID NO: 516382 - DNA, 258 bp, Stenotrophomonas maltophilia
atgtgcgcgcacgccgtctgtcccctgcccgagtcggccctggccggcatccgcgaacgattgatgcagcagttcgtcctgtatcgcagcagcgccgccttctggaatgcgttccagggcatgcaggaagaagtcacccgcgatcacccgcgcgaacacgtgcggctgtgcaacgcgatggccgacatcgcccaggagctcggcgcggtgccgcaggcccagctgatcaatgacaacaccggctgcacgccgcgctga

SEQ ID NO: 516383 - DNA, 3219 bp, Stenotrophomonas maltophilia
atgctcgggttggtcaggaccgcgctcaacaagccttacaccttcgtggtgatggccattttcatctgcatcgtcggtccgctcagcgcactgcgcacccccaccgatgtgtttcccgatatcggcatcccggtcatcgcggtggtctggcagtacaccggcctgtcgccggatgcgatggccggtcgggtggtctccccttacgagcgcgcgctgagcaccaccgtcaatgacatcgagcacatcgagtcgcagtcactggccggcatgggcgtggtcaaggtgttcttccagccgggtgtggacatccgcaccgccaatgcgcagatcaccgccatctcgcagaccatcgtcaagcagatgccggccggcatgacgccgccgctgatcctcaactacagcgcctccaccgtgccggtgctgcagatggcgttctccagcccgaccctgggcgaatcgcagatccgtgacctggcgcagaacaccgtgcggccgccgctcacctcgattcccgggctggccattcccgcgccgtacggcggcaagcagcgccagattaccctcgatctggacccgcaggcgatggcggccaagggattgtcggcgcaggacgtgggcaatgcgctggccgcgcagaaccagatcaccccggtcggcactgccaagctgggcagcagcgagttcaccgtgctgctcaacaacagccccagtgagatcgaggcgctgaacgatctgccgatccgcagcgtcaacggtgcggttgtcaccattggccaggtggcccacgtccgtgatggcgcgccgccgcagaccaacatcgtgcgcgtcaacggcgggcactcggtgctgatggccgcgctgaagaacggcgatgcctccacgctcaccctggtcagccgcatccgcggcatgctgccgcagatcggcgaaacgctgccgccgtcgctgaagatctcgctgctgggggatgcctccaccttcgtgcgcgaatcgatcagcagcgtcgcccgcgaaggcatcatcgccgcgctgctgaccagcgtgatgatcctggtgttcctcggcagctggcgctcgacagtgatcatcgccgcgtcgattccgctggcggtgctgtcggccatcgcgctgctgtcggccgccgggcagacgctcaacgtgatgacgctgggcggcctggcactggcggtgggcatcctggtcgacgatgccacggtcaccatcgagaacgtcaactggcacctggagcagggcaagggcgtacgcgaggcgattctggacggcgccgcgcagatcgtcggcccggcattcgtgtcgctgctgtgcatctgcatcgtgttcgtgccgatgttcctgctcgatggtattgccggctacctgttccggccgatggcactggcggtgatcttcgccatggccagttcgttcgtgctgtcgcgcacgctggtgccgaccatggcgctgtatctgttgaaaccgcatcgggtggagcgaggcgccggtcatcatcccgaagatgccttcctcaaccatcacgaaggtgaccatccgcagccccgccgcgcgcgcttcaccgccaccatggtgcgctggcagcagcgcttcgaagccggtttctccgccacccgtgacctgtaccacgcgctgctgggcctggcactggcccatcgtgggcgcttcctggtcggcttcatggcctgcgtgctgctgtccttcgcgcttctgccgacattgggccaggacttcttcccggccaccgaagccagcgcactgtcgctgcatgtgcgcctgccgctgggcacgcgcatcgaggaaaccgctgcggccttcgatcgcatcgaggcacgcatccgccaggagatcccgccgcacgagatcgatgccatcgtcgacaaccttggcctgccgatgaccggcatcaacatggcctacagcgccagtggcaccatcggtccacaggatggtgacatccaggtctcgctgaagccgggtcatgctgatgcggcagcctacgagaagcaccttcgcgaagtgctgccggccgcattcccgggtgccagcttcgccttcctgccggccgacaccagcagccagatcctcaacttcggttcaccggcgccgctggatatccgtattgccgggccggacgcagccggcaaccgtgcctatgcgcaggaactgcagcgccgcctgcgccacgtgccggggctggtcgacctgcgcctgcagcagcccgacggctatcccaccttgaaggtggacgttgatcgcctgcgcgccaacggcctgggcatcaccgaacgcgacgtcaccaacagcatggtggcctcgctggccggcagtggccaggtggcccccacgttctggctgagcccgaagaacggcatctcctacggcgtggtcgcggcgacgccgcagtaccgcatggacagcctggccgcgctgcaggcgttgccggtgaccggcagcggtggcgtgccgcaggtgctgggcggactggccgacatccagcgcggttccagctcggcggtggtgacccactacaacgtgcagcccacgctggatctgtttgccagcgtgcagggccgcgacctgggcgcggtggcggccgatgtgcagaaggtcatcgacggcatggccggccagcgtccgcgcggcaccgaggttggcctgcacgggcagatcgacgcgctgcatgtggccttcaccggcctcggctacggcctgctggccgcgatcgtgctgatctacctgctgatcgtcatcaacttccagtcctggaccgacccgttcgtgatcatcaccgcgctgccggccgggctggccggggtggtctggatgctgttcctgacccacaccacgctgtcggtgccggcgctgaccggcgccatcctctgcatgggcgtggccacggccaattcgatcctggtggtcagcttctgccgtgagcgtctggccgaacacggtgatgccgccaaggccgcactggaggcaggtttcacccgcttccgcccggtctgcatgacggcgctggcgatgatcctgggcatgttgccgaccgcactgtccaccgagcagaacgcgccgctgggtcgtgcggtgatcggtggcctgctgctggcaacctgcgccacgctgatcttcgtgcccgtggtgttcgcgctggcccattcccgtaaaacccgtactgctcctgccggagaacccctgcatgtctga

SEQ ID NO: 516384 - DNA, 1428 bp, Stenotrophomonas maltophilia
atgtgcgcgtggtcgccggtaacgcggagcctgcgcatgcccgcggttgagcgcgcagcggcgctgatggcggcagccgcgcttgcaggttgttcgctggcgccgacctatcagccgccctcggtggcgatgccggcggcctacgagcaggtgcaagccccggcggctgccgcgccgctgccacagacatggtggcaagcgttccaggacccgctgctggaccggttgcagcagcagttgctgcaggccaatccgacgctggcgttggccgttgcgcactacgacgcggcgcgtgccgccgccggggaagtggcggcggcgcgcctgccgcaggtcggcttcagcaccgggccggtgcgtcagcgccaatccgatgacaagccgctgcgcagtgccacccagccggccatctatgacagcaacacggccacattctcgttgtcgttcgatctcgatctgtggggacgcctgcgcaacgccgccgccgcgggcaaggcgcgcgccgaggccagtggcgatgacctggccgccgcgcgcctgagcctttcgcagcagttgaccgggttgtacctgcagctgaggggtacccaggcgcagcaggggatcctgcatggcagcatcgaggactaccggcaggcgctggcactgaccgaggatcgcttccgcggcgagatcgcctcggaactggacgtgtcccgggcgcgtcatcagctggccagcgcacaggctgacctggacgcgcttgacgcacgcaacgaactggtgcggcacgccatcgccgagctggtcggcgcacctgcgagcggattcgcgctggccgatgccgcgctgccggcgttgcctgcggtgccggccgatctgcccagccacctgctgcaacgccggccggatatcgccgccgccgaacgccgggtgtttgccgccaacgccggcatcggtgtggcccgtgcggcgtggttcccgcagctcagcctgagcggcctgctggggggacagacctccggtggcagcgcgttgctcgaggcaggcaaccgctactgggcattgggcccactggcgacgctgccggtgttggatggcggccggcgcaaggcggccaaggcagaggcctatgcggagttcgatgcggcttcggcgcagtatcgcgcgaccgtgctggccgcgatccgtcaggtggaagaccagttgaccctgttgcgccagctcgacgcccagcacggccacgagcaggaggcagtgagtgcggcgcggcgtgccgagcagatcgcgcgtgaccgctacgccggtggcgcggtcagctacctggacgtggtcagtgcgcagaccgatgcgcgccaggcccaactcggactgcaggacatccagagccggcagctgcaggccagcgccgcgctgatggcggcgctgggcggtggctggtcgcgatag

SEQ ID NO: 516385 - DNA, 303 bp, Stenotrophomonas maltophilia
atgatcagctggaatcggaatgccgtcgccgcctacgcaccggccatggtcggctggtgcctggcgctggccagtggcctgcgcctggaacagctgcgcgacgatcgcctcgcccaggcgatgctgccgctgctgcacaagggcgtggtggcctcgctggtcctcaccctggcgtgcacggtggtggccagcgtgctgctgtggcgaggtggccaccgtgatcgcaacggcatcgatgcgggcactacagcggcgcggcatccatcagcacgaaccggcacggcgcacgctggaaggcgttga

SEQ ID NO: 516386 - DNA, 558 bp, Stenotrophomonas maltophilia
ttgaccgtgacgaagctggacatgcccactgacgactggatcatcaacagccggcggctgcgccttcggccgttcaccccggccgatgccgaccaggcgtttgccgcgatcacgccggggctgacccgctacatggcgttcgaaccgccggtatcggagcaggcctttgctgccgtctggcaggcgtggttgcccaccatcgccgacgcgagcgacatcacgttcgtgatccgccggcacgaggatgaggcgtttctcggcctggcgggtctgcatcgtaccggtgatgcggaaccggagctgggcatctggatcgccgaagcgatgcatgggcagggctacggccgtgaagccgtggcggcggtgtgggcgcacgcgtcccggcggctgcactgtgctgcgttccgctacccggtggccgagcagaacacgcgcagccggcgcctggccgaatccctcggcggcgccccggtcgcacgtgagcaagctgtgaagtacgtcgcggttgtctaccgcattcccgcagcagcaccggaagatgcgaccggcgtcgcctaa

SEQ ID NO: 516387 - DNA, 1434 bp, Stenotrophomonas maltophilia
atgacgttgcgtgccgcattgttgttcctggttacgcacgcacttgtcatcggcctgatcggccctgaagacccggtcggctcctacctgatgctgatggccgctccgctgctggcggcgctggcctgcgcccggcgcgcgcgacgcagccaggccgccttcaagtggcgcctgctcggcgttgccgtcagtctgttctcattggccctgctggccctgctgtaccgcaggatggccggtctggggcctgcacagatgatgctgtcaacgctggttctgtacgtgttctaccgggtcccgctgacctatgtggcggccagcccgggtggcggcaaccgctgcatccgcgcggtggaccttgcgatcattgctctgctttggctgctgtacttcatgcatacgcgggcgctggcgcacctgaacaccgcgctgtggatgcagagcctgagcaccctgagcatggtgcagaacagcctggtgttctgcttcgcgctcatccgcttcctggctgaggacaatcccgaccgccgcgacttcttccggacactttcgatctacgcgctgggctactttctgctggcgctgtacatcaacacggtgcagccccgggcacccgacggagggtggaccgacctgctgatcagcggcctgttcgtgctgctggcggtgatggccggcagcacccggcgctggccggcggtggctgtgccgcgcgatctgcgccgcgtcgtcgatgccggggtcccgctgatgctgccgctgctgctgatgatggtggccctgctggtcgcccgcctgcagccgttcctggcgacggtgggcttcatcggtgccatgctcggttacgccctgcgcagcgtgctgacccaggtcgagatccagcgccagcgcgatgagctggaactgctggcccggcgcgatcccctgaccgggctgggcaaccgccgcagcttcgatgagtcactggccggcgctcatcgccgtgcgcgccgtcagggcctgggactggcggtgctgatgatcgacatcgatcacttcaaacggctcaacgacacctacggacatccggaaggcgaccggcggctgcgggccgttgcggcgatcctcgagggctgcctgcagcgtggcgacgatctgctggcccgctacggcggcgaggaattcgtcgctgccctgccctcgcccgacactgcccacgcagagcagacaggtgagcggctgcgtgccgccgtggcagccgccgcgctgccggccgccgaggacagcgtgacgatcagcatcggcgtggcctggcagccccctggcgcggagaccgcgccgggtgatctggtcgaccgcgccgaccaggccctttaccgcgccaagcacgctggccgcaactgcgtgcgtaccgccacggcggccgctggcgaacgctccgaccgtcgtgcctag

SEQ ID NO: 516388 - DNA, 381 bp, Stenotrophomonas maltophilia
atgacagcgttgcaggacctgagggtgctggtggtcgagaatgacgagatgagtgcggccctgctgcagatgcagctggtgcatgctggtgcgaccgtggtcgggctggcggcaagcgtgtccgaagccctgcagctgttgtcggaatcgcgcccggacgtggccctgctcgattatcgtctggcccgcaacgaaaccagcgaaccggtggcggctgcgttgttggcatgcggcgttcccttcgtgctggccaccggcatgctggccgagcagattcccgaatcgatgcgcagcggcgtgctgctggtcaagccctatctgtcggccgacctgttccaggcactggtgcgcgcggtcggtcgttccagcgtcaaggcctga

SEQ ID NO: 516389 - DNA, 780 bp, Stenotrophomonas maltophilia
atgccggtggtggtgatactgctgggtgcattgctggccatggtggtggcgcatctatggccgcgccgcaagggcgaagcgacgccgccttcggcggcaagcatggtgctggacatgctgctgatcggcctgctgtgcgggcggatcagtttcgtcgtactgaatttcgggctctatcgccaggcgccgtggagcatcctgcagatcgccgacggtggctatcatcttgtcgtggtattggccgcgggccttctgtggggcctctggcggctgcgtccatggcgtgttctgcgtgttccggtgctggccggtgcgttgctgggggtggcgttctgggcaggtggcagccatctgttggcggtctggcagcaacagcggatgccactccctgcggtgcaggtggtggacctgcaggggcggtcgatcgatctgcagcagttccggggcgcaccggtggtgctcaatctgtgggccagctggtgcgggccctgcaggcgcgagatgccggtgctggccgcagcgcagcaggctcacacaggcgtgcagttcgtgtttctcaaccagggtgaaaccgcggacgaggtccgggaattcatcgccgcagagcggctggcgctgggcaacctgctgctggacgactccgcttcggcatccaccgcgctgggggtgcaggcttatccttccacgctgttcttcgacaaggatgggcgcctgcgcgagctgcacctgggcgaactgaccgcggccggtcttgaacacaaactgcgccggctgcggtag

SEQ ID NO: 516390 - DNA, 771 bp, Stenotrophomonas maltophilia
gtgtgcctgttcgtcttcgcgggcgtggccggcgcggagccgatgccgggcacggtgatcgaactggccagcggcgagcccctggacgaggccgcgttcgtgcagcgtgcggccggcgcgcaacggctgctgctgggtgaacgccatgaccttggcggcgaccatgcggcccagcgctggctgctgaatgccctgccacggaaacgccctcagcgtgccctggtgatggagatgatcgccagcgagcgccagccgcgcctgcaacgggtgcaacgctggctggccaagggcaaccatgccggaggcgaacgccttcaggaactgctggactgggatgcacgctggccgtgggctgcctatggcgggctggtacaggccgccactgatacgggcattgcgctgttcggcggcaacctgtcgcgcaccgaggtcaacgcgctgctggcctctcccggagccgtgcagttcccgggggccaccgcaagacaacgcctgtccgccgtggtgctggcccagcacgcagatgcagcgcccatgctggacggcatgctggccgtacagcaggcccgcgacaggcgcatggcgcaggtgctggccgatgcccccgcaccggcattgctggtcgccggccgctggcacgtgctgcggggcaccggcgtgccgggctacctgccgcctggcacgccggcgctggtgatcgtgcttgcctcgcccggcgaagtcgttgacgcgtccgacgccgacctgctgtgggtgctcggcgatgagtga

SEQ ID NO: 516391 - DNA, 927 bp, Stenotrophomonas maltophilia
atgaaccaggagacgatcgcacgcgaagcggcgcgctggtggcttgatggccatgacgggggccgcgacgaatccgcgttcgagcagtggctgcaggccgatccacgccacgccgcgcagtatctgcacctgcagcagctgtggcaggccggcgcagccctgcccagcctgcaacgccagcaacagcgccatcagcgccgccgtctgcgcgaggccggcatcgcggtcctgctgctgtgcacactcgggctgtacagccgccatgcctcgccaccgcctgcacaggtcctgcgtaccgccgccggtgagatccgtgacgaacggctgccagatggcacgcgggtctggttgtcgccgggcagcgaagtgcatgtccgcatcgatgcgcagcgccggcagctgcagctgcaacacggccaggccggcttcgaggtagctgccgatgcggcccgcccgttccaggtgcacacgccgcagggcacggtgaccgcactggggaccgcgttcgacctggccgtgctggacaacagcagccgggtcacggtcaccgagcatcgcgtccgcgtggacagtggcaacggccacaccgtggttgccgagggagaacaactgcgcttcgacagcgtcggtcagggcatgaccgtgcccgccgatccgggtgcattggcctggcgcgggcggcgcctgcactgggtctccacaccgctggacgaggtcgtccaggaccttgatcgctggcatggaggccacacctggatcgtcggcgcgcgcctgcgtcagcagccggtcacgctgcttggcagcaccgcaggcgccgcccacagccgcgaccagctggcggcgcagctgcatgtgcgcgtgctgcgccttggcggcaatctgcaggtctggctgcccccgcgcacggggcgacgcgatgcaccctga

SEQ ID NO: 516392 - DNA, 510 bp, Stenotrophomonas maltophilia
gtgtccacgcctgtcgaacagacggatgtcgcgcagctgtgcgcggcccattaccggccgctgcatgcccatgtccgccacaaactcccgcaacgctgcgacgccgatgacgtcgtccaggaaacctggctgcgcttcctgaaggtcgctgccagcggtctgctgggcaatggccgcgcctacctgtatcgcgttgcccacaatctgattgccgaccattaccgccaacggcagcgtcgccgagaagcaccgctggaggatgcgcacacgctggccctggtcgatccggcaccgcagcccgaacagcaccttctcgacaccgaacagttgcgccacctcgatgcgatcatcgccgcgctgccaccacgctcgcgccaggtgttcctgctggcccgggtggaacagctggggctggctgaaatcggccgccagctcggcatcagccggcagaccgcacacggtcatctgctgcgtgcgctggtcaccctgcagcgggtgcccggtgcatga

SEQ ID NO: 516393 - DNA, 273 bp, Stenotrophomonas maltophilia
gtgcgtctggaacgcctggcgtcttccctgcagggcgatcaccgcctgctgtgcctgtgcctggccacccggcatcccgatggtttcctgcgacaacgcgcggtcgaggcaacggggcaggcgtcagcaccgtgggtgctggcgttccatctggcgctgctcaacgagtatgtcgaagagatcgctctggcaatcaaccatcatgcccgccagatcggcctgaccgcttacgcgtgcattgaccgacgccgcagcgcaccggcgccaccatag

SEQ ID NO: 516394 - DNA, 387 bp, Stenotrophomonas maltophilia
atggataccactgcagaacatgaaatccaccacctgcacgacaaactgcaggcctggttccgtgccgacgtcggctccgatgcgctcgatgatctgatgacgcacttctgtgcggacttcagcatggtcggcatcgccggccgtcggctggaccgagatgcggtgcaggcattgttcgccggtgcccatggcgcgcgaccggggttgcagattgccatcgaggccgtgcaggcagtggaggcgccatcaacgttggtggtgctgcgctatcgcgaaggccatttgatcgatggcggcaaccgcacatggcgggagtcgctggcggtactgcgtcaggaacaggggcgctggtgctggctggcgctgcatgaggttcaaacggcctga

SEQ ID NO: 516395 - DNA, 621 bp, Stenotrophomonas maltophilia
atgctgatcatgggcggatgtggcgggtcggcccccaaagcgacgttcgagacctctcctgcactatccgatgcggatctgaaaggtctttacccgggcacgctgctgacgcaggtggtgttcgaggacatcgacggcgcgggcctgctgctgctttcccgcagcgaaagcacgatgcccgccgaaggtgatgaggatccggtggagcagatcaccctgcgcgcggaactgtaccggcgtgcggaccaggcggcgccctggacgtcgcgatggagcgtcgacgacccgattcaatgcgaaggcctggacctggacgcgggctatttcctggaccaggtgacggcgaccgatctcgacaacgatggccgcgccgagctgaccctggccagccacagcttctgtggcggcggggttgacccgcagcagctgcgcatcggccttcgccagggggagcagtactacgaagtgcggggcgaatcgctggtggaggtggagggagacgcgccgttcggtggcgagcgccaggatgattctgcgctggcttcggcttcgccagtgctgcgcgcgcacgtggataaggtgtgggaagcgatcaagcgcggcccgcccggcgcgccgtga

SEQ ID NO: 516396 - DNA, 261 bp, Stenotrophomonas maltophilia
atgtctacctatgaactgaagccaatcatcatcaacggccgcacgctgtttactgccgaagtggattgtgacgaccgggacgcggccctgtatcgagccacctcagcgtgtcatgtggcattcatgcccgtggccaatgctcacttcttctatagcaatttcattctcagcaatggagcgacttccacatcgtgggtcgatgagcggacggtcatggacatctggaaaagcctggccagtgccactggcgggcatggatga

SEQ ID NO: 516397 - DNA, 567 bp, Stenotrophomonas maltophilia
atgccttccgttcttcgagccgccccgctgctggccggcctttgcctggccgcctcctgtgcagccaagccccctgtcggcgataccctggaccgcgcctgcgccgcagtcgccatcgacgatcggatcgagctgctccctctggaaggaaagcacgtcagcgcctgtccgcccggcgacgatgaaggctgcccgtacagtggccagcagggaaaaacatcgctgagcgacacaccggatctgaacaaggatggacgcaaggatgccatcctgacctacttcggcagcagttatggcgatatcgacgtgaccgacaagctggtcctggcccaatgcaaggacggaacctacatccgtcttctggaaggaaagttcacgacactgaccgctccggccatgccgcatgccacgtggccggctctggaagcgacgaggaactgcccgctgggccgaggtgatgcggtccgcaccgaaaagatccagctgaccttcgatagcaaggcagcacagtatcgtggacctgcaggcctgaatctcgccgcggcctgccaggcccagggcgactga

SEQ ID NO: 516398 - DNA, 1797 bp, Stenotrophomonas maltophilia
atgatctacggcaatcacaacctgcaacgaggcgaccacgacggcacgcctgcaaacaaccggccgcctcgctggggggccgtcgacaatccgccgccacccacgcccgccaacgcgcagacgccgcagaaccagggcggggcgacactggcgattccgcagcacgtgcgccagctccagcaggacctgcgcaccctgggcttcatgttcgtcggcacacccgatggtgggttcggtcgcggcaccgagtgggcggtacgcgagttccagatctacgccagcatggccaatgccgcgcaactgaaccagggacggctgcacggttggcagccccaggcaggcttgaccgcaccggaagtgatggcgctgggactgcgccccaactccaatccaccggaaagctatcacgtcgcctcattggatcgggtcgccaacggatcgcgctacaccggcccgatcagcggcgtgatgaatgccgacacgcgcaccgcgatggaacactggctacgcaacaactatcgctgcccggtggtcatcgaggcatggcaggttgccaccggcaacaaccagcgcaccacaccgttcaccaacggcatcaatatctggaacttcgacgagatcacgcagggcaccgtgcgcaatgccgccaatcgcgtggtcgcccgcgtgcggatgttcagcagggacttcaccggtcattacacacttccgaacggccgccgcgatgaccagtaccagtcgctgggcagctacgcgcggttcatgacctacggcggcccgatgagcgaggtgcccaaccatacctgggccgaagcggaaatgacgcccgaacgcctgatcggtccagcgacgaccacggcaatcctggccgccacacccaacggcgccgcagcgtccacctatcgtgttgtgcgcgccacggccgagcaggaatgcatgggcatgttcgacagcatcaacgcctacgatgacgccctggtctctctcggcccgtgccattggaccatgggcctgatgcctgccggcggctatgacaatggcgagctgcctggcttcctggcctacttcctgcatcgcaaccaggccgactaccagcgctatctcggcaatctgggtctttatccggcgacggcctgggccggcgtcaacacggggccgctctgggaccgcaccggtcgcaagtatgtcggctggatccgccatcacaacgaacagacgcagcctgcgcaggcggcgaccggcctggcccagctgcccatggtcgaccgggcaaccgtggaggccaactacttcaagacctggcactggttctatcgtcttgccatgatcggccgcacctgcgcgaacttccagcaggcgatgtgggacatggtccgcttccgcatccgcgacatccgctcagccccaattgcagtcaatgtgggagccgtccacatcaacgcaacgctgggtgacatctacacctcggaaaagtcggtcgcgatcctgctgcgctggcatatcttccgtccgggccacgtgaccggggcccgcgtcagggattcgttgacccgcgccatcaacggccatgcccagctgaactgggcgacggcaccggcgcaatggaccaacgcacacgagcaggcgatcaccgcgcaacttctcactgacgcgcttacggtcaacgacacgcaggatcgtctcgccaactggccgacctatgccgggcgcaacagccgcaactacacactcaacaacgagctgggcgcattgcgtgatggccgcggctccttccacttcgataccacgggaatatga

SEQ ID NO: 516399 - DNA, 480 bp, Stenotrophomonas maltophilia
atgggggccgataccaaccccgccattcccgagcaccttccgcgcggcacgcaactggtgccgcaacaattcgggctgcgcctggttgaacagttcggcctgcagggactggccggcaagccctacacactggacatcggcggacaacatttcgagggcgaactcgcctccgatggcagcctgatgcatgagatgcccgaaggcgcgaagcaggccaagctgaaggtgtttccgttcggcgccgacaaccatccctgggaatggacactcgaccttgccgcacagaaacagaccgacgagcacaccggactgcaatcgcgcctgaagaatcttggattctacgatggtgcggtcgatggcgacttcggccagctcagccgcatggccatgcagcgcttccaccaggcgcgtgagctggttgggctgaacacgcccagccttcccggcgtcacctcgctgggcaaggaccacgacatctag

SEQ ID NO: 516400 - DNA, 2841 bp, Stenotrophomonas maltophilia
atgaaactcaagtccagccagctgcgtgacgcagttgtgatcgcgcttgtcgccggtgccagcaccgcgacagcccacgcccaggaagccaccaacctcgaccgtatcgaggtcaccggttcgcgcatccgccaggtcgacaccgaaaccgcacagccggtgatgaccatcagccgcgaccagatcgagaagcagggcttcaagtcggtcgccgacatcctgcagaacatcccggccgctggttcgcctgccatcagccgtacctccccgctcagctcgggcgaagcggtcggcggttactacatcgacctgcgcaacctgggtgccaaccgcaccctgatcctgatcgacggccgccgcctgggcatcaccaacgacggcctgcaggacgttgcctcgattccgtcggcgatggtcgagcgcatcgaagtgctgaaggacggcgcgtccaccatctacggttcggacgccattgccggcgtggtcaacatcatcacccgcaaggacttcgaaggtgccgaagccaacgtctacatcggccagtgggaccagggcgacggcaagcgcgagaactacgatttcatcatgggcttccgtggtgagcgtggctcgctgaccgctggtgtcgagtacaccaacgaagatccggtgtgggccaaggaccgctggttctcccgcgaccgcttcccgaccggcgagaagagcgcaccgcgcccgggcggcctgtccggtacctcgcagtggggccgtttcgtctacaacaaccagctctacacgctgcgccgcgacgttccgggcctggatccgtcgcagttctccagctaccgcctggtcgacccgaccatcgacgtctccaacccggcgctggcctcgaccgtgtacagcggcatcaagcgcaagtcggccttcctgaacggccgcttcgacttcaccgacaacgtgcgcttcgacaccagcgtgctgtacaccgaccgtgattcgttcgcgcagaacgcgggctatccgttcttcagcgacgacttcgccctgagcgccaatggcctgtccgctgacagcgtgttcaacccggtcggcgaagacgtccagtacgtgcgccgtggctgggaagtgccgcgcgaagtccgcaacagcctgaccaccacccgcttcaccggtgtgttcagcggcaccttccagaccggcgagcgctactgggactgggaagccggctatctgtacaaccagaacaagggcacccagatcagcacgggtaacctgaacacctacgccgttggccaggccaccggcccgtccttcatcaatgccaacggccaggcgcagtgcggcacgccggactcgccgattccgctgggtaccggccccgggtcgtgcacgccgtggaacccgctgatcgccaacggctacaacgcgcccaacagcctggccgatcccaacgtccaggcctacctgtaccagccgggccaggcgctgtcgcgcaccaccaccaagaacttcttcgccaacatcgccggcaccatcgcaaccctgccggcgggcgatctgggtgtagcgctgggcatcgagcgtcgtgaagagagcggctcgttctcgcccgatgcactggcccagaccggcatctcgaccgatctggccgccggcccgacccagggtggctacaacctcaacgaagcctacctggaactgcaggttccgatcctggccgacctgccgggcgcgaaggaactgaccctgaccgcggccacccgctactcggattacgacaccttcggcaatacgctgaacagcaagttcggcctgaagtggaagccgatcgactcgatcctggtccgcggtacctggtcggaaggcttccgtgcgccgaccgtggctgacctgtacggcggcatctcgcagaccttcccgaactacaccgacccgtgcgacaccagcttcggccctgcggccggcaatgcacgctgcctggccgatgtgccggccggcttccgccagccgaacacctcctccagcggtccggccccgggtccgggcgaggccagcaacacgccgttcgtcaccggctcgaccccgggcctgacgccggaaacgtcgaagtccaagaccatcggcatcgtgtggagcccgggcttcctcagcggcttcaacacctcgctggactggtggaacatccgcatcgacaacaccatcgttgccgatacgccgaccgacctgctgaacgactgctacctgcgtggcatcgagtcgcgttgcgtgggcttcacccgtaacgccaacggcaacatcacccagctggacttcgcgctgcgcaacgccggctacgtggagaccgagggcttcgatttcgatgtgaactaccgcttcgaaaccggcttcggcaacttcaccacctcgctgcagaacacctacgtcaccaagaacgagatcaagtcggacaacaccgacaatccgccgacccagctgaacggcttcgagggcaacttccgcctgcgctcgaacctgaccgtcaactggcagctggacaacctgtcgatctcctggaccgcgcgttactactccggcaccaaggaagactgctacttcgacgaccgctgcaccctgccgaacttcagctcgcccgataccctgggccagatcacgccgaagaacgaactgggttccaacaccttccacgacctgcaggtgtcctacaacctgccgtggaatgcgacggtggccgttggcgccaacaacgtgttcgaccactggtcggcaccggcctacgcgcagccgaactcgggctactcgtactacggtggctacgacatcggccgcttcgtctacatgaagtaccagcagaagttctga

SEQ ID NO: 516401 - DNA, 921 bp, Stenotrophomonas maltophilia
atgtccaacaggagtgcgcagcggcaggcgctggatgaagaccagctggaagcatgggcattccatgcatttgacctggtcagccggcttcgcaagggagctttggagagaacgctgatatccgacgcgctctccggacaggagggtattggaaggccgctgaagggcaatctggggctggtgaattttgccgcgcgccccttcggtgatcggctcatcctctcagacgtggttggaccaagctcccgggcgttggcaaggatgatcaaggttgcccgccgggagctggagtttgatgtccttacctgtacgcggcggggaaggctgaatgtgttgcgtagaggcaacgatctggagcccgaatcatggctcagcagcgttccccagttgactgcgccgcggtttcggcctcgtttccagcaagcgttcaggcgccccacccgtcgtttggacagcccccgggcggcagcgcgatcgcggatcgcgcagaagcgatcggaggaactgcgcagcgagaaggtctatcacgactcggaattcctgctcttgaactacttcgacctggcaatgcggcgcctttatcgattttcgttctggaggcggatcgaaggcgtggtgtacctctttacagagcgacggccctgcgaggattgctgtcacgtcatcacgcgcctgctccgtcgctatcgcagggtccagattgcgatcgtccgggtcacgggacaagggggacgggagtggggcgcattggagcagctctcggagcatcccagggtgcatatgcgcaagttcgagttcctgccactggctgttgaagaattctcgccattggaagagtctgggatgggcccgtggacgttaccccatcccgatggcacgcccaggaggggatgggtgccgaaaggagcaacgcagcgttga

SEQ ID NO: 516402 - DNA, 1347 bp, Stenotrophomonas maltophilia
gtgtccgtgagtgaagcccatccggctccggccgttgccctgctggcccgccctggcgcggcgcgcgagcgcctgcgtgaggcgctggcgcacgccgatgtgcagctggtgctggaagacgatccgaacggcctggaaccgcaggcgctgcaggccgcgcatccgcagttcgtggtgattgccctggaggccgccatcgaggatgcgctggagcgcctggagccgctgctgtccgcgccggacctcacgctggtgttcgatgaagccgaactggccgcgcgccgggacggctgggaagcgcagcgctggggccgccatctggctgccaagctgcacggccaccagcaggtgctgccgcccggcgcagaggaagaaccgagcctgcagctggaaccgggtcacccggcgcctgcaccggcaccgcgcgaggaagccctgcagccgcacctggaccaggccgcaacctgggccgacgaggtgcccgcggacggcctgtactcgccaccggcgcagctgcgcgagccgatcgcgctggagcaggcgttgtccgcactgcagccggtgctgcccgaactgcctgaagcaccgccgctgcctgtgccgccggaggtcacgcccgcgctcccggtggcgccgccgatttccttcgaccacaccgcgtggtcgctggtcgaggacacctcgggcgaccacgcatctgccgacggctcgcgcgacacggcggctgaacaagcatcgcccgcattcgataccgatcacctgagcctggtcgatctggacgcggcggcgccggtgggcgcccgcgctgcatcgttgctggtgctggccggcatcggtggccccgacgcgctgcgtcgcctgctcggcgcgctgccggccacgctcagcgtgccggtgctggtgcatatgcgccttgatgggggccgttacggcaacctggtcaagcagatggcgcgggtgtcgccgctgccggtgcagctggcagaagccggccagcgcgccgtgcccggcgaagtgcacgttctggccgatgacatcggcgtacacgtagccagtgatggcctgcatttccggaccgatgccgacggcatcgcgatcgcggcgctgccggccgagcacaccgcgctggtgctgctcagcggtgccgacctgggccatgtcggcccggcgctggatctggccgctgccggtgcgtgggtggccgggcaggttggcgaaggctgctatgacccggctgcagccacggccgtggttgccgccggcggtgtgcccggcgagccacaggcgctggcgcaggcgattgctgcgcgctggggcggggaagacgacaacggagaagcaccgtga

SEQ ID NO: 516403 - DNA, 6561 bp, Stenotrophomonas maltophilia
atgagcagtctgcgcgatgcgatgagccacgcagcgctgggctgggtcaagcccgagctggacgagaccctgcgccaggtgcgcaatgaggtcgagtactacgcggaagatccgaccgatgccagccgcatgcgcatctgcgccggctatctgcaccaggtgcagggcaccctgcgcatggtcgagctgtacgccccggcgatggtggccgaggagctggaacagctggccaacgccatcggcggcggccatgtgtccgatcgcgatgaagcgtgcgcgaccctgatgcgcggcagcgtgctgctgcccgactacctggagcgtctgcagaacggtcaccgcgacatcccgatcgtgctgatgccgctgctcaacgagatccgcgccgcgcgcggcgaagagggcgtgcatgacagcgtgctgctggccttcgcgccggacagcatcaccgccaccgaagccgagctggaccatgcccgtggcagcctgagtggccgcaaccgcgagctgctcgataccgtgggcagcgcggtgaaggaagaactgctgcgcatcaaggatgcgctggacctgcacctgcgtaccggcggcgcgccggaacagctgcagacccaggccaacgagctgggcgcggtggccgatacgctgggcatgatgggcctgggcgtggcccgcggcgtggtcgtgcagcagcgcgacgcgctgcgtggcgtggtcgagggccgccagcagatcgacgagagcctgctgctggatatcgccggcgcgctgctctacgtcgatgcgtcgctggatgaccaggtcgcccacctgggcgccggtggcagtggtgaggacgacccgagcgcagtggaaaaccggcgtacggtggaggtgctggcgcacgaagccatcgccaatttcgccgcggcgcgcgaacacttcgtcgccttcatcgaaaccagctggaaccatgctcaactgcaggacgtgccgcgcctgctcggcgatgtcgccggtgcgctgcgcatgctcgatctgggcaccgccgccgactacctgcgcggcgtgcagcagtacatcgaggccgaactgatcggccgccagcgcgtgcccagtggccgccagctggacaccctggccgacgccatggccagcctggagtactacctcgaagccctgcgtgaccgccggccgggccgtgaggacattcttgaaatcacccgcagcagcctggaagcactgcgctactggccactgcccgagcgcaccgccagcgcaccggcggccgccacgctgcaggcggtcgagcgcgagccgatcgacctgcacggcagcccgttgcagccggagcacgttgatatccccgtgcagcaggccgctccctctccgggcgcggtgccgctgccgctgccggacttcaccttcgatccgccgccggtggtggcggacaacccgctgatgttcgatgctgccggccattcggttgccgcggccatcgcaacggcgtccacgaccgatgccgagtcgccgctggtgtttgctgcctccagcgcgcccgcaccggaggtgccgcaatgggacctggcgccgttctatccggatgccgaaccgctcgcgccgtcttccgacgaacgcagcccgaccttcgccagctttgatccggtcagcttcgagctggccgacgccgggcaggacgccacgccgcagtggacgctgtccgaagcgccgctgccggtgcaggacgaggtctccacgctggtggccgacgacgcggttgccgcaccggcagcccgtgtcgccgcgatcgatgccgcacccgtgttcgatccggtgatggccgagcacgacgcggctgccgcgaccgatgaggtggtgttccgcttcgacgccgacgcgctggacaatgccgacgacgtgctgtcgctgcatgcgatggagacgctggcgctggaggacgacaccggtctgcatgtgccgctgcagcaggtcgatgccgaagccgccttgccggtcgacgacgtgccactggcggcggtagctgatgccgctgccgacgggctgccggcaccggcggtgtcggtgatcgacatcgacaccatcgccccgattgatttcagcgaagccgacgcccagttcttcgccgagctgagcgcggctgcggccgacttcgacccgcaggcggcggctgtaccggccgatgccggagccggcgccgcgaccgaagccggcttcgaggccggtttcgatgacgatgccgaaaacatcgacgaggacatccgtgaggtgttccttgaagagttcgatgatgagctggccaacctcggcgcgctgttgccggcgtggcgcatgcagccggacaacaccgaccggctgcgtccgatccggcgcatcttccacaccctgaagggcagtggccgcctggtgggcgcacgcactctgggcgagttcgcctggaagatcgagagcatgctcaaccgcgtgctcgagggtacgcgtccggcctcgccggcggtgctggcgatggtcgatcatgcccatgccgcgctgccgcagctgaacgccgcgttgcgccatggccagcgcatcagcgtcgacctgcaggcgatgcaggccattgccgaccgcgtgggtgccggtgaggaaaccttctacgtgccgctgccggttgcggccgcgcctgtcgcaccgaaggtcgaggccgaggtagagggcgaggatgagatcagccgcctgctcgaggccgaagccatcgcttcgacgcagcccggatcggaggcggacccggcgctggaagcggcggggacgccggccaatatcgacagcgtgctgcgcgagatcctcgaagccgaagtcgaggtgcaccagacgacgctgctgaactggctgcgctcggcccagcacgcgccgcagccggtcagcgatgcactgctgcgtgcggtgcacaccatgaacggcgccttcgcaatgaccgaggtgccggaaatcaccgcggttaccggcggtgccgagtcgtacatcaagcgtgccttggccgcagacgtggtgccgggagacgagggcgtgtccgcgctggatgccaccgcgcaggcgatcaccgccaccatggaggcgctgcaggccgagcagccgcgcatcgcgccgcagccggcgttggtgcagcgcctgctggcgctggccggcgagctgcccgaagcgcgttggccgatggccgggttggaagaggacgagggcgatctggcgctggacgcggacgccgacgtcgatgcgcaggccgcgccggaactggagccggttgcagccgatgcttcgccggagcagaccaccgcgccggtcgaggagagcgatctgcaggtcgtcgaactgaccggcagcgatgatctctcgcgctacttcgacgctgcatggccgtcggagcctgccgagggcgagccttcggcggccgtcgatgaatcgattgagatcgatccactgcaggtgcagggcagcgatgccgacatcgccgaagacgtgctggaagcagcgcccgcggcgtcgctggtcgacgcggctgacctgaccgtgatcgatgacctctcgccgtatctcgatgccagcgcgctgccggtggatgaccgcgatgtggacgagtctgtcgcggtcgacgaagttgacgcaattggcctgaataggcgttcgcccggcgacgttgaggttgccgacgatgaaggccacgacgacgctgctgcactgccactcgacagcgagctgtcgagcctgcaggatgaaatggctgcgccggggtttgccgaaccggtctcgctggaagccgcgctcgaggccggcctgcacgtgatcgacgaagaacagcccctggccgacgacgggcaatggcccgtgctcggcctgcaggccagcgaactcgcgccgggcgaggcagatgcctttgccgaggatgcggacgtcggcggggcggcggcggtcggtgaaggagagagcgccgaccagccgtccccggccacggtggatgaagacagcgccgcagacgcaccgcaggacaccctcgcgccggtgcgcttcttcgaactggaagaggcgccaggccagccgcgtccggcggctgatgcacccaccgctgaggccttggtgccggtcctgccgtctgctgacgccgccacgatcgacgcagcggtcatcgccgccacggccgccccggcgctggacgacagcgccgatgcactcgacttcagcgtgtacgaccgcgaactggtcgacatcttcgtcgaggaaggcaaggatctgcttgaccactgcgatggcctgatcagcgagctgcgcgacgcaccccaggaccgggaggcgctggcaggactgcagcgcgacctgcacaccctgaagggtggcgcgcgcatggccggcatcaacgccatcggcgatctgggccacagcatcgaatcgctgctggaagcagtggccgccggccgtaccgagatcgagcgccgcgacgtgcagctgctcgagcgcggtttcgaccgtctgcaccagatgttgacccgtaccggcgcccatcgcgtggtggagccggcgcaggacctggtggaggcatttgaggtccgcaccactaccgatatcgccgcagccgcggcggctgccagcgcagccatcgcgaccggcgtcgaggaaaccgcatcggcaccggtcgcaggttcggtgccggcactgctggatgcgccgttgtcggcaccgctgccggtcgagggcgtggtcgatgaagatccgctcgcgcgtccgcagcaggaacaggtccgcgtgcgcgccgacctgcttgatcgcctggtcaaccatgccggtgaagtggcgatctaccgctcgcgcctggaacagcagctgggtgccttccgtggcgcgatgggcgagctggaacgcaccaatgcgcgactgcgcgaccagctgcgccgcctcgacctggaaaccgaggcgcagatcgtcgcccgctaccagcgcgagcaggaccaggccgaccagaagttcgatccgctggagctggaccgcttctccaccctgcagcagctcagccgcgcgctgaacgaatcggcggccgaccttggcggcctgcagggtgtgctggacgatctgtcgcggcagtacgattcgctgctgcaacagcagtcgcgggtcagctcggaactgcaggacggcctgatgcgtgcgcgcatggtgccgttcgatggcctggtgccgcgcctgcgccgcgtggtccgccagtccggcatggacaccggcaagcaggtgcacctgaccctggaaggcacccacggcgaactggaccgcaatgtgctcgaccgcatggtcgcgccgctggaacacatgctgcgcaactcggtggcgcacggtctggaagcgccggaacagcgtcgtgccgccggcaagccggaggaaggcgagatcgccatccgcctgcatcgtgaaggctcggaaatcgtgctggaagtggccgatgacggcgccggcctggaccgcgaagcgatccgccgccgtgccatcgaccgtggcctgctgggcgccgacgcgcagcccagcgaacaggaactggacaacctgattttcgcctccggcttcagcaccgccgaccaggtcagccagctggccggccgcggcgtgggcatggacgtggtgcgcaacgaagtacgccagctcggcggctcggtcgacatccagtcggtgcgtggccagggcgtgcgcttcaccctgcgcctgccgcagacgctggcggtcacccaggcggtgttcgtgcagatcggtgaaaccaccttcgccgtgccggtggcctcggtcagtggtatcggccgcctgtcgcgcgagcgtttcgaagcggccgacagcagctaccgctacagcggcgaagactacccgctgtacgacctcggcagcctggtcgggcaggccccggcgcgtgccgatggccaggaccaggtgccgctgctgctggtccgcgccggcgacctgcgcgctgcggtggcgatcgaccaggtgcttggcaaccgcgaaatcgtggtcaagccggtcggcctgcagatcgcctcggtaccgggcatctacggcgccaccatcaccggcgatggccgcgtggtggtgatcctggacgtcgcgccgctggtgcgccgtttcctggccaacccgacgctgccggtgctggccaacgcgccgcgccaggagcgccaggtgccgctggtgatggtggtggacgactcgctgaccatgcgcaaggtcaccgggcgcatcctcgaacgccacaacttcgaggtcagcgtcgcccgcgatggcgtggaagcgctggaacggctggaagagcgcgtgcccgacctgatgctgctggacatcgagatgccgcgcatggatggctatgagctggccaccgccatgcgcgccgatccgcgctacaaggatgtgccgatcgtgatgattacctcgcgcagcggcgacaagcaccgccagcgcgccttcgagattggtgtccagcgctacctgggcaagccgtaccaggagttggacctgatgcgtaacgtgtacgacctgctggggatcgcccgtgtccgtgagtga

SEQ ID NO: 516404 - DNA, 345 bp, Stenotrophomonas maltophilia
atggcaaagacttcttcatgcaaaggctcgcgctttctgtacttgtcgttgcctttggtgcctcgcagactgtcgcgtgacagttccgcagtggatgtttgcatggtcaatatcaaagtggtactgacagatgagctcagacaattcgtggaccaggaagttcgtgaaggcgactatgccagcgcttccgagtacgttcgtgaccttgtccatcagcggcggcgaagcaaggctgaagacctgctgcgccagttgatcgcggaaggcgtcgcttcggggcttcctgcccctctgcccccggggcacttccagaatctgcttgaacgcgcatcgaatcgagaatga

SEQ ID NO: 516405 - DNA, 663 bp, Stenotrophomonas maltophilia
gtgaaaggcgagaccgtggtgcgcatcgccctgtgggtgttgtggagcctgtggggcattgcctgcatggtgttggcgctgggcgccgctgccaatgccctggcctcgcgtacgcagacggtgccgctggtgctgagtcctggcgcaaccgcccagatcaccgtctaccgcctcatcgatgaccaactgcggctgcgcctgcgctatgccgcggacggtacagagactgaccccgaggtgctgctgcgcatcgatactcccaccgatcatggagacttccgcgcgggagagcgttcgggtgtggccgggcagggcatcgaccgcaggctggcatcggttgaatccagcggcctcacggcgtcctacttcggctatggccgcggcgatgcattgccgcgcggccgttcatggctgcgggcaaccgtgctggaggtggaccctgcgctcgcggggcgcgcggcagacatcgagctgcagccaccgttggatctgctgaagctgaccaacctggattacatctggttgtggccgttcttcttctggaaagtagcggcgctgttcctgctgattccaggggctgcgttggcagtgttcacttttaccttgtggcgctggcggcgcctgccgtcgaagctgccggcttcagcagcggatacggattga

SEQ ID NO: 516406 - DNA, 804 bp, Stenotrophomonas maltophilia
atggacagcagggaaccagaaggcgcctatggcgacgtgccgagggtgcagggcatggaggtggccgccgtcgcgccaccggaaggaccgaccgactggtcgatgctgccgctgaccggcggcgatgatgattcggcggtgatgcagatggtgcgccgcatgcgccgcgaaccggcgctgctgttcagcgtggcctatctgctggtgtcagcactgggcctgtggtgcagcttctggttctaccgcgggttcgagctgtcgatcctggactacatgcagcccagtgatttcctggttgccggtatccgcgaccccgcctatgtgctgctgctggcgctggggctgctggtggtgctggtggcgagctggccggaaacgctgcgcatgcgcaatgccgccaagctggagcagctgcgtggacgcagctggatctggagggtgctgctccggcgttcgttcctgaccagctgggagggcatcgggctgcggcccctgacggcgatgaccctggccgtggccgctttcatggccatcggcgcggccaactacgtgcaggtgcgcgggcagcagatccgaagtcatggcaagggcgaggtgatccgcctgcaactcaacggcgacccggcgccgctgccgggcagtgcccgccttctgggctccagcagcgctttcctgttcgtctggtggccgcagcagcggcgtgccgaagccattccaatcgcagcggtgcgcacgctgcaggcgctgccggtggcggtgcgcacgcccgcgccggccgcacccgcgtctggggcgccacgttga

SEQ ID NO: 516407 - DNA, 675 bp, Stenotrophomonas maltophilia
atgctgccggggctggacggcaccggccagctgtctgtcgccttcctggccgccgtgcgggcgcacggtgtgcccacccgcgcgctggccttgcccagcaacggcccgcaggactacgccagcctgctgcaactgctgcgcccgcagctgcccagccagccgttcgtgctgctgggtgaatcgttcgccggcccgctggccatgcagttggcggccgaggcgccacccgcgctgcgcggactggcgctgtgcaccacgttcgcgcgcaggcctttgccggttccggctgcaggtgcggcgttgctcgcgcccgcctggccgatgccaccgttgctgctgctgtcgcagctgctgctggggcgctggcgcagccggcagaccctgcgtgagctgcgcctcgcgctggcccaggtgcctgcagccacactgcgccagcgcgccgcagccaccctgcgcgtggatgcgcgccaggcgctgccacgcatcgcggtgccgacgttgtgtctgcaggcccgccaggaccgcctgctgtggccgcccagtgtggccgaactgcaggcgctgctgccggacgcccggcatgtcaccctggaagggccgcacttcctgttgcaggcgcgcaccgacgcggccgccaccgtggtgtccagctgggtgagggcgctgccgggctga

SEQ ID NO: 516408 - DNA, 1527 bp, Stenotrophomonas maltophilia
gtgttcccgattgccgcggcgcagacgaccacgaccgcctccatcgatgccgacgtcgcggccatcgtccagcacgagcacctgcccgggctggccatggccgtggtcgaccacgggcaggtggtctaccagcacgccgatggtatgcgcggcgatggtggccacatcgatcaggacacgctgttcaagatcgcctccaacagcaaggcgatgaccgccgcgctgctggcgcggctggtgcagcagggccggctgcgctgggatgatccggtgcagcggcacctgccaggtttccgcatgcatgacgcgtgggtgggccagcagatgcaggtgcgcgacctgctgatccacaacagcggcctcggcctgggcgcgggtgacctgatgctgtggccggagccgaacgcattcacccgcgccgacatcattgccggtctggcgcacctgaaaccggtcagcagcttccgcagccgctatgcctacgacaacctgatgtatgtggtggccggcgaagtggcggccgctgccggtggcaagccatacgaccagctgatgcgcgagcaggtgttcgagccgctcggcatggaccgttgccaggtcggggcatggccggtgaagcaggtgggcaacgtggcccagccgcatgcctggcgcgcgggccgcaacgtggtggtgaactccgatggtgaaaccagccccgacctgacgtcgatggccgccggcggcatccgctgttccctgcgtgacatgacgcgttggatgcaggtgctgctggagccttccctggtccctgattggctcaatgccgagcagcgccgcacgctgtggaccctgcacatgccgatgccgctgggcgaacgccagcggcgctgggacaacgcgcacttctacggctacggctatggctggcgggtgtcggacatggacgggcagtggaaggtggcgcacaccggcacgctgtcgggcatgtattcgtcgctggccctgctgcccgaccgcaaggtgggcgtggtgatgctgatcaacggcgagggcgaggacgcacgcacggcgctgatgcaggcgctgctgaagcgcttcaccgctccgcatgatgcgcgcccggccgaggcctatctggccgaactgaagaccgagcaggccacgcgggcagcatcgggccatcagcgacctgtgacgtccccggcgcaggcggcgcgcgcggtcgatctgccgcgctggcagggccgttaccgcgatccctggctggggccggcctcgctgtgcccgggcaaggacggcctgcgtttcagcgtggacaagtcgccgaagctgcagagcgccgtgctgcaacagcaaggacgctggctgctgcgctgggatacgctgggagacgaagcgcaggcatggctgcaaccgggcgaaggcccggtgccgacgctggacctgcgcgccatcgatccggacatcgacttcagctatgacttccaggacctgcatttcactcgtactggcgattgccctggccgcgaccgcccacgccgctga

SEQ ID NO: 516409 - DNA, 876 bp, Stenotrophomonas maltophilia
atgcaggacgcgcagtactggttgaacgaattctgggccggcttgagcgtgctcgatctggcgttgggcagcgtgctgggcacgttgctggggctcatcgccggcctggccgtgtggtatggcctgcgccgccgcggctggctgcagcggcgcaagcgctggcatcactggctgctggccagctacatggtgctgctgccgctggccaccgccttcttcggtctgcagctgggcttcaccgccggtgcgcaccgcgcgctgttcaagcagctggaccatttccagccgcacctgcagaccctggtggccgaatggagccacggcttcaccgattcgctggacgacccgcgcatgcgcgaggcgctgcgcagccagggcacggtgggcgatgtggccgatgcggtggcctcggcctacctcagcgagcatccgctgccggcactggaccgcctgggcgacggcatactggcacgtgccacgggctgggtgatcggcaaggtgcgcgaaggcgtgctgcgtggcctggtggaagacacgctggtggacaaggcgggcgcactgggcgtggagccgaaggtggtgcgtgaggccctgaccatgcacgtggatgagctgctgcacacgcgcggcgtgctgcggctggtgaaggcgcagatcaacggcatgatgcccggtgtgtacttcgggctgctgctgccgtggctgttgatcctgctgctggtggcgctggagatctgggccgcgcaccggttcggatggacgcggaaggtggcggccggcactacctgtcggagagcgtgcggaccagcggtccgcacctacccaggtgcatgcagtcagtcgccgtcggtttcgtccgggtgggctttccagtag

SEQ ID NO: 516410 - DNA, 813 bp, Stenotrophomonas maltophilia
atgggggccggaatgctcgacgtggaagatctggataggcttacaaagattctggagagccgctcgattccaatggaagtacttgaaaacatgatcgagctcttcaactatcatgatcacgagggcagagagctcctattcgaactgctgggagaatttcaagtatgcgaatttgaacagtacaagaagaaggggagcgagttggctgaggcgttgatgcaggacgttccgagctccgtgaagacgattgttctgcttcccttgcttgataaggttccggcctcaaagtcaaagagcggcgatgcaattgcatggatcatgagccgatctttggggaggctagctaaagcgactgggcgcgaatttaaaatggcttctcagacaatctccgcggaaataatttcacgcggagatgccacggctttctttatggtcgatgactatatcggcagcggcaatactgcccttggcgcggtggaggggttggtgcagcaaggagtgcatgcagctcaaatatccgtcgcagcttttgttggtatggcagaggcgggtacgagacttgcgtcagccggagttcgtacgatcttcctagcaaatcttccaaagggaatcagtggttcttctcgaatttcaaataagaattacgcaattgaagtaatgttgcgtatggagaataaaatgaaggtggggcgacgatttgagttaggctatgagcgcactgaggcgttggtgttgatgtgtttctgtcctaataatacgtttcctgtgttttggtggaaggggccgacatgggggggggtattcgagagatga

SEQ ID NO: 516411 - DNA, 1056 bp, Stenotrophomonas maltophilia
ttgaccgctcactccctacagtcgcttcccgattttaatgagtattcggcaagattcactgaagcgctgatctcgcgagacggcgaagattacgatccatcttatctttcccgctgcctcagttatgcgaagggccttcttgaaagacgattgcccgtaatctttgaccgggagcatctatgtgctctgactggctattcaagccgatttatagagtcggcagttggttctccgcacctgttttatcggaattttgagatccccaagaaatccggtggatttcgcgagatatccgagcctcttccttcgcttaaggacgttcagcgatggatttatcagaatttgcttctgaggattcctgtgtctgttgcggcaaaagcttttgtccccgggaagaagctgcgggatggggttaggttccatgttggacagaagtttgtaattagagttgacattgcagatttctttccaagcataacgagagggagagtatttggtctatttagatcgcttggctattcatctgaggtttcaggggatcttgcgagtctttgctgtgtttgcgactgcttgcctcaaggtggcgtatgtagtccatacctgtctaacattattatgagatccgcagatcgacgccttcttgcgtacgctagagagaactcgctgcgctatacaagatacgctgatgacttcacggtttcgggtcagaagttctcgaaatcaatcattgaagaagttatgagcgttattaagtctgaaggatttactgtcaatcagaagaagactagggtaagtagatctggtggccggcaagttgtacttggacatgttgtgaatgggaaggttaatgccccgcgggagtataggcgtgaattgcgaaaagttgcgtattacgtagataggtttgggcttgataatcatctcgcatatttgaatgagcggcgatcaagtgccagtgattattatcttggaaaggcgtcatttgtcttgtctgctaaccatcgagatcgagatgctttagatctcaagcggattctgttggatgaagttgaatga

SEQ ID NO: 516412 - DNA, 1311 bp, Stenotrophomonas maltophilia
gtgagcacggcagccacgctcaccctgcacgagtacgacgtactcgtaccggcgtcatcatcgggcacggcgcccggtggtgcgcgcgtcgtacccgatggcgtttaccggtggctggaacggcagtcgttggaactgatcgacggcaagctctccccatgggtgcgccgttgccgccgcggtgttcaggtcaccagccatgtgggcgtggttaccgcgccaggcggccaacagatcgagatcctgcccaaggtgggcaaggcgctggatgcaggggccggtgaggcgcgcggcctgctgttgaggatgttgcgttgcctgcaggagttctcgcaccttcggttcggcaatgcgcagcttgccgccgacagcatgccactgctggacgtgttcgttggcgagttcctgcgcacggtggtggcggtcacccgcaccgggctgcgcggccagtaccagacgcgcgaggatgacctgcccgcgctgcgcggaaggctgctcgttgcccagcatctacgccgcaatctggttcgtgccgatcgcttccacaccgcccatgatgaattcagcatcgacaggccggagaaccgactgatccacacggcgttgcgcagggtgcttggcgcgacccgggtgaccaaccatcagcgcttggcgcgggagctgctcgcgttcttcgctgaggtgccggtcagccacaccccagaccaggacatgcagcgggtgcagctggaccgcaacatgcgcacctatcgcgaagcgctggattggacccgtttgatcctgcaagggctctcgcccacatcggcggtgggcgcgcagcaggcaccatcgttgctgttcccgatggaacggctgttcgaggcgtacgtggccaggcacttccagaagcagctaccggcgcatcttgcgctggatacccaggtaaggcggcatcatctggtgcatcacggcggtgcgaaatggttccagctgcgcccggacatggtggtgagccggcagaagacagacgtactggtgttggacaccaagtggaagctgctggacgccggccaggccaatggcacccacaagtacggcctgcagcaggatgacttctaccagctgcacgcctatgggcgcagctatctggatggacagggtgtggttgcgctggtctacccgcgtaccgacaagctgaatcagccgctgccggtgttcgactttccgggcagcgaagggctgcggttgtgggtgctgccgttctgcctgacgcgggccgaggtattgctgcctgaggggtgggtatggccggaggacagtgtggcgggttga

SEQ ID NO: 516413 - DNA, 2046 bp, Stenotrophomonas maltophilia
atgtccgaattcttcacacaagaacatttcaacctgctgcagtcgctgcaagggaagaagttcgatcaaaccgatgccgcgcatcagaccgcctacaacaagctgcgccaggcctacgatttgacgcaggactgggcgaaccgcatcaaggcggcgcgcttctccaatggccgcgtcagtatccgccgacgcgccaccaaccagggcaatcacttcgctggctacaactgggcgaagatttatcccgatgccgcgtcgccgccttcactggcctacaccgttggcctcaacggccatgacggcttcgtcgtcaagatcgacacggtgaagttgcaagacaacaaccccatgcgtgaggcctatctgaagttgcgtggcccgttccagtcctcacccattgttaaagtgctaccgatcgaccaagggctgtcgcttggcatggaagatctggtggcgtggagtttgaacgccatcgccgagttcgggctgagctacgacgaagtggcaaagcgcattggccagcccgatgaagttgagccggatgccgtgctgagacacttcgatatcaacgaagacttccgcaccatgcgcaagggttggaccacggaagaaacagcacagttctgcagactggctcggctggtgcattactcgggaatggactggtggttcgcaggtacccacacccatctgcgctttggccggaagaacgccggcagcgggcgggccgtttcggtggttgggctggtgacaggttcgctcgcctgccgggttacctggcgacctgagttgccaagcatttccaagttcgttcgcaaggtcatctcagagaagatggtcgacaacatcgcgaccgcgctggatgccgatgatgaggccctgcaggagctgattcgaaccgacgaagagcgcgagggtttctggcctggccaggccgacaatgacgcgtctaccacctctgatctgtcggacgtagacgacaatgatgaaggactgcccgcggtgcagagcgaggtcgcggaaaggcttgcgttcaatcgcatctacttcggtccgccaggaaccggcaaaacgtacgagctcaagttcctgctggatgatcagttcacagctgaggcggacgagaagtcggcggttgaaggcgggaccgaacgctacacctttgtcaccttccaccagtcctacggctacgaggatttcatcgaagggctgcgcccggtcatcgaggatagcgcgcagggccaggtacgctatgaagttcgtccgggcgtgttcctgaagctctgcgagcgtgcgcgcaagtatcccgatgaaatgttcgccatcgttatcgacgagatcaatcgcggcaacatcagcaagatcttcggcgaactgatcacattgattgaactggacaagcggaccggcatgaagaactgccattcggtcacgctaccctactcacagcagctgttctccgttccgcgcaatgtcagcatcatcggcaccatgaacacggccgaccgatccctggcatctctggacaccgcgcttcgccgccgattcgagtttgaggaagtgctccccaactcagaagacggcgaccttgctcccctggggggtctgcgcgttaacagggatgacgtctccattcatatcccaaagctgctcgctgcaatgaaccagcgcatcgaagcactctacgatcgcgagcatctgatcggccatgcttacttcatgccactgaagaacatcaaggaagacagcgagcgcatgaccgccctgaccgcgctgttcgagaagcagatcctgcctttgctggaagagtacttctacgacgactggcagaagattcggttggtgcttggcgacaaccagaagcattcaagtctgcagtttgtgcaggagaccaccaacgatgaccagacattggaacgcctgttcggcgccaatgctgcggccgagggacagggtgcacggccgcgtttcaatcgaaatccggatgccctgagcaagccagacgcctacgtgggcatctacaacacgctgctgggcaacgagtga

SEQ ID NO: 516414 - DNA, 690 bp, Stenotrophomonas maltophilia
atgagtacgtacaccacgctcgtcgagctcgcatttgagaggctgagcaaggaactcggaattccgaagggattcgtcgtggcgctctatgaggagaaggactcgtggagcttcatttccaagctcgcccagcttgtcgaggccgtctttacccgtgccgtggtcgatgcgctgcgcgagccgctgataatcgatgtgatcagtaatcttccgcaggaggtgaggatcaatctcctgcgcaagatgaacatcatcgacagcgaacagaaatccatgttcaaggccatcgccgagatcaggaaccagtacattcatgatctctccaatatcgacgttccgctggatgtctacatcaggaacctggaggacggtgcgaggaagggattcttcaaacggttcaagccgtacatcgtcgaccccaggatgtccgtttcagagttcatcctggagtgcaggccgcaggtgttccacgtgtgtgtactgcagctgctggaggtccacggcacggtgtcctccatcaacaaccggaaggatcacgaggcgttccgtcttcagcaggcgggaaggctgctgccggcaaggaagaaaggcgagatgctgccgatggatcgagtggccgtgagcgaatatgtcacgcaggcaagggacgtcctgaagcgggaaggcctgttcgtgccgcagttcgagtag

SEQ ID NO: 516415 - DNA, 681 bp, Stenotrophomonas maltophilia
atggtgacgctgtacctggcggtccgcatgctgctgccgctgttgacattcgcgctggtggcctggttgctgtcgcgcctgatcaatgcgcgtgccgcgcgcctgccgccggtgccactgaacctgcccgcgcacagccgcagtccacgcagaaaggaccgccgcctgtacgcgcgcgcactgcgccgccgcccgcgcctgcgcagcgccatcgttcccgccagcgccccgcgtcgctggtacttcgccggcacgatggtcgcactggcggcgctggcggctacggtggtggcaatgcccgatggcgcacgcttccaggtgatggtcgagagcctgcgcggctacccggttacgatggccgaagtgcgcgttccggcggcggcgcagccggtggcgctgcaacgatggcagcccgcactggcgccgctggcgcgcccggtcgtgatgcgctacccgatcggccgcttcggcggcgaccatgaagcgcgcgccgtgctgccggtacaagttcggcaccttgatgatcgactacaggtggccattccctcagctgtggatgcgcttgcattgcaggccgaactggcacggttgtctggcctgccggccaatgcggtgtcggtgcagcaggcagacgtagccccctgggccgacgccggctgggcgccactgagccagaggtag

SEQ ID NO: 516416 - DNA, 654 bp, Stenotrophomonas maltophilia
atgcgcgcgactgcctcccgtcttggccgcctgttcgggccagcgttgatgttgttcctgttgcaggtgctcgcgttgctggcgctgggcctggacgccggctacttccatcatcgcgtcgcgctgctgctggagccgctcagcccggcctgcggcgggccggatgcggcggcgcggctgcaggtggccgagcagctgatggcccgtgccgaggcgctggatgattggcaacccctgcgctggattccgctgctgggcatcgtgctggcactgttgggcgccatgacgttgtgcgccagccaggcgttgcgcttgccccaacgatggcgcgcggcgggcgggtcgctggcgctgctgcatggcgccgcattggcgttggcgagctggacgctgcacctgtatgagaacgcctggcgcagtctggccaccctgtcacctgcgacatgcctggtggatctgaccgagcatggcaaggtgccgctggcgcaggcgcagcaggtggtgttccacattctcacccgcgagcatgcgccgctgcagcgcaaccccgacgatctggccctggtgctgacctcgctgctgttgatggcgatggtggccagccttgcgctgtggcgggctgtggcacgcggcaacgcatccgtcgagggctga

SEQ ID NO: 516417 - DNA, 261 bp, Stenotrophomonas maltophilia
atgctgctactgttccttctggttgcgacaagcaccgcaaaaacccaaggcgcgtatgacgaagtacgcgagatgcccgatggccagaccctggtgatgcgcacactggattgggaccacggcaacggcagccacgagcgcgttaccgtgcactggctgctgctggaagacggccgcatgcgctacgactttcatcggcagcctccggagacccaggatgcccaccgtcgctcatacgcgctgcagggcatgcagccctga

SEQ ID NO: 516418 - DNA, 1521 bp, Stenotrophomonas maltophilia
atgccccgcctcgtccccctcaccgttgtgctgatggccgcactggccggcgcacccgcttcggcatcgatcacggtggcgccgcagaagccgtccatcaccaccgatgcggtgcatgtggcctatgccaaccgctgggatgaggcgatccagcagtcggacagcggcaacacgctggcggcgttgatcagcatggaacggttgatggaagatccgctgctggacgacttcgacgccgagcgacagggccgggctgcgcaggcggccggctggaccgcgatgatgcagaagaagccggccctggcacgccgctacctgcagcgcgcgcagcagaccctgccgaacgatgcgcggatcctgctcacccgggtatggctggaactgtccgacaaccagcctgcaccggccaccacctacctgctgcaggcgctgaagcacgcccaggctccgctgccgatcgagcagcagtccgtcctctacctgcagtaccgcctgcgcgaccagccgcagcggcgcatggaactgttgcaggccttgttcgacaacggctggaagggcgacggcctgcaacccagcggtctgtggctggcactggccgcgctgcaggccgagcacggtcgcggcgatgacattcctgccacgctggcccgcatcaagggcccggccgagatcatccggctgcgcagcgacaagcgcttcgacccctatgtcgaccacgatgacccgcgctttgatccacgccaggcggcacagacgcacctggatgatctgcgcgtgtcgggcctgctcgatcgcgcactggatgcgcgcatggccgacttcgccagcacgctgctgatgctcgaccgcagcgaggaagtgctggcgctgaccgatggcatggcccgcgctgccgccgcaggccagtcgccatcggcggccgaggcgcaatgggtggcgtggctgctcaacagccggtccgccgcgctgcgccggctgggccgcatcgatgatgcgctggccacggcgaggtgggctgcgcgcatcggtgcacccagtgccaacggcatcgagcaccagttgaatgtcggctttttcctgatctcgctgggacgcgcgcaggagggggccgcggcggtcaatgacatcgcggggctgaccggttacggcagggcggcgcaggcgctggtgcagttcgccgccgcccgcgaacgcggcgatgcgccagccacgcaggccgcgcgcgcggtgattctggcccaaggcgaagacgcgcgcctgttccagcgcgagatgctgctggaggaaggcgatctggacgccgcggctgcgctgctgattgaacagctgcggtccccggttgaacgtggccagacactggccaccctgcaggacatgcgcacctacccgtcgctgcccggcgacatgaagatcgatgcggcgtggcgtgcactgaaacaacgcaccgacgtgcaggcggagatcgcccgcatcggccgcgtcgagcgctacgacctggtcagcagcggcacctcgcgctga

SEQ ID NO: 516419 - DNA, 165 bp, Stenotrophomonas maltophilia
atgcacgcggccggattcgaccgcgcgacgcagcgcgctgtccggcgccagctggcgcttctgcccgaccatctcatcgagggtgcgcgggcgcatgcgctcggccagcgggcgcaggtgatcccgatcaacgctcagcagatcggggccggggaaggaagttga

SEQ ID NO: 516420 - DNA, 1125 bp, Stenotrophomonas maltophilia
atgccttcgccccgtttcctcgattccctgccgtccattgccgccgccgactgggacgctctgcatgatggccgcaacccgtttgtcagccacgccttcctggccgggctggaagcccacggctgcctgcgcggggactggggctggcagccccggcacttcacgctctgggaaggcgatgctctgatcggcgccattccgggctacctgaagaccaattcgcacggtgagttcgtgttcgaccatgcctgggccaatgcctacgcccgccacggccgcgactattacccgaagtggctgggtgcggttccgtactcgccggtgaccgggccgcggctgctggcccgtcacgatgccgcacgtgccgcgctgttgccggcactgcgccagcagctgcccgcactgggcgtgtcatcggcgcatgtgaatttccatgacaccggtgacgaaacgctgttcggtgacgactggctgctgcgcgaggacatccagttccaatggcagaacccgggcgactggaccaccttcgagcagttcctgggcgcgatgaaccacaagcaccgcaagaacatccgccaggagcgggccaaggtcacccgccagggcatcaccttccgcgtggtgcatggcaatgacgccagccgcgccgacctgcaggcgatgtaccgcttctacctgcagaccttcctcgagtatggcaacgcaccggcgctgaccgaggccttcctgcgccatctggccatcgcactggggcgccggctggtgatgttcctggcagagcaggagggtgagccgattgccggtgcgctgtgcctgcgcggcggcgacacgctgtatgggcgctactggggaggcgcgaccctgcccggcctgcacttcgagacctgctactaccagggcatcgagtattgcctgcgcgagggactcacccgtttcgagcccggcgcgcagggcgagcacaagctggcacgcggcttcctgcccacccgggtgcgcagccgccactgggtggccgatgcggagtttgccgacgccctgcaggactggtgccggcaggagcggggcgacgtgcgtcgttaccagcaggcgctgctggggcacagcccgttccgcgcgggaccgtag

SEQ ID NO: 516421 - DNA, 384 bp, Stenotrophomonas maltophilia
atgaaacggcatcccctgctttgctccctgttcctgtccgccagcctgctgtcagccgcctcggcccaggccgccgatgcaccggcagcggccaccaccgcctgcatccagctgggcagcgaccagcagatggtccgcgccggcgttacccgtgatgtgctgttgcgcaacggccaggaccactacgtggtgcacttccagcgcgactgtaccgccgcggcccgctcccgcacgctgagctttgccaccgaagggcagcagaacctgctctgcagcgacggccgcagcaccctgcgcaccgataccgaacgctgcgccgtcgcccgcgtcgagcacatcgaccccgccagcttcgcccggaaggcgcgccaacgtcgccgttga

SEQ ID NO: 516422 - DNA, 246 bp, Stenotrophomonas maltophilia
atgagcaccatgttcatgacctggctgggatttgccgcgatggtgctgatcgccgtcactttcacctggcgccccgcctacgccaccttgcggcctccccggcatcgactggtcgcattcctgttcggcagccagctattcctgctgatggccttcctggctgcctgggcggcggcaacggccatcgataccggtcacgtccatctaagccatcaccctaagccatcaccgctacggcaccattga

SEQ ID NO: 516423 - DNA, 1539 bp, Stenotrophomonas maltophilia
atgcccgcaccgttgcatcggcgcgcgcgccgcgacggcatggccgcacgcattgcccagcacgaatggtccagcacgccgctgggcgccatcgagcactggccgccgcatctgcgcgccacggtcgatctgatgctggcccacggcttcccgatgatcgtgctgtggggcgaacagctggtgcagctgtacaacgatggctatgccgagatcctggacgaccgccaccctgcggggctcggccagccagcccgcgaatgctggccggaggtgtggcacatcaatggcccgctctacacgcgcgtctggcagggcgaaacactcaccttcgaggacaagcgctttccgctggcgcggcagggtcgcctggaggaccgctggttcaccctgacctgcagcccgatccgtggcggggaagggcgcatctgcggggtgctggtgaccctgttcgagaccaccgccgcgcatcaggcgctggcggcgcgcgaacgcgaggagcagcgccggcgcgagagcgaacggcgcctggaactggccttcaaggtactgccggtgggcctgtgcatcgtcgatcttcagggccacatacagttgtccaacgaccagatgcgtgcctacctgcccaccggcaaggtgccctcggccgacacggccaaccagtaccgctggcgtggctggcatgccgatggcacaccgatcgaaccgcaggatttcgccattgcgcgggccatgcgcggcgaaaccgtggtgccggggctggagttgcagttcctgcatgatgatggccgcaccctctggacacgggtggcggccgcgccgctgcgtgatgccgacggggaggtcagcggcgtgtttgccattgccgtggacatcgacgatctcaagcgcgccaccgagcgccagtcggtgctgctggccgagctgcagcaccgagtacgcaacatcatgtccaccatccatgccatcgcctggcgcacccgcgaatcggtcggcagcgtggatgagtatgccgaccggctgtgcgggcgcctgatgtcgctggcgcgcacgcagagcctgctcacccgcggtgccaacgcgggcgtctgcctgcgcggcatgctggagcaggagatcgcggcgcaggtgcctgcggcggcggcctgccagctacagggcgaggatgtgctgctgccaccgaaggcggctgaggtattgtccctggccatccacgagctggccagcaatgcgctgcggcacggtgcgctggcccatgaagacggccgcatccaggtgagctggcggctgcaggagcggcagggtgagccctggctggaactgcactggtgcgagcgccatgccgaggtggagggctgggcgctgccgcgccagcgtggcctgggccgggccctgatcgagcagcgggtgccgtacgagctggccggcagcggccggttgcgcttcgggccgcagggcctggatgcccgcatcggcttccccttgcgggaacgcggcagcctgctgcagaccgacgccccgcaggcccagtctgggggctga

SEQ ID NO: 516424 - DNA, 228 bp, Stenotrophomonas maltophilia
gtgtacgctggctccgtgttccccgtttcccttgccaccagcctggccattgccggctgtgccggttgcatccatcagttcctgcgcggcgagccgctgctggcattggccattgtgttttcaatgctggccgtggtgggcgcggcgttggtcagccggcggctgacggtgccggcttggcttgcgttggccggcacggtgctgggcatggcggcccgcgcgggttga

SEQ ID NO: 516425 - DNA, 246 bp, Stenotrophomonas maltophilia
atgacgtccgaacgcacgctcagcccggccatggaatcgctgttccatcgtatcgaacaggcattcaacagcgccgaaggcatggccatcctgattggcgaacagtacggccccgagccgaaaccgccggcaccgatggactacgaccccaagcagattgccgtggcgatggtgatgctgagccagcacggccgatgcctgctgcaggagctgcgggcggaagcggaaaaggtgacgtatcactga

SEQ ID NO: 516426 - DNA, 885 bp, Stenotrophomonas maltophilia
atggccgagctctccacatatgcgctgcggctggcgctgtacctggcgctgatgctgctgttcgggcggacgctgttcgtccggcccgcgctgccgcgcgctgccggcttggcactgcccctgatcgcgctggcactggtgatcatcgacgcggtgacccgtctgtccggcgtgctcggcgttgcgccgctcgaccttgatcacgagacggcgcactggttcctcaccggtacaccggtgggtgaggcggggctgctgcgcatcctcgccgtgctggcgatgctgccgctgctggccttggaccggccgctgcaggggctgcgccggtgggtcgcactcgtgcttgcggccacagccctggccagtctgtcctggaatgggcacgccgccgccggcgatgggttgggcggcgttctgcggcagatggcaggcatcgtccacctgctggcggccggcgcctgggtcggcgcgatcgccgccatcctgcaattggcgctgcgcccgcagggcctgcgcctgcgcgaacgcacccatgcgctgtggcaggccgcgcatgggtttgcgctgcccggcacgatcatcgttgccaccctggcgatgacaggcacctacacctatgtcgatctcggtggctccgcacagaccctgaccggcaccgcgcatgggcgctggctgctgttgaagctggcgctggtggccggcatgctggggctggctgcactgcatcgctggcgcctggtgccggcgctggccacctccatccgtggcggctggcaaccgcggccgctgcgcgcgctgcgccacagcctggcctgcgagtcggcgctggtgctgctggtgctggcctgcgtcgctgtgctgggcacgctggacccgctggcatga

SEQ ID NO: 516427 - DNA, 324 bp, Stenotrophomonas maltophilia
atgagtaccgccaccgccctgccgctgttcgccggccgctgcttccgcgtcagctatgacggcctggctgccgacaacgtctacagtgccgatagtcgccacgtgcactacgccatcgtctccggcgcccatgccggtgcacgcggcgaagccgcctgccagtggcagcagctcagcgagggggtctatgctgtttcgtggcaggaagccgatggcgctaccgtcgtgcatgtcgatgaattcgtgggcgggcgttcgctggcctggttcaccgccgccgatggcagcttccatcgcatgcaggggccgctgcgcgtgctgtga

SEQ ID NO: 516428 - DNA, 474 bp, Stenotrophomonas maltophilia
atggaccacaaccccacgacgcccgcaagagccctgccccagccgccagcatcggcacgctggcatccccgcttcgatctggctggcgccgggctgtccctggcctgtgccgcgcactgcgttgcgctgcccctgctgctggccttcgtgccggcagcgatgatggcgcttcgttcgttccagcatcccggccacgcgctgatgaccaccctgctgctgatgtcgcgttgggaatggctgttcgcgctgctggcctcggcgatcgcccttgtcagtaccctcgccggttcgcaccgccacggccaacgctggccccggcggctggcggtggccggcaccacgctgctgttgtccgcatcgctgtacccgccgttgaaggaatcgctgctctggcatggcctggcgaccgcctgtggcggcgtgctgctggcggcggcgcacctggcgaaccgaagcgcattgcgcaaccggtag

SEQ ID NO: 516429 - DNA, 525 bp, Stenotrophomonas maltophilia
atgaaatgccctgctgctctttttctgctgctggttgccagcaccgcgcaggcccacgaacttcgccatctgggtgcgcacgtccacggccaggccaccgtcgatctggcgctggaccaggccaccctcgcgctggagctgcaggcgcctggtatcggcatcgtcgatttcgagcgcgcaccggccaccgctgccgagcgcgcggcgctggcacgcgccaccgctgtgctcaacagtggcagctgggtgaccctgcccaccgcagcgcactgccgcctgtcccgcagcagcgcgaaggccgagggctttgaagcaaccgccgcggccgggcagcaccgccatgccggcttcagcgccagcctgcagtatcgctgtgcgaacccgctggcgttgcgcgctctggtcgtgcgcttgccgacactgttcccgggcctgcacgaggtcatcgtccataccgccaccgaccgtggccagggtcgcagcgtgctcaacgcaggcaatctgcgcgtggtgctggcaccgtga

SEQ ID NO: 516430 - DNA, 681 bp, Stenotrophomonas maltophilia
gtgatcgcgctggaggatgtgcagttcggctacgggctgcgtctggtactggatattccgcggctgtggatcgaacagggcagcagcgtgctgctgcgtggcatcagcggaggcggcaagagcaccctgctgggcctgctggccggggtgctgctgccgagccggggaaggctggaagtggctggccacgcgctgccgggcatgcgcggtccggcacgcgaccgtttccgcgccgaccacctgggggtgatcttccagcagttcaatctgctgcccttcctcagcgtgcgcgacaacatcgcgctgggattgcgcttctctccgctgcgcagtgcgcgcatcagtggaccgttggatcacgagatcgtgcgcttgctccgcgctctgcaactggacccggcactgatgcggcgcccggccggcacgctcagtgtcggccagcagcagcgggtggccgccgcgcgtgcactgatcggtcgtccggcgctgctgctggccgacgaaccgacctcggcgctcgaccgtgaggcggccgccgcgttcctgcggctgatgtcctcccaatgccaggccgccggcaccaccgtgctggtggtcagccatgacgacagcctggaaccgctgttcgaccgtacggtcgcgctgtcggcgatcaatcaggcaggggcggcccatgcttga

SEQ ID NO: 516431 - DNA, 621 bp, Stenotrophomonas maltophilia
atgaaccgtagacatctgttggtactcgcaggttgcctggcgttggccggctgcgggccgcgcgttgatgatgacgtgacagcagcacgggctgcacctgcggccagcgcagaagcacacgatgccgccatcgagcgctgggatgcattgcgccccgatgaggtgacctaccagcgaccgccgccgcagatcggcctgtcgcgcaacggcatggacggcgtgggcggcctgatcgacgacaccggttccggtacgccgcccggtcaggcgatcgaccattccagcccggagcgggccagccagttcggttcttcgcgcgtggtcgatgctctcgacggtcgcatggtggatctggacggctttgtggtgccgctgggtaccaatgatgccgggttggtggacgagcttctgttcgtgccgttctatggggcctgcatccatgtgccaccaccgccgccgaaccagatcatccatgtaaccctggccacaccgattgcgctgggtaacctgtgggatccgtatcggctggccgggcgcctgcagatcaagcgcttcgatgcggacatcgccagtgcctcctacgatgcggcagcggcgacgctgacggcgatcggcacctga

SEQ ID NO: 516432 - DNA, 846 bp, Stenotrophomonas maltophilia
atgcccgacccgacgccgccacacaccccgcctgcgggcacggcccagcgcccgctgcatcgctggcgtggcggactcccgcagctgcagctcgacgtggtggccgaggaggtaccggttgcgatgcgttacaacggtgccgcgttctcggtgatgatggccacgccgtgtgacctggaggacttcgcgctgggcttctcgctcagcgagggcttgatcacggcgcccgcgcagctgctggcggtcgaggtgaggccgcagctggaaggtatcgaactgcagatgaccgtggccgcggatgcgcccggcgccgcgctggatccggatgaagaacgcctgctgcccggtcgtggcggctgcggtctgtgcggtacgcgccagcttgaggatgtgctgcggcccctgccgccgatccgcgaacgccgcacctacgcaccggctgcgctgcagcgtgccctggccgaactggcacagcaccagccgatgaatgcggcgagcggcgccattcacgccgcggcctgggccgacgccagcgggcggatcggctgggtgcgcgaagatgttggccgccacaacgcgctggacaagctgatcggcgccttgcaccacaacgagcacgccatcgacggcggcctgctggtgatttccagccgcgccagctacgagatggtcagcaaggcagtgcgtgccggcgccagcgtgctggccgccgtgtcggcgccgaccgcactggcgatcgacctggcccgcagcgccgggctgtgcctgattgggtttgcgcgtgagagcgggttcaatgtgtacacccatccagagcggctccaggccgacgaaccatctcggtag

SEQ ID NO: 516433 - DNA, 870 bp, Stenotrophomonas maltophilia
atgcatctgcgcctgctcgccttcgccctggtcgccacagtccagatcactcacgtggcggcagctgaggcgccgctgccgcagctgcgggcatacaccgtggacgcgtcctggctgcagccgatggcaccgctgcagattgccgaccacacctggcagatcggcaccgagaacctgaccgcgctgctcgtacagaccagcgaaggtgcggtgctgctggacggcggcatgccgcagatggccgaccacctgctggccaacatgaaaacacgtggggtggccccgcaggatctgcgatggatcctgctcagtcatgcgcatgccgatcacgcaggaccggtggcggaactgaagcggcgtaccgctgcgcatctggtcgccaatgctgaatcggccgtgctgctggcgcgcggcggcagcaacgatctgcacttcggcgatgggatcacctacccgccggccagcgccgaccgcctcgtcatggacggtgagactgtctccctcggtggcatcaccttcaccgcccacttcatgcccggccacaccccgggcagcaccgcctggacctggaccgacacccgcgatggcaagccgttgcgcatcgcctacgccgacagcctgagtgcaccgggctaccagctgcgtggcaacgcgcgctatccccgcctggtcgaggactaccgacgcagcttcgctacggtgcgcggcctgccctgcgacctgttgctgaccccgcatccgggcgccagccgctgggattatgcggccggcagcaaggcggcggtcaacgcaatgagctgcaacgcctacgccgatgaggccgagaagaaattcgacgcgcagctggccaaggaaaccgcatcgcgctga

SEQ ID NO: 516434 - DNA, 822 bp, Stenotrophomonas maltophilia
atgccaaagtatgttctggaccggaatgctgtaatcgaaatagagagaatgaacgccggccattggtcgtcgatgggtgccaaagtacgtaagatcgacaagaggaagaacttcgcaagccccctgctgtctgtcctcgagactggcaggagcgcgtcccgtgatgctgctgcggtgattgagagcattacccgggaggaggctgtcatgcgtaggttcttccgcagggcgcgtgttgattcagagtatctggtgtccgagcagcatgtgctatccggagagttcctggattcgttgacgcagaaccaggcccgggatcttcagttcattgcttcggcgcagcgcctgctgtccaaacagaccgcaggtaatatggtccggaaggagttcaatcgcgtcgtcgagttcgtgcgggacgctggcagggagctccaggacccgctgtcactcgtcgtgctggcatgcccactgggcagcgaacgcgcgcgtgggctgttgaagcccagcgtggaggcggacgacaaggccgcgttcaatgcattggccgatgtggagaagatcaagctcgtcaactacatcgagctgctgatgagtgagcatggccaagccagcgagctgcgtctgttcagtgaagacaaagggctggtgggaatgaaggctgccattgtcgtcacgcactctggaacggtccggaactcggtgctgggccacgaggtcggataccgcttcgatccagagaagtaccttgcagcgatgccgtacctcgaaggccaaccgaagataagcggcgaggtccgggcgaggctgttcgatcaatcctga

SEQ ID NO: 516435 - DNA, 1260 bp, Stenotrophomonas maltophilia
ttgagcgtgcgtggcaggctgatgggcgtggcgctgctgctggtgcctgcgctgggcgccgcgtccacgcccaccgactgcgtgcagggcctgttgcagcgactgggctggcgcttcgaagacgcgccggttgccgcgcccgaggtgcagggcggcccggtgtgcacgcgtgcctcgctggcggcggcgcaggcagcaggtgacctgcacgtgcgctggcctgtggatctgccggctgcatcgcgccaggcgctgttgcagcagctgttggacgatccggccacggtctgcgcctatgccttcgaactgggcgcggccaccggccgtgcaacggccgcattgcagggcaacacaggcttccgcttctccggcctgcagatggggtggatcggtttcggcctgcagggcgcgccttcgcagggctggcagcgcacgcgcagtttcggtcgtggttttgtgcccagcgacggcaacagccgcgcgttgcaggcgttctacagcggccgcgtgcgcaccgagtgcggagtgggccgccaggtcgcgcagctggcgacccagcgcgaactgtatggcgatgctgcattcgatgcggagttcaaacccgccgaactgtcgatcggcacgttcctggcgctgcatgacaccgacagcatcctgctcggcgcgcatgcgggcgacttcttcgccgatggcaaggcggtgcgcacgtcggcgatggggcggcaggccttcgtcggtgtccccggcttcatcgagcacgtgtacgacaagggcagcctggatgacctgagcaaccaggccgagaacttcgtcgtggtcgaggtgggcgagggcgccgcgcaggcactggccctgcacggcggcttggcctggtacgaccagcgcaatgccgagctgtggcggctggcgcagggcatgccgcgcgtcggcatgcgttatttcgagcgtctgctgttcgagcgcgatgcgcaactgcgcgccgcactggcgccgcgccatcgcgccacgctggcgcgcatggaccagctgctggacgatccgttctaccagcagctcgtgatctatgtgcatccacgcggtatacgtcccatcggataccacatcgcccgcctgctcgatcgcaacccccgcacgccgttttcgatcgacctggcggtgcacaatctgcataccacgctctaccggcgttggcgcgaggcgcagctgcgccactgcgcggctaccggcaggccaggcagcctgaccctagaccccaactga

SEQ ID NO: 516436 - DNA, 1041 bp, Stenotrophomonas maltophilia
atgcaggttcgcaaggaagtgcgtcgcatcggcgcgctgatgatcgcgctgttggctgccaacgccctggccgaggcccctacgtcggtcgagctgccctcgccggaggcgcaggtgcagatcctcaacctgcttgaacggcaggcgttgtatcgcgaccgggtggactggcctgccatgcgcacacggctgcaatcggtgcagggagagcctacgcagcggctggcgttgctgcgcgaagccatcgcgctcagcacgggccaccatggtctatggacgacgacccagcgccagcgcgactccctggcgcgcgcgcagcaggccggcgccgccgcggtggacagggccaaggtcgccgatgcggtggatgcacgtatcggctgggtggtcatcgagggctatgccgccacgcccggcgcgacaccacaggaaaaattccgccaggacatccagcgcgctgcgcggtggcagcaggtgatccgcagcaaggacgacggcgcgcgctgtggctggatcgtggacctgcgtgacaacggcggcggcaccatgtggccgatgctgctgggcatggcaccgctgctgcgcacctcggtgctgaacaacgaggatgtggggaagttcgaaacctcgcacgggccgcagcgctggacgttgacggccagcgccgtgcagctggcgggcaaacccttgctggatttcggccagtccggccatatgctgcggcagcccggcgcgccggtggcggtgctgttcgggccgcgcaccggcagctccggcgaggcctcggcgctggcgtggcgtggccgcgcgcagacgcgcagcttcggccagccgacggcaggcgtctcgactgggaacgtcgtgcacaccctggccgatggcagccgcctggtgctgaccaccagcgtgatgcaggatcgcgacggccgcggcgatggcctgaagatcgaaccggatcagtacacggaaggggacgcggccacgctggcggcggctcagcagtggctgctggcccagcccgcctgccagggccgcacatga

SEQ ID NO: 516437 - DNA, 810 bp, Stenotrophomonas maltophilia
atgcattcgatcttccgctggaccaccgcgctgctgctggcgctgggcatggcgttcggcgcgcatgccaacgacactgccgcgcagatccgccagcacgccgccgagcatcgcatgctggtgctgggcgaattccacggcacccgcgaggtaccactgctggtgcgccagctggtggatgactacagccgcgaaggtaccccggtgctggtggcgctggaactgccccgtgctgagaaccccacgctgcacgactatctggattccgatggcgggacggcggcacgccagcgcctggacaaccgtgcgttctggaccgtgcgcgatgaccagcacgacggccgccgcagccgcgacatgctggcgatgatcgaagcactgcgcgcgctgaaggcgcagggccgtgcgatcgaggtggtgggctacgacgtgaacagcagcggcggcggcaaccaggatcgcgatgaccgcatggccgccgagctgcggcgcctgtaccggcgcctgcccgacagcgcacgcatggtcgtgctgaccggcaatgtgcacgccatgctgcaacgtccggccgatgcgccgccggagatgcagacccggccgatggcatcggcgctgcgtgacctggatatctacagcgtgcggctggaagcgctgcgtgggcacttctggggatgcatggaccgttgcaaggcactggctctgctcgaacggccggcgcgtgcggcgcaggtcaacacccatgccgggcgcgagtacgacctgtgggtgtggatgccgcagctgagcgtcggcaccctggtggacccgtag

SEQ ID NO: 516438 - DNA, 162 bp, Stenotrophomonas maltophilia
atggcgacgccgctggaagggatcaagtgtagagccgagcccacgctcggctgctctcccccccctcagccgagcatgggctcggctctacaggtggcgccttacaaccagggcaggatccagtggtcgaccagcaggaaggcaaacagcgccatcaggtag

SEQ ID NO: 516439 - DNA, 207 bp, Stenotrophomonas maltophilia
atgcataacgagaacccgcttgccccgtgtagagccgagccatgctcggctgacgagaagcagccgaccagcggtcggcgctaccagggtgagagcaacggcatcgaacagcagcggcagcgcgcccggcgcaccgccgcctgggtcggcgcgatcgcggtgctggtctacgtcggcttcattctcagcggagtgatcggccgatga

SEQ ID NO: 516440 - DNA, 1458 bp, Stenotrophomonas maltophilia
atggcaccatcgcaggacacggacgaagctgtcggcttgctgcggattggcctgttcttcgacggcacccgcaacaacgcgcacaacctggcgcgcggccgcccgcagcaaccgcagccgcgaccggcgcagatgcgggccgacgatgactcgacctaccagagccggctgaccagcagctacgacaacggcctgaccaacatcgcgcgattgcagcagctgtatccggacagccgccgccaaacccatgcctcaccctcgctgtcgatctacgtggaaggggtgggaacccgcgatgatgccgacgacgatctgatcggactggcgttcggcatcggcgccagcggcgtgcgtgccaaagtgcaacgcgcattgcaggtgctgttgccggcggcgctggccgcgctttccgcgcgctggacaacgccgctgcggcgcgtgcagctggacctgttcggctactcgcgcggtgccgctgcggcacgtgacgtcgccagccagctgcagggctgggacagcgcgcgctggcggcagcagttgcaggcctcgggcctggcctgcacggaggacttcgcaccggctacaccggtggtgcgtttcatcggcctgttcgacacggtggtagcagtcaacagtgggcgcgcggacgagcagccgcaggtacggctgcgcgacggcgtggccgcgcacgtggtgcagttgaccgcgcgtgacgagcatcgccagcactatccgctcaccagcgtggcgcccccgtttgccgagatcgcgttgccgggggtgcatgccaacatcggtggcggctacaaccaggtggaggaaggaccgaagctgctgagccggcctcggcgccagcagctgcgtcgccccgccgttgccgattaccagacaccgccgctggcggtattgcaggccaccacggcctatgccgaagcgcaggccgatgccgagcgctggcggcaacagctgggggcgggcgcgaacgaggtctgggtggacgtctggcaccagtggcagcagcagcgccgtgcgggcagccgcagcgtgctgctggcaccgacgctgtatgtgaccgcggcggtggtgctgcgccggcgcatcgactggcgctaccaactgatcgcactgcaggtgatgcagcagcacgccatcgacgccggtgtgcagtggcgtggccatgccgccgatgttgccgagtgggcgttgccctccgccctgcagccgatcgcgcgtcgcctggtggctgggcaggcgctcacccagccgcaggaagcgttgctgcgccggcgttacctgatgcagtcggcgcactggaatttcgacgcgctgggcgacaccgcactgacctacgccgctgacgccggggtcagcgaactgccctaccggcccgggcccgggctgttctacatcaaccgcccgacggtcgacggcaagcgcgtggttttgcccaacgcatga

SEQ ID NO: 516441 - DNA, 762 bp, Stenotrophomonas maltophilia
gtgatcgacatcgtgctgggcgtgctgatcggcgcgtccgctctgttcggcttcatccgtgggttcgtcggtacggtggtggcgctggtgtcctggctgctggccggctgggcggcgttcaccttcggcaaccaggcatcccactggtgggcggcgccgcagtctccgggcagcggccattacctggccggctatctgggcgtattcgtggccaccgtggtgctggtaggcctggtgggcctgctgctgaaggcggtgatcaaactgaccctgctcggtggcgtcgatcgtctgctgggcggggcgctgggtgcggtccgcggtgcgttcttcgcctgcgtcctgctgttgctggccggcttcaccacgctgccgggtgagtcggcgtggcagcagtcgcagctgcgcccgatgctgcaaccggcggtggcgtggatgcaggcgcaactgccacagctggacgaggtattgccgcaggcgttgccgctgcaggccctgctgccggcgcggctgcccttgcctctggccgaggacgccccatcttcgcagcaggtgttgggcaagccgacggtgacaggcgataatggcgttctcaaccaggtagtggcgggcggcggatggccgcggcccgtggacgtggagccggagcccaggcgggcccccgcactgcccagcaacatcgagccggtgcccgcgcgcccggcccggcccgcgcctgacgcgggcgggatccccggccaggcacggccatcttccttgtaa

SEQ ID NO: 516442 - DNA, 639 bp, Stenotrophomonas maltophilia
atggtcgatgagcatctgctgcttgccggcgagcccatgcgattgctcggtagccgcgcgctgtattggccggcacgacaggcgttgctgatcgccgacctgcacctgggcaaggccgatgtgttccgtcgtgccggcatcgcactgcccagcggcggcaccgttggcgaccttcagcgcctgcaggcgctgctcgaggcacatgcctgccgcgaactgtggatcctcggcgacatcctgcatgggccggcgcatcgcgcggcgtggtaccagcactggcagggctggcgcgaacgcaatgcggggctggaagtgcatgtcgtgcgtggcaaccacgaccggcacctggcccacgcacagctgcaggtccggatccacgacgatgtcccgctcgggcccttcctgctgcgccatgaacctgtggccgatccggcaaggcatgtgattgcaggacatctgcacccacagatcgcgctgcccgcgttgcggcggcgctttcccgcgttctggctgcgcgaggggatgacgatcctgcccgccttctccgccttcaccgccggaatcgtgcccgtccccgcccctggcgagcagatgatcgcctgcgtggagggcgggctggaggcactgtcgacgcgctga

SEQ ID NO: 516443 - DNA, 180 bp, Stenotrophomonas maltophilia
atgtccagcccaacctgcgccgccctgctggtgatcgcggcctgcgtcgtgctgcaggccctgggcctgtcgctgcatctgcggagcgacgccggccgcgcctgcctgcaccagcatcgccaggcgctggtctgcctggcctggacaccaatggtcgaaacaccggcacgcggcgggtaa

SEQ ID NO: 516444 - DNA, 534 bp, Stenotrophomonas maltophilia
atgagtacgcacgaccacgattccgactccgacctgcaggcccggctgcgcgcgctgcccaacgagcgcgatgtgccggccgatggctgggcacgcctgtcggcccggctgccgccacgccaagcgcaggcggctccggtgaccaccggcaacgtggtggcgctgccgcgacgttcaccgcgccgcgtgtggttgccgttgggcgcagcgctggcggccagcctggcgctgtatgcggtggcgccgtggcgccatgcgccgccggacgcgccggcgccgtcccccctgcagctgcaggcggcggcgatgaccgaacagtaccagcaggccgttgcggcgctgcccgatgggcgcgcaccggaatggcagccggcgctgcatgaactggatgaaagtgcggcgcagatccgggccgcgctggcgcaggatccgcgcgccccgcacctgcttggccagctcaagcgcacctatgcgctgcggctggaactgacccggcaggcggcctatgccgtcgagtccggcctgacgacctga

SEQ ID NO: 516445 - DNA, 951 bp, Stenotrophomonas maltophilia
atgcgcctcggcatcgacttcggtaccagcaactccgccgccgccattgtgcatgagggcaagctgctgccgatccgtttcggcgatgccgagcagttccgcaccagcgtgtatttccccggcgtggtgcccgacccggacgacttccagctcgacgatgggcaggaacaccagctgcagcagatgatcgacagcgccgcccgcgcagcgcgtgccgccggccaggaacgcacgccgcaggcgctgcgccgcgaagccctgcgcgccctgcgccgggaatggatggaagcgcgcgccggcaaggaacgcagcgccagcgacctgctgcagaacgccgtctacggcgatgaggccctggaagcctatttcgaggagcacgaaggcaacctcgtgcagagcccgaaatcaatgctcggctacaacctgcacccgcgtgcaaagcagaccattaccggcatcgccgcgcacatcctcgaacacatccgcctgaccgccagcgcccagctcggccagccgctgcgcgcggcactgctgggccgtccggtgcagttccgcagctcgatcggtgcggccggcaacgaccaggcgctggacatcctgcgcgaagcggccacccaggccggcttcgatcacatcgacttcctcgaagaacccgctgcggcggccatgcattaccacgctgaaagccgcgagcggcaccaggcggtcatcgtcgacatcggcggcggcaccaccgacatcgcccacgccgaagtcggcggcgacgacgccccgcgcatccatcgcgcctggggcatcgcccgcggcggtaccgatatcgaccttgcgctgagcctgtccagctacatgccactgttcggccgcggcatcacccgcgtgcccgcccaccactacgtggaagcggccaccgtgcaggacatgacccgccagcgcgatttccgccagcactag

SEQ ID NO: 516446 - DNA, 915 bp, Stenotrophomonas maltophilia
atgaagaagaagctaatcggcatcggagtagccgtagtggcgacgagcattgtgatcggtgtggtttggggttaccggccacaaacgaatgacgctcagcgaacgctcgacaagaacgaggtgcaagagaatgcgcccgttcagaacgggaattcagcctccttgcgcgaaacgacagcccataaactggaggccgaaaaaaaaattccgccagggtcatacaagcctttgggccccaaagcctacgagatcatccgtggtcgtgaattccgtgcgccaggcgacgcattggcccatgtgaagcagctgattcggcgatccgaagcgggtgacgccacggcgacctacgaaatctatctcaccatcgagcaatgccaggcattcacctctgatcgcgccgacgagttggcccaatccgctaccagcctcggttccggcggctggttccttgaaagatcagaacgacttctcaaggagtgtgaatcactggcgctggatcaagatatctatcacgccgattggctatcaaaagctgcggccatggggtcgcaagaggcaatgctcgcttatgcagtgtcgccacaagaagtcctcgggtcgctcgatgaagtcatccatgatccagaaaggcttgctcaatggaaagaaaattcatccaggtatctcaacgagatggccaatcaaggaaacattgcggcgctgggaagtttaagaagggcctacagctatgggcgaacacgcgatagagatccggttgcagcacttgcttatacgcgtgttctgaatcgcatcaatccccagctttacgacaataacgacattgtcaaagccgagaacgatctcacaagcaggcagcgatccgaggcgctcgcgctgtctgaggaaatcttcaagaactgttgcatctcaagataa

SEQ ID NO: 516447 - DNA, 846 bp, Stenotrophomonas maltophilia
atggatgcatatgacgcgctgatgcgcgacggtttcgtggtggtccgccaggccattgcaccggccctggtgcaggacatcaaccagcgcatcgatcgcttcaagcagcgcaatccgaaggcggtcagccgcaatctcgatgcgcaccagcgcttgtaccgggtggtcaatctgcatctggtggtcgatgcgatcagcggcctgctgaccgacaacgcagccatcgatgtctgcgaccgtttcctcggcgagcccaccacgctctacaccagcctctactacgaacgcggctcggaacagccgctgcaccgtgacacaccggtgttctgcacctcgcccggcgaacgctacctgggcgtctggaccgcgctggatacggtggacgacagcaacggcccgttgcgtgtggtgccgggcagccatctgctgcccgccatcgacgtccaggcgctgcgccagcaggtgttcggtgatgggccggtcagcccgatgtccggcgaaggctgggccgcttaccaggatgcggtcgcgcgccaatgcgaggaggccgggctgcaggcgcagccggtacatgtgcagccaggcgatgtgatcgtgtggcacccgcagctgttccatggcggtgcgccgcatccttctgccggcacccgtcgcagcgtggtcatgcacgtcactccgaaatcgatgccggtcgggcacatggacgtgttctacggcgccaagcccgcacagagcaaggccccctggcgctactaccggcgcggcgagcgcgagatcgcccgcttcggccaggtcgattttggtcatgaatacacacggcgtacctggttcctgcggcgcgcctga

SEQ ID NO: 516448 - DNA, 879 bp, Stenotrophomonas maltophilia
atgacgatgcccagccgattgcagctgccgccggggcgctggcccagcctgcttgacggcctgtgcgcgcgctttccgcgcatcgaccgcgcgcagtggctggaccgcttcgcccgtggccgcgtgcaggatgcgcagggcagggcgctggcgccggaccagccgtggcaggtcgggctggaaatccgctacttccgcgaagtggccgacgaagcggtgattccgcatgccgagcacatcctgcatctggatgacgatctgctggtggccgacaagccgcacttcctgccggtgaccccggccggcgggcatgtgcggcagaccctgctggcgcggctggtggcgcgcaccggcaatagggaactggtgccgctgcaccggctggatcggctcaccgccgggctggtgctgttttcgacccggccggccacccgcgatgcctatcagcggctgtttcgcgagcgtcgtatcgaaaagacctatgaggcgctggcaccagcactgccgggcgtggccttccccctgcagcgacacagccgcctggtgccgggcgagccgttcttccgcatggctgaagtgcccggtgagcccaatgcgcgcagccgcatcgaactgatcgaagccggcgggccggtctggcgctatcggctgctgccggacaccgggcgcaagcaccagttgcgcgtacatatggcaatgctgggggcgccgatcatcggcgatgacctgtacccgcagttgcaggcgcggagacagggggcggttgagccctcgctgcagctgctggcgcaggggttggccttcgacgatccgttgagcggggagccgcggcggttcagcagccagcgcggcctgtgcctgcccggccagggcggataa

SEQ ID NO: 516449 - DNA, 270 bp, Stenotrophomonas maltophilia
gtgctcctgctggcgggctgccagagcgatccggcactgcatgcgtcgcggatcggcccgacacagtaccggttgcaggtcgatcgctgccacgtgatcgaccgcgcgcaactcgaaggtgacctgcgggtcctggccgcgcggaagtgcccggcgggcgcgggtgcgctggaaaacatccagtccctgccgagccggcagggcagcctgtttggcgagtgcctgcgccgcgctgcgctgcaggccgaggtgcgctgcctgacgccttga

SEQ ID NO: 516450 - DNA, 708 bp, Stenotrophomonas maltophilia
gtgccggccaccacgccggccttgccgatcgccgccactgccggtgcaccggcagcggccaccgcgagcacaaccgccgcgcccaccgccgacgatgccggcgccttgcccttgccggagctggtcctgcctggcagcaagcgcggtgagcagggcgacggcagcgacctgaccgcgatcggcgaccgtgccgcgacgccgctgctgcatgcccccacccctgcggcgctgcaggaactgaagtcggcgcttgccaccggtactgccatcttcaacggtgaaccgacgccgaagccggtactgggcgacgatggtttcgaccaggccatcggcacacgcctgggctggctggccgaccagaagatcggccatgcccatatccggctcagcccggatgacatgggcccggtggacgtgcgccttcagctcaacggcgacaaggtgcacgccagcttcagcagcccgcacgtggatgtgcgccaggcgctggaaagcagcctgccgcgcctgcgcgaactgctgggcgaacagggcttccagctggcccatgccgatgtcggtcatcaatcaccgggcggtgacggtcaagcgtcggggcaggccggcagcggcggcatgatgggtgacggagaaccgtcgccgggcgacgccgggatgtcgtccgcgcagatgatccgccagcgcgggttgctggacgcctacgcctga

SEQ ID NO: 516451 - DNA, 741 bp, Stenotrophomonas maltophilia
atggatagactcagcctcattggactctttctcgccctggcctcgctggtcggtggcagcatcctcaagggcgccgggctggcgtcgttgtggtcgcctgcggcctttgtgattgtcatcgtcggcaccgtcgcggcgatcctgctgcacacctcgccggccgtgttcaagcacgccttcaagatcgtgcgctgggtcgtgcgcccgccgaacagcgatcgccacgagctgatccgccagatcgtggaatggagcaacatcgcccgtcgccagggcctgctgggcctggaatcgcaggtggaagcacagcaggacccgttcctgcgcaaggggctgcagctgctggtggacggcgtggagcccgaatcgatgcggcacatgctggaaatcgaactgggcagccaggagcaccaggaccaggccggcgccaaggtattcgaggcgatgggcatctacgcacccaccctcggcatcatcggcgccgtgctcggcctgatcgcagtgatgaagaacctggccgacccgagcaagctcggccatggcatcgccgccgcgttcaccgccaccatctatggcatcgcctcggccaacctgctgttcctgccgatcgccgccaagctcaagagtgtgatctcgcacaacacgcgcgaccgcgaaatggtcatcgaaggcctgatctcgatcgcccagggcgagaacccgcgcaacatcgaaaccaacctctccggcttcctgcactga

SEQ ID NO: 516452 - DNA, 525 bp, Stenotrophomonas maltophilia
atgccttcgattgccccgcgcgtccgcccacggctgctggcctgtgccgccgtgctgctgtccctgtccgcaccggcactggcccagcgcacggtggaaggcgacctgcagcagcagatgtcgccggccgagttccaggccgccggcctggacaagctcagtgccgccgaactggcctcgctcaaccgctggctgcagggcaaggtgcaggccgccacgacccaggccgtcgccaccgcacgcgaggaaggccgccaggaagtgatcaagaagaaccgcggcttcttcgacttcggcagcgacgagccgatcgaaagcacactgcagggcgagttccgcggcttcgccaagggccgtcgctacgtgctgcagaacgggcaggaatgggagcagatggacgccacccagttctccggcagcgccaggcaggcgccgaaggtgagcatgcgcccgggcctgatcggcgtgtggtacatgaaagtggacggcgtgaacgtgcagccgaaggtgcgccgcgccaagtaa

SEQ ID NO: 516453 - DNA, 489 bp, Stenotrophomonas maltophilia
atggacgcaacgccccccgtatcgcccgcgccgatgccgccgcccttggcggcggtaccggcgttcagcgcccaggatgccgaccacctgcgcatgctggccatcgcgcactacgtggtcggtggcctgatcgcactgttctcgctgatcttcatcctgcacatcgtgatcggtatcgccgccctgaccggcagcctgccgatgaagtctggcggcgagccctcctcgctggccgaacagcagctgatgggctgggtgttcaccatcctcggctgcgtcatggtgttcgggggcgtcacgctgggcgcgttcgtcgcctatgccgggcgctgcctggcacgccgtcgccgtcatctgctgtgcctgatcgtggccggcctggcctgtctggtcgccccgatcggcaccgcgctgggcgtgttgagcctgatcaccctgctgcgcccgcaggtcaaggccgccttcgatgcaccgggcgctgccctgtga

SEQ ID NO: 516454 - DNA, 423 bp, Stenotrophomonas maltophilia
gtgaacgccgcaggcaatccgccaccgctgccgcagcagaccctggcccagctgcagctggccagccatctgcagacgctgaaagtgctgttctacgcgctggcggggttccactggctggccgcactggccttcaccgccttcatcggcctggtggccagttcgcgcgggctcgacgacggcgccgtgctggccacggtctatgcggcaatcgccgtgctggccgcggtgctgggcttggtgcagctgcataccgcccgcctgctgtcgcgccgcaccggtctggccgcatgccggcgtgcggcctggctggccgtgctggccgggccgctgggcatggcgttgaccgcctatgcgctggtgttcctgtccaaaccggagatggctgtcctgttcgaccgcggcgaccatctcagcgtctga

SEQ ID NO: 516455 - DNA, 603 bp, Stenotrophomonas maltophilia
atgatcaagccgttgctgctggccgccctgctgtgtctgccgctgctggcctgcgacggcagcgcagaaaacgccggcaagggcctgggcacgcgtgcggccgagatctccggcggccttggccagaaggtcagggacgccaccgatgaagcccgcaggaatctgatccgggacaacaccgcgctccacgccgaggggcagccgcgcgcggaaatcaccgccgacggccagctgttgatcgacggcaggccgatccccaccgatggggcacagcgccgccagctgctggatcatcgcaacctgctgatcgccagtgcctccgaccgcctggacgcggatcaaacctacgccaatgccgccgacgccacgttgaagggactcctcggcaacggtggtgatgtccggaaacaggtcggcggtgagtacgaccggctcgaagagaagctcaaacgcatctgtgcccgcatgcccgcgctgttggccagccagcaggccctggcacgcgacatcccggccttcaaggcctacgcgacgatgacacagaatgacgttgacacctgcggcaagggcgacggctccctctcgatctcgttcgacgactga

SEQ ID NO: 516456 - DNA, 174 bp, Stenotrophomonas maltophilia
atgccgaactcgccgtacgttctggtcatgcccgatgggagtacacgggagggcaccaccaatgcgcagggtgaaaccgagcaggtggtgaccaaaggcccgcagaacatccatctcttcgtcggcgacggtgaaaccaagcacgaaggctattacctcaacgacgaagcgtaa

SEQ ID NO: 516457 - DNA, 2922 bp, Stenotrophomonas maltophilia
atggcaaccggaaatttcagactctactatctggccgataacggccagcagcgtcccgccgcgaaggtccgctaccggatcctgcagctgcctgatcgcaacgaagtcgtcaacggaaccaccgacgcgcagggcctcacgaagttcgtgaacaccacgccgaatccgttacagaacccgttggacaagggggtcaaacctgctacgcaggttcctttccttccgcccacaacaattcgattccaactggaagtctgggacttcgaccagcgcaagtgggcgcaaccggatttcgccggccgccagaagaaggcggtctcgcacgatatcgagcttcagctcaacagcaccatcatgacgatggcgccgatccagtgcgcgcttgagctgcagccgtacttccgggtgaagttccagatgcaggccgaccagaaggcgatcccgaatgcgccctatctggcctatggcgtggatgcgaaggggcgtgaagttgccggtaacgacgccgcgggccgccccatcaagggaaacaccgacaagaacggcatgacgccgcgcatcacctgcaacggtcgtcgtcggttccacttcaatctgccgggcaccaaggtcggccgcagcaccgacatgctggaccccctgatcaagggacaatcgacgacactgtacgtactgggcatgaagagccaggtcgcgatgagcgagtccgggcagggccgcactgccaaggtggacggcaagatcagcgcgcccgcagtgctcaatgccgaagcgcaggagcttctgctgctgacgccggatgtgtggagtgagtttgaagaactgagtggcatgatcgagaacaccatggccggcctgcatcggtccagggcgaacctcgacaatgccctgcagggccgcgatgcggcggcggtcgccgctgccgaaaaagcgctgggtatcgccgaagatgatgtggcgaagatgctcaatgacaatttctccaagttgaccgacctcaaggaggttgtcaccttcgagacctatgacaaggggcgccatgcaggaaacggcagcctggccgatcgctctggtctgcgccgacgctatatcccggcgaagaaatacgaagagctcaagaagcgccgcatcaagggcattccgatagcggtgaatacgtcggtcggaaccaaggtgaagggcgggccagtgagcggctcaagcgaaggaaagcacgaggtcacaagcaccaagcctttcgatgccgaggacttcaagaaatcgattcgctcgatcacgttgcaggccaaagccgagacaaagatggatccgttcgtctttgacatcatcgacgccggtggcaatgagtttgtggagcatgtaaagaagagtgactcctacgaggttgcgagtgcatcccagtggctgcgctttgttgccggtgcgggagccagtagtgccgcgacctggaatccgtcaaagggcgtcgctgccgcgaaggccgaggcaagtgcgtcggccaagctgattctgttcgaggggaaatggacccacagctactccgtgcccagcatcaagggttggcagatgcagtttggtgacgttgatctcggcgcaatcgtcttcgtactggcctgtgaactgtacggtttcgttggtgccaaggggacgctcgccggctctgctgaaatcaaatatgtaggcaagaagcccgttgccagcgcgcagcagcgtgaccgctcgcaatcgctcgctgaaaattttgacagccagcgagggctgccacgcgcacagcttgatccggcacgtgtgcggatgttgggtatgaacgaatcggctccgaagggaagcggggcgggtgttcagctgacagccgaagtgttcgcgggtgtggagggcggcatcactccttccggtgatctgcggtggctgccgccagaccgcaaggagcctgtaagctttgccaagatcgcgttggatgtcgcggtcaatgcgggtgccggcgcaagtgcgcaactgaacatctacttcaatagcgggaagttccgcatccgcgcgtctgcgcggctctgctggggtgtaggcgccaagggggcagtggattttgcggtggacgccggtggtatgcgggagttcgtgaagtgggtgttctaccagttggcccactcgggattcatcaagctcacctacatcgcgcaggatgctttccaggcgctatccaaattgctgttcatggtgattgcggaggacagcgatatggggagatctttggctcagaccgttgcgcagatagatgcgggcttcaaggacctccagggcaggttggagcgtgccagtgcccgcgatgcgctcgtcaatcgcatcaacagcaagccggactggctcatttacgcgacgcctgagacccgagggatgctgctctacgctgttacccggcattaccctgaatcacacgcgcgcaatcttccagaggtctctccgggttggggcgacatcgagatccacgcactcccgggacataagcaggctgtactgaatattctgcagcctgtcacatccaggccggaatggatgaatgtcatgcagcacatgacgatcgaagggaagcggcggtccgacggaggaaaggcggaaggcgacgtggtgcgcttcctcgactacggttactcgttgaacaatgatctcccgaatgtgttcgggacgatgaacaagcgctcccgcgacaaggtcggggatgtgggaaattcgtatctgcaatcatttcttgagaagcgctcgaagctgctcaacgaattcccgaaggggtatgaagtagcccagatcatgaagatcaatgacccggtccaattggcttcgctcgacggcactgaggcgccgacgttcgccatgatggaccctccggggctttggctggaccgggacgatcagaccatgcttgcatga

SEQ ID NO: 516458 - DNA, 912 bp, Stenotrophomonas maltophilia
atgtctatgttctcgcttcggacagctgtcctgttagccatcctaccgctcactacctcggcgtgcgcgaaggaggaaaggtcatccccccaggcagaacgcggctcaggtgctgaaacgcagcagaagatcatttcggacctggttccgatcaagggtggcacattcctcatgggcgattttggccccgtacacaacgaggacaaactgccctacagcggagcaatgaatgatgacgtcctccgtaagatcacgctggacggcttttcgatcatggcccacaaggtatcaatcgaggattttgatgcctttacggacgcaaccggccgcccaaaagtaggcacgaccaagatcgacgctgatctgtatcgtgcagacctcaaggctgccgccggagtgaagtggcaggacgccatggacttctgcacatgggccgggaaggggtctgggcgtaagctcacccttccaaccgaggcgcagtgggaattcgcagcgcgatcgggaggcaagatggttttgttcgcgaccgatacaggaagtatcgatgatggtcgcaatgtggcgagctattcccagtacgacgacggtagcggaactgccttgggcaagttcccccccaatccggccggactatacgacatgacagatcacggctatgagtgggtacaggattggtacgaggaacactacacgggaggagataccaagaatcctcttggcccgaagaagggaaccgaaaaggtaattcggggaaatgccagtcgcggcggtgattcactggtatttgttgccatgacgttcgcgcgtgatcaccggcttccggatccacccaagctcaagaatgctcacggaaatgacattgacgcaaatcagaacgcgagccatgggttccgctgcgtcgctcaggattga

SEQ ID NO: 516459 - DNA, 669 bp, Stenotrophomonas maltophilia
atgggcgattttggccccgtgcacaacgaggacaaactgccctacagcggggaaatgaatgatgacgttctccgcaggatcacgctggacggcttctcgatcatggcccacaaggtatcgattgaggattttgatgcttttacggacgcgactggccgcccgagggtaggcacgaccaagatcgacgctgatctgtatcgtgcagacctcaaggccgctgccggagtgaagtggcaggacgccatggacttctgcacgtggacccgaaagggatcaggccggaagcccacacttccaaccgaggcacagtgggaatacgcggcgcgatcgggaggcaagatggttttgttcgcgaccgacacaggagccattgatgatggtcgcaatgttgcgagttactcccagtaccaagacggaagcgggactgctttgggcaagttccctcccaatccggctggactctacgacatgaccgaccatggctacgaatgggtccaagactggtatgaggaaagctacaccgcaggagatgcaagcaaccctctcggtccgaagaaaggaacggagaaggtcattcgaggaaacgacagtcacggtggtgattcgcttgtattcgtagccatgacgtttgcgcgggatcatcgcccccccgaatcctccgaagtttag

SEQ ID NO: 516460 - DNA, 861 bp, Stenotrophomonas maltophilia
atgcacttgaataatggcggaatcaatcggccaagtctgctctcagggggagcgcaggcaaaaggccagaccccgaattcgggccgtattctggcagacatggagggccggcaggcgaccgcgtcgccccgtgctgcgcgtgtatcgtcaggcggcaaccgtcgcctcggcctatggctggccatcgcggggaccgtggcggtcatcgccgggctgaccgtctggggcatgtccggcagcgatgactatcgcgagcccggcgagtattccctgaccccggaaacgccccatgccaccggccatccggatattccggcaggcacgccacgtgatggcgctgcgatgatcgtcgatgcaccggccgctgcgggtgatccggcgttgcccgcacctgcaccgatggagaacgcgaccgctccagccgaagctgctgccgcgacggccgctgccggtgcctcgaccgctgccgcagcgccagcggcgtcttcacgtggcgcggcgcgcagcagcagccgcagctctgcgccagcggccggcagcaagggcaagcaggatgaaaacctgctcggcaccttgctgggcatcatcaaggaagaagacaagaccaaggcgaaggccaagagccaaccgcagaacatggatgacttgatcgcgcagatcgaggccgaccagcgcaagcgcaccgaagacgagcgcgcggccttcgagcgcgtggccagcaagaagtccgcctccaccgaatcgaacatccaggcccagctgcgcgcctgcccgagcccggcatcgttgaagggcgtcgattgccgccgccggatctgtgcagcggtgagcggcaaggacccggcctgcccggcgatgtga

SEQ ID NO: 516461 - DNA, 441 bp, Stenotrophomonas maltophilia
gtgctcctgcccaacgcactccgcgactcccatgtcttctggctgctcgcatcattgatctggccgctgcctttctgcgcgctcgtccatgcaggatttcaacccgatcattggcagttgcaccacaccgactccggcacagggccctaccccaccggctcagtcattaccttcgcactgatcatcgctgaagagaacgtcgcgctgggcctgatggtgcaagcttggcgattccatcgcttgtggctgcgcatgctgatcggcatcctgccgtggctgggctggaccctgctgtggggcgcgtcggccatgcatcaatcgcccgtgcgtggcgtgcacatgctctggttgctggccgcctgcgcacccttgctgctggcgctgcttgtgatcgagccagtctccgcctgccctcggctacggcgttggctcagccgctga

SEQ ID NO: 516462 - DNA, 402 bp, Stenotrophomonas maltophilia
atgttccttcgcggtatgcccctgctgatcgccctgctgctgcaactgctggtggcgctgctgttgtggacactgattccattgggcatgagctggtatcgcgacaccatcggcttcacgtcgcatcgcgacatcggcctgggcatcgcgcagttccatgtcttctggatgctcatcggcgtccagccgctgatcgccgtgctgcgaccgctgtgggccaagctgctggtgctggcaattcctttggctttcgccacctggacgctgatgcacaaccatccgctgcgcatgctctatttcaccttcgggcctggcctgctgacactggctgccatcttcgccagccggcgcctttcatcacccggaccttcgctgcccagcacggacaccgcagatgcctag

SEQ ID NO: 516463 - DNA, 732 bp, Stenotrophomonas maltophilia
atgattactcaagagcaggtgggacttaggggcaatggccccctcgacactgaggtcggtgtagtctccgatcttcgagttcagcatgctgtaaagaatatattctggcgcgatggtgataatgagggaatggcggcaactggggccttcgcagctgcgctaggcctcagtggaccagcagcaggtatggcgataatgtctgccgaggaaatggccgagccggttactaaggtcgagttccggcttggcgatctcgccgtagaagggcttctctggaactggccgtttagcgaaggcgatcttgttcgagttgtcgggacacgggatagcgaaggaaaattctttgctatctcagttcttgatgagcagaagaggttgatcgtctcctacccgcacgttagtgctggctcgatagcgcattggattgtcgtactgaaactatcactaattatatcgattccttggtggggacttataataggatggtttgcctggatgacctccgcgccatttcatttcttggctcgttcgtacttgattggtgttctcgtcttttgtgtaattgggtatcgaatcggtcgtagatttgtcagttgcgccagaatggcggattcagttttttctacgcttgggtggaagggggcgaggcgaatgaatctccgtagagtgactaagaggaagcgacagccgggcgaccatcccgccctaggcgatacctatttcagatattga

SEQ ID NO: 516464 - DNA, 1176 bp, Stenotrophomonas maltophilia
atggctaccaagtgccgtcagtatgaattatctgtatgcccggtccacgaattagaggcggcgcagaaagaggtcgcaccctccgccgccagtacccgcatcctccgcgacagtggcgttgatcgcttcgtcaccaccaccggcgcgttcctgctgaatcgattcccgatgaagggcatccaggataccgccggcaatgccatggtccggttcgtgcttctgacacgggcgttgatggagcgcgacgaggccatcagcctggtggccgaagaactgagcagcggccagcagggcaagcgctatttcctggagcgtatccagttctaccgaaccaagggcagcgcgctgccgatgcagttcgcacttcgggacctggagctgcatcacggcgcgctggcgatgcgcaagcgttggcaggctgcggcagaaagcagccgcaacgtggtgcgcctgaactcgctgaccggtgtgctggaaatggtgaacttcatccatctggccacgaaggtggacaagcagacccgtgactacgcgacgctattggcctctggaatgtcgcttgtggctgtgtataccggtgtgcatgaggctgtggcgaaggagttttttggcgaaggcagcgccagtgccatacggatgaaggtttccgggagtgtgatggcgggggcgggtagttctattggggccctttacagcctcgctgacgctctgagctctttcaggaatggcaaatgcgctctgtccacggtgctcttggtcaaaggcgggacagttgggataagcgggtcggctcaatttttgacggcgcttgcttattcatctcctgtaatcgagcggactctcggaaagaatgcgctcaccctaggactgagaaggctgcaagctggacttgagatcgctgccggacgggagggcggaagtatagtcgcatcgcaagctatgaggcgcgttggcgtatggattttgcgattaagcggatgggagttggccctagctctactggtcatcgaggtcctgatctgggcgatcagcccaaacgaattggagaaatggtgtgcgtcaaactcatttggaaagagttctgggaagagaggaggtagcttctacgcaacagcgcgggagcaacggctggcgttcgagaaggctcttggctctgtttcgatgaggacgcaatga

SEQ ID NO: 516465 - DNA, 756 bp, Stenotrophomonas maltophilia
atgagtatcgaattccaaatgaaccgtgccgaacatgggttgcttgatactcacgctggcatcatctctgacttgaaagttcagcatgtagtgcagaacgtcttctggcggagaggagaccgcgaggggatggcagcgaccggcaccattgcggcagcgtttggactcagcggtccggccgcaagtatggcgatgatgtccgctgaggaaatggaggagcgagttacgtgggttgagtttcggctcggcgcaatcaaagtaaaagcaatgctctggaactggccatttctggagggcgatgatgtccgagtagttggccgacatgagggcgacggaaacttcttcgccctttcagttctgcaagaacagagtaggctgattgtgtcttatccgcacgttagtgcgggtacgtgggcgcattggatgacggttgcaaagtactccctgatgttctcggtgccttggtgcgcacttgtcatcggttttttttggctggttcagcttaaggatagtgtaggcaggaatgagggcggaagtgtgttggtagctcaggcctatttggtctgcgttctgctcttctgcttcattggatacagaatggggcggcgtttcactcggttcgcaaagatggctgatgcaatattccagacgcttggttggcccaacgcaaagcggataaatctgcggcggatcaccaagcagaagcgacagccaggcgaccatcttgccttgggcgatacctacttcaggtactga

SEQ ID NO: 516466 - DNA, 714 bp, Stenotrophomonas maltophilia
atggtgaacttcatccatctggccacgaaggtggacaagcagacccgtgactacgcgacgttattggcttctggaatgtcgcttgtggctgtgtataccggtgtgcatgaggctgtggcgaaggagttttttggcgaaggcagcgccagtgccatacggatgaaggtttccgggagtgtgatggcgggggcgggtagttttattggggcggcttacagcttggcagatgcggaacaagcctatgcgtatccaaacaagatggcgttcgtagcatatcttgccaaggccctgacgctggcgacggttggatcatctcaattcctaaccgcgctcgcctattcatcccctgtaatcgagcgcagccttgggcggaacgcgttgactttggggctgagaggactgagggctggacttgaggcggcggccacggagggtgggaatgtcgttgcgtcgcaggcgatgaagcgagtcggtgtgtggatgctgcgattggcaggatgggaggtcgcattggttctgctcggcattgaaatattcgtatgggccattagtccaaatgacttggagacgtggtgcatggcaaatgcgttcggaaagaaggggagcaaggccttagggggaactcgcatgtctagcaacagctatgtaaattcactagagcagcaactggctttcgaaaaggctattggctcagtttccgtgaggtcgcaatga

SEQ ID NO: 516467 - DNA, 390 bp, Stenotrophomonas maltophilia
atgagtcgctacgatgcagtattcagtggctttccgtcggcagggttggttgacgatgggaataaggtaggcaggatgctctatgcgcagccctcggatctttcgccagagttcatgcgcgaagtgagtgaggtcgtcaacgcgcgtacgttgaaggtagggcgccacaatgtggagaaagtgatgtcatttttgggtcccagcaacctggagggtggtttgaagggattctgggtggcaatgcctttgatgtgggggcatggaatggacgatccggcggctctgatgccaacggagatcatcgcgaacgtgcgagttccagcgggcccagcatcgggtacgctgatggcaagtcgccaagacggcaacgacgaagggcatcaggcatga

SEQ ID NO: 516468 - DNA, 951 bp, Stenotrophomonas maltophilia
atggaattggtgccgtctcaggtcaccgggtacacctactatccagatggtcgcgttgaagtcatggatatgcgcaagccaaattcaactgctgcacagaagggcacgccgctcgttctgccagcgggcggcgacgagcgcaatggcacttggtctgggcagggggtggtctacttgaaggacggcagcgctgatcagattcttcgtgaagttcacttcgattccaacgaaaagcatggattggttcgcttgaagagctattctgcgaccattgcgcccttcgacgtgacgccgattttttcgcagagagcctccacacaaagcgaggtgcttcgctacacgtttcccgccgaggccgtaccattgagtgccgcaggtgcgcagttcagtggaattggtggttacacacgtgtgcgcagttatcagcatcgcaccgggggcgagatctatgagatcttcgctcccagcgcgaagtatccccgtgaacgccagtggcgtacgctggacctgaatcgtcaggagaactacgacgcaaatggcaagctcacgcgcgtgatcctgtccggtccggtatccgatgacgacggctacaccgaaaacctgcgcgcctacgccgagaagggcatattgaagctcacgcccctcaccagcggttacagctcttaccgcgtgtatgactacgacgctgccggcaaagagaccctgtcgttcgtgtgctggcgctatgaagtctcgaccaacaagccctacgcccatttcccttggtgggagcctgatcctcggcctaagcgcagtcgtgaagccgaactgcagtacggcaggacgcaggtcggtacacgctgcggtacgccagacggcaagatgagcgtggagggcatgggcccggtgaagaagctgatggaaaccaagtacgggtttgggacgaccaagctggggttgccgggcgagtag

SEQ ID NO: 516469 - DNA, 819 bp, Stenotrophomonas maltophilia
gtgcctgctccagtgcatcgaacacgtcggcatcgaggttgttgcgtgcctggtggtgcaccgacaggcacaggaactgtgcgtcctcgcccacctgcggatgctgcgacaggccgaagcgcgcgcccggcgccagtgcccgccattggccggcaccgtcgatggtatgcgcgcgcacgcgcagcgcgtccagatgctgctgcgcgcggcgctggccgcgggcgttgtcctgccagccgtaggggccgcaggtgtcgcggtcgacgatgccgaggtcgttgctctgcgcggcctcggcgctggcctggcgccgctccagggtgcggtagtcccaggtcgcacgctcgaccttgcccggtcgccagcggtgcgcggtggaccactgctgcacgctgtcgctgcgctcgctttcgtcgcggcgatggaagcgcacgctgcccagttcggcggtgtcgtggctgtggtcggccagcaccagcgtgtgcgcgccgaagtccgtgccgccgggctcgccggcatgctcgaaccagtaatagatgccctcttcggccagcaggcgctggacgaaggccaggtcgctctcctggtactgggtggtcaggctgcgtcgtgcgtactggctggcgtcacccagcgaccagcgccaggccggggccagcccgctgtagtcggcaaacaggtcttcgacgatctcgaccacggtcttgtcgtggaagacgtagctgtccacccgctgtgacaggaacgccagccacggctgcaggcgcagccggtagcgggccaggccgccgttgctgcccagccgctcggcggcggtga

SEQ ID NO: 516470 - DNA, 624 bp, Stenotrophomonas maltophilia
atgaagctctggaggaagttcctggggcaggcgcttgagacgaagcctgagaaggggggggagcagttcgtcttttctagtgcaaccgaagactactacccttggttcagcgaaaaagttccaaccctggaggtcgacaaaccggcaaatgccaaaacttggacgggaatcagggaactcgcggatgccaattcggaagcctatcagcgtgtcttcacgaatgtcccccgcgactcattccctcgctacgactctgtgtttcatggattcccggcggcaggtcttagtgacaaagggcacgtgcggcgcatgctctacgcgcagccggcagatctgcagccagacttcatgcaggagccaagtgttgtgaacgactacgtgaccggtgcagtggggcggcatgacgtgcgtaaggcgacggatttcctcagaggtacccaaacgcgccgcgggattcagggcttctgggtgaccatgccactcctctgggggagtgagatggatgatccggctgcagcgatgccgaacgagatcatcgcggtcgtacctattgagggaaatcggtcaactgaactagcgtactccggtcgacatggttcttggggacacggagagcaggtatga

SEQ ID NO: 516471 - DNA, 1557 bp, Stenotrophomonas maltophilia
atgagtgggcatctactgttgagggcgatggtggccttgggggccctgtgtggagtgcaaaccgcgcttgcagactgcggttcgtcaaatgagaaggacctccggtttcaggatggtgggatggtgatcaagttcaggccaagcccatcggacgaggtggatgcggtaggcgccagccttagtcgcgcgaataaagttgccccctacgtacggatcagtgtcgaaccaaacctcggtgagttgcacaacaagccgttcaactcgaacggcggtgctatttattacttggaggaaagcgctgaagggcaacggctatgccgcgttgaagagtggaagaggcgggaatccaaattgattgggcaggtgccacctgagagcctgcatcctgcggtgaggccggtgtatccctatttcgagctgagcaggagctatgagctccattatgactcggctggtggattgacttcgattcagaatatggatgcgaaagggcgtagggtcacaacgttctgtgcactctacgacaaaaatggtcgcatagaagtggcaaatgagagttctgggttgattgtctcggataagccagagttccagtgttcgcagctgcgcgatatgccatcccgcgttaccactcggtacttcacttatcggccggatggattgcgcgcttccgatgtagtcaagcaggccacccgtaagccaggtgaggatccctaccgcgaggacaccggccttggaacggaggtgaccgatggtgcctggactgtgggcggcttcgtcaatgtcgacgatgctgaattgaaacggatcgttggcattcgcttctatggcagcgaaaagcgagggcttgtaggggtgcaaagcccttccgctacgctggttccatctgacgccactccagttttcgcagagcgcagtcggagcgtgtcgcaggaagtgcggtacacgttcccgggtgagcgtgttcctccagaggtcgccaaggggtactttgaaggagtcacaggctatacccgtgtgcgtgagtatctgcaccgttcggatagcaggattttcgaagtattcggaccgcaggcaaagcaccctcgggaacgccagtggcgcaggctggatctgaatcgtcaggagaactacgacgcaaatggcaagctcacgcgcgtgatcctgtccggtccggtatccgatgacgacggctacaccgaaaacctgcgcgcctacgccgagaagggcatattgaagctcacgcccctcaccagcggttacagctcttaccgcgtgtatgactacgacgctgccggtaaagagaccctgtcgttcgtgtgctggcgctatgaagtctcgaccaacaagccctacgcccatttcccctggtgggagcccgatcctcgacccaaacgcagtcgtgaagccgaactgcagtacgccaggacgcaggtcggtacacgctgcggtacgccggacggcaagatgagcgtggagggcatgggcccggtgaagaagctgatggaaaccaagtacgggtttgggacgaccaagctggggttgccgggcgagtag

SEQ ID NO: 516472 - DNA, 282 bp, Stenotrophomonas maltophilia
atgccgccgccgaacggcggggccacctcgccgttgtacagctggccggtgatgcgcggctggtcgatgtcgccgtgcaggaattccaccagcacctcgctgcccacccgcggcaggaacgcggtgccccagttcgggccggccacccattcggccaccgacacccagctgccgctggtgtggtcgccgggggcatggccgggctgcgcgctgccggtgtcggtcaggccgcccgggttgggttggctgccgcgctgccagccgaactggatgcgcacctga

SEQ ID NO: 516473 - DNA, 867 bp, Stenotrophomonas maltophilia
atgggtgatggacgatacgccgggccagctgcgcacccgcctgcacagctcgctggccgacagccggctggagctgggctacctgatcgcgcaccaggacacggcccgcggcgcactgcgtggcgaaggcttcgaactggccacccagggctggggcaacgtgcatgccggcgaaggcctgctgctgtcggccagcctgcaggaacgcgcggcctccacggtgatggacaacgccagcgtggtggcccagctcaagggggccgagcgcagcctggaacagatgcagcagaccctggcccagcagcaggtgccgggcctggccgagtaccagcgcaccaagcagctgcgcgaacagatcgacccgcaggcgcagggccgcttccagggcgaggtgaacgggcagagcgcgatgaagcccggcagcgatggccgcagccccggcgagcagccggtggaacggctgggcacaccactgctgctggccgaagcgccgcaccacatcgcctggaccaccccagccagcgcggtggcctatgccgggcagaacctgcagatgacggtgcagcaggacctgcacgtcagcgccggcgaaaccctggccaccgtctccggcgagcatgtctcgctgtttgcgcagagcggcccgctgcgggtgatcgccgcgcagggtccggtcagcctgcaggccaacgatggcgaactggaactgctgagcgatcaggcactgaccatcaccgccaccgacgaccgcatcgacgtgctggcgcagaccaaggtggtgctgcaggccggcaacagcgcgatcacgctggagggcgacaacatcaccttcagctgcccgggcgagttcaaggtcaaggcgggtga

SEQ ID NO: 516474 - DNA, 555 bp, Stenotrophomonas maltophilia
atgaatctttggaagaagttcctgggacaggcgattcaagagctgcctgagaaagagaagaagccgtactctgcagctggagccgcgggggcgtatctgccttggttccttatggtagatccagctcagcagatcgaacagccggcgagcgccagtacttggcgggggatcagggagattgctgacgctaattcggatgcctaccagcatgtcttcaccaatgtcccacgcgattcgttcccccgctatgattccgtgttccatgggttccccgcagcaggcctgagtgacaagggacacgtcaagcgcatgttgtatgcgcaaccacctgacctgcagccagacttcatgcagcagcctagtgttgagaaggactatgtgaccagtgcagtcggtcggcatgatgtgctcaaggcgactgacttcctcaagggcgagccgggaagtccgcgaattaagggcttttgggtcaccatgccgctgctttgggggagcagcatggacgatccggctgccacgatgccgagcaagatcattgcagctgtgcctgtttag

SEQ ID NO: 516475 - DNA, 1392 bp, Stenotrophomonas maltophilia
gtgggcgccagtctcagtcgcgcgaacgaggtggcaccttacataaggatcaggtccggtcctgacctagctaaattgaagaatgagccattcgactcgaatggcggttcggtctactacttggaagcaagtggccaagggcagcggatctgccgtgctgagcagtggaggcggcgtgagtccaagctgattaatgaggcgcctccccaaagcctgcatcctgcagtcaagccgctgtatccgtactttgaactgtataaggtgaatgagcttgattacgatgcgtcaggtcaattgacatcgattcgacgtatcgacaggttgggccgtaaggtcacaactttctgtgcgctctacgacgaaaatggtcgcgtagaggtggcaaatgagagctctgggttgatcgtctcggaagatccggattttcagtgctcggagcttcgaaatacgcctgtaagtgaagttacaagatacttttcttatcggtctgatggattcttggctttggatatgaccaagagggctacacgcaagcttggggagagcgcagagcaagaggacgtcgacttcggaaccgaggcgactgatggggcttggtacgcccaaggggattttttcttcaacggtgccaacttccaccaccgcgtcggtgcatcgtttcagatgagcgacaagcgcgggcttaccggtattcagagtgaatcctttgccatcgcttcgtccgacgcgacgcccatctttgagcaacgcagtcgagatgtgggtaaggagttgaactataccttccctggagagcgtgtatctccagatgtgttgaaggggcagtttgacggcgtgattgcgtatgcgcgtgttcgtgagtatttccaccgcactgggcagcgcgtattcgagattttcgctccgggcgtaaaataccctcgggaacgtcagtggcgcacgctggatctgaatcgtcaggaaaactacgacgcaaatggcaagctcacgcgggtgatcctgtccggtccggtatccgatgacgacggctacaccgaaaacctgcgcgcctacgcggagaagggcatattgaagctcacgcccctcaccagcggttacagctcttaccgtgtgtatgactacgacgctgccggcaaagagaccctgtcgttcgtgtgctggcgctatgaagtctcgaccaacaagccctacgcccatttcccttggtgggagcctgatcctcggcccaagcgcagtcgtgaagctgagctgcagtacgccagaacacaggtcggcactcgctgcggcacgccggacggaaagatgagcgtggagggcatgggcccggtgaagacgctgatggaaaccaaatacggctttggtaccacgaagctcggtttgccgggcgagtaa

SEQ ID NO: 516476 - DNA, 9093 bp, Stenotrophomonas maltophilia
atggctccgagttgtctacgaaatcctggccggtccacccagaccctgtctggtgccaataccttcaccggtggcgtcgcgctcaacggcggtgggctgctgctgggcaatgccggcgcgctgggcaccggcgcactcagtgtcggcggcaacgtcaccctcgatggcacgggggcgctcgctctcgccaacgcggtcaatctgggcgcgggcagcatcctcaatctgtccggaaaccaggcgctgaccttcaacggcgcgatcggtggtaccggcggcctggtcaagaacggcgcggccaccctgaccctcaacaacgccaacacgtttggcggagggctgtcgctcaccgccggtgggctggtgctcggcaacggcggcgggttgggaaccggcgcattgaacgtcggtggtgcagtgacgcttgatgccagctcggcattgaccgtgggcaatggcatcaacctggggttgggtggttcgctcaatgtgctggggggcaacgcgctgacgctgggcggcgtgatcggtggtaccggcagcctggtcaagaacggtgcctccacgctgacgctgggcggggccaacgcgttcaccggcggcctgaacgtgaacgcaggcaaggtggcgctggccagtggcggcagcctggcggcaaccggggcggtgagtctggccggcgcgggcgccgacctcgacatctcgctgggcggcaaccagaccatcggtgcgctgtccggcgtcgtcggcagcacggtgacattgggcagcagtacgctcaccttcggtgatgccaccagccagaccttcggcggtgtgatcggcggcaccggcggcctggtcaagcagggcaccggcgtgcagacgctgaccggcgccaataccttcagcggtggagtgaatcttgcggccggtggcctggtgctgggcaacgccggtgcgctgggaagcggtgcgctgacggtcagtggcaacggttcgctggataccactgctgcgctcaacctgggcaatgcgatcaacctcggtgcagcgctgaccctgccgggcagccagaacctgaccctgggtggcaacatcaccggtaccggcagcctggtcaagaacggcgcatccacactgaccttgaacggtaccaacaccttcagcggtggactgaacgcaaacgccggcggtctgctgctgggcaacagtggagcgctgggtacgggggcgctgagtgtcggcgggattgtttcgctggacggcagtggcccgctgaacctggccaatgatgtcgtgctcggcggcggcgccttgctgacactgccgggcacgcaggccatcaccctgggcggcgtggtgtccggcgcgggtggcctggtgaagaacggcgccaccaccttgaccctcaatggcggcaacaccttcggtggtgggctgaccgtcaacggcggcggcgtgctgctgggcaacgccggcgcgctgggcaccggtgcattgtcggtgggggccaacaccacgctggacagttcggtggcgctgaacctggccaacagcgtgaacctcgggaccagtgccgtactgaacctgctgggcaaccagaacgtgtcgctggatggggtcatcagcggcactggcggcctggtcaagaacggcgcggcgacactggcattgaatgggcccaacaccttcagcggaggtgtcggcctcaacgcaggcgtactgcagctgggcaatgcgcaggcgctgggtaccgggcagctggatgtgggtggcaacgcttcgctggatgcagcatcggcgcttaccgtaggcaacaacatcggcctcgctgccggtgccaacctctccgtgctgggcagcaatgacctgacgctgaccggtccggtattcggtgcgggtgggttgatcaaggacggcccagcgcgcctcacgctgtccggcgccaacaccttcggcggtggtaccaccgtcaacgccggcacgctggcgctgggagccggcggtagccttgccgcggccggtgcggtggatcttgctggcgccggtgcgacgctggacatctccgcagccgccacggcgcagaccatcggcgcgctcaacggcgtcgcaggcagccagttggcgctgggcgcgcagtcgctgacctttggcggcgccagcaacggcagctttgccggtgtgatcggaggcaccggcggtttggtcaagaccggcacgggcgtgcagacgctgtccggtgcaaacaccttcagtggcggccttgcgctcaatgcgggtggcctgattctcggcaacaccagcgcgcttggtacgggtgcgctggccatcggcggaaccaccacgctcgacagcaccgtggcgctgaacctggccaacgcggtgaacttcggtgccggcacccagcttaccctgggcgggaccaatgacgttgcgttcggaggcgtgctgagcggcaacggcagcctggtcaagaacggcaccggcctgctgacgctcaacaacaccaatacgtttggtggcggcctgaccttgaacggtggtggcctggtggtcggtgcggatggtgcgcttggtaccggcgcgctggcggtgaatgccagtaccacgctggatgccggcgctgcagtgacgctcggcaatgcggtcacgctgggctcgggcgttgcactgacgttgccgggcagcaatgcgttgacgctgtcgggtgtggtcggaggcaacggcagcctgatcaagaacggcgctaccacgctgaccctgtccggtgccaacacctacaccggtggtaccgccatcaatgccggcacgctggcgctgggcacgggcggcagcctggctgcggcgggtgacgtcacgctgggcgcaggcgctggcttcgatatctccggcgccggcagcaaccagaccatcggtgcactcaacggagcgggtggaagcacgctgacgctgggcggcaattcattgaccttcggtaccgccggcaacgccacgttcgatggcgtgatcagcggcggtggcggtctggtcaaggtgggcgcgggcgtacagacattgtccggcgccaacacctttgccggcggtgtgacactgaacgcaggtggactggtactcggcaatgacgcagcgctgggctccggtgcgttgacggtcggcggtgtcgccacactggataccaccggcctggcaacgctggccaacaacatcgcgctcaacgccgggctgaccgtaatcgggaccaatgcactgacgctcaacggcgtcctttccggtaccggcagcctcaccaagaatggcagcgcaacgctgaccctgaacggcatcaacacctacaccggtggcaccaacatcaacgccggcacgctggcgctgggggccggtgccagcctgtcggcgagcggtaccgtgaacctcgccaccggtgccacgctggatctatctgccggcagtggcacgcagcagttcggaaccctgatcggcaacggtacggtgaatctcggcgccaactcgatcgaggtcggcggtgccaccgatggcaccttcagtggctcgatcgcagggaccggtggcctgaccaaggtcggtgccggcatcgagacgctgaccggtgccaacacctataccggcggcactttcatcaatgccggtaccctggcgatcggccccggcggcagtctggccgcgaccggtgcggtgacgctcaatgcggcgggcacaggcttcgatatctccactgccggcgccaatcagaccatcggggcgttgaacggtgtggcgggctcgacggtgagcctgggggcgcagacgctgaccctgggcggcgttggcaacagcactttcgatggcgcgatctccggcaccggcggcctggtcaagaatggcgtcggcatcctcacgctcggcggggccaacctgttcaacggcggcgtggcattgaacggcggtgggctggtggtcggcaacaacgctgcgctgggtagcggcgtgttgaacgtcggtgccgatgcgacgctggacagcagcctggcggtgacgcttggcaatgccgtcaacctcactgctggtgccaacctcaacctgctcggcagcaacgcgctcacgctgggtggcgtcatcagtggtggcggtggcttgatcaagaatggtgcggccacggtgaccctgaccggtgccaacacctacaccggcggtaccaccatcaacagcggcacgctggccatcggtgccggcggcagcctggcttccaccggcgcagtgaatcttgccggtgccggcacgttcgacatttcggcgggcaaccaggccatcggttcgctggctggcgtcgccggcagtacggtggcgctgggcggcagcacgctgaccctgggcggtgccgttgacagcaccttcaacggtgcgatcagtggcaatggcggcctggtcaagaacggcgcgggcgtgcagacgctcaacggcgccagcaccttcagcggcggcgtcgcactcaacgccggtggcctggtggtcggcaacaacgacgcgctcggtagcggtgcggtgaccgtgggcggcaacgccacactggattcgaacaccgcgatcacgcttgccaacaacttcatgctcaatgccggactgactgtgctgggcagcaacaacctcaccctcaacggcatcctcagtggtaccggctcactgaccaaggaaggtgccgcgacgctgaccttgaatggtgccaacacctataccggcggtaccttcatcaacgctggcaccctggcactgggtgctggcgccagcctggcctccacgggcaccgtcaacctggccacgggcgcgaccttcgatctgtcagcgggcagcggcacgcagcagttcggtaccctgatcggcagcggtacggtgaatctgggcgccaacacattgacgatcggaggccctaccgatggcaccttcagtggttcggtggccggctccggtggcctgatcaaggaaggttcgggcacccagacgttgaccggtaccaacaccttcaccggtggcaccaccatcaacgccggcacgctggcgatcggtgccggcggcagcctggctgccacgggtgcggtgaacctggccaatgccggcaccgcctttgacatcagcgcgggtggtgcgcaggcgattggttcgctggcaggcgtggcgggttcgacagtggcgctgggcggcagcacgctgaccctcaatggcgtgggcaataccacgttcgccggcaccatcggaggggccggtggcctggtaaagaacggcgcaggcatccagggcttgacgggcgtcaacgtcttcaccggcggcgtgactctcaatgccggtggcctgctgctgggcaacgacggttcgctgggcaccggcgcgttgaccgtaggcggcaacgccagcctggacggcaccggcgcgctgacactggccaacaccgtgcagctggccggcggcacgctgaccctggccggcagtaatgcgctgaccttgaatggcccgatcagcggtgccggtggcctgctgaaggatggcgcggcgacggtgaccctgggcggtgccagcagctataccggcaccaccaccatcaacagcggcacgctggcggtagcagccggcggcagcctgtccggtgccagcacggtgaacctggccggtgctggcacgctggatatcagcgccggtggcaaccagagcatcggcggcctggccggtgtggccggcagcacggtggcgctgggaggtgcaacgctgactactggcggcaacaacgccagcaccttgttcgctggcgtcctcagtggcaccggcggcctggtgcagggaggtaccggtacgctgaccctgagcggcgacaacacctacaccggcggtaccaccatcaacggtggcagcaccctgcagatcggcaacggtggcagcaccggttcggtgctgggcgacatcaccaacaacggcagcctggtctacaacctcggcaccacggcaaccgtgggtgcggtggtcagtggcaatggcggtctgacccaggccggcagcggcacgctggtgctgaccggcaacaacacctacaccggtggtaccaccatcaatgccggtggcacattgcagatcggcaacggcggtgcgaccggtgcgattgttggtgacatcaccaacaacggcgcgctggtgtccaacgtggcaggcaacaccacgctgggcggcaccatcagcggcagtggcggcctgacccaggccggtgccggtacgctgaccctgaccggcaacaacacctataccggcggcaccaccatcaatgccggtggcaccctgcaggtgggcaatggcggtgcgaccggtgcgatcaccggcaacgttgccaacaacggcagcctggtattcaacgtgggcggcaacaccacggtcggtggcgcgatcagcggcagcggtggcctgacccaggccggtaccggcgtgctgaccctggtcggcaacaacacctacaccggtggcactaccatcaataccggcggtgcgctgcaggtcggcaacggcggggcaaccggcgccatcgccggcgacatcaccaacaatggcgcgttgatctccaacgtggccggcaacaccgcgctgggcggcaccatcagtggaagtggcggcctgacccaggccggcagcggtacgctgctgctgactggcaccaacacctacaccggcggtaccaccatcaacgccggcggcacgctgcagctgggcaatggcggtgcgacgggttcgatcgtcggtgacatcaccaacaacggttcgctggtgtccaacgtggccagtaacaccacgctgggcggcaccatcagcggcagcggcggcttgacccaggccggcagcggcacactgaccgtgaccggcaacaacacctacaccgggccgaccacgatcaacgcgggcggtaccctgcaggtgggcaatggcggcgcgaccggtgcgatcggtggcagcgtcaccaacaacggcaatctggtgttcaacgtggccggcaataccacggtcggtggcgccatcagcggcagcggtggcctgacccaggccggtagcggcacgttgatcctgggcggcaacaacacctataccggtggcaccaccatcaacaccggcggcacgttgcaggttggcaatggcggcgccagcggtgcgatcgccggcaacgtcagcaacaacggcagcctggtcttcaacgtgggtggcaacaccaccgtcgccggcaccatcagtggcagcggtggcctgacccaggccggcaacggcaccctcacgctgaccggcagcaacacctacaccggcggcaccaccatcaatgcgggtggcacggtgcaggtcggcaacggcggcgccagcggctcgatcaccggcaacatcaccaacaacggtggcctggtgatcaacaccggtggcaccaccaccctgggcggctccatcagcggcggcggcagcatcgtgcaggccggtccgggcagcctgaacctcggcggcaacagcggtggtttcagcggtaccggccaggtcaccggcggtggcctgaatgtcaccggcaacatcggcggccagtggaccatcggcagcggcaccacgctgtccggcaccggcaccatcgggggcactggcggtggtgtgacggtatccagcggtggtgtgctgtcgccggggaatggcccgggcaacggcagcggtgcgggcaatggcaccggcacgatcacagtgggcggcaacctgaccctgtcgccgggcagcacgctgggcatcgatctgggcgctaccggcagcgatacggtacaggtgggcggcagcgccaacgtgggtggcagcaccgtaaaggtgaacaccatctcgccgagcaccagctaccagcagggacagcagtacaccgtgatcaatgcgggtggtggcgtgagcgggcagttcgcctcggcgaccacaccgtcggccttcctgaccatcaccccggtctataccgcgaacacggccaacctgcagatcgacgtggcgcagaccgcagcgttcaccacggtggccaacacacgcaaccagtacaacacggccgcggcgctggacagcctgccgcagagtggaccggcgctgggcctgtacaacacggtgctgatgtatgacgccggtaccgcgcgtagcgcattcgaccagctgtccggtgaagtgcatgcggccagccgcgcggtgctgctgtatgacaactatctggaagaaggcatccgccaacgtctcggcagcgaactgccgaccgtgcgtggcgagcgtgcctcggcctggctggccggcagcggcaaggtcttcaagcaggatggcgacggcaacggcgacgacatccgctccaatcgcaatgcgctgatggcgggtgtcgaccggcagctgggggagcatgtggtgctgggtgcggccgcaggcaacgagcggctggatacgcgcctttacgatcgcagctcgagggcccgcctgcgcggcaatacgttcggcctgtatgcgcagggccaatggaacaacggctttgcggtgggtggcagcgtgtcgcgcggtgattaccgcacgcgcaccacgcgtgaagtgccgctgctggggcagaccctgtacagccgccaggattcggatgtgaccatcgcgcaggtggagggcagctggacctggacccatggcaagacccaactgcagccgtatgtgcagttcaccaagcattgggtcgacagcgatcgtgcggtggagcagggcggcactgcagcgctggtgctggaaggcggcaaggacacgctcaatgtcagcaccgtgggcgtgcgcggccgttgggacgtgggcagcggcgagcgcttcccggcgcagctgacggttggcctgggctggcagcatgcatcgggtgataccgatgtggccagccgcaaccgcttcgctgtgggtggcaatgccttcgacgtctacagcgcggtgatggcacgcaatgcgctggtcagccaggtgggcgtggcggtgggcctcggccgcaacagccagctgtcgatgttcgtgcagggccagcatggcgatggccgccgcgacgtgggcgggcagatcaacctgcgcgtgggcttctga

SEQ ID NO: 516477 - DNA, 423 bp, Stenotrophomonas maltophilia
atgaatcccaagggcaagagcatcggtcgtcagatcacgctgtccatcaccgtcgcctcgttgtgctcaacggtgctgtcgatcagcggtttctacctgttctactacctgatggaggtgttctatccgcggtggtacgacgagccggaaaccatcatgccgtccggactggaatggctgtggatcggggtgaccgccaccgtggtggtggcgctggccacgttgatcgcttcgcgcctgacccggcgcatcatcacaccattgaactcagtggccgagagcctgcgcagggtcgccagcggtgacctggaggcgcgtgcgcgcggcggagacacctctatgaccgaggccgccaagctggtcagcgacttcaactccatggccgagcgattgagccggatgtctgagaaccgcgtgttctag

SEQ ID NO: 516478 - DNA, 831 bp, Stenotrophomonas maltophilia; identical to SEQ ID NO: 199577

SEQ ID NO: 516479 - DNA, 606 bp, Stenotrophomonas maltophilia; identical to SEQ ID NO: 494217

SEQ ID NO: 516480 - DNA, 336 bp, Stenotrophomonas maltophilia
atgggcgtgctcatcgaatccatcgaccacggctcagccggctcccacgtcgcggcggatcccaaggttctgatacatgagaagtgccggtcgccagtcccggtcgccctcattcccgtcagatcatcagcctgccctgaaggacgcgtaagggcaattctgtccggcggaagttttgacggacaggatctgttgatctccagaatggagctccacaccggaatcgtgatccgatccggagaggtctacgtccgtcgcaagaacgccaccaattccctggcgggatcggagttgccgtcattcacggcagctgcaaaccagcagtccgccacgtag

SEQ ID NO: 516481 - DNA, 774 bp, Stenotrophomonas maltophilia
gtgacgctggatattcaacccactctgctgggcaagcttttttcaacgttctacaaagcccccaagctgtcgatgaaggtgcgctacgaagatggtagtaccgccgattatcgaatgatcgcaggcatggcgcagaccggcttcctgctctcaccaacggtgtccgatgcaaaggacttcattgctctccgttccagctacatgcaccagctgctggacgcgaagcgggtggtttcgttcggtgttgctggcgaccgcgggaccagcctcctgtggaagttggactaccgcgttgcattctcccgccttgacgttcccctgtcggttgaagctgaccggatcctggtacctgattggcaggcggcccagccgctgtcctcctaccctgtatccggggactgcaacatcgatgaagccgatcaacagcccgtcagcgcaaacatggatttgcccaagcgcctgttcacgattcgtggctgggctgcgctggatgggcgtcaaggcaagacaaacgatggaaccttcctgctgatcacaagtggcgacacggtgtcttaccgcgtcgcgacctcccaggtgcctcgtccggacgtcagcgcacacttccaacagcctggcctcgaacatgccgggtatgaggtgacaattgatggcagtcgactgcctgaggaggctcagatccacgtgctgcagagcggtccgcagggcgacgtgcaatgtgcgggtgcgacgatcacgttgcgcaggttgcaggcaaagataccttcctcgtga

SEQ ID NO: 516482 - DNA, 1059 bp, Stenotrophomonas maltophilia
atgggcatcggcgatgcgcgcgtggtcagccgaccacacctcaatgcgcggggcatcgttcagacgctcgcgcagcagctccggcgacaggtacagcgccgacggcggcagcagcgggcgttccacatcgtggcggcgctgctcgtagcggtcaccggtctgcgcccagaacgcgactgccgcttcgtacgcaccggtgcagaccaccggcaggctgccgtcgggcaggtagtcgaacagggtcgcggtgcgctcgaagaacagcggcaggtagtactcgacgccggccggggccagcccggatttcaggtcctgatacagcgaactgcgccgggtatcgacatcgaaacgctcgcgcagcgtggccagcacgcgggcgatgctggcctcgtccatcggcacttcgcggccgggcagcatgtgcaccgcctcgaccttgtccagcgaacgctggctttccggatcgaaggcacggatggagtcgatgtcctcgtccagcagctccacccgcagcggctcgtcggcgcccatcgggaacacgtcgagcaggccgccgcgcaccgcgaagtcacccgggtccatcacctgcggcacgttgcggtagccggcgctttccaggcggcgcttctcggcttcaagatccaggcgctggccgaccttcaggtcgaagctgccaccgatcacatagctgcgcggggccagctgctgcagcagggtctgcaccggcacgatcaccaggccgcgcttcagcgcgggcaggcggtgcagggcggacaagcgttgcgagatgatgtccggatgcgggctgaagcggtcgtagggcagggtttcccagtctgggaaagcgaccaccggcagggccgggtcgccgccgagcagggtctgcaggtcggcttcaagctggttggcgccgtggttgtcacgggcgatcaccagcagcggcgcgtcgtgcgcacgcgcggcctgggacaggtaccaggccagggcggtcggcgaggcgggggcgcgccaccaggcgcggagctggccggcgcgcggcagcggcggggcggggtatga

SEQ ID NO: 516483 - DNA, 2160 bp, Stenotrophomonas maltophilia
ttgtttctggatcagctggatcaccgccatcggatcgatgttcggcttggactcgaacacgatgcggccaccgttctcgcccaggtccagcttgcggatgcccagcgtgttggctttcagcttcagctcggcgatggcgaacagatgcttggcggcatccggcagcaggccgaagcggtcgatcatctccacctgcagctcgcgcagcgcatcactgtcgcgcgcgctggaaatgcgtttgtacagggtcaggcgggtgtgcacgtccggcaggtagtcttccggaatcagcgccggcacgtgcagctcgacctcggcaccgcgcacttcctcgccggcatccaggtcgggcagcttgccctgcttgatgctgcgcaccgcgcgttccagcagctcggtatagaggctgaagccgacctcggccatctgcccgctctggtcctcgccgagcagttcaccggcaccgcggatctccagatcgtgggtggccagggtgaagccagcgcccagttcgtccatcgaggcgatggcttccaggcgcttctcggcgtcgggggtgatcgcgcggcggtcgggggtgatcaggtaggcgtaggcacggtggtgcgaacggccgacgcggccacgcagctggtgcagctgggccaggccgaagcggtcggcgcggttgatgatgatggtgttggcgttggggatgtcgatgcccgattcgatgatcgtggtcgacagcagcacgttgaaacgctgcttctggaagtccagcatcaccttttccagctcacgctcgggcatctgcccgtgggcgatgccgatgcgtgcttcgggcaccagctcggacagctcgcgctgcatgcggccgatgctctccacgtcgttgtgcaggaagtacagctggccaccgcgtgccagctcgcgctggaaggcttcgcgcagcagcgcgttgtcccactgggtgatgaaggtctgcaccgccagccggttcggtggcggcgtagcgatgatcgacaggtcgcgcaggccggccatggccatgttcagcgtgcgcgggatcggcgtggcggtcagggtcagcaggtgcacgttggcgcgcagcgccttcagtgcttccttctggcgcacgccgaaacgctgctcctcgtcgacgatgaccatgcccaggtccttgaacttcacgtccggctgcagcaggcggtgggtaccgacgatgacgtcgatggtgcctgcggcgaccttctccagttcggccttgatttccttggtggtcttgaagcgcgacagcacctcgaccttcagcgggtaatcggcgaagcggtcgcggaagttgcggtaatgctgttcggccagcagcgtggtcggcaccagcacggccacctgcttgccggcgctggcggcggcgaacgccgcgcgcaccgcgacctcggtcttgccgaagccgacgtcgccgcagaccacacggtccatcggctggctgctggccaggtcgcgcagggtggcgtcgatcgcggccagctgatcgggggtttcctcgaacgggaagccggccgcgaacggttcgtacatcgcgcggtccacctgcagggccaggccggcacgcgcctggcggcgggcctggatctccagcagttcggccgccacatcgcgcactttctcggcagccttgcgcttggccttgctccactgctcgccgccgagcgaatgcagcggcgcggtttccgccgaagcaccggagtagcggctgatcagatgcagctgggcaaccggcacatacaggcggtcgcccttggcgtattcgatttcgaggaactcgccgggcatgccgccgacgtccatcgcgatcaggccacggtagcggccgacgccatggtcctcgtgcacgatcggcgcgccttcggtcagctcgccgaggtcgcggatgatcgcttccggctcgcggccggcacggcgcgtgcggcgggtgctgccggcgcgctcggggaacagttggcgctcggtcagcaccgcgatgcgcggatcgtccagcgcgaagccatcctccagcggcgccaccgcgatcgcgaagcgcgcatcgccggcgaggaagctgggcaggtcggccaccaccggcggcttcagctcggcggcctgcagcacttccaacagggcctcgcgacgcccgggtga

SEQ ID NO: 516484 - DNA, 177 bp, Stenotrophomonas maltophilia
atgaccaagacgtcgcacctgcttcccctcagcctggccctgtccgcggcactgctgctcggagcctgttccaaggacgcgcccgcgcctgcaccggcgccttcgggcaaggcgatgcagctggcgccggcaaggttgcagtcgcgcgcggcatcatcgatgtcgagggtggtctga

SEQ ID NO: 516485 - DNA, 756 bp, Stenotrophomonas maltophilia
atgaataagcgcactccgaagaaagccaagccgacctcccgccgcaacaatgcttaccagcggttgttgaaggccatccaagccatccccggggaatcgcccagggaaaagatgcgcaagttcaccgcgcttgcgctgaaggttctcgtgctcaagcaggcggagttggccgtcgggcgaggtgggcctttggttccctggtgcgacttgacgctgcttgggaccgatgtggatgggaccgaggattggtgcctcgaagcgggccaggcctatgggggcgcagtggaaaccttcgagccgttcgaatgcatcctggggcagatctttggagagttcgtggggaaggggaataaaaacgacgctcaatatttcaccccttgggactttgcgagggcgctgactgcctttgctccaacgcctcaaaaagacaagtggtccatgggtgaccccacctgcggagccggcacgctgttgcttgcgaagcttcacgaactggtcaggaacgatccgaaggcccttctggggcttaccgtgaaagcgaatgaccgcgatccgttgtgctcggcgattacagccctgcaactgctgtcaaaccaggtgatttggaggatgcccatcgggagcgtggtggtcgagtgcaaagacatcatcactcaatacctggaaacgcgggtggtgttttggtctctcacgcgagctcggttcatcgccatggacgaagaaatccgccttgagaaagccaaccgccgcggatga

SEQ ID NO: 516486 - DNA, 273 bp, Stenotrophomonas maltophilia
atgactcagcagcagaaggctccgccgcgcccactcccgacctgtccgaacggacacccagccaggtacatcctcgactgccggcggctcgaggcgcggggtggccacttcatcgaatgccgctgcagccgaacgatgaagcacccgacgttcgacttggcgtgggcgcattggcacaaacaacacggcctgcagccgacagccgcggtgttggaggaacctttgccgagcaacgtgctacagatgaaattgttcgccgcagggagggcttga

SEQ ID NO: 516487 - DNA, 315 bp, Stenotrophomonas maltophilia
atggctaagcgcaaccgcgttcgcggcccgcagcagggcgctccgggcgtttcccgcgtcgtgtacggcccgcagggtagtggcaagggcttgcacagccaggccatcgccgaccacctcggcctgcagcacatccgggatctggatgacgtccagttcagcggtgaccgactgcagcgtcgcggccacctgtatctggccttcgaccgtgactatgcgcaacgtgccgccgatttgatcgggagcgagctgctgcccttcgcctccgcgctggccatgatcgccgccggcagcaagggggtggcccgtgcttga

SEQ ID NO: 516488 - DNA, 426 bp, Stenotrophomonas maltophilia
atgcacgacatgatcagcaagaccgaccacaccagggcaaatacgcaggcttccggcaccggacctggggcgaaggctagcacggctgggggaaagtgtggatttgccgccacgcccgccggggggtgcagcgcgaccctgacgatgcacatcacccataacaaggtgatcatcactgtgcagttggatatgggcggacacaagaccgcccagcaggtactcgagcgccgccgtggcaacgtcgccggttgggtgcagaccggcggcagcgaggacttcgccgacgaggcggattggatctccgccgagctggccgagctggccaaccgtctgcccttcccctttgaagtggccaacatgctcccaagcactaaggccagccacagcgccgtagccgccgccgctcaggaggtggcccatggctaa

SEQ ID NO: 516489 - DNA, 258 bp, Stenotrophomonas maltophilia
atgggcagccacaacggccacgcgccgccgcaccgcaacccgccgccagcccacgatgacccacacggccacctcatcagcgccgaagacgtgacccgcctctggcgcatttcctacgccgtcgagctgatcgcggtcctgcccgtcgaagcggcaaagctgctgggcatcactgccgaccacacgtcggccgtggccgagtacatcagggacgacttgcgcgaaatcctcacccggtcgaaaccggcagacgaatag

SEQ ID NO: 516490 - DNA, 345 bp, Stenotrophomonas maltophilia
atgagcgccgccgtcggacagcgcgctgtgttctgctgccctgcctgcagggcgccactggtaaagcgcaccagcgcattgcagcaccagttcctgcgcaccgatgcctatgtatgccctaaccccatgtgcggggcgacatacaccggcaattcggagctgaccagcgttgccagtccgagcggcctacccactgcgcctgcctgcgaacttccgccgacgcccggctatcagcgcgtattgctgcagaaccgctggaagcaagaccggggcgaggtgcagctcgactggatcgactcgatagacgaaatgccccccggcgggggcgacctgcccgccatctga

SEQ ID NO: 516491 - DNA, 282 bp, Stenotrophomonas maltophilia
atgaaatccaaaacggtatggcaatgcgacagcgctggatacttgatcggccggactgtcgcggatgaaagtccgctggaacccggcacctatctcatcccttccggggctgtgacggtcaagcccccacatccactgacggacaagcaggaatggcgttgggatgggaaggcatggcaggccgtggacgctcgcccgctcgttcctgtgttgacgcctgcagagcgcctggctgcgttcttgaaagccaacccggatgtgagtgcgctgatttccggctga

SEQ ID NO: 516492 - DNA, 1176 bp, Stenotrophomonas maltophilia
atgcgattgaagttcaccacccgtggccgcgccgccctggtcaatgccgcgcataccggcaccaaggccgtcaccgtgacccagatcggcgtgacggatcgagccttcacgccggaccctgcaggtggcgacctggtactgccaggcgagcgcaaacgcctgaccaccttcggtggcaaggccgttgccgatgacgtggttcacctgaccgtgcgcgatgaatcgaacgattcctaccccttgcgcggaatcgccctctatctggaagacggcaccctgctggccctctacgggggctcggaggtgatcctcgaaaagtcctcgcaggccatgatgctgctggccctcgactggatcctggccgacatggacgccaaccagatccagttcggcaataccgatttcctcaatccgcctgcgacaaccgaggtgcagggcgtggtcgagctggcaacggcggaagaggccatcaccggcaaggacagccaacgcgcagtgacgcccagcgcgctactggccacgctggacggacggctggggaaaggggcgccctcaacgctgggcaaggcgatgatgggccgaggcgatgccgcagaggtgcgctcggatctcgggctcaagagcgctgcgctcaaggatgagggaactggcaagggtcttgatgctgacagcgtggacggaaagcacgccgacgacttcgcgtccaagagccatacgcacaagctggccgatatcaccgacctgtcgctgacccaactcgttccgccaggcatcgtcgggcacttcgccatggatacgcccccggaaggctggctgcgttgcaacggcgccgacgtgagccgcaccacctatgcagccctgttcgctgccatcggcacgcggtttggaagcgccaacggctccacgttccgacttcccgaccttcgaggtgagttcatccgtggctgggacaacggacgtgggctggatccgggccgtagcttcggctcgatgcaggacgatgcaattcgtgcccccttcaacatcggacggatcatctccagtcagttcgcgtggaccggcggtaccttgcatggcgagggctacatgaaggccagtgaaggcggtgcggggctctcttccggtccagaaacccgtccacacaacctggccctgctggcctgcatcaagttctga

SEQ ID NO: 516493 - DNA, 702 bp, Stenotrophomonas maltophilia
atggatatgaccgttagcgacttgccactcgcgcccccaaccttgagcctctccgcagaagggcgcgtctttacgaccagcacggccgtggcggactactttggcaagcgacacagtgacgtactgcgtgccattgagaacctgctcggcgacctgaaagggtgtgcgcagtgggcgagtggcggcgactatgccaacgacggcgagggtcaaaaccatcagcccaaaattgggctgatggtccccgaagacctcttcgaggcatccgagttgacagtcaggatcggcagcggcgccatccggcgcgacccgatctacaacctaagccgtgacggatttgccctgttggcgatgggcttcacgggcaggcaggctctcgcgttcaagctggcctacatatctgctttcaacgcgatggaagccaaactccggcagccctatgtggcccccttggctgaggatctagagttcgcacggggcctgcgcgtcaaagacaagctcatgctccacgagcaggcctacaaggcctcccgtgcgttaagcaccgccaccagtgaagacgaacgccgccaagcctattggcagctgtatcagatcaacacgaccctcggcatcccaatgcccaccatggaagcactgggagttgagccgttggccgccagcaaccgcttgccacacggcccagaccggagcgacggctga

SEQ ID NO: 516494 - DNA, 348 bp, Stenotrophomonas maltophilia
atgccgttgcccgccgacttctactggacgacacgttcagccagcttccccaacgattccctgacggtgatcgcctgcgagggggtgtgggttctggcgctgacgcagcgcgtggacgacgggagctgggtggccacgctggaccggcaccgccacgggccagggggtggacctgggcgccgctgcagcagctacgagcagggttgcgccggcgcagaaatgtgggtggccaggcatgaggcacgtctacgcgaggacgtggccaggatcacggcataccgggaggccgtgcgcgcgaataggctggccaagctgcacaccccgccgccgttcggttgggcagggtag

SEQ ID NO: 516495 - DNA, 732 bp, Stenotrophomonas maltophilia
atgcagaagatcctgatcatcggcgcgacatcggccatcgccgaggcggtagcacgccaatacgccggacgtgccgcggcgctctatctggtcggccgtagcgccgggaagcttgatgccattgccgccgacctacgagtgcgcggcgcccagtgtgtggagaccgggcttctggacgtgaacgatgtggccgctcacggtggactgctggacaacgcatgggcagcattggggggcatcgataccgttctaatcgcccacggcactctgccggaccagaccgcctgcgatgcctctgtagacctgtcactacacgagttcgccacaaatgccaccgcgacgatcgctcttgccgccgcacttgcacagcgtctacagcatggcgctactctggccgtgatctcctcggtggcgggcgatcgcggtcgcgccagcaactacctgtacggcagcgcaaaagccgccgttactacctatctaagcgggcttggtcagcgcctgcacgcgagcggcgtcaatgtattggccatcaagcctggattcgtcgatacaccaatgacagccgcgttcaagaagggagcactctgggcgacaccggaacaggtggccaacgggattctcaaggcaattggaaagcgcaaatccgtggcttacctgcctggcttctggtgggcagtaatgatgatcatcaagaatatcccagaattcattttccgcaggatcaagctttga

SEQ ID NO: 516496 - DNA, 429 bp, Stenotrophomonas maltophilia
ttgagcagatcacgtttgatctttgcctactcgagctttgcggccgcctccattctggtcaacatcggcacccaggccttggctgtccttctgtatcagggaccatattcggtgccggcgtctgttgtgcttggaactgcaacaggcctgttgtgcaagtacttcctcgacaagcacttcatcttcggccatagctcagagagcgcctcccaagaagcaaagacattcaccctttatgtcgttatggggctggcgacgacactgattttctgggggaccgaagctgccttccacttcatgttcgaaggagacgccatgaggtatgtcggaggaatcattggcctgagcatcggctacgcggtgaagtacaggcttgattcgcactttgtcttcaagaagacggcggtgccaggccgccgtcacgactga

SEQ ID NO: 516497 - DNA, 1515 bp, Stenotrophomonas maltophilia
atgcgggagttgctgcacgttggcatgcaggaagacgcgatgatcggactgcgtcatctgcgcaacatgctcgagggcagcggattcgtatacaaccgcggtgaatcggcactcggcgcgacaaatccgcttttctggatcttctcgttccttgccatcaagccattctacttggcaagtccgtccctcgacgtgttggtggcgcactactatttctgcgggtttgcgctgctggcagcggctatcgcctttgcaatggccgcgccttcgcggactcgcactgtgtcggttgctgccatggcgctcctgagcgtcctgttcttctggcccctgcgcttcctctatctggggcttgaagggccgttcatgctcgtatgtgttggcgttcttggcttgctggctgtccgatctgtgggcacgcgggatggtctgcttgcaacactggttggcttcctgtcatggaaccggccggaaattgcactcattctgattcctgcagtcctcttctatgcactgctgatgtcggataagtcgagccgtatccgggtctcagtcggctatctggcaggcgcagtggcattcccgttgatgctgaagctcgtatccggtgcttacatcgtgggcacggtgcaggcgaaggcatacttcggcaatcccagtccaccgtacaatcttgatttcttcgtgcagcggatcatctatctggactcattcatcggtcttggtggtggggtgacggtgcttctgctggtgggcattttcgctgctgcaatcatcggcatcctcgatttcctgcaaggtgatcgcaagcagatgccgtgggttcgaggcgtgtaccccgcgttcgtcgcaggatattcgtgtttcgtcctgttcattccttctctgtgggaatggtatgtaactttctggctttccttcgcgctggtccagtatggcgttctcatcagtcgaggaatcaattgctgcatctcagtactgcgtggcaatgttggcgcagccgtactgggcgtcacaatcgtgctgttgtctacgagctggttgatggggcaccgacttgcaacccagcgcacggagatcgtcggttggattacccaggacgcgggtttccgtggccgcttgtccaaggaactgaacgagcgctggcatgctcgctcggtctggatggaggctgctggctggcagggttatttcaacaatgcgcgcatcttcgacgaagtcgggctggtggatgatgaaacacagccgctggcacagaagtacggctgcgcgtatttcgtttctgcactcaaggagttgcagccacaattcgtcatcaagaggcagttcgagatggaccggaacgtgatgctgacgcctccgcgtagttgcccgaacgcgcctctcttctcgaatgatgcggatcgactctggtttgattccaactatgaggccgtggagcactacggaacgcccgctcccggttacttcggagagtattcattcctcgtcctctaccgtagccgcaacaagtag

SEQ ID NO: 516498 - DNA, 1011 bp, Stenotrophomonas maltophilia
atgcgcgttttggtcaccggtggagcaggctacctagggagccacgtttgtgccgagcttctgcttggggggcacgaagtcaccgtcgtcgatgacttcagcaatgcccggccggacgtgggcgaacgactcaacatgctcaccggccgcgcagtgaacatcatcaccggcgacatcagggaccgcgcgatccttgaccgtgccttccttcagcagccccccgaggccgtcatgcacttcgcggctctcaaggccgtgggagaaagtgcagttgtgcctctggcttactacgatgtcaatgttgctgggacgatcaacctgctccaatgcatgcagcgcaatgcgtgtcacaagctcgtcttcagctcatcggctacggtttatggaaattcttcccattgccctataaatgaaagcgcccctacttcagcgacaagcccgtacggtcgcacgaagctcttcgtcgagcagatcatcaacgatgcaaaactggccgacccgttgctgcaggcgatcaatctccgttacttcaatccggtgggcgcgcatgagtccgggctgctgggggaggaacccagtggcactcccaacaatctgatgccctatatcgcccaggttgcagccgggcttcgctcgcatgtttcggtattcggtgcggattatgcgacgactgatggaaccggcatccgggactacatccacgtatgcgatctggccacagcacatattcgaacactggaggcactacctaatctttccggtttgaacgcattgaatctgggaaccggaataccctactcggtactcgatgtcatcagggctttcagcgaagcatcgggacgaccggtaccctacgagatcgttggccggagaccaggcgatatcggtgaatgctgggctgatccctcacttgcagaatgccggctgggctggagcgcgaagttggatctggccaagatgtgtcgggatacttggagatggcaacagattctgatgagcagatcgcagtag

SEQ ID NO: 516499 - DNA, 138 bp, Stenotrophomonas maltophilia
atgccggccagcggccggcactacctggcatcagcccagcgcttcggctacggcgcggaagacctgctgcatctgcagcggctggaacaggcggtggacgccctgccacgcttcccctgggaaactgccgaacggtag

SEQ ID NO: 516500 - DNA, 684 bp, Stenotrophomonas maltophilia
atgatttgttacggagtaacacttcaatgtcatggaccggccccttccacatccagccgccacctctgccaccatgaagccctcgcccctcgctaccggcatcaccttcgccctggccctggccagcctgcccgccttcgcctcggcagccgacgcccccgcttcgtccgtcaaggatctggatgcggtcaccgtccacgcccagctcgaccaggcccgcaacacgctgtcgccggacatcggcagcagccagtaccggatcaccgccgaggacatccagaagcagccgctgggtgcctccgcgccactcagccaggtactgctgcaggcccctggcgtggtccaggactcctatggcggcgtgcatgtgcgtggcgaccacgccaacctgcagtaccgcatcaacggcgtgctgctgcccgaatcgatctccggcttcggccagaccctggacgcgcgcaccatcaagagcatccgcctgatggacggcgcactgccggcgcagttcggcgagcgcaccgcagcggtggtcgacatcaccacccgcaacggtgccgagctgggcaatggcggcagcgcggggctgaccaccggctcgttcggcaagatcaatccgaacgcctcctggtggggcaaccaggggcgctggagctggttcctgaccggcaactacgaccagcatga

SEQ ID NO: 516501 - DNA, 660 bp, Stenotrophomonas maltophilia
atgaagagactcgtttccatcgctcctgtccggaagttgaaaaatagccgacgggccctgaccgggaaggtcaatttggaagctggcggggtagccggctttgagtcgtcgcttgagcgcgatctcctcatcgtcttggacgccaacccgaaggtcctgcgggttcaagagcagccgttcaccctgacccacattcatgccggccgggtccggcggtacacccctgacgtgctggcagagtttgatcgggacgagatcccgaccgttgtctatgaggtcaaacctcttgaggtgctcaaagaggactggcatgaactgcggcctcgtttcaaggccgcggtcgcctactgccgcaggagggactggcagttcaagatcgtcactgagcgtcatatccggacgccttacctccacaacgccaagttccttcgccgctatcgggcgatggacacgctgtacgtcaggcaggcccagttgcgctacaccgcgagtgcgcttggtcctactacacccgaagccttgcttgccgccgcctactggccggaggaggagcgggcactggccatccctgcgctgtggcagatggtggcccggggcgacttcgacattgatctgaacaagccgctcagcatgcgcatgccgatgcagctgagggagtaa

SEQ ID NO: 516502 - DNA, 1896 bp, Stenotrophomonas maltophilia
atgtctgaatccaactttctgagcatcgcgcccggagctgaggtgatggttggccagcgccgctatcgcatcactcgatcgcttgacctctatagcgtcctggccgaggacgttgagacacaggcgcccacacggctgcgaatcgagacgatgtcgcgggtgatcgaggcagcgacggacgatggcacgccaaactattcagtgcaccactactcaaacgaggtttgggcggtggctcagcgccggttcgaggccatcaaacctctgatcgagatgccctaccgcagcaaggacgatgtcagccgggccgctttggccgcgggcgtgaacacggcgacgctctataagtggctgtccttgtacttggatcaccagcatgtcgcagcgctggtgcctcgaaagcctggtcgaaacaaaggcgaccgctatcttcatgcggaccaagagttggtcatcgcttcggtcattgaggatttctacctgaccaagcaacgtcgctcgcccagggaggtagttgccgaggtgctcctgcgttgccgggtcgccagcatcaatgcgccgcacgagaacaccattcgcaagaggctggcggaggtcagacctgcgacagcgcttcgctcccgcggccagaaggacaaggctcgcaacaagtatgagccgattcggggctcattcccgggcgctgacttcccgatggcggtcgtccagatcgaccataccccgctcgatgtgatcgtcgtcgatgaggtgtaccgcaagcctcttggtcgaccctttctcaccctggccatcgacgtgttcagtaggtcggttgtcgggctctatgtgaccttggacgcgccctcggccacctcggtggccatgtgcgtatcacatgcgatcaacaccaagagtgagtatctgcgacagcttggcgttgagggagattggccggtttggggccagattggcacgctccacgcggacaacgcacgcgagttcaagtgcaaggcggttgaccgcgggtgccaggcaaaccacatcgacatgcagtggcggcctgtgaagaagcccaactacggcggacacatcgagcgttacatgggcacggtggccacggagatgaagaaggtgccgggcactaccttctctaatgttcaggagaaggatacctacgactctgagaaggaagcagccctgactctgagggacgtggagcgctaccttgtcgagttcatcgtcaacaactaccaccagcgcacccacagtcagcttcagggctcttcgcccatgcgcatttggcagcaaggcattctgggcggcgacaagcctggcattggccggatgcttccgtccaatcctgatcgcatccgcttggacttcctgccttacttcagcagcaccgtgcagcgctacggcgttcgcgttgactacgtctactactacgaccctgtcctggacccgtacatcggtgccacggatccggattttcccaagcggcgccagaagttcaccttcgccagagaccctcgcaacgtcagcgtgatctatttcctggatccggccgtgggcgactacatcgctatcccgtatcgcaaccttggccatccagcggtttctgttggcgaactgcgtgaagcacagcgtgccatccgcgctgagggcaaggcggcagtggacgaagatcgcatcttcgacagtatccgcagaaatcggcagctggtggacgagtcggtgtccaagacgaaggcggcgcggcggcagcacgctaagcgccccaagcagaacagcggcgtgccttcgaccacccaagctcctacggcgccaccggcgccgaagacccctgtggcggcagcgaaggatcgcagcatcttctcccaggttcttgaagtgctcgaggtaggagagatcaactga

SEQ ID NO: 516503 - DNA, 882 bp, Stenotrophomonas maltophilia
atgaacgcatttccgcatctgatggatagcatcgctgttcacatggatagcagcgtcgagaagcgtattgagatctgcagagcagatcgctggatcggctatgaaaaggccaagtccatcttggattccttggaccagttggttatgtacccgaccacccagcgcccaccttgccgtgtgatcgtggcacgagcggacaatggcaagactgcgctgctccgacagttccagctcaggcacaagtcggtggagaaagagaacggaacgctctgctcgcccgttgttcgcatggccatgcctgtaccggccgacctgtcgcaagtctggtctgagatcctgacgcgctgcgccgtgacccatcgccgatctgatccggcccatacgaaataccagatggtgctggcagtgatgcggttgcgcatggtccgggtgctggccatcgatgagttcaatgatgtgacgctcgcacggaagtgtgcggccgacatcctcgcgggcctgcgcaagctcagcaatgacttgaacatcagcattgtggcagcgggcaccaccgctgccgtgaatgcactctccttcgacgcgcagatgaagtcgcgttttcagacgttggccatgccgaggtgggagctggacatcccttatctcaacttcctcaatacctacgagtgtcttctgccgctggccaagcgttcgggcctcgcgactgaggaactgtccacggccctgtttgctctgggggaggagaccattggcgggactgtgcgtcttttgaaggaggcggcagttctggcgatcaccaacggcagcgagcagatcacagtcaacctgatccaggcggtgaaggaagcgctgccaccggaagatgcactggcagatgtctag

SEQ ID NO: 516504 - DNA, 1017 bp, Stenotrophomonas maltophilia
gtgcataccaactggccacctccgattcccggtgagttgctcaccagctacctggcgaggcaagccatctcgcatggggtctcgcctcatacgctagtccagcttgcatccccggggacggcggtatggaaccgcgatgtcgacgtcagcgcctcatccgggctgattgatgatctggctgttgcatctgggcaacccagagaggtattggaggaattgaccttgggccggtgggaggaggtaacacggcggcagcccgaactgttacaggggacctaccactggatagggagcattggcgtgtaccaccgcaggcgtttgcggtctggtttggcgttctgcccagcgtgcttggctgagggcggaggcttcctgaggcagtggcggctttccttctggacggtttgtcccatccaccagacgctggtgctggaccgctgcccccgctgtggtgctccagcccagccacaacgccagggctttgacatatcggtctgctggaactgcttcacgaacctggcctctgcaagggcagtgcctgcggaagtgactgtaacccagtctctcctcttcaatgccctggtgggaccgcgtgattggttcctgccgtgcaactttcggtgcagtggcaaagatctactctggggtgtcgatgccttgctatccggatttgggaccgcgggtcgccctgctcactcatccagggcgcgtgtggagttcaggccagtggaagtccggcatgcggatatgcaactgaccgaatcgctgatcggagacgtggttgcgctggaggtcagcgcagatcgttgccacctcacgcagcgcagcttccgtcagagcatgcctccttggctggtcgctgttgtggcccgattgccgccaggccgtcgcaacagaggatgcagcgttaataggcgagagatacgaatggtgggagaagcggagcggagaagacaggttgggtggcgcgagaagagggcagctttgttgttcaagatgattggaaaggcacaatga

SEQ ID NO: 516505 - DNA, 1482 bp, Stenotrophomonas maltophilia
atgagtaccgataagttaggtcgccgtagctgcgatggttgcagccggcacatcacccaagcccagcgaattcacgaggggaaggactattgcggaacgtgttacaagcgcgagttcaagcggacgcaatgtccttcttgtgagggcacagtggtacatcatcgctctgagttggaggtgcctcagtgcctacgatgcgatcgctccgaacggcgctgtaatcgctgcaatcgcctggcgcctgaagcaagacacgtgacgctggtggttccggctccggacggggggagcattaccgagtgcgttgtagcctgtctgtcctgctatccgtacttcaccgaagccataccttgtgacatttgcaaagaactgagccaacgcctgagcggtgcccgccatcttgagccagggcagaaggcctgtccgcggtgcatcaataaggcaacgcacaccacgtgttcaaggtgccgacgctaccgaaagctggtgcaaaccacagacgatggccgcaagctctgcggcggctgcagcactgagcaaccggcaactcataactgcccggagtgtgggactacggtcaatggttccggttctgcgcggtgcgatggatgcagcatcaagtccaggctgcgccgggaagtcgagcggcagctgccaatcttccagcgatcgtgggtcgccgatctgtaccggcagtatggagagtggctgttgatcaagaacgcgcccacgggcgcgttaccaaagaaagctggaaaggtcgctggattcttcctggcaattgacggtgatgcccaggttcgccagccactgattgctgccgatcttctccgcatcttcgacaccaagtcgctgcgggcaaatatgaatgccacagactttgtctgcgagcactacggcctgtccatcgacaaggacgcacgcaacgaagctcgtgatctagccctcatcgaggctcgcttgtccgctgccgacagcaagcagtggggtccgctcctgcgcgagtaccgggtgtggctcactgggaagcagacccgcactgtttcccagtacctgggtgttgccgaggcgttctgtgaaagtgcgcaactggaggggccattcagccaagagcaattgcttgcctatctagcgaaggttccgggcgctcgggcgaccatcagtgtttgggtgacctttgtgcaaaagtgctacgactggcaggtgaacatgccgcctcgatctcccagggcgcccaacctcaagcgcggggcggtcaagctgttggatttgctggcgcgagccggcagccctccggaatcaaccgaccaggatcttgcggacatcctgtgcctggtctatcagtttgagccagctgaattgcgtcgaacggttattgctgtgacgccagaaggagacatcctgaccgaggatgggctcgttcaggtgcaggcggaaatgagggatatcgtcttggaatggtccaaacgccagacttggtag

SEQ ID NO: 516506 - DNA, 393 bp, Stenotrophomonas maltophilia
atgaagatggttaaggtctatgaagatcccgagctttcaggcgctggtatacgggcctttacgcagatcgccaaggcttgggatctgaccgacgaggagatgaatgcgattctcggacagcctgtagatggcgctttcgctcaacctgctgctgacagcacggaggggctgcctcgggagacgatcgagcgcattagctatgttcttggcatctatcgggcgttacacatcatcttccccaaccggcgccaggcagacggctgggtgcgacgaccgaatacggggtctgctttcaacggaaacaccgcgctgtcgctcatgtgcacgggtctactcagcgatcttgccgccgtgcaccagcacttggaatcccaatgcttggccgagccgtag

SEQ ID NO: 516507 - DNA, 696 bp, Stenotrophomonas maltophilia
atggcgaaacaccttttcctcgaaaccaccgcacccctactacgtagctacgagacgctcgcactccaacaccaaaaaaatcgtaatggcaactatcacacggcctttccactactgatgatcaatgcttcgatcgttgaggggatgctccgattctggctagtcaacgcggtaaagcaggccatgaacgagatggttgtggaagggaaaactttcggacgaacgtcgaaaagcaaagctgagcagctgcttgagaagtaccttatagaaatcgaaggaactggtggctttgagaaattgaagtcgcactacaagttcttcttttctgtccaggttgatcagaactcaaccgagtacgacatcaaatccattaaggcgctcttcacattaagaaatgtgcttgcccacggaacgtcgatcgttgcgccgtcggtcccgtcgagcagcccaaatggccaggactacgcggacagctggcagagcaagctccagatgacgctggacatccttaaagaagtgaccgggtgcaacgacatattctccgcgcttaatgacccccgtgttccgcgccacttctttgagaacagcgtccgtttgcttaagaacgttagaagcaagctaccggacgatctgaatgttggagcagcatttgctgacatcgagcgcatgagcttcgggtaccgtcagctcacctag

SEQ ID NO: 516508 - DNA, 633 bp, Stenotrophomonas maltophilia
atgatcgcttcggtcgtggctgagtttgcagcgctccaccccgctttgaatgtggaactgcggctctcggacaagccagacttgattgaggacgatatcgatatcgtcttgcaggtcgagcggccagattcggcgcgtctggtggccaggtatctgctcacaagccgccgggtcatcgtcgcagcacccagctacgtccggatgcatgggctgcccggggtccctgttgatgtactgagacaccgctgcatttgcctgatcagaggtcgtcgaatactggataactggcgcttcttcattgacggtgaggacgtggagattcaggtcccccggttcctgatgtccgacagcactcaggtcaccgaaggctgggcgctggatggccgcggtgttgccctcaaggtgctttgggacgtgtcggaagacctcagccgcgggcgcctgctgcaatgtctgtctgactacacccggcatgaggtcaacctgtatgccgtctatgcccagcagtgctatttgccggcccgtatgcgcgccttcctggatttcatccgcgccaagttccaggacagtcttccgggcgcatccccagggcagcatgtgttgtccaggccagatatgttaggggctccttag

SEQ ID NO: 516509 - DNA, 888 bp, Stenotrophomonas maltophilia
atgaaactcgagcactatttcgggattctggaagaatgtctgggtggaaactttgagcttgagtcatcaacggaagccaagaccggtgcagattacgagtataaagggctacaggcacgctattacctacaggccaagtccccgattgcgcttaggagcacccagattgtgccgatcgcaaaggggaaagagaatgagggactaaatgcaatccgtgcattccgaaaagacaacaacctcgccgagtctccgcattcgttttgcttcggcctgagaaaacccgcgaagcatgccaaggttcccgacgagttacaacacaacttgctctacgccatgaattccccagacagtaacagtcacgccatgtacgttgcgccgaccgtccatagcaaggaagaatatttggcgctactgcgggatcgctcacattttaataagctctatgacggtccattctggggatttggagaaaaaagagtatcactggcaaactttgcatcagatgtcatgatgaacatgccatttcttcaagcgcacatctgcatcaccccacatgataaggtgactacgcacgagcatcattattcgtactcggctcatgcgaatgacgtagcattccactccccaatcgtgttagagagtgcctcatggagtctggcagactttcttgcgtcacaagctcgacagattgcggggttcgaaacgcaatcgactgagtcagtgcttaatgagatgagggaagctctacctgagtccgtcctccgagcgctgggggattcgtcccaacaggatcagcctccgcttagcacaataaggaaaatcggcaagatgctttgggagcagtacggcatcgttcaatacttggtgatgaaacgccgagctgagtag

SEQ ID NO: 516510 - DNA, 657 bp, Stenotrophomonas maltophilia
atgagcccaacccactacctgctagatagcgatgcggccaagtcgctgtgccagtacggccttatcgaagacctcgccgcagcgttgaacatcgcgcttagcgacttttccgtactagcccagctgcgctttcaactgcatgtcgccaatcccgccaaagcacttgccaagcttggaagtgagcaggcagtgggtcaggtgaaccttttgatatcccaggccagcgaagttgtggtcctcgtggattccgccaactacgccctgctggaaggtacgccggacatcgatggcggggagctggcgctgtttgcagccctctgcgacgacggcaatgccgggctcattaccggtgacaagcgatcactggtggcgctttgcaaggttggcgcgccgatccaaagcagctttagctgggcacagattctctgcttggaagaagcgctagccctgctggtcgaccactttggatggtcatacgtatctgaacgcgtccgtgccaggccggacgtcaacaccgcgatcagtaccgtcttcggcagatccgccgctgctgacgagcaagcaatctctgaggggctgcaaagctatctgcgggatgtccagacacgtacgtcgggcaagtaccaatccccctatctagccaagctccgagactga

SEQ ID NO: 516511 - DNA, 1032 bp, Stenotrophomonas maltophilia
atgaacaagaacacccctatggtgacggtcaagagcgcctacgacgctctaagtgcggccggattccctaaaagctttgtcaccaggcttctgcccgattggtgggacaacgcactgttcaagacgagcactggtgcgatcgagtttgcctcgatcctgaagcagcgccttggcttggatgtgggttttgcagaaagcggtgagctgcaagtgctcgccgcggatcgccgtgcccgttacaaaaagcgcgcagcgaccttagagagcgaactgcaggtctgctccaccctgggtgtcgccatgggcaagctggcccttttctgtatggagcagccggctcaacaactgctcaacgatccattgatgctggccaagatggtgagggctggaagccagaccaacgatgtcagctttgaagcgctgttggacttgtgctggcatcagggcgttccggtcctgttcctcaaggacttgcccagaggaagcaagcgcatcacgggaatggcgctccgtattgaaggaaggccggtcatcgtcctggggtaccagtccaaccagaacgccaagcagctattcgtactcgcgcacgagctggcacatgtgtgtctgggccatgtcgattcggcgggcgtactgatcgatgagggcattgatgcgatcactgaaagcatcgagggagccgaggacaacctggccgatgccgaagagcaccaggctgatgagttcgcgctgacactgctacgcaacggccaccggcatttacctcataccgaccagtcgccggcctcacctgcagagctcaccatggaggcggtcaaccgcggcagggatcttggaatcgacccaggccacatcatcctcagctatgcccgccaacatgacgactggctcttcggtaaccaggcgctgggctatcttcccaaccagaagactgccatggagcttatccacgatcgcttcctcaagcattgccacgtggacaggctttcagacgacaaccgcgcctacttgctcagcatgcagggattctga

SEQ ID NO: 516512 - DNA, 330 bp, Stenotrophomonas maltophilia
atgaaacgtctaaagcaggcacagccgctcgcagccgagctacgcggacgatttgaacgggatggattaaagaccagcacggcaatcgctaaggcctcgggcttgggtcaatcgcaggtttaccgcaacctgtttggcagtcccaagaaggtcggccgcacactgcgaagcctatgcaaatatgcggacatcgatgcatacgagggcaacagcgatccgcgcgagtcacaggtgctgatggatgctctggctcggatctgggacggtacggacgcccatgctggtcgactggccaggctgctttttgctcatcagcaagcccacatgtaa

SEQ ID NO: 516513 - DNA, 561 bp, Stenotrophomonas maltophilia
atgagagagctccagatcaaacaggcgttggccgaccacctggccaggcagtctgctgccacggatatttcattgattgaggagctccgccttcacgggggggaggtgcgggccgatcttgtgctggtccagcagatgcactgctttgagatcaagagcgaggccgatagcttggcgcggctgatcaatcagggctcgcgttacggctgggtatttgaccgggtgacgctggtgatggcgccctgccatgtcaccaaggccatggaactcctgccgccctggtggggcgccatggtggtggatggcaagacaggctcgtttgaagttctgcgcgaggctggcttgaacgtcaagcacaaggcaacttcgcttgcctccatcctcaacaaggaggaggcgcttgaggttctcaggcaggagggccagctgacgggctggcgcagcaagagcctttatctaatccagcggcacattgcgcagaccttcggcctggatgaaatcaaagagcacatccgggctgcactgctcgcacgcgcgagcagtgcaaccgcggtgcactag

SEQ ID NO: 516514 - DNA, 1020 bp, Stenotrophomonas maltophilia
atggcgaccaaatacgaaggtcatccgcactacgtaccgatcatcaagtggcagatgtgggagcagagagcgctgaaagagctgcttgcgcccgtcgcagcaagaacgcttccgtgcattgaggcgcgactgcctgcgcaacacgcctccatgcttgccaactttgccaacgtttggaagcaggctgcgctgatcgactactccgatccggagggcaagctcacccctacccggctcaatgagttgatccagtttctgaaacttgtgggaggctctggcctgctaagcatacctgtgctcaacccggtgaccgcagcgacggactttccgttgatttcccctcacttgggagatcggaacattgcctttcgcttgcgactgtccaacattgaacacataccctacggcatcgccattgtgcaggccgcgcttgctgtacctggactggctgccaaggccaaccgcctgatcgtcgatcttggcccaacgccagcctatggcgctaccgagaagaacacgctggcgggcatgcttctagccctgaagggcctggggttcgtgcacattcatctcgcttctggtgcattccccgtgtctcttgcgcatatcaacggcgccggccaggtgaagaggaaagactgggatctctgggccagcgtcgaggcgttggctcccgccgcgctggttggcttctcggattatggaccgctcagtccaaactggtccgaggaaacgctcacgcgccgaggaagtcgagtcaccatccgatacgcgcttgacgacaaatggcgcatcgtgcgcggtcaatacgcaacaaaagcagagtcaaatgcaatctcgagcatcttcttgaccagctaccccgccgagtttcagggcaagctgttctcatttggagaccgcctcatcgccgaccgggtcgatcctacggtggcggccaaggacaagaccggtggtcactatcacatcaccgagttctggacgcaccacatcagctacgtgctgcagaagcagtactag

SEQ ID NO: 516515 - DNA, 1626 bp, Stenotrophomonas maltophilia
atgctagaagctcgaaattttaacggtgtctcaatatttcgacccaaccaagaacatgaggccatgatatacgaccggattaaatccgccatcttcggcagatttaatcccgggacttacacatgcaagtccgacattgttgaaattgtcaacttcaagtatcaagaatactacaacatccttgaggagtaccttccaaagcccgcgccgcgagatttcgtagatttcttggtgacagagtatgaacgatacggcaaggtttctgacatgcacaagcggaaagaactttcgcttgaggatgacgaattctgggcggcttacgctagcaattcccgcaggggaattaagtacttacttgaactcctctttcgctcagagcttgatgaaagcaacgtaagccttacgcgagaggagcatgaggaagcgatatcgatagccttcttggccactgaagagctggttagcctttacatgcggagtgaaggatacaagagctatatggacagtgtcacattaacattagacccgtcaaagcacacttacttccacgtcgaggaagacgagcgcacaaggtttgatattcgcgatatcgcgttggatttctacaagtacgtacccagccccatgttcctcgatgacttcgcgacccatgggcagatactggacgcaagcttcgtatccacactgggcatcaactacggcgacacgatcggaacaatatcatggctaattgaacgctacagcgcggagagagacgaagaggaaactttctatttcatatggcaggaggcaattgattcgctgactagcgcatttggcatatctgcagatcaagcctcgaagatagttgaaggatttagcctttcccaccaaaacatggaaggcagagaactcaacaagcccaagcaagagtaccgagcgtacaagcgcgccttcttcaagcacaaactaaatggagaggatgctgcattcttctctctcagaatggcaagagagtgcctgaataagctggtatcagatattccatttagaaagcttccgtcagaatgggaatccaaaagcgtcaattcatctttggataaactgtcattaatggcgggccgatggttcgaaggcgtggtcgtagaaaacctgaagacgctcgggataagaggatcgcattcggtcaaatcgctgaaaacatcaccaaacgagaggatcttgattccgaatgacgtgggtgaaattgacttcctaggatttcatgaggagcaaaagctcatcgtcatcattgaggttaaacaggtgggccttgccaccgaaccaagactattccttgacgacctatccaagtttgtgcacggaacgaacaattacagcagcaagttcatgaaaaagtacaactggataattcagaattcagccagcgtccagatgcacttcaagcacacattcgggctcgatacgaagctcgaatcggcaggatatacaatgatcacactttacccttccgtcgtcaccacgaagattcatgaatttacttgcgtttcgattacgaaattcatgaatgaaagcaagaagggcgaatcctggccattcagcaaagcaccacttcaaggcttgcccccactagagggcaagaagtaa

SEQ ID NO: 516516 - DNA, 696 bp, Stenotrophomonas maltophilia
atgagcaacaccactacaggtttgagccgccgactgacccccgccgagatggcaaggtgcattcgcaagctccgtgaaatgcatcagtggtctcaagaacaactggctgagatcgccaagctcaacgtacgcacgatccagcgggtggaaaagggagcctcggattccagcctagacacgctcagggccctggcactggcctttggctccgatgacattgatgtgctgagccgcccggtaccggtccctgaaatgaccgaggaagaacaagttaccgccaaagcagagttcgacaagcactacgtgatgctcgatgcccatgcggtcaccagcggccgtcagttggcagatctagccgaagccaaccagtctctgagctgcggaccggccttcgatccaactcgtccgatcgccgaagagatcgcccatcttgccgactatctgggggagtacatggattgcgccgacctctacacccaggttcagaagctcgacatctacgacgaactgcaagcccacgtggacaatctagactcgatgggcgtttgcctccgatacggaatgcgatcattcaaggcgacgccgacgggagattcagccgggatcggcattcgcatcctccacgtccttgcgtatgagaaggaccaaacgcccaccaccttccccgtgccacgacgcgtccagttcaagccctag

SEQ ID NO: 516517 - DNA, 2121 bp, Stenotrophomonas maltophilia
atgaccgaattcacagacttccctgacgacgaccgcaactggttcattcttcacatggacggctacgccaagccgcacaaaggcaccgactcgaccgcggtagagtgccagctggtccctatccccttggaaatggaggcgccagagaagctctcacgtcggcagatcgccgaactgtttggtatgcgcgacggcgaggcattcatcaccacgatcttcgttggcgcagtgtctgtgtatgccattggcgatgtgtttaagcgcagcaagtacgtaggtgccctgccggcgttgcagttgcgaactgggaacgcattggaaaaaggcgaatcctccgcgctttacaccacgcaccacaacacgagccgcttgcaggaagtacatgctcacaccgaaatcggtcgtgacagcaatcgctaccccatcaaagtgttgtccaagcgccagcttgaccttgattcgcggtaccgtgcaaggagtgagtttctggtcgtcaggaacaccagcagccccgatccaaccaagcacgtggagttcgtcattcctcgcatggcgatctaccggacgttctacggcttcacgagcaaggttgcggatatcttcagcatgggtccatgggacaccttcgcttccgaagcggtctactccgaggactttgccggcaacaagacaggggcagacgaagagaccggcgcttggaacctggtacttgagctgggcatgtcaaaggacgacgccacgctgatcgcacttctctacttcgatgactacggccgtattcaggcgaatcggcttgccattccgatgcagaaggcaacggaaagagtcgaccttgacccttcccaagacccgcgttggtacaccaatgcccggcttcccctgcagccgggccgagggccgtaccgcgcagtggtctccggctatgccctacggcggcggaagggagattccttccaaggaaaaatcctgctggtgcgtgcaatccacagcgtcaacatgcccgagggaatgcctcctgtgggcaagatcctgatcaacgacaacaccgacggtgcacaggttcaagtgaccgatgggcagaagacctggaagcccaaaccccgagagcagaagaagcgacccaagggaatgccaaacgttgatatgaaaccaggctctacccaaagagaaggttttgacgtcccagcgctatcgtttgaagttgatccaccgcaccctagccatgacttgaccaaggacaagagcataactcgcactggcgctcggccggcaccaaatgatccgccaacgaatggaggatcacatggacggcccaatggcgacgaagagtcggtcagccacctgcgcgttcgtaaggagaagcgtcccgcatccgacatccatgaaggactccttacagcgatggagatgctgcacaccaaggggcacattagcaacttcgcgacaattggtccggtggacctttgccagctagtgcatgtcggcgcgtttcagtgctggaacttcctcacccagcaccagcatgaggcactccgcagaaacgcggtcgtcggctcctacgctgtgaactggccgacacgctgctggccctacctggcttcggggagctccccgttcaccgcccaagaacgctccgccctagtcctggaggtcgacctccccaatggccagaagggcttctggttcgaaattgagatgaggggaactgaaaattattcctctgcattcgtcttgcaccgcggaggcaacgtgcgcggggagatcacagaggcgctacagatcatccgccaggcaagcgggatttcgatgtcgcgacacttccacgccaagagcatcgaatgctactgccaccctcactactttgagaaggatgccaccaagaagggcaaggcgaagaagtctgaggcgccagagggtaacactaagaaggatgatgccgagcgaccccagatagaagctgttccctcaggcgccaatagacctgacgaagccgatggtggggcaccagcagatcctaaggacactgccaatccagccaaggccaagtctggcgtctggagcgccggcccgctggtcaccttcttcagtaggttctccgctgaaaaagagatctcgggatga

SEQ ID NO: 516518 - DNA, 906 bp, Stenotrophomonas maltophilia
atgactcagtacctcaagccacccctgtcgataggtgcacagctagaccagctcaagcaacgtgggctgttcattggcgatgaggccagcgccaatcgctatctggaacgggtgggctactaccgcctgatgggctatctccacactcaacgagtgcctggcagtgacaacttccgtgagaacgcaacctttgaggatgcgatcagcctctacgagttcgataggggactgagagatctggtgatggaagcagttggccacatcgaggtggccatacggaccttgctcacttatcactttgcgcacgctttcggcccgtttggccacttagaggcgcgcaatctggccttccgccgctcagatcatcaggactggctagagggtgtcctcaatgaagtgtctcgttccagagagactttcatcgaccactacaagaagaagtactcctcgccagcatttcccaaggtaccgatctggatgacaaccgaggtcatgtctcttggatcgctttcgcgcttttacgcggctctgcagaacagagaacagaaggccatttcgggcgttctcttgatcgcgcctcctgtcctggcgaactggctccatgtcacgagcgtggcgcgaaatgtagttgctcaccacagtaggctgtggaacaaggagctgggtgtcgcggttaaacgacccaaggcagcaggctggtgtgagcgcgaggcgccgtatgcgccaacccgctcattcttcctgctgctagtccttcgcaggctcatgggagccacaaccgcagactccaaaggttggcatgcgcgagtgaacgcgcacttggttggcggcctaacgaacgaggctcgagtgagaagctttggtgccgcagaagggtggcaggaccaccttcactggagggcgtag

SEQ ID NO: 516519 - DNA, 519 bp, Stenotrophomonas maltophilia
atgctgttggagggggtctaccgcgccggcgccctggtctttggcggcggccacgtcgtgctgccattgctgcagaccgcggttgtccagagcggcaccgtgagcacggcagatctgctcgccgggtacggtgcggcgcaggcggtgccgggccctcttttcacattcgcagcgtacctgggggccatggccgcgggtccgttgagtggctgggcgggaggtcttacgctgttggcggtcattttcatgcctgccgttctcgtgctcgtaggagtgctgcccttctgggagtcgctaagccaccgcaaggatctgcaggcttcaattgcaggcgtcaacgccggggtcgtcgggatcctgctggcagcgttgtacgacccggtgtggacgagtgcgatccatgaccgatgggatgtcacgatggcgctggttgcgttcgggctactggtcgtcgcgcgtgcaccgccgatcgtggtggtgttgctggctgccatggcgggttgggcgatggcgcggtag

SEQ ID NO: 516520 - DNA, 654 bp, Stenotrophomonas maltophilia
atgctggtcgaaatcctccaggtcatccagctacttactgcggctgcaaccttcctgctactgctctacgggattgactcctggcgtcgggaacatcttggtcgtcggcggatggatatggccgaggaagcgctcgcgctgttctacgaggcaaaagaccacattgaaagcatccgattttccggcagccttgggtatgagtacgaaggagtgacccaagcggagggcgagagcgacgacagtttcgccgcgagaaagcaggcgtccattgtctacacacgctatgagagtcgaaaggagaccttcgtaaagctgtacgcgatgcgctacaggtttatggcggcgttcggcccggagagcggcaagccctttgatgagatgtcccgcatctccaacgagatcaagtccgccgcttggtccttagctcgtatgtggtcgcaaaagaccttcgtcaacgagcaggcgtacaggcagcacgaggccattctgctacgtcacgaagcggtcttttgggatagtcaagacgaggacgacccgatcaatccgcaggtgaaacaggtcatcgctgacatcgagggcatctgtcggcctatcattgagtcgcaaagcacgctctacggcttgcttaactggcgcgcgttcgggcgcaaatag

SEQ ID NO: 516521 - DNA, 966 bp, Stenotrophomonas maltophilia
ttgcgcattagtctctcaccgaccgctctttgcgcgctgagttccggcgcggctatcgacgcgaccgcggactcccttagccatcacgctagccggggtgggcgacacccgcacggtctctacaatcatgcgacttcacgcctctgtgagcgcatcagtcgctacgccacaatggttgaagcaatgctaaggcttgactacgaggggctctctaagcctggctctggcaacgatacctgggctgccacctcagacgcattggaagcattgacctacgcagctgcggaatatgacgacgacctaaagacaatcgtcagcaactactttgctaccaaggaagaggctgcgcgggatgagcgggccaagtttttccggagcacgattaaggggtcagccaacttgctaaacctcatggcgaacaaggccaagcacgagcacgcgcgcgctcgtctctacactgccgaaatctcatttccctaccacccaatctcacttcatggtttctttctggaggggattaccgaagatggagcaataggtccacatcccgttgtgcatgccgtccagccggtctattccttgcccagcctggcttggattgcgatacacatgattgtcgagacggacaaggcgttgacccattttctctcatgcctgtcgcgcacagtgtccccaaaggcagacacttcgtgccccaactttcagaaggctgtgagcgcttcggcccggctacccgcctacagcttcggcgagtcattttacgagtatcgcctcattgacaccgacagctcggagactcggctggattctggattgaccggtagtctcctcacggaatggccgtccggccgatttaaggtcataggagcccgagtgagctataccggggacggtgcttcggtgaaatacacaacgccaccggtcgctaaggtgaagctgatccactacccaatgccacgccgctaa

SEQ ID NO: 516522 - DNA, 999 bp, Stenotrophomonas maltophilia
atgagtggggaattgaatgcggccttccatatggccgatgtccgcgacaagcgcatcacccgccgacgtgcggtggcggtgggcgagctgcatgccggtccagtggcctatccgctgatcgtcgagcgccgcctgcccaagggcgatgcgctggtgatggccgagattgccggcctgcagggcgccaagatggcctcgatgctgatgccactgtgccacccgctgccgctggaactggtgcaggtgttctgcgcgccggtaccggaacggcaggcgatccgcgtgtggtgcgagtgcgccagcgaggcgcgcaccggcgtggagatggaggcactggccggcgtcaacgcggcgctgcttaccctgtacgacctgagcaagccggtggaaccggccctgcgcatcgaaggtatccgcctgctgttcaaggaaggcggcaagcgcggtgtctggctgcaccccgacggcatggacgatgccgagcgcacgcgtttcaagccgcgtgcgccgaagggcctggagggcgcggcctgcgcggtgatcacgctgagcgatcgcgccagcgacggcacctatgaggatatctctggcccgaccctggtgaccggcctgaaaaagctgggcggcgaggtggtggccgctgaggtgttgcccgatggcatcgagccattggcgggtcgcctgcaggccttggccgccgagggcgtgcgcctgtgcctgtgtaccggtggtaccggactgggcccgcgtgacctgaccccggaggcgctccgttccctgaacgcgcggccggtacatggcctggcgcagatggtgcgcgcgctgagtgcacagcacacgccgatggcctggctgagccgcgccgaggtggtgcagctgggcaacatgctggtgttcgcgctgcccggcagcccgaaggcggcggcgcagtgcctggatatcctggcgccggtactgggccacgccctggcgatggtcgagggggatggccactcatga

SEQ ID NO: 516523 - DNA, 1215 bp, Stenotrophomonas maltophilia
atgcctcgtggcaagattccaacagacgtggcgctggtcgtccgcaatagcgtgtgggcctgcgttgtgcgaaggctgcatggcgatcgactgacctgggatgatcttgatcagttgctcttgcctagagttgggctcgatatacacgcgcaagcggccaacggtcgtccccgatccttctaccggttcttcagcaaggggcatcatccagggaagctacgcggtcctggtggatacttgattgactcggtgcatggggatccagcgttcgcggctgcaaaggaggccttcgagcatccgatctggatgatctgcagcacagaggctcccactgcggagcaattgcggggcgtacgtcgatcactaatggagcgtcttgggctactgatgccgtccatcaccgaacgcctggtggcttctcatcacaatctccctggcctcagcagctatgcgccaagtcgggtagatgccttggagtccatgttcaacgtggccgaaggtggctccttggacgcgataggcctgtgtgcgtgtaactatctgttagctatagacagcggtaggctcgagactgcagtagatgtccgggatgcactacgctgggcaattattcgtttttgtgctgtttggggattgcgccccgacgcatgcacggcaatccagctgttgatggagcagcgggtggtcaggcttcgtaggggatcgctgttgccaaaggatgttgggtttccacttggcaatacggattccagcgcgtttagtagcaattcggcgaagggggtattcttcgcagatgactatccgtgcatgcttccggtgactcctcgcacaggtggggtggatacattcttcgcccggtttcactcgcactatcttgctttcgtgaatgatctgacaaggcaaggagcattcgcgcagctggctgggactgagctcggcggatctttgccgactcaagatgcaattgacgacctgtttcttgggctgctggacgtgccggaggatgtttgtcacggcgaggttgcaactctcaagcagtttgcgccaatcagtccggtagcggcatgcgtggcggaagtcctgcccacttctagcatcggaagctcgccttacacccgcatcaagcctctgggcgcagtgcttctgaagttcatgcgttctgtcgacatgctggttgacgttgagcatccgcatcccatggttgatgagccgtga

SEQ ID NO: 516524 - DNA, 240 bp, Stenotrophomonas maltophilia
atgcctatccagaatccagaagcagcagtctccaccgaactcagtcgcgagctgctagagcggcatggggagctcatgggcggcagcgacctccagcggaaccttggctttccaaacggccgcaccttcggccgagccgtccagcgtgaacttttgccggttcgcacctttccgctgccaggtcggcgggggttgttcgccaaaacgcgagatgtcgctgagtggctgaactcgctgtaa

SEQ ID NO: 516525 - DNA, 744 bp, Stenotrophomonas maltophilia
atgagcaaccacgcgaccaatcccgtgagcccgttccaaggcgtagcgtctgcacgcgcctccgacccgctccacaatgggaaggatcgaccgctggccccccgtgaactaaccgctggccagatcaagaggggggacatcttcaccttctttagcccgaaagagaaccggacggttaccgtacacggccccctgcaactcgcgcttcgactgcaattggagtttgatccatcagtggcggccgtgaccgagaggcctcggtccatcccggtaggacttgacagcatggaactccatttctggtttcagaggcgcggaggccaggagatctatgcaaacgtcattccgaattcgcagacagtacccggcgtggatggcaagcgtcgtcctcgcgagctggaccggcttcgttcagcagccaaggatgcaggcatctctttgtggctaatcacggaggacgaactcaaggcgcccggcggcaggaatgagctctgctaccaactgctcgggttctgccagtcagccaaggatctggggagcagcctggcgttgcgacaggaaatcgccgcgaccatcgagcgaagcggcagcatcagtgcagatgaactcatccatgagctcaggcaccaccctcgaactcacattcagggggtcgtggctgagttgcttcacgtcggatttctggcgaccgatgcatttcctcgaatgacggggcgatcaaggatctggagggccgacccatga

SEQ ID NO: 516526 - DNA, 1851 bp, Stenotrophomonas maltophilia
atgagttccaagttcaatgccgtcgacctcgagtcgatccgggcaactccaaggccaaatgggatcgtacttccagctgatcaacagtcggaatttcaagcccgcctgtcagcactcaccagcgtccttgatggggcaaccttggtcgacgcagcccttcgatggggcgtgccgcgaaataccctctctcgaatgatccggaccgcactgctcttcgacgagagcggtcatcgagtcggataccgagcctgcattccctatgcgcgattcagcgtgtcagatcgcaacaactcggtcgtccccgatagttcacatccgttcgccatagatgctgtcctgcaagcgatccccgaactcggcgatgcagtcgcaagattcaagggcgccttgccaacacagtccaaaaggagccccgcgttcgacaggctgcattcccagttcgtgaaggtgctgactgggaagggctttcaggccatgtatccgctcaacatccgtgacaagggaagacgagcactgacctccctcataaagcgcatccgaggcacaaagagcgaaaatgagatgctcttggctgcggatgagcctacttccacccgaatcgagaacctactcagcattcggccatttgatcgagttgagtacgacgagcattccgtcgacatcgacgcatggctggccatgccgatggcggacggctcattccggctagagaagattagtcggatctggctactggcagttgttgatgtcgggagtggcgccatccttggttgggaaatggtgcttggccggaagtacgagcaacacgatgtagtcagcctgttcgcgaagatcatgagcccctggcaaccaagggatctgagcacgtcgaacttgagctactcgactagtgcatggatgccgtcgatctacctagtggatgaggtagtgatgagaagcgcaatgatcgcaatggacaacgactcatcccatcacgccaagatgacagtccgaaatctcattgatcatcacaagggaatcctgcactttggacgatccgggatgggcgaaggtcgcccctacatcgaggctctattcaagaagattgagaatggcctgctgcgccacatcgccggcggctttgctcccgcaacgcaagtgaatgagcgtcaagtcactacaaagcttgacgggaaagaccaccccattctcctggaggtcttgaaagacctcattgacacctatgttacctcgcacaatgtgacgagccggtccactcgcgaacccaggtcgcccaagcgaatcattgatgagcatctggcatctggggagtgggtgtggcatgcacctggcaccgaagatgacgtgagaaacatgaccgttaggcggatgaaggtgaccatcagaggctccagaaggagtggtgtacctcccctcgtctatctcgaccacgctaggtacaggtcaccaacactgtctggacagtggcacctgattgggcagtcatttgacgcaacctacgaagactggcgagacattcgcaagctgaccctctggagaggcggtaagcgtgtactcacacttcacgctctcgccccatatgcgagcgtggcccacacgctgtcgatcaggaagcgcgcggcacgctgggcgaagagcgacgcgtcacgggagcccggtaactactgtttagccgacaacattgaggcctatcacgcagccgtccgatcggcggccgctggcgtcagggacagcgcctcgctcatggcagctggcgatgtgcccaagccaccttccacgaccaacagtcaggggcaaggctctccactgatgggaatccgcagggccacgttcaacacgaggctccgctga

SEQ ID NO: 516527 - DNA, 780 bp, Stenotrophomonas maltophilia
atggtcgtcggaaaaccgactacccctagcgaaggcaacttcttccgcgaggtcatccttggactgggcatgagggcaacaaccgtagccagcccacaggatctcctcctcaggatcatccgggcaattgagcaggaagccgctagagcatcggccgacgtggtcgtgattgcgatcgatacggctgagcagctcacgctcaaggactacgcccaccttgcaaagcttcagaaccacttcctcggatcatcagtgcaaccgttctttctcttcatccaccagagcaacagcgtgattggaggcgcagacgatcttagtcagctggcgccgccacatctgtatggccgattctttgtcgacagccatccttttaccgggcttctctgggacatcccgacggaggacgctgacgtgcaggacgcatgtgatgtcgccttggcatttcgccagcttgaccaagttatgaggtggccggacgagggaggaaagacctacaccgaagcattcgcaccctatgcttacagcgttggctggcgccttgagaaggagaccgaagcgatacgcgaacgaattgagaaccttgccaatcaaggcaactatcccgttcccaaggattggctcatggcctccttcaaccagtttgtctaccacctactcaccaagatcgctgctgggcgcaacgatttcgaagggcttactacccagcacattgatgaagctctcctgcgcagcgcatacgccggcttcgaaagctcaagaaatagggccgtaggcaaatga

SEQ ID NO: 516528 - DNA, 1218 bp, Stenotrophomonas maltophilia
atgaggagcggcgctcagctggtcggcggcaacctccgacttgttccataccaatcggcttttggctgcgtcgcgaggctatcgcgactgaaccaggccaggcgggtcacggagtactcacaactcctcggaatcaagccaaacagaaacatcaacctgctcttgagcctgacgacctcgcaagtacaacaagaggcactctctacaacccttgggatcgagactccgcccgagtgggacttggcggcgtggtatccgttcatgacggacgacccgagactgccctcccatctcaggttgaggtactgccttccttgcatcagactcgggtatcacaccacactgcatcagctgccctggatttccacgtgtccctggcatggcgttcgcctgcgccagagttgcccacgatgcaatggatttccggtgacagtcgctggcacgcccacgaagttgctcacctgtgcgtgcggctttgaccttatgaatgagtcggcttccgccttgcagagacacccccaccccaatgccacggcgtatctacaggcctacctcaactggtgtgcggagcaaaggcgtacaagtcggctgatcgtaactccaggggtacacgttgatcccagcaggatttccagccttgtggaccttcctcctggcctggcgctacgccaggccaggagggtctgcaacgctaaaaggtacaggctcacgacacacccagatcaacaatcaccaccagcaggcgcagatacagcactacgtgcaaaccatacgggctctgaggacgactcaggcccaatcctccgttacattgaccagaatgcagccagaggttcccgacgaggtcgatcagatcaggcctttagccctcaaggcgagcgagtcgccggagctcgggatcaaccggctccggatggatggagcagctacgccgcgaccaggccaggcgggcgctatcgagtgattcaccccaactatttgaacttcgtagatgagctcctgggcaaattcagccattccagcccgcagcgggtgagcaactcgggattgggactacgagtgagactagcggtgctcgcccagggctacgcggacggcatcctcctctcggagcatgagggcaacttgagcgcgcttccggagcgttatagatcgcccagtcccattgcgcttttggatacgagccatccacacgaattgcgcgtggcgttcggataa

SEQ ID NO: 516529 - DNA, 216 bp, Stenotrophomonas maltophilia
atgacgctgagggttcggcgccgcgcgataggcctgaatgacgtactggaccagcgggacttccaccccaaaccgaagaccttaggtgccccgcatgtactcctcgcgcaccatctgccgttgtgcgccagtcagttgcggatactgcccaccgctaggatcaccgatgacgcgctgtcctgccgcgtgcgggcacccgggttgacttggcgatag

SEQ ID NO: 516530 - DNA, 966 bp, Stenotrophomonas maltophilia
atgggaacgcagcacgtaggccatagggagcttgtcaattttgccgacgatcgggtcaatctgccacgcgataaagccaatgagctacgcgcgcaggcgcgtggactgagagagcgtctggagacctacctagggcagcacccggatttcacccttcgaaagatgatcctttcgggaagtctggcaaaaggcaccgcattgcggtcgctcaacgacattgacgtggcctgttacatcagtggggcagacgcccccaaggacattgggaggctgctggagtacttggcagagcggcttcgaaaggcttatccaaatttcaagcccgaacaagtcaagccccagacttactccgtaacagtctcgttccaaggttctgggctggatgtggacgtggtgccgatcctctatgacggcgatcctgactggtatggcaacctagtcagtcaggatgatggctcgttcttgagaaccagcattccccggcacctagagtttgccaagcggcgtaaacaattgcagccttcggattttgtgcaggtggtgcgcttggtcaagttctgggcaaggcgcatgaagacggaagttcccggctttcgtttcaagtccttcatgatcgagatgatcctggcaaagctgtgcgatgaggggcgtgatttctccaactaccccgaagcgctccagcacttcttcacctacgtggcgcagagcggccttcgcgaacaaatcgcattccaggattactaccctaccgccattatcgccgccttctccgagcctatgcagatcattgatccggtgaacgagaagaacaacgtggccaaattgtacggtcacgcgcaggtcgatgccattgtcgaggcggcattggatgccggcgacgcgattgatgcggcactggctgcaccgaccaagcaggagaccgtgcgctactggcaaaaggtcttcggctcttccttccaagcgtga

SEQ ID NO: 516531 - DNA, 516 bp, Stenotrophomonas maltophilia
atgactggcagctacacacaatcaagcaccagcacctttacgatcactcatgcccgccacatggcagcgaaattggccgccgacctcaagcgtatgcagcgcttctatggggcgcccagcgatgacagaatcgccgcttatgagaccgaagtggttgaattgttgaaggccggctatctggacacagtcacctacggtttcaagcggggtgataactggatcgagcccacactgcgctacaccgcaaaagatcttgcaggcatgtccggaatcgatgacgatcccggcaagctccgcccaggcgcagatgtatccggggcgagcttctacaactacctgacgtattcctctgcctggttcacgctgtcggctcctcagcgggagtcatttgaaaagtcgcttccatttcagcgtaccggggcagccgagcctggtatcagcggaagcctggtgtctgaccgcagctactctgcgggtggcaaggcactcgaccgcctcagtgtcaggagctactaa

SEQ ID NO: 516532 - DNA, 933 bp, Stenotrophomonas maltophilia
atgcactcaaagccaacccttgacgagttgtttgatcaacgtcgcatctatccggacatcgacgcccgcacccgattggatcggctgattggcgtggacgatcagaaggctcgcttgtcgaagattctcggcctgctagtccacccagctggcctggaattgtgggccaagcgccatcacccaggtgccgcaacgctgcttgattccgtactgcgccgacctcctttggtcattctttccggtgacgtcggctctggcaaaaccgaattggcagagactatcggtgatgccgtggcgcgacaggagaagattgatatcaccttgttcccgctcagcctggccacccgaggcaagggacaggttggcgagatgacccagctactcaccacagcgttcgactacgcgctggcagaagcgaccaaattgcaaggtcgcggaaaaagcaccggaggggtcatcttgctggtggatgaggccgatgcgctgacccagtctcgggaatcggcgcagatgcaccatgaggatcgagcaggggtcaatgccttcatcaggggtatcgatcgtctggcgcagacgaaggtgcccgccgccgtgatcatgtgcaccaatcgcctcaacgcgctggatccggccgtacgccgtcgcgccgctgacattttgaccttcaaccgtcctgattcagctcagcgacgctacgtcctggaacaccagttgcgaccgctgggtctatcctccgtgcagatcgaagggctggtagaggccactggagcgaaggatggacaagaggtcggcttcacctactctgacatcacacagcggttgatcccctcgatcgtactagatgcttatccagaccgatcgattgagagcaaacgcgcgcttgagattgctcgcccaatgcagccaacgccggcgtttcaggatcatggctga

SEQ ID NO: 516533 - DNA, 726 bp, Stenotrophomonas maltophilia
atgtcccaatggtcactttcacagctgctttcttcattgcatgaggatgttcagctgcgccttgccactgtccggaagacgttcaatcacccagggtccaagggggatgccagtgagaacgtgtggatcagcttgctggatacctacctaccaaagcgctatcaagctgcgaaggcacacgtggtggatagtcaaggaaatttcagccagcagattgatgtggtgattttcgatcggcagtattcaccgtttattttcacctacgagggtgaaatcattgttcctgccgagagcgtctatgcggtgttcgaagccaagcagacagcgaatgcagagctggtggcgtacgcccagcagaaggtggcaagcgttcgacagttgcagcgcactagcctgccaatcccgcacgcgggtggggtctatccgccaaaggccttgatgccaattcttggcgggctgctgacctttgaaagtgactggagtccagcgcttgggccctccctggaaagggcactgaccgccaatcccggcgacgggcgcttggaccttggctgcgttgctgcgcatggtcacttcttctttgaccattccaaggatcgctatctctttgtgaatgagaacaagcccgcgacggcgttcctcttcaaactcatcgcccaacttcagttcagtgggaccgtaccgatgattgatgttgaggcttacggccagtggctgacgaagtga

SEQ ID NO: 516534 - DNA, 729 bp, Stenotrophomonas maltophilia
atgaccagcgccagtgctggcgcacgattaaaattctttattgggaatcagggggaagatgcaatgccgagtcaagctagaatcgcctttgataagaatttgcaggacgtggagaacttgctgacgttgcacgctacagttggtggcgcaaagccagggcgacgctatgacttggaggtgctcaataagtcagcgatcgtgctgttgacttcgttctgggaagcatactgtgaagacatcgcggcggaggggttggagtgcattgttgcaaatgcagccagtgcggaggcacttccaaaggaaatcaagaagatcgttgcgagaaagctgaaggcagatgtaaacgatctggcaatttggtctgtctctgacgacaagtggcggcaatatctccgcgaccatatggcttcgttgaaagaggcgagggataggaagctaaacaccccgaaatggaagaatatcgatgatctttttgaatccgcgataggcctccatggagtgtcttctaaatgggtgtggtcaacaaagttgaccgctgcgaaggctagagaaaagcttgataagtttgtagaactccggggtgagatcgctcatcggggtaaggcgaagacctctgtctccaaggctcaagtgcaggattacctcggctttgtaaagaatgccgccgcgaaaactggtggtgctgtcaacgcgcatgtgttcaaggcgactggcactaaactctactga

SEQ ID NO: 516535 - DNA, 858 bp, Stenotrophomonas maltophilia
atgccccgcccccgccccaatccaaacaaaagtccggaaacacttcgagccatcgaaacgctgctcctctgggaggggcaagtcaccaatgagcgagtacgccaagtgtttgatctgcatatcaccacggtaagtcgattgctaacccaatatgctgaactcaatggaggcggccttgagtaccgaagccatgtgcgcggatacgtggcgatgtctggcttcagacccctcctaaccgaagggctgatcgaagagtaccttgcgtttgagcgcccccaggaagctacaggctttatcgagagctcccagcttatcctcggcggcgttgaacgacgccacttcgcactgcttaatcgtgcctgcagagagggcaaggggctcgttggcgagcaccggtccatgcgcaacccagcacctcgcaccaaacgactgttccctcatgcgctggtgcaggcaggcaggcgctggcatgttcgcgcatttgtcatcgccgaggacgaggcggaagccggacgcttcctggacctgtctataaatcggctgagcggcttgaaacagctggctgatcctcggccagagcgggccgagcctagccaggacgccgcctggcagacacaggtagagctgtcgatcgtcccccatccgcatctgacaccagatcagaaggatatggtgcgtatcgagtatttcggaggtaaggcagcctacaggttaagaacccgtgccgcactactccaataccgactacatgaactgcgctgcgccaccgatgcagagaaggagccgccgaacgaatttcacctctgcgtcgacgatccaaccgcgatccaaccgtggctatttggcgagctgaattag

SEQ ID NO: 516536 - DNA, 1566 bp, Stenotrophomonas maltophilia
atgggcagtctgcatcaaatccacagtcgcaacggccgtatcggtgccggaaccgatacgaagccagaggatatcgacgctatcgtcacggcgcttcgtaaggacgggcgtggtcatttgctgctttactttcacgggggcctggtcgacaaggccgcgggtatcggtattgcccagcgacttgaggggcgcttttctcaatcggcctatccggttttttccgtgtgggagtcgggtttcgttgaaacgatccgcaacaacctgcgcgagctgccggatgagccggtattcaagaatctggtgcgcaaggcgctagagtacgcgctccgccgcttgggaggtagcaacggcgcccggaccatcacgccgggcaacgtcgatgcagggaaggtccgccaggcagttgatacatattggagcgatcccagtcgcaatcacgtgccctaccgtgatttcaaacctgtagtggggccctcaggtgcgcgtgcggcgagtgcgctgatcgacgacgccgagatcgaagccgacttgcaaaccgacagcgagtttgtggtcgccatgcaaaccctgccaaccgcgttagacgaagcacgcgatgcattcatcgggggcggagcgagcgttcgagataccccgttctcgcaggcggtatcaacgcaggtcgccggggtcgagggaggccgcgggttgatcgtctggttcaaagtttcccttctggtgaagcgcatcctgcagggtgttctgcgtcggtacgcggatcaacgcgatcacggcctgtatgcaacggtcgtagaggaagtgttgcgtggtgttcattttggtggcagtggactcaatgaatggggcaaggcactccagtggaaccgcatgaagcaggactcactcgatgcgttcggcgacggctccgacctgtatgccggaactgcgctgctggagcggctgcgtgccgcccatgcctctgaagggctgctatcgaggatcactctagtcggccacagcactggcgccgtctacatcgccaattggcttgacaaggcatcagagcttctgccggccgagattgcattcgacgtcgtgttcctggcgcccgccatcacctacgagcgctttgccgccacgatcacccaacatggcgatcgcatccgtcacttccgcttgtttggcatgcgcgatgaattcgaacgggacgatcaggtcgtcggagacgactctaaatttcccaatgggcaggactggaagcgcttcatctatcccagctccctcctctatctggtgtcgggtgtcctcgaatcgcgcccaaattccgacggaacgctcgtcgacgaaccggacatgccgctgctgggcatggaacgcttcttcgcttggcaccacatctactcagatagcaagtttcccgaaataggtgcagtccgcgcgtggctcggagctgcaccgaaccgtacgatctggtccaagtcccaaggacagacagcaggcttgaacagcacaagcattgatcacggagctttcgacgacgacgaagatacgctgctcagcgttgagagcctcctcggcggatggtga

SEQ ID NO: 516537 - DNA, 2757 bp, Stenotrophomonas maltophilia
atgccgcgagatgatcactacgcgatcgtgctgacaattaaccgttatcccggcctgagtgacctccatggacctgagaacgatggcgaagagttccggcaatggctcctcgatccggagtacggcgacctggacacccgacgtatccaagtcatacggtcgcaggattatggcgtggcagcgaccccggacgacgcaaacccgaccgagaaggagctcaagaaggcgcttaatctatggctgcgcaccccgaacggatggcatgaccgcattggacagcgcttgtatctgttcttcgccggacacgggttcacagccggttcggcgattcacgacccggcactattctcggccgtcgcgcaaaacggcgacacggcgcatatcgccgtcctgcgttatgcgtcgaaaatcgccaacgcgggtttctttgatgaaatcatcctggtaacggactgctgccaggacgtactcaaggcgagccaggtgctcgagccgacttggaccccgccggaccggcaacgaacggcacacgtccgattgttccaggcgtatggagcgccgcggggacgtcagtcctttgagcgcaacattggcccggccgggcagtctcgcggcctgttcactagcgtcctactggacgcgctgcgcagcgcaccgcctgacgccgacggatgggtgacggatcgcgccgtcgcggactacttccaggtgctatgggccgatcgctacgaacaggaaaccggatacacgccaccactgactcccgcaacgaagcggattcgaatatatcagcgcccggcgtcggcgccagcttccgcgctcccacgccgggttgccgtcgacctgagccgcatcattgctaaattcgcggccatcgaccggcaaccggatcctgacatctcaccttacccacccgcgccgcccaccgacatgacgccaaatgggcagctacgcagtagccagcttcgccagctcgagcatcccatcgtggagctgaccccgggtctgcatctcgtcgttacaccagggaatctacccgacgtcgccttcgaggttccctacccggtgctgccagctgcaggcaacacccctcccgttgctgcacctatcgacatgcccgctttgcgaaccgacgaggttgcagcgcagccggtggtgttgaggacggacaatcccaacgcgcagatcacggtgctcgatgctagctacgctcgtgtcagcatcggtacgggagtggtctcgctgtccttagctccgggactctacaaagccctggtgcacgtcggggccgaatcggcgcaatcgctgttcgttgttgcggatgcgcccctcgaccagcggttgcccgggcccgaattttccgcggctgcgcccgtcatcggcacgtcaaccacgcaccaaaatcagtcccttcatgccgctgaatactcgatgattccgacggagccaagccgcgatctcagcgaaatcggtgaggtctttgtcttcgcgcgcgactccagtttcagtcccgacggctctctaaaccccgcgccaccgtggcggcagtggcacctcagttcccttgtaggggcaaccttggaggagcgcctcatccacagtggtacggacgacaggctcggctacgcctacctcaaattagcagcaacagctggcagcctcgcactgcgaacggccagcccttgggacgagtcgaatgaagacggactggtcgtcccggtgattaaggggtggcgtaccgagatctaccttgactgtacctcagctccgccaacccctccgatggtggacactcagggcgcacgaatgctcgacttggcgactgcctccatccatctggtccggatgggaagtgcgtcactgctgttcgatccgatcgggcttgcgacggaggcggcgcgagcgcagcttacagtcggccgggaggtggcggtgccatcaaccgagcaagcaatggccagcccgatgtgggccttgtacgcggccctcgctgccttccagcggggcgggcagcacatcgataccgttggacaatgcgttgcagccgttcctaaggaaatcagggagggtctatccgattttgcggtgctcgcgcaatggctaggcctatcgaacgtggcccatccgctccgtaacccacccgcgctggcggcctcatggagccttgcctcaaagctggaggcgcgaggcggactggcctccgaactgttcgaggagatcggccaatggcggtccggtgggagtctatggactctctggcagcgttcagttgatgaccgctggttgttgcgaaatcggctttctgaccaggctatgggcactctgaagggtaatgcacaggggattgacgacgcggcaaccccgcaagtgctcgcccccgcctggtcactggacacctgggttccggtcgaagacggcctgaggtgtcctaatcccacccatagccccttccagcaagcactccgtcggcgtcttctggatgcgctggctgagcgccacaccgatgccgacagcggcgccttcaccactgtgtcgctgccacccgagtccgatgtcttcgccttggcagcggagctcatgctgtcgccgatatacgccatggccgcctatagcaagctgtatgcggaagcccgccgccaatccgacctgggccctctcatcgagtgggtaacggtgaacggagatgaacccgacccagactcgacagccaccaagtcgaagcgcagcactcacctgcaatcaatggacgactactga

SEQ ID NO: 516538 - DNA, 486 bp, Stenotrophomonas maltophilia
atgccggtaagcgccaatctcgcctacgaccttctcaagaccgtgagcaaactggaattccagctccgacggcacggggacttcttccggaaagaccggacggggcaaccgacgtccgacgtggcttggcgcaaggtgcaagagcgcgtccgaaagttgggcgacgatttcgcgtcagaggttcctgagtcggcgcgtgcgcgccttctctgtcaacgcgatgagcgccccatgaagcagatgattattgaagagaacgggaacttggtggcccgcttttgcccctgcccattggatgccgaatcggatgcggtcgcgctggtggaagccatgcggcaagtccgcaacaacctcttccatggtggcaaagaagattcggaagtggatccgtacgaagaagacaacgattgggtctacgccgcgacgcaggttgcgattgctctccagcatgcgttgtctaacggacggctcgacaatcgcgaatga

SEQ ID NO: 516539 - DNA, 360 bp, Stenotrophomonas maltophilia
atgaaagtccagctacagcggcaggcagttcgtctgcgcgttgatgaagaggagctagcgcagttgctggccggcgaatcggtggagaacctgacgcggttcggcggcgatcgcggctggggcatggtgctatcactgcatgcagggcaacaggcggtgcttctggaggggagcgagtactgccggttgatgcttcctcgcgaagcggttcagtccttggcattacgtttgccctgtcgtgatggtctgggttttggcattgcgctggatgatgacatctcgctgcagcttcaattcgatgtggatgtacgagacagcctgcgccaacgaggtccgcaccgtcgtgcaccctctacctag

SEQ ID NO: 516540 - DNA, 981 bp, Stenotrophomonas maltophilia
atgagccaactcaccgacggtttcggacgcagctttccgtacctgcgcctgtcgttgaccgaagcctgcaacttccgttgcagctactgcctgcccgacggttaccaggccgatggccgcccgcgcttcctgcaggtggatgaaatcgcgaggctggtgcgtgcgtttgccgcgctgggtatgagcaagatccgcctgaccggcggcgagcccagcctgcgcaaggatctggacgagatcatcgccaccgtggcggcggtgccgggcatccgcaaggtggccatcaccaccaatggcacgttgctgccgcggcgcctgccggggtggcaccgggccggcctgactgcgctgaacgtgagcatggacagcctgcagcgcgaacgcttcaagaccatcaccgggcacgaccgcctgccggagatcgaacagggcctggccctggcgcaggcgttgggcctgccggcgatcaagctcaacgcggtgctgctgcgtggcctgaacgatgacgagttgccgcagtggatggactacctgcgtggccgccccttcagcgtgcgcttcatcgaactgatgcgcaccggcgacaacgaagcctatttccagcgccaccacctgcgcgccgacgtggtgatcgagcagctgctggccgctggctggcacgagcgtccgcgcgccgccgacgccggcccggcgcgcgagttcggccaccccgaccatcgcggcagcatcggcatcattgccccgtattcgcgtgacttctgcaagggctgcaaccgcctgcgggtgaccgccaagggcgacttgcggctgtgcctgttcggcgagttcggcgtaccgctgcgcccgctgctgcagcgcgatgaggaccacgacgcgctgctggcacgcatcaccacacagcttggcctgaaagcggccgggcatggactgcaccagggccagaccgggctgaccccgcacctggcctccatcggaggatga

SEQ ID NO: 516541 - DNA, 2637 bp, Stenotrophomonas maltophilia
atgagattttttgaacttgatgctgtagatatcacagcgctcagtgctggcgatctgcgtgaattggttgcccgtctttgcgaagcggaggtaatccagcaggggcgtcggccgaagagcgttatgtggggaggtgcgcaggaggcacctgatggcggtttggatgtccgtattgaggctatggacttgccgtccaacgacggctttgttcctcgtgggatctgcggtttccaggtcaagaagcatgctatgggtgcggcggcatgcagggacgagatgttggagggtggcaccccaaagctcgtacttgcagatcttgccgatcgaaatggtgcctacattatcgttagtggcaaggacgattgttcagacagcatgttggcgagtcgagtgcgggcgatggaggcggtcgcggagacccttcctggaaaagcgtctctgcgcgttgacttttatggtcgagatcgattggcgacttggctacggcggcatccaagcgttgcgctgtgggttcgtgcgcgcctcggccgccccttgtccggctggaggcctttcgggaggtgggcagctactcccccagcccagaacgacgcattccttgttgatgaccacccctgcgtgattgacgcgaactcgagcgcaaagactcctatgcctgtttctgagggtatacatctagctcgagaacggttgcgccgccgcggtagtgcggtgcgcatcaccggcctctccggagtggggaagacgcgattcgcgcaggccctgtttgaggcgaacgttggtgaggaggccttgtcaccagctagcgcaatctacgccgacctgggtgagaacttgacaccgacggcatccgagctagtttcatacatcgttgctaacgatcatgcggttcaattggtgctggacaactgcccgccagacgtgcatcggcagttgcagaagcaggtctccgcaagtagcgcgatgctcagccttctgacaatcgagtacgacatctcggacgatcgtcctgaggaaaccgaagtgatccacctcgagccgtgcagcgaggagacggtctcgatgctgatccagcggcggcacccagacatcgggaagttgaacgcgggcaaaatcgccgaattttccggcggcaattcgcgcatcgcgatcgcgctggccagccgggtagatgcagatgagacgttgacaaacttctccgacgaggaccttttccataggttgttcagtcaacgaaaaggagcgtccaatgaacttctggaatgcgctgaagcgctatcgctcgtctattccttcaatgtctcctcgtccgagttcaatgatgagcttggcgtcctaagtgccatcgttggcctcgatcgtcgtggtctgcatcgggctcaggctgagttgatgcgtcgtcagctcgcgcagagtcgtggtgagtggagagcagttcttcctcatgcacttgccaatcgtttggcgaagcgtgcgctggagaacatccctgtcgatgcaatcaatgccgagctgctaaagccagagaacctccgacttttcgtctcatgtgcgcatcgactgggatacctgcacgatttcgagcctgcggttcggatggcaaatagttgggtgagccccggcggaccgctgcatgatattggatcgtgtaacgaaggcacgctgtctgcattgctatacatagcgccggtattcccggagaccgtgctgcagctgatcgagaacgccgcaaccaagccaggctttgcctcgcgcgagaaccgaaacttcaggttgttcgtgcgcctgctgcaccagctagcttacgacgacgataagtttgatcgtgctgcgacggtcatgctgaagttctccgagggcgagaagtcaggtgagaacagggacagcatagttggacagatgcggcatctgttctcgttgcacctgtcaggtacgctggcgcgaccagaacggcggtgtgcgtttgtcagcaagctactcgagtcgggcaccgagaggcatcgcgagatcgcagccgagctgttccatgctgcgttcgaagcgacgcactggacgtctttctctgcgttcgacttcggtgcacgtagacgtgatgctggctggcagccgcgaacgcgtgccgaagagctcgagtggtatatcggcttcttgaacttgctgcgaccggtgctgacatgtgatgacttgactcttcgcgactgggcgcgctcacttctggcaggtcatttccgggaactatggacgtttgcgggctgttttgatgatctcgaggagatagtcagaagtcatgcttcgaaaggggaatggccgcagatgtgggtctcggtaaagaagacgcttggcttcgatggcgactcagctcatcctgatctactggctcggctggagtcactttcgcgcgttgcggcaccatccgacctctattctgagatcgaggcctatgtgctgtccaatacttgggatcacatcgagagtaggggggggcaagtagccttcagtgacgagatgatcaaagagaaggtcatctctcttggtgagatggccgcagcagagctaggttgcttagagcgattgggtccagggctttggtcgatggtcggcagggaatcattacgtacagggccaaaagctgcctaa

SEQ ID NO: 516542 - DNA, 1212 bp, Stenotrophomonas maltophilia
atgactatagcccgggccttccttacgtcaattttcaatcgctcccagaatgcagtgagtcgtggcaaggatgagcgaatagctctcaggctgacggagtcatcatgcccagagttcttcagcctgcgcagcatcgaggatgcaagagcgtttcgttccgaacttgaactggctgagcgctctggagccatcgaaatcaaggccaaggtgatggtgcagccgcctctagatgttgcgggcgttgccgtactgaacctcgcaaagctggcgaacttcttgggcgcacgacttcgtcgtgattccgtatcagaggcccgttccatgctggacactcacaccggccttttccccgtactgaccgaggtcattgagcgctggtcgctgggccataaggttcgcgggcaagaggctaccgatgcttctgtagcgcaaatactggatgcaatcagactcatttcagcaaggcgaggtgtcgtcagggacgaactgttgcgccgggtttcggccatgatgtttggtgacagcaagcgagtggagggcatcgtgaaatggatcgatttgctttggttcaactctattgcaccatctggacttgatagtagcgaggtcttctcggccataggcctgcacaaggaaccattgcccgtactgatctcaggtccgcttacggttgttacgtcgactacggtggtgggagtggttcatccatatctcggcttcgctcctgcccacatcactggattcgtgccgaatccagccgtgttgagttggcgtgttctcaccatagagaatcgacagacattccatgagtttgctgaagctgcatctgatcaagtcggcctcgtgctgctctataccggtggtatgccgtccccatcctggagacaggtctacatgctgatcttgaaatcacttccttgccagacaactcaggcgtttcatttcggcgacttggatgagggggggatgagaattggcgccgtcatcgcaggatctgccgccgaggcggggttcaccctgaagccgtggttgatggatcccagggagctcattggtctcggttacgctctcaagccaacggctgaatcggtgtctagcgcaatatctcgaacttgtcgatccatcgggtggaatgacttggccattcatgtggaaacgcatccggggacgctggagcaggaggttctccttccacagtttccaggctcctag

SEQ ID NO: 516543 - DNA, 3420 bp, Stenotrophomonas maltophilia
atgtatctgcttgagaaatttcacttggtacagtttttcctattccgtgccgaaaccctgagctttagccctgcaacaggcattgtggcgcctaacggatctggaaaatctgcgattctggatgcgatgcagatcgtcttgtacggaggggatcagaatcaaatcgatctcaatgcgcagtcagggggggtatcaggcactcgagggcgttcagtgcgcgaatactgcctcggctactatcgcggtgacgagcatattcgtgagaatgcgacgtcctatttgaccatggtgtttcgcgacactgagggcgaattgccgccggtttcggttggcctggccctgggcgcgtcagtgggcgacccaaagctgcacgtctacgggcgctatgtggtccaaggggttgcgctcgcgttagatgatcatcttgaagcgaacgccgaggcggaacttttgccgttggcctggggaacgttcaataagctgatggaggacgcagtcagtcgcgtgaatggtaggctcgcagtgcctccgtcggcggagaagcaggttgaagcaatgttgttcgccttgcgccccaaaggagggggcagcatcgacccgagagcttttcggcgagcgatgaagaatgcgcttaatctgcagaaagttcctgacaccagcagctttgttcgaaattacattgtcgatgcctatcctatcgagctcaagaacttccgctcccagctcgacaatctgcgctcgcttcaagccaaggttctggaaacactggacaggcttgagaacgtcaaaagcttgatcgcagccggtcataaggctactcagactcggatgcacgcagcgacctatagggcgctgttggatgactatgagcgtgaacaacacatggatgctgttgatgcggcacaaactacgctgcatgaagcgcgggacaggcatcaggcagcgcagaatgcagtcgacagcgccaaggcggagcatgatcgactcaacggcgtgtacatcgaactagagcttcaatcagcagcagatccggcgatcagtgccgcccgtgacctggccagcgaacgagagagatcacttagacctatcaaaaccaacgtggcccaggccattcgcgaggtggtggcgggcttcgagaaggccaaccgcgtgaaacccgatctcggaggctggcagcatctggcgatgccgtgggttgagcttcttgatgcggtttccagtacatccgtatccgatgcgcttgtgcttgacgtttcgcaggcctcggcagcattgcgcgagtccagcatgcgggttgctccgatcatccagtcggcacggcgtcagctagaccatgacgagcagaggctgtccaagcttggaaatgaacttaggatcgctaacgagcagatcaaacgcatccaggaaggcaaagcggaactcccgccggccgtccaagcagttgtgaacatacttggagacaaaggacttctgtgcacgcccgtctgcgatttggttacagtcacagatgccgactgggcacccgtaatcgagggattccttggtcgttcgcgcactgccctggttgtccgtagcggcaagtttgaggatgccttgtccgttttcaacaagattccgtgggatacaaagccggattcagtactgttggtgaacccggtgaagtcgaaggcggatatgggtgtggttccgccaatgggtctcgcgcacctgatcgcgggtgacaatcaagtggcggtggactatatccgtcttcgactcggccggctggagcgattggagcgcgtcaccacggatagcccagagggcttcacccgtactggcgagcaggctggacgtgctgatttcggccgtcgacgccccttgtctgcaacggaactggtgttgggacgccaagatgcgagccatcgcctggcggtgcttcggcagcagcgcagcactttggggcagaacgcagccgaatgcgagcaggaggcgaaccggtcgcgccagttggttgaagcccttgagaagttggtgggacttgaaggacgtatccaggacattgaaagatggctgaactcgcacattcaggagcaatccgcgcttgatgcaaaggcggcgatgcaagagatcgcaagcgcacctgatctccttgctcgtcagctgctcatcacagaggcaaggcgagctgccctggcagcacagtcgaagctggaagaaagcagcagagacgtcggaactcatggtgaggctttccggcaagcacagagacggctagacgagcttgcggatagaaccaacggaatctgctcaaaggcggctctcagtcgccgcaatgaatacgtgggtgatgagtggttcgaaacaaaacgcgatgagtttgatggttccggcctatcgctgcatacgattgtggcgaagattagtgacgctacggttagaagtggcaatcagctgtcttcccaggtgcaggccttggcaagtgacatgtctacatacgcaaaccaattcgatccgcagatggatatcgcggtgggcgacttgggtgccatgtgcgagacgatggctcaggagaagcaacggctagaggaatccgagctccatcactaccaagtgctttccgcggaagctgcagaagcggcagagcaaacgttcaaggtgcagatcgccgcccgcctgagcgaccacttcgccagcatgcgcagcacgctcaatgagctgaacagtacgatggagcgcttgccgccattctcgaacaacgagaagtatcacttcgtcaccaatctcaataaagatcatgagtcgctgtacaaattcatactgaaggtggctggtgcgggaccggagggggatatcttctctggacaggtggatgctcctcctgagttcagggcgatgcttgagggaaaggatgcagaggccaacaggcttctggaggactatcgcaatttcttcaacttcgagattgacgttcgcagcaatggtgtgacggtgaccgacttctcaaagcgcatggacaagggttccgggggcgagcaccgcgcgcctcttttcatcgttgctgcagcgtcgatggcgcgcgcattgggaaagttgcgcggtgatcaaggcggcatgtcgctgataattttcgatgagttgggtgacaagattgactcagtgaatacccgtgccgtctttgagtacctgaaggcattgggccttcagcccatcgtcgcggcaccggacgatgccttgggtaagatcaacgaatcggtggatacctacatcgagatgtaccgtgacgacgatcttatctccatcaaacacgtacgcattgatgacgatggtcatgtaattctggattccgataactggcgcaagcatcccgagcttttcgaggaggagctcaagcgtgttgaagcaagtcgaatgccccatggggaaggggtcgttgcatga

SEQ ID NO: 516544 - DNA, 657 bp, Stenotrophomonas maltophilia
atggcacgccactgggaaaaggcgcttagccgcgacactatgtacgaagagcaggactacgagcaggcggcctatcggctagtaacccatcaggtcttgtccgcctctgaccgggcgacccggaaggattacggcattgtcagccgaaatatcaatgactttgagcaggcagttcgtccccttggcatcgagctgttgcacgacaccaactaccagtacatcgtggcgcggcccgtgcacgtactgacccaacagcgagccagcaaggacgaaaccctgctgctgttggtgctcgccggcgttcatcatcgcgtccgtttcgaggggcgcgaagagccaaatggcgaaactttcgtcgatttgcctgacttgcaagagcactacgagaaggaaacgggcagggactttccctcgcctggggacttccgctctttgatgaccaagttcaagcgctgggggattgctgcctttgaggacaaggacgatgtacggaatcagctcgcgaaggttcgcatccatcccgcgatcggagatctgctgcggaaggaatacttgagccatctggaatccttccgtaaggaagtggcaggtgagggggatgcggctactttcgacgcaatgaatgaagtcacggaggatggcgatgtatctgcttga

SEQ ID NO: 516545 - DNA, 1422 bp, Stenotrophomonas maltophilia
gtgtccagctctctgtttgaggtactgccatcgcaactctttcgcccattggcctcggcaaatcgggagaactactggcggctgctcttgggtctgtacgaagaattcttcgggccagaggctgaggttcccccggcgaccggctgggaacggcggcagttgacgcagttcatcgagaactacctcgaacacgatgacgcttggcaggcagaagagggggtaggccagctcactccgctcaacattcgcgccaacatgtacttgagccatctcacggagaatggctggttcgaagaagagcaggtgggactcacgcgcactctgtccatgactgctgtggtaagccgtttccttgccaccttgcaggtcttcacagaagacacgccggcgatggtgggcgcgaagatgcgttccattgaagacacattacgtcgggtgcttgatcctgcaagcaatgtctacggtgacgacttcgtaaacgccggcgacagcgcccatgcgcttctgtccgggattgccgccatgagtctgaacgtgcgtaccctgcagcgcgagatattcaagtccgcgacccccggggcggctatccgtcggttgtttgaagactacatttccaagcacgtcatggctgactatgcggacttggctggcgccgatcaccccctcgcacgaaaggcgcaggtgttgagcctaactcaggaaatccattacggggatcatcgggaacggatcatcgtgtggttggccgagcgacgctacaaaggtgataaaggcacggctgaggctgtctatgagaaggcgatcaggcgattgagcaatgtctatcgtctgcaagactacttcgatcgcttgggccaggatcagcgccatatcgagcgtcgcatgctggccatgatcgagtaccagcttcgcgcgccgggccagctcgagagacggatcaaaaaggctatcgccggagtcaatgctgcggagaacttcgacgcctccatgcccgttgggcccggagcattgctttccggtgaactcctgtttcaaccacgcatcgcccgtccgcccattcccaggaccgcggattctccgcggcagatgacagccgagcaggaggcgcggatgaacctgcacaggcgtgcgcgtgatgcgcgtaccgccatgccaacagaggtgagggtgtacttgcagggtgtcatgggaggaggtaggcagatccgggcgtctcagcttcccatcaccggtatcaagcaatttcgaatggtgcagacgctgtccacctacgcacaggaagcaatgacaggcctcggaaagaagcaccatgaaggaatttcaaagcgactacctggatatcgcttccaaagcgccggtgatgaacgaattgccgggccgtatttggacatgccggacttctacatcaccaaggtgaaatga

SEQ ID NO: 516546 - DNA, 1398 bp, Stenotrophomonas maltophilia
gtggccaccggagcagcccagaccaagcacactatcccggacatcgtgaacgtcctgcttgaagagctggtgcaccatcgctacgaacttcctggcttccgcaccttggaactggccgccatcggtgcccgcgagcgggtcaacctgggctactaccgcagtatcagccacgcgctgacgcccgccacgcgcacgctcatcgacgaactgctgcgcgcaccggaagggtccaggttcaccggctggcaatcactcaagcgcgagcccggccggcccaccaacaaggaagttcggttctatctgcagcacatccgcatgctgcagcagttggccgaccagctgcctcccattgatgtgccggtgcccaagctcaagcagttccgtgcgatggctcgggcctatgacgccagcgagctggccgaactggctccggacaagcgctatgcgctggccaccatcttcattcgcgcccagcatgccaagacactggatgatgcagccgagttgttcatcaagcaggtgcgcgggctggagaacacggcccagcagaaattgctggcctaccagctcgaacatgccaaacgggccgacttcctcatcggccagctcaaggaaatcctacaggcctatcagctcgacggcagcgatagtcagcgcgtggatgccatcgacaacagcctggaagcggaagtgtcgaccttgctggccgaatgcgaagaacatatggcctacgccgggaagaactacctgccattcatgctgcagccctatggcgcggtcaggccgctgctgttcaatgggctggagctgatgaaacttcgggcgaccagccacgacgccggcatggagccgctgatcgcagcggtgctctcgctgcgcaaccagcgccgtgagctgatcgaggtcgcctccctcggtttggacccggaaaaggactttgactggatgtccaagctctggcgtcagcacgtgttcggcaagcgggccagtgcagccggcgccggctggatgcaccgtaagtacttcgagctggccgtgctggtgcaggtcaaggacgaactgaagtccggagatctcttcattcccagcagcgaacggtttgatgactaccgtgagcagctggtcgatgaagccaccttggcccaggaactggaagcctacggccaggtgtcaggcctgcccaccgacgccgagtctttcgtggcgggattacgtgcacaactgacctccctggccgatgaggtcgacgcgcgtttcccggagaacgtacatgcggacatcctggatgggcgcctggtgctgcggaggggcaacgcgccgaagtctccagcgcgattaccaccgtggatcgcctcatcgccgaacggcttccagaatccagcatcgtcgatgtcctga

SEQ ID NO: 516547 - DNA, 207 bp, Stenotrophomonas maltophilia
atggccgtgcgcgccgatccgaaggaagtcgccttccccaacctcgatctgaccgcgcacctgttcggcatgcccgaaggcgagtggctgggcttcgatacgtcggtgtcgtttggccaccagggtctcggcttgaccagcacggtgctacacgatgcacgcggtccgatcggcatgctcggccaggcactgaccgtgcgcccgtga

SEQ ID NO: 516548 - DNA, 1131 bp, Stenotrophomonas maltophilia
atggatcgtcgactgcaggttttcgtctccagcacttacacggacttggttgcggagcggcaagccgctgtcggcgcaattttgaaagctcgccacataccagctggtatggagctcttcactgcgggtgatcaggggcaaatggacatcatccgccagtggattgacgagtccgacgtctacatgttgattctgggtggccgctacggctcgatcgaaccaacctctggcctaagttacacagagctcgagtatgactacgcggtaagcaagaacaagcctttgtttgctgttgtcatgaagcaggaggccttggacgctaaggtgaaactccatggtctgcaagtcgctgagactgacaacaaagcacttttgaagcgctttgagcagaaggttctatccaatgtttcgtcgttcttcgaggatgagaaggatattaagctggccgttttcgagacgctgcctgtgctgcagagtaagcgaaacatgattggatggattcgcggtgaccaggttatcgatactggcccattcagagagcagaacgagcgcttgatgcaagaggtagatcgtctcagggcagagctggcgattgcgcagcagacgcgagaagctgcccgtgaccctgaagcgcagaggattacggagacaatggatgcgctggaagcgaccaggttggaagttccggtcgattttcttccggccgggacggagaagccttgggtcaccaatcaactagaatttctttccgtcaactcaagctccttggtcggtggattgaccaacagaggggataacactcctcagatcagttttctctactggaaggtcgcgagcgttctcgcagtccatggcgttctgaagaatgtcaagttgcaagggcaaatacgcacattcgagttgactcccttcggacagaaactcatggcagcagccactgtacgccagcagcgctcgtcagcgagacctacagacgctgaccccgtgcgggatgttgctgtggaagccggttcatctgaggagagcgtattgccggcagtggcccatcctgagttagatgccccagcctccactgcaaaatcgagaaagacgggagcacgacgatccgcagcgcgggcacccaaaaagtga

SEQ ID NO: 516549 - DNA, 447 bp, Stenotrophomonas maltophilia
gtgaaggagacgaagaaggcgccggaaggcgtgcggatcgccgacaacaagatcgatcacgcaatagccaaactggccgacctgaagcgagccaaactggccgacctgaagcgggttgagcccaaggaccgggatagccggatctcccctggcgtctatgccccggtgatcgtctccgagggcggcaagctggtgatttggcccatgcgctaccagtgcaggctcgccgggaagccggccaactacgaccagcgctacccgggcacctacaatgcccgtcgcgacagcctggagaagttctggacgccgacgttcggctacacccacggcctgctggtcgtcgacaccttctacgagaacgtggaggggccggacggcaacggtcaggtgctgcagttcacgccgcgcaccggtgagccgaacggcagccccggcgtgcgcctgtag

SEQ ID NO: 516550 - DNA, 201 bp, Stenotrophomonas maltophilia
atggccgagctgatgcgcacctcggctgggcgatttgtggtctctatcaatgatcacccccagatccgagaggtgttcgccggcttcgacctggtgccgctgcagctggattacacgattggcggtgggcaggggagggtaaagaagttcggggagctgatcattaatagctgggacgacagccacgccagtttgctatag

SEQ ID NO: 516551 - DNA, 210 bp, Stenotrophomonas maltophilia
gtggtcacggctggaggtccgcggctgaacctcctgcgcatcgaggaagagctgagcgcggtgcatctgcgtctgtcgaacaccgtgatcgagtgcctcccgtggcaggagtccgtgtggcgctacgatgggcgggggacgctgttctacctcgatcctccttactgggaaaccgagggttatggcgtagagtttcccttcgcggaatag

SEQ ID NO: 516552 - DNA, 261 bp, Stenotrophomonas maltophilia
atggaagtgctcaacgacatccatggcgagctggtgtcactgtaccgctgcgtgcggcatcacctgaatgagttcctgcgcatgttccggtggtccctggtaacgcggcagatgttcgagtgggtgcagatggagcggccggagaccttgaccgacattcagcgtgctgcgcgcttctactacctgcagaggctggcctttggggggaaggtgcagagggccaatcgttcggtgtggtcacggctggaggtccgcggctga

SEQ ID NO: 516553 - DNA, 579 bp, Stenotrophomonas maltophilia
atgactgaaacgtcaatcgtgcgcgcagcctataggactctcaataagcggaccaacaaagaggacaacgctgatctatatgcaaggctaatgccttacggtcatttcatcggcgccataaactactccctacagacgagcctcatcctgcatatctgcacattgacagacagaacaaagggcgtgtcgtcgctagcgaagctttgcacggattttaggagggattttcctaatgtcgattttcaggacctggagcgcagactaaaatccattgacgataaatactcaaactatcgaaacaagctgatcggccatatcactcatgatagaaacgccaccattaaagcgttcgacgcggagaaattcacgcatgaacacttcgagcaggatctagttgaactagattatgtgttcaaagccctttgcgcagtgtcgaacagattgccgatcccgacgttcgaagaatccaagatgaccacgcatgaatatcacatgcactacgacctgaccgagagaagcgcgtcgaacttcctggctgcgctcgaagccagcctgccgaaagttatactgaaggcgtaa

SEQ ID NO: 516554 - DNA, 201 bp, Stenotrophomonas maltophilia
atgcagctgatatttgatgatgctgagggtctgggcaagcgtgagcagaccagacgcgagatctggaccggccagatgcgtcgacggacgatctacttcttggcggaatccatgctccgcttgatgtctgatttcttcgggtccccggcccaatgccacgtggcgattttgaggaagtggcgctggatctggaagacttga

SEQ ID NO: 516555 - DNA, 2580 bp, Stenotrophomonas maltophilia
atgcacaccctgcccctgcagcggccactggcgctgatgatttcactcacactgttttcccccggagttgcccatgcaggcgcctccacatccactgattgcgatgtcggaactgaagtatgcgagatctcgcgcagcggcaaaggctggctgtggggcggcctggccgcgctcgctgtaggtgccgccgctggcggtggcggtggtggcggaggtggcggaggtggcgaatcggccggccccggcggcggcgggacgccaccgcccgggccgcagcccggcggccagttcggcaatggacaggtgctggttggtgcaggcggccacgatcagtggcttcagccggtgaccacccgcatcaacggcgatgtgcgcagcgaaggaacgctggagctggcggcgggcaccctgcacatccagggcgatggggagctgcgcaacaacggcaccctccacctgctggccggcagccagctgcgcgtcgatggcgatggcgatctggagaactccggcgtgattcgcgtggccggtgacctgcagatggcaggcgaaggcagcctggagaacatccgccaggcgaatttcatcggcgccaacgtacagatgtcgggtgacagcgagttcgagaaccgtggcaccctgcatatcgagggcggccaatgggcgctgcagggtagtgccgagatcgagaataccggcaccatcagtgcccgcggcaccttcgccaatggcgcgctgttcaccgccaccgcccagcgctacggcaatgaccgtgatgccatcgatgtactggagaaccggggccacatcgatctggccggcgacgccagcgtgctgcgcctgcgcgccgacgagcatgctgcacacgcgatcaatcatcgcaatgccagcatgaccagcacagcgcgcaacgctgccatgctgcacgccgagggcaacaatgccactctgctcaaccagggcacgctgaccatcaccggcgacaatgcggtggccatgcgcggtgagcgcggcgccaccctcatcaacgatggcaccattaatctgggtgccctagccgacaacggcgggcgcggcatggtcgccatgtcctctgatggcagcgcaacgatcaataatcgtcgcggcggcgtaatcaacatccacggcagtgaatcgttcgccttccggatggacaccgccggccaggggcgcctgatcaacaatggcgtcgtcaacatccacggccgcgacagcggcatctttgccgacgccaccaccgctgctgcggatcgccccggcacgcccgatctgggctggcaggcaccgcgcggtgtgcgcggctacatggtcggcacgaacgccgatggtagtgcaggccaactggtgctgcacgacggcggtgaattgctcgacgtagccgtggataccggtttcacccgcggtacggatgcatcgtcgctcctgctgaaggacgtggtgcttggtgccgatggcggcgagcagaacatccatagcgccagcgtggtatggcaggcgcagggcctgcgcaacgccgatggcagcgtagacgtggtgatgcaacggcaggactatcgcgagttggcggatgcctcgcagcaggaactggccgcagcgctggaaggcagctaccgcaatgattccctgttccacggcctggaacttgctgaccggacccagttccaggaagccttgacccaactctccggtgccagcctgcttgacggcccgatgcgcctggccagcaataccgatgccgtatggtcgcagcttgcccagttgcgtgccgacaccccacaagtgctcggcttcggtggcggcaacagcaattcgctggatgtccgcggccagggtacggccttgcagctggcggtgccgctgacgggcggccgcaccctgcagatcatcagtgccgggttgcggggagacttgtccaaccgtggtagcagcgatagcgcacagacttggcttgctggcgtcggcctggcccagcagtggggacgcctgcagctgcgccatcagctgggtcacgaactgcaccagatgcaggaccagcgcaacctgaactggtccggggtgagcgaacgcgcacgcagtgagcgcaggctttcccgcacactgctgagctccacgctgagccactcggtcagtcacggcaacctgcactggcaacctcgattgaaggcgacggccttcgactatcgcgagggcggcttcagcgaggctggtgcaggcggtttcggcctgcgggtggaggcaggcaacctgcgtggcatggccctcgaactgggcagcgcattgcagcatcggctgagtgatcgctggcagttgcaggccgacctggccgtgaccaagccgatgctgtcgcacgccggccagcgccaagcatggctgcacggcgccaccagccaggcattcaccctgcccggccttcgcgtgggcggtctcgaccatcgtgtcgcgctgtcggccgactaccagcatccgcgtttcaacttgggcctgcagatgctcggacagcgcgtgtgggggcagaacgatctgcaggcaggattgcgcatggcctacccgttcaaatag

SEQ ID NO: 516556 - DNA, 972 bp, Stenotrophomonas maltophilia
atgcaactacgcaacgccatttcattggccctggcggccgctgccgggctggccgccagcggaaacgccttcgcgcacggcaccatgtccaagccggccagccgggtctacgcctgctatcagggcaacccggagaacccgaccaacccggcctgtgcggccgccaaggaggttggcggttcgcagccgttctacgattggaacgccattgcccatggtaacgccaacggcaaccatcagggtctggtgaaggacggcgagctgtgcagtgccagcctgcccaagtaccgcggcctggatctcaaccgcgccgactggcagaccaccccgatgcgcgcggatgtgcgcggccgctataccttcgagttcctggccccggcaccacatcagacccgggagtggaagttctatgtgacgcgcgagggctggcagccgggttcacgtctggcgtggtccgatctggaagaattctgcaccctcggcaacgtgccgctgtcggagggcggcgtgtacaagctcgattgcccgttgccgcagcgcagcggtcagcacgtcatctacaacacctggcagcgctcggattccgctgaggccttctacacctgcatggacgtgcgcttcgaaggtggtggaggcgtgaccccgccgccgcaatggcaggatgccggaccggtgaccgcccgcggtgcactggacgtcggcaccagcttggccctgcgcgtgttcaacgcccagggcaacgatctggagagcgtggaaaccacgctgggccggccagaccgcaccggcgcagtggccgctggtgctggcgcgcaaggtcaatgccactgcacagcatgcccgcgtgggcgtgttgagcaatggcgtggtcacgccagtggcgtcggcaaccgagaaccgcgtctacctgaagccgggcaaccgtttccagctggagacccaggtgccgctgccgagcccggatccggttga

SEQ ID NO: 516557 - DNA, 756 bp, Stenotrophomonas maltophilia
atgtgtgattccagttcctcttgctcagatcacgctctggatgagggccgccgcggcctgttccgccaagccgcggcgctcgctgctctgggtggcttggcaggcgcgggccttcttacatccggatcggtcaaggcggcgcccctgaaccgcgagcaacgtgacggcctgagcatcgatgaagtactcgaacgactgaaggccggcaatgaacgcttccagtccggcaaggccacccagcacgactacctcgcgcagaagcgcgccacggttgctggccagtatcccggctcgatcatcctcagctgcatcgactcgcgtacgcccgccgaaatcgtgatggatattccgattggcgacagcttcaacgcgcgggtggccggaaatgtggtcaacccggatctgctcggcagcatggagtatgcgtgtggcgtggctggtgcgaaggtggtgcttgtaatgggccatacctcgtgtggcgccatcaagggcgccatcgatcgtgccgaattggggcatctgaccggcctggtcgaccgcatccggccttcggtgctcgcgaccgaatacacgggtgagcgtagcagcaggaatgcggcgtttgtcgacgctgtggccaggtcccatgtgctgcgcactgttgcggcaattcgcgagcagagcagggtacttgccaacttggaagacgcaggcagtctccgcattgcaggtagcctgtatcacctgtctggcggacgggtggagttcctcgactga

SEQ ID NO: 516558 - DNA, 1131 bp, Stenotrophomonas maltophilia
atggggatggaaggcagtttcagggcttgtttcggccgaacaaatagaactcgtcccaattccccgccgtgcggccatgctccctcgaaagttcagacgggtcagatgtcctgcttgatgggcaatggtgatgatggagccctcttcatcaagcgccgccaggccagagttgtccgtgtgaatctgcatcgcttgcaaaagtcagcgtggatcatccgcatctgcacactccatcggttccgcagcatggctcgaacgttgatcggctggggtgacggcattcttcccacccgctggatgcagctgggcctgatcggtgcgattctggcagtgcctcctggcctgcgcgggcgccgttatcaggcggcgcatgtccacctgcgcctgttcaagtacagcgtaggcgatgcagaccaccaggcgaggaggcaccttgcactccgcctgctatgcgaaggacgccagcgtgggccagtggcaaaggatccagtgcgctggcgtgaccgcatccgcgccaccacatggcatgaccccagtgccagttggcgcctgccgcgtccgggaatgcacatgatcgccctgctgcgtactggcgatcccctcatcgcattggcccgcatcattgagcaatgccccccatctgcacgattcttcattgccctgccatgcttccacgaggatccgctacatcgcatggtcagaagcctgcgacagttcggctatggaatcgaaacggctgaccggcgagatcccatgctgtctgtaacaatggtgcgccgcatgatgcagggtgtgacggtactggccttcgtcgatctgcctacattgggccagccagcctcgcatctgtgcaatgcctcgctttcagcagagaccggtgacggccaagagcacgatccgataggcctcgcccatctggctggaacagacatcctggtggctggccatcgcatggatgccggcccaggtgacggactgcatgttgtgcagcgcgttccgcacggccctttcagtcgcatgtcccacgctgtactgcaacatgcagccgccttcatcgcccacgatcccgccaactggcaccacctggatcgagccgcgcccattttcagccgcagagcagctgaaggctga

SEQ ID NO: 516559 - DNA, 741 bp, Stenotrophomonas maltophilia
atgaaccgtatcttgatggccgccctgctgaccgcctcggccttcaacagccaggcagccaccccgcagatcaatgtgggcaccatgttcgattacatgcaggccaacagcacgcagctgctcaagcgcgtgcgcaacagcggtggcgctacggccttcgttcgcgtggagatcagtcgcatgcacttcgacgcatcgggtgagatcaccgaaacccccgtcgatgcagccgcattggcacgcagcgagcccggggcgcaaggcctgattgccagcccgagccgaatgatcgtgccggccaacaatggccagcaagcaactcgcctggtgttccgtggcaatcgggacagtgaacagtattaccgcatccgcttcgttcccgtcgtgccggagaagggcgaattctccctgacccaggaacagtccgaggagtacaagaagagcatctcggcaggtgtcaacgtgttcacgggctacggcacgatggttttcgtcgcgccgaccgacgcccgctacgacacccacgccgacgcacatcaggtccgcaaccagggcaatgccacggtggtgctggagaatcttcgccagtgcgccatcgcccgccctgacaattgcagcaagggaaccagagtgcatctcttccctggccaggcgcacatcctgaaccacgctcccgagcagttcagccgctatcagctgatcgaaggcggcgcgacgcgcgagttcgacagccgccgttga

SEQ ID NO: 516560 - DNA, 513 bp, Stenotrophomonas maltophilia
atgaagttcaacaagaccctgctgtcggctgcggccgccctgatcatcgccccggccgtcagcttcgccgctgatatcccggtcaacgtcaaggtcgaggccgtcatcccgaccgccgacggcctgcgcgtggataccaaggattggggtggcgttacccagaacatgtcctatgacatcaacagcgacacgctgtccccgatccgcaagcagctctcggtcaagagcaatgcagacgtctacgcctacctgcagtcgcctgccagcctgacctccggtgacgattcgctgtcgctgaccgtcgccctgggtgccacggagctcaaggtcggcgccgccaacaaggctgagatcgcgaagaaggccgatgcggaagcgaccaacggcaagaccatggatctgaccatcaccgccgccgacgcaccgagcacgggctacgtggccggcagctacattggcgaggtcatgatgatgttcgaaagcaccccggcctcgggtggcagcggcaagtaa

SEQ ID NO: 516561 - DNA, 2502 bp, Stenotrophomonas maltophilia
atgaagccccgcacccgtcacagccgcttggcactggcaaccgcctgcgccctgtccgccctgtcaagccagggcgttcaggcaagcgaccggaccggcaccttgagcctgcagcagcagcgccagtacatgcccgtcgagtttcgcgagcacctgttcggcgcgccgctgatggtgcgtgtggagcgtgacggtacctatctgggtgatgccgaggttgtgctgcacgaggacaatcgtgtgcagctgctggccttcaacgaaagccatgacagcccgttgccgcctcacgagcgtcagcattgggccagccagttggccgagcccaccgcactggggatgtgcgaaaaccagtgccagggcctgcttgccgcacactacagccttgaacattccctgctctccttgctgaccagcgagggcagccgcgctaccggcgatgggcgctacctggcacaaccggagaatggcagtcatggcctgatgctgcgcaacagcctcacgttcagtggtgggcagcaacagggccatgccctgaactatggtgccgagctgcaaggcagcgtcggtcattggagtacggtcggcagctaccagtactatctcaatgagtctggcgaatcagcaaaacactatctcagcgcgctgtatgcacagcgcgagttccgtgaccacttcctgcgtgtaggctacttcctgcccacgttccagggcgtgacccgccaaccacgtgcaccgggcacgcagaattacaccagtgtgggcatcatggccggttcttccgatgccctgctggccgattacagcagcgtcagcgtctatccggtctatgtcaccgccagccgtgacggcgtggtggagatctaccgtgatggcaacctgatcagcacccaggctgtgaagccaggtgtgcaggaaatcgacacccggcgcctgcccggcggcatctacgatgtcgagctgcgcgtggtcgaggaaggccagatcagctcgcgtgaaacagccgtcatccacaagcccggcagctggcgcgatgccagccgccgttggcgctacagcgtgttcgccggccagcagcaaggcctgctcgacagcggcaacgatgcccagcaaggcagggtttccgcaggcgcggttgtcaactatctgctgcacccgcgtgccgtagccggcgccaccgtgcagcaggtgggagatcgccgcagcgctggcatttccctggactggcaggccagcgatcgcttcaatctgtataccaatgtgtatgactcgtcctatgctggccgcggcatcgatgcccagggcatgttccgctacggcacaggctcggtcatcgtctcgcacgcccgtacgtgggtggaacagcgcgatcgccttgcatccaggcccggccagccaccgcgctgggaaattgccagcggctggcaggacagcagtgcagtgtccttcaatcatcgcattggcgaccgtaacaacctcagcctccgcgtggcccataacagcggtttcaatgcaggcaccagcgtggatgcttcgtggtggcggcgccaaccactgttcggcaacgatgccagctggcgcgtgtcggtctatgaccgcccaggcagcgccttcaccgacttcaagcggcagcgcggcattgatttcactctgagcctggagctcggcagagagggtcgccgctacaacggcagcctgggcagccgcaccggccaggcaggcaatcgcgatctgtatgcgagcgccaccgtccagcaacaattggatggatcctggctgcagagcgtgcagggcactgtcactgccgatcgcagcgggcttggcctgggcgccggcgcgtatgtcgaacaccagtatctcaatggtgatgcccaactgcagcgctcctcgcttgacggtcgcctgtcgggcaacgtgaatctggaaagcaccttggtattgggtgacggcaagggcgccctgctcggccgcaaccagacccagagtgccagcaccggggtgatcgttgacgtgcgttctgactaccccgacctggagctgcgtgccgacgacagccagggtggcggcgtgaccctcaagcctggccgcaacttcgtgccggtcagtgcctatcgagccggcttcgtgcagttcgatttcaccggaaatgcggccccggccgcgaccatccagccggccaccgtaagctaccacctcaacaagggtggggtaatgcatgccagcgtagatgtactgcgcaccttcaccgtgatgggccaggttgtggacgccaacggcaagggccagcgcggcgtgcaggtaatcaaccacgccagccgcagtgtcagccaggaggaaggcttcttcaccctggagctcagtgcccgtgagcctgtggttgagctgcgatacgccgaccagagcggctgcacgctcaacctggatgaagcccgctacccgcgagaaggtgatgtggtgatggtgggggggctgcagtgcccggtgcaggtggcggatcgctga

SEQ ID NO: 516562 - DNA, 1230 bp, Stenotrophomonas maltophilia
atgaatattttcagaaagatcaagagaacaggtaatgcccagccgtcgagacgccacatcacaacactgcttctagggacagccctgcttctcggcacggggggtgccagtgctcaagctgttgagaagaccattacggcaattttcacaccgagcatccttgacccaacgaacaatcgtttcgtcaacaccacgccgaaggaaggctattgccctggatgcgacgtcgccattctcatcggtgttggtgggaatttcaaggatatcaatatagatgctgagccgcggagatctgtttacatcaagatcccttcagagaagaggcaaatccttgtgagccacgaggatggcgcaagcactgcgctggttgaatggcgtgcaaccgccttctcatcgaaactgaacgcaaacggagttttgaacaatttcgacagcgcatggctgtacgctcgaggaggctgtggcaactccgggcttattagggggcacgcgcatcaagttgaatttcgctggttgtttcgcgaggcggcagtcaatggctgctataagatcgcagccagcagagattttccagacatcagggcaagcatgatggcaattggctatgaattgaagacgccaaatccgctgggaatgaaaagtggaatctaccgaggatcaatatccctaagtgttggtccgggcggtgattttgattttggcgataatttcatcgctacagcaagcgagattaccctcaaattcgagctgaccgtgaaacactccttcaaggttgaatttccatcctaccatcccacggtgagcttgaatcccgtaggcggctggcatcaatggacagactacggccgcgctccaagccgacttcaacaggagctgccgttcgcgttgaccagttccagtgatttcagtgtcaaaatgcgctgcgagcatgaaagcgaagggcgttgcggcatcaaggaccaatcggcaggtacaatcgcgccagtagacgtcgatgtcaccatgccaggcatgcgggatttgacttcaggagcatacgcagttaatgcacccttgattgcagagcatagcggctctacggcccctcgtttccggccggacggctatctggagaatcgaccatccaaaattcgcttctccgcgagtggcagttcccttgatgagatgctgaaggcgcccgggtcctcgtggcagggtgacgtgactgtgatcttcgattctgatccgtga

SEQ ID NO: 516563 - DNA, 312 bp, Stenotrophomonas maltophilia
atgcaacgcgcaaacgactacaccgaccaggccattgctggggtggaacgccgactggacaagctggacaagcgcttcaaccgcatggcagcgatgagcagtgcgcaagccgccatggccatgaacacggcgggtctgaagacctacaaccgcctgggcgcgggtgtggggtactcggaaggcgagtcggcgttgtcggtgggctaccagcgtgtgctcaacgagaagggctcggccaccttcagcctcaatggcgccttcaccaacagtggtgagcgcagcatgggcgtgggcatgggctttggctggtaa

SEQ ID NO: 516564 - DNA, 690 bp, Stenotrophomonas maltophilia
atgaagattcgtaccctggtcattgatgaccatcccgtcgttctggccggcatcgaatgcatgctgcactccatgcccgaagtgcagttggtcggcgaggcactggactcgaccgcagccgtgcgagtcctcagcaggcagcgagtggatgcggtcgtgaccgacttctccatgccgcagggtcgctatggcgacggtgttacgtggctgaggtttctgcaacgacgctttccgtcgtcccgcattgtggtgatgacgggtatcgagagcgcgatagtcatgaccagcatccgggctgccggcgtgtactgcatcatcagcaaggccgatcctgagctgcacctgctgccagcactgaaggcggtgatgcggggcgaggactacttgtctccagccattcggcaggtgctcgatcgtgtgcccctgatagagaacgtcggtgattcaaagggcttgtccaagcgcgaatccgaagtgctgcgcatgtacgccgagggtatgtccgtggcacagatcgccgaccgggtaggccgcagccgcaagaccatcagttcgcagaagcaggcagcgatgcgcaagctcaacctgcagcaggatgccgacctgtttgcatatgcggtcacgcacggactggtcagttccgcgcaggtggcgcggagtgaccgccacgaagatcttggtgatgcctga

SEQ ID NO: 516565 - DNA, 657 bp, Stenotrophomonas maltophilia
atgagcacacctcgcatccgcgtcatcgtggctgacgatcatccggtgatccggctgggcgttgaggccgcgctggatgaaacgccgatgatcgaatgcgtgggtagcgtggccaactccaccgccctgctggaactgctggatagcacgccatgcgatgtgctggtcaccgactacgcaatgcctgggggccgccacggggatggcttggcgctgattggactgctgtccaagcgctaccctgaactgcctatcatcgtgctgaccggtttggatcagccggggcttctgcaggcgctgcacagcgctggcgtgcagcatctgctgagcaaggccgacgacctgcagcacgtcagttctgcggtgctggcagctcatgcgcgccgacgctatctgtcgcccagcatcaatgatcttctgcccaaacgcgggtcttcgcgccctgcgcgcccactgtcgacgaaagagcgtgaggtgctgcggctgtatgtgagcggcatgggcatcaatgagatcgctgcacatctggatcggcgtaaacagaccatcagcacgcagaaggtttcgggaatggccaagctgggtgtcgacaaggatgcggacctgttcaagcttgccgaggagcttggcctgcgcggagcttccgacatcgattga

SEQ ID NO: 516566 - DNA, 3438 bp, Stenotrophomonas maltophilia
gtgcctttacctgacgcacacaacgcccgcccaattggctcgcgggatcagtacatccgcgacttgcagcgtgtgcggcgccgcctgctgttcggtggcggcggactgatcagcgtgctggtgctgctggcggcgatgatcaccttgatggcaggcgtgcaggacttccacgcacgccagcatcgcgccttcatggccgcacagtccactgcggatttcttcctcctgcagcgggaccgagcctatgccggtgccatcaacagcaatgacgcgatgtgggccgagcagcgccagctgctggagatgaaaggccagcgattcctgcagtcgttccagcagcgggacggcgaggtcttggtaacggccggcggtccgacggctgtaccgtggctggtgctggccttgcccggacatgagctgccggctcacgaacttgccgcctatctgggcatgatcgagctgtactctgcctacactgcgactaccgtgacctcgctggaatcgggtgaggagctcgccctttatgcatacgagcccaagggccgcctgattgccttcgccgggatgcgcgacgaaacccagttgctgcagacgttgcgtgtcaccagccgtgagcaggcctttgcacgcctgctgaaggaagaggcaggggtgcgacagtcggtgccgctgcctgggccggtccaaagcgccaccgccgggcaccgcctgctttctcgctatggaatcaatcctctcaacgaccgaccctcactggtgggtgtgctaaccatggcggaagggcgtgtgccgtacttccgtcgcgtgtcatttgaacccgtggacagcatcgcggcgcgactgcaggctgggcagcatggcgactttctgatcatcgccaatgacggtacggtcgtgctcagaagcgggggcatcgatgcggctgacggtgcagcgcttgcacggtgggtgaaatcccagtccggtgatcttggccagcgctccctggtagaagggcgatttgtggtgggcggcccattgcagggggtcgactggtgccttgtacatgtatacggctggcatgatctatggcgggaccagtggcaggacatgctgtggaaaatgctgatcgcactcagcatcctgtcggcgctctggtatgtgttgctgcgcatggatcatcgactgttcgcacccgcgctggctgatgcgcggcggatcaccgaaagcgaggcactgagtcgcatcatcatcgagacctcgccggtagggttggcattggtctccatggcgaatggccagccgttgctgcagaacggcctggcccggggcctggcctattcggccgacgacgctggcgaaccggtgcctgcgctgtatcgccagctggctcactgggccaagccggaagaggatagccagcacctgcagttccagtggccggaaaccgccgcgaccggtatcgcgcagaggcagttggaggtcggtctggcccgcgcgacctacaacggccagccggtgtgggtctgtgcgctgcatgacgttacctcgcaggtggaactggaagagaacctgcgccatgcccgacaggattccgaggctgcgcggcacgcagccgaggctgcttcacgggcgaagaccgcgtttgtggccaacatgagccatgagatccgcacgccactcaatggtgtgctggggcacctggaactgctggccagagcctccttgcccatcgagcagcgagagcgtgtggatcgcatccgccattccgcggatgccctgatgagcatcatcagcgatgtgctcgatttctccaagatcgaagctggacagctggacatcgagtcgacgcagttcgccttgcggccgctgatcgagcgctgtgcgctgttgttcgcgccttcggcgcagcagaaggggctgaagctgctccactcgctggacgcggcgacaggtctcgaatgtgttgccgacgctcatcgcatcagccagatcctgaacaatctggtcagcaacgcaatcaagttcaccgagtctggccgcgttctggtacaggccagcctgcgccagggcaacgaggctgacgccggccagttgctgatccgggtcgtcgattcgggcattggtatcagcgaagcccaggcaagccagctgttccaacccttccagcaggccgacgccagtgtctcgcgccgttacgggggcagcggcctcggccttgcgctgtgcagtgagctggccactgccatgggcgggcagatcagcctggaaagcacgccaggtgtgggtagcgtgttcgcgctcaccctgccggtggagaccactgaggtggaggaggccagcgctgacgcattggcggggcaggcggtcacgctgctgtcggccactgcagagtggcgtaatgaaatgactcgcctgttgaccggatggggggcttgggtggaggccatcgaacggccatcgtccctcgccactgccgcggccggagccgtgttgctgatcgtgggcgatgacgctgcctgggacccggctgagctccagcacctggcttccctgcatggcagggtggtgcacgcgcatgcggcggggccactcagcgtcgagcccgatgggcagcgcacggtcgtcactatctactcaagcgaggtcctgctgcacgcactggctggactgatcgaacgccggaagacgatcgacggcggatccaggcggcctcaggttcaggcagcgacggcgggcgcgttgttgttggtggaagacaatgccatcaatcgtgaactcatccagcagcagctggatgagttgggctataccgtggaggttgcagagaacgggcagctggcattgtctgtttggcgaagcaacgcgttcgccgccgtgctgaccgatatcaacatgccggtcatgaatgggtatcagttggctcgcgcgctgcgtgaccgcggcgagacgctaccgatcctggcaatcaccgccacggcgttggcgagcgagcgccagcgatgccgcgaggccggcatcgacgatctgctgctcaagccgcttaccctgaaacggctgcaggaggccttgcagatctatctcgccggccccgtcgccacggtgccgacgccgggagagatgccggcggagcctgaaggcgcagtaatgaagcgcctgttgccggagaaagtccggcgggtattcgtcgaaagtgcgcgcaatgacctgcgtgcattgcacgaggccaggcacaagcgcgatgatgccgcgctgcttgactgcatccattcgctcaagggcgcattgctgatgatgggcgagcgcttgcttggccaacgcgccagcgagattgaacacgaactgcgcaaggggcaacgacccgccgacgccgcgctcgatggtctggtgtctgatctgcaggtattggccaaccaatatgaaagtagcttgcgtgagcagaaccgcgatgtacgttga

SEQ ID NO: 516567 - DNA, 2700 bp, Stenotrophomonas maltophilia
atgactaccctggccccgcccgcagtcgaatcgcgtgaggcgaatagcacactgacaaattcggaagcccgcctggcgggcatgaccctgctgcggcgctaccagcgccgcctgctgtttaccggtgccggcctgatcagcgctggactgctgtgcgcggcgcttgggctggcggtcacccatgccgcgcgctaccacgacgaacgggtgcagggcctggagcgggcgcgtagcgcgctggtcgaggccatcgaacagcgtcgcaccagcgatatccgtctcaccaacatggccgagtacgcgtggaagcaccccatggaggttgcggctggggagatggcgcggcgccgggagctgtttctggccggtggcgagcggctgatgctggctgccgatccgcaaagtgcgccgcagatggcgctggggatgggtacctcccgctgggcaggtacggagatcgatcgctacctgcagctgagtacctcgttgtcgttgatcgttcggctcacacgtgtccacagcgatggcgcatcgcgtccggcggcgttcttcttcgacccgagcgggcactacctgtcattgggtgaaggattgaccgagcgcagcctcaagcatgcattgggtgtggaggatcggggcgaggtgttcagccgcctgcgcgaacaggccgggttgctcgcgccagcatcgaacgacgacgggcttccgacattgcaggctctcaccgaaggcgcgcgcctgcagttgcggttcaaccgccatccgctgactggagaaccttcgctggtcgccacctcgttcgcacttgacgacggcaggccggtggccgcctttgtcaccttcgagcctgcttcacggctgcaacgggcgctgcggatggccggtggtggcagcccggcgctgatgacgcccaggggcgaatgcctgctgacggccgtcggaagctgccaggcagatagggacccgggatcgcaccatgcgtctccaagagtgtcggcaggggtcaccagcagccttgatcaagggatggggcggttccgtttgacaactacagtgcctggcacgaactggctgctggtagacacctacacgttgtcctcgatgttgtcctcggcctacggatctgtgatggcagcgacgcttgtgctggttgcgttgctggctgctgtatggatcctggccggatgcctggaccgacgctctttcaagccgctattcgaacagacccagcagttgctcagcgacgaccagctgttggtgtcgatgatggcatcgggagtggcaggactctgtacgctgggcgggcagggcgttgacgttctggggcagaactccatcatggccacctatgcggagcgctatgcccaatccggcatgactctccatgagcgactatggaaagagcatggcctgcgcgtgcgcgaggcggggaccattgtcgagttcgagattccactggacgatgacctagacggtgagccgcagttgctgctggtccgcgcgcgcgcgagcgagcaccagggggcggcaatcctccatgtggcggcctgtgacatgtcgttgcgcgcggcgatggagcggcgcgaggtgcgtgcgcgccgtcacgccgaggccgagaaccgtgccaagtccagcttcctcgccgccatgacccatgaaatccgtacgccgctgttcggcatgctggggcacctggagctgcttgagcgttccggcctggatacctcgcagcgcgcccgctcgctgcgggttcgcgaatcggctgactcgctgctggacatcgtcaatgacgtgctggacctgacccgcatcgaattcggccagatgaacatcgtgcaaacgctgttcgagcctgcacaactgctcgaacgcgtcgcactgctgtacgcgccactggcccaagccaaggggcttgatcttgactacgtggtcggccccacggtaccggcatgctgcgtggggcctgaagaagcgctggagcgcgtgctgcgcaatctggccagcaacgctgtgaagttcacccgttccggacgggtgcagttgcgcgttgcctgcacgagccagagcggcgtgcctgcggcgctgcgcttcgagatcgccgattcggggatcggtctggacgccgtccagcggcagcgcctgttccagcctttcacccaggccgacgagaccatccaggggcgcttcggtggctcgggcctggggttgtcgttgtgccggcaattgtgcgatgcgatgcagggttcgatcgcggtggacagtactccggacgtgggcagcctcttcactgtcgaggttcccgtggagaaggtcgcacgtccgttggcgccgcgcccgctgagaggcatgggggttgcgctgctggcggcaccgcccagctggcgtggtgagatggtccgctgcttgcgtgagtggggatgctcccctcaggcatactgctccgtcgaggagtggttgggcgcgtcgcgggacaccgaggtccgcatcgtgttcgaaaaggctggggcgccgctgacggagccctgtgcagttgatggcccgctggtgcgcatccgcgtggacggaccgctgcatccggtacgcgaaggtcaggcctgggtgctgtccagctatgccagtgcagccctgcgggccctgctggaagagatccgcgacggtcgggcagtgatgcctctggcggccctccaggccttgggctag

SEQ ID NO: 516568 - DNA, 1299 bp, Stenotrophomonas maltophilia
atgtggcggcgacattgcgggtggatcatgaaacgtgcgcttttctgtctggtgctggttctgctcggcatctttccgtcagttgcgaagaccggtacccggttcgtccagatacctgctggtgggtgggatcctggaccagagctgcgcaggcagtacgagggcagcatcgtcgactgggtgcgtcgcgttgacgttcatccagatgccctttccggcgattcgatcgaagtcgatcttttcgacgtgacagtacggctggaacgcgtaggctaccctgccggtgacgcgccggatccggtccacgttctggccgtccagaatggcggaacatcatccggaaccatgcccagccggctccgttgggctggcacaaccgcatcgtcctcctcgccgtgtacagatgtggaagggacggtgcgtgtttccgaggcttctgacgggcgattgcaggccatcttcaacatcggcagcttccggtacgaactccaaggcagcgtgctgatccgcaaggatctgcgcaggcttccacgagaggcaccggtacgcgatgtcggccccgcggtgcctggtgcagccgcttcagccgaagccggacccgcgggaaaatcaacggctcgtgtcctcttcggctatggaactgccgcacttgagagtgaccgggaagaggtctttgccgaaatgcggaaggccgtgtgcctggctaacaagggattctctgacagcggaatccagctcgaactggagcgcgcggggaacgcgctacccggctaccgggaaaccggtgtgacccagacgctggatgatctcatggccggaagaaagggtgcactgggcttcatgcatcaggtccgcgatgttgccaaggcggacatcgtgctgatgattatcgacacagggtcgtcactgtcgtcctgcggacaggcgcaacggctgctggccacgaaggaaacggccttcgcggttgtagagcggaactgcctgggggccagtaccagcagcctcgcccacgaaattggacacctgttcggcgccgatcatgagcctgcaaatgcatcgatcagtccgccgcgatttgcttacgggcatggctatcaggcgccggagaacgtgcctgatcgctggaggactgtgatgtcctacgagtgctctggcgtgccatgtcaccgagtgaatctgtggtcttcgcctgacctcagtcacaacggattgcctgccggcacggaaaagacccaccacaatgtcagggtcttgaacgaaacccgccagatgattgccgacttccatccttggccataa

SEQ ID NO: 516569 - DNA, 1746 bp, Stenotrophomonas maltophilia
atgccccatgcaccctctgctctgctcgatcctggccccgacgcactgcttcaggcggcccgctcactggaaatgaaacgacttgcgctgttgctgtcctggctgcaggagccgcgtgccagcctgtccagagtggtattgcaggcactgaccgtgctgtggtgctggctctggatggatggaccacaacccgtgctggccaacgaggcggcgaaggtgctgcctgcgtcgattgcgctgcttgttgcgtccgtggcatgggccgcatgggtgaacctccataaggatcgcggtgtggcatggcgcgacgcggtgggcctgctcctcagcctggtgatggtgacggtgcaggtcgatgcagccttcattcttctgatgacgctcaatgcaacgctgcccttcctggtgatcgcggcgacggctgcctacgggcggagggcgatcgcgccagccatcgctgcaacggcgttggggctgctgtgggccgcgccggagggctattggatctcacgacctgcctacctggcctatgccctggcgctgacgatcctgctgccggccgtggttgcctccatggttgcggccatgcgcgatattgcgctccgtgccgtcgcgtcgcgcgaggcccaggggcggttcatcggaacgatgagccatgagctgaggacgccgttgaacgccatcatcaatggcatccagttgctggacatggacgccgcgacgccggcgcagcgcagttcgtttgcgatggtggcccggcaggcaagagcgctgcggcatcgcattgatgatgtcctcgatgtggccagcatcgagggtggaacgctgcggcttcgtcctcaaccctgttcattggcgtccgcgctcgatgcgatgcaggaaagctgcgcaccggctgctgcggagaaaggtgtactgctgacggtggaggactgcgatcccgcagtgtggatgatggttgacgcaggccgggtcgaacaggtgatcagcaatcttgtctgcaacgggatcaagttcagcccggtggggggcgagacccgcgtgtccattgacgcctcccgcatcggtgagcaatggcaggtgcgggtgaccgtttccgactccgggtgcggtatcgacgagagcgaccaggaggcgatcttctcccccttcgtccaggtgagcgagggtgatgcccgttgcgagcagggggttgggcttgggctctacatcgtgcgactgatttccgatgccatgggcgcgacgatcgaggtgggccgcagcacgttgggtggcgcctcgttccagtggtgcttcaccgctcctgccgtgatcggcgaggcagcatcaccttcgcttgaggcggtgttcaaggcacatgcggcgtcggtacgatccctgcattgcctgctgttcgaggatgtggaaaccaaccggcaggtggtcgagcggctgatggaatgtgcaggtcatcgactgagttgccggcacgacgggcgcgatgcgcaggctgcggtggcgtcgcttgcgccagacgtcgtgctgctggaccttcatatgccgggttgcagcggttgggacgtacttgaagcggtcggctccagaacggacggtccgcccatcctggtgatgagcgcggacacgcgtctgcaggtcatcgagagggcgcgttcaatgggcgccgccggcttcctgtgcaaaccgttggatgtgcacgaggtgctgcggatgctgcacgaggtggcgccccggggatccagtctgtag

SEQ ID NO: 516570 - DNA, 150 bp, Stenotrophomonas maltophilia
atgattgtgtcggaaagccgacaccggggaaagccgtcagccgacgatgacggcgtgatcgacggcgtttccccggcggggttcagcaatgtggcggcggcgttcagccacagccgccaccacgcaggcgcttacttgaccttggcgtag

SEQ ID NO: 516571 - DNA, 381 bp, Stenotrophomonas maltophilia
atggccaccacacttctgaccatcgtaactggcttcatgatcaccaccatgctgtttaccggaaaggtggaagcagccaaaagcctcaattccgttcagatggagaggttcactaagaagagcaatcacttgcttttttcacaatggatcaccctgatcaatcacatagctagccttctcggcgtagctgtgattctcgctataggcgagagccaaccgaagttatcctactggatcgtgtgcggggtcgtcggcctcttcttcctatccttcctgcgttcaatgctgatacctgttcagataatagaattacatcgatttgtgcatgctgccctgatccgagagaagcaagaggaagagggcagcaagaccatcacatag

SEQ ID NO: 516572 - DNA, 954 bp, Stenotrophomonas maltophilia
atgggcaccatcctcagaagtcttcagttgaagaagctcgtcgctatcgacggcgaccgctacccggccattgcgccgcttgaagtacacaagcatttgcggaaagcattagacgctgcaaaaacagttggtgagaggcactgccctgcggtggctgacgttacgccggggaagacatgcgtctttctggaaccgtcaaagaaggcaggcgacagccttttgttccacgccttcatctacacggcggggaaaacccccgaccaggtcgtgcaagatttcacggccgcgagtgcagatatcaaggcagagcagatcaaaacagaggatggcgaccctatcgagatcgtggaccgtgtggcgtgcttggtctatggcgaaagcctgatcatggagaacgcccgggtgtacggctcccttcacattattctgacagcgatccgccagctcattcgcaggcacgcggtcaagagctacccgagactcgttgcggaggatgtacccgctcgtgactttaagacgctcgccaaactccatcgaggcgtaaaaagtgtcacggcacgcgtcaggggagacttcaatccggagccgacttcgttcggcgcagccctagagtccatgttcaccaacgctggcgtgaacaagttcaagcaggtcactgcttcgatcgaggcagagaagaacggcgagcttgacgttgacaccgtgcttgagtgggtagacgaaagcgaagggggcactgggctgtcgggcatctctgttaccttcaacgataagaccgggctagcggatttggacagctaccgggagaagattcaggttgagattcaagaagttcggcctggggtacccgcagtcacagaaattgagacggagatggtgaaatatctcaatgaacttgctaccgcacctaacgttaaggcgcggctgatagactcaaagggtgtctttctctaa

SEQ ID NO: 516573 - DNA, 798 bp, Stenotrophomonas maltophilia
atgaaaagggggtgtggcacacttttttggttacaagcctcttgcaggcaccgctgtctcacttcccctatgaccccattgtctcccaagggtttcgccggtctagctgctgtcttgccgcccgacatcttccatgtggtatttctgactaacagtatttgctggttacattggtacgctggttacaccattcgtgcacaccttgcatatcaacgacttgcgattaccaccgactcgtaccacctcgtggacacgactggttacactggttacagccagtgccgcagagaagcgcatgggctacagaccaaggaagacacgatgatcgctagagccccgattttgacgagactggccatatgggcagtcccgttcttcagcgccactctggctgcgccccttagcgcgcagaatcccgttgggatccaactcatgaacgatttggcttggcatggcgtgtctgatcgcgtccaagttcatcagccgtctgtgcaaggaaagcctccccacatcgacgtgtgggaacgaattgccataggtaatacatacggcaactgggcttacgtcaagaacctcatcgattgccagcagtggactcagattccgttctacacgatcgaccggaatggctactttgtcctatggtcggaggcccctagctccgcaaaggcagcttgggacgcgcacggccaaggcaatgagatggtaatcgcaggggtctgtgcgctttacggattcaggaagccgcgtccgaacaaggctgcaccggacaaaagcgggaacttcgtggagcgctag

SEQ ID NO: 516574 - DNA, 729 bp, Stenotrophomonas maltophilia
atgagcgacatccagagcatcaacaccaccaccaccgacctggctattcaatccggcgaagggagcaaggccgcgtcggtatcggagaacaggcggcagctgaatgagttggcccagcagttggccagcgcggtgcagcgcaagcgcgccctggtaggtaaggtcgatacgatgcagcgtgccaagcaggctgcacagggtgatgccgccgctgctcgccagcagtggggtgccaagctgcgcgagaacgatggcacgctaacgcgcgacattcagaagctgcgcgccaacgagcgttcggcactctcgctggctgaggaatatgaggcactggagggtgagattgcagccgaactgccgcgcctggaactggagttggtcgaggtggctgaccgttgcctccgcgctaggagcaccgtcacctgggaagtggccgatcaggcctacgagcagttgctggcacaggctggggacagcctagccttcgcatttgcgttgttctcgagagcggagaactctggcgatgcaggcgcacttgtcagccggttctttggtcgactcggcaatgcggtgcgccatcgcctggaagacgccgcagtgaagggtcagatagaagacgtgttggcgctgccgtcgatcgacctgagcggggtggacatggagttgatgcgtagcccgattcgccgttcaaaattccgagagaagatcaatgctgggggcgtggcgtga

SEQ ID NO: 516575 - DNA, 675 bp, Stenotrophomonas maltophilia
atgaagatgcgcttgaccacgaaggaaacgggcttgtgcctgattggcgtgctctccggcagcctcggtgggtatgtttccggtacccatggctacgccgtcgattgggcgtccaccggcacgatgattcaaggttggagcgcgctgctggcggcggtagtggcagcgtggggtgtcaaccgctggcagcaggagcttcgattcaagcgaaatgctgagcttgcggagaaggtgctcattgcagttgaaggactgacggactcgctaagcgtggcccgggcgacgccgtcaggctacgaagtggatcaaagagtcgtgtccaaccgcgtcctcacgaagcaatcatatgagcttcgcctccatagcctcagcgtcggtggccacgcggcagagatcgaggcggtgatgaaccgcgtttcagcactgttcggtgcggagcatcgaaaacagctgcgggcactgttggacgtgaccaacgtcgtccgctacggcatccttgagtgcatcggcatgatttctgcgattgaggctgggcggctcgacctggaagcgttgcacgcgatcgaacataccgcagacgtgcttctacctggtggcgaggcgggcgcggagttctcccaatacatcgagggcgtagccgagcggtccagagaactgttccggccctccatctag

SEQ ID NO: 516576 - DNA, 342 bp, Stenotrophomonas maltophilia
atgcccttgcccgccgacttctactggacgacacgctctgccagcctgcccgacgatcccttgaccgtgatcgcgtgcgagggggtgtgggtggtgtcgttgtcacagcgggtggacgaccacacctgggtggccagcttggaccggcaccggagcgggcctggcgggccaacacgccgctgcagcagctacgagcaggggcgcgccggggccgagatgtgggtggccaggcatgaggcccgcctgcgagaggacgtagccaagatcaccgcataccgggaggcggtgagggcgaacaggttggccaaagcacacatcccaccgccattcggctgggagtag

SEQ ID NO: 516577 - DNA, 960 bp, Stenotrophomonas maltophilia
atgaacgcgccgagcgcagcctccgcacgagatctgactggccttggcaattcatacgcgattgaacccaccgaacgcctcgaaagctgcagggtgagcgatggcgcgctactcacgctcgcatcaggcggcggcacaaacggcatcaacgtcgaccgctcaaccgtgcagggtgacatccggggtaactcgctggacgggcattgcgacacaggttcagccgttccgtgtgctgaattggctcccactcgctctgagagcgaaatcatcatagattgcgaggccgccgacgcacgaattccgcgcgcccgtagccatcaagtcacacgaattttgatcgccgatgacctcccagtcattcgattgggtgcacgcgttctactagagcggaatccgcagaaccagatcgttggtgaggtgggcaccgttgagctgatgaactccttcctcgagagcacaccttgcgatctgctgatcctttcattgcaaatgagagacggacaccgcgactccgggacggcagtagtcgccagagttcgccgcagatttccccacgtccgtgtcatctacttccccgacacttgctcgctccagacaatgcgatccgtgttgtcgctcggcgccatcggcgtcgtcctcaagtctagtgcgaagcgccagctacagctggccgtaaggagcgcaaagaagggaattcccttcatagctaacgatctcagcgaggccatcgtagattgcgccacctccgcatcattaacgccagcagaagaaactgttcttcaactaatcgcagatggctacaagggctctgagatcgcggccgccctagggaagtcctcagcaaccatcagcgctcagaagaagagcgcgatgcgcaagcttggactgggctctaccgcagccctctactcgcatctttcctcgtggcgctcgaagcccgtcgccccaccaggaagctaa

SEQ ID NO: 516578 - DNA, 948 bp, Stenotrophomonas maltophilia
atgaagtccgtgcgacgctcgtcggattgctgctccccaaggccagcccgacgaagtcagcaagatgacctgggcaagaatgataatggtgacaacatgccaagctctggcaatactcttattacaatcgcggataggagcttggacgtaattgcaaatgcaaaagaagcacttgcgcccagccaaagaccaagcgtatccgaggcgacttcttttgacgtcgtgctccgcaaactggcgatcactccctccgaaatccttgtcttctcgctcagcctgccgggcagccggtacttctctgggctcgcgggcgtaaaagcaatcaggcgacagcaccctggcttgaagatgatcgcctgggtagatggctgctcaagctcgagcatttcctcggcaataagcataggagttgaggggattagcttcgcagcgtccatctcgaccgagctcaaacaagcaatctctagggttaaatcagggggaaagtacatgagtcctcaattgcatagcacgcagtctagagatgtaagggcgcctatcctctcccccgcggaacaggaagttatgcgcctcatgcacatcggactgaacaactgggaaattgcccaagcctgtggaatatcggccagtactgtctcaaagcacagacagtccgctctactcaagctaacactgggcaaccccagcgtttggccacccgacaagtcgaacctcacactgacgcctgaagaagaccaggttatgagaatgataagcactggactaaccacaactgagatcacggagatttgcggacgacctaccagtgtcattgcaaagcagaagaaatctgcactgctcaagctaacgatagatgaggccgcgatatggcaggcaggaactaatccgctagctcagccatcacatgcccccccaggtgaatgcgatagcaaagtcagcaactcataa

SEQ ID NO: 516579 - DNA, 2976 bp, Stenotrophomonas maltophilia
atgcgcatgaagatcaccactgccggccgcgccaagctggtcaacgccaccaacaccggcaccaactcggtgctgatttcccacatcggcctcactgccaccggcttcacccctactgcggcgatgacgcagctaccgggcgagttcaagcgcatgaccaccttcggcggcaagtccgtcgcggccgataccatccacgtcacgctgcaggacagcggcgcggagaagtacaccctgcgtggcttcgggctgtatctgtccgacggcacgctgtttgcggtatacggccagagcgaggcgatcatggagaaggccacgatctccacgctgctgctctcggccgacgtgacgttggccgacatcgacactgcgcagatcaagttcggcagcactgaattcctgaatccgccggccaccgaaaccgtccccggtgtggttgagctggcagacgggaccgaaaccaccaatggcgcggatgcggttcgggcggtgaccccgcgcggcttgaagaccgcgctgaacaaccgtttcggcggcgaagctccgacccagttcgtcaagacgctgttgtccctggcaacggccgcggctatccgtactgcccttgaagtgaagggcgccgcgctgaaagacatgggccacggcaaggggctggacgccgacacgctcgacggcatgcacgccgccgacttcccgcaagtggggaaagttcagcccattgacgcgatcccaggcaactccaatcagatccggtggatcaagctgggcacgctgccgtggcgcggccccggcgccagcattctgctgctggaaatgaccaatggcgccatcggcagcccgcgctacgcttgggagcagatcgccgcgtctacccgcacgttcagtgatacgaccacggtgctgacgcaggcggttgttgatggcatggtgcagcacacgcggatcggcgccgactcttcccttgatcgccccagccgcttcggcttggtgctgatgaccgatgctgcgggcaagtccacaggtgtcgagctgtggctgcagcaacgcgagtacaaccaaggtcatgccgtgcgcgtcgtcaacgctgccgggacgacgtaccacggccctggcacgttcgtcactgccgagccgcagggaatcatttacgcaaccgtccagcccctcgcctatatgggcgatctgcggcgcttggtcgaggcaaccgagaatcgctggggccgtcgtcagacctttgccctaggtctctacctgcccagtgatcaaaccgtcgacctgggattcggcggtggcagcttgcgtggaacggatactggcagtgttgtgctcgccgcaggggcggggccgacgggcgaaccggggggctatgtctacctgcggcccaatggcaccgccaacgccgccgggcagctggccgtttacaagaacggattcacggagatggctggagcccgaatcggaaccggctcgggcgacggaaaggtgctgtgcgagctgtactcggaacgcccttggcagttcaaacaaggcgggacggagggacagaccgggttggagttgcacgacattaccggcggtaaggaattccgcctgacgaacgtcgccaatcccaacaagattgtgttgaacccgaccggaagctgggtatacgcggccgagttccgaggcaagctgaccggcaacgccgacacagccggcaggctcgctacgccgcgcacgatcaatggcaccgcgttcgatggctctgccaacatcgtgagcacggcatggggcgcctcccgcaaggtgaccatcgggaacaccaccaaggatgtaaatggtggcgtgaacttcgggtggacgctggccgagattggcgccggttcggccaccgacgttgccgctcgggtggcattcgcgccccgcacccaggacggaagtgcttggctgtccgcatacgacacctaccgttcgcaccttcgcagcgcggcggcggatgactcgatgcccagcgcattcacaaacgctatttcgctgccgacctacgacaatgcgcgcggtctggccatcgcgagtgatttcagcagcgccaatcgcttctggatgcggtcccgccacgactcggccggcaccaccgctgagactcgctggaagccatgggccgagctatggacgaacgtcaacttcaacccagccaccaaggccaaccgcatccccggccaggtcatcatgttcgccggcaggaccgcccccagcggcaccctgctgtgcgacggcgcggccgtttcccgcaccacctattccgagctgttcgccgccatcggcacgctgtacggcgcaggcgatggcaagaccaccttcaacctgccggccatgctggaaggcaccgtggtcacccacacgcagaagccggagactgtcggtaccgccaccaacggtgaagtgattcgacacgcgcatggtgcgtcgtcggccagtgcaggcacgcacagccacaccatcacggtagcgggcggcggtgcgcactcgcacggcgccagcgctgcagccgccggcgatcatgcccacaacacgtggaccgattcgcagggccaccacgcgcacaacggcggcacctcggcgtctggtgatcaccagcacatcagtcccttcggcgaccagatgccctatccctgggggcagtatggcaaccgggatcaggtgggcacccgtgccagcggcgtcgatcaggacaacagctggcccctcacgaacccggcgggcaatcacgcccacacattcaccaccgacggcgccggcgcccatgcccacaacatcggcatgaacaacgccggcaaccacacccacaccatttccgtcgcgcaggtgggcgatcacggccacagcgcttcggctgcagatgcgggcgcacacacccatgcggtgacagtgaacaacaccggcggcgaccgcaacctgccggccggtctgcgaatgatctactgcatcacctactga

SEQ ID NO: 516580 - DNA, 573 bp, Stenotrophomonas maltophilia
atgtccaccgaaacccgctttgcccacgccttcgatcccgccaatcgcgcctacatgggcccggtgcgcctgcagccgtcgcccgacggtgtttggcacttgcccgatggcacggtggacgtggcgcccgcacagaccgtcggccagtgccaggcgctgcgcctggctgatgacgggagccgctgggagctggtggccgacttccgcaaccgcatgctgtgggacacggccaccgccatgccggtccccaatcggctcgcgctcggcgagcccttgccgagcggcgtcacgctggccgagccattccgtctggatggcaccacgccgcagtgcaacgcttgggacgccgttcgaggcgagtggacgctgcagcccgattacagcggccggccgatctggaacaagggcgatggcagcttcgccgcgccgctgctgcgtggccagccgctgcccgccaccgtgaccgatcacgccccgcccactgaccgatccgcaccgatcggctatgacgatgccaccggtgcctgggtggaaatcgcggtcagcgacacgacggcatcgcatcccaagtga

SEQ ID NO: 516581 - DNA, 660 bp, Stenotrophomonas maltophilia
atggttgatctggacaaggcgcgtcagttcctagctgctgagtttgagagtgccggactacctcatgccgccggcagcatcctggccggcatcagccccttcggcaagggcgcgtacatcgctgccgtggctgcggcccttagcgcatcggcgcccccgctcgctgccggcgaacgagcgcggtttgaagcgtgggcccatgcgcagagctatgggggcggaaacatagcttccgaccggcacccggacgatccggaaatgtacgcgtgcccggcggcgcagctggcgtggcgttgttggcaagcggcgcttgccatcggcccccggcgcgacgaaggcttcgtttccagcctgtgcaaccggctcgcgacattcagcgcttcggcgcagtgcatggccgaaggtggcaacagcgacctgctagtggttggtcttcatcacgcacagcaaatggtgcgcaaggccaatgcgaccgctggaccgacgctagacctgcatcggttggttcctccgttgtggctcagcgatcagattggaggaccacttgatgatctaacacccggccaggcatggcgggacggattcaacgagtgtcgaactcggatgcaactgcagatcgagcaggtgaacaaccttcatcagttggaggccggtcgatga

SEQ ID NO: 516582 - DNA, 1827 bp, Stenotrophomonas maltophilia
atgaccaacccaaaaagatcgaccgtaaaaaagaaaaacggaagccatatgaagaagaaggatgcggtagcgaaagatgatgcaacttggcaggatgctctagccacccgggacgacctggctcaatatggcgacaacgcgattggactattcgctcttgctattcgattctctctggatgacattcacacggtagcatcagagtcagtgacagatggaagtgatgacaaaaaatgtgatttgatttatatcgataaggaagagggcgtcgcagtcgtagggcaatgctactgggcgcagaaggtgaaaaatagcgcccctgcaaacaaggcatccgacttgaataccgcggttgcatggcttcttcagcagccaatcctacaacttccgagcaaacttagatcccccgcaagtgaactacgcgaagcgatcaagagcggccagataaggcgcctggaagtgtggtacgtacacaactccagcgagcacaagaacgttcaaaatgaactggacacagtcgaaattaccgctgacaacttagtaaaaacaataaattcagcgagaactgtaactgtctccgcaattgaagtcggaaaaaacaagctggaagactggtacaaagaaactctctctccaatcttggtgagcgacgaaatatcgttcgagataagcgatggttttgagttaataaaaagcaactggaaggccttcgtcgccccaattcaagcaaaagaacttcacagactatacaaaaagcacaagacaaaactattctcagccaatgttcgagactatctggggtcgagaaaaagcgacgcaaatattaacaacggaataaagacaaccgcagagactgagccggagaatttctgggtattcaacaacggcataacggtacttacgcattcctattccgttgatcgatccaagaccaagcacaggctgacgatcaaaggcgcatccattgtgaacggagctcagaccaccggcgccattggctcactgggaaagtctccagccaccgatgttcttgttcccgctagattcgtatcgacaaatgatagcgaacttgtgtacagcgttattcagtacaacaacagccagaacaaagttacagcatccgacttccgaagcacagatagaattcaaaaaaggcttcgcgaagaggtcctagcgatcccaaatgcaaaatacgaaggcggaaggagaggcggccataaggatgtaatcgaaagaaacaagaacctacttccctcctatacagtgggccagtctctcgcagcctatttgcaggacccagttgttgcttacaatcagaaaagcgaaatttgggtttctgataaactttactcaaagtactttaacgatgacaccacagggcggaatataatattcgcttatggacttcttcgtgcagttgaagagtctaaaaagaagctaattgcaaaatcaagatccgactcgcagctcacgcaacaggaagaatctcttctcgagtatttccgacacagaggtgcgaccttcctccttgtttcatcaatatcatcatgcattgagacattcctcaagaaaaaggtcgccaaccccacgagactttccttcggcaacaaagcggcaccggctcaggctgttcagaactgggcggagattgttgacctagtttcgcccttcacacagcaactcctcgaagcgctttcaggcggactccagaacgccgaaagagccacgaaggccattgccactttccgatcattagtccaagccacgtcaggagccaatagcaccgcttacgccaaatttgccaaactagtgtcaaccggcccctga

SEQ ID NO: 516583 - DNA, 1053 bp, Stenotrophomonas maltophilia
atggacgaacgaaaaataacaacttatgacgttgactcagtgatcgtcccgccagacggcggcacgcatctgcccgtcagccgcaaggacattgagatcttcaatgatattcttggcgaggaactagactcatccttctcatccagcatttgctgctgcgactattgcttcgatgaattttcatcactgtggcctggcgttgtatcaagaaagtctgagttccaaacttgctccattcctgttgactggtatctgaactcatcaagaataagagatatctacagcgaagctgagtttcagacccttagaaatttcgtcacctgcacaagatgcaaatcggaaggccccgcaaatgtctggatttacgaacacgacttcaatcactcagccgatcaagattcaataataagacaggcctcggaaattgcattaaaaacgccgttcctattacttgaggatgatttcgcaaaacaggttagatctgaactaaagagggtcgccaaggacaccaccccctccaccttagattatgcagttttccgcggaagagacatgcaggatgtaattacatcaaagcaggatcctctcagccctaccacgtatggcgcccctcctgcagcggtcgtcacggagggtcgtttcaatcacgccgggcatcccatgatctacttttcaatgtcacttcgtggagcatcaaaagaaataggaaagcctggcggcagctatttcatcgcagaaatgcagctacctcccactccaatccgagtccttgatctagaccaaccccttgattctgccaacgatagcgacgtattggcagccgcatcgcaatcgcttcttgtagccgcccccgcatcaagtagcggctggctaagaccagaatatggcttctcacgcttcatcgcagattgcgctctagaatcaggattcgacgcaataaaattcggatcgaccaaggataatgaaagctgcaacatcgtaatattgaatcccgcaattttctcaccaagtgaattcaaaattattaaagtacattatcatcatgagcattag

SEQ ID NO: 516584 - DNA, 798 bp, Stenotrophomonas maltophilia
atgaacaacgtcaagcgtcgggccagcgcccgcaaggtactcaagccgatggccaaggtgctcggcgttgccttggccctttcagcgaccaatgcgggtgccatcggcccggtgcaggaaacgggtcctgcgctttggcagcacatctggaaccagttcaacactcttcagtccaaagtgcaggaaaaggcacagttcgtgaaggagaatacccagtggctgcgtgactggaatcagacgatcaaggaatacaacgagatgctcgtgagggtccagggcatcgtcaatgatttcggcctgcccgcagctacgccgttgacgcccgtgcctccgaaatacctgatcgccgagacctgcggaaccggggcccagctcaaggacctgatgacgtcgatcgtgttcaagcctgacggtgactggaaggatcagcagacacagatctgcgtgaatattcgcatgatgcagaatcgcaagtacaacgatgcggttgatttcatgcagaagaccggcccatcgatcatgaagagcctggattcgatcgcccagattcggtttggtagcagtcgccttggtgatatggaggcggtagcaaacgactcgttgcggaccgccaatgaaatgaatgcgtcggttcagaattttgaggcgcgtatcaaggcatatgacgcgtacatctcggtgatggaagcaaaccagaaggtcgtggcgcaggcagcgttgaagggggatccgatgaagaacctggctagcgatctggtcaagacggtagcgctgaagacggcgttgtccatcgactga

SEQ ID NO: 516585 - DNA, 420 bp, Stenotrophomonas maltophilia
gtgcaccggctctacgagctaactatgaccgtgcgcattgagcagctagcagaagggcaacctcttcagatccactatccgatcgcagaggactatttcaccgtgttccgagagaacgccaaccacattggtcacgttcctgatgttgagctacggagtgcgatcattgagtgctacgcgctcacaaaatcactcatcgatacgtaccgtttcaacaatcagctagtcgaagagcatgaagccgcgtccttggaattgatgcgaaacccgtccgaagcgaatcatctggagcttcagcagcgtgctcaggctatggtgctgtatacagacgcaattcgcgcctcacataagcgtgcagtcgacagtttccgcaggcttgacgtgatgctcatagcggcacttgcgaacccgatagcgtaa

SEQ ID NO: 516586 - DNA, 801 bp, Stenotrophomonas maltophilia
atggggtgtaggggcatcgcccctacgctaaacgcctcacccgcgctggtgaggtctgggccctcggctcatgtagaccacattggatggttcggcgccggagccgggatcacgcatgccgaaccggcgctctcggcgaattctgatcgcttcagcaaggcagatcaccgtggatttcgccgcggcgggcggcttggtcgccggacccactcgactgatcatctccgggagggcctcggccatcatcagccgccattcccgcgcgatgtttcaggtcagagaccaccaggtcatatcgcagggctccagctggtgaccctcagggtgaacatgtgtccaccctggaagccgatcagctcaattcggtcgtgcggatcgatctcgatcatgctgcaagctcatccttgtcgggggagccagcagggaggcaagagccgagccggcgcctcagccattgccatgcggagccgacgaaggcccagactcagcggatacgttatttcgcataatgtatattatgttcaaagcgtccccgaggacgctggcgtaccgctcgcctcaatcaccggccttgctatgccaagccaagaagccagcctccccagcgtgcccctcgcggcctggcagctacggcttcctccatcgtccgatcagagtcttgtgcatgacccaggcgatccagccgcagaccaagccgccccccgcgacaatgacagcaaggcaaacaaagctgtaggcgcccaaagcaggaccttcatcgttctcccgcctccaattgcatcggccggtcacgtgccatga

SEQ ID NO: 516587 - DNA, 201 bp, Stenotrophomonas maltophilia
atggacagcactccggacaataccatcacagcctcctggaatggcttcgtcgtccggcagatccttccgtgcgatctcgacctcatctgtgcccaccgtgaagcgatgttccgtgagagcggccggagcgaagaggtcctgcagcagatggccgccccgttccgtagatggctggagccgcgcctgatgtcgggcgactag

SEQ ID NO: 516588 - DNA, 669 bp, Stenotrophomonas maltophilia
atgctgaaacccgtcttcatcctgctgctgggcctgccgctctgggcggtagcctccgcgccagccgatctttcgccgcaggccgaatacacgctgcaggcgcaggtgctcctgcacgacgatgccgcggcccggcagatactgcgcgagcagggagagggatacgagcctgccgttgccctggagtggcagttgcttgtggacgatgtgcctgcggcactcgcgcggcagggttctactgcgccttccccggctgccacgcaggcctttgtacaggcactggcaatgcgactgccgagggtcagctgcgctgcccgggagttcgtgccgtcgggatcgccggaaatcagcctgtacccactggtctgccagcatcccgacgtggaacccctccggcaggagtatctggcgttgcgggccgcacctgaagcagggcgccaggcacgcatcgatacgctcttcctgcgttgggcggcggtgctgcgcgacggacccgatgtaccacattgcagtcgggtcaccgggtggtaccaggcacgccatgcgttcgcccatgccgagcgcgtgcatcagctctaccagacaatcctgtggcgattgctgccgatcgagttgtggctgggtgaaccgctgctgccgcaggaggatgagctgtgtgatgacgcttga

SEQ ID NO: 516589 - DNA, 453 bp, Stenotrophomonas maltophilia
atgaagaaccagaagggctttaccctgatcgaactgatgatcgtcgttgcgatcatcgcgatcctggctgccatcgctattccgcagtacaacgactacaccgcgcgcgctcaaatgactgaggcctatacgctggcttcgggtttgaagacgcccatcgccgaagcacttgctcaggacaacagtaacgctagctgcaaggagcctgacggtatcgttgctagtggtaagtacgtcgccagcgttgctgctgctggcaccgcaactagctgcgtgattaccgcgacgatgaagaccaccggtgtgaacgaaaagattaagggtgcaactgttaagctgacctacaccccagctgacgggaagtgggattgcaacagcagcgtcaatgcggccttgactccgaaggcgtgcacggctgctgccgctggcggcggcaccaccactcctccgtaa

SEQ ID NO: 516590 - DNA, 888 bp, Stenotrophomonas maltophilia
atgcgggcggcgctgctgatgctcggcagcaccatggcatttggcctgatggcggtggccatccgctatgccacgcgctacgtgccgacccaggaagtggcgttcttccgcaatgccttcggcctgctcgcgttgctgccgatgctgctgcgccccggccacgcgccgctgaagacccagcagctgccacgctatttcgtgcgcagtgcgatcggcctgggctcgatgctgtgcgcgttctgggcactgggccacctgccgttggcgcaggcggtttcgctgtcgtactccacgccgttgttcgtcaccatcgctgccgtgctgtggctgggcgagaccgtgcgcgtacggcgctgggctgcagtggtggtcggcttcatcggcgtgctggtgatcgtgcgccccggtaccgccggcttcaccgcgggcagcctggtagcggtggctgccgccgtgctcagctcgctggtggcgatccagatcaagcagctgacccgtatcgacagcgccgataccgtggtgctctatacctacgtgttctgggtgccgctgtcgctggtgcctgccctgttcgtctgggtctggcccaccggcgcggcgtggctgtggctgctggccaccggcgtgctcggcacggtcggccagctgctgtggacgcgtgcgctgcgcctgggcgaagtctcggcgctgaccccgatcagcttcctgcagctgccgctggtgacgctgtgcggctggctgctgttcaacgaaacggtggaccgctggacgatcatcggcgccggcatcatcctcgccgcgaacgcctacatcgcccaccgcgaagccgtactgtcgcggcgtgccgcaagtgcagcggcctcggcagcggccaagcccgccgaatga

SEQ ID NO: 516591 - DNA, 663 bp, Stenotrophomonas maltophilia
gtgagctccaatcatgcacccagctccatcatgcaactctcatgtctgatcaccgcagtactgctatgcatgtgctgcacaggatgtaccgagcacagagcgtcaaatgccaacaccaaccttgacaaaaccgaggtagacgcaaaaatcgatcaagcgagatcgagcaatctcaacacacagccactggctacgcgaccagaaacagacaactcggcaacgaccttacatcgcgcagcatcatcaatcgagcatcttcattcagaatccgcactcatattcgagggtggaatctcaagccaagtgtccgaggagctcctacgctccggcagaagcacttcagacgcgatcgaccgcttgaccgtggacgctgcttccagcaccgaagcacaggatctagccaagcactatcgatcctcaataacccgcgcaatgggtgatgacgctctacttaagcgcctgtcatgcggccttagcatctgcatcggcatcgctcaagccagaagcaatgcagaccatgaggcctggggtcaaagacttgcatcagacacatcctctcccacctacagctatgccgaaacatctgagaatctcggcgcagggtacgagaacagattcatattctccacagacccagcgatgaattcgatcagcggcaattaa

SEQ ID NO: 516592 - DNA, 384 bp, Stenotrophomonas maltophilia
atgaccctcctgcgccagggcagcgcatacatcgtcatcggcctggtgcagctgctgctggactggctggtgttcgtgggaagcaccgcactcgggctgccggtcgctcctgccaacatcgtcggccgtttggccggcatgctgctcggcttctggctcaacggccgctatacctttgctgacgccggccaacagcgcctgggctggaagcgcttcgcgcgcttcttcctgctttggattctgctcacagcgaccagcaccctgctggtgacggtggtcgaccatgggttggggctgcagtacgcgtggctcgccaagccgctggtggaaggcggcctggccctggtgacattcgtgctgctgcggcacgtcgtgtaccgctga

SEQ ID NO: 516593 - DNA, 1047 bp, Stenotrophomonas maltophilia
atgaacatcccccctccgaccagccccaccacagcggtccggcccgacgactcgccgcgcattgcggtggtgatcccgtgctatcgcgtgcgcgcgcatatcctgcaggtcatcgccggcatcggaccggaagtgggctggatcatcgccgtcgatgatgcctgtcccgaggcaagcggcgcctggattcgcgaacactgcaccgatccgcgcgtcatcgtggtccatcacgagcagaaccagggagtgggtggtgccacgctgaccggctaccagcacgcgctgcagacacctgcccatgtggtggtcaagctcgacggcgacgggcagatggatgccggcctgcttccccgctttgccagcccacttctgtccggccacgcggactacgccaagggcaaccgcttccatcgcgtcggcttcgtgcgcggcatgccttgggtgcgcctggctggcaatgcggcactttcgttcatgaccaagctgtccagcggatactggcagatcgctgatccgaccaacggctacacggcgatccgcagtgaagtactgcacgagctggagctcgagcggatcgcaaagcgctacttcttcgaatcggacctgctgtatcacctcaaccaggtgcgtgccgtggtgatcgatgtaccgatgcgcgcccgctatgaagacgaaaccagcagcctgagcccgttacgcatccttggcccgttcctgctggggcatctgcgcaacaccctgcgtcgcctgctttacagctacggcatacgcggcttctcgctggccagcgtagagctgctgcttggcagcgttctactggccggcggcggcatatttggcctgtggcggtggtgcctctcagccgacagtggtgtaccggccactgcgggtaccgtgatgatcgccggcctgcccatcatcgtgggtatgcagatgctgctgtcctggctcaatttcgatgtagccagcgaaccgcggcaacccgtgcatcgtctgcttggcgtcgaacaggccctgcgcagcgtcatcgggaagcctcggcaatga

SEQ ID NO: 516594 - DNA, 1965 bp, Stenotrophomonas maltophilia
atgggcccactcctgctgctcatcggcctggccatcacgccactgctcaggggcttgccatcaggtcgcttccgtgaactggtcgtactgggtctgctgacctgcgccttggcatggctgatgcggcgcctgcgtggctggtccatggccagctgcctggcgatgctctggatacttctgctccccctgttcaccggtgtatctccgctgctggcaacggccttgctgctgctggttgcgatcgtgatcggtcaggcgctgttcgcgcagcgctcgttggccctgcagacgatggctggcctgttggtactttcggcagtgctgggctgggccctgctggtcccgatccatttccgctgggtctatctgccggtgggccttgccgtggtgatatggcgccgttcgctgctgtggtcatcgttgcgggccggcgtggcgcagtggcggcagtccgtggcggacgcgccgcgcagcgccgcattcgctgtgctggtggtcggcttggccagtaccgcctgctggttgccgaccctgcagtacgacgacctcacctaccatctgcgcttgccatggcagttgctggaacaaggcgtctatcaaccggctccccagcaccagatctgggcgctggcgccctgggcgacggatatcatccaggcagtaccacaggtaatcgcaggggctgaatcacgtggcccggtcaacgcgatctggctgctgctgctggccacgggcgcctggcagcttgcggcgcagctcggcgcgagcgtgctgctgcgctggctggcggttgccatggtagccagcctgccgctgaccgccggcctggcgggtggcatgcagaccgagctgccaaccgctgcggtgctgctctggatgtgtgcgctggctgccgcgccccgtgatggccgcttgtccaactggatgctgctggcggtgctggccggtggactgctggcgatgaagtcgatgagtgcggtgatggcactccctgtcctggcctgggccctgatccgccatccgtggccgtcgttgccgcgcatcggcctggtgctgctggcaggactgctggtcggtggtgccaactacgtgttcgcgcagtggattgctggcaatccggtgctgccgctgttcaacggcatcttccagtcgccctacttcgctccgacgaacttcatcgacctgaagtacaagatcggcttcggtcccgacctgccgtgggcactgaccttccattcatcgcgctacttcgaatcgcacgatggtgcggcgggcgtggtcctgatcggcttggccgggctgtggctgctggccgtgctgcgtccgccaactcgcgcggcggcactggtggcactggccgtgctggcactgccgctgttgccgatccagtacctgcgctacgcctatcctggcatggcattgctgtgcgtggtcgccgtggcgtcgctcggcgccggccccttgcgccggcctctcattggactgctggtggcgctgtgcgtgctcaatgtcagcttccaatccaccggctactggatgctgcgtagcggagcgttgaaggacacgctgaaggcggctggccgcgatgctccgttgttccagcgttttgcacccgaacgcacactggccgcagccatccgtgcgtcgggtgaagacgagggcaccgtgctgctgctggatccgggtgacccgttcttcgccgaattcggtacccgtgggcgcacgatcagctggtactcgcccagcctgcaggcggccgccgccaacgccgagctggatcccagcggcaagcgctggctcgccatgctgcagcaacagcaggtcaggcacgtcatcctccgcagtgaagcgctcacaccctcacagaaactcgcacttgagctggcaggtgcccacctgcgcgaagaagccggcggccgccagtggtggagcctcccggcgcctccaggaaagccatcgcgatga

SEQ ID NO: 516595 - DNA, 1449 bp, Stenotrophomonas maltophilia
atgactatggacacgagcaagaccatcaaggaccccatccatggggcggtgaagtttgaaggcgaggccgagctggaactgaagaatctactgtcggacccgtacttccagcggctgcggcgggtgaagcaactgggtttctccgaccatgtgtttccttccgccacccattcgaggttcgcccattcgctgggcgtgtatggcgttgccaagcgcctgctgtcggtggtggagccgacggtgaggaatggcaactggagcaggaagggcaaggcctgcctggcagccgcgctactgcacgatgtcgggcatgggatgttcagccatgcgttcgagaacgccatggagaagtttatcgaggctcaccctagggtcggcgagcagttcaaggacgcggtcaaccacgaaaagcttagccaccgtatcgtgaccgagaccagcgtagccaaggtgctggagcgcatcggcggtgagggcttccccaaggaagtggccgccatgatcgagaaaaaggataccggctgcatctacacctcgatcgtgtccagccagctggacgccgatcgtcttgactatgccaagcgtgatccctacttcgccggcgtctcttccggtggcatcgacctggactggcttgtcgatcatctgaggatcaaaaagacctccgatggccggttcttctatgtggacggaaaggcgttcgtggccatcgagcagttcatggtgacgctgttccagctctatccaacgctgtacctccaccatcgcacccgcggcttcgagtacatgttctcgaagctgatggtgacggtgttcgaacggatcgcaggcggacgagcaagtgatgcgggattggagaacggccatccactggtccggttcttcaaggatcctggcaatctcgagaacgcgatggtgctggatgactcgctgttctggggctcgctgcacctgttcctgaaggcacccgacccggtggtgagcgccatcgctgggcgctttgctgcccggatggcgtatccccgtatcgatgtgtgggcggctgccgagcgcattgccgtcaagcacggcacgtatctggcgctgccggccgctgaccgggcggaggtgttgcaccgcgcctgcaaagcggtctgtacgcagatccagaaggatgagaaggtgtggcactcctcctgccactacgacagctatcgtcggcagatctacaaggccgagaacattgccggcggttatccgcagcagatcaacgtgcagcatggcggcgacatcgtcgacatcgcttctgtatcgccgatcgtagccagcgcggcgtccttcaccattcaccgtatctactttgacgatggggtggcggatctggacaagcgcctgaagacggccatcaatcgcaccctgcgtgtggcaatcaagcgggagatcgccacggtgcgtgccagcccagcctga

SEQ ID NO: 516596 - DNA, 1416 bp, Stenotrophomonas maltophilia
atgaagcaatccgaggcagtggtgtttgtatcggcaggcatgtcctcgccaaagaagcgcgaccatatgctggcgcggcggcagctctatttgaactacggcgcgctttcgctggccaccaccttgtatgtggctggatacgacacttctgtcgttcacggcgaacatgagacgcccgaaagcgtggttgcaggcctgctgcaatcgggccggctgccgtcggtgtatccgctgatgctctccgtaccaagctttcatgcgctgccctgggcgcgcacgttctgcatgctgatacggcgagcgctgcccgcgtgtcgtattgtcgtgggtgggcgttgggtggtgggccccgacccggcgtggctgcgcagcaagctgcccgaggccgaagtgttcgtgccggggctggccgagccctatatcgaagcgttgctgaccggcacgcctgagatagggcggactcgagtgccacggcccgatcatccactgcatcatccgctggtggacgggtatctccgttaccaacccagcgtcgaagcgtcacgtgggtgtggcatggggtgcggcttctgcgaggagcgcgaaatacccgtggacaagctgggcccggctgaaaggatgtgggaaacgatgaaggccgtgcaggcacaatacgccgatggtgagatccggccgtacctgcaggcgtcgatgttcgtgcccacggcacgctgggctgaagcgatggccgagtgtgtgcagcgcgacacgctgcggattccgtggcggaccgagagccgggtggacgcgctgaccgaagatgcgatcgcggcgctggcatcggccgggatgaaggtcttggacctgggattggagaccgcgtctccgcagcagattttggccatgaagaagtcgcgctatcccgaccgatacttggaccgcgcttcgcggctgctgagagcctgcgcgcgggccggtgtgcaggccaaggtgaatgtcctgatctatggcggcgaaactgccaggaccttgggtgagacgcagcagtggctcgatgagcacgccgggcaaatcgcaggtgtttcggtgggcccggtggtggcctatggtccaccgaagacggccgatcccttcctgcgcgagctgggcgacctgggcgcacggaccattgatgtgggcagcgcgcaggagaccggcatcagccatatccatccaagccgcgagatcgatgtcaccgaggcggagcgattcagtctgcagctgtcgcgccgctacatggacgcagaccagtacttccggctcaaacagttttcgtattacccgcgagactacgggagggaccacttcgaccaggatatggctcgctcggatccggcaacgctgccgttccggaccggcgacgatgcgcaggcaatgaacccgagaacgacgagatga

SEQ ID NO: 516597 - DNA, 636 bp, Stenotrophomonas maltophilia
atggcttttgtcacgtttgaaggcatagacggcagtggaaagacgacccaggccaaacgactggtcacggtgttgggcgaaaggagcattaccgtcgtcccagcgaaggaacccgacggtggccatatcggcttggaaatacgggcaatcctggtcaaacagcgcgcgcggaaactcgatccctacgaagaagcgctgctggtttccgccgcgcgctacgaccacgtacgaagcgtgattcgcccagcacttgatgccggatcctgggttgtttgcgacaggttcatcgattcaacattcgcgttccaggtcttcgagaaccacgtgtccgagtcattcttcgatgtcgtttccagccatgtcgccgatcagacgcatccggatttcaccttcatcctggacctggatgccgaggtggctctgcagcgtcgtagcacaggtgcatcattacgacataccgacccggccgaagcccatcgcaacttcggtcgtctccgccgtggcttgcttgaggtggcgcggcgtgatccggggcgatgccacgtgatcgatgcaaccggcagcgaagaacgggtcggtgcgcagatcctcgatgtactgcagggctccggccgacttcacccatcttcggcatga

SEQ ID NO: 516598 - DNA, 348 bp, Stenotrophomonas maltophilia
atgcctcaatcctcccccccggttccggctaagctccaggaaatgctcaaagactatccggagtatatcgaacgactgcagaaggctctcaactcggtgaaggacaggaggataaagtccacccctccttttgaggccgcagtctggctattggaagaccacctcagtggctttatcgctgaagcgcgagctgaactagccaccgccgaaacgtcaggcaatccgcaggccattgcacaggcaaatgagaagctcgaactgatgttcatggcacgaagcggtggcggcgggatgctgaacatcagtgatcttgcggcctactttgaaactcataaagagcactactga

SEQ ID NO: 516599 - DNA, 411 bp, Stenotrophomonas maltophilia
atgggtgtttcaagcggtgtcatagtgacctttgcggaaccgattctgtacgagggacgtcccggggccaaatctcgggatttctacctcaatctcagcctgctaggaatctgccgcgacggcattcgcttgatagaccgtttcaatcttccactcgtgtcggatccacatgcgctcgctgattggtcgcgtgagatcaccgaggccgagtatcttgatctcgtggggccgcctgatatcgaggctttactggccaagcatcgcggctttcggtcgatgatggaatggcggagcgagccgggacacgaggaccattacactcaggttgagaagatttttcatctcgtttcagagttcaagcggggcaatcgcgctgtgcgctatcggctcacagtttccgatatgggatga

SEQ ID NO: 516600 - DNA, 450 bp, Stenotrophomonas maltophilia
atgattctttcccgcattttcgcgctcctgctggccacaacgcctgccggcctcgcggcagccagtgatgccagcgatctgcaacgcctacaggcatacgagtggcatctcacccacgcagtcgacggcaacggcaagcgcctggatgcactgttcatcgccagtgatccgcccgtcggtctgttgttccgcggcaccagtgccaacgtgctgaacctgtgcaacggcatgggcggcccatacacgttgaaagacagccagctcacgttgggcagcatggaacagaacctgaagggatgcttcggtgccaaaggcgaacaggaaaccgaagccaagcgcaggattctgggggcctccacactgatcatgggtcgcgcggggccgttgaccctgcataccgcacgtggcgacacgctggtgttcgcgccggtgccactgaaaaacagatga

SEQ ID NO: 516601 - DNA, 588 bp, Stenotrophomonas maltophilia
atggtcttaatcatgctgggtatccatcgctggttgcgtgccggcttgttcctcacgctggtgggcgcactcggcgcctgtggcggtcgtgtatcggatgcggcggagccgctggatctggtcaagccaatcaaccttgccgagtccgggcaagcggtgcggtttgagttcgagacgaatgcccgcaacttccatcccgggcgcccctatgtgctggatcttgaggtgcagcggcatggaccggagcctgacagcgagcaagatatggacggtgtccatattccttttgaactgtccctgcagcgctgggtcgctggcgcctggcaagacgttgcaacttctgatttctatcaggcaagggcgcgcaatctgggggagccgctccccgaatggcatgcatcggcagattggcgctacgcgcaacaggtgtcgatggacgccagccgatataggctgagcatcgtcaccctgccgatggaaacggatgcccgctaccatctgaatgtgcgcacagttcagcctacagccgcgctccagcattacccggcccagctgcgggtgcatgccgatcctctctctggaaaatag

SEQ ID NO: 516602 - DNA, 666 bp, Stenotrophomonas maltophilia
atgcctttgctgaatgatcgcgccatcgattcggtggtgattgccggtgccggcggcttcggtatggaagtctttgactatctcatcgctgaatcccacaagggtgggccgagggttgctggcttcatcgacgatggcgtcggcaatccgattcccggtgaattggggactgagcacctcggcgcaatcgcggactaccgcgccgtgcaggggcaggccgtcgtggtcgccgtgggttcggtaagggggcgtcggcatatcctcgggatgctcgcggaagccggtgtctacagtccgccctttgtggctggtagcacggtgttgtctccgaacgcgcagctggccgatggcgtggtggtctgcccattcagcgtggtcaaccggaatgctgtgctggcgcggggcgtggcagtcaatgtgcactgcagcgtcggacacggggcacgggtgggtgagttcagcatcctctcgccgtacgccgccctcaatggtgacgcctcgatcggcgatggctgctttctcgggacacgcgcgacgatctatcccaggacccagctgggcgccggctgtatcgtggacagccacactggcgtacgcgccagcgccggcgatcgccagatgatttcttcgcggggtacctaccaggtggtcgcgctccggacctga

SEQ ID NO: 516603 - DNA, 780 bp, Stenotrophomonas maltophilia
atgcaccagcgccggaagcggtgcatctccctgtttccatccaaccggaagatcgacaatcgccgggatcttgcggccgtcacgcgctgtgtaggtgacccagcgttgctcgccgatctgcttgccatcgacccagggtctttcgctgcccagggtggtgacctgtttgcgatcactcagcatgcggtaggtcgtgggctgatcggcggcattggtcgtgaacaggacccgcgacaagtcgtcgttgtagccagagatggcaacgtaggtgcctgggtaggcctgcttcaggccttcgtacaggcccttcatctgcgggtccacgtacacagcctcgcggcgtgggccttcgaggtagaacccaagaacctgattgaagttgcttggcttggtgcccaggatcaggccgccaatcggatactggggatgtgctgccagcggttcgttgtcgaaggttcggttggcgggatcgtacaggcgtgcttggacctgctccgagaacctgtcggtgagcacgtacaacttgcccgtctggtcgtcgatcccgacaacgtccatcgtgtagcgatcgctcaggcgcgtggtcagcgggtcatgcttctcgaactggccactgcccttgttcttgatcagtatctgctgctcatactcgttcgagcccgcaggttcgatctgggtgcgggtcagcagttcgccatcgcgggggtggaacaggcctggcgaggaacgggcgtcgccacggaacagcagcccggtctcaccagtgcgcagattgaatag

SEQ ID NO: 516604 - DNA, 273 bp, Stenotrophomonas maltophilia; identical to SEQ ID NO: 498400

SEQ ID NO: 516605 - DNA, 186 bp, Stenotrophomonas maltophilia
atggagagcttcttccagctactgaagcgggagcgtattaagcggaggatctacagcaatcacgacgaggcacgggccgacgtcttccagtacatcgagatgttctacaacccaaaacggcggcacagttccaacgacgggctgtccccggtagagttcgagaagcagtacgcactaaacggctga

SEQ ID NO: 516606 - DNA, 585 bp, Stenotrophomonas maltophilia
atggtcggctacggtcggcgaccacgcccattgagcggccctgttggatcagtcgccaagaacgttctggctcgcggcttcaaagtcagtgagccaaatcgcgcgtgggtcacggacatcacctacatccgcacgtacgacggcttcctgtacttggcggtagtgcttgatctgttttcgcgtcaggtcgttggatgggcaacccgaccaactcaacatacggacctggttttgcaggcgctattggctgcagtgtggcggcgcaagccaagccccgggcttctgcttcactccgaccagggaacccagttcaccagcgaagactggcagagcttcctgcgcgagcacgacatcgtgtgcagcatgagtcgacgaggaaactgccatgacaacgcagcgatggagagcttcttccagctactgaagcgggagcgtattaagcggaggatctacagcaatcacgacgaggcacgggccgacgtcttccagtacatcgagatgttctacaacccaaaacggcggcacagttccaacgacgggctgtccccggtagagttcgagaagcagtacgcactaaacggctga

SEQ ID NO: 516607 - DNA, 273 bp, Stenotrophomonas maltophilia; identical to SEQ ID NO: 498400

SEQ ID NO: 516608 - DNA, 273 bp, Stenotrophomonas maltophilia; identical to SEQ ID NO: 498400

SEQ ID NO: 516609 - DNA, 246 bp, Stenotrophomonas maltophilia
atgccatcgcccaaccacatccccgacgacgcgttccccgaatcggccatcagcctggccgatctagagagcccagagacaccggaagcggacccgcaatacttgctcgtgcaaagcgggtttggtctccatgtccgtctgggaaaagacggcgaccagggattgcgcagcgaggacgaaatcgccgagctggtgcggcgagcgttgtatcaccgcaagagtctgacccttcatatcgagttctga

SEQ ID NO: 516610 - DNA, 273 bp, Stenotrophomonas maltophilia; identical to SEQ ID NO: 498400

SEQ ID NO: 516611 - DNA, 186 bp, Stenotrophomonas maltophilia; identical to SEQ ID NO: 516605

SEQ ID NO: 516612 - DNA, 2361 bp, Stenotrophomonas maltophilia
gtggcgaagcaggtccctgaacgctccaagtcggacgacagcaaggcgtcacgtcgcacggccgcggcggcgacgaccgacaatccacgccgccagcgcctctggcgcgacctgggcctgatcgcgatcgcgccggccctgctctatctggcggcgagtcttttcacctattcagcgacggatccgggctggtcgcataccggcagcgtggtcgcgccggtgcacaacctcggtggtcgcgcgggcgcctggatcgccgacgtgctgctgcagttgttcggctacatcgccttcctgctgccggtggtgctcggtgcgctgtcgtggattgccatgttcggcctcaagcgcgagagcaagggcgagaacgacctggacccggcgctgcgcctggtcggcctggtcggtttcctgattgctggcaccggcttcctgcatgtacgcctgttcagtggcgatgtctccagcgccggcggcattctcggcaagctggttggcaattcgctcacggtgggcttcggtgcgctgggcgcgaacctgttcgtgctggtgctgctgctggcctcgatcaccctggccaccgggctgtcctggttcacggtgatggaaaagatcggccgtggcgtgatgtcgctggcaccgttgctggcgcgcaagaaggaagaagtcaccgagtggcagcagacccgggtgatgcgcgaggagcgccaggaagtgcgcaaggccgatgccgaggtccgcgccaagcgcgagccggtgaagatcgagccgcgaccggaaccggtgatcgagaagagtgaccgggccaagcgcgacacgcagatcccgatgttccgtggcgtaaacggcgacggctcggacctgccgccgttggccctgctggacgaccccaagccgcagccggtgggctacgacaaggaaaccctggacgcgctgtcacggcagatcgagttcaagctgaaggatttccgcatcgacgcccaggtggtcggcgccaaccccgggccggtcatcacccgcttcgagatcgagcccgcgccgggcatcaaggtcagccagatcagttcgctggacaaggacatcgcgcgcggcctgtcggtgaagtcggtgcgcgtggtcgacgtgattccgggcaagtcggtgatcggcctggaaattcccaacgtcacccgcgagatgatctacctgtccgagctgttgcgctcgaaggaatacgacaagtcggccagcgtgctgaccctggcgctgggcaaggacattgcagggcgctcgaccgtggccgatctggcgcgcatgccgcacctgctggtggccggtaccaccggttcgggcaagtcggtggcggtcaacgcgatggtgctgagcctgctgttcaaggcctcgccgaaagatctgcggatgctgatgatcgacccgaagatgctcgagctgagcgtctatcagggcatcccgcacctgctggcgccggtggtcaccgacatgaaggaggctgccaacggcctgcgctggtgcgtggccgagatggagcgccgctacaagttgatgagcgcggtgggcgtgcgcaacctggccggcttcaacaagaaggtgaaggaagcgcaggatgccggccagccgctgatggacccgctgttcaagccgaacccggagctgggcgaggcgccgcgtccattggagacgctgccgttcatcgtcatcttcatcgacgaattcgccgacatgatgatgatcgtcggcaagaaggtggaagagctgatcgcgcgcctggcacagaaggcgcgtgcggccggcatccacctgatcctggccacgcagcgcccgtcggtggacgtgatcaccggcctgatcaaggccaacatcccgacccgtatcgcgttccaggtcagctccaagatcgactcgcgcaccatcctcgaccagtccggcgcggagaccctgctgggccacggcgacatgctgtacctgccgccgggcaccgcgctgcccgagcgcgtgcatggtgcgttcgtgtccgatgacgaagtgcaccgcgtggtcgagcacctcaaggcgatgggcccggccgactatatcgacggggtgctggacgaggtgcagacgatgggcgacggcgtggtcgtcggtgccaccggcctgcccgagaccagtgcggccggcgacgagtccgacccgctgtatgacgaagcgctgcgggtggtcaccgagacccgccgcgcctcgatttccggcgtgcagcgccggctgaagatcggctacaaccgtgcagcgcgactgatcgaggccatggaagcggccggcgtggtcagcccgcccgagcacaacggcgaccgcacggtgctggcaccgccgccgccgaagtaa

SEQ ID NO: 516613 - DNA, 972 bp, Stenotrophomonas maltophilia
atgagcaccagcctgccctcccgccaccagcgcctcgtcatcctcggttccggaccggccggctggaccgccgccgtctacgccgcccgtgccaacctgaagccggtcgtcatcactggcctgcagcagggcggccagctgatgaccaccaccgaggtggacaactggccgggtgacgcccacggcctgatgggcccggacctgatggcgcgcatgcaggcccacgccgagcgcttcgagaccgaggtcatcttcgaccacatccacaccgccgacctgtcgcagcgcccgttcaagctgatcggcgacagccacgagtacacctgcgacgcgctgatcatcgccaccggcgccaccgccaagtacctgggcatcccgaccgaagacgagttcaagggccgcggcgtgtccgcctgtgccacctgtgacggcttcttctaccgcgaccaggacgtggtcgtggtcggcggcggcaacaccgccgtggaagaggccctgtacctgtccaacatcgcccgcaaggtctacctggtccaccgccgcgacaccctgaaggcggagaagatcatgcaggacaagctgttcaggaaggtggccgaaggcaagatcgagaccgtctggcaccaccaggtggaggaagtgctgggcaacgacgccggcgtgaccggcgtgcgcgtgaagtccaccctggacggcggcacccgcgacatcgatgcccacggcttcttcgtggccatcggccaccacccgaacaccaccctgttcgacggacagctggcgatgaacaacggctacctggaaatccgttcgggcctgggcggcaacgctacccagacctcggtggaaggcgtgttcgccgccggcgacgtggccgatcaacactaccgccaggcgatcacctcggccggcttcggctgcatggccgcactggacgccgagcgctatctggacgcgcagggcaaggccagctga

SEQ ID NO: 516614 - DNA, 273 bp, Stenotrophomonas maltophilia; identical to SEQ ID NO: 498400

SEQ ID NO: 516615 - DNA, 2376 bp, Stenotrophomonas maltophilia
atgccgtggatcaacaacctgaaactgatgccgaaactgctgctgaccttcggcgtcctcctgctggtgatgctgctgcagggcatcgtcgcctatcgcggcctgcattcgctgaacaacgtgaccaccgagctggccggttcacgcatggagagcatccgcatggccggcgagatgcgcggcatgctgggcgagtaccgcaatgccgcctaccagcagctgatccgcgccagcgatgacgtcaagtccgatgcgcgcaagcagggcgtcgacctgcgcgccagcatggacaagtcgatcaaggagtatccgaagctggtcgacaacccgcagcagaagaagctgttcgacgccttcgccaaggaatggaaggacgccttggcatcctatgacagcgtcaccgagatgctggaactggacctgccggacgacgccatcgataccttcgtcggcgaaacccgcaccaagcaccgcaaggccgcctccgcgctggaggcgctgatcgccgaagacaaccgcctcgcccgcgcctcgcgcgatgaggccgcatccacctactccgcctcggccgtgctgaccgtgatcgccctgctgggcggcgccgcgctcggcctggtgctggtgtggctgtttgcccgcgccctggtcggcagcgtgcgtggcgccgtctcggtggccaacgacgtggccggcggcaagctcgatggccacatcgacgtcagccgccaggatgaagtgggcgaactgatgcaggccatgcagcgcatgcagcgcgacctgcgcgagcgcatcgagaccgaccaggccatcgcccgcgagaacctgcgcatccgtaccgcgctggactacagctcgaccggcgtctacctgaccgacaccagcaacaccatcgtctacagcaaccgcgccctgcagcagaccctgagccagtaccaggacgaactgcgccgcgacctgccggacttcgatgcgcaggcttcgctgatcggcaagccggtcaccgtgctcgaacaccgcggcgagatggaccagaccctgctgggcaacctgaaggcacacggcgtcgcccgtcgcccgatgcagtacggcgatgcccagttcgcccaggtggtctcgaccatccgcaatgaaggcggcgacaccgtcggctacgtggtggaatggcgcgaccgtacccaggaagcgcaggtcgaagccgaagtggcccgcgtgatcgcccaggccgccgctggcgacctgtccggccgcatcgatgccagcgacaaggaaggcttcttcctgcagctggcccagcagatcaacggcctgctggacgccaatgccggcagcatcgagcagatctccggcctgctggccgcgctgtcgcagggcgacctgaccgtgcgcatgcacggcgattaccagggcgtgttcgcccgcatgcgcgacgacgccaacgccaccgccgcgcagctgagcgagatcgtcacccgcatcaagcagtccagccgcgcgatcagctccgctgccggtgaaatcgcctccggcaacagcgacctgtcgcgccgcaccgaacagcaggccgccaacctggaagaaaccgccgcctcgatggaggaactgacctccaccgtgcgccagaacgccgagcacgcacgccaggccaaccagctcgccatcggcgcgcacggtgtcgcctcgcagggcggtgacgtggtcggccaggtggtcaccaccatgtcggccatcgaagcctcgtcgaagaagatcgccgagatcatctcggtcatcgacggcattgccttccagaccaacatcctggcgctgaatgccgcagtggaagccgcccgtgccggcgaacagggccgcggcttcgccgtggtcgccagcgaagtgcgcacccttgcccagcgctcggccgccgccgccaaggagatcaagggcctgatcgacgactcggtcggcaaggtcaacgacggctcggcgctggtgcacaaggccggcgcgaccatgggcgagatcgtcgcctcggtgcagcgcgtgaccgacatcatggccgagatctccgccgcctcgcaggaacagagcgccggcatcgagcaggtcaaccagaccgtggtgcagatggacgaaaccacgcagcagaacgccgcgctggtggaagaagccaccgccgccgcacgtgcgatggaagaacaggccggccacctcagcgaggccgtgtcgatcttcgtggtggacgaagccgaggtcgtcgccgccccgcgcgtcaccgccccggcaccgcgcgccgctgcaccggccgccccggccccggctgccccgccggcccgccgcacggcgggtggtcgcccgatggccaccgaactggccgacggggactggcaggagttctga

SEQ ID NO: 516616 - DNA, 384 bp, Stenotrophomonas maltophilia; identical to SEQ ID NO: 497002

SEQ ID NO: 516617 - DNA, 492 bp, Stenotrophomonas maltophilia
atgaacgacaagaccagctccgccgccagcgccggtggcgaattcctcagcttcacccttggtgacgagcactatggcgtggacatcctcaaggtgcaggaaatccgcggctacgacgccgtcacccgcgtgccggacgccccggactacatcaagggcgtgatcaacctgcgcggcaccatcgtcccggtcatcgacctgcgcctgaagctgcgcctggacaacgcccgctacgatgccttcaccgtgatgatcgtgctgaacgtggaagaccgcgtggtcggcatcgtcgtcgacagcgtctccgacgtgatcccgctgtcggccgagcagatccgcccgaccccggaattcggcgccgccgtcgacacccgcttcatctccggcatcggtacccacgacgatcgcatgctgatcctgctggacatcgagaccctgctcgacagcgccgacatgggccaggccaacctcgccgaagacgtcgctgcctga

SEQ ID NO: 516618 - DNA, 774 bp, Stenotrophomonas maltophilia
atgtccgacggcaacgacactgcagtgcatgatgtccacgcggctgatgccgcggacgaacgattcctggtccgcaacccgcgccagctgcgccagctgctgcgctcgctgatcgaccagcgatcgctgatcaacgcccatatcgacggccgcgaccgttccttcccgaccgccctgctcgacctcgacgaagacgaggacttcctgctgctcgatggcagcccgcaggaagcctccaaccgcgccgccgagcaggccgatcacctgctgtgcttcgcccagctcgaacgcgtgctggtacggttccggctgcacgaactgcagcgcgtggacaacgacggccatgtggccttccgtgcgccgctgcctgacgaactggtgcacctgcagcgccgcgagctgtaccggctggagacgccggtcaccgactcgccccacctgctgctgccgcctggcgaagcgcgcgccgaagccctgtcgatgcgcgtagtggacatcagcggtggcggcctggccgtggtggtgcccaatgactgcgcggtgtttggtctgcagaagcgctatccggcgcggctgtcgctgccggacggccccgacctggatatcgaactggtggtctgcaacctgctgccgcagcgtcagcccaatggcatcgaggtcaagcgcgtggggatgcgctttgaatgcctgccacgcggcgccgacagcgccatccagcgctacatcttccgcatcgaccgccagcgcaaggcccgccgcaacggcgagctctga

SEQ ID NO: 516619 - DNA, 2250 bp, Stenotrophomonas maltophilia
atgaagtggttccaagatctgcccatcgcccgcaagctggccgtggggttcacccttaccaccctgatgaccctggtcctcggcgcgttcgccctgctgcgactgagcgaagccaacgcgcagctgcgcgagatggccggcaacgacatcccctcggtccagcacctgggcgaggcgcgctcgcagctcggtgagttccgcacctacgaactggcccagctgagcatgctcgaccagccggagaaggtcgccgactacaacaagcgcatggacgacaccgccaaggccgtacatgacgaactggcggcgtacgcggcgctgccggcgctggacaaggagcgcgaactttatcgcgccgccagcacccagctggatcgctacttcgccgccaacaaggcgatgcgcgacgccgtggccgccggtgatggcgcgcaggcccagcagatctccgatgagcagtcacgcccggcgcgccgcgacctgttcgctgcgatgaaggcactgggcacccacatcgccgggcagatggacggcaagatcgccgacgccaacgccacccatcgcaccagcatgatcgccatcatcggctgcatcgtgctgctgtcgctggtggccgccgcgctggccatcgtcatctcgcgtgcagtgaccggcccgctgggcaaggccgtgcatgccatccaggcggttgcccgcggcgacctcagcgtcagcacccaggccaccagcaaggacgaagccggcaggatgctggccgccacgaccgagatgaccgcaatgctccgccgcttcagcgagcagacccagctgatggcacagatgcacgcgggaccggacatcagccatcgcattccggaagatttcccgggtgtctatggccagctggccggcggcatcaatacggtgatcttcgagcacctggatgcgatccgcgatgccattgacgtgctcaaccagtacgccatcggcaatctcaccccggatgcacgccgcctgcccggcagccgcgcgatcctgcacgaatcgatggacgcggccaaggccagcctgctggcgatcaattcgcagatccagcagctggccgcggcggccgctgccggtgacttcagccagcgcggcgacgcacagcgtttccagcatgacttcaagctgatgatcgagcatctcaacaccatgatgcaggtggccgacggcaacctcggccagctctcgcagctgctgcagtcgatcgccgccggcgacctgaccgcgcgcatggaaggccagttcaatggcgtgttcgcgcgcatgcgggatgatgccaacaccaccgttgcacagctgacccagatcgtcggccagatccaggccagcgcctccagcatcaccctggccgccggcgagatcgcctccggcaacagcgacctgtcgcgccgcaccgagcagcaggccgccaacctggaagaaaccgccgcctcgatggaggaactgacctccaccgtgcgccagaacgccgagcacgcccgccaggccaaccagctcgccatcggtgcgcacggtgtcgcctcgcagggcggtgacgtggtcggccaggtggtcaccaccatgtcggccatcgaagcctcgtcgaagaagatcgccgagatcatctcggtcatcgacggcattgccttccagaccaacatcctggcgctgaatgccgcagtggaagccgcccgtgccggcgaacagggccgcggcttcgccgtggtcgccagcgaagtgcgcacccttgcccagcgctcggccgccgccgccaaggagatcaagggcctgatcgacgactcggtcggcaaggtcaacgacggctcggcgctggtgcacaaggccggcgcgaccatgggcgagatcgtcgcctcggtgcagcgcgtgaccgacatcatggccgagatctctgcggcctcgcaggaacagtcggcgggcatcgagcaggtcaaccagaccgtggtgcagatggacgaaaccacccagcagaatgctgcgctggtggaagaagccactgctgcggcacgcgcgatggaagaccaggccgtgcagctgggtgaagccgtggcccgcttccggctggcatcgcagggcacgacggccatcccggcacgcccgctggccgcaccggtaccgcgacagctcgcagccgccgcgcctgcggcaaagccggccccggcacgtgcgctgcgcacggcaacggcccagccggcgctggccacggacggcgactggcaggaattctga

SEQ ID NO: 516620 - DNA, 1989 bp, Stenotrophomonas maltophilia
atgagcatggacctgcaacgcttccacgccaccttcttcgaggagagccgcgaaggcctcgacgcgatggaggctggcctgctggccctggaatcggggcagcaggacgcggagatcatcaattcggtgttccgcgctgcccattcgatcaagggcggcgccggcaccttcggcttcgacgcgatcgccggcctgacccacgtgctggaaacgctgctcgatgagctgcgcgccggcaagcgggcactggaaggccacgccgtcgacgccatgctgtcttcggtggacgtgctgcgcgccctgctgcgcgaagccgaacatggccaggctgccgatccggctgccgtcgctgcggtgaaggcacgcctggaggcggttctgtccggccaggccgcagcgagcgccccggcggccgccgcagccaaggtggacgatacgccggaagcctggcagatcggcttcaccccggcgccgtcgctgttcatgagcggcaacgacccgctgcgcatcatccgcgaactggaacacctcggttcgctgcaggtcgccgcgcgcatggaccgcctgccgggcttcgcgcagctcgatccgctcgaagcccacctggcgtgggacctgggtctggtcggcaaggtgccgcgcagcaagatcgaagacaccttcgcgtgggtactggacgactgcgagctggacatccgtccggccgcaccgccgagcctggccacccaggcgccggccgcggctgctcccgctccggcggcagcgtcgccgtcggcacccgccgcgcctgccgccagcggtggcgccagccaggaagcggaaacctccatccgcgtcagcgtcgacaaggtcgacgcgctgatcaacctggtcggcgaactggtcatcacccaggccatgctcaagcaggtctcgcatgcgctggacccggtccacgccgagagcctgttcgctggcctggaccagcttgaacgcaacacccgcgacctgcaggaagcggtgatcggcgtgcgcatgctgccggtcgatgcggtgttccgtcgcttcccgcgcctggtccgcgacctgtccagccgcctcggcaagcaggtgcggctgcgcaccgtcggcgaaggtaccgagctggacaagggcctgatcgagaagatcgccgatccgctggtgcacctggtgcgcaactcgatcgaccacggcctggaaatgcccgacgtgcgccgcggtgcaggcaaggacgaaaccggcacgatcaccctggcggcctcgcaccagggcggccacattgtcatcgaagtcagcgacgacggtcgcggcctggaccgcgccaagatcctggccaaggccaccgagcgcggcctggcggtgccggacaacccgaccgattcgcaggtctgggacctgatcttccagcccggcttttccacggccgatgcggtcactgacctgtccggtcgtggcgtcggcatggacgtggtccgccgcaacatccaggcgttggggggcgaggtgcagattgaaagcagcctcggcgctggcacccgcacgctgatccgcctgccgctcaccctggccatcctcgatggcatgaccgtggcggtagccggtgagaccctgatcctgccgttggcctatgtgcttgaggcgttgcagccgcaagccgaggacatccgcagcatggccggcgaaggccgcgtgctgcgcgtgcgcggtgaatacctgccgatcctgtcgctgagcgagtactacggctacggcaaccgtgcacccggcagcgaatcgctggtggtggtggtcgaaggcgatggccagaagatcgccctggaagtggacgaactggtcggccagcagcaggtggtggtgaagaacatcgagaacaactaccgccgcatcggcggggtgtccggtgcgaccattctcggcgacggccgcgtcgcattgatcgtcgacatcggcgggctggtgcgttcactgcggatgccgcaggccgcctga

SEQ ID NO: 516621 - DNA, 366 bp, Stenotrophomonas maltophilia; identical to SEQ ID NO: 495283

SEQ ID NO: 516622 - DNA, 309 bp, Stenotrophomonas maltophilia
atgagcactgtcgaactgggtggggatctcggcatcgagagcactaccgagctcaagaaccgccttgcccccctggtggagcaggcaggcgagctgaccctggatgccagccaggtcgcccgcatccacacggccgccgtgcaggtgctgtgtgcgttcgtgcaggcccgccgcaaggcaggcctgggcaccggcttccacggttgcactgcaaccttccgtgacgccgcgcgcctgctgggcgtcacccaggccctcggcctggacgtaacccatgacaacctgaaatctgtggagaacgctgcatga

SEQ ID NO: 516623 - DNA, 1266 bp, Stenotrophomonas maltophilia
atgaacagcactggcatcctcgacgactacctggacgaactgctgggcgaggcgatcgccccggccgccgctccccaccccgcgccgatcagcaccgccccggccacggccaccgaagccgccgccgaacgcgaacccacctgggatgacctgccggccgaggtgatctacgaaaccgaaaccgagagcgttgccgctgcccctgccgtgcacaatgccgcactggaagccgctttcgatgccgcgtccgcgcccgtcagcgtgatcgatgccgaacgcgaacccacgtgggacgacctgcccgctgaagtggtcaacgaaacggatgccgtcgtcgcggccccggccgaggatgaggctgcactggaggccgccttcgaggccgccgccgcgccggccagcgccgggtccaccgaacgcgagccgacctgggatgacctgcccgacgaggtcatccacgaaaccgcgccggcacccgctgcggccgctgcgaacaccggcccggaacccacctgggacgatctgccggacgaagtgatctacgagaccgacccggcggacagccatcgtctcgcccacaccgacagccccggcctgcaggccgccttcgaggcggccgctggtggcgaagacgtgcctgcgccgccgcccgccgcggtcgcagcgccggtgccccccccggcgacacgccctgcaccggccccggccgcacgcgccggcacgccgccgccgcgcgtcgccgtcgatgcacccgcaggcaaccgccccggcacctggcaggagctgcaggcgcaggcccaccaaccggcccgcagcccgcatccgcagaaccgtcgtgccggtgaacgcacctcgcgctggctgcgcctgcgctgtggcacccaggcctatgcgctggaactgctgaaggtccaggaggtcgtgctgccggtgccgctgctgccgttgcgcggcaccgctgccgccatgctgggcatcatgaacctgcgcggccaggtggtcccggtgatggacctgggcctgcacctgggcgcggctgccgccgaggacgacgcccagacccgcatcgtggtgctggaagaagacggcgagaccatcggcctgcgcgtgtcggcagtggaagatgtcgccaacctcaccgattcgcagatcgaacctcccgataccgcacgcatctgccagatttccaacgacctgttccgcggcgtggcccgcgtcagccagcgcccgatgatcctgctcgacgccacacggctgttgagctga

SEQ ID NO: 516624 - DNA, 783 bp, Stenotrophomonas maltophilia
atgcgcatctgggcagtcgccaaccagaagggcggagtcggcaagaccaccaccaccctcgccctcggccgcggcctggccgcgctcggccatcgcgtgctgctgatcgacctcgatccgcatgcttcgctcagccgcgccttcggcgtgccggtggacccgccgccggccggcgtgctggagctgttcggcgcaccgccggcggacctgtccggcctgtgccatgccagcaacatccagggcctggactacgtctgcgcgcagtccgcgctggccacgcttgaacgccgtagcgccaaccaacccggcctcggcctggccctgcagaacgcgctggcgcgccaccagggccagcacgactacatcctgctggactgcgcaccgacgctcggcctgctgatgatcaacgcactggctgccgccgatcgcctgatcattccgacccaggccgagccgctggcgctgcacggcctggatggcatggtccgcaccggcgagatggtcgagcgttcgcgccgccggccgctgccgatctcgatcctgccaaccctgttcgaccgccgcacccgcgccggcaacgaatcgctgcgcaccatgcaggaccgccatggcagccgcgtctgggaagacgcgattccgatcgacacccgcatcagcaacgccgccgggctgaccctgccgagcgtcggcgaagattacccggggcgtggcctggctgcctaccggcgcgccttgaactggatcctcggcgaggatgcccgcgccctggagcaggccgcatga

SEQ ID NO: 516625 - DNA, 1017 bp, Stenotrophomonas maltophilia
atggcccgccgcaagcaccacgaagagcacgccaaccacgaagcatgggcgatcccctatgccgacctgatgacgctgctgctcgccttcttcgtggtcatgtacgcgatctcgtcggtgaacgagggcaagtaccggatcatggccgacgcgctcaccgatgccttcggtggcgcgccgcgcacgatcaatccggtgcaggtgggcaacaagcaggtgcagggtggcggctgggacagcccgtcggtgatcaagtccggcaccaagatcggaccgtccgcgccggcgccctcgcacgacccgacgctgctgccgtcgatggcctcgcagatgcgcatgccggtgtcggtgcacaaccaggagcagatcgcccgtgccgagcgccagctcaacacgattgccgaccggctcaccgccgccctggcgccgctgatcgaccgcggcatgatcagcgtgcgccgcacggaactgtggatcgaggtcgagatcaacagcgacatcctgttccccaccggctcggccgcactggacgtacatgcgcggcagaccctggccagcctggccgaggtgctgcgcgacgtgcccaacagcgtgcgcgtggaaggccacaccgacaacgtgccgatcgccaccgccaccttcccgtcgaactgggagctgtcggccggacgcgccgccagcgtggtgcatctgttcgccgaccagggtgtgcagccgtcgcggctggcgatggtcggctatggccagttccgcccgcgcgaagagaacgacagcgcacagggccgcaaccgcaaccgccgggtgatggtcatcatcctggccgacacctcgcattcggtggacccgctcggccagcgcctgaacgcagccaccggcgccaccggcagcaccgtcaccgaacaggccgccgcaacgccggccagcgcccccacctcccccatcgcaccggtggcgttgccaccggtgccggctggcagccgcgtcggcgccgccgttcccccggcaatgaaggagtaa

SEQ ID NO: 516626 - DNA, 741 bp, Stenotrophomonas maltophilia
atggatagactcagcctcattggactctttctcgccctggcctcgctggtcggtggcagcatcctcaagggcgccggcctggcgtcgttgtggtcgcctgcggcgttcgtgatcgtcatcgtcggcaccgttgccgcgatcctgctgcacacctcgccggcggtgttcaagcatgcgttcaagatcgtgcgctgggtcgtgcgcccgccgcacagcgatcgtcgcgaactgatccagcagatcgtcgagtggagcaacatcgcccgccgccagggcctgctcggcctggaatcgcaggtggaagcgcagcaggacccgttcctgcgcaagggcctgcagctgctggtggacggtgtcgagcccgaatcgatgcggcacatgctggaaatcgaactgggcagccaggaacaccaggaccaggccggcgccaaggtgttcgaagcgatgggcatctacgcaccgacgctcggcatcatcggcgccgtgctgggcctgatcgcggtgatgaagaacctggccgacccgagcaagctcggccacggcatcgctgcggcgttcaccgccacgatctacggcatcgcctcggccaacctgctgttcctgccgatcgccgccaagctcaagagcgtgatctcgcacaacacgcgcgaccgcgaaatggtcatcgaaggcctgatctcgatcgcccagggcgagaacccgcgcaacatcgaaaccaacctctccggcttcctgcactga

SEQ ID NO: 516627 - DNA, 1845 bp, Stenotrophomonas maltophilia
atgagcgcggtatccgacgacatcactgccgatttcatcatcgaggcacaggaaatcctggatcgcctcggcgaacagctggtgtcgctggagcaggcaccgcaggacaccgaacagctcaacgcggtgttccggggctaccacacgctcaagggcggcgcgggtttcctcggtgtcaccgccatggtcgagctgtgccacgccgctgaagaggcgctgggcgctgcacgtgccggccaggccgtgctgcaggcccatcacttcgacgccgcccagcaatcgctggactacctgcagtcgatgctcgatgccgtgtcttccggcaccgagccgggctatgcaccgccggacctgatcgcccagttcgacgtgcatggaggtgcagcagcgcctgccgccgctgccgccgcaccggcggccggtgccggcgacctgatcaccgacgacgagttcgaggcgctgctcgaccagctgcacggtggcaacgcaccgactgcggtggcgccggcaaagaaggccgacgacggcctgatcagcgaagatgagttcgaagccctgctcgaccagctgcacggtggcgccgcacccggcgccaggcccgcggctgcggtggcgccggcaccgatcgccgccccgcgcccggccgccgcaccggcaccggtggccaagccggccgccaagccgctggccgaagccgaacacaccgtgcgcgtggacaccaagcgcctggatgcgatcgtcaacctgatcggcgaactggtgctgtcgcgcaaccggctcaagaccctgcgtgcgcgcctgcgcgacgaggagctggaccgcgccgtgtccaccctggacatcgccaccgcgcgcctgcagtcggcggtgatgcgcacccgcatgcagccggtgggcaaggtattctcgcgcttccccaaggtcgcccgcgacgtcgcccgctcgctgaagaaggaagtggacctggagctgatcggcgccgagaccgagctcgaccgcaacctggtcgaagcgctggccgacccgctggtgcacctggtccgcaacgccatcgaccatggcgtggaaatgcccgacctgcgcgaagcgcagggcaagccgcggatgggccatgtgcggttgtcggcgcagcaggaaggtgactacgtcagcatcgaggtgcaggacgatggcgccggcatcgatccggaaaagctgcgcgcgaaggcacgcgagaagggcctgatcgatccggaagccgccgcccgcctgagcagcgaggagtgcctgcacctggtgttcctgcccggcttctcgaccaagcagcaggtcacggatatttccgggcgcggcgtcggcatggacgtggtgcagtcgcgcatccgcgaactcagcgggcagatccagatccagtcggagctgggccgcggcagccgcttcctgatccgcgtgccgctgaccctggcgatcctgccgaccctgctggtgcaggccggcgaggacgtctatgcgctgccgctggcgcgcgtgatggaggtactgcacgcgccgcccacctcgctgggctggttcgatggccgtgccgtgctcgaccgccgttcgcacacgctgccactggtcgatctgcggcagtggctggatgtgacgccggccgcatcgaccctgctgaccatcgtggtgctgcaggccggcgaagcgcgcttcggcctggtcgtggaccaggtccgtgggcgcgaggaagtggtcatcaaaccactgccgaaggccctgcgcggcctgcgcggttacgccggtgcaaccttgatcggcgatggtcgcatggcgctgatcctggatgtggatggcctgcgcagcccgcacgactga

SEQ ID NO: 516628 - DNA, 606 bp, Stenotrophomonas maltophilia
atggataccacggtcgacaagaacgccctcgccctgcgcctgcaggaagccctggatgccctggagtccggtgacgaagccgcctggcggcaacgcatcgacggactggtcgcgctgcgcacgcagccgatgatgagcggcctctcgcggctggcccgcgagctggggcaggccctgggcgaactgccgaccgtgcccagcgaggccggcgaactggacgatgcgtgcgcacgcctggaccacgtggtggcgatgaccgaacaggccacccaccgcaccctggacctggccgaggaatgccgcagcctgaccgagcagctgcgcgccgaaggcctgcagccaggccaggacgcgcagctggagcgcatccgccacaacctgaccgagatcgccctgacccagagctaccaggacctgaccgggcagatcatccgtcgcgtggtcggcatcgtccgccgcgtgcatgaaggcttcggcgcgctcggcctgccgccggaacagcatcgcaccgacccggaactggccgggccggcactgaagggactggaccgccacgcggtctcgcagaacgacgccgacgacctgttgtcggatctggggctgtaa

SEQ ID NO: 516629 - DNA, 381 bp, Stenotrophomonas maltophilia
atgcgcatcctcatcgtcgacgacttctcgaccatgcgtcgaatcgtcaagaacctgctgggcgatctgggcttcaccaacaccgccgaagccgaggacgggcatgccgcgctgtcgctgctgcagagccagcccttcgatttcgtcgtcaccgactggaacatgccggtgatgaccggcatcgaactgctcaaggcgatccgtgccgacgccaagctgaagaccctgcccgtgctgatggtcaccgccgaagccaagcgcgagcagatcatcgaagcggcccagaacggcgtgaacggctacatcatcaagccgttcaccgcgcagacgctggaagagaagctgggcaagatcttcgaacgcctggcggccagcgcctga

SEQ ID NO: 516630 - DNA, 1683 bp, Stenotrophomonas maltophilia
gtgcagaccaccgaccacccgagttctccgaccgccaccccgccgtcttcgccccgtgaccacagcatgaaaatcaaacgattcgtcgccgccgacatgcgctcggccatgaacctggtgcgcaaggaacatggtcctgacgccgtgatcctgtccaaccgccggatcgaggaaggcatcgagatcgtcgccgccgccaactacgacgagagcgccgtgcagcgtgcactggaagcctcgcgccgtgacgtcgcaccgccgccggcacccaagccgcgcaccgccgccgacgcggtgatcgccgccgtcacccgccgccgcagcagcaccccggcgccggaaccggtcgcggccaccacctcggcagtggccgccctcgcccgcgccgccgtcggtgccaccggccgcaccctggacagcgccgacgagatcgtgccgacccggggcagcaccggcttcgccgccaccctggcccgcgccgccgtcaacgaaccggcaccgccggaccagatcttcgccccgttcgccgaggccatcgttgcaccggccgccaccgtgccggccaaccgcgcgcgcttccagatcgacccgccgcacgaggcgcatcacgaaagcgtggccccggccgtgctgccgccgccgctgccgaccgctgccgtgatcgacgcgcagcccgggatcgccgccagcgaaccggcagcggtcgaagccgctatcgaggccagcccggcccccatgctggccccggcaccgacgctgaccgtggttgcccaggacgacgccgagatccgccagctgcgccaggaagtggccggcatgcgccaggtgatcgagcgcgagatgaaccgcttcaccgatgagcgcctgcgtggcagcccggtgcgcgccaccgcgctggacctgatggacgagtacggtttcgacgccgggctggcccgcgacgtggccatgcagatcccgctggaaaccgaagcccatcgtggccgcggcctgatgctggggctgatctcgcgcaagctgccgatcgccccggtcgacccgctggaagaaggcggcgtgatcgcgctggtcggcccgaccggcgccggcaagaccaccaccatcgccaagctggcctcgcgcttcgccgagaagcacgccccgcgtgacgtcgccctggtcaccaccgacaccacccgcatcggcgcccgtgaacagctgtatggctacggccgccagctcggcatcgccgtgcacgaggccaacagcggcaccgacctggaccagctgctggaacgcctgaaggactacaagctggtgctgatcgataccgccggcctgggcccgcgcgaccgtgccctggccgcccagctgcagtggctgcgcgccgcgcgccaggtgcgcaccctgctggtgctgccggccaacaccagcttcggcgacatggacgaggtggtgcgccgcttcggtgcggccaacctgcagggcctggtgctgagcaagctggacgagaccggccgcttcggcaacgccctgtcggtggccgtggaccacgccctgccgatcacctgggtgaccgatggccaggacgtcccggaggacctgcaccgggccagtgcagccaatcttgtacttcgccttgaagatttgcgccgagcggccgatatgccctgcaacccggagttgaaccatgccgtcgcgtga

SEQ ID NO: 516631 - DNA, 2109 bp, Stenotrophomonas maltophilia
gtgagcgcccagccctccgccggtttcaacacccgccgcgccctggaaatgatccgccagggccttggcgcgccgctgatcgtgctggccctgctggccatggtcgtggtgccgctggccgcgccggtgctcgatgcgctgttcaccttcaacatcgccatctcgctgatggtgctgctggcggtggtctacgtgaagcgcccgctggacttcaccatcttcccgatcgtgctgctgatcaccaccatgctgcggctggcgctgaacgtggcctccacccgcgtgatcctgctgaacggccagaacggccatgatgccgcgggcaaggtcatcgccgccttcggtgaattcgtgatcggcggcaactatgcggtcggcatcgtggtgttcgcgatcctgaccatcatcaatttcgtggtcattaccaagggtgccggccgcgtttcggaagtgaccgcgcgcttcatcctggacgcgatgcccggcaagcagatggcgatcgacgccgacctcaacgccggtttgctgacgcgtgaagaagccaagctgcgccgcgaggaagtgcgtgaggaagccgacttctacggtgcgatggacggcgccagcaagttcatccgcggcgatgccattgccggcatcctgatcctgttcatcaacatgctcggcggcctggccgtgggcgtgctgcagcatggcatgccgttcggcgaagccgccgccacctacaccctgctgtcgatcggtgacggcctggtagcgcagctgccggccctgctggtctccagcgccgtggccatgctggttacccgcgcctcgcgctcgcaggacatggcccaggccatgaccggccaggtgttcggccagtaccgtgcgctggcgatcaccgccggcatcatcggcgtggtcggcctggtgccgggcatgcccaacgtcgctttcctgacgctggccgcgatcctcggcttcatcgcctggaagctgtaccgcaagggcaaggcgccggctgccgatgcggcaggcggtggcaccgatgccgccgcactcaacgcactcggccgcccggccgcaccggcaccgactgccgaactgagctgggacgaactgcgcccggtcgatccgctgggcctggaggtcggctaccggctgatcccgctggtggacagcaaccagggcggcgaactgatggcgcgcatcaagggcgtgcgccgcaagctgacccaggatgtcggcttcctgatcccgtcggtgcacatccgcgacaacctggaactgccggccaacggctaccgcgtgctggtgcacggcgtgccggtggccaccgccgagatccaccccgaccgcgagctggcgctggacccgggcagcgcgctcggcgcgctggaaggcatcgccggcaaggaccccgcattcggcctggacgccacctggatccagccgcaccagcgcgcccaggccgaaacgctgggctacaccgtggtcgatccggccaccgtggtcgccacccatctgtcgcacctgatccgtgagcacgcgccggaactgctcggccacgaagaagtgcagcacctgctggccaacctggccaagagcgcgcccaagctcgtcgaagatctgacgccgaaggcgttgccgctgtcggcggtggtgcgcgtgctgcagaacctgctggtcgagcgcattccgatccgccagctgcgcaagatcgcggaggcactggtcgaacatgcgcccagcagccaggacccggccgtgctgaccgccgctgttcgcaccgcactgggccgcttcatcgtgcaggagatcgccggaatgtcggcggagctgccggtattcaccctcaacccgcaattggaacgtgtcttgcaggagtccacgcagggcaacggcgccgcgctggaacccggactcgctgagcgactgcaccagagcctggccgaatgtgtcagcaagcaggaagcccgcaacgagcccgcggtcgtgctggtacctggcccggtgcgcgccgcgctggcccgcctggtccgccacagcgttccgtcgctgtcggtcctggcctacagcgaggtgccggaggacaagcgcctgaagctggtcggaacgatcagctga

SEQ ID NO: 516632 - DNA, 1131 bp, Stenotrophomonas maltophilia
atgtccgagaacgaatccgccggcgaaaagaccgaacaaccgaccgaaaaacgcctgcgcgatgcccgtgaacagggcaacctgccgcgctcgcgcgaacttggcaccgccgccgtgttcggcgccggcgtgctggcggtgatggccatgagcggctcgatcggccgtggcgccacggcctggatgaagcacgcgctcagccccgaacagagcctgcggcagaacccgaaggaactgttcggccacttcggcgacctgctgctgcagttcatgctggtgatcgcaccgctggtgctggtctgcctgctggccagcttcgtcgccccgctggtgatgggcggcctgcgctggtcgcagaaggcgttgctgcccgacatcaaccgcatgaacccgatgagcgggctcaagcgcctgtatggcccggaggcgattgccgaattcaccaaatcgctgctgcgcgtggccttcgtcggcgtcgccgccgggctggtggtctggaccggcttcgacaccctgcgcgggctgatccaccacccgctggaaaccgccatcaccgatggcctgggcttcaccctgcgcctgctgctggccaccgccggcgcgatgctggtgctggccgccatcgatgcgccgtaccagcgctggaactggacgcgcaagctgaagatgacccgcgaggaactgcgccgggaaatgaaggaaagcgagggcagccccgaggtgaagggccgcatccgccagctgcagcagcagatggccaaccgccggatgatggaggcggtgcccactgccgacgtggtggtggtcaaccccacccactacgcggtggccctgaagtacgagggcggcgccatgaacgcccccaccgtggtcgcgctgggcgtggacgaaaccgccctgcgcatccgtgaagtggccgacggcaacaaggtggcgatcgtctccgccccgcctttggcacgcgccttgtatcgggaaggccaactcggaaaggaaatccccgtgagactgtattcggccgtcgcccaggtcctgtcctacgtctaccagctgcgcgcctggcgcactggcccgatgccggacgccccgcacatccaggtggatgaattcggcaagggaggccgcccgtga

SEQ ID NO: 516633 - DNA, 2133 bp, Stenotrophomonas maltophilia
atgctggtaggcacgtacaacccgtggctggtggcgatctcgctgctggtcgccgtgatggcttcatacaccgcgctggcgatggccgggcgcacggtgaccgccccgggcaggggcgcggcctggtggtggcggctgggcggcggcttcgccatgggcctgggcatctggtcgatgcatttcatcggcatgctggctttcgacctgcccattccattgggctacgaccttcccatcaccctgctctcgcttgcgcttgccatcgcctcatcggtgttcgcgctgtggctggtctcgctgcgcaccctgccccacccgcgattggcggtcggcgccctgctgatgggcaccggcatcgccggcatgcattacgttggcatggctgcaatgcgcatgcagccgggcatcgactacgacccgggttggttgctgttctcgctgatggtggcggtggctgcctcctggaccgcgctgtacgtggcgttccggctgcgcgcccagcgcacccgcatcggtgatcgactggcggcggcgggcctgctcggcctggccatcgtcggcatgcattacaccggcatggccgctgcgcgcttcccggaaggcagcgtctgcggcgcggcggtcggcgatggcctgcagaacgagtggctggcgatgctggtggtagtgctgaccgtggcgatcctggccgtggtgctggtggtctcatggctggaccagcgcgtggaagcgcaactgctgcggctgcgcaattcgatgctgagcacctcgttgaccgacgcgcagcaggaactgacccaggccgcgctgcacgatcctctcacccgcctgcccaaccgcctgctgctgcagcggcgcatcgtgcaggcactggccgaggccgaacagggcggcaaccgcttcgcggtgatgttcatggacctggacggcttcaagcaggtcaatgatgcctatggccatcaggccggtgatgcgctgctggtggcggtggccgaacgcacccgccagctgctgcgcccgcacgatatgctggcacggctgggcggcgacgagttcgtgctggtggtgcgcatcgagcacgacgaggacctgccgaccctggcccggcgcatcctgcaggcggtgggcagcggcccgttgctgccggacaacgaactgcaggtgaccgccagcatcggcgtggcgatctgcccggaccacgccgccagcgagcgccagttgatggccttcgccgacgcggcgatgtaccaggccaaggagtccggtcgcaacgccttcgtgctgttctccgactggatgaacgacagtgccgagcagcagttccggctgctggccgacctgcgccgcgccatcggcagcgagcagctgttcctgcactatcagccgaagatccgcgtggccacgcagaaggtggccggcgccgaagcgctgatccgctggcgccatccggaacacggcctgattccccccgaccgcttcatccgcctggccgagcgcagcggtgcgatcaacgagatcgggcgctgggcgctggaccaggcctgccagcagctgcggcgctggcacgacgccgggcatgaaagctggtcgatgtcggtgaacctgtcgccggtgcagttcagttcgccgcacctgctgcaggatgtgcgcgaggtgatcgagcgccatggcattgccccgcgccacctggtgctggagatcaccgaaagcaccgtcatgcgcgataccgataccagccttcgcctgctgcaggcgctgtcggcgctgggcgtgggcatctccatcgatgatttcggaaccggctattccagcctgctgtacctgaagcggctgccggccaccgagatcaagatcgaccatgcgttcgtgcgcgacctggaacacagtgccgaagacgtggtgatcgtctcggcgatcgtggcgctgggccatgcgctggacatggacatcgtcgccgagggcgtggagaccgccgcgcagcgcgcctacctggagcgcctgggctgcgacttcctgcagggatacctgctgggccgcccggtggatgcggcgcgcttcatgcagctgcacgacctgccccggccgcgggtggaactggcgcagagcccaccgccgcaatacccgcccggctga

SEQ ID NO: 516634 - DNA, 780 bp, Stenotrophomonas maltophilia
atgcgtgtcacccgtacccgtgttgccaccctgatgccgtggctgctgttgcttgccctgtgcctgttgccggtgctggcgttcgccgcgcccggcgccccggccaccccgctgccggacgtcaacgtcggcaagatcggcggccagccggtcagcctgccgctgcagaccctgctgctgatgaccgcgatcaccctgatcccgtcgatgctgctggtgctgacctcgttcacccgcatcatcatcgtgctgggcctgctgcgccaggcactgggtaccggccagacgccgtccaaccaggtactgctgggcctggccctgttcctcaccgcgatggtgatgatgccgacctgggacaaggcgtggagcacgggcatggcgccctatctcaacggcgacattgacttccagaccgcctggacattgaccacgcagccgctgcgcgggttcatgctggcgcagatccgcgagaccgacctgatgaccttcgccggcatcgccgggcacggcacctacgccagccccgatgcgatcccgttcccggtgctggtcgcctcgttcgtcaccagcgaactgaaaaccgctttcgagatcggcttcctgatcttcattccgttcgtgatcatcgatctggtcgtcgccagcgtgctgatgtccatgggcatgatgatgctgtcgccgatgctggtgtcggcgccgttcaagatcctgctgttcgtgctggtggatggctgggtgctgaccgtgggcacgctggcggccagcttcaatcccgcgtga

SEQ ID NO: 516635 - DNA, 420 bp, Stenotrophomonas maltophilia
ttgagcctgctggcctccaccctgctggcggtcggcaagaccgcagcgccgatcggcccgcaggtcggccagcacgcggccgccgcacccagcctgttcggtgcggtgctggcgctgctggcggtgctggcgctggtgatcggcctgggctggctgctcaagcgcatgcccggcagcggcttccgcccggccgaaggcatgaagctggtggccagcctcagcgtcggcgccaaggagcgcgtggtggtggtggaggtcaacggccagcaattgctgctgggcgtcactgccggcggcatcaacaccctgcataccctgcccgaaccgttgccgccaccggcgccggtgcgcgtgccggatttcaagaacctgccgaatttcgcccagctgctgcagcagcggctgcgcaaggacccctga

SEQ ID NO: 516636 - DNA, 336 bp, Stenotrophomonas maltophilia; identical to SEQ ID NO: 513248

SEQ ID NO: 516637 - DNA, 1005 bp, Stenotrophomonas maltophilia
atgaatgatctgctgtcccaggacgagatcgatgccctgctccacggcgtggacagcggcgcggtcgagaccgatgcggaacccccgtcaggcgaagcgcgctcgtacgacttcgccagccaggaccgcatcatccgtggtcgcatgccgaccctggaaatggtccacgagcgcttcgcgcgcctgtggcggatcggcctgttcaatctgatccggcgctcggccgagctgtcggtgcgcggcatcgaactgatcaagttcaacgactacatgcactcgctgtatgtgccgaccaacctgaacctgatccgcttcaagccgctgcgcggtaccggcctgatcgtgttcgagccgaccctggtgttcgccatcgtcgacaacttcttcggcggcgacgggcgctacccgacccgcatcgagggccgcgaattcacggccaccgaaatgcgggtgatccacctgctgctgaagcagaccttcgccgacctgcgcgaagcgtgggcaccggtgatggacgtcgacttcgagtacatcaactcggagatcaacccgcatttcgccaacatcgtgaccccgcgcgagtacgtggtggtgtgccgcctgcacgtcgagctcgacggcggcggcggtgacatccacgtcaccctgccctactcgatgctggaaccgatccgcgaactgctcgacgccggcatccagagcgaccgcaacgaccgcgacgagagctggggcaagaccctgcgcgagcagctcaacatcgccgaagtcaccctgtccagcgtactggccagcaagcgcatgaccctgcgcgacctgacccagctgaaggtcggcgacatcctgccgatcgagctgagcccgcaggtgccgctgtgcgtggagaacattccggtgttcaccggcgagttcggcatcgccaacggcatgaacgccgtgaagatcaccgctacccatccgccgggcacccgcccgcgcgtacccgtcatccaggaagacccgcaatga

SEQ ID NO: 516638 - DNA, 516 bp, Stenotrophomonas maltophilia
gtggccgcagccgctgacaaaaccaagaagaccgccgagaaggacaaggccgccaagccgcgtagtccgatcctgatcaccgcactggtggccgtactggccgccgctgccgctggtggcggcgtgtggttcttcacccagtccaagcacgaagagaagaccgcgcaggcgccgaagaagagcgcgaccccggccccggcacagtacttcgcgctggacccggcgttcgtggtcaacctcaatggcccggtcgacggcccgcgctacctgcagctggaggtccagctgatgacccgcgacccggccgcgctggaagcgatcaagacccatgccccggccatccgcgcgcgcctgctgatgctgttctcgcaggtcagcccggaccagatcgccgatgtcgccggcaagcagaagctgcaggccagttcgctggtcgaggtgcagaaggtgctcaaggccgagaccggcagcaacggcgccgacgatctgctgttcaccagcttcgtgacccagtaa

SEQ ID NO: 516639 - DNA, 1167 bp, Stenotrophomonas maltophilia
atgcccgccccgctcgccagcagcgccaacccggccacgcccgccaccagcaacagtgccgcacgcgccgcgcgcagcgaaggcgcaaaggacttcagccagctgctgcagggcggtgcgccctccgcgcccgcgcctgccggcagcgctaccgcaccgacgccgtccccgcccagccagccatcgaccgccgacagcaatggccaggcaccgggcgaacgcagcgcggacgcggaagcggcaactgccgaaacgccgccgctaccgcccgttgccctgcccccggctggacccggcaccgacaaggacaagcccgccgcgaccgaggacgccccgtggccaccgatcggcctggccggcctggtgctggcgatgccgacgcctgccgatccggccgtcgctctggcgggcagcgctgcaccgtcactggccagcggtacggcgctacccaccactgcccccgccgcgaccccgacactgcctgcagccgcgccggcagcggcaaccgcagcccccgtggcggccgacggcaaaccggcggcgaccagcgcggaggatgccaccgcgctgccattgccggagatgagcctgcccggcaagcgcagcgagcgcggcgaaggcagtgacgtggccgccgttggcgaccgcgcaggtacaccgttgctgcacgcaccggcagcggccgccgtgcaggacctgaaggcggcgctcgccaccggcaacgcgatcttcaatggcgaacccacgcccaagcccgttctgggtgacgatggcttcgaccaggccatcggcgcacgcctgggctggctggccgaccagaagatcggccatgcccacatccgcctgagcccggacgacatggggccggtcgacgtgcgcctgcagttgaacggcgacaaggtgcatgccagcttcagcagcccgcacgtggacgtgcgccaggcactggaaagcagcctgccgcgcctgcgcgagctgctgggcgaacagggcttccagctggctcacgccgatgtcggccaccacgcgtctggtggtgacggcaatgcgtcgggacaacccggtggcggcggcatgaccggcgacggagaaccgacgccgggcgatgccagcgtgtcgtccgcgcagttgatccgccagcgcggcttgctggacgcctacgcctga

SEQ ID NO: 516640 - DNA, 468 bp, Stenotrophomonas maltophilia
atgaaccagtccaagcgcatcgatcccctgctcaagcgggcccaggaacacgaggacgcggtcgcccgcgacctggccgaacgccagcgcgtgctcgacacccatctgtcgcgcctggacgaactgcgccgctatgccgaggagtacgccaacgcccaaatggcagcgaccagcccggcacagctgctgaaccgccgcgccttccttgatcgcctggacagtgcggtcgagcagcagcaggccacggtcaacggcaaccgcgaaaaagtggaggccgagcgcgcgcggctgatcctggccagccgtgacaaggcggtgctggagcagctggccgccagctaccgcgcgcaggaaaaggtggtgaccgaccgccgcgaccagcgcgagatggacgacattggcgtgcggcgcgcgcgcctagtgcaggccgaagaccaggacggcgccgagcagggaggccgcccgtga

SEQ ID NO: 516641 - DNA, 1386 bp, Stenotrophomonas maltophilia
atgagcgccgcaccgcaaacgacgccgccgccggccgactgggccgtggcccgcaacctgcgcctggcccggcgcctggacggcctgcgcgtggataccgcgcatggccgtgggctgatccgcgagggcgtgctgcgccgcgcggtcgggctcaccctggaagcggtcggctgcgaggcgccgctgggcgccagctgcaaggtggaagtggtcgatggtggctgggtcgatgccgaagtggtcggctttgccggtgagcgcacctacctgatgcccagcgccgaactgcacggcctgctgcccaacgcccgcgtggtaccgtcggcgcggcgtggcggcgtggaagtgggtgaaggcctgctcggccgcgtcatcgacagcgacggcgtgccgctggatggcaagggcccgatccgcgcagaagggcatgtcggcatggccggcgtgtcgatcaatccgttggcgcgtgaaccgatcacccagccgctggacgtgggcgtgcgcgcgatcaacgcgctgttgccgatcggccgcggccagcgtgtcggcctgttcgccggttccggcgtcggcaagtcgacgctgctgggcatgatgacccgctacaccgctgccgacgtgatcgtggtcggcctgattggtgaacgaggccgcgaagtacgcgatttcgtcgagaccacgctgggcgaggaaggcctgcgccgcgccgtggtggtggccagccccgccgaccggccacccttggcgcgcctgcacggtgcctaccgtgccaccgccatcgccgagtggttccgcgaccagggcctgaacgtgctgctgctgatggactcgctgacccgcttcgcccaggcgcagcgcgagatcggcttgtcggtcggtgaaccaccgaccacccgcggttacccgccctcggtgttcgccaagctgccggcgctggtcgaacgcgctggcaacggcgcaaagggccgcggctcgatcaccgcgttctacaccgtactgaccgaaggcgatgatccgcaggatccgatcgccgacgccgcgcgcgcgatcctcgacggccacatcctgctctcgcgccgggtggccgacagcggcctgtacccggccatcgacgtcgaatcgtcggtcagccgcgtggtcacggaaatcgccgacgagccgtggcgcctgcgcatccgcaagttgaagcgactggtctcggcctactcggccaaccgtgacctgatcgcgatcggtgcctaccagcgtggtaacgacgcggccaccgacgaagccctggaacgctggccggaaatcatggagttcctcggccaggacgttgccaaggccgcagatctcccgcacagccaggcggcgctgcagcgcctggtggaacaagagagttaa

SEQ ID NO: 516642 - DNA, 642 bp, Stenotrophomonas maltophilia
gtgagcaacgtcgtgcgctggcttgccccggacctgctggcccagcccgaaccggcgctggagcaggaggacgcgttcgaactcaccgagccggacccggaacacgaaccggagccgccgctgcagctgccgaccctggaggaaatccaggcgatccaggacagcgcggagaaggaaggattcgatcagggccatgccgaagggtacggccagggccaggcggaggtgcgtcgcctcgccgcgcagatcgaaggcatcctcgacaacttcagccggccgctggtgcggctggagaacgaagtggtcggcgcccttggtgaactggcggtgcgcatcgccggcgcgctggtcggccgcgcctacgaggccgagccggcactgctggcgcagctggtcggcgaagcgattgacgccgtgggcggcagcacccgcgaggtggaagtgcggctgcacccggatgacatcgccgcgcttgccccgctgctgaacctgtcgccggcgcagcgcctggtaccggataccagcctcagccgtggcgacctgcgcgtgcacgccgaagccgtacgcatcgacggcaccctggaggcccgcctgcgcggtgcgctggatgcggtgatccgccagaccggggcgacggcatga

SEQ ID NO: 516643 - DNA, 1002 bp, Stenotrophomonas maltophilia
atgactgaggccgcactgactggcgtgcagcgcgccgccgtactgctgctttcgctgggtgagctggatgcggccgaagtgctgcgccacatggaacccaaggaggtgcagaagatcggcatcgccatggccaccatgaccgacatcacccgcgagcaggtggaacgggtgatggaccagttcggccaggagctgggctcgaagacctcactcggcgttggctcggacgactacatccgcaacatgctggtgcaggcgctgggcagcgagaaggccggcaacctgatcgaccgcatcctgctcggccgcaacaccaccggcctggacgcgctgaagtggatggacccgcgtgcggtggccgacctggtgcgcaacgagcacccgcagatcatcgccatcgtgatggcgcacctggaaaccgaccaggccgccgacgcgctgaaactgctgccggaccgtacccgcgtggacgtgctgctgcgcatcgctaccctcgacggcattccgccgaacgcgctcaatgaactcaacgagatcatggagcgccagttcgccggcaaccagaacctgaagtcgtcgaacatcggtggcgtgcagtgcgcggccaacatcctgaacttcatggacagcggccaggaccaggcgatcctgggcgaaatcgcccgcatcgacgcgccgttgagcaaccgcatccaggacctgatgttcgtgttcgacgatctggtcgacctggacgaccgcgagatgcagctggtgctgcgcgaggtgagcggcgagcgcctgggcctggccctgcgcggcgccgacatcaaggtgcgcgacaagatcacccgcaacatgtcgcagcgcgcggccgagatcctgctggaagacatggaagcccgcgggccggtgcgcctgtccgacgtggaaggcgcgcagcgcgagatcctggccatcgtcaagcgcatggccgatgaaggcaccgtcaccatcggcggcagcgcggaggccatgctgtga

SEQ ID NO: 516644 - DNA, 1647 bp, Stenotrophomonas maltophilia
atggcactgacgctctccaaggacagcctgaacgccgagaaggccgggcaatggttcgaccgcctgcagagtctgcagatcacccgtcggctgggcctgatggcgatgatcgcggtggcggtggcggcaggcctgtccgtgttcttctggtcacagaagccgggcatggtcccgctgtacaccggcctggaccagaaggctaccgctgaagcgaccgacctgctgcgcgccgcgcagattccgttcgcgctcgacccggccaccggtggcatcaccgtgccggaaaagaacctgcatgatgcccgcctgaagctcgccggctccggcctgaccgacagcggcaagctgggcttcgagctgatggaacgcgacccgggctttggtgtcagccagttcgtggaaagcgcgcgctaccagcacgcgctggaaaccgagctgtcgcgcaccatcaacacgctgcgcccggtgcgcgattcgcgcgtgcacctggccattcccaagcccagcgcgttcacccgccagcgtgacgtggccagcgcctcggtcaccctggaactgcgtggcggccagcagctggaacgcagccaggtcgatgccatcgtacacatggtcgccgccagcattccggacctcgcgccggaacgggtgaccgtggtcgaccagagcgggcgcatgctcagcatcaccgacccgaacagcgaggcggcggtcaacgcggcccagttcgagcaggtgcgccgccaggaaacttcgttcaaccagcgcatccgcgaactgctggaaccgatgactggccccggccgcgtcaacccggaagtgagcgtggacatggatttctcggtgaccgaggaagcccgcgagctctacaacggcgagccgcagaagctgcgcagcgagcagatgagcgagaacaccaccagcacgccgggcccgcagggcgtgccgggtgcgaccagcaacagcccgccgggccagcaggccgcaccggccaccgcgcaggccccgaccgaaagcagcaagaatgcgacccgcaactacgagctggaccgcaccctgcagcacacccgccagccggccggccgcatcaagcgcgtctcggtggcggtgctggtggacaacgtgccgcgcgccggcgccaacggcaagatgagcccgcagccgctgtcggctgccgaactgacccgcgtcgaagcgctggtcaagcaggccgtcggcttcaacgccgagcgtggcgacaccgtgtcggtgatgaatgccccgttcgtgcgtgacaccacgccggtcgaaggcccgtcgtggtgggagctgccgtgggtgcacgatgccggccgcatgctgcttggcgcggtggtggtgctggcgctgctgttcggcgtgctgcgtccggcgctgcgcgcgatcaccggccagagcaggaagaacgacgaacaggcactcgagccgcataccgcggacgtgcagctggtcgatgacgatggcatgccgctgccggcgctgggcgctgaccgggccagcctgggcgggccggaagcactggccctgccggtggattcatatgaggaacgattgcggatggcgcgtgaagccgtgaagaccgactccaagcgcgtggcccaggtggtcaagggttgggtggcaaatgactga

SEQ ID NO: 516645 - DNA, 366 bp, Stenotrophomonas maltophilia
atgtcccactccgtcacttcgatcctttcgcagatccgctcctatcagacccagatgggacagccggcgctcaacccgctgggcgaaacgccgcgcagcaatgccctgccgggcacggtgctggatgcgccgcaggtgcagccggccagcttcaccgaaaccctgcgtggtgcgattgccggcgtcaacgatgcgcaacagaaatccggcgccctcgccaaggccttcgagatgggcgaccccagcgccgacctggccaaggtgatggtcgcctcgcagcagtcccagatcgccttccgcgccaccgtggaagtccgcaaccgtctcgtccaggcctaccaggacgtgatgaacatgccgctgtaa

SEQ ID NO: 516646 - DNA, 417 bp, Stenotrophomonas maltophilia
atgcatcacctgatcctgctcgccgtcctgctctgcccggccctggccaccgcggccaactgcaccctgcccgccacgctcgaccaacgccagttcaccaacctcagcgacccgttgtacgcgccggacaaccccaacgccggacgcatggtgcagctcggctttgctggcagccagtacgtgctggacatcctcggcaccgacctccgcatcgccggcagctaccgctaccagcgcctggccccgcatatcgcggaaatccagatgaccgaggcccatccggccggcctcgcccactacaccctgctgctgacctgccagagcgaccgccagggccgtttcatctacacccagcatgacggccccatcgcaccgcgccagcgccagaattccggccgatggaccctgcagccatag

SEQ ID NO: 516647 - DNA, 1506 bp, Stenotrophomonas maltophilia
gtgagcgaatcgcgcatcctggtgctggacaacgacgccgtgcgcgcagagcgcaccgttgccctgctggaattcatggacttcaacccgcgctgggtgtccgacgcggccgacttcgacctgggccgccagcgccagaacgactggatggcagtgatcgtcggcagcctggatgacagcgccgccagtaccgcgctgtaccactggctgggcggcagcagcctgccgccgccggtgctgctggccgatggtgatgctgcagcgtttgcccagcagcacggtctgcacgaggccaacatctggccgctggaaacgccgctgcgccacgcgcagatggaagccctgctgcgccgcgccagcctcaagcgcctggatgccgagcaccaggccggcgccgcgcaggatcaaggcccgaccggcaacggcccggcggtcaccgcgctgcgcaccatgatcgagcaggtggccgcgttcgacaccaccgtgctggtgctgggcgaatccggcaccggcaaggaagtggtatcgcgcgccatccaccagcgctcgccgcgccgtgatggcccgttcgtggcaatcaactgtggcgccattccggccgacctgctggaaagcgaactgttcggccacgagaagggcgccttcaccggcgcactgaccgcgcgcaagggccggtttgaaatggccgagggcggcaccctgctgctcgacgaaatcggcgacatgagcctgccgatgcaggtgaagctgctgcgcgtgctgcaggaacgcagtttcgagcgcgttggcggcaaccagaccatccgctgcaacgtgcgcgtggtggccgcgacccaccgcgacctggagacccgcatcgccgagggcaagttccgcgaggacctgttctaccgcctcaacgtgttcccgatcgacgtgcccgcgctgcgcgaacggcgcgaagacctgccggcgctggtggaaaccatcgccgcgcagctggcccgcaccggccgtggcgaagtgcgcttcaccccggaagccctgcaggccctggccggctacgagtggccgggcaacgtgcgcgagctgaccaacctggtcgagcgcctggcggtgctgcatccgggcggctcggtgcgcgtgcaggacctgccggcccgctatcgtggcgatgccgcgctggcagcggtggccgcagcggtacctgcagcgccggttgccagcgaagaacgcctggacctgcgcagcttctcgttccacacgcccggcagcggcaaccagccggcgctggagcacggcatcgccgtcaatcgcgcagccgccccggcggcactgcccgacgacggtctggacctgcgcaaccacatggccaacatcgaactggggctgatcaacgaagcactggaacgcacccagggcgtggtcgcccacgccgcccagctgcttggcctgcgccgcaccaccctggtggaaaagctgcgcaagtacggcatcgagcgcgagcaggccgaactggccggctga

SEQ ID NO: 516648 - DNA, 378 bp, Stenotrophomonas maltophilia
atgaacaagctcacggtcctgctggtcgatgaccacgagggcttcatcaacgcggcgatgcgccatttccgcaagatcgactggctgcagatcgtcggcagtgccggcaacggcctggaagcgatcgagcgctcggaaacgctgcgcccgcaggtggtgctgatggacctggcgatgccggaaatgggcggcctgcaggccacccgcctgatcaagtcgcaggacgatgcaccgtacatcgtgatcgccagccacttcgacgacgccgagcaccgcgaacacgcgctgcgcgccggcgccgacaactttgtcagcaagctgtcctacatccaggaagtcatgccgatcctggaaggcctcagggaggatcgatcgtga

SEQ ID NO: 516649 - DNA, 1410 bp, Stenotrophomonas maltophilia
atgaaggctgcactctcgacccagctgggccagcaactccacctcaccccgcaactgctgcagtcgatccggctgctgcagctcgatggcctgcacctggagcaggaaatccagcgcctgctggactccaacccgctgctggagatcgaggaggccgaagcgcccgctgccgacgccaccgaagcgagtgccaccaccctcgataccgccgcctttgacgaactgcccgagccgtcgatgtgggacgtggccggcgccagttggcaggacggcgacgacgatcgcatggcgcgcatcgccgccggcgagtcgaccgacccgcagctgcgcgtgctgcagcgcctggcgctggacatggacgaccgccagctggcggtggccgcgttctggctggaccactgcgatgaagccggctacctgcaggcgccgctggcccagctgcagctgctggccagtgcccagttcgacatcaccgccgacggcgtggaagccatccgccagcagctgctgcatggcgagcccgccggcatggccgcgcaggacctgcgcgaaggcctgcaggcgcagctgcgcagcctgcatggcgtggtgccggcccgccacctggcggcacgcattctcgatggcgcactcgacgcgctcgcggcccacgactaccccgccctcgcccgccagcacgacgccgagatcgacgacgtgcgcgaggcggtgcgcctgatcctctcgctgcagccgcgccccggcgacagcctgctgcccgaacgcaacgccgtggtggtgccggacgtggtcgcctggcacgctgatgggcagtggaaggtcgcactgaacccggccaccagccgccgcgtgtcgatcaacagccagtacgaacaggccctggccgagaccagcgaagccgccccggcactgcgcgaaatgctgcaggaggcgcgctggttcagccgcggcctgtcgatgcgctacgacaccctgctgcgcaccgcgcgggtgatcgtcgagcgccaggccgccttcctggtccgtggcgaagaggccatggcgccgttgaccctgaaggaagtggccgaggagatcggcatgcacgagtccaccgtctcgcgcatcaccaccggcaagttcctgcagaccccgcgcggcaccttcgaactgaagcacttcttcgccgtgcgcctggaaggcgctagcgtctccggccaggcggtgaaggccatggtccgccgcctgatcgacgccgaaccggccggccgcccgctggccgatgaggccattgccggcctgctgtcacgccagggggtgaacattgcccgccgaaccgtcgcaaaataccgagaacaactggatatcgccccggcccgcgaacggcgccggctcagcgccaggcaaccccagctggcccgggtgggctga

SEQ ID NO: 516650 - DNA, 639 bp, Stenotrophomonas maltophilia
gtgcctgtgcgagttctcatcgtcgacgatcacacccttgtccgcgccggcctggcgcggctgctgcaggggtttgccgacgtgcagctcgtggccgaggccagcaacgccgaacaggcactgcaactgtccctgcagcacgcaccggatgtggtgctgatggacctctcgctgccgggccgcaccggcctggaagcgctcagcgacatccgcctgcgtgcccccggtacccgggtggtgatgatgaccatgcacgacgatgccgcccacgtgcgcgatgcactggatcgtggcgcggtcgggttcgtggtgaaggacgccgcaccgcaggaactggaactggcactgcgggccgcgcacgccggccaggtgttcctgagcccgcagatctcggccaagatgctggcgccgatgctgggccgcgagaaacccaccggcatcgccgcactctcaccacggcagcgcgagatcctgcgccgcatcggcaagggcgagagcaacaaggaaatcgccgccgatctcggcatcagcgtcaagacggtggagacccaccgcgcacggatgatggaatcgctgggctgccgccgcgccaatgacctgctgctgctggccgcgcgccatcagcacgagctcgagtag

SEQ ID NO: 516651 - DNA, 579 bp, Stenotrophomonas maltophilia
atgacctcgctgccgaccacctcgctgcatcacccggccgaaagcgagctgttcgacgagacgctcagctgcgaactggccctgccggccgagttccaggcgggcagcgcggccggccgcaccagcagcgccgaaggcctgctgcgcagcctggcactggtcgaggacagccgcggcgacgagcacgacgaacgcaacgaagccagcctgcagctgcagcgcctggaagccaagctggacctggcgatggtgctgctcggccggctggtgcgccagcagggccaggagctgaccctgcgaccggtgcgctggtcgcgccgtggcatccgcctgcagctgggcccgcgcagtggcgcaagccccggccaggccggcgtggtgcgcctgcagcccagcgactggctgcccgaccacatcgacctgccggtggaggtcgtcgcagaagccgccgacggtagcggcgggcacttcctgtggctgcgcttccagcgtttgggtgatggcctggagatggcgatggagcggcacctgttccgcctgcaccgccgccaggtggccgaggcacgccgcgcacgctga

SEQ ID NO: 516652 - DNA, 294 bp, Stenotrophomonas maltophilia
atgagcctgcaggaactgcatgcgcagctggatgccttcgagagagccttgggcgaagactccctcgaccaggccgacagcctgctcgacggccacgacagcaccctgcacgccctgctcagccagccgctgaccgctgcggaccacgcgccgctgagcgccctgttcgagcgccatcagagtctgctcggcctgctgcgccagcgccgtgatgccgtggccgcactgatgaacgacggccagcgctcccttcgcgcggcgcatgcctatctgcaggcagaatcgctggcatga

SEQ ID NO: 516653 - DNA, 417 bp, Stenotrophomonas maltophilia; identical to SEQ ID NO: 513264

SEQ ID NO: 516654 - DNA, 1416 bp, Stenotrophomonas maltophilia
gtggcagactttggatacggtggcattggctcgggactggatatttccagcatcgtcaaccagctggtcgcagctgaccgcaagcccgccgacaatgcgctgaacctgcagcagtccaaggccaagatgcagttgtcgtcgatcggcaccatcacctctgccttcgacaagctgaagacggcgctgaccgcactgaaggccaccacggcgttcgacacgcgcacggtgaccgccagcaagggcggcgacaagggcaccgacgagatcctgacggcgtcggtcgcgctgtatgacgttggcaccaccaaggctgcggcctccaacggcacgcacgtggtcaatgtcacctcgctggcgacagcgcacaaactgatcgccgatacctcggtacccaagaccgacacgtttgctgccggaaccttgacgctgaccgttggcgtgggcgacaaggccaagaccatgaacgtggaggtggaggacggcgacacgctgaccaccatccgcaacaagatcgatgcggccggccgcaaggaaggcgtgcaggccaccctgatcagctccggcgacaaccagtacctgtcgatcgcccaggagaagaccggtgccgccaacgcgatcaagctcgaatacgccggcagcgacgccaaactgggcggcctggtcaacagcctcaagcagaacaccgccgccgccgacgccgagctgaccatcgatggtgtgaaggtcgtcagcgccagcaacaccgtggccgatgcggttccgggcctgaccctgaacctgaagatgccgggcaccagcacggtgaccatcagcacggacactgcggcagccaccaaggtgatgcaggagttcgtcaccgcctacaacgctgcactggcggcgatcaacaccgaaaccaagtacgacgccaagaccaaggaagcctccacgctgaccggcgatgcgcagatgcgcggcgccaccagccagctgcgctcggtgatgtcgagcgtgctcaaggacctggccggtgacaagctcgatgccaaggcgatcggcctggatacccgtggctatcccaatgccgacggcacgctgatcctggacaccaccaagttcgccgccgcactggccagccagccggagaagatgcgccaggcgatcaccggtgataccggcggtgccggcaagctgtacacgctggtcgacggctatgtcagcaccacggtcggcaaggaaggcgccttcgttgcccgcaccaagggcctgaacaacacgctggacaacatcgacaagcgccgcaaggacctcgacacgcgcatgaagagcgtggaagagcgctacaagaagcagttcctggcgctggacagcctgatgggcaagctgcagcagagcaacaccgcgctgcagcagcagctggcccagttgaaccgctga

SEQ ID NO: 516655 - DNA, 1179 bp, Stenotrophomonas maltophilia
atggcacaagtcatcaacaccaatacgatgtccctgaatgctcagcgcaacctgagcaccagcggcagctcgctggctaccaccatccagcgcctgtcctccggttcgcggatcaacagcgccaaggacgacgccgccggcctggcgatctccgagcgcttcggcacccagatccgcggtaccgacgtcgccatccgcaatgccaacgacggcatctcgctggcccaggtcgccgaaggttcgctgaccgaaatcggcaacaacctgcagcgcgtccgcgagctgtcggtgcaggcctccaacgccaccaactcggccagcgaccgcaaggcgctgcaggccgaagtgacccagctggtctcggaaatcgaccgcgtcgccaagcagtcggacttcaacggcaccaagctgctggacggcaccttctccagccagctgttccaggtcggcgccaatgccggccaggccatcgccatcgacaagaccatcgatgccaaggccggctcgctgggcacctcgaccttcgccaccggcgcgaccgctgccctggctgccagcaccgacggcgcccgtttctccggcaccgtgatgggcgtggacatcggcacggttgaagtgaaggccggcgccaccacggccgatgcctccaaggccgtcgccaccgccatcaacgccaagatcggcgaggccggcatctacgccgaagccaatgccgacggcaccctgaagctgagctcggtgaaggaaggcaaggctgtcgccgccgccgatatcgccctgatgcgcagcgactacgacgcgaccgccaagacctggggcaccgcggcagctgcgggcgcctacactgccggcaccgatacctcggccaacgtgcagaagctggacgtgagcaccgtgctcggcgcccagcaggcgctggaagtggtcgacaaggccctgggtgcgatcaacagcccccgcgccgacctcggtgcgatccagaaccgcttcacctcggtcgtggccaacctgcagacctcgtcggaaaacctgtcggcgtcgcgcagccgcatcaaggacaccgacttcgccaaggaaaccgccgaactgacccgcacccagatcctgcagcaggccggtacggccatgctggcccaggccaaccaggtgccgcagggcgtgctcagcctgctgcgctga

SEQ ID NO: 516656 - DNA, 1185 bp, Stenotrophomonas maltophilia
atggcacaagtcatcaacaccaatacgatgtcgttgaatgctcagcgtaacctgagcaccagcggcagctcgctggctaccaccatccagcgcctgtcctccggttcgcgcatcaacagcgccaaggacgacgccgccggcctggcgatctccgagcgcttcggcacccagatccgcggtaccgacgtcgccatccgcaatgccaacgacggcatctcgctggcccaggtcgccgaaggttcgctgaccgaaatcggcaacaacctgcagcgcgtccgcgagctgtcggtgcaggcctccaacgccaccaactcggccagcgaccgcaaggcgctgcaggccgaagtgacccagctggtctcggaaatcgaccgcgtcgccaagcagtcggacttcaacggcaccaagctgctggacggttcgttctccagccagctgttccaggtcggtgccaacgccggccaggccatcgccatcgacaagaccatcgatgccaaggccaacgccctgggcggcgccaagttcgacaccaacgcgctggccctggccgacccgggcaccaacgctgatttcagcaccagcggcctgcagatcaatggcgttgccattgccgatgtctcggtcaagcagggcgccgacgccgctgccaccggcaaggcctcgcgtgaagcactggtgaccgcgatcaacgccaagatcggcgagaccggcgtgttcgcggaagtgaacggcaccgctggcgtgaccctgacctcggtcaaggacagcgtcaacgccgatggctcgttcaaggccatcaccgcgaccccgggcacctggaccggcgccaccgcgccgaccttcaccgcctcgacggccgcgccggccgccaagtacgccagcgacctggacgtcagcaccgtgaagggtgcccagcaggcgatggaaatcgtcgacaaggccctgggtgcgatcaacagcacccgcgccgacctcggtgcgatccagaaccgcttcacctcggtcgtggccaacctgcagacctcgtcggaaaacctgtcggcgtcccgcagccgcatcaaggacaccgacttcgccaaggaaaccgccgaactgacccgcacccagatcctgcagcaggccggtacggccatgctggcccaggccaaccaggtgccgcagggcgtgctcagcctgctgcgctga

SEQ ID NO: 516657 - DNA, 783 bp, Stenotrophomonas maltophilia; identical to SEQ ID NO: 510032

SEQ ID NO: 516658 - DNA, 273 bp, Stenotrophomonas maltophilia; identical to SEQ ID NO: 498400

SEQ ID NO: 516659 - DNA, 339 bp, Stenotrophomonas maltophilia
gtgaaaacgggggtgaacccgtccttcgagatccgctgcaagggcgtgctggtgatggaggtggagaacgcgccctcgcgcgtgctgatccgcatgcccgccgatgcacggtggcgggcgccggatatcgaacggctgcgcatcagcttcgagcgttggctggatctgcaccagagccaggggcggttgctggtggaaagcgcggggccttcgtgggttgaggcacggtttgggcgcttcaatgggttggtgctggatgagcagcggtgtctgcttggggcgccggcgcaccgccaggccgatcccaccaacgacttcagcgctgaagtgccttcgtag

SEQ ID NO: 516660 - DNA, 585 bp, Stenotrophomonas maltophilia; identical to SEQ ID NO: 516606

SEQ ID NO: 516661 - DNA, 273 bp, Stenotrophomonas maltophilia; identical to SEQ ID NO: 498400

SEQ ID NO: 516662 - DNA, 273 bp, Stenotrophomonas maltophilia; identical to SEQ ID NO: 498400

SEQ ID NO: 516663 - DNA, 273 bp, Stenotrophomonas maltophilia; identical to SEQ ID NO: 498400

SEQ ID NO: 516664 - DNA, 1386 bp, Stenotrophomonas maltophilia
atgaacgacgtgaccatcatcgaccgctttctggatacgttctcgcgctacatcgactccggcttcgggctgctgcaaggcgaagtggcgttcctgaccgccacgctcatcgtcatcgacatgaccatcgccggcctgtattgggccatgagccacgccaccggccagggcgaagacgtgatcgccaagctgctgcgcaaggtgctctacgtcggtgccttcgcctacatcatcggcaacttcaactggctggccggcatcgtgttccgctcgttcgccggcctgggcctgacggccaccggctcggccatcacgatggagaacttcctgcaaccggggcggctggcgaagaccggcatcgacgcgggtgcgccgattctggagcagatcggcgacatggccgggttccccgaggtgttcgtgaacctcgaccccatcgtggtgatgttcctcgcctggctggtggtgatcctctgcttcttcgtgctggcggtgcagcttttcatcacgctgatcgagttcaagctgaccacgctcgccggcttcgtgctggtgccgttcgcgctctggaacaagacgagcttcctggctgaaaaggtgctcggcaacgtggtgtcgtctggcgtcaaggtactggtgctggccgtcatcgtcggcatcggttcgggcctgttcgccgagttccagaccgtgccggatgaaccgtccatcgaccatgccctggtcgtgatgctggcctcgctcgcgctgctggctctgggcatcttcgggccgggcatcgccaccggcctggtgtccggtgcgccacagcttggcgcgggcgcgatggccggtgccgctgtcggcgctgtcggcacgggcgttgccattggtgccgccgcgaccggcgtaggcggtgccgtagccgccggggcgcgtatggcgccggccgccgccaagctggccggcagcggtgcgcgtgccgctgcctcgacggccggcagtgcccggtcggcgttccaggccggttccgccgcagccggtggcggggccaaaggcgcgatggcgggcctgggcaaagtcgccaagaccggcgcgcaggccgccggccataaggccgccgccggggcgcgttcgctcaaagaccggacagccgccgctttccgcgccgacggcgcggcacctgcttctggcggcggtgcggcagcgaccagcggcgccgcccaagggagcgcggccgaaggcgatgccccggccgccgccgggcagaagcaaccggcctgggccaggcgcctgcaccgccgccagcagatgacccatgccgcgactaccaccgcccacacgctgcgcggtggcgatggtggcggctcagggcaaggcccgagcctgcgcgattccgattcataa

SEQ ID NO: 516665 - DNA, 705 bp, Stenotrophomonas maltophilia; identical to SEQ ID NO: 498200

SEQ ID NO: 516666 - DNA, 246 bp, Stenotrophomonas maltophilia
atgagcacgaccaagaagctacggctcgggccgctgcccaagaccgagagcgtcaagctgaccttcgcctgcccggccagcctgaaagccgacctcgaccgctacgccgcgctgcacgcgcaggcgtatggcgagactgtcgatgccgcgacgctgatcccgcacatgctggaggcattcatggctggggatcggggattcaggaagggaggcgcgggcagagccgcgccgctcacgccaagctga

SEQ ID NO: 516667 - DNA, 273 bp, Stenotrophomonas maltophilia; identical to SEQ ID NO: 498400

SEQ ID NO: 516668 - DNA, 273 bp, Stenotrophomonas maltophilia; identical to SEQ ID NO: 498400

SEQ ID NO: 516669 - DNA, 990 bp, Stenotrophomonas maltophilia
atgtcccacccgctttaccgcccgcgccgcatgcgccacgacgagttctcgcgccgcctgatgcgcgagaacacgctgaccaccgacgacctgatctacccggtgttcgtgcacgaacgtgcgggccgcaccgcagtgccgtcgatgccgggcgtggagcggctgtcgatcgaagagctgctgaaggtggccgaagaagcgctggaactgggcattccagtgatcgacctgttcccggtgatcgacccgtcgctgaagtcgctggacgcgtcggcggcgtgggccgaggacggcctggcgcagcgtgcgatccgcgcgctgaagtcgcgcttcccggaactgggagtgatgaccgacgtggcgctggacccgtacaccacccacggccaggacggcatcatcgacgacaagggatacgtgctcaacgacatcactgttgaagcgctggtcaagcagtcgctgtcgcatgccgaggccggtgtggacatcgtctcgccgtcggacatgatggacggccgcatcggcgcgatccgccgtgcgctggatgccgacaaccacatcaacgtgcgcatcatggcctactcggccaagtacgcctcggcgttctacggcccgttccgtgatgcggtgggcagcgcggccagccttggcaaggccgacaagaagacctaccagatggacccggccaacggcgacgaggccctgcgcgagatcgcgctggacctggaagagggcgccgacatggtgatggtcaagccgggcatgccgtacctggacctggtgcgccgggtgaaggagacattcggtgtgccgaccttcgcctatcaggtgagtggcgagtacgcgatgatgaaggccgccttcgccaacggctggctggacgaacgcgcctgcgtgctggagtcgctgctgggtttcaagcgggccggcgccgatggtgtgctgacctatttcgcgccgcaggtggcgcgatggctgcgcgagcgctga

SEQ ID NO: 516670 - DNA, 999 bp, Stenotrophomonas maltophilia
atggcagtcaatgacgatctggtggtcctgcgccccgaagggctgtactgcgccgccggtgatttccacatcgatccctggcgaccggtcccgcgcgcggtcatcacccatggccacggcgatcacgcacgcccgggcatgggcgaataccactgcagcgacggcagcctgccgatcctgcgctggcgcctgggcgatgtgccggtgcaggcgcatgccgagggcgtgccgttccgcctgggccgggtgcaggtatcgctgcatcccgccggccatgtactggggtcttcgcaggtgcgcatcgacgacgggcagcaggtctgggtggcgtccggcgactacaagcgccagcctgatccaacctgtgcgccgttcgaagtggtgccctgcgataccttcatcaccgaggccacctttgccctgccgatctatcgttggccggacacgcccaccgtcgctgcggagatcgtggcgtggcgacgcgaatgcgaacagcgcggcgaagctgccatcctgctgtgctatgcactgggcaaggcgcagcgggtactggccgaactgctgccgctggacgatcgcccggcctggctgcacggtgccatcgccaatggtgtggaggtgtatcggcaggccaacgtgccaatgctggagacgctggcggtggccgagcagggtcgccagccggatgccgccggccagttgatcctcgccccgccctcggccgccggcacaccgtggatgcgccgcttcggccgctaccagctgggcttcgcatcgggctggatgcagctgcgcggcaaccggcgtcgccgcaacgtcgatcgtggcttcgtcatttccgatcacgccgattggcccgcactgctgcagaccatcgaacagaccggcgcgcagcgggtgatcgccacccatggcaataccgatgcgttgattcccttcctgcgagagcgcggcgtagcggctgaagccttccgtaccgatttcgggagcgaggaatga

SEQ ID NO: 516671 - DNA, 273 bp, Stenotrophomonas maltophilia; identical to SEQ ID NO: 498400

SEQ ID NO: 516672 - DNA, 585 bp, Stenotrophomonas maltophilia; identical to SEQ ID NO: 516606

SEQ ID NO: 516673 - DNA, 273 bp, Stenotrophomonas maltophilia; identical to SEQ ID NO: 498400

SEQ ID NO: 516674 - DNA, 210 bp, Stenotrophomonas maltophilia
atgacccgcaccaccattagccgcccgcgcatggcggcgatctacgccgctggcacggtacgcgcccgccgttggaacggcgatggcgacgtgcgcggctaccgcccgccctcgggctggacggcctgcgccgacctcaccgacattcaccccatcacgggccgcgccttgccgcgtgccgtgtggtggctcatcgagacgaaggaataa

SEQ ID NO: 516675 - DNA, 585 bp, Stenotrophomonas maltophilia; identical to SEQ ID NO: 516606

SEQ ID NO: 516676 - DNA, 1431 bp, Stenotrophomonas maltophilia
atgttgtgggaagcccaaatgggcgtcttcctgcaccagatcgaccggaaccttcagtcgatgacccgcgaagaaattgacaccatctaccgccagtacctggcaacgaagtttgatgagatcgaggcaaggctttcccagcctctcgatgaagaccagaaagacggcacatccttctacctgaatgacgaagcccaccgcatctcggcggcactggcctttgggcaggtggacgagcgcttgccggaagccgcccagctggcccccaatgcaaccagggatacacaccgcagactcgcaaggcgcctcttggaagcggaccttaaggccaccgtggccgagctaaaggcacttgaaggtgaacccttggagcttccccaggaaatccttgccaccactggcggggccaaggatcggacgcaaaactcacccctgctctcgcaggtggttcaactctattgcgaggaacatattggcctgaagaagtggtcggaacgcaccgccgagcagagccgcaagattttcgagctgatcgtggatttgcttggggaccgccccattcaccaagttaccaaggccgaaattcgcaccttgggtacgcagatgcttcagctgcccaagaacatgaccaagatcttccctggcctcacccctcggcagatcctcgaagcggcagcatcgcagcccgagctgccgcgcctgcaacctcgcagcatcaacaagaactatcaatacgtccgttcgctattcatctgggcaacagagcacgaccatctgacccagaatccagccacgattttgcgtgatgtcaacgagggacgcgctcaggatgcgcgcaaggccctcgacgacgacgacgtggcgaagtttatcagatacaccaagcagcacgccaaggagtcttacgagctgtggatacctcgcatcatggcctataccggctgccgcatgggcgaggcagccagactggaaaagcgtgacgtccgccaagtggacggattatgggtgttcgacatcaattccgaccacccggagaagcgagtcaaaaccgagaacagcctgcgcctgatccctgtgcatccaaggctcatcgagctggggctattggattttgtcagcagctccgccgaaggcttcctgttcccccgccgcatccggtacaccgatgaccccaagcgcagcccggtggacctcctgtccaagcaactcagccgctggctgcgaaaggccggtgtggaggacaagaagaagcaggtgcagagcttccgggaaaccatggccaccaagctaaaggacctgggaacgccggagtaccagatcgcggaaatcctggggcacgagaacagcaacatttccactggccgctatggcaagcacaccaagctgagcacactgcacgaggctttggccaaggtccacctgccggtctaa

SEQ ID NO: 516677 - DNA, 711 bp, Stenotrophomonas maltophilia
atgagcaccgttcgccagaaacgccgggaaggcatctaccggcgcatgagagaagccaatccgacctttgcaacctgcgtagtgctggattgcggccatctcaccatggcgcagcaaggcagcgggttgagcaaggcgtactgccgccgccatgtcgagcatttccgccgccacggcagctattcaaaacccagctacaccgctgcggagctgcagccgtaccgtgttgctgccctgcgttggctagaggagcaacgggatcttccggctgttagggaggctagggaggcggtggtgactctttatatgcgtggcggtgcaccagaggaggccttccggttggtcgggaagccgccggcggagcgggcgagcaagatctgggcgcgcctgcgggagcgccaggtagaccccagcgcccttctgtccatctggattgctgtacagctgcgctaccaggatgacccgcagccggaccgcaaggcccgctaccgactggtgcaggccgccaaatggctacaccggctggctggtggtacgcacaaacagtgggaacagcacgacaatgccggccggcggaaggtggtccagttgcacaagtacccggccagcagagggctggtgctgtggcacctgggggcgggtctggcgcgggcagcgaggccgctgcaggcgcacttggaagcagtacgcctgcacgttgcagcttgttag

SEQ ID NO: 516678 - DNA, 1365 bp, Stenotrophomonas maltophilia
atgagggtggtcgacttttgcgtggatgcggcggctgcggcggtctcgcccgaaagccgcgccgacagacacagggcttttgatccggccaagactgctgcaacttcgaagagcaagcagctcgtggccgaagtgcttgagcgattagaaaaggcagagaggcggcagcgccggcgtcggaaagccgatcaggagcgccgagagtcagccgcggaggcgcttgtctgcgacctggtccaccgggcattgggtgatcccgatgcctggctcacggtcgagatgagcaagggtgccttgtccgcccaaacacgccgtgcgcccttcctcacggaggccttcccgaacctggtgaaattgctatgccacccggaagtggctgcggccgagctgcagcccggctactacgcatcctcgttcggtggcgaacgcacgatgatccgggtcagcccttggctggacgccaggatcgacgacctcgaaatccactacgaggacatcgggcgcaaccaggcgctcctgggtgatccccttgtgctccgtggcggcaaggtgaggggtgtggcggagaccctgccgttgcctgacacgcaggaggtttgtgcgctccgcgcccagatgcagcagatcaactcttggctcgctcaggcgaacatctcgtatgttgggccgaaggagatagacctggggcagcggtatctcaggcgcatcttcaacaacggctccttgcaggaaggtgggcgcctctaccacggcttctggcaggaaatgtccaagaaggagcgcgcggaatacttgcagatcgaaggctcacctgtggtcagcctggactttgcccagatgtctgttaggacggcctatgcccttgtgcgcatggcgccccccgatggagacctttatgagctgccgggggtaagcggtgaccgcgagggcgtgaagctggttttcaacgccctactggccagcaccaagatgctgtcacgcatgccccaggggggcaggccgcactttgccaagcacgagacggtgcattcggttgtggcgggaatcagtcggcggcacccagccttggtgcccttcttcggaaaggggcaggctcatgcgttgatgaacctcgaaagccagatcatcgtcgaggcgctgctccggctcaaagaccgcggtgtggtggcgctaccggtccatgactgcatcctcgtcgccgaccatcggatggaggtggccaagcgggcgcttgaagaggcttctagggatgtactgggtcaacaactcagggtggaggtggagggatctccaccgtcggggctccatggtccctctatagggaatcctcagtcctccccattagtggggggcataagcgtatga

SEQ ID NO: 516679 - DNA, 3264 bp, Stenotrophomonas maltophilia
atggacaaggcagccgctgccgatattcgtaatgcccttttggagttgctgccggaggacgggaccagccagggaaacctgaagctgcgtactcagattgccgccatgcttggcgccgaggtgcctgaagaccactactcggccgcgcgggatgccttggtagccgatgggctgctagccaaaggccaaggccgcggcggctcggtacggaagatcgtggaccacgcggcgccgctcactttggaggtgcaggaaaagcccattggtgcggatgcctcgaagccgaagcagccggggctgacgctggcccaggccaagcgcgcaaaggccgaggtcaagcccaagcgcaccgacgaagacaaccagatcatcgcctaccggcacaaccagaagcgccgcaataaccccgacgtcggcgtggtcactccggacaacgatcctgagcagcccaagactcaatgggcctacgacccgcacatcgaccctaccttgcagttcgatgtcggccgcgcccagatcgaagccctgatcgacaacgcactgtccagcggcgacgaggccaccatgcgcgccgcgctggaacagctcaagcgccaggccgcgccctatctcaactggaccggcaaggcggaaagcaccagcttcgaggtggacaccgtcagcctgcacgtgcacgagcgcatcgacccggccagtatcctggccgtcatccagaagcgcatgaaagccgatgccggcaaggtcgcaaccggcgacatgttccgcgcctggttcgaggagccgctgccgctacgcgaggcggtggacttctacaagcacgaccgcggctggagcaaccggctggtgtctggtgacagcctgctggtaatgaacagcctgctgcagaaagagggcatggctgggcagttgcagatgatatatatcgacccgccctacggcatcaagtacggcagcaacttccagcccttcgtcagcaagcgcgacgtcaaggaccgcaaggacgaggacctgacgcaagagcccgagatgatcaaggcgttccgggatacctgggagctgggtatccactcctatttgacgtatctgcgggatcggttgctgctggcgaaggagttgctgcacgagagcggcagcgtattcgtgcagatctcggatgagaacttgcaccacgttcgagagatctgtgatgaagtttttggcgttgagaactatctcaacgtggtgcccttcacgaagaccagtggcgtaacaacgtcctttctggcgagtaatgtcgatttcctagtttggtatgggaagaatcgacgcgaagcaaagtacaggcagctctttgtggagaagagtcgggagtcaggtactgctgatacgtacagctggctggatcgtccttcgggcgagcgaagggggatgtcttcatccgaaaggcgaggcgaaagcgatcttcccagggatgcgcaaatttacaaaccggacaatattacgagccaaggcaatcccactacgaaatttagtttcggaggaaaagtctacgcacaagcttggaagaccgacaaggagggaattgggcttcggcgacttggtgctgctcggcgcttgcacgtagcgaagaactcgctccagtacgtccgttatctcaccgacttcccatgcattccggtgacacaattgtgggatgacatgcagactggtggcttcaccgaagacaaagtctatgttgtgcaaacggcagaaaaggcgatccagcgttgccttttgatgaccaccgatccaggtgatttggtgcttgatcccacctgtggctccggcaccacggcctatgtcgccgagaaatggggccgtcgctggatcacctgcgacacctcgcgcgtggccgtcaccttggccaagcagcgcctgatgaccgccagctacgactactacgacctcaagtacccgcacgagggcctgaaggccggcttcatctacaagaccgtcccgcacgtcaccttgaaatccatcgccaacaacccggagatcgacgaactctgggagcgcatgcacccggccatcgaggccgcgctgggtcagctcaatgccacgttggccggcacccgagtcccgttcaagatcaccgaaggcgggcgcaagggcgaggagatcgccttcgacgcgaagggcacgcacaccctgtccactggcgagcaggtgcctgccaacgccctgcttgaatgggaggtgccgttcgacttcccggccgactggcccgccgctgcccgcaccgcgttcgacgcattccacgccgcgcgccaggcgatgcagaagaagatggacgactccatcgccgcccacgccgaccaggaagtgctgtacgaccagccgcaggtggcaaaggacaagctgcgcatcaccggcccgttcactgtggaggcggtgccgtttcccagcgtgatggtgctggacgaggcacagcccaccgtcgaggccgacgccagcatcgcccgcagcggcgagtccgcccgccagcaccgctggcgcgacgagctgttgaaggccggcatccgcggcaagggtggccagatgttgcggttcgccgaattggagagcctgcccgacactccgcacctgcactgcaccggccacctggactctggcgagcgcgtggtggtgtgcttcggcccggagcacgccgcgctggagcagcgcacggtggagttggccatgcgcgaggccggcgacctgttcccgcggccgaagatgatcgtgttctgcgccttcgccttcgacccggaagcggctaaggacattgacgccaccaagggcatcaccgccctcaaggcgcagatgaacactgacctgcttaccgaagacctgaagaagaacgcccgccagaaccagagcttctggctgatgggtcagccggaagtggaggtcagccagcagaaggacggccgctacgtggtggaagtccatggcttcgactacttcgataccgctaccggcgagctgaagtccggcggcaagaagaacatcgccgcttggagcctggacaccgactacgacgagcgcagcctgtttccccgacaggtgtttttccccatggctggtaagaaggatggctggcacaagctgaaaaaggacatcaaggccgagctggacgaaagcaagctgaacaagctgcatggcactgtcagcctgccgttcgaggccggggagaaccgcaagatcgcggtgaagatcgtcgacgaccgcggcatcgagtcgttgaaagtcatggccctgggttga

SEQ ID NO: 516680 - DNA, 2823 bp, Stenotrophomonas maltophilia
atgacgactccaaaatccctgatcatcaacacgcctttcgaggcgccgcgctggcactggatagaccatcaaggtggtctgaagctgaccgagggacgccgcccggcgggctacgagatcttcgacacccgccagaacacgcgtcgcaccgagcgcctggacctggtggagcgcgtccgtgaccgcgtaggcgaatggcgcggctcggattaccccggcgtaaccaccgttacccgtagcctcctggaacactggcacgacgccagcgctcgccagcatccgttctatttttgccagctggaagccatcgagaccctgatctggtggatcgaagcgccggccgacttcaagcaaggcatccacgtgccaggcgatggcggaccatggcagcggctctgcaacaagatggcaacgggcaccggcaagacgacggtgatggccatgctcatcacctggcaggtgttgaacgcactggcctaccccaagcgcaacaaggatttctcccgtgccatcttcctggttgcccctggcctgacagtgcgcgagcgcttgcaggtgctctatccggggcaccaggacaactactacgacctgttcagcctgtgcccgaatgaggcaatgcgcagcaagctgaatcaggccgaggtgctggtagaaaactggcacacgctgatgccgctcaagcagccggatcggtcggtggtcaagaagggaccggaaagcgacaaggcattcgtccgccgcgtgctcgggaagctggcgcagcacaaggacatcgttgtaatcaacgacgaggcccaccacgcttatcggcaatcccccgacgacaagcgcagccgcgacgtgaagcgccgggctgaggaaatgggcctggaccaggaggaggctacccgctggatcgaaggtctggaccgcatccacaaggaactgcgcatccagcgttgcttcgacctgtccgccacccccttcgccccgaccgggcgcagcaacaccgaaggcggcttgttcgagtggatcatctccgacttcggcttgaacgatgccatcgaggcgggcctggtgaagaccccccgcgtggtcgtgcgcgacggcgtggtaccggatacgcagacactcaaacccaagctctatcacctgtaccgcgacccggctgtccaggaagaccttggccgccgcggggcacaggcccatgaaccgctgccgccactggtgcagcaggcctacaccctgctcggcgcagattggcgcaggactgccgaggcatgggcagaagccggccacacctcgcctccggtgatgctgacggtatgcaacgtgacctccaccgctgcgcgcgtggagcgattcttcaccgagggtgacgtgcattggcctgagatgcgcgacgccaaccgcacgctccgggttgactcccgcgtgttggagaaagccgagatcggcgagaaggcgggcgccgacaaggactacgaggagcggctgcgggcgattgtcgaggccactgccatcccatccgaccgaaagagcgagctgctgcaactgcggaaggaagaactgctgcgcgagatcgtcgacaacgtcggcaagcgtgggacagccggccaggacctgcagaacgtcatttccgttgcgatgctctccgagggctgggacgccaagaacatcacccacatcatgggcctgcgcgccttcaccagccagctgctgtgtgagcaggtaatcggccgcgggctgcgtcgcgtcggctacgacacggagcctgtggtctgtcccgacggtgtcgagcggcagttgttcgtcccggagttcgtcaacgtcttcggcgtgccgctgtcggtattccaggacctgagtggcgagggagaggcgccgccgccgcccaagcagagcacccagatcgaatccctgccggaacggaacagcctggagatccggtggccaaacgtggtgcgcgtggatgccatcgtgcggccgggcctgactctcgactggcaggcgatggagcctttgcgcctagaccctgcagccacgccgctggcggcagagatggcgcctgcactgggtggcgccaatgcgtgggaccagatacaggccatcgacctggagctgctgcctgacgagttccgcctgcaacggctggtgttccaggccgcacgccaagcctatgcgcagatgcaggaccaatacaccggcaccccggagtacctggcgttccagttgatccgcctgatcgacgagttcctcgcatccgacaagctggaagtgccctccctgttccaccaggagccgctgcgcaagcgcatcctggtatccctgaacatgaacgcggtggtccagcacctgctgcgatacctgctgcagcaaaaccaggagcgcatcgagccggtgttcgacgaggagttcccggtaggttccacgcgatacatgcgcacttggtacaccaccaagacatgccagcccgcgcagaagtcgcaaatcagccatgtggtggccgatggcgcctgggaagcccatgcggccaacctgctggaaaccagcccgttggtgcaggcctacgcaaagaacgaccacttgggcttccaggtctactacatgtggaacggagccaagcgccgctatatccccgacttcctggtccgcctcgctaacggcaagacactggtgttggagatcaagggcgtcgacgacgaccagaaccgcgccaagcgctcggcactggacgcatgggtaaagggcgtgaaccagaagggcggctttggcacctgggcgtgggacgtggccttcgagccccaccagatccaggacatcctggcagcccatggttga

SEQ ID NO: 516681 - DNA, 660 bp, Stenotrophomonas maltophilia
atgcgagtctccaccgcccgtcaagggcgcagcgggctcggcctggaagctcagcaggtcaccattgccgactttgtccggcagcggggagccgaggtcatccaagcgttcaccgaggtggagagtggcaagagggcggatcgcccggagctagcccatgccttgcacttggcgaaggtgaccggcgcaacgctgctgattgccaagctggaccgattgtcccggaacgcggccttcctgctcacgctgcgggacagcggagttcgattcatcgcggcggacatgcccgacgccaacgagctgaccgtcggcatcatggccttggtcgcccagcaggaacgcgaggcgatttccaagcgcaccaaggaagccctacaggccgcaaaggcgcgcggcaggaagctggggaatcccaacggggcggttgccctgcagcgtgcccagaggggcaatggcgacgccgtggcggccctccgcggcaaggcggatcaccatgcaaaccagctgcgcccggtggttgacgcgctggcagcagagggggtttcctcgctgggaggcatagcaaaagccctgaacgagagaggcatgctcacgccacgtggtggcacgtggcacaagtcatcggtccgcaacctgctggaccgcctctccgtccagtaa

SEQ ID NO: 516682 - DNA, 3780 bp, Stenotrophomonas maltophilia
atgatgttcgaaattactggcgcacaagtcgccgacctcaatgacgccgatctacggacactcgtcgcacgtctcgctttggcagaattgcgggcgcagggttgccccagttcgtcggtgaccgctggcggcaatcaggatgcggccgatggcggacttgatgtccgggtcgagtgcccgtccgcactgccgatgccggatttcgtgccgagccagcacacagggtttcaggtaaagaagcccgacatgccggcgagtgcaatccgcaatgagatgcgtcctggcggcgtactacggccggtcatcgccgaactcgccgctcgctcgggcgcctacatcatcgtcagcgcgcaagggtcggtcgcagacaagccgctgagcgatcgtcgctatgcgatccgggcgcagctcgatgatctgcctgaggccgggcagttgcatagcgacttctacgatcgcgaccggctggctacatgggtcaatcactatcccgggattgccgcctgggtccgcatgcggctcggcatcggtatgtcgggctggagcagcatcggcgattggtgcggcgtcggcgtgagcgaggagacgccctatctcttcaatgacaaggcttgcctaactgatgagcgaacgagcgaccgcgagcacctcaccatcggcgagggtctcgcccggcttcgcgtctctctgacccaagctcgccaatgtatccggttgatcggcttgtccggtctcggaaagactcgtctcgtgcaggcactgtttgaagatggtgtcggtgaggcgccgctggacccggggcttgccgtttataccgactattcggtcgagactgacccgaccgcccgggacatggcgcgccagctagttatcgcacggcaacgtgcgatcctgatcgtcgataactgcaatccggcgacgcacagcgaacttgcccgcatctgttcggaagcggggagccaggccagcctcctcacggtcgaatatgatgttcgcgacgatgagcccgagcgtaccgaggtctttcgcctgcaatcagcaccgcccgaaatggtggaactgtggctggaaaagaccttccccaatgtgacgcaggtggaccggcgcacgatatcggagttcagcgacggcaatttccgcgtggcgcgcgccctcgccgaaaccctcgggaaaggcgagaccctgggaaagctcaagagccgtgacctcttcgagcggatttttcaccagcgcaatgagcccgaccgggatctcctttccgccgccgaagaccttgcgctgctctattcgatcgatggcgaagacacgtcggaaagcggcgaacttgcgcgggttgctaccattcgcggcgcttccgtggcgacgatgtatgcggcgctgaacacgcttcgccagcgcggaatcgcacagctgcgcggacggtggcgtgcgatcctgccgcacgcaatcgccaacccgctcgccgggttcgccctcgaacgcatgcccccggccgatttcgaccgcttctgcgcgtcgctcacggcgcggatgcagaagtccctttcgcgccgcctcggctatctgcacgacagcgccgaggcacgggccgcggtcgtgcgctggctcggtgccgacggttctcttggcgatctcgcggcgttgggcgaagacggcctccagatcatcacgaatatcgctccggttgcacccgatgccgtgctcgcaaggatcgagcgagacgtaactgggccgcgcggcgccgagatactcgatccgcagtcgagcgaccggtggcggtggatacggttgatcaagctcctcgcttacgatccaccgctattcgatcgcgcggcgacattgcttgcccggttcctttccgccgaaccgcccaatcacaacaagaactcggcatcggacatgttcgccgagctgtttcacctgcacctgtccggcaccaaggctttgccggatcagcggcgatcgcttgtgcgccggtttgcgcaatctggtgatccggctttgatgcgctgcgccggcgtcgccctcggtgcgctgctgaaggcgcaccatttcagttcatccagcgacttcgacttcggcgcccggtcacgcgactatggctggcacccgctgacctatggcgacatctgggcctggtacaacggcgcggtcgacttggcggtcgagctttcgccaatcatcgaaaacacccgggaccaccttgcccatagcgtaagggagctgtggcatttcggcgcctgtcacgatgcgctcgaacgggcagcgacccacttctcttccgagcggccctggatcgaggggtggatcggcttccgcacagcgctgcgcttcgagggcgatgctatgcctgatgaggtgcgggcgcgtctcaccgcgctcatcgaccgcctgaaacccaccgatcttctccgtcaggcccgtgcggtggtactggggcacagcagtttcggctgggatgtcgctgacggtgatgtcgacgacggcgatgtcatgaagccgtatgagcgcgcctcccagctcgcgaaggagatcggaaccgcgctcgcgcacgacccggagacgcgcgctgctttcatcgccgaactgctcgtcgaacaacatccgcagcgcgcctacgagtgcggcatcggcctgtcggatggcgccgccgatcctgatgcgatgtggcgggaactgctggacctcttttctgccgccgatgtggaaagccggaatgcgacggtgctgggcgggttcatctatggcgcacacgccagagattcggccttcgccgacgccgcgctggaggatgtgatcgagaatcccgatctcgccgcgagcttgccatatcttcaggcgcgtgttgctatcgacactcagggcattgcgcggcttcggcgcgcgattgaacgtggcgtcctgtcggcgcggacttttcacagcatcgccaatggcagcgtcggcgagtctccacccgacgcgcttggcccgctgctcaccgacatcgccagtctcgccgacggcgtggagatcgcgctcgatatccttcacatgcacttctaccgcgatcgggaggagggccgacaacgcgctccatccttgattgccgtcggccgtgagctgctgctgcgcgccgacttcgggaagaagcagtcgcttcgcgatttcgggctgcataccgtcatacgggtctgctgtgccggacctgatggtgcggcgacgctgcgcgagatctgcgcgcgggtccgggtcgggctggagaccgtccatctctcgtcctacgatatcggttatgtcctgaaggcgctcttcgaaacgcaccccctcatcgctctcgacgaattcctgcttcctgggctccggccgagcaatcggggactgtttgagggggacttcgggtctggcacgccggtggaggatgtcggcgccgagacccttgttcagtgggcgaatatcgatccggatcggcgctatccgctgcttggcaaaagcatctccatgttcaagcggcggcagggcgaagaggagaatgatgtctccacgcttttcctggaaatattgggccacgcgcgagacaagcgggcttttctcggtgatacgtggtcgcggctgcatccgcgcagctggtgtggctcgctcgccgatattctggttcggcgtcgcgcagctatctcaacgctgggtgacaatgtcggaggcgaggttcggcaatgggtcgccgacattctgcccgaactggaacgctggatcgaacatgcgagcaagcgcgatcgggaaggcgagcagagtttcgaatag

SEQ ID NO: 516683 - DNA, 609 bp, Stenotrophomonas maltophilia
atgttcgaccagcccaagtcattgcacgcaagtactgcagaagctttcataagatccatcagacggatcgcaggcgcaaaacccgccattgatgaagatggtgagcgcactattgtcagtcaggaacaactcgctgaggacgcgggaatgtctcgttcctcactaaccaagttgctcaagcagagcaacgaagccaatccaaccctcaagtccatctgccagatcgcccatgccctaggggtacctcccgcgtttctgctcatgcgcgatagggactggaaagtactcgccgaggcaattttcacgcacggggcagcaagcacgaatccgaggttcatcgaattcgccaatcggctctgcaccagcaatgaccacggcccttccgccagcgtccagaacggtcgcgacctggcgcgacttaccaaccatctgcagcagctgcccgctaacgttgatcagatggttcgtaccaacgtcgaagcccaggcatatcgaattggagcaacaagtgctgcaccaccgctacagcaactccacgcttccaacccagaatacatccctcttctcctgaccctctgcgccgcgatgggcgcaaattttcgagactaa

SEQ ID NO: 516684 - DNA, 900 bp, Stenotrophomonas maltophilia
atgaccgtcaccgattctcttagcaacgaagacatccgtgttaccaatgatctgggggtgatcctggcggaagctgacgccgaggatctcgacatcctagttgactacattaccgatcggggagctggccgcctgacgcttgacagcgccatgtgcaggattctgatcaatgccaaagaaaagcaacactacggcccaaccgagcgggcattgattgctcaggagattcttgagtttggtgggaataccgtcggcaacgcatttcgcaaggcgcgcggcatgttttctggaagcttccttgacaacttgctgccagatgcagcgccgacggttgcgtacagcgagatcgtcagtgacgtggccagccaccttggtgtcaagatgcccagtgtatcttcggtagccgacatagaactggtcatcgtccgcaagattcttggcaaggcagtagaaaagatgtctgaggaagagaagcaagcggtcgccaatgagctcggtttgggcagcttgccaactgggccaggggcacttgctctactgattcagacggctcgcttgggcgggttcgccacctacaagatcgctactatcgttgccaatgcggttgccaaggcgattctcggccgtggccttacattcggtgctggcgcagccattaccaagagtgtcagtttggcgcttggacccattggctgggcgatcacagcagtatggaccttggccgacctttccagtccggcttaccgcgtgaccgttcccgctgtgattcacatcgcttacatgcgcaacaagatcatcgcgaagaagacctatagaacctgcagcagttgcgaagcggtagtggagcgctcggcaaacttttgtcccagttgcgccgccccccagaacgccgtagcttga

SEQ ID NO: 516685 - DNA, 426 bp, Stenotrophomonas maltophilia
atgtcactggaacacatcgtcgacctgtccaagaaaatcgaagcaaaactggaagcgctgggtgctagcggccgcggcctgcacgagaaggctacgagtatcgaaaggctcctcggacccgacctgatcaaacaaatccgctttctggcatctgttcgaaacaagcttttgcatgaccctaaagtgcgcttgtcagagtctcttctcgctgactactcaaacacagcagccaatgtaattttgtgccttgacggaatcctgccacagcaaacgcgccccccgaaggagccacgcagcgctatatccgacaacgctgaccttgctgcggcttggcgtgacgcatccgtcactggcaaggccgcagtcgtcgcaggcgcgctggttgtcggggcgctttggatcaaatggaaagtgaaccactggtag

SEQ ID NO: 516686 - DNA, 222 bp, Stenotrophomonas maltophilia
atgacagagtttcatgtacgcaacaaactgactttcgtcacccaagctgagaccggcaagttgcgaagctgcatcgtagaaaccgacaatgtagccacggaccattgggtacctgagcagatctggaagcgcagccattccgccacacatcgccagctgaagctggagaagttgagtcacagcctgcgcaaccaccgcggagagaagggacagcatcggtag

SEQ ID NO: 516687 - DNA, 351 bp, Stenotrophomonas maltophilia
atgacggctggtgcaacctctgttggagcgaccgccagcctttccgacaccgccctcaagctggccaatccggccacggctgcgagcggcagtgaactggccgccgcctctctggccgtcagcaatgcggtcatggcacttagcgtctctaccgaaagaacagcctatctggatactggcatgttctacctctgccaactgcatgcgaacggcgcgctgaacccaaaccagtttgaggccgtactcaaggatctgatcagcaagagcgcgacgatgcctacttccgccacgacggttggccaagtgatctccgagcaacggctaatgcataagcaggaacggagcgagtga

SEQ ID NO: 516688 - DNA, 252 bp, Stenotrophomonas maltophilia
atggaacagcttggcgactggtcaaagcacgacaataagaagtacatcggaaagatcgaccgcatctttgtctcgatgacggagggctatgaggtcgagtacttcattgatcattatctggagactcacaattacacggttagtaacgagaaccgcaacatcgttgccgttgcacttgaggactttccgggtagggcccccttcaagcgtgacgatctcacccgatttctggatgcaaagttcaagaagtag

SEQ ID NO: 516689 - DNA, 2052 bp, Stenotrophomonas maltophilia
atgctggatggatggatcggcaccgaagtcggggacctctcggaggatgccgcgatagagatcgtcaagaactggttgtcgctctcattgcaccgatccgatgggatttctgagctccatcgaaaaacaggcatccagaagaagcgcctggttaggctctttagcttgcattgcaaggacacgccactgcctggcgaactcagcaaaatttccgctgcgactgactatcccacccacgatctcgtagtccaggcggtcacctacctctgcccggctaagcctgagacggcagcgccgttgcgagcaattgagctgccgttgacttctcgcggtgatctcaagctatggctccgctcagttcgtaggggtcatcccagcggacggctaactcagatggagttggcggagcggataggaaggtcccacgtgtcgatcgtagcttgggagaacccggatataccgcgaattccaaagtacagggacatctgcgccatcgccgtagcatgtggcgtggagccaccaggcattgcattcgacgtgcgacaaggcaggtccattggcactgcgttcccggtgccagcgagtaatccggcggatctctatgaggagatcctgttcaacggctacatgctaagtgtgcgagcacatgctccctcctgcacagagcgaaactctctcgtgtttagggccagatatggcgggcagggggatgctgagagcaccttgcaagcgatcggtggaatccatgggatcacgcgtgagaggatccgccagattgtagacaagcagttgtccttcctttcagtcacacccgtgacaacggacaaatttgatgcactggaggaggcctgtcgtaatctgggggccgttaccctctcagaggctgagtcgcagctacgaaagctacttggaggaacgctaagtctgcaaggtgcaagtgactatggccgtgaagttctgggtcgcgctcttcctgtacagatcgtccagatcaagaggggcgagcctatcgtcattgcgggggagctacccgcctggctcacagcggccattacacaatcaaaagccgccatcaggcactgtggtgctgcgcaaatcaaccttgtatgggccctcactatgcgtcagcacggtgactggattgcgcctgaagacttccgcaagttcattacttacgcgcccggtttcgactggattgatgacgatcaggcatggtactggcttggccccgacggcagtgccaatcgagtagtgagccgagcgatagacatcctctccaactcaagaagcgcactggatatcgaagtcatctacggaggaataactcgctattcgcgagccggctcttcagatgtggcagaggatgctggagtctggcccccgatggacgtggtgcaatgcctcctcgccaaggtgcctgcgctggtatgccagcaaggggatgatttccgactggcccatcctgatgaggtgcgaggtgagaagaggggcgttgcggaggcaatcatctacgaacttagaagccagggtggcctggcttctcgcagcgaattgcatgaggccttggtcaccgggcaggggatcaacgctatctccttctcagtagctttggcgcactcccctctattgcgccaagtcgatcggggaatctacgcgattcggggctggcctatcagtgcggcgcgcctcaccgaggcgcaaggtcgtgtagggacgaatagcgggccccttatcaactatcgtgaagtcagcgtatcgggctccggtgacgtaagttggatgaacacggtcagtgagagctcgctgaccaacctctacgcgggcgtaccgcgaaaggtgtttctgcacttggatgagggtgactatgatgtcgatggcaccccgctcacgctcacagacaaccgtatggttgggttgattaagctcttggttgcaaagggcgggacggccggcacagtctacaaggtgacagccaatggacgaaccaggaaggccctcatcgaaattgtcggatcggacgaagatgagattgatggtggagatggcgattga

SEQ ID NO: 516690 - DNA, 579 bp, Stenotrophomonas maltophilia
atgtcgcgcacgcaagaacgcttcatttcggtggacgtggagacgtccgggccgattcctggagaattcagcctcctcacgctgggcgcatgcgatgttgatcaagaggagctgacctactcgtgcagggtccagccgctcaatgagaacttcgatcccgaggccttggccgtaacgggcctatcgatgagcgacttggcaaagaacggaattgcgccagacaaggcgatgagtgatttcactcaatggcttgggtccttgcgaaccaacggagagcaactggtcttcgtggggctcaacgcgcccttcgattggtcattcgtgaactattacttccaccgctttgcgggtggcaaccccttcggtttctcggcgctggacatcaaggcctactacatgggcgtcaccggatgtgcctgggcagacactcgctccagcttgatgagcaagcgactgcagacgtaccgcactcccagtcacgacgcattggatgatgcgctgtatcaggctggactattccgcctgattcgtgctcatcaggctaccgccaccttggtcccagggtttcccggacggtag

SEQ ID NO: 516691 - DNA, 1197 bp, Stenotrophomonas maltophilia
atggcactaacagagcaaccggccaagaggcgatcaaaggcgccccgccaaggccgctttagtaccagcgatgaggtcaagcgcatagtatggatatacgcggctgggcactgtgagctttgcgggacggacctgatgtatgactatcgggtcggccagaaaatgaactggggtgaggttgcccacatcatgccggctagtcctaagggtccccgtgggatagagcaacatgatgctgaacaggcacatgcgctgacgaacgatccagctaatttgatgctgctgtgccccagctgccacgacagaattgaccgcgacgctgatgactaccccaagcaagacttgagcaacctgcaccaagcccatcgagaacggatccggttggccgcctcaacgccagaaagcggccgggcagtcgcccttatagtgcaagggcagcacttcagtacccaaaacgatatccctgtacgtgccttcctggcagccatgtcggctgaaggactggctgcttttggtcatccaatgaaaatgatcctggatgcaccagggcctggtgggcgcgacgccgtgtattggaagctgcaggaagacaagatccgctacgaactgcagcacaagctcagtcagcgtggcggcgtgcatggggatgcgccggcgctggcagttgttggagtggctgacatgccggcacttgctttgctggggcaatgcatcggcgatcggtcaaaccggttgttgttctccttcagccgcgagcacgggcttagctggcctgacccaaatgccgagccgccagaatttctgtacacccagccacctcaaggtaaccagccgcttgcattggtgctgtccatctcggcgcaggtccctgagcgagacgtgctggctgtgctacctggtgcgcgaatagctactttgaccatcccccagcctagttacgcaatggtcaagaaccgccgcgttattcatgctttccgcgatgctcttcagatccgcctcagcgcgttggaggcaatgactgcggagacgatccatgtatttccggccgtacctgcagcattgatggttgaatttggcgcattgctcactactgagcaccagcatccttacctgatcttcgatcgcgacaagagcgatcacgatcggttcaagccggccttgtcgttaggcccttcgtcgatcaaaggtggaaaatga

SEQ ID NO: 516692 - DNA, 1260 bp, Stenotrophomonas maltophilia
atgaacttgcacatcaacactggccaaaccaagtatggcagctgggaatttctcttgctgagtgcagctgagaagatttccctgagcgaggcgcaatatcagaccatcgacagccggtaccagcagttgcagaaagttctggacgccgcagatgatccgttgttggtaggggcccacatcttcgttcaaggttcgatgcgtctgcgcacgacgatcaagccggtggcaggtgctcccaaggacttgggcaccatcgacgccgacgccatcgtctggctaccccatgccgacggcgccagcgcaatggaagtactcgaaacaatgtataggcgctttgatgaaggcagccgtgtccaagccaacatcgagccgctgcgccggggcattcgcatcgtctatgccgatgaggatcccggcttccatatcgatgtcactccagctcgagctatcgctggcaatggcgaggaaaagggggcgggcaagctggaagtgccagaccgtgagttgcgcggctggaaggccagtagtccccttccatatgccacttggttgcagtccgcctcccaagaacacatcatcttggatagctcccagcgattgatcaagcgagagggtcggctggttgaggcatcccaagagccgctgcccgactatgcgttgtacgccgatcaggaccccttacgggcatcaatcaagctcctcaagcgacatcgcgacgagtgggcgatccgaaccaagacagaggctcaccgtcccatctctgcagtcatcacgacattggcgagtcaggcatacttggatgtagcaagaacctctaagagccaggcgctgcgtccgctggaagctatgatggccattgttgagcgtatgccggcgtatatccgaggacttccgggccactatcaggtctgcaaccctaaggacgaaggcgagaactttgccgagaaatggaatcgaactgacggccacctctatcgcaatgccttcgtccgatggcacgcccaggcactgacttcgttcggactgggcttgcaaacctttgcctccactacagcttttgccgacgcggttaaggagagctttggtgtgggcgcgtcgttcgtggacgagatcaataacgcgattccagcaaactggaccctaccgggccgtgccgatacggtgacccggaacacgatgatcgcaggctctttctttggcgacggagtgcgcagtcggaactcgcaagaggagatgaagccggttgggcgccttggctga

SEQ ID NO: 516693 - DNA, 1503 bp, Stenotrophomonas maltophilia
atgtgcctccacgggtttggcgagcgccccatcacgggcacgccggagacagttgtcgccgacagcttgagacggctgggtcaaattcttgaactggtagccgaagggagcgatccagatcggaggacggccgagtttcacggcgaaatcacctcctactggtcccggcagctgaaaaaatctgcacaaagtctcctattgttgaaccgccccacacgagctgggccactctatgccttgagtgatccccgccgtcaggtgaggtctgggtgggagacgctttggctatcgaatgacctgggtgcccttggtaagcaccatgagcgcgttgtcggcgtaggacgttctgccaggaaccttgtggcgccggcgttctatgtcaaactgcgtgagtatccgccgcttcacgttcccaaggccgaagggttcttcgagtgggtgatgccgtacttggatgatgaggatcattctgctctctcagcgtggatggagaacagcgagactcttcccgtgcgctggatggtgcttgaattgcctggtgaggttgccggcccgctgttctgcttcaacgtgcggtccaaggcgttgcagcctggacgaggtccgcgctatgggctacgtgccggacgtcggcagggcgcacaacaagtcactctgtttccagcaattttgcaggtggcgacacttgatcttctcgaacgcgcatcaacccactcaagggagcgtgcgggcatcgcagcagacttggagtcgcggcgggttgtccttgtgggtctcggctctctgggcagtccagtggccgcgctgttggctaaggctggcgtgggccatctaacactgattgatcctgacaaacttgtaggccagaacttggggcgacatgccttgggcatggatgagttagggaaacccaaggtcgacgcgctgcggatgcgacttcagagagacatgcccagcgtcaaggtcgaggcttacagcaccttcattgaggcggttctcgccgccaagcctgaggtcttggataaggctgatttggtcattgtgactagcgccgattgggcctcggaggtggcactctggcgcgccaaagcagaaggggcgaagtggccactgatgcaagcttggagtgaacctcatgccttcataggtcacgccttggtcgcgatggagccaggcagtgatgggcggcagctgtttgatgagcgaggcgatttctgcaggacctttacacagtggccggacgggggcgtagtccctttgccagcttgcggagagagcttcattccgggcggtgtcacaggactggctaccgtggtatcgatggtcgttaacagcgcagtccgcatattgcgcggccatatgcccgcaagggcatggatgagcagcatatcgtcgccggacgaagtcagtcgactggatgggaactatcaaggtccgcgtctggaagctggtcaagttcaggtgctcttggagcgggattggccgcttgaggcgtgtacttga

SEQ ID NO: 516694 - DNA, 1167 bp, Stenotrophomonas maltophilia
atgaagatcgctgttgttggtaccggctatgtcggcctttccaacgccgtcctgctcgcccagaaccaccaggtcgtggccttggatatcaacgcagagcgtgtggcccttatcaatgcgcgcaaggcgcccatccaagatcgcgaaatcgaggactatctggcgacccgcacgctgcagctgtcggccacgttgagtccagaggaagcctacgccgacgcgagcttcgtgatcattgcgacgcctacggactacgacccccagaccaactactttaatatcagctccgtggaatcagtgatccgcgacgtttcgtcgatcaatcccgatgcggtgattgttatcaagtccacgcttccggtggggggcaccaaagagctgggcaaacgcttcaactcgtcgaacatcattttttcgcccgagttcctgcgcgaaggcaaggcgctgtacgacaacctccacccaagccgcatcattgtcggcgagcgctccgagcgcgcggccacttttgccaagctcctccgggagggtgcgctgcgcgatgacgttcctgtccttttcaccgattcgaccgaagctgaagcaatcaagctcttcgccaatacctatctggcgatgcgtgtagcctacttcaacgagctggacacctatgcggcgtcccatgggctggacacgcgccagatcatcgagggcgtaagcctggatccacgcattggcacgcattacaacaatccatctttcggctacggcggctattgcctgccgaaggacacaaaacagctgttggccaactacagcgacgtaccgcagaacttggtccacgcaattgtggaagccaatcgcacgcgcaaggatttcatcgccgatgaagtcattcgtcgggcgccgaaggtcgtcggcatctatcgtctcgtgatgaaggccgggtcggacaacttccgcgcgtcggccatccaaggggtgatgaagcggatcaaggccaagggcattgaggttatcgtgcacgagcctgtactcaaggatgaacagttcttccattccgccgtagtcaatgatctgggccggttcaaggagcagaccgacgtgatcatcgcgaaccgcctgactgatgaacttcaggacgtgagcgggaaggtctacacccgtgatctgttcggatcaaactga

SEQ ID NO: 516695 - DNA, 786 bp, Stenotrophomonas maltophilia
atgaccaatacttctccctacacgttccccgtcgtaactgtcggcggcctgccaactgcgtcggtatcacggcaggcgctcgcagactgcatggtccgcgattgcctgcaggcgcgcgctgaccgtgagcgctggacgccccgcgtcgtactttcctccaatgggcagggcattgctctcgcaggccgggacaaatcgttcgctgcagcaatgtcgcaggcggacatcatccatgccgacggcatgcccgtggtgtttgccagccgcatgaccgcgcacccattgccagagcgcatcgcgacgaccgattttttccatgacgcggctcgtgcagcagaagcccatgggctgaagtttttcatcctcggcgccaaggatgaccagaacaaggccgcagtggctgcgatccagaagatgtacccgaaagccgagatcgtgggccggcgtgatggttacttctccgccgaagcggatgacgaggtctgcgcagagatccgtgcgagcggggcggacgtcctttgggttgcgctgggcaagccgcggcaggagcactgggcgctgcgtaacaagcacaagctcaagggcgtcggctggatcaagacctgcggcggcttgtacgcattccttgcaggcgatgcaccgcgtgcgcccgagtggatgcagaaagccggcctcgagtggctgttccgggctgcaaaggagccgaggcgacttgccttccgctacgttgtgaccaatccctactccctcttccggttgctgaccgcaaccacccgtggaagctga

SEQ ID NO: 516696 - DNA, 1083 bp, Stenotrophomonas maltophilia
atgccccttgccgctgcgcccttgcccaccgaagctcccgcgacgaagatgaccccgttcaagaccaacgttcgcaagcacttcagccagcagcatgcgacgttgctcgcgttctggacgggggatggacaacgcccccaggcatccatcgagaaccattgcgacatggtctactcgttgttcctgctgggtgacctggacgatgtcagcccgtcggccgtggacgcgttctgcgagctcgctgcgaagacccgtctgccaggatggaaaaccacagaggtgctcgaggaaggaatctcggtccataactgtgcttatctgttcggcaccctgaacctgctcggcacgcgcttccccgggctgtatgccaaggttctggcgggacgaaccttccatcttcccgagcttgccgacccgcagacattgcgtccggtgttttcagccaaatgggcccaccacaattggcgggtaagccactggatcggcggcgtaccttccatcctgatctctctggaagcgaacgttccccacctgctgccccgtactggcctggccgcgggctgtcgcgatgccgtagacgccctcatggacccgcgtactggcctgctccgggcttaccgcagcgaccttctgcagaaactgttccgcatcgcgtacggcctgcgtcacgcaccagacctgggcgacatgggcggcgtcgcgcatgttctttgggtcgaccatgtaatgcggcgcagatacatggccgtggaagccatccgggccgaggcatccaggctgctgctgggcaacagtcctttcatggagaaggtcccctactgcttggacttcgacatcatccaggcacttcgcactgccgccgaacagtcgacacccgcaaccgcgctggagcgcgaccgcgcgcgtgcactgatgcgcagcattgaagcattctttgagaatcccagcgaaggctacacgctccacaagattccgggggccctggcaacgcatcatgagtgtgcgctgctggtcgaaacctcaaactcaccggcctctggcggtgagccgcttgatgtcatcaaggcagcgaactggctctaa

SEQ ID NO: 516697 - DNA, 1443 bp, Stenotrophomonas maltophilia
atgtcgcgtacgaaggttgcggtcctgtggaacgcgggcggtcgagtcgcgcgtgtcgcgctgcagatgcttttcatccttctcatgggccgggtgctgggcccaacggaattcggaatcgtcacgctcgcactgattcccttccagattgccactacgctcggaacacggacattcacgcaagcgctaatccagaatcaatcctggatggatggactccatcgtgaaactgcccgggcaagctttgtttcaggactggtcgtcttcatcctgattgctgcgtgtggtctcgcattcgggtacgccaaccaatcgtgggattacttcatcatcatcgccgcaatgggactgagcgccccgatttcatcaatggcggtggttgctcaggcgcgcctcagcaaggagatggagttcgccaagatctctttggcggagaccatcgccagcatcgctgccgtagcggcgggactggcatatctgtacatttggcgcgacgtgtacgcggtcgctgtttatgcactaacccaacggagtgttgagactctcctcatctacatcacagcacggcaccggggcttcccagcgccggccgagaaggccaccctgcgaagcacacctggcgacatcaagccggtcgtgcgatttaccgcgccccttttcggaatgaacctgctgacggctgcgatccagtcgatcgaccagattttcgtcgcactcctcatcggcacggaggcgctcggtctatacggcatggcaaggcggattacagaacagccagctcgcctcatcgtacaggcccttgaacgtgcactgttccccgccgccgtccactcgctcgacagtagatcatccgcgggccagatctatgaacgcgccatcgtaacgatctgctttgtctcaggtgcagcgttcttcgttcttgccgcagtcgccccgacactggcccctcttctcttgggtgaccactggcgaaccgccgttccgttcgtccaggtattcgcgatccaatcggcggtgcttccggttggagcagtttttctatctttcattactgcagcaggcgcgaccggcaagcagtttgcattcacgctcagtcgtttcgcgacgcttctcatttctacggtgttccttgcatggctgctcgactggagtgccatggagttggccattgctacgactgttgccaatcttctgcttgtgtaccccaacatgctactggcggagagaacggcaggagtgagtagtcgcgccggcggcatttccattcttcgaggtcttgcgccaggcgccattgcaggcctggccgcctacagtgtcagcggccttgatttcacaccagctctccaagtcgctatcgcacttactgtcgccctagcggcacttgtgctgtccgccttgataattgtgaaaccggcatatcgaaagaccaggaacagagattga

SEQ ID NO: 516698 - DNA, 921 bp, Stenotrophomonas maltophilia
atgacctccgaaaacccactcgtaaccgtcgtgatcccggcttacaaccgagcgcatagcatcggggcggcagtgcagtcagcgatctctcaggattaccccaatttggaggtcattgtcatcgacgatggttccaccgatggtacttccgaagtcgttgccgctatcgcgaacccggcagtgcgttgcatccgccaagccaactcaggcgcaaatgttgctcgaaaccgtggcatatctgaagctcagggagagtacatcgctctgcttgactccgatgacacattccttccaggccacatcagccgctcgatccggcacctcgagaaagacccggggagtgcggtgttctcgcgaatcgttgttgatcgcggcagcgatcggaaatttctgaagccgccacgagcacctaaggagggcgaacccatttccgagtacctttcatgcgctgccggcttcgtgcagacaagcacggtagtcgtccgaacggagaccgcccggacggccagatatcttgaatggctgccctacggtcaggacgtcgacttcgccatccgcgtggagcgtgctggctaccggtggcatatgatcaacgatccgggcgcagtctggaacgatgtgaagagtggaagcaggatttcggcaaggacagatcctgcggttcggctgcgctgggcggaggaggcgcagcagcttcttaccaagaaagcgctgaggggattcaagggttggcgcgtggcgaaggcttacgccgagcacggccagacgctgaaggggctgactctctggttagaagcggcggtgacgggcacctatgcacccaagcacgccgctatcgtgttcctccaggttgcacttgccaacggttggtatcgcaaagtcgcggatgttggtgttggacttcgctcatcgaaaaaatga

SEQ ID NO: 516699 - DNA, 1137 bp, Stenotrophomonas maltophilia
atgaagatcctgatatatcgctctcggctgctcgcaggctcagagacattcatcgccgaccactacgatgccttggaaaggtcaggaattgagtgcgcgttcgcctgcgaggaggctgttggcgatagcattgatcgattccggcacgtaaagaaccgcgatgcgcatggcggaaagtttgcgcggctgatgcaaaagacactcttcaatctggcaccgaattggtctcggcttgcagcagaagtacgtgcacttgcccctgacgtaattcacgcgcacttcgctaccgatgctgcggaaatcctccctatcgcagagaggctgggaattccactgatcgtcactctccacggatttgacgtaacatcgaaggcgagctacttcgcaaagaagctccccttcaaatggccgtacgtgcttcgtgcaggccggctgcgccaaagagctgcggcattcctgccggtttcggacttcctgcgtgacactgcaatcagcaaaggatatccgacggaacggacacatacgcactacctcggaacggacctggatcgtgcaccagcggtcagctcagagccgcggaagaacatcctttttgtcggtcgcttggtagagaaaaagggatgccactatctcatcgcggcattcagaaagatggtggccaatggctttgaaggaaagcttctgatcatcggctccggcccccagatggaaccattgatgcgcagttctgaggatctccaggaccgcattgagttcttgggagctcaggatcgggagaccgtactcaagcacatgagctcagcgagcgcattctgcatgccatcgatgccagccaaaagcggggacaatgagggactggggatggtatacctcgaagctcagcttactggctgccccgttgtggcattcgatcaagggcctgtccgcgaggccgtctgggagggagactgggatcttctagccgaacagggagacattcattcactggcggagaagctttacctcgctattcgcgatgataaagcctctcatgatcttcaagtaatgaggcgtgacgcggtcattcgaacgtttgacctttccacaagaaccagagctctcggacaaatttacgcgagcatcggcacagaaaaatga

SEQ ID NO: 516700 - DNA, 1329 bp, Stenotrophomonas maltophilia
atgaaattgaagaacagccactcacgactatccgccccaatcattatttttacgattgccctagtctacttgtttgtccaagacattccatttcaagatcgtggaacaagaatagacctggatgagggtggctctgggtcaattattcggcaaatattcttcattgctgttgcagcatatttttttctgaagggcattgtttcgagaaagatctcaagacacttcttcccttggtcgattgttgcacttcttctgtggtggtcgattacggtcacatgggcaacatcgccagaaatttcctttaggcgactagcctttaacgcgataatttttatctggatctattctgcaacagcagttgtcggcccgaaaagatctcttcaaaccctcaaaaatgtatcgttcgccctagtattcgcaagcctgattagcggccttttgatacctaatgctatccatcaagcaggagaaatggattccgggcttgtgggtgcatggagaggtgtgttctatcataaaaatcaagcaggccaagtcgccgcaatcgcattaatactcggcgtcttctccgcgtttccaggcttcagctttaaatcgattcggttacgtaaaattttcctgccattgctcggcaccttgggcggatttgcattactcatactatcaaactcaaagacatcgattggcatgcttctgccggctctgctaatcgggtacgtgtgcactcatattgcgatgtctcgctcacgactactgggatacgcagccctcattctgacaggtaccgcggcagcatctgccgctattgcgatatttttcccacagatttcatcaatccttacaacgcctgagtccttcaccggtcgcgcgggaatgtgggcaattctagtcacaatgatcattgaccgaccaatttccggctttggttttgggtcagtttttcaagcaggcgcggaatcggccatttccggatatgccaactggtcgtacctaacctttgctcacgggcataacggctatcttgacctaatcgtggcaaccggctttattggattcgcactgtttttgatttcaatgttcttatccccgacacgctggacgctgaggctgcaagacaatgactcggacctgcgaggaggaatgatcggtcttatcaccttcattgctctgcacagccttctcgagactacgttcatgaatccacagcaacctctctgtgtcgtactggtaatgattgccgcttcgtcctaccaaatggcctctacaagcaggcatcagcctgtagcgaggctaagccgccgtcagcctgtaacgagaccaagcctgtga

SEQ ID NO: 516701 - DNA, 900 bp, Stenotrophomonas maltophilia
atgtacgtttcgcatggtcgcaacaatgatccactaccctttttcatccaccgactggctcgagtcgcgccactctattgggcatttactttgctcttagcaagcctactcattattgcaccttccacgtttagatcgaccgagtacagtacatcagccctgattaactcacttgcattcattccatatgagtgggacgacggcagggtccggccactactctccattggctggacgcttaactatgaaatgttcttttacgcacttttctcgatttccctgttctttaaggaatcaaaaagtagaattgcctttatctcaatcacactattgaccttgatagtctcatccgagattttttcatcaggacttggagagaaatcaacctatctatcccattatggatcgacgattacgctggaatttgtggccggcatggttacggcgaagatgttcttaagcggaacatttggcaatcgcacgcggggagtgacgctattatcagttggaattgccttattcatcctcacagccatatggatgcctgaggatggtcgacttcgattcctatactttggtattccggctgtattggtcgtcctcggctgcctagacatcgagagctcatcgaaaagagagaaaggtaacaggctattgttggcgctgggcgaatcctcttattctctttatgtctcacacattttcacactgggcattctgcgcgccttgttcggcgcactgggtattaaagtgaatgactggccatcagctataggcttcatcgccatcggcctcattgcgtgcgagctcgtcggatatcttgtgtacgcactgtttgagcgcccggtgtccaaggcatccaagaagttggtttccaacgccattcttcggcaagcctag

SEQ ID NO: 516702 - DNA, 1119 bp, Stenotrophomonas maltophilia
ttgaacaggcgaaatttcctcatctcaagttcgctactggtccctgcactttctgctcatgcgctacctttacaagttgcaggtggcgacagaaaatctggcctgaatgatattgccaggagaaaggggttgttcttcgggtctgccgtcaacgtcagcgagctgaccaatgacgcgcaagcaaaggcaatcattgacgactgtggaatcatcactgctcaacgcgcgcagaaatggccgatcatgtggcaataccaggatcatgagacgccagaggaagccgatctagttgctcaattttctttccagcacggcctgctacttagagggcacgcgctcatctatgatgccttcatgcccgactgggtaaaagcgcttgataaaacagcaatgcgaagggcttttgatcgaaggatcagttacgcagctagccgttggaagggtaaagtccattcttgggacgtcgtaaatgaagccattgagccgaacgaccatctagccaatggacttagaaactccctgttcatgaaggcactcggcccctcttacatttccgatgcattcttcagagcaaaggagtgcgattcaagtgcattgctttgctacaacgattacaatctagaatcgaccgcaatttttgcggatagacgtcgacggacagtattgaaacttctggagtcattgaaaaagcgcggcgcgcccgtcgaggctctcggagttcagtcacatctcaaatctcagctcaagtacgatgatcgaatctggcgtgacttcctcaaggaagtagctgatatgggtctcaagatcatagtttcagagcttgacgttaatgatcgatactttagtgaggacattgctaggcgggatgctcaggttgcgagcatgacttctcgatacctcaacgtgactctggatgagcctaaggtcataggcatagtcagctggggccttaatgatggccaatcctggatggcagcccgtcagcgaaagggcgatccaggattcattcgtgctgacggagcagtcccgcgcccccacccgctgagctcttcactggagaagaagccgatgtggtatgcaatcgctgacgcgctcagggcggcacccgaccggtcttaa

SEQ ID NO: 516703 - DNA, 336 bp, Stenotrophomonas maltophilia
atggtggaaggaaggaacgtggtggaactccagtccgacagagtggtgttctactccagacaggatgaggcgagcttcttcgcgcggctgcagcagctgccctgcgtggtcgacgttgcagggaaggggcggattctccatatccaggtggatcgccagcgggtggatgacgaggcgctgacggagctcctggcgctgttccatcgctatcaggtggacatacggcagttgcgggtgtttgacgagcggcgcttcgcacgctggttcagacgacgccagagctactggcacgatgccgtgttcgggcaaccggggcgcgccgacatcgtcgagtga

SEQ ID NO: 516704 - DNA, 705 bp, Stenotrophomonas maltophilia
atgccatggcagaagatcagcgaacttcctgaccagcgattcgtcggcccctacggcatcgaactctggcgcatccacgatggccgggtgttccaccagggccgactgctgcgcaaggccgatgcagcgagcttcgagttcattccggcgcacttcttcatcgctcgcgatgcgcacgcggtctatcacgcgtggacccggcagacctccatcgaccgcgacagcttccggcagtgcggcgcctactggctggacaaccatgccgtctacttcgagtacgagacctcgctgaaggcgctggccggggcggattgcacgacgttccgtgatctcggtggcggctacggggccgatgaccatggcggctggtactgcggccggcgcatgaagcactgcctgcgtggcgaccagctgcaaggggtgccagaggacccgctgtacgccgttgatgacagcaacgtctactgcgacgggaagccgctgcccggggtggatcgcgagcgctggcagctgctggatgggtgcttttcgggtgatggcagccgggtctactacctggagcggaagctgccgcgggtggatgcggctacgtggcgctggctggaggggagctggtcgcgggatgcgacgcagttgttcaccctgcatctggttgagaaggacgctggggtgcgggcgcggtttgggtttgccgcagcaccctga

SEQ ID NO: 516705 - DNA, 825 bp, Stenotrophomonas maltophilia
atgaaaagtgcaattgtcgttcttcactcggatgagcaggacgcagtcgcggtcgctctgcgcgacgtcaaggacgtaactgtgattcatctggaccagctgaccagactgtggacgattcgggaagcgacgccgatcgttgcccagcgtcccgatcgaaatccgatgctgcatgcaggctacgtaatcaacagggtgtttgatatctctcgttgcgatattggcatgaagctccgcgagtgtggactgcatgagaactgggcacatgctgcactgggctctctcctggcgggtaccgcaacactggcgcatggaatcggtactcgcggggtgagtaaatcacttcttccgcttaatgttcagtggatgctgatttctggccttgtttcggacatcagagttccatcattcgcgtttggctttggccacaggatgccagacacttctcatctcaaggatcctgtacagaaatccgtatggtcctacttcaagtgggatggtacgtcggatgtagaagagggagaggagcagtggcatcccttcttcgtcgaacggcctgagggagtgcccgtagtctgcagctatcacggcgatgcggttgaccttgagtttccacgaggcgcggtatcgaccgacgcgagttctatcacatcgctagtagctgcatgtcgcgaaaccttcgatagcagaattggcgagatcttattctacgtccaagggacgaaaatcacgttctgtgcattcagcccctatctggccacccttggcgatccggtgagaagcagggatctgctcctgcgtgggatgccgatcgcgtcggtctag

SEQ ID NO: 516706 - DNA, 1218 bp, Stenotrophomonas maltophilia
atggatctgtgctttgaagatctgaagcgtgcgatcgatgagcccggacgcacggtcgacgtgtgcgtggcgttgatggaatcgtggctcgaactcaccgggcaacgcttgggaaatgcgctttcagtcaagctgaatgaagggcccgggattcagcgtcgggtcgatgcgatagatcgtgcaattcatcatcttgacgctgccggaagacggaggctacttgcctcgccttgggtatcagcatttctggacgagccggcgggcatcgcatatgagaatcagcatggtgagccggtttcgacactcgacgctctgtggtttgcggctatcgccgagtgcccgattcaacagcacacccatgagaatgagctgaggctgcttactgacgcgaacccgctcgaaagttctctgggcgactggtttacaacgagtgagagcgacatcgctgcaaggatagacagacccaggattggtggagtgattgttcttgatgtggacagccggctttcgcagaggtacgagcccgagagcggaacgttctgccaaccatcattgggtatcccgctgcacgagatccaagtgataaggaagaaacttgaagcggctatttctatggtggacgagtcagccccgcatctcggtttgttgattcgaacattcacaagacgtgttcttgtcagaaaatccattggcgccggtgacagcgtagccgagctcaatcttgggtcggagtatcggccaactcatgtgggctgcattcgggtgctgaatgtccatagggaagaaatgacggtggatctttgcgcagaagcgatcctgcatgagtctgtgcattcgtttctttcggcatatgaagatgtctacgggaagttcatgtccagcgcaatccgcgttcggccggtttcgccctggtcgggaaatttcattccaaatcactcgctggtccatgctgtgttcgtctactacgccattcatcatttgctcgctcgtgctctggaatctcgcgcgggctttgaccacgcagaaatcaagagactgaagcgaaggctgatgcacatcgatggagggttcttcatcgagaggagaatatcgacgcttttcgttttggaagaagcgccttcagagaagctcatggcactggtcgacgaaatgcagggtgcaataaagaaggttgacagggctcaagaatgcgctgtggccacgaaggcggtggcatga

SEQ ID NO: 516707 - DNA, 309 bp, Stenotrophomonas maltophilia
atgtcgaagatcgacaagtctgtgctgcttcctcccactctcgtagcactgctcggcctgtccggcattgcagctgcagcgcagtcggatgtgtcgccaccggttcagagcctctcggtcccggaaatcagtatcgacagcgggatcgctacgcacgaactgtctgacgatcacggaatcgcaggcacgcagtgcacgagctactcgagtggcgggacccattgcgggcactactccaccggagatcagcaaaaggagaatttcaggtttgcgcatgtaattcctgaagtccggaagttcattatctga

SEQ ID NO: 516708 - DNA, 729 bp, Stenotrophomonas maltophilia
atggccttcaccagcttaggtgtacctccggttgctcgcagccatgagccttggcctgcccctatgctcaatgtcatcgagcaagcaatgtaccaagcctggatccatgtggtgacaaatcacggtcccgtgcttgatgcggcgaatgaggacgacattaccgatcggatgcgcacagcgctggtcaaactgcgaaggtccggcgccgttgaaggcttcaacggcgatgtgttccagttgccgatccgcgatggaaagctttcttctggcgctggtgattccatcgatatgatgccggatttgaccttctatattgtcggctgccgtgacggtgtggaggaggatgagcatgatggtttcttcattgaatgcaaagtgctggacgcctccaagggactgtcgctgtacgacaacaacggtatagcgcgcttcgtggatggacgctatgcgagccggatgcctcaggcaggattgattgcatacgcgttggggaaaacgcatacctgcccggatgcatcgatgcccggctacatggcgaaaactgcaaaaggggccagtgttacgcatggtcagcgcctgaagtggaacagcgcagccagtagctcgctggctgctttgggtagcctcagtggcaaacggtggatcagcgttcacggccgagcactgactaaggatccaacagtggctctccctgacatcgccctgcgccatctttggctgcgacgctga

SEQ ID NO: 516709 - DNA, 2979 bp, Stenotrophomonas maltophilia
gtgaccaagtttgaactcgttgacgagctgatcaatggcggtgtgaagccggagacgatcgtgcgtctggacgtgcccgcgacgcatcaacatgtccgctatcttgatttgattccccgccccggcgagcaatccctgtttcccgacgctgtgattgagtcggcgggtcagccgttcgcctatgtcctacgaagggaccgcttgggcgatgttgagaaggaggagccttctctagctcaactgattcgtatccttgcctgccgttctgacgccaaatacttgtgtgtggtcgcacccgggaacatgggggtgtacccgatcgtactcagtcgcaaggcgccccagacgctcaagcaccagcatacgaaggaggcgcccacctggctggatctactgaccgggaccatggcggaagcggcggctatcccgcgcaagagggcgaagtctgacgagcaatggttggaagcactgttgttcaacttgctgtcgcttgcggcacgcgggattcagcaaagtgccccaaacctgaccattgagcagacactcgcgctcgtcgggcgggcgctgttctttcggtttctggttgatcgcaagatcgtcgccccgactcaccacaagcagatcagtcctggcgcggaatccatcgccgacgtcttcgccacttccgatggcttgatcgccaccagccgttggctggatacaaccttcaacggagacctgctctcgcttggtccggagggtgcgcatgggctcgtcacgcaatgcggcaacggcatcgaggatgtatgtcggcatctaaccaacatccaacacaactcacttggtggtcagatggagctggactggagcggcattcacttccggcatgtgccagttgatgtcctcagtcaggtttatgaagatttcgcgcacgagtttgtgcccgagctggcgaagcaaacgagcgtacatttcacaccgcgtgctatagctgagatccttgtcgaaggcgtcttcagtgcggtgaattccgcaccgccacatgccgcaaaagtgcttgatccatcggtgggcggaggtgtttttctcgtattggcattacgccgactggtcgccgaacactgggcgcattatggtcagcgccctgatcgagcgcgcattcgagccattctcaaccatcagttagttggctttgatatcaatcgtgatgcgctgaacgtctgcgctttgagtttgtatcttgctgccctagaactggacccagagccgagccccatcagcgaactcaagttcgacaagttggtcggcagcgtcctggtgccagtggatatccaagcttcggacaagctggcggatagcgaactaggtagcttgagcaaggaggtgcgccaggcctacgcgggtacgttcgatattgtggtgggcaatccgccctggactggctggaaaggcgagaccgctcacgcgcttgagtgttgcttagcggaactgatcgacccccaagcaaagtctgcgaagaagatcagggctcgctacggttcgcccgatgtagcgttcttgcttgcagctcgccactgggctaagcccgcgggcgccataggatttgcgctgcacgccagactgctctttcaggcagccagcatgcccttgcgtcgggtggtgtttgacaccatccgcgtaacaggggtgatgaacttctcggcgctgaggcaggatgcctggctgtggccgagcaatgatgcccagttcatcctgctcactgggcggaacgttcgaccagaaaacggcgactcattctacttcctcagcccgcgccgcgagcgggctcttgagcaaaggcggcagtttcgaatcgatccctcggctgccgtgccggtatcgctacgcgcctcctgcaacatgccgtacaccttcaaggcgctgtacaaaggttcagccttaggtctggagctgattaatcgcttgtgcgcgcagccactgacgaccgtcgcgcaagcgcttgaagcgaatggtttggtattcgctagcggctatcaactgggcaccttggaaaaccagacgcaacctaccggtgaaatgcatggcatgccggaagcatcgttggccatgcactttgaagtaccagaggacgcaccccgcttcatgtgggaaagggtccaatggcctcgtgctgccgagatctacaaaggaccgctgattctctttagagaatcgccaaagcgtgacttggacgtacgaggagccttgtatgcgccatctgacacggtctacagagagcattaccttggcgtgtctttcagtggtaagcccgagctgaagtacctccgcgacgcgctgtacgtcctgtcttacagtgacttggtgctctactaccagcttctgaccagccccaagtttggcgttgaacgcgattccgcactgcaatcagatttcgagaacgtcccgctgccgaacttggagagtctgcgagcccatagtgagcaactggcatttgtcgcggacgcgatccgacgtggagaccgaccttggcaaggtctcaacagcctaattgctgaactgtacgaactcagtccggcagatgaacaattgatcgaggatacgttggctaccgagctgccgttcgcagaaacgcgcaggaacgcagaagctccagtctcggaaacgcagctggtcgagtttataagtaccttcaacaagattgtggctccatttacgagcgctagggctcaagtgctgccaccgatgccggctgcacgcggactgggctgggtcttctttgccattgccgatgcgactaagcctttgcaaggctcgacgaccttgacgggtttcgatgcgctttcggacgtagcggaaaactattgggtctcggccatgcaggtgaactgcgcgcctggctatcggctgcacggccggcttaatcaaatgcggtattggacacgcaccgaggcgcgcctagctgcagtggagtggattcggcgcgccggagcatcgccctga

SEQ ID NO: 516710 - DNA, 417 bp, Stenotrophomonas maltophilia
atggaagcggtcctgaagatggcggagcaatcactaggccctgaaatcgacaaatggaaggcagcgggtgggcgcggggggtttgggtccgtttttccccttcaaagcgaatacttcactttgtttgcgaagaatgcggaccagttgggcttggttgatgagcgcacggcgaccctcgttatccagagatacattgacctcaagggttcggtggacagttttctctacaacaaccgtcttcttgaggaattcgaacaggctcggcttaagcttggagcgtcgacggacagttcgtgggtagtcgagcacatagagagcatcgaagatcaattgcgcaggtatggtccgccgttgatccagaattacgataaggcggtagcgtccgtaggcgccgcgctgaagagccttaagacttga

SEQ ID NO: 516711 - DNA, 606 bp, Stenotrophomonas maltophilia
atggataccacggtcgacaagagcgccctcgcccagcgcctgcaggacgccctggacgcactggagtccggtgacgaagctgcctggcggcaacgcatcgacggactggtcgcgctgcgcacgcagccgatgatgagcggcctgtcgcggctggcccgcgagctggggcaagcgctgggtgaactgccgaccgtgcccagcgaggccggtgagctggatgacgcctgcgcgcgcctggaccacgtggtggcgatgaccgaacaggccacgcatcgcaccctggacctggccgaggaatgccgcagcctgaccgaacagctgcgtgccgaaggcctgcagccgggccaggacgcgcagctcgagcgcatccgccacaacctgaccgagatcgccctgacccagagctaccaggacctgaccgggcagatcatccgtcgcgtggtcggcatcgtccgccgcgtgcacgagggcttcggcgcactcggcctgccgccggaacagcatcgcaccgacccggaactggccgggccggcactgaagggactggaccgccacgcggtctcgcagaacgacgccgacgacctgctgtcggatctggggctgtaa

SEQ ID NO: 516712 - DNA, 246 bp, Stenotrophomonas maltophilia
atgccatcgcccaaccatatccccggcgacgcttttcccgaagaggccatcggcccggccgatctggagagcccagagacgccggaagcggacccgcaatacttgctcgtgcagagcgggtttggtctccatgtccgtcttggcaaagacggcgaccagggcctgcgcagcgaagacgacatcgccgagctactgcggcgagcgttgtatcaccgcaaaactttgacccttcatatcgagttctga

SEQ ID NO: 516713 - DNA, 537 bp, Stenotrophomonas maltophilia
atgacgcagcagatctttacctttcacatcaccgcttctcttgacgtcaccgcattgctgcccagccacgctcggagcattgaaagtgctgaagcgctgatggatcgcatcgatccccaagaagccgcggacgcattgatgactttctttgatctgaatcggatcgagacgcgcatcagttgctcggagggcgatgccatcgcggaagaggtgccgcgggtcgtactttcccgcaggcgtgcagctctcttggagtttcctgcgatccagcatcccgatcaaaaagagggatgtgtggagttgacgggggacgggttggcgaccaaaagctatgcgattgctgcggcgaccaaatctgaagcgctggagaagtttcgcaagcttgacgcggtgcagctcaatgccacgcggtggcaggtgtggggagtgaccttttacgacgacgtcgagtttacgttgggaggaaacctgtatgcctttcgcgtcgatgaagagacgcttgaagccattgccgagcacatcgaactagagctgtaa

SEQ ID NO: 516714 - DNA, 249 bp, Stenotrophomonas maltophilia
atgcaaccgctcatcctctcgctcgacccctcgctctctaaccagttctctaacgtaaccccgcaggtcctcgccgacgccttggccgacgttctgccccacgcattgggcctgcttgccgccgacaccagcacgtcggtcatcgtgcccaaccgcgacctgcggggcgtaccccccgaccaagtgctcaccttgcagctggcaacgctgaacagcttcctggacatcgaagacgccgccaacggctaa

SEQ ID NO: 516715 - DNA, 180 bp, Stenotrophomonas maltophilia
atggccatcaacggcaacgtgcacacgacaaacagcccagccaggatccagacccaggtccgcaacctgatgggcgataccttgccggccatgcagaattcccctgaagtgcggctcactgtagcgaccggctccggcggcgccaagccagtgccgccccatccgcgaggggggatatag

SEQ ID NO: 516716 - DNA, 2364 bp, Stenotrophomonas maltophilia
atggatggtaacgatctgcgcgcgctgagcgcgaaacggacttgggaattgattgtaaaaatcgggcgtgacaaggaagagcgagagcctctcctcgctctcgtttacataatttgcctgtatgactcattgaagtatgggtcactcaagtccgagattgagaatttccgcgacattaagagtttcattgagcccgataaattctcttcgcttctgaatgatctaattggcggggaagattccaggcaaggacggtctgaagttgcttggagtagattggttggcgcgcttgttgcttgggcgggggctcctcaatggagggcagagccaccgagtcatgaaaatgtgcgcgctgtctattcatctcttcgtcaatggcttccgagcttcgatgggcttggtattgtagtttttttgaatgaactctatttgcactatcgaggtgcggcatggtctcgcacggtggagacactcttctgcgctgccttggtaggtggcagttcaaggctatccgaatcaaccgcatggtcgggtaatgttgcgtcggaagccgctattcgctcccggtccaccccgcgcctcatcgcaccgtttggtgctcctgcgttgagtcgagccggagctgcgctgtggtggatacgccttcgatgcaatggagttgaagttcagcagtcggcagacgtggtcgatcttcatgttattgagggtgagtccatctcggcgagttttgcgggtcgagatttgcctccttcaaggaactggaggtggattgagcagttgcatgagatcgtttcgggcgagagattggtcgctctaatcttgccttcgtcgtcactggcgcggccaacgtaccagcgaaagctgtctgagcttgcatccaggggttggatacatggtctggtcgcgatgccgactggttcttctaagagtgcccgagtcgtactgattctatccaggcatgcgcgccggcgagatgcggtgcttgtgacagatctttcctccattcccgatgggctttcgcttgggcttgaggataaagccgagatcggaggtctaattgttgggagggtacttggtatcgatcgaggttttgatgttggtagtcgatgggcattcagtctggcggttgagagggttgtaaatagagaaggtttggacgagcttgcggcgtcttctgggttgatcgaatacgttgaggatcaggttgctgaggcggatcctggtattttgattccccgggctggagctgtatctgttgcgggagaagatctgttttctccaatccgaagtgataaattatggtctgatgttaattcttctcccgggtcttgcttttatgtgattggtgacaatggtgaagggaaaagtttcctcttggcggatttggctcggagattttccaatgatggggtggtttgtgtggcgattgccttttcagtgaatgataggttttggtcgataaagccctctgttgacattggcttgaagtatgtttatcgcgggctcctggattcaaagggcagggttagtggaaaggaatttgagagaagcttgcttcgagatattgaggctatcagctcagatccaactaaacttgaaaggttgagaggttttctcggtgagtgtggatttcaggagggtgtgtacctgcttccgggtggagggcggtccgcgaagggttccacctttgtggagataggtgagttggcaggtcgatctatcgccggctatcagccatgcttccggcgaaaaatgagagatggtgaaattgttccattcgcaggtttgagctcgggtgaacggcacatcgttcacttgctgcttgttgttgttaggaatatggagcaaggggtcgtgttccttgtggatgagccggagattagtcttcacgctaagtggcagaggctaatgccgattctgttctcgaggatgtctggagaactcggcgtaacgttcgttgtcgcaacgcactcgccaattcttattgcaggtgcgaacgatgcggcaggagttgtctattcggcctcctcgggcagtttgcaggagatggagctctccgaccggaattcggttgggcgggcactgctggatggtttcagcgtgtacacccctggcagtttggatctatatgaagattgcgcgaggattgtttctacagctgttgaggcttgtaacgatgatcagccggttggacgcagggtggaaatcgctctggctgacgtggatcgtctttcgcaattgatttcggctgccaaagggtgcgtggatgagacgcagaggggcaaggacatggagctcttaaggatggcgcgccttgcaataggtgaggttgaaagtcacgcacacctcaatgcagggggctga

SEQ ID NO: 516717 - DNA, 738 bp, Stenotrophomonas maltophilia
atgcctggagtgaattctgctgtgaaacagtattggtcaaagccaactaaggttctgcttgatgctggtcccgcgagaaaagctttgcgcaatctctacttttcatcaatgcgacgcagggttgatctttgggccgaaagccagaagtttgatgaattgattgatgggaggaaaattacgtggcgcatcctccaatcaggattcagagactatcgcgcagcagttcagggtgggcgctgctgttattgtaggggtgaattaattgggtctaaaggtgggaggcccgttgaacacgttctgccgcgttcacactatcctcaatttagtttttgcttttggaatcttgccatttcttgcccaaggtgcaatgggattaagacaaatcatgactggatgatggcgttgaataaaaggagccgaagatatccgaggccagttgactccgcccattttttccatccggtttatgatgcttatggggaccatgtttggatgcgccgggttagtgatgggcactcgtccgtcgccgtcttcgtcggcctgaccgacaaggggagacacctttgtagttctgtgcttaacaaggtctcgaaggtcgaaacgagagtcgccggaagcccagggctagccaagtcactcgatttaatagacgggttggtgtctggtatcgccgtgcctgctaacggggactacgtgcggtttcgtgagcaattgaaagtggttcttggtggtctttag

SEQ ID NO: 516718 - DNA, 447 bp, Stenotrophomonas maltophilia
atgccgaagatccgccccgcacgtgtcgatgacccgcccgcgatcagtgcggtgtgcctggccgcgttcaacgctgcagtggcaccgacgctcggcgcggacggcgccacgttcgccagtgtcgcggccgccgacgcattcggcgtgcgcctgcagggcgagaaccagatcctggtcgccgagcaggaggaccgcatcgtcggcgtgatcgaactgaaggcgggccggcaccttgcgatgttgttcgtcgatcccgcctgccagggccagggcatcggccatgctttgttcgaggcggtgcttccacaggtgcgcgagccggtcctgaccgtgcgcgcctcgctcaatgcggtaccggcctacctgcgctatggcttcgtgctggacggtgacgtcggcgagttcaatgggttggtgtatcagcagatggtgcggtcagcggcctga

SEQ ID NO: 516719 - DNA, 309 bp, Stenotrophomonas maltophilia
atgaagagcagccgagtgacgttgtgggtgctggccgcggtgatggccgctgcaggcaccgcccacgccggggaaatccaggtggattgcggcgactacgcgctgcaggccgaagagaccggggccggcccgatcaccgtggtctttgaatccggtttcgggcaaggcgcgggcgcctggaaggaagtggttgcgggtctggggcgcgactaccacagcatcacctacgcccgtgcagggctcggcaagtccggcagcgacggtcacccaagcgcatcgatgcgcatctggccgacctcacggccgtga

SEQ ID NO: 516720 - DNA, 2001 bp, Stenotrophomonas maltophilia
atggctaagggcaagagggcttattatgcgggtgtaatcgaggtggaaggggggtgtgagatggaggacaggcagcgcggtcaacgctatcacctgacccaggcgcagttgcgccgcctcacgccccacgaacatcccgcgatcgatccccacaccggcaggaccaagctggtcgaacacgacgggcagccttaccggatcctgttggctctcgagcgagacacgacacccggagtccggggcttggccgggttcggggtgcgcgtgggcaagaccaagaacacctacgaggtccaggtgggcacgggggtgggcacaaaaacgaaacgggtgacgctgggctcggtcctggaattgaccatggaagaggcccttcgcaaggccttggacgcccgcaaggccatccagaccagcggagaaagccccaagcgggccgaaaagatccatgaggacgccgaggccgcgcggaccatcaccgtgcgggagtgcctgaaccgttacatcggacaccttgaaagcctggtgagcaacggccaacgaaaagccagcagcgtggccgccgtccgggccagcctcacgcgcgtggcgcgccccagcgtgggccttgcgaacaagcagctgcgcgagctgacccccaatcctggatccccggagccacaccccatgatcgtggcctggaatgcctgccgtaaagcctgcatgtcggagtccaaccagctgacccaagcccagaaggacgcgttgggatcggtcggagactggtggaacatgagcgccacggaactggaggcgttggggtttcggggccggtacatccagcgcgccagggcggccgggcttgcggccaccgagcacacttttggcgacatccaccgcgccattcagttggccatggagaacgaggcctatttgtcgcgcgtccagaaacgcgacccggaaatcaccgccgaccccacccggatcctctacaagcagggctatttccgcaatcacacggcgctgcgggcgcactatcgcaaagcggaggtcagcaaccccttgggcgacgccgacgacgaccagtcgctgcaacgggcgttgaaggcgctggtacagcggcgcgagcaatttaccgatgttcaccagaaggtgggggtggactatctcctgatcgttttgctgtgggggttgcgtcgcaatgagggcaccgtcctgcgctggtatgacgactgcaccccgggacagctcacccagcaggaggcgtcctgggtgtggcttgcgcctcaccccgaggccgtcaatcccaccaccggcaagcgcggctcccaggcgttcttgcatgacaccaaaacgggtgtcgtccagcacatccccattacctatttcgccgagcggatcttgcgcctgcggtgggacgaccgcctcgacaccttggagaaccacgcaagccgcctggccaaggccaaggcggaactggccgcagccgaaaagcgcacccaggacgaggtcaagctggccgtgtacaggaaggccattcggcgcgaagagtttcgctatcgcaatgccggctgggtgtttcccgcccgatcggtcaaggccaagagtggctattacaaagacagcaaatcgttgctgtcgttgctgcgcgaagaggtgggacgctacaacctggctgaagatatcgaccagggtctgacggttcacgacttccgccgaaccttcggccgtattgcgtccaagctcctgtccgggcgcatggtgtccgaactgctcaagcactcccaaagcaggggcaccgatggcgacgacaaatcggcctccacgaccgagaagttctacacggaccaacaatgggccgatgtgcgcatggccatggcgaccgtggaggaagctatcatcaggtcaagcccgcgggcttggaaccgcctaaaggggccggacaaacccgtactggacgaagcgaacgacccgcctgttcagctggcctggacgcggcggaagcatggggacacggaagaatga

SEQ ID NO: 516721 - DNA, 738 bp, Stenotrophomonas maltophilia
atgaaaacgcttgaggtgtcccgggacgcggacgccctcttggcacttctcgaccaacgggaggccaagcacatccaggaactcgcagaagcgcaggcgggcgtgcgcgcggttgtctcaagagacgccgcggcacgcttcctgggcatgtccaccaagaccctgtatcggatcatccagaagggggaaggacccccttttgtgaagcggtcggtgggcagccgctcccagaacgaaagagtttacttcccatttccgcagctcaatgcgtggaaagaggcgcagacccagtattccagccccgagcagcgccagaagcttcgcgaggaagccgagcgcgcccgcttgcgggccgaactggccgaccttgaagcccaggccgccgcactgcgccgggccctgcgcgaaagcggtgacctgcggatcatggccttcgagggactgacctcgctgaccgagccgcacccgtgggtgatgggcccgttccgcgtcctgggccacgccctgatcgtgtccgaccaagatttagaagaaagcgacatcatctggctgtcgctggaagaggccctggcggaagactgggccgacctggccgcgcacgggcagcttactgaaatctatgccgcagtcctggaagaggccgcacagctggccaccaacaaccacaaacgaaagcgcctggccctcattgcggagcaggccaaaaccgacacacgcggtctcatccgcgacctttga

SEQ ID NO: 516722 - DNA, 4800 bp, Stenotrophomonas maltophilia
atggccgaaaccaccatccaccaaatcctcgaagagcttgctgaggccgccactgaccaccgagataagggcgggaagttcgagcgcctgatgaaggcgtacttccaagccgaccccctgtatgtgtcgcggttctccgacgtgtggctgtggaacgagtggcccgaccgcaagggtaaggccgacaccggcattgacctggtcgcccaggagcgcgacaccggtgccctggtggccatccagtgcaagttctacgcgcccagctacacgctgcagaagggcgacatcgacagcttctttaccgcgtcgggcaagtcgccatttgcctcacggctcatcgtgtccaccaccgacaagtggagcaagcacgccgaagacgcgttggaggcccagcagatcccgtgcgcccggctgcgtgtggcggacctggaagacagcgccgtggattggtccaagttcaccctggccaagcctgaccaggtggtgctgcgcaccaagaagaagcccttcaagcaccagcaggcggcgttgaaggccgtggccgaaggcttcaagtcccacgagcgcggcaagctgatcatggcctgcggcacgggtaagaccttcacctcgctcaagatcgtggagcaggaaacgccttccgacggcctggtgctgttcctggtgccctccatttcgctgctgtcccagacgttgaaggagtggacggcgcaggccaccgatgagatccgggcgtttgccgtgtgttcggataccaaggtgggcaagcacagcgaagacatcgccgtccacgatctggccttcccggccacgaccgacgccaagcgcttgggtcaggtgatggccgcgcgacccaaaggcgatacgcgccgcacggtgattttttccacctaccagtcgatcgatgtcatttcccaggcccagaagaagcacggggtgggggagttcgacctgattgtgtgcgacgaggcacaccgcaccacaggcgtgacgctgtcgggtgaggacgagagcgcattcgtgcgcgtccacaagcccgacttcctggcggccaagcgccggctgtacatgacggccacgcccaagatctacgccgacgagagcaagaccaaggccgacgaggcgggcgctgaaatcgcctcgatggatgacgagaccaagttcgggccggagttccaccgcctgggcttcggcgaggccgtctcccagggcttgttggccgactacaaggtcatggtcttggccgtggacgagaagtccgtcaccaagaccttccaaagccagttggccgacaagaacaaggaactcaacctcgacgacgtggtgaagatcgtcggctgctggaatggtctgtccaagcgcctggctaccacggatggcgacaacaccgctcagcttgatccgcaccccatgcgccgggctgtggcttttgcaaaggacatcaagtcttccaagcacctggcccagctgttcccggaagtcgtggaccagtacatcgacgggtccgacgaagacctgttgcgctgcgaagtccagcatgtggacggcacgtacaacgtgctgctgcgcaaccagaagctggactggttgaaggaaggcagcgaaggtaacacctgccggattttgtccaacgcccgttgcctgtccgagggcgtggacgtgcccgcgctggacgccgtgctgttcctcaacccccgcgacagtgtggtggacgtgatccagtccgtgggacgcgtcatgcgcagggccgaaggcaagaagtacggctacatcatcctgcccattggtgtgccttctgacctcacgcccgaagaggcgttgaaggacaacaagaagtacaaggtggtctggcaggtgctgcaagccttgcgtgcccacgacgaccgcttcaacgcgctgatcaacaagatcgacctgaacaacgatccgggcggcggcaagatcaatgtcatcggcgtgggtggcaaaaagcctgataccgagggcggaaagggcgatgggcagggtggccagcagatgggcttcgccttcccccacctggacgagtggcgcgaggcgatctttgccaagatcgtcaagaaggtgggtacccgcaagtacctcgagcagtgggccgagaaggttgccggcattgcccagcgccacatcgaccggatcaacctcctgctagccgaccccgacagcaaggccagtaaggcgttcgcccaattcctgaagggcctgcacaagaacatcaatccgtcgatctccaaggacgacgcaattgaaatgctagcccagcacctgatcaccaagcccgtgttcgaggccttgttcgagaactaccagttctccaagagcaaccctgtgtccgtatccatggacaaggtgttgaaggtcctcgaaggccaggcgctggaaaaggaaacagaaagcctggccaagttctacgccgacgtgcgcatgcgcgtccagggcgtggacaacgcggaaggcaagcagaaggtaatcaccgagctgtatgagaagttcttcaaggtggccttcaagaagatgaccgaccggctggggattgtgtacacccccgtccaggtagtcgacttcatcatccgttctgccgacgacatcatgcgcaaagagttcggccaaggattggccgacgaaggcgtgcatatcctcgatcccttcaccggcaccggcaccttcctggtccggctcctgcagtcgggcctgatcccgcccgaagcggccaagcgcaagtatgcaaccgagctgcacgccaacgaaatcgtgctgctggcctattacatcgcggctatcaatattgaagaggcctaccatggcctgacgggtggggagtacacgccgtttgacgggatagtgctgaccgatactttccagatgggagagggtgagggtcagttcgaggaggtcttccccgagaacgataagcgagccaaacagcagcaaacgcacgacatccgggtcatcgtaggtaacccgccatactcggctctgcaggacagtgcgaacgacaacaatcagaacgtgaaatatccacgtcttgatcagcgtatcgaggaaacctatgtggcagagtctacggccactaacaagaacagcttgtacgactcctatattcgtgccatacgctgggccagcgacaggatcaagcaccggggtgtggtcagtttcattactaatggcggcttcatcgacggaaagtccgcagctggattgcgcaagagcctggcaaaggagttctctgatctttacgtgttcaacctccgaggcttgcgagggcagaagacttccggcgagaaagccaagcaggagggaggccagatctttgggcaggggtctgccacaacgatcgccatcatgttgctggtaaagaacccgagtcgcgcaaactccggtcgagttcattaccgggatatcggggactacctgtcgcgggacgacaagcttcggatcatccaggaagcgggtagtgtcaccaatattccgtgggaaacgattacccccgatgagcacggtgactggatcaacctacgcagccccgcattccagaagttcatgctcatgggagacaagagcggttctcctgaaacgcgaatttttgcgacctactcggctgggctgaagtcgcagcgggacgcgtgggcgttcaatttctctcgcaatcaactgtccgagaacatacagcgcactatcgcgttctacggaacccagtgccaagcctacgcaagagcggcaaaggccgcgactgacgaaccgccgtccgttgattcggtgatcaacacggacccaaagaagatcagttggactcgccagctaaaagaggatgttcgcaagcagaagaagcttgtgttcaacgaagaggcgattgttgaaagtctctatcggcccttcaataagcagtatctgtacttctcgcggcagctcaatgagatggtctaccagatgccccggctgtttccgaagcctggtttgaagaacctggtcattggcgtgcccgcctctgcgacccgaagtgattacagcgtcattatcacggacacgttacccagccttcatgcggcggatctggtgggttcccagttcttccctttgtacttctatgaagaagccagcgaacaggccgacctgctagccaatggtggagaggatggttacgttcgccgcgacgccatcacagaccaggcgctgaccgccttccaaacggcctacgtggacaagaagatcggcaaggaagacctcttctactacgtgtatggcgtgctgcactcgactgacttcaagcgccggttcgaaaccgacctgaagaagcaactgccgcgcattccctttgccagcgacttctgggcgttctcgcatgcaggccgccagttggccaagtggcacctcaactacgagaccgttgatccatatccgctgggccaagcaggtgaactgcccctgggcgacgaagtccagaacaaggtcgtcaagatggcctgggtcaagaaccggttgaacggcaagctggtggaggacaagacggcgttgaagttcaatgccaagaccatcctgaccgggattccgcccgaggcccacgagtacgtggtcaatggcaagcccgccatcgagtgggtaatcgaacgctaccaggtgtcgccggacaaggcgtccgggatcgtcaacgaccccaacgactgggccatcgaacacaacgaccctgcctacatcgtcaacctggtcaagcggatctgcacggtatcagtggagaccatgaagatcgtcaaggcgctgccgccgttgaacgagcggaagtcgtaa

SEQ ID NO: 516723 - DNA, 1665 bp, Stenotrophomonas maltophilia
atgaacatcctgacgctggccctcaaagacaccccctccgcacgcaatctcccggttatccaaagaatccacagcgcctgggccgatgaacccgagcggatcctggcgttcttcattcgcgacaacccatcattgttctcccacgccaagacagtgatgggtttggacgtgctggattggggcgagcccatgaccaaacatgcggtcgaagaggactcgttcgccaaaatgctggtcttggcgttggcaggaatacccgtttcaaaggaccccgccctgtcgttcaagaaggctgtcaaagccaaaaaatacggcatggtgctttgggccctccacgcccacccctccgtcgttgccgatcaacttcgacgcgattgggacgagttctacttggccctggatggcgaaggcaacggcatgccctatttggcagcacaggtgctcaacggtgtcatgtgcaaacaccaacccgacgcctggaaaaagaaactagccgcactcgccaaggcgaagggcaggccagacgctgccggctattttgagcaacagggaatgacctttgcgtcgaatcccaccgctgccatccagagcctcttcggaccccattggcagaactatgctcccatcctgtcggatgaagaacttgaagatgatgagggagagttcggcgaagatgaagtcgaaaacgccctgcccgatgtaaatgtggccgccctgcggggtgcggaaagtaatcccacggctgccatgttgaaggtcgtgtacgaccagcaccctgacagggcccacttgctgcctatcgtccaagcgttgcaggggtgctggcactcggatccggcccggatcctggcgtttttcatgcgggacaaccgcgccctgatcccacgagcccgcgaactgatgggtctggatgttctggattgggtgggcccgatgtggcaacacgcggtggcgtctgactcctgggctcgctttgccgtcctggtgatggccttgggaggtaatccggaaacgccccgccagccccccgccggtttcattgaagcgatcgccgacaagcactacgagatcgctgctgcctacatgtcattttatggcaacgtcgtgggtccgggcgtgagtgatcgctggacccagttgtactggtcgctgtttgaaacgggtgaacccgctgccgtagctacagcgcaaatgctcaatggcatgatgaagcgccacggcaagcgggcctgggaacgggatattggccgcttggccaagaagttgtcggagtcgaagaaagctgcgttggacacgtgcttggggtacctgtccagcgaagcggaccattttgcggacgccgcaacgcttgtactgaagagttctgtcatgcccaagtgggaggaatatcccgccgatgatcagaatgacgtggaggaacccgacggaagtcaggctgacgcagtagacgcggttgtaagcacatatctggcgctggcaggacaagaaaacagcggcctgccaagagaaacggttgaggccttcattgaaatggcgcgtggcctggcgtcgatgactggacttgatcgtgagacgattgcccgggcggtagtgaaatcagggaagaccacacaaagcgagagagatattttgagcaacctgaagcgcttgaatatcggcgcctag

SEQ ID NO: 516724 - DNA, 1350 bp, Stenotrophomonas maltophilia
atgttcggagaacaccaaagcctagacgcctcgcccgggcaatcccgcccgcgctttgcactcatcgatggcaacacgttctacgtgagctgcgaacgagtattcgaccccacgctgcgcggcaaacccaccgttgtgatgggcaacggcgacgggtgcgctattgcgatcagtcccgaagccaaggcactggggatcaagatcggcacgcccatcttccagttgcccaaggacattcggtcccaggtccaggtccggtccgccaacttcgcgctgtatggcgacctgtcggccaggatcgtgtcgatcctgtcggacctgttccctcgggtggaggtctactccatcgacgagaacttcgtggacgtggagggcctgaaagatccgttcgccacggcgctggaagcgcgggagcggatcttgaagtgggtgggcattccctgctgtgccggcctcggctcgacacgcacgctggcaaaggccggcaacaaactggccaaggaccagtccaagcgggctgtgaacgccgggcgcctggccgtgttccacgccaccccacagaacatcgacgcccttgcagtcgaggacgtgtggggtgtcggacggcgctatgcgacccgattgaacgccgaaggggtgaagaccgcggctgacctggccgccctgccccttgaccatgtgcgcgcccgctatggcgtggtgctggcgcgcaccgcaaccgagttgcgaggcattgcctgcggtgacctggaactggaagagcccgaccgcaaacagttggtggtcagccgcacgttcgggcgggatgtggtggacccgatggacgccctggccacctttacaacggtggcctgcgagaagttgcgcaagcgtggcctggctgcgggcgcgctatgggtctggctggacggaaacccgttcaagggcgacccgttccatgcctcacgtgccgtgcccttccccttccccacccaggacacagcggaagtgctgcgggcggtgcgcttcctggccaagtccatccaggaccaggccaaccggggcagcggtgttcaggcctacaagcgcggcggggtgggactgaccgatctagttcaagcccaagcccggcaggccgatctattcttcgggcccgatgagaaggccgaacgcaccatggccgtgctggacaagatcaacgccaagtggggccgcggcacggtgggagtgggcaccgtgggctggcgcgtgggtggcgcccggcccggggagcgacgcgttggcacgcgggacgcgcagtggcgtcccgagctgaaggcgttgtcgccggcgtatacgacgaggtggagcgacctgttgcgggtgcggtag

SEQ ID NO: 516725 - DNA, 468 bp, Stenotrophomonas maltophilia
atgctcattcctgtctcaacccgtcccttgcccaccccgcccacgctcctggggccggtgggcaccctcacggcccgcaccctgccgttgctgctctcgcgcgcggcgtgcggcttcccctctccggccgaagacttcttccgggaagacgaccggctggacctcaatgaacggctgatcgccaacccgcccgcaacctttctcatgcgtgccgactgtggcggctcgatggtcgactacgggatccaggacggtgacctgctcatcgtcgaccggtccatttcccccaggcctggccacacggtcgtggccctgtgggagggtgggttcgtgtgcaagaagctgtatgtccggggcaatcggatcgtgctggcttccagcgcgggctgcgcccccatcatcgtgcccgaagacatcgaactggatgtgtggggcgtggtgcgaagcaacgtccacttccatctgtga

SEQ ID NO: 516726 - DNA, 408 bp, Stenotrophomonas maltophilia
atgatcacccacaccattgcgcagttgcgccaactggttgaattcgtcgagggctacccgctgcctgccgaggtgcgcgagcgcatgacctatcggcagttccatgccttggtcgaagccaagatggatgagctggggttggactttggggcgtgggatgacgcgttcaccaaccaccccgacatccggcactggatggacatgttcggcatggccatggacgagcgggagttgatggccgaagcccaccacatggacctgccgctgaacttccattggatggatgagtacgcgccactccgggaggccgagcaagcgttctgggaccgccagccacccgggcccgtggacaccgcgccgctactggaaatcgtgcgccagttcgcgcccaaccctatcgcgcactga

SEQ ID NO: 516727 - DNA, 972 bp, Stenotrophomonas maltophilia
atgtgctattccgcagaggcttggaccttgtacgacggttacgtcaaagagttcggtgccgatatcgacatcaaggcgttctgggagttgtatctgggccgggaagagcggtaccgggtccgcaacaagcagtccgacgggcacaagatccccaagggaatggacctgaacttccttcggcccaaaacggagctggagcgcaagatccaggacctgatcgccgagtggaacggacgcaagctggctgaaagccaagcggaactggaaaagcaaaaggcccgcctggccgtagccgaggcaaaactggcctccaagccgaccaagaccgcggccaacgaacaacgggtcgccaccaacaagatcaaacagatggagcgctggatcgccgacgccaagcgcacccgccacaaacccacccaggacgaccggatttttccgctgtggtacgcgcctgtccttctcatcgaggacggcaagcccatcgtgcggcccatgcgctacctgtgccggccccaaggtatggatccgtccaccgactacaccaagacgggccaggtgtcgggcaagtacaacgcccgccgggacaacctcaccaaattctggcgccggcagttcgggcacacccacgcacttctactggccgagacgttctacgagaacgtggacgacggccaaggcggcagcaaggaaatccatttccagcccaggaccggcgagaccatgtacatcgcgtgtctgtactcccactggaccgaccccgccggccaggaacctgacctgtggtcgtttgctgcgatcaccgacgaccccgaaccggaagtggcggcccaggggcacgatcgcactatcatcaacatcaaaccagagcatgcggtggcctggctgacgcccgacggtagaagcgacgaagacctgtttgcgatcttcgacgacaagcgtcatccgtactatgagctggtcaaggcggcctaa

SEQ ID NO: 516728 - DNA, 2229 bp, Stenotrophomonas maltophilia
atgatcaaaacgatccagatctacaaccacaaaagtttccatccgacgacgccgtacccggttcgcttcgatcccacgaagacggccacctacgtctatggcctcaatggcgcgggtaagtccgccatcggggaagtcgtcgacggccttgcccgcaacgacccgaagttcgcccactgcaagatcgagaccaccgacggggcgaagtatcggtacatggttttcaaccaccacttcgtggagcgcgtcatcggcgaaccgatgaagggcattttcacggtgggcgaagtggaaaccacccggcagcagcggatccaggagatcgaaacccaggttcaagggttgaacggggaagtggaggccgcccagcggcggagccaggaactggacagacagatcacccgcgaggtggatcgggccagggatgatgtgtggaaggcgcatgagcgaggaaagcagacatcactggcggacctgctgcgtgggtatggcagggacaaggacaaattctttcgggagttgcggactcacgcgatacccgacgatgtcccactggataccctcgaacgcctcgaaaaacgctgggcggacgtatccggcaatgagaacgaacgggcgcgcgtggggctggacacccttggcctgggccccatcgagcaggaccccatatggggagaagcgattgaggtgtcagccacgagccggctggcgcccctggtggccgaactgggcaacgctgactgggtcgcccgaggccagcagtacctgcacggcgatcaatgcccgttctgccagcaagggttgccacacgactttcgcgacgagctggcgcgtctgttggaaggtgagcgcaaggccaaggtcgacaagatcgccgccctggtccaggcctaccacgccagggttcaagcattggagacgcaggcccagaatatcttggccgaccctgacgcttcagaggccggggtcgaggtggcatgggcggacgtgcgcggaaagctgcacgacaccctcgcgcgcatgcgagacaaagccgcggagcccagaaccgtcgtggtgatcgagccggtgaacgccgaagccttgcaaacagcgctggcaaaactcaacaccctgattgatgacttcaattcgaggatccgtgaccgcaagggcgagcgcgagcggatccgcgtcatgttctaccaggtcctccatgccgacaggcgtgaggcttatagccgtcacgatgggctggtggcccctctgcgggaggcccaggcgcaggccaacgcggaggcctacaccaaggggcaggcacggcaagcgctgagccaggagctgcgtgaactgcgccgcctgcaaaagggtgtggacgcgtccattgacgccatcaacgagcggttgaagatcctgggcattacagagttcagcattcagcgccagggacaggagcgcttgtactgcctccatcggcccggggtgcccgagtgcagcccgcagtcattgagcgagggtgagaaaaccctgatcgccttcctctacttcatggaagccctgaagggttcccatgacgaggaagagcacgtcgaccccaagaagaccatcgcggtgatcgacgaccccatttccagcctgtcccagaactacgtgtacgacatcgccacgatgatcaagcgtgaactgtctgaacccgagagcaggccccaggtggtcaagcaggttattgtgctgacccacaacttgttcttcttccatgagctgatccgccagcacacgaagaacctaggcaaggcccacaacaaatgtggcctgctgcgtgtggtcaagaaccagcattcggaagtggcagacctcaatcccatgttgctgatgaatgactacgacgtgtggtggcagttgttgaaggacgcgaaggagggcagggttcccacccaggtggtgcccaatgccatgcgcaacatcctggaacagttcttcaccttcaccgtcggatcgtccgagttcccggaggccgtcaagaagttggctgacgtggacacgtccagtaagtacctggcactcgatcggtttgtggatcgtggctcacaccgggacgggatcaacggtcctcctgtggactggacccagtacgacgtgtcttatctcctgggcaaattccgggcaatgtttgccgcgttggaccaggagcagcactacctgatgaagatgggggaagacgcccctgaacccgaggtccaacatgcctga

SEQ ID NO: 516729 - DNA, 225 bp, Stenotrophomonas maltophilia
atgcctgacccacgcctttcccaactggccgactacctgcgcgacaccgaccaggccaccagccacgccgacttctgggcagggtgggaccggcttgccggcgacctggcccagaaggtctggtccgacgacgccagccccgaactgcgcgaggcctacaccgacctgttggcttcggccgacgatggcggctgggttgtacccatggagcagtgccagccgtga

SEQ ID NO: 516730 - DNA, 375 bp, Stenotrophomonas maltophilia
gtgaggaaccacaacctgacgccgcccaagaagaaattgccgcccctggtcaaggtcaagctggccgccgttgccctggtggctgtgctgtccgagcgcatggacgacaaagaagcgggccgtttcttgcgtgaggccaccggtacccagtggtcgttcctgacctgcatgcagtacctgtccggcaaagaggccttggcggcgatcgccgcactgcctgatgactgggccgaagacaacatgaccaaggaagcgttggagcaggccaccaaagtggcggcgttcacggtggctaacgcccatcccaagggcacaccgctgtgcgccagcgacttggccaagcagtacaggggcaaggggatgatcgaggagtga

SEQ ID NO: 516731 - DNA, 366 bp, Stenotrophomonas maltophilia
gtgctggacgacgagaaggcgttgttcgagcgcatggtcaatgacgctatgcgcgtgttcgggtacggccggcccaaggccgagaagctggtcaagggcgtgatcccgcgtatccgactccaggcccagatccagaaggagcgccaggccaaagcggcgcgcaaggccaagaaggtcacgggaagccggaagcgtcctggccccatgacgcgcgaggaaatcgccaaacttcctccggccgtcccggcgccgcgtaccgccaaggagcggatggagcgtgccctgggacctgatgatggaaagcgaagacggggaggcagtcctgtcgtccagggtggaagccccggactcgggaaaagacgctag

SEQ ID NO: 516732 - DNA, 411 bp, Stenotrophomonas maltophilia
ttgaatttcgtgctccaaaactactccctggctgaactcacccagctgatcaaggccgcagaacgtcgactgaaggaactggccaagcgtcgacccgccgcccaggtgcgccgtgagctgacccgatttgccgccgcccacggctatacgatcgaacaactgctgggaatgacgccagagcgcgcgcaggccaagccaaggaagcggaaactgcctaaggtcgcgccgaagtaccgcgacccagacaacagacgcaacacctggtcagggcggggcagtcagccccgttggctggccgagaaggtcaagcgcggacaccatcccgccgatttcctgatcccagggctgggaaagcccaccaccaaaaagcagagccccgtgggtcagcggaccctgtacaaggccggctag

SEQ ID NO: 516733 - DNA, 1230 bp, Stenotrophomonas maltophilia
atgcgtctgaccgaagcctttcgccgctatggcgtggaactgaccaatccgcagtggacaagttcggccgtgtccgaggacccgccccaggtgatcctgtcgctgtggaagcacagcttcaacgaagacatgacccggtacgagaccgggacggctggctggaaaggcgcgggcaaggcgatcttctaccgacatctgcgccaggccatggaagaaggcctgccgcttcgggtcgtggtggcgtcaagtgacgaccctgaccagatcgtggaaggcaacgccgcccgcacagacaacgatttcgagcctgatttcgagctggtgggccgggttgtgcggctggaggacaacgagctggagctggcgtttgagcgtacgggggcgccgcccgacgcagtcgtggcggaccggtcccgtagtggcgtgaagtactggcatgtggcagaagcggtggaggccctgggcagacccgtgcgtacgggggagattgccgcgtggctggcccagcactatccgcatgaggatcattcggaccttggggcgaaccttgcgttcctgacggtcaatgacgcaaatcgccggcattacgaccgcacccgcaagatctggcgcagcgacaccggccacccgcgtgatcgtttgttccgacagggacgcatgcgggccacgacctacgaggtgttccgtcccacgcagcacgggcactgggacctgcagcccgtcgaagttggtaagtgggaggcggttcccctgccctcaaccgccctggggcgcgctcaagcacaagcccaggaacaggcattcgagcatttgccgccgctggacagcgaccacgatggtcgggtgtggacgatggctgtcattgcccagcggcagggccaaggggcgtttcgggccagggtcctggacgcctacgggcagcgctgtgccatttccggatgtacggcagtggccgtccttgaagccgcccacatcctgccgtaccggggtgaacgtacgcaccgcatggacaacggcctgctgctgcggtctgacctgcacacgctgtttgacctgggactgttgtggatcacggaccagtacaccgtgagcgtggcgcccgcattgaacggcaccgagtacgaagcgctggcgggccaagcgctgcgcttgccggagcgggtggaacaccaccccaacccggcgcatttggcccggcatgctgcgcttgcccaggagaagcagggctag

SEQ ID NO: 516734 - DNA, 195 bp, Stenotrophomonas maltophilia
atgaaaatcgatatctaccgtcatacccgcaaccgcttcgtcgccgtacctcaccagcacacaatccccgagtcctgggctggtgccaagtacttcaagaccatcgacctgcaacctgacgatgtccgatatggggtaggcaacgccgccgaggtactggcgaccatcgaagttgagggctacgctgccatctga

SEQ ID NO: 516735 - DNA, 282 bp, Stenotrophomonas maltophilia
atgacaattgaaaacaccgttgacgccgatcagatcgaacgttccctgcgcgtggaagcagccaaagagttgatcgagaaaaccgacaaatctggatggctggagatcaacgaccttggtgcgtttctccatgaacttgaagctgccatccgtcttgcagtagcagaacagcgacgcgaagcgttatcggaagtctcaaaggcctcccgcccagtaaacaatctagcctcgcccgatgagtacatggcgcggaagaaccgtggtcgcggacggtgcatgtag

SEQ ID NO: 516736 - DNA, 381 bp, Stenotrophomonas maltophilia
atgaactccatggacctccacgaagtcgaacgtaccctacgcaagacggcggccgaaaaggccgtaacgcaggccgacaggtacggctggaccgaagtccgccgggatgtctacctggacactgctgaccggttgaaggcgttcggacacgatgtatccgctgcaccctattggatgaccacccaggacggttcaccgccccgccccattcggggtgcagatgacccgacgctgcgcgcgatggtcgacgtggaccgggatctgtccaaggtggccaagcgggtcaacgagatggaacgacagacggctgcgggcaaagggctggatctggccggagccgatgagtatttggccaggaagagccgcgggagggcgctatga

SEQ ID NO: 516737 - DNA, 540 bp, Stenotrophomonas maltophilia
atgtcgagcaatcacgaactcaagaaggcgcatgtgaacgcacccgaagaaatagacaaactcgacgttcgcgaagcactctatctcaacatgagcgatgacgaacgcgtcattctgctggaagccgcccgtcaggatctaggtgtcgatgacttctacgacgaacttcggcaagccgctttcgacaactactatgacggcgagactgacagggagcagtggatggaagaggcgtggcaagtgggatacgacgattatgtgtcgttccttgcaaccactaaaacccacccactacacctcgccgccgctttcgataacgtcccgtgggctattgagctgctagacgccggagcggacttgaacgcgaccgacagcgagggcaagcgaccgttggattttgctactgataagaccgccataaccctgcgctcctttcaggcccgcataagtctcggtgccattgcggatcatcatcgggactccgacctggcctccccggacgaatacctggatcgccgcaaccgtgggagggccctatga

SEQ ID NO: 516738 - DNA, 795 bp, Stenotrophomonas maltophilia
atggcccctctcaatcaggtcacctattgtcatttcgtgtacaccctggagcacgacatagaccaggatacgggtggcgaccgatggcggatcatcgcacgcagagttggtcgcccagaacttcccgatcggctgttgaaagtgttttacaacgagcgtgacgccttggaacaaatgcgtgatatcagcctcgctgtggaacacacccacagagtgggagttcaaaacacccttgccgagccctactacacctacgatgtagaaggatttaggctgttggttcaagaagccgacgatgtcaacgtcaagatcagttgcagagacgcgacatgccttcatctagtttcatggtcgaatagcgatgacgctcccgacctcatccggctccttctcgatcgcggggctgacgtcaatgcccgggattggactgggcggacgccactgatgtggtgttcaatctggtgttcaagcgcaacatcagcaagtttgctcatcgctgcgggcgcagacatccatgcacgctgcaagacaggcaatacgccacttcacgtctgcggaaacgtggacattgctgctcttttgctgaggtcgggcgcggacatcaatgcccgcaatagccagggcctgacggccgaggatctggcccttcaagggtccgacttcatgcgagcgttgaaagccgaggtccatcagttcttgcgagcccatcgagttcgacaggccctaacggctgttgcccagcaaacaacaggcacggtgcaacgaacagctgcggatcagcgccggtccatctga

SEQ ID NO: 516739 - DNA, 387 bp, Stenotrophomonas maltophilia
atgaacccagcccgccacaccctcattcgcgccgccttggactgggcctggcagcagccggtggtcacggagctgcgcttgcctgcccatgagacgcttttgcgtggcgctcaacgaaaccgcgcctgccacaccgctgtaaccaggttggccgatcaactgggtgtcgacatgggcccctactgggagtttgccggcccacccgtgctgtcgcgcactgattacgatgatgacgcccgcgacgtgcgtgtggtggaagcctggatcgcccaggagcgcgccttggccgaagccgtggatcgctactgtgtgtctgtggagcgccgggaagcgctgggggtggtggcaggcgacatcaccacccacaccccagcccggaggatgtga

SEQ ID NO: 516740 - DNA, 405 bp, Stenotrophomonas maltophilia
atgtcttgctcaccttctcgtactacgacgacccatgtggtgccatccacgcaccaggaacgcgtccaccgccgcgtcatcattgagtcgccctttgccggcgatatcgatacgaaccaggcttatgcccgggcggcgctacgcgactgcctgcttcgtggcgaggcacccctggccagccacctgctgtacacccagcccggagtcctggacgacagcaatcccgaagaaagggtgcacgggatcgacgctgggctggcctggggctgtctagctgacgccacggtggtatatggggatctgggcatttccacaggcatgcgctacgggatcgaacgcgcggagcgtgagggacgccccgtggagtaccggcaattggccgactggaagcggagggcaccatga

SEQ ID NO: 516741 - DNA, 3354 bp, Stenotrophomonas maltophilia
atgcctcatcccacccgccagcgcggcataacgctgatcgagatcatcctgtggagtgccatcttggctgcggcagcggtggccttgttcgtgttcgcgggacgcgcccgggtggctgctgccgtggagacggaacagcgacaggtggaacagctggtcagaacggtggatgggctgttccagctccagcccaactttgcggccctgggtaccaatggcgcggcttacctggacctgcggggcgcggagcgctcggggttgaagttcacgcgtaccaaccatggggtgctgacgctggcaacgggcgtgggcagtggggagttgaacctggctgtgtgggatgtggaacagcccagcggcccggcaattcgttctggcggctaccggctggcctaccaaggattgtcagcggccgagtgtgtgggactggcctcggccttgggcaagagcgcccatcaggtccgcgtgggcgtgtccggcctggatgatgagtccgcagaccttgtggcccaccgctacggccgtccgggagggcctgaccagctggccgagctttgctctcgagatggtcgcgtggtgttcgtgtacttcgccccggctcgggcgatcgcgtcttccgtaccgggtgcgagtgcagtggcgccgcgctgtaggccgcagcgggagaccacttacgcggtctgtccgccaggccagatgggtgcgatcacgcaggttcgagacggcacctgtacgggcgtggacaacggggtggtgtggacggcctggtcgacgatcgacagcacctgccagcctgaaccggccatcccgccacagcaaacccccacagccccacccaacacctgcacgtcgatcacgaccaggcgcatggcggcctgtccggcggggcagacaggtcatatcgtggaggaaagtacccaggacacttgtgcgggcacccagaccccgtggacgcaggttccgggccctgcgggcaatacctgccgggcaccggaaattccctgcacgatgtcggccgaagggcctgtgcccttcgcttgtcctgcgggccagggtgggcaaattctgcgaacgcgctactcgacctgttcggctccggtgggcgttgcgccccagtggcctgcctggtcggacgcccacacgatcagcaatacatgtacgaccgcctgttcccatgggggctccagttgctgtacccccatccctgaaacccgggtggtggaatgccccgccggctcctatggccccggtacgccacagatccgtttccgcggttgcgtgaatgccacaacgcagtccggatcctggtcggcatggcagccgtaccgggacctggaaggggcccggacctgcgacgcctgcccaacggacgtactgaccgaaacgcaaacccagtgggtagagcgatccgaaccatgccctgcgggtcagacgggcaagatcacctgggaggccgaacaggttagaacgcgggatatcgcaacccagtgtccagcgggcacgactgcactacctgcgcccacggtgggcgactggagcgactgggcggacacgggtgcgcgccgcacgatggtgaacacctgcgctccgtccagcggttgccttgaaatgaccgaccgctatgggggtgtaatggacacccacgacgcctactacaccattgcctacgtggccaatggagtatcgggcgggtgctacgccagtcgaagggacaacggcattacgggctttgacgattgccgcggtggtgccaatggcgtcctggatcttgcggagtggtcgaaggtagccaacgtgggggaaacctatgtcacgaacggctcgcaaagcggctggggtgggagtgcgcacgaattctggggatgggattacgaagagttcaccctgatcaatgacagctgcaagcacactccgccgacggggtgccgttgggatgtccagcaaaccttgatcgctccgaactggggcaacttggacggtggcagtattgagtacgaagacggcgttggcggcggctgttcggccggttggggtattccggggggtggcgtgcgtgcaacgtttgacgcgtgcaaggccagcattccttccacccctctgcggccttctgctcgatatcgggaaagcgagttctccaactggggcggcattgccgaaaatgcctgggaggccactgcttcttcggcgtgtgtggagccacccacgtccgtctgcgctattccagcgggtaccgtgttcaactggaccgtggcaggcaatgcctgcacgttcacccagggcacagcgaccaccgtggccagcggtggggtgtttacggccaccgacacgatcgcccccaccaccggttcagcaaacttcacgtgcaacccgagcggctatacggtcgatccgtccacgtacagttcggggctggataccaactgcgacccatcctccccgcgttggcccgacaccgaccaggacgcagcggtcaatcgcttctgtgcttcggccggtgccggatccagtggcaccgtgtcgtggtgccccagtccccaagtagaagcctccatccatgtcgtgtgtggatctgctacacccacgttggccacttcgcccaatgcgggcgcaacgtgttcgacggggtgtgttgttccatcgcctagcaccgagacgattacagaaaccaggactgccacacagaacgtaccgtgtcccgcaggccagagaggtacgcatacacaagctcgtccggaagtgcgcacccgaacccggacagcgtcgtgtgcttcggggtccgtggcgtggtccgcatggtccggctggactgcatggacaggaacaggcccttgggccacgaccatcaatacctgcacgccgtcgggctgctcgccagggcaggttgacgtggaaacgtgggacctgaccgcaaccacgttcagcacatgcaactggggtacggccccttcgccaaccggcagtagcatttacggcctgaccgtcacgcagctgcgtcgcacccgcaactgtggtgcagatggccaatgggccgcctggaacgtggtaggccctcccatcaatgatggctactggacatggtcggtgtctgccgcaggcatgccttacgccatcaatggttgccagaccggtgtgggctgcagtggttcaccaggccactccacccgctgggtggcgcgcagcaaggcctgccctaacgggtccacccatacctgggaacaaatgcaggtgcgcgtgaatgcgtcctgccaagggggcacctggtctggccctggttcggactgggtcgacgtggcgcctgtgtacggggcggccgcaggctctgctccggtccgcaacatcgtcaatccctgctga

SEQ ID NO: 516742 - DNA, 642 bp, Stenotrophomonas maltophilia
atgttcaacatcaaccaattgttttggcgtctttacgccaagtatcccaatgccacactggggatcccgtactatggtgccattgcctccatcttcttgggcggcattgttttggcaggtgtagcgctgtcctatttcgggttgagcttatggtggctcctggcactcgcgcctctggtcgtcatcatgatcgctcttacgatggtcaaatcatgcatggcgctcgtgaagcgttttcgccacggagctaagccaggtcattccttcaatcagatcttgagcccaatcacacgtgttgctatatcaccagtaaaaggcttcaaccgcagatcgctcgatacggtcctgaaactcggcactgacatcaacgataccgatgatcagggccgcaccctactggaccacatgctaatgcccatgtacgccaacgtcttccgagccgaggatgtggagtacgtcatcagtctcggcgctcgtgttcccgatgacttcctggctcgcttgcgcgaagtcgacaacgacgaagcccatcagttggccctcaaacttcacgtggaagccaggctgcccgaactacaagcgatcgccgaagccaaccgcggtgatctggatgaggaagcaccaccccgtaggcgcatgtga

SEQ ID NO: 516743 - DNA, 2163 bp, Stenotrophomonas maltophilia
atggcaaagcgcacacccaagaaccttgtccaccaggccgccctggctctgtcgcgtgctgacgccgaccaggaccgtgccgaagtagccgcatggaatgcctgtcgggtgctggacgaactccgtgatgagctgcccgaaggcaagttcgaggaacaccttcgcgaccaggtggggttgtcgtatgcgggcgcccggatggtgtcggaagtgttcgctgaccgcgacgacttcctgcgtagttccgcccaggccgtggcattggtcccggaagcccaggccacgaccaagcggctggcggcagcacatgaggcccacctggccaatccggccacacgcacagcgctgtcgcgtggaccgcggacgaaccacggctgggaaggcgacacgatggccccgctcctggactggatccatggcgcggagaatgggctgtccaagaccgtgaaaggcgaggccatcgcccgcatggacgcctacattcgttcgggctgggcgcagcgggatctggggccggagggtgaggtcctgacccccaatgccgggtcgttgcgtgaggtcttcaatcggctgcgtgccggggagacggtgtctccacacgacatcaaggcgtcgctcgactcccgctggcaagagctgttcacgcccatccgtgtggacaaagtccgactgcatgaccagacgtcggaaaagaccgccctgggctttgagtcgggcgtacccaccttctcgatggatggcaagggcaccacagaagccggtgggcgtgtggacgctttcatccaggacgcggtcaaccccaaggcctggcacatggcctttgcctccacgtcggaagacagtcgcaggcagggggaccagatgacccgccacgtcgggggcgtgctgaccggcatggccataggcgccccgccttgggagggggaaggccactatctggcgtccacgtcctactacgccccggccattgcgtcggaaagtcgagccaaggccatgaacctgaaccccaagcagcaggagctggtcaaccgcttggcgctgtatgcgcagctggacgacccctatgtacggtcggtccagggtgtaggcgacgccgtgttggccaccgcccactacgccattggcgcaggcaagaccacacaggggcgcgagcttgcgccgcaagaggtgcgggacatgaacccgcagacgcacgcaaagcaggtggtggacgcagtcaagaccctggccaacgtggactgggatcgtacgttccggcaggccggcgagaagtcggggcgtgagctgatcattcccatgtgccagtccgcgctggacggcctggccaagcactaccccgaaaccctgcccgagttgaagaaggccgtgccccatctcacgcggcttgccaaggcccaggggattgccggcacggggttggagcgggacctgctggggacagcggctgggttgaagcacgtgcccgcgggcagggttcgccccgccccgaccctgaccgacgaccacgtgggccagttgaagcgacacatcaccctccacaacgcccgggacaacatcaagggcgtcgtgcatgaggcactacacggcaacatcaacgccgtggatgaggaaggcaactcggcgcttcacatcgcggcgggtgaccgcaatctgcagctcacacagaaactgctttcgaggaacatcgacgctacgctgaccaacgcggaaggccagaccgccctgcatgtggccgcaggcgcgtcggcgcgcactgcccgggcccagaacgaccaggcccagttggtggcactgcttgcgccccactcccagctcgacgcccaggaccaggacggcaacgccccgctccacctggccgcagccaaggggctggatcgcaccgtaggcgaactgctacgccatggggctgacccgtccgtgcgcaacgagcaaggcgaacgccctgctgatctggcacgtgcctatgcccggcaggtatccagccccaaccttcgcctatcggcggatcgatcggtgatgaacctggaaatcgccgagcaagcccgggcaatggtcgccgtccagttcaagcacccggcacagatgaaagctgagcgtgaggctcgtggccaaagccaggacctgacggccacccggccacggaattcgcggatcaggtactag

SEQ ID NO: 516744 - DNA, 471 bp, Stenotrophomonas maltophilia
atggcacgttttggctcgttcgatgagagcccgacgtttgaacggataccgcggcgcaagcggcggagtagcgacggtatcagccacaaggaaagggatcgtgcgctgattgcgtccgttcaaagctccctccacaggtgctcgaaggctgcatttcctaccaaggcccatgccgagcgccggatgtcgcagctgatccatttcggcactccggtcaagcacgcctatcgatgcaggaactgcgcccagtggcacctgaccagcatgccaaaggctgagtcggaggcgcttgcgaaatttcaatcgcggacccggtgcaccatgtcgcgggcgtatttctcctacggcagtgccctggccgccctgcccgaccggaatgcgcgcctgacgccagacactttgccctacacagacgcgtacaagtgcccgaagtgcggcgcgtatcacttgctgaagggtgcgccgaaatga

SEQ ID NO: 516745 - DNA, 483 bp, Stenotrophomonas maltophilia
atgaagaagctttccctcctggccattggcctgatggccgttctggccgcccccgccgcttttgccgacgactccaagaccggcaccgttaccgccaacgttccgtcgacgtgcgagatccagttcgttgagaacgttcacggcgagttcgcggccaacatcacttcaacctcggccacgggcaatatcgccgtgctgtgcaacaaggacgcgggctattcgttgtccacccctacgaccgatagcgctggtcgcttcacgctctacgccatcagcggtacggcgggtgccaccatggaagccgagcttcgggagactgtgaccggccagccctggagcaataccgacctgttgggtggccagggcacgggccagaccgtctaccactcgttccaggtggtgttcaacccggatggtggtgtcattccggctgtgggcagctacaccgctgacctgactgccgatctgaccgccacgttctga

SEQ ID NO: 516746 - DNA, 2226 bp, Stenotrophomonas maltophilia
atgcgccgctcattcctgaccctggccttgctgttcgccctccccgtccacgcggaggaaaccttggcgctgctggtggtcgacggaaagcccgtggccagtgaacccgacatgcttgacccagaggccctgtcgttcccgacgacacagtggcaggaatggggcgttgtcatccccaagaagctgcgccggaagcaacacctctcgccccaggaactgggggtggtggtggagtacgacgaacccaccatggagatacgtctgacggttccggccaacctgcgccaagccaagaaggtggggtatgtccgaacccttccagaccaggtatcacccgcgcccaagggtgtgatggtcgactacgacttggccgcattcaatgacggggacagtacgcgggtgtcgatggggcacgtggcccgatcgcatgtggccgggggccttttgaccaccacggggcaagccaactgggtacagggcaagggcgattacatccgcggcacgacgacctggcgccgggacttcctgcgctcgggcacctcacttgcggttggggatgtgggattggcccccaacggcttgaacgacccagccctgttagggggtgtgcgaattggctctgatcgacagctgacccgctttggcacgggactggaaatccccctcattggcggcgtggccgatacccgctccactgccgaagtgctggtcaacgagcaccaacgggccactggccaggtgtcgtcaggaccttttgagctggcgccctccatcgccttgcccgggctgaacaatgtggaggtcatccagcgggacgcgttcggtcgagagcaatcgttctcgcgttcgttctatgcccacccggatctattgcgccgtggcagcaaggagtgggacgtggctgccgggtcagtccgcaccaaccccaccgaagaccactatgaggggtttgccgcgcaaggcgccttccgctgtggcctgaccgaccgttggaccatcggcactactgcccagacaggcaaggtgggcgatatgggcgggcgcaacctcacgctccacaacacgttgtctttcgggcgaggcgggctggtgcaggccgatgtgtccgcgtcttcgcgagacgatggcgcacgaggttcggcgtttcgcgttgcctatgagcaacgtcgtcccaactggtcattgaccgccagccacacgaagaaatcggacgattactgggagatctcacagctgcaggatcggggcttccggatccagtcccagaccacggccgccctggctattcacccgaaagaccagccatggcgcgcccaggtgtcgtactcggacatccagtacgacaacgaccgccggctccaacaggtgggcgtgtcggggtcgtatcgtcgtgggcggtctgcgtacatggtgggcgcgctgcatgatctacgcacgggcgacaaccaggtgtacgtgggcctgcgaatgcccatgggccctggaaatttcatggccaccgctcgcagcgcgccaaacgttggcccatgggtatacgccacctatagcgggcgtacggagatcgggggccacgacgtacgctaccaggtgggcggcacgtgggctgacacttcccgaattcagggccgcgtggacaccgttgtgtggggaggtgacctcacactcgaggcccgcaagggccagggccatccgttcatggtcaatggccgctacaccaactctgtgtggttgggagagggcggcctgatcaacggccgcggctacaacccctacggctcattcgccgtcgtggaagtcccaggccaagctggggttgatgtccggggcagctcgcgccccacgacgaccaacaagcgtggcgcagccctgatcaggggcttgccgagcctgacccacaccccagtgaacatagacgcgacacagctgccgatcgaccagcacgtagacgacagccagcgcatggtggtggcaccacgccagggcggggtcaaggtcgagttccccactacccgctcctccgtacgccagttcgtcgtgcgtcttggccaggactttgcccctgcgggtgcgaaggtcgaaagcgacgcgggtgaaaccttcctgctggccgaacgcggcgtgctggtgctggaactaccttccgcacgcgccacgctgtacaccaccggcctgaaatgcgaactggtactaccggaagaagggggtgaagtcatctgttccccttga

SEQ ID NO: 516747 - DNA, 582 bp, Stenotrophomonas maltophilia
atgggccaggccttggaggccacggcgaccacgggtactttgcggatccacaacgaaagcaaggacaccaagcgctaccaggtcatggtggacgcacttaccgtgggtcctgctggcgaacgaattcaggctgccagttcggatctggcgttttacccttccacggtcatcaccctaaagccgggggctacgcaaaccctgcgctggaagcgcaacacgcctgcgtccccccaggagaaggcatacctcgtcatcatccgggaagagcccacctcttctgtggaggacgcgccaggggtggcggtcaaactgcgctacacccctcgtttcctcaacccatgggtgttcgtaccccatggcgccaagccttcgttgtcggtcaagctcgaaggcagcgatctcgtgttcatcaacacagggacggccacagcgccgctgactcagatctcgtttgctggcaagcccattccaggcaacttcttggtcctgccgggcgagcgcttccgcttgcccgcggacggcacgggccgtgaggtccacttcgtatcgcgaggtgtagcgcagtcgcttccggtggactga

SEQ ID NO: 516748 - DNA, 483 bp, Stenotrophomonas maltophilia
atgcagaatgcggttatggccatttccattgacactttgcgcgccctggtggacgtcgatccttacaaggagacggggcccagggccatctcgccacgggatgaatttcttgcccgcctggacgacgccggcatgctgccgttcatggcccgcaagaacctggccccatccaagggccaggacgaccacctgtggtattaccccagtcgcgatggcaacgattacctgctggccgatattgtgggccgggtggacagcaccaagctcaccgaggtggccatcaagcggctggccaaggacgacccggacctggcccaagagttgaaccagcttcgccaggagcaaggcggggcagcggtttttcagcggattggaacccaggtgcgccggcacgacctggcccagctggccacgcccaggcctgcggacttggccacgaccgacgacttcattgaacgtaagcaccgcgggagggcgatgtga

SEQ ID NO: 516749 - DNA, 420 bp, Stenotrophomonas maltophilia
gtgagccagcaccatcgaatagaactgatcgagcagagctttgcccaagcggagcgcgacgtggacagccagatcctgtctggtccccggtgggcgcgggtgtttcaccaggcaggaaaggaagtagggaagaccgcgcagttcaaggacgggtttgacttccaggactacactgcggccggctttcccgacacagcagccgagtgggccatgaagaacggcgatctggtcaagcaggaccctgtccaggccatgagcgactggatcgactcctttccccgcgcccgccaggcggtggacacgtactgtgctgcccgggccaaggaagacttggctgctctggctcagggtgtacgtcctggtggattggcctcgcccgatgagtacatggaacggcgcaaccgtgggagggcgatgtga

SEQ ID NO: 516750 - DNA, 1029 bp, Stenotrophomonas maltophilia
gtgaggtacccattgcacgatgccatcctgcgtgaagacgttgacgccgttcgtctggcaatcgccaacggatcagatccggaagaacccttgcgagatgataggtcctggtacaacaccaaaactcccttggatcttgccgccgccatgcaagatccagataagcaaggtgtagtaacgagtttgctggtggagacgggggtgtgcgactacgagcattcccactttgactggaagcgtccatttgccaccgctcacgctggccagaaaactgcgttccttgacgccgtgcgggcaacacctgcttttcagaagtgggagcgtgttcatcgttcggaatgcgaggtcgcgctttggaaggcttgcgaagtgggagatcaggtcaaggtcaaaggcctgcttgagcgggggaccaaccctaacgccgagatcccggtcaaggatggacgcaagatgatcacttcgacaccactggaggccacgatctccccggaggtctttgacctgctggtcgcacatggtgcaacgctgcccacagatccagccaggcaatcacgaatgatggtcatgcctgcgcggtttggcgcgcttggcgtgcttgatcgactggatcagatgggcgtgtcggctcaactggggcaggtcaagacgggcgggaacgaacccttgtgggttgctgcgcaccatgggcagaaagacgttgtcgattggctgttggcacatggcgccgatcccaacggcgtcacaaagcaaggtagaacacgtaccgtccctttggacgcggttctggcttctgcgcgcctctccctggacgacaagatttcactaggtcaacgcctgattgacgctggtgcaaagcctgagctttcagatacgcgatggaggtgggaagacaatcatcgtggacctttcctggccgcgatgaagcagcaccgattggctggggtggcccagaccacccgcaaagaactcgacctggccactcccgacgaatacatggagcggcgcagccgcgggagggcgatgtga

SEQ ID NO: 516751 - DNA, 1044 bp, Stenotrophomonas maltophilia
gtgaggccatccgtgtggatccagtctgaatacgtcgtcgacggcgacacctggggcgagggtagcggccacgggcggttggaactcaaacccgtcaaggcgctgcgcgaagcgctggccgcgggcgcggatcccaacgaccaccatgctctccatcatgcggtaaaccatggagcgatcggccaagtccaggcgctgttgaaagcaggcgcaaaccccgaccagttcaacgaggctggcttggcaccactccacctggccgtacaactgcgagacggcaagaaagtagacgcacttgtaaaggcaggggctaacgtcgacatccgagtgccagacgccttgcaggtagaagacctgggtgaaggccaggaatggatggctatccccgacgagcccggccagaccccggccatgatggccgccagacaaggcaaccgccccctgctggaccagctgcgtgcggcgggagcgtcgatggacggcgtgctacatgcggccgtcgtgggagagaaggaagccgcctggaaagaagaggtgaggctgggcccattccatgagcgcgtaccgatggtcaaggcgctactggacgaagggttggaccccaacgccccatgcgacgcgcagtttcaaacctaccgcaagcctgggcctagctacgggtcgcgcaaccaaggtggggagaggaacaccccccttcacctatgcatggacgacaccatggctgacgcagcctacggcctggtgcctgccaaggtgctgctggcagcgggtgctgaccctaaccgtggcaatgcccgtggcgacaccccgctacatttgactgaaagcgatgagctggccagtgtcctggtggaagcaggggccgacatccagcagaagaaccacgatggtcaaacgcccgaggacaccgtatacaacccggcggtcaaggcgctgtttcgccagtatcgactaggcaagctggcccaggactcaagacccactaccgacctggccacccccgacgaatacctggcccgcaaatcgcgtggccggatgatgtaa

SEQ ID NO: 516752 - DNA, 294 bp, Stenotrophomonas maltophilia
atgagtcgcttcctcaaacacaccttctttatcgccttctacctgtacctggtctggttcgtctgggcgggtggcctgcatatgctgaccgtgaaggccagtgcccccgtgtacatgtcggggctgctcgtcctctggctgggcggcatgtatctgctgcctagcatgatcggtgcgcaccgtggcgcgggccacagcacccgcatttccatgatcaatgtgttcctgggctggacggggatcggctgggtcgtggccctgcttatggcgctgttctaccgccgcgtctattga

SEQ ID NO: 516753 - DNA, 681 bp, Stenotrophomonas maltophilia
atgatgggacacacaccatcttccattgccatgcattcatccgcgcgctccctgcacgcttatctctcgcacctgatggataccaggcgcagttgtcagcgctggcgttatgactcccacgcgctgttgcgcgcgtttctggacgacccgcgcaactcgcccaacgacgcgttcgggcgcggtcctgatccctacaactggcaggagttgacgtatttcgaggcctggatccggacccacgatgtcgatgggcccactatggccatgttcctggcgcatggcgccgaccccctggccggtggagaagggctgtcggtggcctttcgcataatgaaaggctccgatgatcctgagcccattatcatgttgctggacgcaggcttgcccctcgattgcgagtggggccatcacggttggacgctgtttcaccaggcggcgagctttcattcgcaggagcgatccagccgcattctgccggtcttggtcgatcgcgccatacaggcaggccgtcaggacctgctgcaggcgatatccagggagcgggtggaggatctcggccagacccccatggatgtcgcattgatggggtggcactgggccagcattcggcttcttgccaagcacgtccccgtcacagagaacgtccgccgagcggcggtggccaagggtgtgaccctttag

SEQ ID NO: 516754 - DNA, 201 bp, Stenotrophomonas maltophilia
atgaagctcaacgcccaagacatccgctggatcgaaagtgttctctccaacgacgaagagtccacggacgacgaactggttgcctacttccaggacaacggcctgacggcgcaacaggcacaggatgtggtcgcccaccgcgccacttacctcaacgacgtcgtcttcgacgggcagggcccgctgtgggacgagggctga

SEQ ID NO: 516755 - DNA, 450 bp, Stenotrophomonas maltophilia
atggctcatccatccgacagtgctgaccaacgcgttgcagagcgcgcgaccctttcggcgctggaagcgctgtggggaacttccttcgtaacaggcacgatcgtgccggttgaggccggtgtagctccggacggcgtcgacctggaccgtaaggtggtggtcgaggtctatgcccgcgtgggtaagttgaagccagcccagtgccacaaggtgcgggcagacctgttcaagcttgcctacctgcgcaagctattgggtccggagtggcgggtcgtgttctgcttcgttgacccgcaggcggcgtcgtttctcatgggcaagtcctgggcggcacaagcggccctggctttcggtgtggaggtcgtggtccaggaacttccgccagacctgcgcgagcgggtgatggcggcccagctgcgccagcgtatgaccaacgccaccccgggttga

SEQ ID NO: 516756 - DNA, 423 bp, Stenotrophomonas maltophilia
atgacgttcgagcaacagtgttccaccttgcggcaaaacgccaatcccgccctgctggaccaggtagtgggctactacggccccgccgacaccatcgagccgtgggcgcacctggacgcactgctgtggccggagctgtccgaaaacgagcagtctcggcgcgagcagatcggggttgtcctggaagcgcacgccagcgagctggcccgctacatcgaccgctacaacgacctgcggacccggcgcctggacgccctgtccaactacgacctgggcattgcctaccgggccgccggtcccgaagccggcctgttccaggccctggacgcggtacgcaaccacatcagccgcgtaagggcccagatcctgtggctgctggccgaacaggtccggctgaccccgccgcaactcgccctgttctaa

SEQ ID NO: 516757 - DNA, 258 bp, Stenotrophomonas maltophilia
atgcctctttctcttcaatctcccgttgccggtgcttccgtcggcgaagccgaaacccttatccgccagctggtccagcaggcaggcctgaccacgcgttgggtcgccgcctctggccgccgttggcgtgtctgtgtggcccaaggcccaaacacggaaatcatccacatccccgttggcacgcaatacgtcgtgcgcagttcgctgcgcggcgagctggtgcgtgtgcgccaggcgctgggggtgggccatgattaa

SEQ ID NO: 516758 - DNA, 186 bp, Stenotrophomonas maltophilia
atggtctgggccatgtggaacatccaaggccagacctgggaaatcaccagcgacgacggcgagggaccgacctactgcaatgcgtgtgaacagcacgacgtgagggttgttcacggcacgaaggaagaggcggatgacgaagccagggcgtacgcgggccaaggggaggatggcgatgaagactga

SEQ ID NO: 516759 - DNA, 243 bp, Stenotrophomonas maltophilia
atgaagactgaagcgcagctgccagccgggggcgatctggtgcgtgtggcccaggccatgaagggaaagccgacctactactgccccacgtgtgggtccaccgatatcacgttcgatggacagatcagttgggatcgggaaagcggttcctggacgttgctggaaacgttgaacagcccctggtgcggagggtgcgaggacaccattcccgaagccacgttcggggtggtgggtcatgagtga

SEQ ID NO: 516760 - DNA, 186 bp, Stenotrophomonas maltophilia
atgacgcagcgacgcaccggccccaaggccaagcccgaatccgaaaagttcgtacccacgatggtgaagatgaagccacgcctgcgtgctgaacttgagcgcttggcggacgcggagaacatgacgctgtccgcgtacctgcgccgtgtcgccgagcagcacgtcaactacgcaaaggccgcataa

SEQ ID NO: 516761 - DNA, 1797 bp, Stenotrophomonas maltophilia
atgtcgcaagaacaaagtatgagtgaaggtgccgctagtcaagcggccaaggtttcgtcttttcgggaacgcttggccaagagggtcggcgatcgtgcccaggaagaagctctgacgctgggcagcaacgtggtgagcattgctaccggaacgcatggcggcggggccggcaaagcagccgggaagggtaagggcaaggccgaaaagccgtcgggtcctccgatgagcctgcggtgcgcccgctggttttttgcgcatggtatggacggtatgccactgactgccgagagccgtggacgcaatacggtgctgcgtgcctggaatggcacatactggcaggaaatgttcgaggaaaaggccaagcccaagatccagaagtggctcgagcagttcgaggaaaactcctgcacgccctatgtcgttagcagctcgtggacgactctggtcaacaaagttcttgaagagcgcccgtggaaggcaaataagcctaacgaagatcatacggtggtaatgccgttcaaggatggctacctccacatcacggctgagagagcctggatggaggagcccaaccccgactacgggatcaagcattgcgccaatgtggttcttggcgtcaagcctggccagatcttcgttccgccaaccattccgagtgatagcgtttttggtggctacctgaactcctccctgttcgacttggagaagcgggcagtggttcagcaacactgcgccatgtctttcctgaggaacaagttccagctctgcgggtggtgggtctcaccgggtggtggtggtaagggtgcgatggtcaaaatgcttcaccatgtgcatggcaaggacaacatgggtcgcgccaactatggcgccatcaatctcaccaagctcgatggtgatcactacctggaaacgatcgtcgacaagacttttctctcagtgggcgaggtcgatgtcaccaagccctggtgtgaggacacgtggaagatgttgattgcgggagacgcggtggatatcaacccgaagaacgacaagctgtattcgtacacctgcgacgccttccagatcatcatgtccaaccaagagcccaggatccgcgacgaaagtggcggtgtcatgcgtcgcctgcaggtcgtacagtgggacagctccctggagcgccgtggcaccatcatctacgacattgacagggtcgtattcgagcaggagcccctgttgcttgtgggctggctggtggaagggatccagaagatcctgcgcaacgggggtcccgtccgcgacaaggcccttccggagtcgatccgccggtacacccagcgcttgaccaaggacaacgatagcgttgaggcctggatccaggactgcaatatcatccgcacccgcgacccgaacgtgaagatcagcaaacgcgagatctttgagcactacgaggcgtactgccacgagcactgcattgatcggcctcgcggggcgtcggtgttctggaagatttttgcgcgcaagctcaacgtgaatatcgatgacatttccgaacgccccaacatcaaggggggtggaaagggtccttcgatccttcgcacgattgccatccgcgaaccagacattgcgcgcgagcagctggcccgcctggccgaagcagccatccaggacggccgcttcaaggaagagccggcgaacgacgatccgttcgggattgacgatgtccaggcggaaggggagggccggatgatcaggttgccggtctacaacgccaaggaacaagcgcaggtggactactggacctccaagttggccccctga

SEQ ID NO: 516762 - DNA, 483 bp, Stenotrophomonas maltophilia
atgacgaagtctgtcatcgacaccgagtccgggcggaagaccgcccgggtctcgcccaaggtggccaagcggatcgagaaggtggtggcaaaccaccagtcgatcgacgagcgtcgaccccccagggcttggaccaagactccggatcgggacctggtggacgcggatctcattgacctcattgaccgctatgaggcggtggcgccttacttatcagcgcccacggtcaaggctttgcgtcgcatgctggtcaaccatccttacctgcggctgcgtggcaaagagaacgcggccgctcaacccaactatcgactgcccaacggcacgaagttctactggggtggcgtacgccgcctggccgacgggacgctgcgcgcaggtggggtggggcgcaaaccccgagtcctggaagagtacgagcggtcccccgcgggccagaagcgaattgcggcgggggagccgactttccttcctattgagtag

SEQ ID NO: 516763 - DNA, 246 bp, Stenotrophomonas maltophilia
atgtccaccgaactcaatttcaccgataccgagatcctgctggccgccgatcgcttcctgatcggcaagaccacgcaaggtttccgcatgcagctggccacgaacttcatggcccccggcaagcacctgtccaggtattgggactgcgaacgactagcggaagtggcaatcaagcgagggcacaaagtctttatcaagagagtgccccatggacctacccgagtaccgccaacggcaagcccgtaa

SEQ ID NO: 516764 - DNA, 870 bp, Stenotrophomonas maltophilia
atggacctacccgagtaccgccaacggcaagcccgtaacttctactcccacctgcgcaacaccacagctcctgtgttctggcgctggcaggatcccgacaaccccatgccccagatcggcggcgagccgcgcggtcccagtggccaccctttccagggcgacaacgcccttcagctgtccatggccgccaaatcccaaggcttccagagccccttgtggatgacttacgaccaggccaaggccgctggcggaaccgtccgtcgcggtgaggtgggcaccaagatcctgtcctggatgggtggcaaggatggccgtccctacgagcccgtcttgctgacggtgttcaatgaggaccagatcgcaggtctggacctgcccaggacccaaggcctgaccccggaacagcaggccacccgccaagcgggtctggacgcactgctacccaccaagaagaagacccccacgcccgagcagtacaacgcgcgccttgcagaagtcctggccgagcgcttcccggatgtcgacgacccagaaggccaggcccaagtggtgctgcgccgcgagctggccaccatgacggcccaagccaggctggggcttccccgagccgtcgaccccaagttggccgacacgttgaagccgtacgttgaccgccgccccaactggcgggaggtcgaaagcgcgatcagcgacgccaacaaggccctcaaggatcttgggatcgaggccctagtctacgacaaggtaccacgcaaggaggtcgagcctgcagtcaagcctgccgagcagccgcggggcaagggcaaggccaaggcaaagacggtggccaagtcggccagcaaagagcagtcggacgacatcccgttctga

SEQ ID NO: 516765 - DNA, 1737 bp, Stenotrophomonas maltophilia
atgggcccgcaggcgacttcccgcgccgctcgcgccactgccatcggcaagaatgccgacgccgacggtgaagactcgatcacgatgggtaccaatgccaagaccaatggtgatcgccagattgccattggtacgggcgccggcaatgagaacatcagtgaagacaccaccgccattggtaccaacgcccgaacgggcgcaacgggctcacaggcattcggtaagaacgccaatgcgatgggcttcgacgcactggctgtgggtacggacgctaagtctgacgctcaggatggtgtagccatcggccacggatccgaagtgcggggtgtactgaccggcaccgctgtcggtagcggtgcgtccaccgatggcggcggtaccgccgtgggcaccaacgccgaagcccagaacaacggtacggcgctgggcgatggatcatatgccgtgggaaatggtacggccgcaggccgcaatgccaaggccaacgcggtgaactgcgtagcgctgggcgacagcagtgagtgtgatgaggcaaacacggtttccgtaggcaccgagggaagtgagcgccgcctggtgaacctggccaacggccgcaacgacaccgacgccgtaaacatgggccaactgcgctccaatgcccaggccctgggcggtggcgcgggctacgacaccatgggcaacttcatccctccttcctacaccttccagtcgggtgcgacctacaacaacgtgggtagcgccctttatgacctggatggccgggtccacaaccttgagcagaaccccggtggcggcggtcagggtccggcgggtccagcgggcgcggatggcctgtctgcctacgaggttgctgtcaagaatggctttgccggatcggagaccgagtggcttgagtccttgaagggtgccgacgggcgtgatggccgcgacggcgagcgcggtgaaaagggcgaaaagggtgacccaggcgagcctggcggttccggttcgggtgagcccggccccgaaggtccgcagggacctgcaggtgcagatggccgagatggcgtggacggtgccaagggggacgacggtcgcagcgcctatgaagtcgccgtcgatgaaggcttccaaggcagccaggccgagtggctggagtccttgaagggtgctgacgggcgcgatggtcgggacggtgcccgtgcggtggctggacgcaacatcgatgtccaggacaaccaggacggcacccagaccgtgtcgctggccaaggacgtggacctgggcgaagacggttcgctgaccgtgggtgccaccacagtgaacaacaatggtgtggccatccagggtggccccagcatgacgcgcaacggcttggacgccggcaatcagcgggtgaccaacgtggccaacggccggatcgagcgtggctccactgacgcggtcaacggtggccagatctacgacctcatggagcagtgggatgaccgctggaccgatatcgatcgccgcttcgagcgcaccgacaagcgcctcaatggtctgggtgcgcagatgggtgccatgaccatgatggccgccacgccaggcgagggaggtgtcactgtcggcgtcggcttctcgggtggcgaaaccgccttggcggtgggttggtcgcgtcgtatcaacgaccgtgcgtcgatcgccgtaggtgcgtcgttcggtggcggcaacaaagcagtcgtgggcgttggtgtccggatcggggggcgctaa

SEQ ID NO: 516766 - DNA, 687 bp, Stenotrophomonas maltophilia
gtggcccaagggggagggcggtgcttcggcaccgccttcttttttatgcttgtcgcgctcgacatcgtgcctatgctgggcttgatgactgcactacatcccgcactacttgacctggtgcgcgaacgcactggccccacccacgccaactacacagcgctgctgtgcgccacccctgatatgcggcaactggccgagcaactggccagaggcgtggatcccaacagcatgcgccgcgatggttccaccattcttcaccgccaagacttgccactgcccgccgttcgcctgctgctggcagcgcgtgccaaccctgatattcgctggttcgaccggcagctgcgcacccctttgttcttcaccaccgttcccggtgtgcctacggcgttgtaccgcgcaggcgcagacctcgagcaccgggacacggatggcctcacgccactgctggccaatgttcaagacggatcgcttcccatcgtggaagaactgctatccctgggcgcggattggcaagccaccgatcgcgatggccttggcgtgtatgactacgcttcgctacagcccgaccctgcggtggaacgccagctcctgaccatcatccgagagcaccgtgcaggtctgaagcgtgccgcgctgatggagcaggtggggctggaagaggagggaagggagcggcggcggatgtga

SEQ ID NO: 516767 - DNA, 189 bp, Stenotrophomonas maltophilia
atggaagacgccctttccctatccgacgccctggaagcggccatccgctatcgcatagtcaaatgcgaggaagggctgaccattgagccaggtgagtccgacgaccaccttttcgatctagaaacagcgttgcactacgtgcgccgtgcgttggaaggcggcgacgaggttgagatcgtcgttcaatga

SEQ ID NO: 516768 - DNA, 1038 bp, Stenotrophomonas maltophilia
atgaagtacgccgacctcgcccaggcccaagcgcaagttctcatcgacctcatgaaggagggcaagcccttcctgccgttcttgaagccgggcgacccctccacgatcaatgggttgccgtacaaccccacgacggggaaagcgtacaggggcgggaaccgcgtcatgctgtggatcgccggcatggtcaatcatttctcagacaaccgctggctgacgtacaagcaggcccaatccgtgggggcgcaggtccgaaagggcgagaagtccattccgctgcgctatgtgatgtttcccaacggacaagaagcagatggggcggccgttgtgcagccgacgcaaccgcagggcgcgtctccgaaggcctggatggataagcccaggacgttcttcttcaatgtgttcaatgccgagcagatcgaaggcctgcctccaccgcccaagcggcctgagtccacgccccaccaacggattgagcggtgcgagcaactggtcaaggacagcggcgccgtagtcgttcatggggccagtggcccgcactatgctcccaagagcgacaagatcggtatgccctacccagagcgtttcatcaccccggatggctactacgctgcattgacacacgaacttgctcactggaccggacacgaaacacgattggcacgggatctgacgggagcgttcggctcggagagctacgcacgcgaagagatttttgcagaactcgctagccacataatgggcgtcgaacttcaaattggtcacgatcccacgcagcatgccgcatacatccatcactggatgaagatcgccaaagaggatccatcgttcgtctacacggccgcggcggcggccgagaagatctgcgacttcgtgggcctggaacggtatgcctacgaaccactaccgcaggtagaacaggcccacgaagtcgagggtggggtggatgtcgcctccggcgctctgactgttccttcgcttgaggctgtatcggtcgccgtgcttgaacgcccgtcggacgttgccatgtccatgtag

SEQ ID NO: 516769 - DNA, 222 bp, Stenotrophomonas maltophilia
atgttccaggacaagttcgataatgaaaattccagtcaaggcaaactgacgaggaatgatcaaggtcgtcccgttgcaatcgtgttgccgggtgagtatggcttttccaacgtgatcgacgatcggaacatctccttgaaagagaagctgatcgagcgccagaaacagtcccagaaaggcgttcagacactcctgagtgcgttgatggaacagcctcgatag

SEQ ID NO: 516770 - DNA, 219 bp, Stenotrophomonas maltophilia
atgaagacgcgggaaatgaaggtggtggtgatggtgcgccgtgagggtgcgcctgatttcgtccggttcgacatgagcgtgtctggcgaacaggtcgagcagggtttgcattacgtgctggccaagcaaaaggcgcgcgaccttggcctagaggtcgtggacgcattcgatgagcaggatccggccttccagtggctggcagtggagttcggagcatga

SEQ ID NO: 516771 - DNA, 318 bp, Stenotrophomonas maltophilia
atgaaagatcaattggacgtggcctttatcggtatgggcgtggacgccgcattccgcgacccgaccacgggcagatacaacggtggacagctggagctggtggagcaagtgctggcgtttgggcatgtgctggacagccattacgaaacccatttccgggcggagggcttccccgggtgctgggcctacgaggttgccgaagagttcggcaactggtgcgcccgccagctcatggctggcaaagccgtcgacaccaaggaggtggacgcatggctggctgaaacggcgcccggcgactgcacgagggccacggcatga

SEQ ID NO: 516772 - DNA, 222 bp, Stenotrophomonas maltophilia
atgaactggcgtggcgcattgactgcctacgacgcccacctggccgaggacggccggattgttcgcaagggcaagacgctaggcgttgtgatcaccgaaaggaagaaccgcctgcgttttgagtcggtcgccggctcgttgctggcaagtggccccgtcgagccccgaaccgttgagcggttcgtcgagagtttctggttctggaccaaggagaacacctga

SEQ ID NO: 516773 - DNA, 288 bp, Stenotrophomonas maltophilia
atggccacgtatcgcttcaatctgcggcttgatcgggtagtgccgcacaccgccaccgtggaggtggaggccgacaacatcgctgacgccatccagcaggtcagggcctcagatggggacggcgctgtatggacgccggaaggcaatggctactggggcgatgacctggtggtcgacggcatgcaccgcgtcgaaccgccgctggacttcgaggtggtggctgaccccatcgacgagttgggactggcgtggttcaagcgcatggaagccaagcaggtgaccgcgtga

SEQ ID NO: 516774 - DNA, 207 bp, Stenotrophomonas maltophilia
atgcccttcaccggttcgacggtggaggacatggaacagctgcgccacttgtcccgagcctacgcccgacaggttccctttggtctggattggcccgtgaacttctgggccgacaagatcggctgggaaaccgaagaccaggcggcccgcgtctggctgaaccactacttcgacacccacaacaccacttcggacaccaagcactga

SEQ ID NO: 516775 - DNA, 285 bp, Stenotrophomonas maltophilia
atgaaagctccaaccccctcactgtctggcaatacggccacctatcacggccccgacggctggaccttagtggccgaccgccgggaagtcttcccagacgaccccggccagggcacgcccctgatggtgtacggcccacatgcccgctgcagtggcacgctgggtcgggtgctggacaccgccgaaaccgacaccaatgccgggcgcctcgagcccgttccgggccgggtcatggcctggctggaagacattgaagacaacgcaaccgaatgggtattcgcatga

SEQ ID NO: 516776 - DNA, 411 bp, Stenotrophomonas maltophilia
atgaacaacacgatggacgagttctggggcaagccgatttccgtgtacacccgcgcccaagccctggccgacggcgtgctggtggatctgaccgcaacggccaagccctttggcttcaagatcccgctggcctgcaccgatacggtctggcgctccctggactggcccgcaggccacaagcccggactgggccaatccaccgccggccgtgtccacgacgccctgaccatggcaaggcttgccgccaacgccgctgcgcaggcgggcgagtcgaccgtggacttcgacatgctgctggtgcctgtgagtggagaggccgaaacaccccgcgtggtcaagctgcgcctggcggtgtcgggtggcgacagcggtgagccggtgttgaccctgatgtaccccggggaagagtga

SEQ ID NO: 516777 - DNA, 372 bp, Stenotrophomonas maltophilia
atggccaatcgttcaaatgacaccttcttaaatactcttttgttgataacgattgcaatctccttcgtcatactgatctggaacgtcaatcaaatcgtttccatgtataaggaaacgagaaagcatgagcccgatccgaaagaagtggagcgccaggccaacattgaaaaatactgtgatttggtcgaggtgagtggtggcaattggctcggtgtggagcgccgggctaagcccggcgtcacgcgtgaagtgggtctcaaggtctgcggtcagaacgcattcaataccggtggagagatttcagttgcttccacgcaaagtttcgcccttggcagcggagcgcgtgcagtcccagcaagtgattggcgttga

SEQ ID NO: 516778 - DNA, 450 bp, Stenotrophomonas maltophilia
atgcgcgcagccatccttctctccctggccctcctggcccccgtcgctaccgtcacagcaggtgagcattcatcccgctcataccagtccaacgaagccagggtggcccagcaggtgcgcgtggccaaggtcttgatggtccgagaggttaggatccaggccaagaaaacccatacggggacggctgtcggtgcggccgtcggctacgccgctgcagatcaaatcaacgaccgtcgtaccgcacgcgtagtcagcagtgtcctgggtggggcaactggacgcgctgtccaggggaatttctaccgccgtggtctggaaatctatgtccaggagcccagtggcaagacctgggccatcgtccaggaggcagatgtgcccgtacatgcgggcgacctggtggccatcgtcgggcgcagccgcaaccttcgcgtggtgcccctcgatcgctga

SEQ ID NO: 516779 - DNA, 252 bp, Stenotrophomonas maltophilia
atgttcatccgccagcccgaccacacgcccaccaagacccctgaactccatgcggccattcgcgctggcaaagtcagggcgcttcatgccctgatcaagaagggggtgttcgtggaggtcaatgggaccaagacccggcaagaagtctatgccgacggtacggcgttcgacctggccaagatccatatgcccgagcaggttcctgtcctgcgagaacacatggtgaagaacttctatggcggcaacacgtaa

SEQ ID NO: 516780 - DNA, 480 bp, Stenotrophomonas maltophilia
atggcggcaacacgtaaaacggaaatcgtacagcttcgtctcaaaggcctgtcgtatcgggaaatcggcaacattgttggcctgtccggcgagcgcgttcggcagatcctggacgaggagaacgatagcgccctggcccgcgccaggcggcgtcagaatgacgcgcgcaaccagaagatcctggccttgcaccaccttgggctgacccagcaggctattgccgccgaactgggcatgaaatcctacacggccgtggggcaggtgatccgcgacgcgggcctgtgtcgctaccgcgagcagcgggagcgcgacgggatcaatgacgagcggatcgcccagctgaaagcacagggctgcacctaccgccagatcgctgacaccctgggcattgagaagttgagtgccgtctacgccgcattgaagcggaaagggctggtcgtgccgctcaatgccaagcgagcgcagcccgagaaggcctga

SEQ ID NO: 516781 - DNA, 168 bp, Stenotrophomonas maltophilia
atgaaaaccgcgaacaagaagtccaccaacaacctcctgctgtacacctttcttggcctgctgctggccttcgctgcctccgttgatatcggtgggctttcgagcaaggccatggacaaccaggccgagcgtgcccagcaggcagtgcggaactggggcctggaatga

SEQ ID NO: 516782 - DNA, 576 bp, Stenotrophomonas maltophilia
atgagcctgcacatcgccgtggcctcccccaagggtggggttggcaagaccaccgtcgccctgcaactggcgggtgcttatgccgccaaaggccatcgggtggcgcttgtcgaccacgacccacagggctcttgcctgatcttcgggaaggtcgccacgcacactggacgagaactgccgttcgtgcccacgacggccatggtctcggggttcgatgtctatatccacgactacccgccgggcctggctgaaacctatgctccagcacgcctggtggtagtgcccaccttgctggacgcggccagcttcctggtacacacccgtggcttgcgctacttccaggagttgggggtgcgggtactgcccgtggcccagagagtccgcaccgatcggaaggaacagcgcgacctgctggccaagcatttcacaggcggtgtcgtcctgcgcgatcgggcgctgtacgccaactgctacggaaggggtctgactgtgatgtcggccaggggactgccgcacctggggaaggcgcaggccgaaattcaacggctggttgaagcgattgaggcaatgtcatga

SEQ ID NO: 516783 - DNA, 171 bp, Stenotrophomonas maltophilia
atgacccgcgccctgatctgccttcccgacggcacgctggaagatctcgacctgacacaggccagtcccaacgagctagcagctgctatcactgaccaccgcgagctggaaatggtacgagctgttctccgcgcgcaggaacccgcaccaacacagaaggagacaccatga

SEQ ID NO: 516784 - DNA, 348 bp, Stenotrophomonas maltophilia
atgagatggaccgatttgaacgctgacgatgtggccaaggtgtcgtatgtgaagccgaagaagccacgaaaggcggtatcacagccaccccggttgaagatcgttcgtgaggctggcaatcctgctatccatgttcgaaccaacgtacccatggatgggattggcaagaaggtcttgttccttcgcgcgccggcgcggcttcatcagcgaattgatcgtctggtggttggaccaaagaacactgcgctggtggccatcattgaagacgcactggaccgtcttgaggcaggtcagtccgcatggcgcgtgatagccgttgatagcaaaaacaaaggcgaagaactgtag

SEQ ID NO: 516785 - DNA, 135 bp, Stenotrophomonas maltophilia
atgagcctctttgatcgcattacccagtcgcaagaaccctccttcatcgccctgcgcagcaacggtcttctggtattggcgctcacgggtctggcagttctcactgccgtcgtccttcctgccatcgttggctga

SEQ ID NO: 516786 - DNA, 186 bp, Stenotrophomonas maltophilia
atgaacaccaaaaccaacctcatcatcgccgccgccctggcctggttcatcctccccgcgttcgccgctggcatggcttggctgtcctacgacctcaccaagctggtctgggtcctggcgggcctggccactctttcggttctgttcgagacgcctcgcgactggatcctggatcggttcatgtaa

SEQ ID NO: 516787 - DNA, 333 bp, Stenotrophomonas maltophilia
atgcgcattctcgaacaccatgtcgatccgatctctggccacacctatgccgtgatcgaggaacctattgcgggtgggctggtggggcagccagcgtatcgctaccgcctgatctgtgcccacatccccaactggattgagcaagttgacactgctctccctatttctcggacgccagggatcttgatctacgaaacctacgacgtgctggaaagctggctgtgcttggactattcacagcggcggatcgctggcctcacccgaaatgctcgagtcctgggcggcgcccaccacctcgtcaacgacatcaagaagccaaggaaccatccatga

SEQ ID NO: 516788 - DNA, 474 bp, Stenotrophomonas maltophilia
atgaaagctgcttacccccggctggtggaagccatccagacccagtccctcatcgctgtccaggacgccctggtggagctgcgcgccatcgcccaggtgggctacgcgccggagtatggcaacaacaagtccgaccacgaatgggacttcgagctgaccaacgcccgctccgaagacgacctgaccccgctggccacggcctgcttcctgtacgccaagcacaacgcccaggccgatcgcctgtcctgcgaacgtctggacgccattgccgcttaccttatcgagcgtggagccgaccccttctcagagcaggcgcggcgcaaatctccccgcggctatttggatggtaccggccgcaccctggtggaagtattcggtcaggcccagctgcctccgtcagttcgtaccaagatcgaaagggttgaccagcgcagcttcctggaccgccggacctgggatctgcaggtcgcctga

SEQ ID NO: 516789 - DNA, 1032 bp, Stenotrophomonas maltophilia
atgacgcaccccattcccaccatgacgcttgacgacttcctggctgcggtcgctcccctcgatgttcgccggcctctgtcgccgccttcctatgcccgtcgcaagatcatgtccacggccggctccacctgcccgctctgccacacgacttacgaccgctctcgctccaacggcccgtcgttcccggccatggcgtcattcgttcatacattccttggcggcccactggttgctgacaacttcttcgtctgctgccgtcgctgccaacagatccgcgcgtccgctgacctcgtgaccgtcgacaaccttcctgacgacctggcttcccagcgcctggctgcgcttcaactgtcggtcaaccatctgtgcgcactgccccccagcacaccgctgccggcgttccgttccgctctggcccagcgccatgccctgccccgctcgcgcgtctatgccgcccaggccgacgacggcttgtgcttcattggcgtgtcggcccgctatggcgatgaccagtcaaaaggcttggcccgactgctgtcccaactcaacggcaagccgctgctgcgcgacaagcgcatgaccgtctacctgttcgacgacgcagccttccgctcggtggtctggcaactgatcgacgccaactgctgggtggtcggtgtcggcagacggtcggacctgcgcgacttccaggactactggtggctcacctctgcgtccgtagccgaactccgactgcggaaggtgggcggggtgaaggtgccggcaggcgtggccactcgggaggttggaccgcgcgccctacgccagcgaaagctggtggcgcgacgccgcgcagaagcccagcgggcccgcgacctggccgacttgaaggtggcggaagtggagttcgaccaggcgttcgtgaggctgcgagcgcagcaagctatggggctatctggcgagctggatgagacccggtacttcgtcaaccgctactttgcggcctacagtaaggtccacggacgcccggccagtaccccccggcagcggtga

SEQ ID NO: 516790 - DNA, 420 bp, Stenotrophomonas maltophilia
atgaccaagcgaaagaccagcattgccctcactgcacgcgagatcgagcgctttcagcaagccgctgacgcgcgcggattgtcgttctcgaagttcatggcgcagtccgcggtcaacgctctggagaccaacgacgcgactgtgtcgctgaaagagttcgcagccgacctgcgcgccgacacgtcacgcgtcctcgaccgaatgctggagtccgacgcccttcaatcccaggagcgcgtccgcttcctcgatgagctgcgccaggtgttcggcaacttccttgccgacttgaaggagtcccagcgcgaagcagtcaaggaggcgttcctgttcggacagaaaaacccaaccgccattcaaccccgcatgcccactgatcacgagctgggtattcaccgtccgcccacccctcgctcctaa

SEQ ID NO: 516791 - DNA, 639 bp, Stenotrophomonas maltophilia
atgaagaagctcactctctccctcgcactggctgccaccctggtggctaccacgcccgtcctggcccaggactccccgaccaccgagcaggttgaagccgcacccgccaaacccaaggccgacaagaagcgcttgttcaagtccggtgcgctgggctgtctcggtggcggtgccatcgcttacctgaccggcaagaaagacaaggcgctggcagcctgtgctgtcggtgcggctgtcggttcggtggccagctaccgcaagcagatggacgaggcccgcgaacttcaagccgaagcccaggccgctggcatgaccgccacggtcactaccaacgaagccgtggctaagtcaggtgagaaggtcgaggcatttgccggcatggtcattccctatgacgtcgagtcggtggcagcacgtgatccgaataacgcaaaggtgtacgaccggatcgcggcctttgcccagcgctccaaggagccgctgaccatcgcagtggaaggccgtgaccagaaggcctgccagataccgctggccgagctgcacgcccgctccgcgttcccgccggccaccgccgtggacaactgcggtaagggcaatccccagatcgtcatcacgcccgtgccggacgtgtccgcctga

SEQ ID NO: 516792 - DNA, 135 bp, Stenotrophomonas maltophilia
atgaactactacgaacgcgaagtcttcctgttcctcattgcctaccacgccgagcaggagcgcaaagcccgtcagcggatcgcacagatcgtccgcaacaagcttctcaacattcctcgcaccccacgcccatga

SEQ ID NO: 516793 - DNA, 1185 bp, Stenotrophomonas maltophilia
atgaacgacaagtccaccgacttccttgacctgttcgagctgcccgcccgcgacgaggtgccggcacctccggctgcgccccaatccgtcgacgatcaagccagcgccaccacacacgagccgtccaggccgtcgatgttcgacggtgtgctggacgacctgatggtgcccgagtcgcccgccgcaaccgaagggcgcgtcagcgaaactgctgtaccggtagagcctgagccagtcattgaacttgaacccctggtctgggatccggagcccgaggcggagctggagtctgaagtggtggagcccgagaccgacggccccgcaatggaagagcgtgccatccagatcgccgaacccgtggaagacgaacagccggcagacgttgagaacgacgagaacgagttctggcctggcgtggaaacgtcccccacaaccgaggcgagcgtcgtcgaagatgtcgaggctgtcgaagcctctaccgtctacgggaagctggaagaacggggcgcactcgacccctatcagacgcgcgaggtcgccaaggacgcgctggtagccgatgtcctggccagtcccaaccccgagcagtgcgtggtgctggtacacagccccgaagacaaggcgcaactggaagagcgcccgggtgacacccctgcccaggtgaacgtggtccggcctgccgccacgaaatcccgcataccgcttctggtgggtgtcggtgcagccatcctcgccctgggtgtgatcggctggtggacactctctagtaacagggagtcggccgagccaacggtagccgcacccatcatcgcaatcccaggccaggccaaagaagctcaagtagccagcgcgcctcccgccccgcctgcggtggacgtgcccagcactccaattgttccggtgcctgcctcgccccagcccgtgctggtcaatccggctgacttggtggccgacctggtccagcccacgccccagcccgagcccgccccgccacaggtctccgaacctgagcctgagcacaaggccgcgcctgcgccgaccgtagccaaggcgacgccggcacccgcaccgacgcccaagccgaaggtcaagccggctccgaaacctgaggccaagcctgtcccagagaagtcttggcaggacgacgcgctcaatcagctggatgaactcgaaaaacgcttgtga

SEQ ID NO: 516794 - DNA, 759 bp, Stenotrophomonas maltophilia
atgatcctcgacaagttcttcgtccatctgcgtaccggcgcgccaggcaagtacctggccagcaaggtcctggacttttacggacgactattcatcggcggtccgacggttgacgagatcccgggtcccgacaagtccgttcggcagttcctggcggacacctacttttacatcgacgtggaccgtacgcccagaaagcataacgaggctcacatgctttctgcattgtgggtggaaaacctgcgacaggtggaacatccccaagtggcccgcgccgttgtcattgcctctctcatcctgtgtacggcgctgtactcgctgacgggtgtagtgggcaagtcggcaaccgagtttcgggagtggagggccgaacgcagccaggccaaggcggccgaagaagccagggcgtatgccgtcaagcgcgacagcgtgatgaaagcgctggccgaggaagttgcgacctactcagcccagcagtgcctggacgaagccaccaagttgcgcgtacgcgacaccaccgaacaacgcgatcgctattcggcaatccagcaggggtgtgctgacaaacgccaggaacttatcgatatcggcaagaactggtctgtccaacagtgcgcgaatttcgccattgagggcaacagggccgtcaaggataaaggcgcgagccagacctttgccgatgagtgggtgttccagatcggctgtgcgaggaaccacgactacgccgaactccagcgcttgatcaatgcgggaaactga

SEQ ID NO: 516795 - DNA, 1029 bp, Stenotrophomonas maltophilia
atgaagaccattactcagcgcacgctttctttcctgcgcaaacgagccaatatttacgacgcgttgaacctgcttcccaccctcacggctcgggcaaccgccttcgtgctgcgtcggccattcaatcccgctgcgacgaacagtcgacagggagtctacgcccgggcacaggagcgatacgaatacatcgtccagggtggcgaactggtcaaccgcgcaccgccgttgccgggggatccgctgctgtacgtccagcccgatgatcatgccgaactgatttccctgggcgccgtccagcgtgacggcaagtggtacatgcccgatggtaccgacgaagaggcccagtggcgctttgcccgctggtttgcgaaagccccgcccgatcttgagatccagggccatacctggcacatgacccgggatgggaagtccaccaatgggtggattctggccggagacatgttcaggggctgggacagcacggccacctctctggtcatgggcgcattcccagtcatcctggccgtgggcatggtgctgaatctgttcagtccacttctggccctcgccgtctgtctacccttgttggcactccacgccatcacgctgtaccagtgcgaaaacgccgcaaccttgctgaaagtactggggcttacggtcgtcttgcctgcattgatgagcggaatgttcgggcccagcctggaattgaccaacctgcggtcgacgctccccatgttggcagctgcggtgttcgtcatgacgttcgtggggtcgcgcacaatcagtggcaaggctggtaccgctgtcctttcgctattcactcggctccagcacgcctttggcattaccgctttcgtgatggcggtgaatctggtcctgtccttgttgccaccctccctttcctttatccggcccatgggctggctcatggtcgcctgcgcctaccccttgtactacacctgggggaacttccggcagcgagcggctgaactcgaacagcaatccaaatacaaggcaggtggtcaatga

SEQ ID NO: 516796 - DNA, 2064 bp, Stenotrophomonas maltophilia
atgagtgcacaagcaacccagaccggtcctctggcgccggctcgacttcagcagatccgtgaggcagcccgcgacaagtcttcccttgtccctctggcgcgggcgttgggggtcaccgggcgcgcggaccttgcctgcgcacctgcagccaatcagtggatgtgcctttctctcaacgatctttcgacccacatgatggtgttcggtgccactggtaccggcaaaacctcttcggttctacgtcccttggccgtcaagctcaaaacgcttccagagaagatcggcgctgtactgtctgacggcaagggcgcaatggttgctgacatgcgcgcgctgctggatatcgtcattgagccgggaacgaagtttgctcccttccagggcatggacgctgaaacagtggccaaagccttcaacgaggcgaccgacgacggtatcaagggcgaagctatctggacggatggtgcggacaacttccatttgtttgccctgacgattctccaagcattggtccagcacgaaaaggccgggaagatcgacgccgaggaccgacttgtaacctccgccaacctcatcgacatcatgttggttgagcgtgaggaagcgcggcggcgaaatctggataccagcttcattcaaagccagattgatatggtgtcggtggccgttgacgaaaccaagaaattcatcgcttccacgcgccagttcatgtggaccccctcttgctactccaagattgccaacatcttggctactccgtcgtatgcgggcaatggtgtcttccgcgcgaacgatgaagcgcagcagcttttcgactttcttgggtactctccaatcaccttgccgagcgacacccccgaagttatccaggggaagagggcggcccaccaggagcggatccgtgaccggcctgcgagcattttccctgaccttctggaggaagggcgggtcaccgcgcgtgctatcgacttcttccagcacacctggcccaacaccgacgagaagcaacggtcatcgttcctgatcaacgtaaaccgcgacatcctgtcgttcctcaagtccgacaaactgcgtggcggcatgttggacggcgttgacatgggtgaaaccgcatgggctgacacggaagagggtgtggatgtactgggtgttgtccacggtgcatggttaggtgtcaacctgccggaaacccagttcaagaaggcaggcaaaatcatcgcaaagctggtcaagtccaaggtcttcaaggccatccagatccgtcaggaaatccatggtgagcattggcgtgaagccactggccaatgcgcggtcatggacatggtcgatgagtgccaggaaatggtgtccaacatggaaatcggtctggcgggcatggctcgatcgatggggctgttttttgtttacgccactcagacctacgagagccttgacagtgtcatgaagtcggtggaagccaagaatcgcttcctgaacaacttccggtcgatcctggcatttgattcttccgagcagaccgtccgctacctgcagggtcgggccggcaaggtcaagaagctacgggtcaagactgaagcccagggctacatggatgtgagtcgtgcaatcaacacgttctacaacaccatctacgccgacccaaaccatccagcggcgcacatcctgcgcgacatggaccgtcgcggatccacacgtttccaagtggtgggagagggtgttcagccattccgtgggctcgcacgtcggcttcccttggaagaaatgcgcgatcagaactacctgcccgtatacatgagtggcaagtacgaggaatgccagctgctggaagactgggaggtcaatgatcagctgtcggtacgcggaaccgtcattgcgctactgaaccgggccggacacaagcggatcgacttcgcacgtacccagtgcatgtcggtagatgacgtaaaagctgcactggaagcccaccagtgcaagcagctcgacaaagttgcggctgacctggcctcgctcaatcaagagcttgaagccgttagcgcaaccgccaatccaaccccaaccgcctga

SEQ ID NO: 516797 - DNA, 906 bp, Stenotrophomonas maltophilia
atgtccgcatttaccgattacgagaagaacgaactgtccctggggcgccgctaccgccagtatgagggcgtgtacaacgcagcctttgcggccgaccccaaccccaaccagcgcaagtacaacgagctggctcccaaggacgacatccagtggaagcgcctggaggtctaccgcggcaacgacaagaacgcctatcacgcgcacctgtccaacccggccgatccgctggcacggcctacggataaagagcaggccatgtggcaggccaaccagaaggaccagtggcgtgttgagcgcgagcctggcttttcagcgcacccccaaagcaacaacaagtggttgccgatgtcgcccgagcagcgcggttcggaaaaggccaccgcgttctttgagcaggtcgaggccaagcacggggcaggctacgacgcttacgccgcaaaggtcggttctcaggccgtggccaaggacgactacatgcgcaccatggccgtagtggacttcgaggccatgacgggaagggcacaacaggcgcagaaggaccgtcagcaagcacccgctgaacaggctcaacgcgtcaatcctgcttcccaagcaaccacccagcagggggcagcgcagtcctccatgcccaagtcccgtctgtcgttggagagcttccacggacccacgagcgagtatgtggagcagcgtggtgcggagatagcaaaagcgactggctccgagcgagcacagatcaagcagcaagccgaagcaaaggtgggcgacgtccaggcccgcctgaaagacgctgacagctatgtgcgggttcagtcatcacttgcccagttgcgcgaggcaagggcgctcgacagccagtcccaggctcaatctcatgcacagacccgcaaccggagccgttcacaatga

SEQ ID NO: 516798 - DNA, 837 bp, Stenotrophomonas maltophilia
atgaagtggggagcgagggccctcattttcagcatggccattctggcttccaccgcgcaggccaagctcccgcgcgtggacgggatgtcccgggtcacccaggcccatgcccagcaggcgctggattgctcgcgtcgactgggacgcgaccctggtctgttgatcgtggccgacatgcgcctgccgtcgtccgcccagcgcttgtgggcgatcgacacccgaaccaacgaggtggtactgcgcaccgaagtggcacatggtcgcggatcggatcccgaccagtcgggtagggcgtcggttttctccaacaccccagggagcctgatgacatccgtggggttgtactcggtggccgagtcctacgtgaacaccaaagatggatccacccgtcgccgcctggatggcttgatggtggggttcaatgacaacgcccgcgagcgggccgtggtgctgcacccgtccaactacgtgcgcaccggctgggcaggtcggtcggaagggtgtccggccgtgtcttacgccgtcatggaccagctcaacgcttacgggctggacaacgcgatcctatggattgagggcgatgtggagggtctgtcggaggccatcgccgattgctccggaagcaaggcccgccacaggttccgttggccctggcagccgaaactgcccagcaaaccgcagtggtccccggatagcacggaagccttcaatccctacttccaggtcgaggccgagaacttctgccctacgcccgccctgatggccacggtgtcctggtggcaacaggctcccatctacgccgaggcagtggggcagcgctggacgctgcgctactga

SEQ ID NO: 516799 - DNA, 675 bp, Stenotrophomonas maltophilia
atggcactaatgattggcttttttgccgctgtagcaagtagcgcagcgaacacggtacctgctgtggagccagcagcgaaggtagccagcgatatgcaagtggcgtggatagcgggtggggcgtccctggcgggtgcgttgatcggtgcgttgatcccagcccttgtgacccatttccagaacaagcgtagccgcgatgacgaaaagggatttctggccgttcaggtgtcctcggcgctgtacacctacgccagcggttgtgttgatgtggcctatgaccacggtgagcctgatgaccaggggcgaaccttcccgacagtagcttccccaatccttgacccgctttccctggacgtgaattggcggaccattcccgtgtcgctgctggatcggatcttcgcccttcctgctgcccaacgtatcgtcaacgaacgcttgggctgggaagccgagaacgatttcgagtaccccgttctggatcggcaggccgagtacggccgaattgcgttgaaggcccttgctatcgcacacgacctgcgccgttccgccaacctcccgccagatcccgatggtgttattgacctggtcgccaagatgaaggagcacgtgcccaagctcgaggccaagctggccgaaattgagcgtcgccggcaggagtcatgggctcacgcttga

SEQ ID NO: 516800 - DNA, 1788 bp, Stenotrophomonas maltophilia
atgaagcccgctatctatgacgccttcggtccacctggcaagcacctcgacgcctctaccttggtccgccgctgggacctgggcctggcctatggtgccctgggtgccgttggggggtttttacccttcgcccactggggcctggggtggcgagacaccgtccgcgccgctgttctggacccggccttctattccaggatcgacaatccggcgtggctgaccgactggacgacgctggccgcaggcgtgggggtggccctgctagcagctgctagcttgggctacgccggcctcatcccccgctcgaaccagtgggtcgtgtccggcccccgcctgctggaaggcaaggacgcccggaagaccgcgcgcaagcgcagcggcaccatccaggaccagaaggccgacccattcggcatgtggctccacccggatctcttcctgtccaagaaggtcctggcacgcagcaccctgattgctggctccgtgggctcgggcaaaacccagatcctgctggccctgctccagcagatctttgcccacccccgcaccaagctgttcctgtatgacgtcaagggcgactttacggccaagtttccgcaagccactctggtctcgcccttcgacagtcgctcccgcgtgtggtgggtagcccgggacgtgcgcaccagcacccaagctgccgccttcgctgacagcctcattccagaggacagcgggtccggcaagttctggacgcaggccgcacgccaggtcttgttgggcgtggtgcgctctctccaaaacgagaagcccgaagcctggacgtggaccgacctggcgcaacgcgtatccatgcgcgcccaggaaatggcgcccatcctggacaagtcctaccgcaaggcctacgggttgatttccaacacggaaggccagacggcgttcaacgtcatcgccacgctcaacggctacaccaaggtcatcgacgacctggcacgggcctggcccgactacgaacgcttcgaccgcaagggcaatcggcgccttttctccataaccgattgggcgctggacgattacaagggccctcgccacatcatcgtccagtccggccccgacaaggggctggcggccgcctatatcgccgccatggtcaacgtggcggtgcccgccatcatttccccgcagttggaagacaacgaaagcggacgcttcctgggcttcgtgttcgacgaaatgtcctcaatcggcaagatcgacttcgccccgctggtcgacaaggggcgatccaagggcgtggtgttcgtcgctggctatcaggatcttgcgcaactgcgcgagatctatggcgacaaccaggtcaaagcgctgcagggcatggtaggcacacacatcatctgccaggtgcagatgggagacacccgcgaggaactgtccaaactcctgggcacgcagaaggtggcaaggatggaccacgccccggacgcccgactgaacaccgagggtcagccggtggtgtaccccaaccagctcaccgacatgctgggcttccgcaaggtgcccaagaaaaaggacacagaccccggctttgccatccgtgccatcgtccaacagggtggagacctgctactgctggacttcccgggccagcctctgcccgacaagcgcaagggccaagtcgccgccacctggaccaccaagccgccaggcttcgagccaccgcggcaagacgcaaccggcgacgaggtgctagccggcaagcaactgggtgaaggcctggatcaggacgagctggaccggctgtttcagtag

SEQ ID NO: 516801 - DNA, 627 bp, Stenotrophomonas maltophilia
atgaccctcttcaagcctaacgggcaactcctgcccctcagccagtttcgcgcagcactggaggacggtgctgaccccaacgaatgctggcagtccgccgacggtgaacagactcactatctcttgctggtggcagcgcagcgccacatccaccacctgcgcttgctcttggctcatccccagatcgacatcgcggtgcagggccgcgatgggtcaaacgcgctgaccgtcgccgccaagtacaaccacgtccaggccataggccccttgatccgggcaggggtacctgtcaaccaggcagatcgcttcggtgccacgccgctccattacgccgttcacatggagggggtggggccacttcgccaactgctgctggccggcgccaaccccaatgcccaaaccgcagagggacgcacacccctgggcgaactgatgatgatcatgaccgccgaagaaaccggccaggcgttgagggtccgggcgctcatggcccatggggccgaccccatgatggtcagtgtccaccaacgcaccgaaaccatgatcaacctggcacgtgagcgactatcgcggcacgtccagcctatggcccgtgtttccgaactgccacacgaacgtcgcatgtga

SEQ ID NO: 516802 - DNA, 2802 bp, Stenotrophomonas maltophilia
atgctcaagctcacccccctgactgcgaccggcaacaacgcccgaggcgacaacgtcattgaatacctcacggccacggagttgctgaacaacgtggctggtattaccggctactacttcgtgtcgggcctggaagaagacaccatgcgctggcgcggccatggcgcggccatgctcaacctcaccggccagcccgtggacaaggaggccatgctggaattggcggctggcttctcgcccgacggcaagaaagagaagttgtgccagaacgccggcaagctgcccgagaaggtgttgaagctcgatccccaaaccggccagccgcgcatgcttcccaacggccacccggagttcgtgtggaagggtggccaccaggtgggctatgactgcgtgttcaacgcgcccaaatccgtatcgctgctgctggccatggcctcgcccgaagagcgcggcgccatcctcaaagcccaccgtgacgctgtcgaccaggggctggagtacatggaaagcaaggttgagacccgacgcggcaaggcgggtatcgatgtcattcctgtcgatgggttggtcatcacgtcctgcgaccacctggccaatcgcaacctcgaaccgcacctgcacacccacaacatgatctatggcgtggcctacgccgatggcaagtggggcggctgggagagttcggagatgttccggcaccagaaagccgccgacactatctatatggcgcacctggccgaaaatctgcgccgcttgggctatgccatcgagcagcgagccgaattggatccggaccagcaggacacgggcgtgcgctcctgggaggtcgccggcattgatgaggccacgatcaaggccttctccacccgcaagaacgaaatcatggaggccatgaccgaaggcctgacccaccagcaggcttgggcccagacccgtgcgcacaaggacgagccctccccggccgaactgttcgccacctgggagaaggttatcccggccgtgggccaggactgcgacatccagcgcttgaagcagcaccaagacgtgctggcaccccgccgcaccgatgagcagatcctggaagcgcttcacgccaccacggcgatcgtggccgagaaggacatcctgtgggaggtcagtcgggcccgtgcgggccagagtcccgaagccctgttggccgacgtggagcgtatcaaggagagcatggtggccattgcccccgagcgccaagccgccatcgatcagggtacgcatgtatcgcgccgttattctgaaacacgttatgcgtggtccaagattgtggactgggagcaggaggtccagcagcgggctgacgcccgccgcgacgacctgtcggtgcgcgtgcccgagcagatcctggacaaggtcattgccgactaccaggccgagaagggtttcaccctgtccgacgaacaacgggaggctgtccaccacctgtgcgccaacagcggcgggcacgccgtcatggcgggggtggcgggtgccggcaaaacaacggtggcagacctgtacaagcgctgtttcgaggccaacggccaggagttgattggcgcctgcgtctcgcgcaaagcggctggaaagctgaaagaagaaagcggcatggaagctatgtccgtcaccaagctgctgatgaagctggacaagggccacaagttgacccgcgacatcccagccctcacatctcgatccgtcgtggtgttggacgaggcgggcatggtcgacaccgaagcagttcgccggctcatgcgccacgtggatgacgccggtgccaaattgatcctccagggagacatgaagcagctgcaggccatcggggccggggccggcatggccctggtctccgagaagctgggccaggccgagctgactgagatccgccgacagaagaacgcccaggaccgcgacattgccattgccttctacgaccgcgacgcccagggcaggatcgtgctggacaaccgggccgagcccaagtccaggggcgaagtggcggccaagggtgccatgatcatgaaaaagctcgaggtccgcggcgccatcgacgcatacaacacccgcgaggacgcggcccaagccctgacacgtgattggctggacagtccgcatggcgtggacaaccgcctggtcttggtgcacacccacgaagacagccaactgctgaccaacaagtttcgcgacggcctgcgtgagcggggcgtgctgaccggcgaagaccacacgttccgagcccggcgcgacaagcgtgtgtacgacatgtcggtggccgtgggcgaccgggtgcggatcacgaagaacgacaacaccctgggggtggaaaacggcgacatggccgtggtcgaaagcgtgtcccgcaccgacaagggatcgctggcactgggtctgcgcgtggaaggcaagccgggccagccgtcgtttgccctggccgtggacacaggggagtggaaccacctgcaggccggctactgccgcaccgtccatgacgcccaggggcagggtaagcctgccgtgttccatttcgccaacgcggccatggtggacaaccagtcggcgctggtggcgttcactcgtctgacttccgaccgctaccgcatgtacggcgccgaagtggagctggaacagatccgcaaccgcttgggcgcagaccggctcaaacagaacgccgtccaggagggcctgtggcaccagtacgcacagaagaagcccgagcgaaccttggagcagcaatacgaccaggtcctgcgggagcaggggcggaccaggcgcggcgggttggagcgctag

SEQ ID NO: 516803 - DNA, 219 bp, Stenotrophomonas maltophilia
atgtgccaagtgatggtgggggagatggggaacgggctgtggtccgtggccattgagcggtgcttcggcaatccggcccgcaaggacgtggtgacgggaccccgaccatcggagaaagaggccatttctgccggcgaggtcctggtgaagcagaacaactgtgcggtgagccgtgtggtggtcaacaggatccagcccaaacgcggccttttaggctga

SEQ ID NO: 516804 - DNA, 369 bp, Stenotrophomonas maltophilia
atgagccagtgggtccggcgtagccatttcgagcacaagacccggcacttgtacgctctggtgttcgactccgaacgcgcggtgtacgtcgggcagtccacagacgtgaaacgacgggcccagcagcatgcctcctcacggggcggctggctgcgcccgttccgggtcatccacctcgaaacgatcgagggcacgttcgcccaggccgaagaacgggaatacgtctggcgctgggtggcccatttgaagggctacacggtatacgtccagccacccaatgtacgggtgaacctgggccggcggatggggttgctcaggaggctggaagcttggcgcacctggttgttcgttaggtggccgtcagcctaa

SEQ ID NO: 516805 - DNA, 699 bp, Stenotrophomonas maltophilia
atggactacttcctcgtcccccacgccgacaaggaccaggccaaggccctgggtgcccgctggtccaccgacttcaaactctggtacgccgccgacccgagggtggctgaacgcatgtcggcctactgggcccggaccaccccaccccagcccgtggaggtcttcccgggcgaggatcgcgcttggggaaaccaggtgcgactggccgtggacatgatccctgccagctgccggaacacaggcgtgaagacgtgtgtgtcgaaggacgactggaaacggatccagctgggagtcctgggccgggcccatcgtcattgcgaggtgtgccggcagccggccgatccagaacgcaagatcgtccttgaggtccaggagcgctgggcctacgagagcggggttcaggtgttgaagcgcctggtatgcgaatgcacccgctgcaccctggcctcgcaatacgggcgggccttggcctatggccacgagcccgacacccgcaagtacctcatggaaatcaacggctggacgggcacggagctggaagcccacctgcgcgacgcctacgcgctgtggtcccaacgctcgacccaggcgtgggccctggacctgtcgatcgtggaagcggccgggatcccggtccacctccccaccccggaacagcggcgacagctgggggtggatctatctgctttacggcaatga

SEQ ID NO: 516806 - DNA, 2109 bp, Stenotrophomonas maltophilia
atgactgattttgaggtgctttctagaatcaacgatatgattgagcttggatgtgagcaggaggcccgagcttcattgattgagcatctccatggaaggtcgcaatcagaggaggcctatacgccccttctaaatcatctgttgcgtagggtcgggctctatccttatcttcagcttgatacagcgatgtggcaggatcgcatcgtcgcagacgtttttcgagcagacgttggactaccagagtttgcaactctccatcgcgaccaatcgtccttgctttccaagctgttgaaagggcagagcgtcgcagtaagcgcgccaactagctttggtaagagcttcgttattgatgccttcatttcgataactcggccaaaatcagtcctcatcatcgtgcctacgctcgcgttgatggacgaggtgaggcgtcgacttcatagaaaatttggtggcagctactcagttgtgacgacgactgaggggaatatcccagagggatcgaaaatattcgtctttccccaagagcgagccattacctatgcgaacagaattgaaagtctcgacttgttcattgtggatgagttctacaaggcaagtgctgcgttcgataaggataggtctccaacgctagttcgtgcaatgatcaagttttcatcgatcgccaagcagagatattttctcgcacccaacatatcatcgttgaaggaaaatccttttaccaggggtatggagtttgttaagacggactttaataccgttgttctaaagacttacgacctttcggactcgacttctggtgatgtggagaagaagtcggctgcagtgcgtagaatttgccagccaggttcaaaaactttgctttatgcaggatctcattctcaggtcaaggttgcatcggatgctgtcaaaatgtcgtggccattgtctagttctgatctactgcgcgacataggtagatggctgggggataactattctgcaacctgggctctatcaactcttattcaacatcggattggattgcataatggccagatccaccgggcgattgctcagatgcagctgcggctgtttgaaatggaacagcatggtctggatttgattgtatctacgtcctcgattattgagggcgtgaatacgtcagcgcaacgtgtcgtggtttggagtaacaagaatggcaatccgcggctttcgaacttcgactaccgaaatttaattggtcgtggagggaggatgttcagatacttcgttggtgaagtctatttgctggagaaagctcctgctgattctgaaacgcagctcactctggaattgcctgaatcgttgcttggtgttgctgaaattgactcagtgtcggattcgttgagcgaagcgcagcgggacaaggctgaggcttttgatagagatgtttcggctatgcttaacgtgacgtctatagctgcgctgcaacgagaaggcaagttgcaatcgagtgacgcaaatgtcatttggaaactggtgaattcgatttcaaatgagccgagcaattggagagctttagcaaatctgaattcctcgaatcgcgagtcatgggaatgggtgctcttcaacgcaatcaacctgagcccggcgggatgggatgctccatacaccaaagttgttgcattcatcaaagtcgtcgcagactcatggacgtctacaattccggcaatgctacgaaaactttctaatcatggggttacggttgaggagttcttcaagcttgagaggacggtttcctataaaatggcagcgctcctcggggacatcaataccattcatgccaaagttagtccaaatcgcggattcgatgtgtcaccattcgtttacaggctttcccacgcctttctgccggcaacggtttatcaactcgaagagtatggcctgccaagaatgcttagtcgcaggattcatttatcaacgattgtagattttgagagggcggacttgtctcttcctgatgcgctcgaggcgctggagacccgacggtcggaagtctatgagctgttcggttcccccgcagagcacttcatgctggaccatttctatgccggcgtgacagtggatcagggcactcgccaaagcgcctag

SEQ ID NO: 516807 - DNA, 630 bp, Stenotrophomonas maltophilia
atgttgtatggggtcatgagagcgtactatgacggtctccccgtagttccaaagatattctataaacagaatgcccaggataacgcgaagggtgctgacagtgttcacgtgaccgtggatggcgacgagtttcacctctggtttggtgagtctaaattctactcaaacctcgaagatgctcgtattgcctctattgtgaagtcagtgggggagtcgctaagggcggataagcttaagaaagagaatgcaataatctgcaacgtgagcgatctctcggcctgcgtaaaaaatgaggtcgttctagataagataaaaaaaatgctctcccaggacgtctccctggatgaactcaagcctcacttgtgcatccccatacttctgcttcacgaatgtgcacttacgtcgagcgcctcgatttggaccgatgagtacgagaagtccctggttgaccgccaccgagagcgagcggtggcctactttagccggcagctcagccaactttcgtccactgtatctcagtatggtgacatcacctttcacgtgattttgttcccagtccctgacaagaagaaggttgtagagaagttcctggcaaccgcgaagttccacaaggagtgtggtaatgactga

SEQ ID NO: 516808 - DNA, 1254 bp, Stenotrophomonas maltophilia
atgagccgcctgggtaacctgttgcggcgcgtcgccgcgcgcctggatgcaagcgctcccggtgcgcccacgcccaatacccacgttgccgagatcactccctgtaccccccggcacgacccctgggaggggcggcggctgaacctggtgctgccgtcgatcaacaagcaacattactttggcggcatccataccgctgtgctgatctaccgcgagctgtgccggttcttccctgcatcgcggatcatcctggtcgacagttcaccggatgaagaagcgctttcgcgcttctccgaccacgtactggtgcctgcagaccagacctccacggcgatgcggcagatcgtgccgttcagcgatcgctaccagaagaccctgccggtggccggcgaggacatctgggtggccaccgcctggtggacggcgtatgcagcgcagcgcatgtcgcaatggcagggcgacaacggcggtattgatcgcccgatggtctacctgatccaggatttcgagccagggttctatccatggtccagccagtacgcattggctttgagtacctaccgctgcgatcgtgacatcggaattttcaatacgggcctgcttgccgacttctttgaacagcacgatctgtgctacgcgcagcgctcggtgttcgagccggtgctgcatgacggccttcggccggccctgcaacaggtccgcaatgcgccggctgcgcgtaatcgccgcatcgtggtctatgcgcgccctggtacgccgcgaaatgcgttcgagttgatctgtgaaggattgcgcctgtggggatggaaggacgcacgggcagcccagtgggaagtcgccgcgcccggtgagctgcagtccgacctggacctgggaccgctcagtctgaaggcactgggcaagttgaacatcgatgcctacgctgagctcttgtccacttcggccttgggactgtccttgatggtgtcgccacatcccagctatccaccgctggagatggccgcgttcggaatgggcgtggtcaccaatcgctatgacaacaaacgcctggacgagacgacagagaacatcgtctcgctggaatcgatgactccggaggcgatctgtacggcattgatggcccaggtcgatgcatgcgaacggaggcagatgatgccgggttcgattgcatgcctggaacatccgctgctgcgcgcggggagcttcgacagaatcgccgaagatgtaatagacgccttgcgccgtgcgccttga

SEQ ID NO: 516809 - DNA, 2304 bp, Stenotrophomonas maltophilia
ttgattgtgaatgatgcccctctgtggccggtgcgcggccagactctgcgcgcctacctgttgccggtcgtgatcctggccctgctcgccgtgccgtttgtgcacagtggtgcgcaggcgcagttcctgctgctgcttgccgttggttttgccggcatggcgggcctcggcgagctggtcgcccggatgttccggctggatgcagtgctgcagtcgccggcgatcttcgtgcgcgtgttgctgggccagacaggcctggtggtgctctggctgctgctggcaccgttgacctgggtttgggggcgggtattgggcctgcctcttggtctttccctgatgtgcctggccgtggtcgcagcttccgtcaccgtcatatggcggaagccgtgcgcgccggaggcaagccaggcgcgccgcctcggcggcccggcatggctgctgctcgctctgttggctgcgctggtgctgctcaagtcggcgacgcactattccctgcgcgccggtgccttgggcctggatacgcatcagcacattgcattcgccctcgatctgttcaatgcgggctatccgaagctgactgcaggccatacagattggctggaaaagtacccgaaaatgctgcacctgttcgcagcactgtgggcctggccagggctgggtgcgcatattggcccgttcctgaagatccagccggtgctgcaggcgacactggccgtgttcgcgttcgtggaagtgatcttcctatggatgcgggcgcgggcgctgtcccaccctgcgcagggcatgtggtcggccctgctcgcggtggttctgggctacgccatcatgcgcggcacgatgttcctgtacccggtggacgatctcaacagcaccgggcggctggcggccttctcgactctgttgttgccggtcctgtgcgcgatgttcgcctggctcgagcctgcccgttcgcttcgttcgtggttgctggcctggctgagcctgccgctggccggcgccatggcggccaagctcaatccatcgctggcgattgcctttctcagtttcagtctaccggcctggctgctgctgatggccccgttgtggtggcgtgcccgggcgatgcgcggcaagattgccgttccgctgctgggcatggtcggcggcggcttgctcggcggcctgttgctggtcaccgatccctactacctgcaactgatagcggaagcgctgccaccggtacgccagttcgtggagcagacactggggctgcacatgctggccatcccgaccgaactcagccgcacctctgatgcgttcctcgagcacatcatgcaggtgctgcgctgggagctgtggtatgggccccaacccggcttcggcatgcagtatctgcccgagtcacagcagctgatggggcagcggctgttgccggtgacgcgcctgctgattgcgatcacctccgtgcttgcggtggccatgctgaccatcgcgcctgaggcgatccggcgccgccgcgcattctcgctgctgctggctgcccagatcgcgttgatcattgccgtggccgtggcgcttcgcgtgtcgaacatcaccacgcttgcattggggcacgaaacgcttgaagccagcctgctgagcacgtacacgcagcgctacatcggcctgctgagcatgtacgcggtgctcctgcactggtccctgctgctggcgacgctggtgatgactgcagatgcgctgctgcagtggcgctgcccggggttcccagcgcggcgctgggttcgcgtgccgataaacgtgcttgcgggtggcgtggcggtggtgctggttgcagccttcgtcctggtggatatcaagggagtaaccccggccgatcagggctggacgttcccgatcaccgaggcggacgtgcgtgcgttccggcgcgcggagagccaactgccagacgacgcggtcgtgttggcgcctgcctatgcgatcgtgcttaacggacgcgaggactgggtgctgccgtcgatgtatgtcactccctatctgccgttcgcccagcgtgattacctgttcaacgtcaggctgggttcgggctacggctacttcgctagggacctgcgttcaatgttctgccgttcgcaggcggagcagacccgtgcgatgctccgtcgagcgggcgtcacccatctgctggcacaccgctggccgggacagagtgatgcgcgggtcatggatgggcagtactgtctgaccggttaccgccaactgggcgccagcgaagagccggtcgccgtgggcccggacgggctggtgttctacaggttggatccgtga

SEQ ID NO: 516810 - DNA, 1002 bp, Stenotrophomonas maltophilia
atgctcggacagacggacatcacacagcacactcggtcacaggcgatcgcagtcgtggttcccagctacaaggtcatccggcatatcctggacgtgatcgccaccatcggcccggaagtcactgccatctattgcgtggatgatgcgtgcccggaacagtccgggcgttacatcgaggcgaacaataccgacccgcgggtgcgcgtgctctaccacgaagtcaaccagggggtggggggcgccaccatgaccggctaccggcaggccgtcgccgatggcatggacgtgattgtgaagatcgatggcgatggccagatggacccggcactgctgcccctgttcgtggcaccgatcctcagcggtgaggccgactacaccaagggaaaccgcttctgggatctttcacacatcagccggatgccgatgctgaggcgcgtcggcaacctggggctttccttcctggccaaagcgtccagtggatactggcggttgttcgatccaaccaacggctacaccgccattcacgccgctgttgcacaacggttgccgatggaggcgatcagcacgcgttacttctttgaaacggatctcctgttcaggctcaatgccatgcaggctgtggtgcaggatgtcccgatggatgcgcgctatggcgatgaagtgagcaacctgaagatcagtcaggtactcggcgagttcgcgctcaagcatgcccgcaacttctgcaagcgcatcgcctatcgctattaccttcgcgatctcaccatcgcctcgctggaactggttgccgcactggcactgctcgccggaggcgtactttacggcggctggcattggattgtggccgcaggcgaaggtatttctgcgcctgtgggaacggtggtgctcccttcgatcgccgtggtcagcggactgcagttcctgctcgccttcctcagctacgacatcgccaatcagccggtgacgccgattcatcgatctctgcctggacttcggcgctga

SEQ ID NO: 516811 - DNA, 234 bp, Stenotrophomonas maltophilia
atgatctccactcaacgctggtcgctgcagtaccggctgatggacacgaggcggagcttcctcaaagggagcgccgatgtgggcatgggtatggcgtgcgaaagcctggtgttccgttgcgcactggagaaccaaaccgtgcatggcatcgtggggtacttcggcgcggttgagtttgcttcgattcgcagcgcgcagatgaccaccggtcgttcgatgctggatctgggatga

SEQ ID NO: 516812 - DNA, 1935 bp, Stenotrophomonas maltophilia
atgaatccgttgcggatatctgatgaccgtgaacgcgactggacggcggtagctgccatcgcgctgggcatgttgggattgcttgcggttctggcttatcaatatcggctgctgcatttcaccgaatggggtgacgaatcggaaaccatcgtcgcggccaagatgatggtggctggcagctcactctatcgcgacatcttcaaccaccacgggccgcttaccttcctacctgggatggtcgttgaactgctgggcggtcattccatccccgcacatcgcgtattcattgcactgctgcaacttggcgctctggccagcctgttcttctctccactgatccgcgacaagcatgtcagcgcccgtgtcacctacgtactgctggtagccaccgtctacgtcggcttcctgccatcgagtttcggccattcctacatctatcaggtgatgtgtgggctgatgctcagccttgcattgtccagctggcttctgccgcttctggttgacgtccgcacttgcggcaaggtgggaacagtactcggcagcgcactcgtcgcctcgctgccattccttgctgtgacgtatgttcccgctgcagcgctgctgctgctggcgtcgttgcgacgggacaactggcgcagcgtgatgatcggggcagcggcgggcgtcgcattcaacctagtcttccttgtaatggtgggctcggtgaagggcttcatcgccttccacctgtacatgaattcaacgctgctgtcgcagtatggaggcggacaaaccagctggcagtacatcgcgtcggcgttctccactgccacctccgaccttggcaaccttaccctgctcacactcatcgtcgtgtcactgacagctgcagccaccagggtggcgggctttccgtggcggcatgtacttgtggcattggccctgggctcgctgctggtacggggtggcggtttccatggcctcagctacgcatatgctgcgttggcggtccccctgctgctggtcgccagcgcacctgcccaggcgccgcgcaagcgtagtcttctgctggtgctgtgctgtgtcctgctggcgcgccttgtcgttggcggccccggtgaaaagcagctgatgaaggagcgccgcataccggaaactaccgagttcgccgaggttgcccgagccctgaccgagcctggagacaaggtactggcctattcgttccagaacttccagtacatcgcctcgaaccggcttcctgcttccggctactacttctatttgccttggcagcgcgactacctcgacaagccgattctggatatccgcattgatccctgcaaggacatccagaccggcaaacccaagctgatcatgctggacgaatggaacgtttgggatcgctacgcctggtcgacttacggtggttgcgtcatcgacattgtcgcccgcgaatatgtgcgcctgccaggtaccccctactatgcgcgtcgggatctcgccgagaatatcggactggccccatcggttcctgtcgagctgatcccgagcgctccggtgcagccgggtgatcgattcgacctgcccgatcccgccccttccaacaagggcgcgacgctacgggtcggattcatgctcgggacacacgcccgccgtaatgaggggattgccaccctgaccaccacggatgcggccggctcgaagtcgacactgggaaatctgccgctggcggatgtaaaggacaacgcattcgcctacttcactgttcctgccggtatcagtggtgatctggcgatcgacatccaggaaggcggcggggtcagcgtatgggaggcccgcagcagcgatggcgccacacagccctgcattgccatccagttcgagcatggcccccctagcttcacaccaggttgtccggtggatattgggttgctgctcggaccgacgcaccattaa

SEQ ID NO: 516813 - DNA, 732 bp, Stenotrophomonas maltophilia
gtggtcattccggtgatcaacgaaggcgaacgcatccgctcgctgttgatgcgcatgaaggaagtcggcatcgccgatattgccgatatcatcatcgtcgatggcggaagcacggacggatccttggccgaatctttcctgaagcaacacgacgtcagcgcgctattggtcaagaccgggccagggaaactcagtgcacagttgcgttgcgcctacgatttctgcctggacgccggctacaccggaatagtcaccattgatggaaacaacaaggacgatcccgcacccatccctgcgttcatcgaagcgctcgaacggggagtcgacttcgtgcaggcgtcgcgtttcatatcaggcggctttgccgagaatacgcctttgtcccgttacatcgcgatccgcctgattcatgcaccactgctgagtcttttctccggattcggctggaccgatacaacacagggatttcgtgcgtacagccgcagcctcctgatggaccctggcatcgacgtattccgcgatgtattcgacggttacgagctgttggcctatctgtcctaccgtgccccgaagctcggcttccgctgcgttgagctgccgactgcacgttgctaccccaaaggtgaagtacccaccaagatcagcagcttccgcggcaatctgaaggtcatgcaggtgctgctggcaaccatcgccggccgctacaaccctgcgcaccggagcaaggcatga

SEQ ID NO: 516814 - DNA, 363 bp, Stenotrophomonas maltophilia
atgaacaagtggctgatcctcctcctggccatcttgtgcaacgccgctgccagtgcattggtcaaggtcgcggtaagtgctccacgccagttcccgtcgctggaagatcccgtcggggcactccgcaactggcccttctgggccggcctgtcgctctatggtggcgccttcgtgctttattcaatgtcattggggaggcttccgctcaatgtcgcccatccgatctcgacggcaggggccatcgctgtcgttgcctgcatttcagtggttgtgttccgcgaagccatgccttggacgacattggctggcatcgtgctgattctgtccggcgtgatcctgattaccttccacgccccccgctga

SEQ ID NO: 516815 - DNA, 831 bp, Stenotrophomonas maltophilia
atgagcatttcgatttccaacatcgcctgggaccgcgatcaggacggtgccgtcgcggacttgcttggaaggcatggcgtgcaccacatcgacgtcgcacacagcaagtattttccggcgccttcagagacagccgatgccagcattgactacgtgcgcagatggtgggctgaccgtggcgtaagcattgcgggaatgcaagcccttctgtttggaacccaggggctgaatgtgtttgccgaccaatgcgtgcagcagcaactgctggagcatctacgccatgtgttcaggatcgctgcccggcttggggctggccgccttgtgtttggctcgccacgcaacagggatcgtggcgatctgtcggtagaggccgccaaccagatcggcgccaccttcttccaccaggcgggcgatctggcccaagcagaaggtgtcgtactttgccttgagccgaatcccgagcattacggagccaacttcatgacgaccacggcctcgacagccgaggtggttgcactgaccggccacaggcacatccagatgcaactcgataccggggcagtcttcatgaatggagaagaacccgcacacctactaccacgctatgccccgatcatcggccacgtccacctcagtgaaccaaacctggccgaattgggctcgatgaccagcgatcatgatccgctggccgcactgatagggaagcacctcggcacgaggcctcttaccatcgagatgctgccgcccaacgatggtatcgccggaatcgagcgcgcgctggtcttcgcgctcgggcagtacggtgccgcccagagcggagagcatgcatga

SEQ ID NO: 516816 - DNA, 780 bp, Stenotrophomonas maltophilia
atgtcactcgcgctgatcggccacaccgggttcgtgggttcaacactgaagcgccagacggccttcgaccacctgttcaattccagcaacatccaggatatcgattccaatacgtatgacacggtgatctgctcggctgccccggcacagaaatggatcgccaaccgcgaaccggaagcagactgggccaatatccagaagctgatcggatcgctggaaaaggtcaagtgcaggcacttcatcctgatcagcacggtggatgtattcgcatcaccaatcgccgtggatgaatcgacggtcgtgcagaccgaaggcctccatccttatgggttgcatcgccgccggctcgaagagttcgtcgagtcacgctttgcttcgcggctgatcgttcgcctacccggcctggtcggacccggcctgcgcaagaacatcctgttcgatttccacaatgacaacaatgtcagcgcgatcgacagccgttctcgcttccagttctacccgatggtgaatctgtacggagacctgatcgctgcggaaaaggcgcagatagatctactccatctaaccagcgtgccggtcagcgtcgcagaagtagcgcgtgaagccttcggcgtggcattcgaccatgcacccgaaacgttgccggcgctttacgacatgcgcagccagcatgcactggatggcgcaggagcgccaggataccagtatgacaggcgggccacccttaccgcgatccgggcatatcaccagtccgagcctcgcaaggcagcgctggaatga

SEQ ID NO: 516817 - DNA, 1131 bp, Stenotrophomonas maltophilia
atggatgccgacgccgtcgtcattggtggcggattctatggcgcggtgattgccagctatctggccagtgagcgcgacatgcggcgtgtgatcctgatcgagcgtgaacgcagcctcatgcagcgcgcatcgttttcgaaccaggcacgcgtacacaacggctatcactacccgcgcagcttcactaccgcctaccgcagccgggtaaacctgccgcgcttcatgcaggaatgggactcggcggtccagaccaacttcgtcaaactgtacgcgatcgcgcgccgcaactcaaaggtgacttccgcgcagttcgtgcgtttctgccagtccatctcagcccctcttgaacctgctccgccggcgtaccaagcactgttcgacagccagctgatcgaacgggcattcatcacagaggagtacggattcaacacggacgtgatccgccaaatgatcgaacaacggctgcaagccagcgacgtccgcaccgagctcgggtgcgaagtcgtctcggttgctccacttggcgacggcgcgatccaggtgaatctacagaagaccggtggcggcgatgaaagcctcctccgcgcaccatacgtattcaattgcacctatgcaggattgaacctgatcaacggtccccatggcggaaccgaagccaggttgaagcatgagatcaccgagatggcccttatccagctgcccggcgcactggaagggatggcgatcacggtaatggatggtccattcttctcaatcatgccgttccccgcgcgcaaggcaagcaccctttcacatgtgcgctatacgccgcacaaatcgtggatggatgacgcctcccgtgatccttacatcgaactgtccgactaccccaaggccagtcgctatgaccgcatgctgagggatgtagcgcgctacgttccggcgatgtcgtcggcagtccatctcgaatctctctttgaagtgaagacgattctgatgaagaacgagggagacgatggccgtccgatcttgttcgaaacctatcctgccctgcccggtttcgcatcaatcctcggcggcaagctcgacaacatctatgacgtcatcgctcatctggacaccgtttcgttcaagatttcgaccactgtctag

SEQ ID NO: 516818 - DNA, 729 bp, Stenotrophomonas maltophilia
ttgggcgatttcgtggccgtgcttgacccgctgactgatgatgtcggtttcctgcgcagcatgctggaacctgcgacggccggcattgatgtggtctttgccagcaatcagatgaaaccacggctttcggccagctaccgcgtcgcaaacgcggcgttcaatatcgttttccggtggctcaacggtgtcaacccaggaaccgaagcgccccagtatcgggtgctgagcaagaaggtcatcaattacatcctccagcaccctcgacctgctgccatctaccggctgctcccggtaaccgctggctttacccgcgccaacctgaattaccgtcacgcaccgacagccaacccgccgaaaaagctagggcaaagcatcgatcgcggaatgcggctgctcgtgtcgaacacgcgcctgcccatgcgactggttaccatactctccactttcggcgctgcggccaatttactgtattcgatttacgtgatcgccgtggccgcattcaaacctgatgtggcaccgggctgggtcagcctttcactgcagcagtcgggcatgttcctgttggtttcgctggtcctgcttgtgcttggtgaatacatccttcacatggcatccctcaccagcgagggcccctcttaccacgtcgcccaggagttcaccagtgcccgtctggatcgcctggaaaggatcaacgtagaccattcgccgctccgtcgtgagaatgtctga

SEQ ID NO: 516819 - DNA, 381 bp, Stenotrophomonas maltophilia
atgaaccagcgactgcttcgcttcgtgatctccggcggttccgccgccggagtcgagtacgccactttcatcgctctgcagctcacgcttggcagtagctggctgctggcaagccagtcgataagcttcggctgcgggttcatcgtcagcttcgcgctgaaccgacgctgggtttttcaaagctcggggcacctcggcagcgagctggccacctatggtctcgttgcagcaatcaacctgggcctgggcaacctcgccatctacctgctgacaggccctgcaggagtgcatcccctgctcgccaaattcgcggtgatgggcatgatcgcgggttggaactacctagtcttctcccgcttcgtattcagggaatcggcgtaa

SEQ ID NO: 516820 - DNA, 255 bp, Stenotrophomonas maltophilia
atggcaccacgtgatagcaccattggcgtgcttctgcaggtcaattcacacgcgagcaaccacatgcctgactgccatcatgggacacagactcagcgccgcttgatcggcgtcacgcagttgagccagcttcaccacgtgggtcgtgatgggcagcgcgatagcgaagacggcgccggattcgcggtggagtgcagccccgctctatatgtcgcttctggcattgcgatgctcgaaacgggccaaacgcgataa

SEQ ID NO: 516821 - DNA, 627 bp, Stenotrophomonas maltophilia
atgaactgtacatgttttcaaaggcgcatgtccgcggaggaagagttgctggatctcgcgcatcggctatgtgcttccgctcctcgattcagcgctgcctgggtgctggtcctggccaattcggcacagtgttggcacaggccattctggaagcattggtacatttggactcgtcgcccccctcctaaggggaaggtcgcccgttcgaatcgggccggggtcaccatctgctacagccgcatggcaaccgctcgccggacggcggcggcaggcagtcctccccagacagcccagcagcgccgccgcgcaggccatgacgcgaatccacgtgggcgtggctgccggtcacgcatccgatcagtcgcgaaaacgcccgcttcagagggcggggtaacgggaagcccgccgaggcctttgaacgaggggattcccgaaaccgggctgggctgggtgccgcggcacacggggcgtgatggcggcgcgtctggaatctattgcctatggcagatcccaaatgcggccgcgcagcgtgtaggcctggcgcagatgacgcaccatgaatgccatgagcccccagcttcgccccgtccagccgtcgcactacgccatcgtggccaactggcctga

SEQ ID NO: 516822 - DNA, 750 bp, Stenotrophomonas maltophilia
atgcaggccgctcaaaacgggtacacctacgacgaggtgtacgtcatcaaccagaccgacaacttcatgaagaagttcatcgtgaccgtggatgctggcgggggcgatatcccggatcagatacctgacggcacgagctacgggacggctaccgaggtcccagtaccggccactgagctgcagtacttttctgtagcgcttgtggtcaatgggcaaatcatcgcaatggccagtgggctgccaggctcgatgtacgacgtagtgaacaacccatcggccgacttcgcactttcggaatacgcgcgaaccactccacaagctcacggtcagacgctgttggattttctgtcggcattgaagttcagccttctcgatttttcgaagatcgacatatcaatcaggctagtggcgagcgataactcttacgcgacactagtgtttgatcccgttgcgaagaagtgggaacgcctgaagaacgagactcgcgactctagcggcaacgtcattccgtccacgaaaactgaagtgacaggtgggtctaacagctacagggaatacacgttcaacaacccaaacgactttactagcttcgttcagcacgtaggaaatttgggggttgtgttcgtaggctcagttggaacgtgggcggtcagacaggtgtggtctgtacttcgatcatcaagagcaccgaaggccaggagtcccgcgaagaaacgcagtgctcaacgaccaattgagctggaagcctaa

SEQ ID NO: 516823 - DNA, 771 bp, Stenotrophomonas maltophilia
atgaaacgcaggacgattgcgctaacttcggtcgttgcagttgcggtatttgccgccacaggctttttcctcatccagcgtgaccacaacttcacgccagctgagactagccaatcagccgttagcgttcggcatagcccgacctcgaaggaagaacaggggcttgagcccgaatctacaaacagcgcaccgcagaagtacatcactgctagaacagcacagacggatgccgagacggcatacgaactcgttgagatcaatctgcgttgtcagattgaccgtgatgcatctgccaatggcgagcacattcgaatcacgcccgagggactttgcaaggatctgtcactgaagccactcagccgagaagagatattcaaggcaatcacttatgccgctgagcatggaaacatcaaggcccagctcgactactctctctacgcttcgagaatttttgaagacgagctgcattcactcgatccggatctgattcgcgagtacaaggacaacacagtcagattcctcgaggcggctggcagcgctggtcaaccacaggcctacgctcgcctgagcgacatatacaagaacggcgcactcgcctcgaaagatccggtgatggcctatgcatacgcggaagcatacttccgcacaggttccagtcgttatggtgcgtcgttcttgagcaacgcatcatctggcctggatggcgcccaattgcgccgcggtacggaaatcgccaatcagatcctcagcaaaaggagtgcctcgaggtga

SEQ ID NO: 516824 - DNA, 465 bp, Stenotrophomonas maltophilia
gtgattctgaccaatctcggcggcaacaactggcgattgtcggcctacacggggtcatcgtttgtattcggcacgatatgggtatacgactcggttgtgactggaacgccgggcaagaccggcatcgaggtctaccgagagcacaccggcgagctggctttcgcttcttgggcaaagccccttcggatcgtaggcgtgacaactgccccgttcggggcggcggagggcgcctacatgcaggtcccggctggtcggcgctacgcggtgatctcgtctcgttcgtgccagcggattgagcgtggtgtgggcttccgcttgactgggccgcagggcgatggaaagggcgctgcggggtcgggacgcttttactatgccggggcgactgccctgatcccgcagtcggacaacgccacgcagttcagtgcatccggccacttcgtgctgatcgacgtgaccgggcattga

SEQ ID NO: 516825 - DNA, 270 bp, Stenotrophomonas maltophilia
atgacccaccacgacgagccgatgctgttcccgaccgccgctgaggctgccgcctactgcgaggatgacgaacagccggttccgctgttccgctcgcccgcgcaggccgtggacctgtccatgcctattgcgatgatcgaccgagcgctggggcacctctcaactgcgctggatgatctggattccagccccgacccccgtccgggcgccatggtcaccgaggcggtggcatgcctgcgccggaccctcaccggggtgccccatggctga

SEQ ID NO: 516826 - DNA, 696 bp, Stenotrophomonas maltophilia
gtgatcgatgcattgcgtcgtgttgcgttgcgttcgactgtgctgccagttttcttgatcggtcttattatctcgggaccagtcgcggctcagtcggttgcggacggtatccatccctatttggaataccggaagcgaatccagaacgctgaatcgctgtccactttggatacggggctgttcggcgagggcgtaagtctatacgacggaagcacgcagttccgcgtggtcgaaatcgacctgccaggcaacagtaatctgcccgtgcagtttgcacgccgattgaatatgcagttgcagccgcaaggtagcatccgcgaccacgatgctcgcctgttgggcctgggaaattgggatgttgaagtgcctcatgtggcggtaacctacgcgaattccaccggtcttcctgcaagggtatgcactgtggggagtgtgccgggcagcggcatcttcaatgtcagggagttctggagcgggctcaacgtacacctgccaggtcgaggcgacactgccatgcttggcattatcgcaggcacccccttgcctactgcaggaacgagcacccgactttcgacccgcggggtatctccaacacatgcaacagttgttgggcttgagccggaagcagccagccgcttgttttcgccttcggcatccaatcccgttcccgtcgtcgaaaggcttcagaggccgtaa

SEQ ID NO: 516827 - DNA, 891 bp, Stenotrophomonas maltophilia
atgatgcgttctccactgtttctcgccctcgtgctggccgtcggtgccggcgcccccctgcttgcaggtgacgccactgcgcagaccgcacgcgctgtacgtgcgactgcggaaatgagcatggtgctgtccggtcacatcgaggtcacgccggagggcgcggtcagttcgctggtgctggaccagaaagccatggtcgccccgggcatcgcctccttcgtcgaaggcaccatcggtggctggcgcttcgagcccacgctgcgcgatggccaggcggtggccacgagggcccctttgcgcgttcgcctgcgtggcaagtccacaggcaagggcgactacgaagtcagcatgaccagcgtggatttcagcgagtacgatccgaaggccaccgattcggtgacagcgggtcgcctggcgccgccgcggtatccggacgaggcaatgaggatcggtggtcagggcgatgtgatcctgatgatcaaggtcgcccgtgatggcacggtggccgacgtcattgccgagcaggtcaacatgaccgtggcagggcccgagcggaccatggccaagctgcgcgatgtgctggccaaggccagcatcaacaccgcccgcaagtggaccttcattcctccaagcagcggtgaggacgtcgcacgggaattctggtcggtacgcgtgccggtcaactatgcgttctcggatgatcgcaatgccgctgccgagcgctatggccgttggcgcgctttcattccggggccgcggcagagcgtgccgtggcacgaggccgacccggtcgagcaggccggcagcgatctgctgccggaaggcggcgtctacatggtggacggcgccaagcgcggcctgcgcctgctgaccccgctgcaacagagctga

SEQ ID NO: 516828 - DNA, 528 bp, Stenotrophomonas maltophilia
gtgaaggcgcgccagtcgcggctgctggcgggcatgctgctgctggccatgctgttgctgatcgtggtcgctgcattgcaggccgggctggtcgagttccctgcattggacagcacgcgaccgctggcggtagccctgcaaccgcacccgcagctgcagtggctgatgccgttgctgccgctggccggcgcggccggattggccgcgctgctgctggtgctgctgcgggtgggcctgtgcttggcgatgcagctgtggccggcacggcatgacgaagcaatcggcatgcatgtgcgggcggtgccggtcgcgttgattctgtcagcggcggtgctggctttcggcgtgcccgcgggcatcctgccggtgctgcccggcccggtcgtgctggtggtgatggccgccctgtgcctggccgtactgcgcgggcagtcaccgttggcacgtggccttgcgctgctggcgcctgtggccgccggactgtgcatgctggccgccatcgggtggctgcgggcctggcccggctga

SEQ ID NO: 516829 - DNA, 705 bp, Stenotrophomonas maltophilia
atgagtacagatttgaatacttcatctgcattgcaaaaccatctgtgggagtcggcgaacatccttcgcggccccgtggatgccgctgatttcaagacctacatcttcccgctgctgttcttcaagcgcatctgtgatgtctgggacgaggaataccaggaaatcgtcgatgagaccggcgatgaacagttggcctggtacccggaatcccatcgtttccagattcctgagggctgccattggaacgaggtgcgtgaggtcgccagcaatgtcggcgctgccctgcagcgcgccatgcgcgagatcgaaaaagccaaccctgacacgctctatggcgttttcggtgatgcacagtggtctaacaaagagcgtctgtctgatgcgctgctcaaggatctgatcgagcatttctcgatgcagcccttcggcaacaaggatgtggattccgatcagctgggtgatgcttacgaatacctgatcaagaagtttgctgacgccaccaacaagaaggccggcgagttctataccccgcgcagcgtggtacgcctgatgatcgacatgctggacccgaaggaggcagacacgatctatgacccggcctgcggaacgggcggcatgctgttggcggccgttgagcacgtgcgccagacccacggtgacgtcaagcgtctgtggggcaagctctatggccaggaaaaaacctga

SEQ ID NO: 516830 - DNA, 573 bp, Stenotrophomonas maltophilia
atgcccctgtcccgttcccgtcccgcgcgcccgccgcgcacccgcttggccagcgccctggccgccgtctgcctgcttggcctgcccggcatggctgccgcagaggccagcgccgatgcctccaccacgaatctggataccgtggtggttaccgcctcgggcaaccagcaatggatcaaggatgccccggccagcatcagcgtaatcagccgcgaggacatcgaacgtcagccggtgcacgacctggccaccctgctcagccatgtgccgggcgtgaccggtggcctcagcgcggtcggcgagcagtccaagatcaagctgcgcggcatgccgtccaactacacgctggtgctggtggacggcaagcgcatgggcagctcggcgtcgaccaactaccgccccgacctcggccgtcaggatctgaactggatctcgccggagcagatcgaacgcatcgaagtggtgcgcgggccgatgtcgtcgctgtatggctccgatgccatgggcggggtgatcaacatcatcaccaagcgcatcggtgatgactggagcggcagcgccacccacagctag

SEQ ID NO: 516831 - DNA, 1353 bp, Stenotrophomonas maltophilia
atgctcatcagcaaggtgcaatggaaggaccatcccattctggggaatctgctgttggatttctctacgccgtccggcggggcttacaaaacggtcgtgttggctggtgagaatggtgccggcaagtcatcagtgcttgacaccttgagtcagttcctgaatctaggtccgatcactccgtttgagcgcatcgaatacctggttgatggtcaactctataaggcgacgcccccaacaggctggacgactcatccaaatttcttcgaacgacacgaccccgatggcgaagtggttaaagttgttgcagacagaaacaacagtccggatacaattgattcggatgaacgcgatcctcgtcaatcgggttgtgtgtactcgaaagcgaggtcagagtatagaacgcagaagatcaaggctacgtccgccagcacgctcgacgtactaaagcgtgacatcgatgagaacgatgacttcacttcactcaaacagctgatcgttgacgtatcgaaccgcgacaatggtgagtacgcggacacgaatcgcgaactgggagataagccaaagtcctgggcagagttctacctgacatccaagctgtatcggttcaaggagtcgttcaaccagttcttcgatgccctgcggtttgagaatgttgtcgaccaaaatgaagagaagacaattcgcttcactaagggcggggtctcaatccccatcgacaacctgagcacgggtgagaaacagatcgtgtttaggggcgcacatctgctgaagaacagcggtgttctccatggaggagcgatcttcgttgacgagcctgagctgagtatgcatcccaagtggcagcgcaaaatccttgcctactacaagggtctgtttaccgcggattccgatcagatcgcacagttgttcttcgcgacgcactcggatcatgtcgtcaaagcagcactaagagacgaagagaccattgtcatcacgctggaacgaggcgaacaggggctgatcgccaaacggcatgacgcagcatccgttcttccaatgatcaccagtgccgaggccaattatcgagccttcgatctgccgtcgatcgactatcacatcgagctgtatggctggcttcaagagaaggagtccaagctatcggtgaagtcgtgcgacgaattcattgctgcgcatccgctcttcaaccctgcaatccatggtaggcactctgcattcaacgcgacgacgtacaccacgttgtcgacgttcgttcgtaatgcgatccaccacccggcccaaggcacggatttcactgaggacgaattgaggacctccatccgactgctgaccgacattctgagacacgaaccctag

SEQ ID NO: 516832 - DNA, 630 bp, Stenotrophomonas maltophilia
ttggccacggtaattttctacacacttcaacccttcgagccctggaacaaaggaaagctaatcggccagaaggccccactgaagctgaaggacatttgggctatccggatcagacttcagctcggccacaagatccgcgacctcgctctgttcaacctagcgattgattcgaagctacgcgcctgcgatctggttaagcttcgggtatctgacgtctcgcatggtggccaggtagcatcccgcgcaatcgtgatgcaacataagatggggcgacctgtccggttcgagatcacccaatcgactcgcgaggccgtccaggcttgggtcgcccatgccaacctcaaggcctcggatttcctgttccgcagccgcgtggcggaatcgccccacctgtcgatgaggcggtacgcccggatcgtccatcgctgggtggaagatgccggcctcgagtcgggctcctacggcacgcacacgatgcgcaggaccaaagcttcgttgatctaccgacgcacgcgaaaccttcgggccgttcagctcttgcttgggcacacgaagctggagagcaccgttcgctatcttggcatcgacgtcgaggacgccttggagctcgccgagcggaccgatgtctga

SEQ ID NO: 516833 - DNA, 1416 bp, Stenotrophomonas maltophilia
atgtcgatacctacgatcgttgtaagccagaaccaagttgtcgagcgggtcgaccagttcacaggagctctcgtaaactacctgggcgagcttggccttccgacccagaacgttctcgtccctactgcggagcgacagcgggtcattgccaacctgcccgacgtcattgcgctaatcgaacatgcgaagcgcggagacgcactttatctttctaagttcattgcggcatgcggcgcaggattgttcgacgctgccttgaacttcgtttgggacgaaacagtggttcatctcagaagaaaggtcgctcgatttgaccttgaatatttctatgacagcgtagtcactgatccagcgcgtagatctaagttgcgtgatgaagccgatcttacaaaaatcgaggagtgggagctgattcgcggctgccatctaacggggatcctctcagatatcggatatcgccaccttgactacatacgggatatgcgcaactgggcaagcgccgcccatccaaaccagaacgatctcagtgggctgcaactgatctcttggctggaaacatgcataaaggaggtaatagctaaagatccagaagctgctgcgatagaagtcaaacgcttccttagcagcattcgcaactcaagtttattggaacaggatgctcagcacattcgatccggaatggagcatttacctactgacatcgttagatctttgctcagaacactctttggcatgtacactgctgacagcgcaaccacccaagttcgatctaacatcaggctgattgctcgcaagtgctgggaccttgcccccgaagatgcaagatatgagtgcggcttacgtttctcaaccttcgctgcaaatggcgaagtcacgagaagaacggcggccaatgaatttttgagtggggtcgaaggcttgggctaccttcctcccgacactctcgccgtagagatggctgagcgaataacagctctttacaacgctcacagcgcctacaataacttctataacgaaccccctcacgcaaagagcctccttgcttacgttccaacgacaggtcgtatcccggaggccattagacgtcactacgtaaaaactctggttatggcaaagattggcaacggctatggtgtatcaggaatggccattccaaactacgacgcgatgattgatcgcttcactgaagaagagttcaaagaactcgtaaagcttcccacagaccgagagtttgccgctcgtcttttcctgcgttcgtgcgcgcccaattatcgtgctgtcgtacagtcgttattgccgctaactacgaaccagatcacgctggctgctatgaacgcgatcgtcgcagctacggatcagcaaatcccccagcttggcaaagacagtagcttcctgagaactatcaactcttactga

SEQ ID NO: 516834 - DNA, 348 bp, Stenotrophomonas maltophilia
gtgagtcgtggcccgtggccggcgttggaagaccagcgccgccgccggcacgggaggcagtggccgtggggcctgattgcactgggcctggcggcgctgttcaccgcgggcatgttcggaatggcgctgatcggtgccgcgtccgtgcgcccgccgggtgatggcagcaccacgctcaatctgcgcgcgtacttccttgcgctgctggcgggggaactgctggctgccgtgggatgcgtcgtctccgccgtgcttgcgtggcgcctgaatcgtggcaaggtggccgccgggttggcgatcatcctgctgtcgctgtggcttggtgccctgttctacgggctgttctga

SEQ ID NO: 516835 - DNA, 225 bp, Stenotrophomonas maltophilia
atgccgtccagcgccagccgcggcaccgggatcagcgtgcaggtgggccgcgcggttaggccagcgccgccgcacctgatgggcgatgatgcccagccggtcctcatcgtgatcgaccaccaggatacgcagccgtaccacgtcggccaggcttgcctgcgccgagtgcagcgcggtctgcaggttgtccagtgcctgcccgacctgttcttcgaagctgggtga

SEQ ID NO: 516836 - DNA, 843 bp, Stenotrophomonas maltophilia
atgggcatgtttggccgggatcttcatggattcctgaccgaggacgtgaaaggtctcatcacccatgtcgttaccgggaaggatcagaagcccgaggagcagatcgacaagagcttggcctggatgcaggttgcgctgtccagtgtggatggaatcaagatcctgaatgacccggggctgcaggaagacaagacacgagccatgtggttcatcggcttgggtacgggcggcccggcggtgactgctggctcgatgctgttgctctatgaggtcgcgatggcgttgttcatcggtttcggcccactgttcatcctctgtctgttgttcgatcagaccaaacaattgttccagcgatggctcttctacggaatcgggaccatgttctcgatggcggtgctgtcggcaatggtgtccattgcattggatatggtgatgcgcgtgtcttcctcgttctgggcgacggcgctggtgaacaggttcctgcttgacggggcttccagcgacggtatgaccagtcaggcgatgcagcagggtggcatgggcctgattctcacgaccctgatcctgaccgctcccccaatggcagcgatgttcttccagggcacgctgggtagcttcatggcatattcgcagataggcggcagcccggttgctgctgcgccgggcccgaatgggcagccgccgggtagctactacacgccggccgctccggagaaggggcagtccggccaagacagtggtgcgcatgatcgacatgcgaccgcacgttcaacccttccgtcgtcggaatcctccagggttgccgaaaccggtctcagagctgcacatcccggcaatcaatag

SEQ ID NO: 516837 - DNA, 696 bp, Stenotrophomonas maltophilia
atgatcctttgtctgggccggcgcatagtagctacccggtggctgcccacttggccccggcgcctgtgccaccgggctgccacctatctgcgaatatgccatgaagctacccagcgtgccctggaagaacatggccgccactgggggcgcagtcagaatcaaggtcgtcaggatcaatcccatgccgccctgctgcatcgcctggctggtcatgccgtcgctggaggcgccctcgagcaggaacttgttgaccagggcggtggtccagaacgcggtcgagatacggatcaccatgtccagcgcgatcgataccatcgctgccagtaccgccatcgagaacatcgtgccgatgccgtagaacagccatcgctggaacagctgcttggtctggtcgaacagcagacacagaatgaacaagggacccaggccgatgaacagcgccagcgcgacctcgtagagcagcaacatcgcaccagcggtgacggccggaccgcccgtgcccatgccgatgaaccacagcgcccgcgtcttgtccgcctgcaaccctggatcattcaggatcttgatgccatcaatgctcgacagcgccacctgcatccgcttcctggtcccggctatgggatacgaaattcaggggcaaggtcacacactcaacattaccacctagatcggccgttccagctcacccacaaatga

SEQ ID NO: 516838 - DNA, 561 bp, Stenotrophomonas maltophilia
atgatcgggccgccgacgatcgagccggtgatcagtgcgccgggcctggtgaacgtgccgcagtacagcctgagctggtcggtgccggccaacagcgagagcttcgtgctggaggagagtgccaacggtggtggctggacggtggtgcataacggcggcgggaacagctttggtgccagccgtggcaatggcagctatgcctaccgggtgagggcatgcaatttcgcggggtgcagtccctactcgggcatcgccagtgtctccgtcgtgcttcctcctgcagccactcagatctacgtggcggagtggctcagcacgcgcaaggcgccctatcaggtgcaatgcagcgtcggctggcgcgcggttccgggggcaacggagtatcagcttgagccttccggagctggacggcgcctgtacaccggccccaatacctacgtgcagtcgagcggcgggacctactgcgccagtctctacattgtcagggcctgcaacgccggtggctgttcggcatggtccgcagacttccccgtcacccgcggcgtattgaattgggactaa

SEQ ID NO: 516839 - DNA, 678 bp, Stenotrophomonas maltophilia
atgcagcagcggtattacgatccagaggcgagcgcgtttcattctgtcgatcccgttgctgctacagaagttgcgttcggacggtatcactacgcgcaaagtaatccatacgcgtttactgatcctgatggacggcaagcatgcggaaaggacacggggtgcaggttggacaaagggggggagcgcggtggaagtattggtgggtcgaggatttcggcaggaaacagaaattcggagccttcaattcctcctgcggggagtatgggggaactgatcgaaaataccggggagcgtgcaatcagaaggacgtcgttcacagcaagtggttctcttgccctgggtcttggcgcggaggctaccgcgaccaagacgacgcgcccgtggcaaagtgaccggctaggcgtttacaaagtgatgggcttgggcggattcatcggcgcccaggcgaatttcaaggtgttctcttggggtgaccccaaagggacaactgatctggcgcttaagggtaaccctctgggatactttaaggtgcgaataggcgatggcctcgctattggtttgagtgcccgtttcaatgatcacggcggagggtctctatcggtttctgctggcggtggctttggtggacaggcaatagtcaagcctcccgcgatggggggatgggagaaagagctatga

SEQ ID NO: 516840 - DNA, 660 bp, Stenotrophomonas maltophilia
atggcgcgacttctggttacggtatcgggcgctcaggtgaggtcaagaaagatactggaaagtatgggcaggtgggcgcctgagcgtggattgacagtgtcgaatgataaaggtgtgcgtatgaagtgcattgtcgtacttttgctgctcgttatttctaatgtggcgttggcagaaggacgttgccccccagggcagtaccccgtgggaggtcagggtgtaggaggttgtgcgccaattcccggtggtcaagctggtggtgagagcagtggccccatgccgaccggtaaatgggaaacccgatggggtgctttggcgcaagacacagaccatcaagtcggccagaatttggcgattggtgtggcagaggttaaaaaaacaaagagagaagctaggtccctcgcgctttctgaatgtcagcgcatgggggggcagaagtgtaaagttattcttgagtatcacaatcaatgcgccgcgctagctggcccggtgattggttcagtacccctcgtcgacgtgaaaactgtggcgtatcgatcacctaatgaagaagatgcgaaggtggaatcagtgcgccgttgtgagtccgagggtaagggtcgcagttgtactgttatctactctgcctgcagcatgtctgagtttaagcccttccgctga

SEQ ID NO: 516841 - DNA, 1452 bp, Stenotrophomonas maltophilia
atgatcatcgcagggcttctgatgggcgcggtgcttgccacacccattccgcaaggcgttccaaccgactggtcgcgcacgctgctggcagatctggatgcagcggatgcagccatgcgcgacagtcatccgggcacggtcgaccggcgcaatcccggcttcattccccagttggaggtagcctcggcgcttgcccgctcgcgcgcgggcagggtcgacagcttcgcgggctactggtgggccatgaagggttacgcggcctccttcaatgacggccacgtcagcctcaacgcgtttgccgacgctcccgatcttccaacgcaatggcccgggttcctgaccggcttcgacggcgatgcgcaggtcgtcatgaccgtggacggtggtccgggccatccgccgctgggggctcgattgctgtcctgtgatggcatcgatgcgcagacactggctgcacgccgggtgggtgacttcagcggccgctggaacctgcaggccagccgcatccatggtggtggcgaagtgctgctggagcagggcaatccgttcgtgcccatgctgagcagctgcgtttttcgtgtgaacggtcgagaacagcaccatacgctgcgctgggttgcactcgatccgggaagccggaaggaacgcctggccgatacccgtcgcagcttccgcccagccaatggctggcacacgatgccatgcggtggctactggatcaccaccagcagcttcaacgccgatcccgctgcggccaatttccaggagctcacccggatgctgcagcaactcaccccggcgaccgacgcgttgcagcaggcgcccctgatcgtgctcgatgtgcgcggcaacagcggcggtgcgtcgcactggagcatcgcgctggcgcggttgatctgggggcgcgaggccgtcgatgcagtgcgtgacgacagctgggtggagtggcgggcgtccgaacccaacatcgcccagctccgtggttttctgcagaaactggagcaggcacctgacgcatcaccggcgctgcttcatatgctggagtccgtaaccgcagggatggcgcaggcaagggagcaaggccagccattgtggcgggaacccgccaatgatccggccgccgttctatcgcaaccagagcgggccgggtccggacgcaagggcagggtggtggtcgtggctgacgcgacctgcggctcggcctgcctcgatgcattggatctgtggaagcggctgggcgcggtgcaggtgggcgtcgagacgtcggccgacagcctctacatggatgtccggccggagcggctcccgagcggcctggccaggatctctgtaccgatgaaggtttttcggggccgtgtgcgcggttcgaatgaaccgcatgttcctgatcgtcgctatgacggcgacatgcgggacaccgcagcacttcaagcgtggatctccggacgatga

SEQ ID NO: 516842 - DNA, 345 bp, Stenotrophomonas maltophilia
atggtggtcctgtcactacccaacttcgaggttgaggtggcagaagcatctactcctttagagacgttctatcgtatggggggcatgactgatcgtcaggctggcggatggctagtatccgagttcattaccaacatcgagcactgcgcgtccgagaaacttcaaaagaccctgccgttccgtgataagtacaaatgctggtggcttgccctgacgaacttcaccggcatgagactgaacgagagagaccgagatcagcttcgccagcatctgccgcgtcagaatggctgggacaaaatcttattgatcaatccacacaatccgacggattggtttgagatctaa

SEQ ID NO: 516843 - DNA, 810 bp, Stenotrophomonas maltophilia
atgcttgatgtgacctacccaactccgaaaccgcagaaggcgcttggcgtgtgcatctactgtggaggcacgaacgatctaaccgacgagcacgtggtgccattcggactggcgaaaaattcactcatcttgcccaaggcaagctgtaaagcatgtgcgtctctaacgagcttcgttgagatggggttcctcagagaaggcttggggattctcagagaaaaatttggctccccaacaaggcgagcaaagaggcggacaggacttgcaagccgatggctggcagaccgagccaacgatgggacgattgttcccaacggccaaatctctgaagttcccattggagaccttcctgcaatgtgcattttgcctgtgctgaacccggccagagaaattatcgcgcccggccatcaagatggctggacggggcaattttggatttggagggaacaagtcgacatttcctcggcagtacgcccggggaaggcccttcaccttgggaaaatcaatccagcacagtttgcacgcctgcttgcaaaaattgcacacggcgtggcagttgcagagctagggttgaatacctttaggccctttcttagggatgtcattctcaaggacgatgtcgacccgtttcagtatgtaggtggtgctggtatcccagaccctgcagatggcgttcttcatgcctgggaacaaggttttgcgcagcactcaggcaaatcagatgcgcgatatgtcatcgtgcttattaggctgtttgcgtttttgggagctcctcagtatctcgttgtggcaggtgaccaatgcctgtag

SEQ ID NO: 516844 - DNA, 1407 bp, Stenotrophomonas maltophilia
atggctggcattcgatacctgatcctagtggtgatgatctgctgtgcatttccggcgctggcggacgatcaaggtcaggcgtacgcgaagtgcgcggcggcaatgcaggacgtttcgtcttcggtggaagatctcagggccattgagtgccggcacgaggtgactggcgatgcatcgggcttgtatcgcgtctattacaagttctttaacaaggttacccagcaggtttccaactgggcccgagcaaacaagcccgactacaactattccggcatgtgccgtagtagaggtgacggtcaggccggaatgatcaacggcacgatctacagcggcggcgtctgtgacaacggctgcaaagttcaacccattctcgattcgggcacgaacttttccatccgcgagagtggcaactcaaatgcgatctcagtccgcgcgggtacatggcgtcccagcggggaggtgtgcaacatcactgatacgcagcccaagcccgatgcgaaggatgagtattgccacaccacgtcctccggccatcaggtttgcaagggcaaggacaggacttgtgtaacttcgcagagcgggtttcgcacctgtgccagtgatacggcgaacgagacggggcatacggccaccaacaatccgcgcactgaggcggcgagcatcagcgcgcccaacactaagcccaatccgcctacgaaccgcccgggtgaagattggcagtcgagtggtggcacgaccaatatcaccaacaacaacaccggcaagacaactaatacgcagaatttctacaaccagggcacgccgaacggtaacaagcctgttcccggtgacggctctggccccggagctggcggcagtaatggcaacggcgacaagggcggcaatggtgagggtaatggcaataccgcaagcggtggcggcgactgcaagagtcccccggtagttagcggcgatgcagcgttgggcatgatcgcgacgcagacctgggcgacgcgttgcgcggctgagaagggtaattccgccaaggtgaccggcgacattggcaactgcgatgcagcgttcagtgttgagggcgatagcgtgcaggccaatcagctgcgtgcgcagcgtgtccagttgtgtgccggtcggcccggcgaggggcagggcagtggcagcaatccgcatgacggcgcagaggacgtggacggccccggtaaatggtcgtggaagttcgacaaggacttgatcgataccagtggtttcggtggcggttcctgcccgcagttcggaacgctggatttcggccgcttcggaacggtttcgctcgacggcacgacgtggtggtgccagctggtggcctccatcaagaccgtgatgctgcttctgggcatgttcatttcgttccgtattgtctttggagactga

SEQ ID NO: 516845 - DNA, 177 bp, Stenotrophomonas maltophilia
atggataacgcgcttctcatcatcgttctggccgtcgcgtgcgtcagcgtcggcctcgtccgcatcggctcgtgggtgatcgaccaccgcgagcaggagcaaacccgagtcatgttgcagcaggtctatgcggcctgcgccatcgcccaggtgcgtgccgaggtgcgccgtggttga

SEQ ID NO: 516846 - DNA, 612 bp, Stenotrophomonas maltophilia
atgaccgccgttcaggaaatgcttgatgccgccaagaagggcgcaggtatcccgtcagacaacgttttgagccaaaagctgggaatcacccgagcagtgatcagcgcatggcgaaatggcctctacccggtgccggatgagcgaattgcgcagatttgcgagctagcaaagctcgatggcgccatgtggatcgccaagctacacgccgaacgcgccacttccccggtcgagcgcaaggtgtggcgctcagtcctggacaggctcagcgcggcggcggcagtgttgatgctggtagtcgtcgcagcaccaagcgtcgctcgcgcaaatcccgttcagattcaggggcttagcggctatggcgacggcagtatgtatattatgttcaaagcctctccgaggacgctcgcgtaccgctcgcctcaatcaccggccttgctatgccaagccaagaagccggcctccccagcgtgcccctcgcggcctggctgctacggcttcctccatcgtccgatcagggtcttgtacatgacccaagcgatccagccgcagaccaagccaccccccgcgacaatgatctcttcctcttcaaaggcgggtccattcagtccttga

SEQ ID NO: 516847 - DNA, 243 bp, Stenotrophomonas maltophilia
atgcaccggcgaggaacttccacttcgttgcgcagttacatccttcgcggcatcgcaattgaggagcacaacgcgaccaaggtgccgctcaaggcgcctataaagaagatcctcgttcacgcgtcgtacttgtcgttcaagaaggagttcggcagcgtccacgccaggatcaagagttcacttggcgggaaatttgccaatctctgcacgatcagatacgagaacactgatctcataaaatga

SEQ ID NO: 516848 - DNA, 207 bp, Stenotrophomonas maltophilia
atgctctgcgcaggggaagagatcggcgccataagatgcaagcgcgctgcgattcccttcaaggagaagtcgatcgacgtcctgtccgtcaatttttctgaagcagcgttctgggggtctgcgaggaacaggtcgttgtacgaattgttggtggccgaccagagcgaagtgaaggcaagatcgggccgtcgcagcagttgccagtag

SEQ ID NO: 516849 - DNA, 5292 bp, Stenotrophomonas maltophilia
atggtcagcaatcgcaatcgctggaacgttctcttggtcggcctgttgctgggtctggccggagctgtggggccgtcccagcagctgttcgcatccggtacgtccgcggacaatgcatccagggcggctgagcgcactggcgctcctggcatccagaagtcactccggcttccggaaggccagttgttgctggtctcctccagtggcgccgaacttcagttgcagcgctcggttggaagccaggtctcgcggcgttggtcgctgcctctggttcgcaggaatccaagcctcaccatgatgcctgatgggcgcgtgttgatatggggcgggcgggatagccagggaaggctgcagcaggatgggctatggttcgatccgcaactgcgtgtggttgagcccgcgctcgggctgccgatgagtgcgcggagtggccatacagcaaccgtgttgacagacggtcgcgtgttgttcgccggtggtgacggggacgggagcggttacgaggtctggagccctgacttggggcagctggttcagccagaaggtactgcgccgcgctcaggccatagggcggtgctgcgcgcagacggccaggtcgatcttctcaatggcggagcagggtccgttggctcacgcgcggatatgctgttcgatccagcgagcaacaaggtcgtggtccgtgcgccagagccggtgtcacggtcatcgtccgaagggttggccggcgcgctcccagtgcagggcgccaaggacgtcaatgtggacgcccgtcttgctcttcgtttcaccgagcctgcgcgactggatgacctcaacgacgcgaacatcactttgttcgggccgggtggaaccacgagggctcacatcgtagcggccgaaggggggcgccttgtctttgtgaagccgacgcggtcgctcttcccaaatgctccctataccctgatggttgatggcgttcgtacacagcagggtagggccctccccctgatgatggtggacttcacaacggtgtcgctctctccgcacgctgctgcccaaggagcgtcggccgacgccaccaggactgtccagtcacaaagcaatgtccgttactgcggtggtcgagctcgggtgcctcagccctgtgcgcgcgcgagcagcatgcacgaaggcgtttggacgccagggcaggacaatctgggcgaccattggcgcatgcttggccggcagccggagctttcctacctgggattcatgccggccttctacaaggcacttggcaagactgcgttggcaggaacggtactgcgcaccgatggcgtgccagtggctggtgtggctgtaagtgtgggttccaacagcgcccggacgaaccagagtggacagttccttctgtacgatgttcctgcaggacgccaacgcgtctatgtcgacggcacgactgccaatagtgctggctatgagtacggacagttcgttgcgggcgtggatgtgaaggagggtgagctcacccaggtcccgttcaccatgtggttgccgcgcatcactgagcgggacaagatcaagatttcctctccaagcgccaaggccctgacgcttactcatccggatctaccggggatggagctgcatcttcctgctgacacggtcattcgggatcagaagggcaagatcgtgacggaagtggcgatcgtccccacgccgatcaaccgctcgccctatccgctcccggcgaacttctccatgtacttcaccttgcaacccggcggcgccgtcctgcagggtcttacgccgaaagctggcaggggagccactgtccactatccgaactacgaccgccatccagaggggacgcgtgccgacttctggctctacgacgccatggaagggtggcgtgtgtacggccaagggcgggtaaacaaggaagagactcagttcgtccccgagccgggagttgcgcttcacgaagtggtgagctttggcgcggcggtcagtccgaacgacccggctccggaggaggggatgcccccagacccgcaggagtgtggcgaatgcaatggtggtaccggcagcaacgcaacagctggcgatccgattgatcttcgaacagggcgattcacataccaggaaaccgacatctcgattgccgacgtgatgccgctgattctggggcggaactatcgacccagcgactcggtcaagcgcgagttcggcatcggaactggagctggcttcaactatcgcattgccaggaagaacagctatgcccagatgcagctcgtacttcccaacggcacgccgttggtgtttcagcagacctcgggaagtgaggcatatggcacctggcgctacaacggaaagcatggtttctcgggcgccgtcctcgcctctgaaagcgagggtgggtggaagtaccggttgaaactgcgcgacgggagccagatgaccttcgagcagtacagccccaaccgaatcaagacggttcaggaccgctttggaaacacgatcgagtaccagtacgatgcgggacgtgtgagccggatagtgtcgccgcatgggcggcatattgacctgaactacgatgcccagaaccggatcatctcagcggttgatccactcggtacgacatggcggtacgagtacaacgccttgggcatgctggagaaggtgatctatccggacaatacattccgtcggtacggatacaagacctatggaaaggcgccggttcaacagcatctcctggatgagatctacgatcaacgcgggaatcggttgctcttcaacgagtacaaagagactgatctgattgggaccggtgtgatcaccactgggcaggtggttcgtcagacactggccgatggagcggtgtacgcaattcagtacgatcatttcgatggcacgaacaatgggacactggtcactcacccagatggaagtcagcggcgcgtagtgttcaatggtggtctttatccggtatcggatacgctggcctacggcacgcctctcgcccaggagtatagatttgagcgggatgcggacggccgcatgctggcccgaatagatccactcggcaggcggactgagtaccagtacgacggagaggggcaacctgttcgcacgaccaggctggctggctctccagatgcagtcgagtcgcgaggaaccttcagcgcggaaggccgagtgacatcgttgactgatcccttgggacgcgtgacgcacttcgaatacgatcgcgggtgcttatcgaaagtcactaaccccttgggccacagcagcacatttggttgcaacagctcgggacaggtagaaaccgtgaccgatgcgctgtcaaatacatctttcgcctactacgtgggagccgatctggtcgcgacgcgcgatccattgggccgcggaacgacctatcgtcatgatgcgctggggcgcgtgatcgctggagaagggccgaatggtgagttgttgcgttgggagtacgatccgcagggaagaatggtaaaggccgcgatggctgcgggtgaaacagtcgagatcgcttatgaccccaatggaaacgtgacggacatcttgttgcctcatcaaggtggtctcagctatgagtacgacgctcgggaccgcatgaccaaaagaactgacgggcttgggcagatcgaggcatggacgtatgacgtgatgaaccggccaacgagttacaccgatcgccggggcttcaccagtcgctacgactacgatgcacttggtcggcgtgttctggttagctatcaggacgggagcacggttgcctccacctatgacgcggtagatcgtcgggtgacgctgactgattccgcatcggggagtatcgcctggcaatatgatggattggacagggtggtgcgggtgacaagcccgcagggcgccgtcacctatggctatgatctggtcgggaggcgaacatcgatgcttgcagatgttcaagctgagatgcggtacgtctatgacgacggtgatcgtctgattcgtcagcagcagggtggtgaagtagtagagttcacctatgacgctggaggtcgtagatccagtacaactcttccgaatctggtaagaactggctatgcctacaacgacaatggcgaattgactggtattgcttggacacacggcggtcaaaaattgggtgatttgggctacggctatgacaaccgaggtctcctggtttcacagaccggaagcttctcgccgaggacgctcccatcagcgagcacggggccgaacagctttgatgacaatcaccgccagctgctctacaacggccaggccttgagctatgacgaaaatggaaatctgctaagcgatggtgctcgagagtttgagtggaatgctcgaaatgaacttgtccgggtccgcgaaggcggtatagtcgccgctgagtatcagtatgatgcgctcggtcgtcgtgtgaggaaggttgagcatgggggcgcagttgactatctgtatgatgagttgagtgttgtccaggaatccaaggagggcttgaaaaatgctgtgtttgcgggacgcggaatagacgaaagatttgctcgcaatgatggtgctgagcggacatattttctgacggacaatcttggcagcactcgggccctaaccgacgattctggccaacttctagcaagatatgatactgatccttacggcggagggggtggcgcttccggttatgacaacccttatcagtacactggacgcgaactcgacgcgagtgggctttactactatcggtctcgctattatcacgccgggctggggcgattcatttctgaggacccgatcggtctccagggtgggctgaacacctatgcttatgtgggtggaaatcccacagcatctatcgatcccttggggctatggacgttgaatttgacaggttactatcccacagcggtgctgggccccatcggaccaggtggaggcattgttatctcgggcgtgggaagcagtgttcactcgattggcttccgttttggcattggcgctggagctgggttggggtttgaccctctcggaacccctcctgatagcaatcatatggatctgccatgtgggcaaaaggatggaatcggcctttatgccgatctttctgcggcgatagggcccattggtgttggtactggagccaactacgggggaacacgctcactcactcccagtggctccaatcgctggcaggagtacggcgggcccactagtggagcttcaattggcagcacccgttacggtactggtgctcaggcaggcgtaggaattgaactaactcactacctccgatga

SEQ ID NO: 516850 - DNA, 1542 bp, Stenotrophomonas maltophilia
atggcacaagtcatcaacaccaacaccatgtcgctgaacgcccagcgcaacctgggcaccagcggcgccaacctggccaccaccattcagcgcctgtcctcgggcatgcgcatcaacagcgccaaggacgatgccgccggcctggcaatctccgagcgcttcagcacccagattcgcggcgccaaccaggctgcccgcaacgccaacgatggcatctcgctggcccagaccgccgaaggcgcactgggtgagatcggcaacaacctgcagcgcgtccgcgagctggccgtgcagtcgcgcagcgccaccaactccgattccgaccgccaggccctgaacgccgaagtgcagctgctgaagcaggaaatccagcgcgtcgccgaacagaccaacttcaacggcaccaacctgctggacggcaccttcaccaaccaggccttccagatcggcgccaaccagggccagacgatcaacatctcgcaggttgccaacgccaacatcagcaagctgggcagctggaccaccgccaccaccagcgcttcggtcgctggcgcaatcccggcttcagctgccaccgatggcacagccagcagcactccgcttgcactgaccgcgtttgcgaacgcgaccgataacaccggcagcggcggtgcatttgacatcggcccctccaccttcaccattgctggccagaccctgaacgttggccctcagaccggcgctgacaacaatgccgcaaagaccaacctgcgtaccgccctggctgcgcagatcaatggcaacgccgagctcaaggctgctggcatctccatggatgccgccaccggcgcgattgccaacctcggtgaagaagccaccctcgcctccactgccctgaccacgagcgtcaccgtcgttgaggcaaccgccccggcttcgccggccttcgccgcgatcgaagcaggcggcctgcagatcaacggcgtcgacatcactgtgggctcggccaagaccgcagctgaccgctccaccgcactggccaacgccatcaatgccaagacccacgaaaccggcgtgaccgcgtccctgatcgagggcaagctgcagctgacctcgaaggacaaggacttcgccattacgtcggacaaggctgcggctgatctgctgaaggcaaccggcctcgccgcgcttgacacctcgagcagcaccgccgccggcgtcgtcaagttcgacaagggtactgccaccgaaggctttgcggccttggacatctcctcggtcaacggtgccgacaacgccatcctggcaatggacgcagccctgaactcgatcaactccgcccgcgccgacctgggtgcgatccagaaccgcttcacctcggtggttgcgaacctgaacacttcgtcggagaacatgtcggctgcccgcagccgcatccgcgacgtggactacgcctcggaaaccgccgagctgacccgcaaccagatcctgcagcaggccggtaccgccatgctggcccaggccaaccagtccagccagaacgtgctgagcctgctgcgctga

SEQ ID NO: 516851 - DNA, 465 bp, Stenotrophomonas maltophilia
atgctgcggcaggccctggaacagcgggtcctgcgccgcctgcggctgcagttccagctcgatcgtgcccgactcccgcccggccgggttgtaggccacctcgccacccagcgcgtgtgccagcagctggtggccgtagcagatgccgaacaccggcagatcgtcgtgggcggtctggcgcagccatgcggcactgcgctcactccattcggcgtggtcggtgacgaaggcggccgagccggtcaccagcacgccagcgaacgcatgtgggtcgggcagagcgccaccgtgttcgacatcgaccaccaccgtctcgtgttcttccagcccggcggcgacccggatccagtgcggaaagcgcccgtagcggcgcagcgacggtaccgggcggccggtttcaaggatcaggaacggggctgggttcatccgggggcggcaggactgacaggacttcctcgattgtag

SEQ ID NO: 516852 - DNA, 192 bp, Stenotrophomonas maltophilia
gtgttgccggaattttcccggccccggcctttcccaccaagagccaatcccgacaagcaggcgctggtgcgcatggattggagccggtgcgatctgccaggcaacgtccgcctcccgaccctgaccggcatcggcgtgacctggctgtacgggttccagttcgagatcaaggtgatcgcgaagctgccgtga

SEQ ID NO: 516853 - DNA, 621 bp, Stenotrophomonas maltophilia
atgaactactacgcgctatgccaagcaaagccgccgggatgcccctcgtgcgatctggacgcccagcttcacgacaggttctatcctttccatcctgccgtgtcctacggccgattcccttggtacgccagggccagaactgacacggcgcgggtcttcacagacaccatggtgctggttggccctgaggccagccattcccaggacatcatccgtatctgttcgcacctctacattgcaagccggaagttcctggccgcttgcctgaaatttgatgtaaagatggtcgacttcaggggtattcctcatatttcagagaagggatggacgacttcgacgagcgagtacagtgccatcatcttccatgagaccagcctctcctccgtcgccgctgaggaaaaccagatggcgtatagcaagtatggtgagtctcgcaggatcaagaagctgcgcgtgaaaagctccttcaaagaacacttgttccggattgagaacatggaaggctccagcaacaccttgatctgctcggaggactttcgtgcttacgtcggggatagtctcagcggcgtcgaatttgttgataccgcggatgtggagtggccgcgaatcaagccgatctga

SEQ ID NO: 516854 - DNA, 723 bp, Stenotrophomonas maltophilia
atgcaagtggacccaagaaccgtcgctagagacatacctggaatcgttgacgaactattcccccatctcacgcccggaaccgtatctcacttcaacactcaaatcctcagccttgacttcggagacagccccgaaaacctaatttccgtgtccagactccaaaaggctcttctttttgaaatcgcctacagtgttgcagagaacctgatcaacaatgtcgttatcgactggcaagaatgcgttgaagcagcaattgaacgtcaacgatcattcttcgacgccaagatatctcgctcactcgaggagtccgacaaagaagcagcacttgttgttggtggaaatcttgcggcctggctggctcagcagagcaagttgacaggaagtagcatagtagcgcggcctttcattccaggtttggaatggatttccagcggaagtggagatttcagcattgccgaaactttggtcgaggtgaagtgcactgccaagaagttctccaccgcggacttcagacaggttgctatttactggatgatgagcttctctgcagcattggaaggacgtgggcaggagtggaagagtttcactctattcaatcctcgccgaggcgaagtgctatccataggattcgacaacctcatttcatccatttctggaggaagaacgaagctcgaaattcttcagcttttccacacgttagttggctcccgctcacatcactaa

SEQ ID NO: 516855 - DNA, 1680 bp, Stenotrophomonas maltophilia
atgattgatgtatctcaagagcacttcaaacgcgcagctttggaggtctccaagcatggcgacaacgacactctaccgttcgacatggatgtcagactctgtggagacacatctgatgcgctcgccagcatcgcgttcggctactttagtgagctgaagaatgggccaatcaaagagaatcatgagcgaattgcttccatgccgatctggagtgagcgcctggttgcaccttcgggcccagcagggttccgcgtcgttacaaagattcatccgttctggaacatatacctaaatgggcttgctctagcgattgcagaaaagttagagccccttcgggccgccacatcgcattcttatcgttttttgccaggctccgacgagttgatcttcgattccaaacgttcttggagaacctttaaggaagagacggtagctcaaagcgaagagtttgggccagatggaatagttgtccagacagacatctccagcttctacgaacatgtttcacaccattatattgaaaactgcatatctgatctcgacaacggccaacgccaaatcgcaagccaagtcaatgcactgctgagtcgactctttgcaggacgatccttcggtcttccagttggtggacaaggtgctcgtatcctggccgagctttttctacatcaggtagacatggcgctgtcagctcaaggcatccgctggcatagatatgtagatgactacgtgatcatcgctcgcagcactgctgaagcctatcgtgccctcgcagttttggctcagtcgcttatggactatggattgaccttaaacaaatcgaaatctgtatttctttcacaaaaacactatagcgactatgtcaccgctcagcttggcactgaagacgatgaagccaaacagctgcgcgcgatcgacatcaagtttgacccttattccgactcccccagagaagattacgagtccttgaaggagacagtagagagcctggaggttagaaagctactggcacgcgagcttgacaaggcaatcccggacagcttcttggtttctcagatcagcagaaccatgccactccatgagccagaggcagcttttgagctggctgtaactcttcttagcaagcagaatcttcacgcattcagatcttcgttctcaaccatcatgcgtggcttttcgcaccttcggtccaaggaagaattctcgaaaatttttccgagattggattcacttctcgatgagatacccgttcattccggccatcttttagaagctgatacaaacttgcttcattacctcagatgccttcgcttctccagttcgatgcgtcgcagtcagtttgttcgtcaaactttcgatggaacgcaattagatacagtaagaagagcatgcatagattgttggcgcggctggaaggatcgtgcagcctttaattatttgcggaatcgctgggcgcaaatgaccgctgaaagccagcgctccttttggcttttctcgtactcgttcggcgatgagggcgaaaaggcaagacttcaatcaaaacgggctgctgcgtccaactgggaattgggcgtcgagttagcgctggatccggcaaaggacaaggcaaagcttacaaagcacccaagagggacggaacctcgattccctattgtctttatgaagtggtcggaggagccctga

SEQ ID NO: 516856 - DNA, 216 bp, Stenotrophomonas maltophilia
gtggaatacatcatacggctgacacttggggatgcgcagggcctgggcaagcgcaagcagacccggcgcgagattctcctttacgaggtggactgggtagtgccatggaaggcactactggtccggatcgagccagattacccgcgttcgggtcgcgtgggtcggtcgtcgtatgcgatggagacgatgctgcgcatccacctgctgcagcagtga

SEQ ID NO: 516857 - DNA, 927 bp, Stenotrophomonas maltophilia
gtgagcatcccgttgccggccagtgcgctgcctacgcgggtgctgatcctcggtatgggctggagcggatgcgtgctggccacgcagctgcaggcacggggagtgcacgtcgtcggcacggtgcgtgacccctcgtcggcgccggacgatggcctgctgcggcatcagctgcacgctgacactccaccgtcgccagccctgctcgatgagatcacgcagaccgaggccgtgctgtgcagcgtgccacccgatgccgagggcgacccggcactgcgtctgctgcttccggctctgcacgaaagtccggcgctgcgctgggtgggctatctgtcgtccacgtcggtatatgccgatcgggccggcggctggatcgacgagcgcagtgaggctgatgccaccgacgcagccggcgtgcagcgtgtgcgcgccgaggcgcagtggcgcgcccttgcggaagaacgtggtatcgcctcggcggtgttccgcctgccggggctgtatggtccaggccgcaatgccctgctgcagttggccgaaggccgtgcccgccatgtgattcggccgggcctagcgttcaaccgcctgcacgtgcaggacttggcaaccgtcatcatcgcagcaatgcggcgccccacccggcagggcctgtacctgcccagcgacgacgaacctgcaccgccgcaggatgtgctcgcatatgccgcacagctgggcgggcttgcgatgccgccggccgtggcctgggacgatccagcgctgagcccgacgctgcagcgcttctaccagagcaacaagcgcatcgacagtcgtggcacgcgtgtggcgctggggtgggcaccgcggtttccgacgtatcgggaaggactgcaggcgctggccgcttcgctcgccgggcatggcccggcgctaccggacagcgctttgtag

SEQ ID NO: 516858 - DNA, 1287 bp, Stenotrophomonas maltophilia
atggacctcaacgtactcctttccaacagagtggctggatacctggggcaggatgcacatgggcatccaacgttccgttacgcggacagttggcgccagacgccgggggcctatcccttgtctctcgcacttccgttggcgcaggacagtgctcccagcgcgacgctttccgcagtgctgtggggattgcttccggacaacgaagcactgctgcaacgatgggcctcgcgattccatgtatcagcccgcaatccgatcgcactgctgtcccgcgtgggtgaggactgcgcgggagccgtccagtttgtgagaagtgaacggctagcggccgtcatttcaggcgagagcgacaggcaggagccactgtccacgcatgaaatcgcccagcgcctgcagcgtgtacaggtggaccaagccgcagcacggcgactcgatgatgtcggccagttcagcctagccggggcgcaagccaagatcgccctgttacagcgcgacgatgggggctgggagattcccgccggccgtgttccaacgacccatatcctcaagccacccagcggcgactacgacggattcgttgaaaatgaggtgttctgcctacgtctggccagacaacttggcatgtcggccgcgtttgctgaaatgatctgcgtggaagacgcacaggcaatttccgtaaggcgatacgaccgcatacgtacggcgactggatggcagcgtgtgcaccaggaagacttttgccaagctctgggcgtgatgccccacatcaagtaccagaatcagggcggacctggtcctgccgatctcgcgcgagtgctatgggaccactccagtcaaccgcggtcggatgtcgaggcactgctacaggcactgcagttcaactacctcatcggcggcacggatgcgcacgcgaagaattattcgctgctgataggcgcccagggaagggcccgccttgcccctctgtacgacatatcgagcgcactgccctacgccgaacttcagcgccgcaagatcaagatggcaatgaggatcggcagccattaccgctggtgggacatccgcttgatggattggcggtctaccgctgaggcaatgagacttgacgcagacaaggcactgtctggattgttcgacatggccacccaacttcccgcgctcgcgcggaagtcgcatgcggacctccacgcggagggacttcgtcacccggtactgaaccgcttgcttgatgccatcgatatgagctgtcagcgctgcctgcggcagtttgaacaacccgcaacctga

SEQ ID NO: 516859 - DNA, 387 bp, Stenotrophomonas maltophilia
atgtcggcgagcgcatacatttgtgaaatgagcgttctccgaacttcccgagacttgggcgcggtcatccgccaacgtcgcaaggcactgcgctgggaccaggcgcagctggccgagcgcgtgggagtgagccggcagtgggtcatcgaaatggagaagggcaagccccgggccgaactgcaacttgtgctgcggacggtgaatgtcctcggcctggtactgggcgttggtaacgtcgagggcgaggcatccgttgctgattcgtcggaaatgcctctagcgctgcccgatatcgacactatcgtggatagcaaccgactgtacccggatgaacgtcgcaaggcagttctgccggtcgatcgtcgtaaccgcagcaaggatctctga

SEQ ID NO: 516860 - DNA, 657 bp, Stenotrophomonas maltophilia
atgccgcggacacccccgcgaacccaccccgcccggcctctgacaatttccgggtgcgtccgccacggaaaagaaaaaagaaaagcagaagcaaaagcaaaagccggttggttggccgccttctgtagagccgagcccacgctcggctgcatttcgatcagatttcgaatattcgattccgatgcagattcatccacgcatggcgtggatctaccgtgtcgaccaaggtcgacacctacccacagctgcgaaaatctgtcgaaggcggggcactgtgggtttgcggggtgtgagccgcatggatgcggcgaccaagcccccatggatgggtttacggcgtccccgcaaacccacagtgccccgccatcccaccggaagaccgctgttgctgttgctgttgctttggctttggctgttgcctctgcgggtgccgggtgcaacccggccgaatccctccctcagggccaggcaggcggcgcggcaacccacgcctgctgcacctcggccagcgatgcgcgctcgtcctcacgccactgcggcagcaattgcgcatggtgggcactggtactccactgcgtcggctcggtgcgtaccgcagccgcataccactgcaccgcctcctgcttctgccccatgcgccacagcgccagcgcatag

SEQ ID NO: 516861 - DNA, 915 bp, Stenotrophomonas maltophilia
atgttcaatcttttgatctcgtccagagaggatagttggaagtcgggttcttttgagatggacaagtctcgggtgataaacgggtacacggcggaggaaatcaagcagcgattcaagtccctcagccctaaagtgattaaggagatcaagtcctttccatgcctctttgtggttgaacgcgaactgatcgagtcacgagtcggctggatcactagcattcgagtccgggaggcctccgtagtaatcaaatttgagttcgatccgatatttccacccctcgctccaggggccatcgaggcgcttcggtcagagattgatctagggcgttgggagcttgggaacacccactgggcgatcaaggatgtgccgatctttgaaatcctggaaaggcacggctttgtaacccctcaacaggtgcatgcctcgcttaaactcgcagctctgagctcaccggatccggttccgactcacacacccgcgggtgagtttgataccaagcaggtttttgtggtgcacgggcatgatgagatcgcaaagcttgaaatggcagagttcgtgcgtagcgtggggctcgagccgatcatcctgcacatgcaggcaagttcgggccgaaccattatcgagaagatcgagagctattcgaatgttggtttcggtgttgttctctacacgccctgtgatacgggcgctccaaccgggtgcctgacagcgcgataccgcgcacgtcagaacgtcgtgtttgaacacggttttctgatcggaaagttggggcgttctcgagtgaccgccatggtgaagggcccgatcgagactcctaacgatatcagtggggtggtgtacatccagctggactctgaagagcgttggaaggacgagctgaccaaggagatgagagcagcgggctaccaggtttaa

SEQ ID NO: 516862 - DNA, 612 bp, Stenotrophomonas maltophilia
gtggccttggcctacatcagctcggtctcgaacacaggggtgatctttcagtaccacattggcttggcttttgatgccctgaagcgaattcccattcctgagaatggctcggaggtatcagcattcgaggcgataattgatccctcccgtgagcacatgcaggatttactggtaatccgagcgaacgtcctttcgtgtatccacctggtgcgcaatgcatacgacctgttcgcacagctgtgcaatgccttgctgctcgcccaaccgttggatgaatcaaaagctaccctctacatggtgcgcaagtctctcccgcggtcgccgttgaaggatcttttggattcaattgcttcgagcgagtggttccgatatgtcaatgactactcgaacaccagcaagcacagggccctggttcaacagagcatgtttctgtcgttggaggacggcgtcggcggggtgaggacagtggcgttctcgcatgatgggagggagtatccggcgtacgagttgatggagctcctggagggaattttggaactcaagaaccagatcgtgcactgcgggaatgcgctgaacgatctgttactcacccaacctagccggcgcggctag

SEQ ID NO: 516863 - DNA, 1506 bp, Stenotrophomonas maltophilia
atgtcaaccgaagttctatttctggtccggtcgcgagaaaggcccgcaccgagaacgcctcggccggcgttcctgctgacaactgataggtgggacgacttcagtcatcaggttcagttccacctttcgtatgctgatgccgagggaatcgaaacgcgcatcggcactgtgaagattttgaagcgaaccagcaaggccggcgaaccgatttcggtcgcctcgttaagcaagctgccgtcatcgttccggagattgggcgacgattttatttcccttgggcaagacgacggctattacaagaagctttatgagctatttgccaacgatgccgactcagtgctcgaggccttgcgcgacatcgcgatgcggccggctctcgcggcggacttcgagcccacttcagcattccgcaatgcgatgatgcgggagaacggcgcacaccgggcgcgacgcttcggtagggcctgggcatcagggaaagaagccaccgagaaactctctttcaagtacgccggagtgatcgaaggcgcgagcgcgcccgtcgaggtgaagatcgcgttcaacggtaaggatcaagttcccggccgaatcgtaggcgtcatcggacgcaatgccgtcggcaagacccggttccttgccagtctcggcgaggatctagcccagatctcgcgctcatctgccgaacggctgactgagcgggagaaacgctttcccgacggacgcccgctatttactcgcatcattaccatctcgtacagcgcgttcgatcgcttcaagcggccgcccgaggatgcttccagcagctacgtctactgtggaattcgcagcgacaagggcggcctatcgcgcacctcgctgatcgagacctatcgccgcaaccaggatcgtattcgcactcgtggattgcaatcggattggaccaattacatgcggacgatcctcggtgacttgagcgacagcctgacagcgagcctcgaggcagaaatcgcaaaggccgccaaggacgacaaggcgctgtctttgctcagctctggtcagtcgatcctcgcccacttcgtcacagcgcttctcgcctggatccagccgaacaccttggtgctgttcgacgagcccgagacgcaccttcacccaaatgctgtggccagtctcttcctagtgctttcggacatccttaagagctttgactcctatgcggttgtcgcgacccactcaccggtcgtaatccaggagatcccggccaagcgcgtaattgtgtttcggcgcacggacgatgtcaccgtcgctacgcccctattgctcgagagtttcggcgagagcgttaccgaattgacaaggcacgtattcgagaccatcgaagtcgagagcgtgtaccgcaagacattgcgggagctcgccgaggacgaaagcgccgaagaggtgctggcgcgctttcccctcggcttgagcttgagtgctcaggcctacctgctcgcgctctatgccaagaatacgcggaacgcgaaatga

SEQ ID NO: 516864 - DNA, 849 bp, Stenotrophomonas maltophilia
atgaagcgcctaactgctctagccaccgatcccgcctaccttgaccggtacatcgaaattcgcaaccgcaagcatttgaaggtccgccgcccgctgattgccgcgcaagagttcgtcgaggagcgctacgaggtacttgccgactccgtcgccgacaacactctctcagaagttactatcgacgctaggtccactccgcttaaagcgatccttcgagcctgttacgacgtttcgaccgggccgctgagagacttgaagaaggccatcgtggccgcacaatctgcgcggctcaggaagtactgccccatgtgtgggaccacgcttcactcgacgtttgaccactacctgcccgcagtgaagttcccggagttcgccgtacatccactgaatctcgttccgtgctgctcaaaatgcaactcgaccaaggacgacgactggctgtcggccgggggggggagacagtacctgcacgcctactcggatgaaataccggatcgccagttcgtcaccgtagaccttcatgagcagcacggcctggcgggtgtcggtgccacgttctcgttggtcaaaccttgtgacgtagacacagaaatatgggagctgatcaagtcccatttcgatcgtctgcacttaatcgaccggtacgacgagcaaggaaacgacgagatcgctgagatcctggcggactgcaggacgcacatcgagactgggggaccggacgcgcgagcgttcttggctggacttgcaaacgaccgtcgatcggtctacggacgcaatcactggcgtgccgtcctgatggaagccttgtccacccacgagaacttcgagacttggctccaaatcccgtga

SEQ ID NO: 516865 - DNA, 1146 bp, Stenotrophomonas maltophilia
atgaagaaaagaaacgttatttattaccttccattactgcaaaccgacgatgcaatacggcagaccgactttactatcacgccttttctaaaaaacaaggagtacagccacctcctgccaatggacgtttttgacggcaccggatcattggttgaatttaatggatttgagagcggcgacccctacacgcacgagattgatagaaaaatattgatctcactggagcggctgaaattcagttacttccttcagaaccctaatcattccacgagcatcgacgggtatgtttcaagcgaaacatttgagtgcttcaggtgcatcgagccaaatgaagacacctccttcgagcaaaaggttaacttttcaaatggaatgtacaatttttcaaaatctcttaaaacctactacgcatcccgaatatcaccggggctgcaaccaattaaactaacggcgtgggattttgactatgtagactatttgagcgatggacattatgaggagggtcagctcgccgccatgagactttacaacaggtgctggagcacttattcacttcacaacagcatagacaagcctgttttggcgagagccagcattgaggtattggcaaaaattaaatttcgcaataagccgctggtgagattcatacctgatttttttgaaatggcctttctcaagcttgatcagctgggaaaggtggatgccacggtgcgtcgcctcacagcactcatcatcccgattcgcaatctgctacaggacagtgtgacgaaggaaattgagtctattacagaagcacggcatacgttcgcgcatgaggggattgagagtgagtcgcttatcaacattcctttctaccttgtatggttcccgctttactggatggtgctatttagatttgatgaaatgaccgcaaaggatggagtaaggcttgccctgttcttttgtcttttgaaggtcaaaccggagtgctggcagtacatagagcgctgtacgcctgccactcaaatcaagcgccatcatttggacacctacgcgcactactcccgccttctgcagaaatggtcagaagaacgaccagaagaagcagactcagttttatgtgcaattccgcaatggtttggcatcgacgcccctcgtcctgcgtag

SEQ ID NO: 516866 - DNA, 882 bp, Stenotrophomonas maltophilia
atgggctatgaactgtggacgtcgcctgtgactggacatcgtcgccacggcacgaggcttgcagatttcaacgacgcgctgggcctgaggattatggcgagggatatctgtgagtccctgaaatgttgtgcttccggagcgcccgcagatctggtgcagaatgaactgagtcgtctcgatttttccgtttgtggagtccgagatgcggaagatggtccggttaccggcttcgtgagagttgaagagctgtccagtggatcagtgcaggctcatctctattccctaacagctgggacggtcatcgatgatgaggtgtcattgcagtttgttcttgaatgcctggggaaggattcattcttgtttgtacgaacagctggtgacatatctgccatccttacatgggcggacttaaataagccaattgttcgcgtatacatattcgggcttatctcgctgctggagatgcatcttagcttttgggtcgctcacacttactccgacggcgactggcagcaggccttgactgagggcaggctgggcatggctgttgaagttaggaaaaagcgcgcggcgctgggtcaggatgtatctttgattcaatgcctgcagatgtgtgacaaaaggactctggttagtaagtccattggaatacgacatcagctgggttttgaatctaaggcggcctgcgagcgatttctaaaggatgttgaggtgttgagagatacactggcccacagtcaatatgagttggcgccggataacggctggaaggagttgctcaatctagtcgatggagttaattcagtgatccttagatctgacggtctagtggagaataaagctctagacagcgctgctggctttaaggggcttctctggtag

SEQ ID NO: 516867 - DNA, 696 bp, Stenotrophomonas maltophilia
atggattctggggtctaccgagtggagatggatggtcgctggagcttgaaagatttatatgaatttccacacgcttatatgcaggtctatgcctttgcatacgcttttgatacggatcttccggcggttgattctgataggatcaactacgcgctcgaaagctatccttgggctggcgggtactctgtcgtcaacatctatagcgtcctgcagagtcaagttagtccgagatcgaagccggtaattaaggagattagatacgcctcgcctggctggttggatttaattcttcatattcatccggcggtcaaggttgcgggcgctgtcgccgcgatcgcgagttctattgcagctactgcaaaggcttatgcggctgttcaagatgtcttgtataagatcagcgctaggtcgaaaaaggcgcgtgtggagagtattcagcttacgcggcttgaagttgaggagttgcaggcgctaaatgaacagctagctaaggtaatgaatttttccgacatagcagggctggaggggaggacgaacaatccccacgttacggcgaaactgctgagtgctcagtacagaagactcaggaagcttgcaggttttgtaaagcaggggaaggcaaagctcccgctggtcgctcctgggttgccacccttgccacccttgccacctaaatcgccgcgaatcgatgattga

SEQ ID NO: 516868 - DNA, 309 bp, Stenotrophomonas maltophilia
atggaggatggtggtcgatacttctacgctatctgtgtggaggcggacttcagcaaatcctttcaggatagagtctacttcgtgatcaatattattgcgcaggaaaagcatctgattgaacgctttcttgctgatgcagacgtggatggccttgatcgtctgctgcgcgatgaattgtacggtcgccgaggtgcgattttcttggggtgtccaaacgactggagggtggagtcggctgatttcagtattgagccagccccctatcttaaattcttcgcgtttccggtcgtcgacgtgctggcggcctga

SEQ ID NO: 516869 - DNA, 1269 bp, Stenotrophomonas maltophilia
gtgatttcccgactgctcgaccgctggttcaaggataaacccacgcccgaggcattcgccgcgaaagtcatccagaccgcgcgccagctgggtatcgacaagcggctggaataccaggccgatcagttccgcatcgcctacgacggcggttcgttcttcaatctgcacaacgcctattcggcctacctggaagtggagcgaggccggcaacgcgaggtgctggaacgcttcaccagcatcctgggcatggcaaacgaagaagaaccaccttttgtcgagatccgcgaccgattgcgcccggtgatccgcaaccgcaacctgctcgaccagatcatcctgcaggagatggaagtcaacggtctcgatgcccagatatctctgcagtaccgcccgctcaccggcgaatgtgtggaactgctggccgtggactacgaacagcacaccgcaacccagactcgcgacctacccgaggaatggggtgtcgatcttgaccaggcactggcgatcgcgcgcgacaacctgcgtacactggacgatgcacccttcgtcgagattgccccagggctgttccgctccacctggggcgatgcgtacgacagcagtcgcgtgctgctgcccgagctgctgcaccgccttcccttggcaggcatgccagtgttcatgctgcccacccgcgacgtcctgctggtagccagtgaacgtgacgaacaggcgcagcaagcgatgatcgcgcaggccagcgaagccatgaacgatggccgcgtgatcagcgatgaaatgctccactacgtcgagggccagctgcagaccgtcatcccggccagcgaagtactgcgggaggcactgcgagcgctgcgcctccaggtgcgcgccgggctgtacgccacccagaaggaacagctggacaaggtacatgagctgcacgggcacgacgtcttcgttgcaaacttcatcgtcgacagcagcaaccatatatccattggctgctggtccgaaggcgtggatacctcactgccgcagaccgacttcatcgcgctggtggtggaagagagcgatacgcagatggtggagtggcacgtggcgatgcgcgagttcggccacttgctggaagccgatacccggcacatacacccgccgcgctacctgacccgcggcttcccggatgcagacctgcgcgcgcgctgcccaggtgacacgtcccgggacatcggcgcggccgggcaaggccagcccgcgcccgatacaatcgccccatgtcgaccgaactga

SEQ ID NO: 516870 - DNA, 2409 bp, Stenotrophomonas maltophilia
atgaaccctcgcagcacccataacaccatacccgcccgccgggtacttgccagcggactgctgctggcaatgtccgcatttgctaccgcacccgccctcgcggggagtcttgccactggcacccgggagattgtcgagggcgacaacgttgagaactggcaagtgaccaacgacgcacacttgatcgtcaatggcggtcacacccgccacttgcgcgcaacggcggcctcgaagatctcattgcgcaatgcctttgtctcgacaaaccccattgcagcaccattgatacagctagagggaagcgcctcactcgatgcgatcaacagcagaatcaatggcgaagtggtgcttctggataacacatcactgcgagtgggccccggcagttccattcacgtgatgaaggataatcacaccccgacacgcacgcgctcaatcggaatcgacctggtcagtggacacacaggcgcacccacggcggtcctcgattcggccgcagtctgggtcgaagacgcgcctgccttcggcttcgcgctgaacagcggtatcggcgcgcgtcttcagcaagggcgcctggatatcagcaacggatcactcatcaacgcgagcaacgtcgctgcgctattgtggaacaatcgcggccgaggagcgccggataccattcgacttggcatcaatgcatccagactgcagtccggacggggtgccgccatccacgtcatgccgtcgacagacaacaattacgacatcaacgtctccaatggctcgatcctgatatcgggcgatggcaatctgcttctggtccggtcagatcatggaggcgacggcagtgcacgcaccgatgtcgatttcgtggtcgatgattcgcgcctgattggcaacgtcaccttcgatcccaccacagtgaccaacggcactttggatgtgatcctgcgcaacaacgcccagatcgatggccgtttcttcaacgtcaccagcaccaccattgacatcggcagcacctggctgatgaccggcgacagcaacgtcagccacctcaccctgggcagcaccggtaccgtggcactgggtaatggcagcagcttcaataccctcagcatggataccttcaccggcaacggcggcacgctggcgttcaatacgcatctcggtgacgacacctcggccacggacaagctgatcattgccggcgatacccacggccaggccaacgtgcgcgtgctcaatgccggcggagccggtgcaaaaaccgacaagggcatcgagctgatccgtgtgggcggtgcgtccaacgcgcagttcgacctgcagggccgcgcggtcggcggccagtacgagtacttcctgttcaaggatgcgaccagcggcggctggtatctgcgctcggaactggcgaccacgccggacccgtgcctggccgacccgaccctgccgcagtgcaagccgatcgtcgatccggtggacccgattgacccgattgagccacctaccccggtgctacgcccggaagcgggcgcctacctggccaaccagttcgcggtggaccagctgctgcgtcatggctggcgtgaccgccacggcggcagcacggccgccaacgatggcgtgcgtggctgggcccgcgtggacggcaagcagagcaagctgtcggccgtggaagaccagctggacctgcgcgtggaccgctcgcgcctgcagctgggtgcggacgttggtgtgttcgataacggccgtggtcgcgtgggcgtgatgggcagcatcacgcagtccagcgccacttcgcgttcgcagctgaccggctacagcgcacgcggcaaggtggacggtggtgcactcggcgtgtatggcaactggaacagcgatgcgctgtatgtggatgccagcgtgcaacgcggccagttccgcaaccgcgtgcagggcgaaggcttggctgaggagcgttacgactcggatctgtggcagtcgtcgctggaggccggttaccgcatcggcattggtgcgatcggcagcaccgcgctgagcgtgcagccggaactgcagctggtctataccgatgccaacatcgatgtgcacaccgagaacaacggcacggtagtgcgctcgcagggcgacagcggcttgtccgggcgcatgggcctgcgcctgcagggcgaaggccactcggcagcgggcgcctcggtcagcccgtatctggcggcaaactggtaccgcgatggtgccggcaacggcatcgccttcgatgatgaagtgctgaaggccggcattccgcgcaaccgttatgaactgagtgcgggcgctcgattggaattccgttcgggcctgagcgcatggggtggcttcggtgtgatgcgcggcgaccatggttaccgcgaggcaactgcgaatgtgagtgtcgcctacaagtggtga

SEQ ID NO: 516871 - DNA, 312 bp, Stenotrophomonas maltophilia
atgacttcttcgctctatccctacctcttcgccatcctgcttggctgtctgcagcgcattcatcatgtggaagccgccgatggccgaccctggccttgtaaaggccgcaatcagggtcagggcatcgcgatggcccgcatcgaccgcgccaacgccgggctgacactgctgctggaactgctgcatgccatcgagcgtgtgcgcgtggatggcgacgagcgtcagcaggtgggcgatgaggtgcgtgagggattgctgctggcctgccgtgggctggccgagtatttggatgtgcagttgcgggcggcgtag

SEQ ID NO: 516872 - DNA, 648 bp, Stenotrophomonas maltophilia
atggcaaacttcatcccagcaatcagggggatttctgaaatgagcttttctgacgggataagtgagtgctggtggcttagcgaaacctgcgtagtaaactgggacgcatgggccagcatcggcactgtcgcgggtgttgtgacagcactctctgtgcccgctgttaagcgcttctttgcgagtcggcgtgtgagtgcgattttcgctgcagctcacgtcacgcagcttgaggccgcacaagcagcaattaggaatttcagttctgcgtactcgttcgccgcgccctcgacggagtcggctgataaacgcttggttctcaagagcgatgccgggcttgccaaggccgcagaggcgcttgtggaaaaccttgcctccgtccgcgctcttgaagtcgatctgagcaaatatcctgacgtaggtactcttcttgccgcggacgtttctcggtctttgtacttcgtcagctacatatcgaaattggccgggcttcttcaatatgacaggagtagcgtggaagacgaggtatggatcaagttctgcgtcgcgatgaatcgcaatttggacgacggtcttgccgtgctggatcatgcgaccaaggggtgctcggccgcgatcgggcgtacgtcgattctcaagcggttccgctag

SEQ ID NO: 516873 - DNA, 558 bp, Stenotrophomonas maltophilia
atggacaccatcaccaagcaagaccgcatcatgctgaagaacctcaaggtcgccgacttcgccagcgaggaaacgctgtgcttcaccgcgaccgtcgtgttcgacggcactcccatcgccgaggcccgcaacgacgggcatggcggctcgacattcctccgcgcgctcaacggcaagacgacgctgctggctcaggccgaagccttcgccaaggaactgccgcctgcgcctctcgatctcggccaagagggtgaagacccccattacatcgacatgacgctcgacttcctggtcgatgagctggccgccgttatgcgcgcggagcgtaaggtgcgaaccgcgttcaatcgagatgtcggcaacagggtgctgttcgtgaaggacggcaagctgaagtttctcaagggcatcaagctcaaagccatcgccgaccgcaagacgtatttcgctgcgttgcgcgcccggcaggaccagcccatcgtcatcctcgccgagctggaaccggacgaggcattcgtcctgtggaagcagcatgtcctgggcgacaagcccaactga

SEQ ID NO: 516874 - DNA, 483 bp, Stenotrophomonas maltophilia
atgaacaccaacaccccttcgatcgaacccgccgacggcggcgagatcgagatgcaagtcgctgtcgcctgcgtcgatgcttccggcacccccgacataccggtcttcaaggtcagaaccacccaggaggaatacgatcagggcgcccactactacaaagccaaggatctggccgaagaagcccggtacgaagggccgttcgtctgcttcgatgctgccgaatatggctccatcctgtcggccgcccgcgaactgggccttgtcccgcaggtcgtcgtggtcgatatgaccgacggccagatccactcgatccgctgcgacaccggcgagatcaaggtcgtctgctacgacaccagcgacaccgacgagtactcggcgacggtagcggaccggccgctcggcgagaacggccagctcgtgcgctgctgggcgcatgcccaactggcacaggtcgatcccggcttgaaactggctctggattga

SEQ ID NO: 516875 - DNA, 414 bp, Stenotrophomonas maltophilia
atgcgcatgaaatcaccatttcgtaccgtccgtggtttcactctgatcgagctgatgatcaccgttgccgtagttgcgattcttgccgctgttgccatgccggcttacaccgagcacgtgcgcaaggctcggcgcgcccaggccaaggccgatctggtggaactggcgcaggtgctggaacgcaatcacaccactcagaacacctacgccggtttgactctgccgttcaccagctcgccgcgtaacggcacctcgttctatgcgctgtccttgaacggtgatgcgactgcggccacgttcgagttgcaggcggtaccggagaatggtcaggaagatgacaaatgcgggaccctgaccctggatcaggccggacgaaagacgccgaatgccagcgagggccccggatgctggtga

SEQ ID NO: 516876 - DNA, 4710 bp, Stenotrophomonas maltophilia
atgaacactccgcgccgtttcctccgcctcactccgtcccagtggttgcgatggggtaccgctggtgctgtcgtcgctgctgtcgccgcgctggtgatcccgctacgtgcggccattggtgacttcgatatcgcccaggagccgctgtacagcaagcagagccagccaccgctgatgatgatggtgatgtcgcgtgacgaacagctgttcaacaaggcatacagcgactacaccgacatcggtggcggtcctgatggcagtgaggacggcatcctcgatacgacctatctggatgcattcgagtacggcggctacttcgactccaaactctgctactcggtgacaggaactggagccaacgcactgttcaaggctgccgcgaagggcggtggcaataacggtcacagctgcacgggccagtggtccggcaacttcctcaactgggtcaccatgagcaggctggacgtcatgcgtagcgtgctttacggtggactgcgcacaacagacagcctgacccagaccatcatcgagcgcgcgcggattcccaatgatctgcacgcttgggtgaaggtgtataccggttcagacatcggtagcttcgcaccgctgacggcgaactccaccggctggtcattctgcaatggcaacacatctgccaccagcgggtcgctgatgcgggtggcctcgggcaactggtccgagtgggcagcgacggccagttatcagtgcggcgtcggccgtaccgataccgacggcaagcgggacgtgcccggatcggcagcggactatgctgtgcgcctggatgtctgcgcgggaggcactgacgccttgcgcgaaagctactgccgcaagtacaccagtggcaataccgatcgttacaagccggccggcctgctgcagacctatggtgagagcgggcgcctgcgttttggcctgatttccggtacatatgccaatccgcgtgatggtggcgtattgcgccggaacatcggcaagctggccggcaatggtgacagcttctgcggcgcgggtgacgagatcgatctctccaccggacagttctgctacatgaagtccggcgcgaccgccaatggtgaaggggtgatcaacacgatctccaacttcagcatcgaccagtggaactggaaggataactggaccgactgcaaccagtacggcattcttaatcgtgtaggcaccgataaatccaagattctcaacaaccccggctcaggcagccagaagtgcagcgcctggggcaatccgttggcggagatgtatgcagaagcactgcgctatgtgacgggtggaagcaaggtttacagtgattctggtgatctccctacgctgccaaccggcattgcctgggtcgacccctatcgggacccggccaagggcggcaactcctattgcgctacctgcaacattctggtcatgtcatctggtctgccgtcgttcgacagcgacaacattggtacgttgcccgcttcgatcaacgcgactaccgcgaccaacgatatcggaaccgctgagggcatcgccggtaaaagctggatgatcggtcgcgtgggtgcgaccccgagcggcaccgtgctcaatacccacgaagatatctgccaggggcgtaccgtcgacaatctcagcctggcgcgtggcatctgtcccgacattccttcgatggagggtagctatctggtggcaggcatggccaaggctgcagcggctaccgatctgcgcccaggcgtacagagcaagccagccagttacaagatctccgccaccacctataccgtggcgatggccgagaacctgccgaagttcgagatcaaggtcggcggcaagaccatcagtctggcgccgttgtgccaggccaacaacgacggttggctggaaatcaaggacgccggttggcgcagctgcttcctgggttcggttggtgttggagtgaaatccggtgtcaacaacaacaagtacggccggccgtacgcgaatgacgcgagttcgggcagcttctcgctggtatgggaggactcattgtggggcaatgaccacgacaatgacgttgtggcgatgatgagctactgcgtgggggcagcctgcaacactgtgccgccgggcgccaatgacatgtgctggcgtgctgatccgacccgcagcgtggttgccaataccaccaccaccctgtgcaaccgcgatcagtccagtcgtggtaccaccttgcgcagcaccgtggcggccgacgaagtgttgatccgaatcgagaacctgtccgccttcgccggcaacgcaatgctgaccggctataccatttccggctcgaacgccgccgatacggtgcagcgtctgaccctgcgcaagggtgattaccaacggggcaccagcggtcctgcgcgcaatggttccgtcattacccagtccgatgatttccccagtacgtgggatcggccggtggtgatcaagtacaaggcctcaagtggtgtggcagccggccagctggaaagcccgctgtggtacgccgccaaatacggcgtgccggctggcaagaagtgggacagcaagaagcccggagtacccgacaactatttcctggctcgcaatccttccaagctgcgccaggcgctggatgacatctttgccagtgctgccgagggcgacgcgccggtcggtggcagtggctcgggtgcacgcatcactaccggctcgttcacggtaggctcgcattacaaggttactgccggctcaaatgactggacgggtgacgtggtgggaacccaggtgttgcccagcggcgccgatggtgatgaattgtggcgtgcatcgagcaggatggcgggcgccaaccgcaagatcttcatggcgacatccgccaacatgcaggacaccaaggatgtggtcacgcctgtagctgcagctgcgttcacggcgtccgccattccaggcagcacccgcgcgcagaagctggcggtgatgggcttcagcaccaccccgacaccgatcccggcctggttcggtagcacgactgtcgaccaactggtcaactatctcagcggcagcgcagtgcctgggcttcggacccgcacctcgcctctgggtgacatcatcaactccactactgaaatcgtgtccaaccgcgatgattttggctatgggggctggacggcgcagagcgttgcgtggaagcagacgctcggcagtgcctacaagaccttcctgaatgcaaagcgtgcggccaatggaccaccaaccatggtttatgtcggtgccaacgacggcatgctgcacggcttcaatgccagcaccacagcggcggcgggcagggaggagtttgctttcattccgtccacatcactgcagcacattgccgaactggcgaacccgaagtatggccaccgctactatgtggacggtccggtgacatcttcggatgtctattacggtgattcctggcataccgtggtggcggcgaccaccggcgccggtggcgcgagcaaggcgccgaatgcggcaagcgtcggcaatggctcggtattcgctctggatgtcagcgatccgagcgggttcgacgccagcaaggtgctgtgggaagtatccggcaagaacgaatcagatcttggtttcgtgcttggcaagccagcgatcgttccgttgaccagcgccaccagtggtggagcaccgcgttttgtcgcgctgttcggcaacggtgtgaactcgtcaggtggcaaggctgtgctgtacgtggtcgatatccagaccggcaaggtgctcaagcgcttgagtccggctgattccaagtacgtgggccgcaatggccttatgaacatcgtgccggtggcgctgaagaatgcggatggggtgaccgatacagtgtatggcggcgacatgaagggcaatctgtggaagttcgatctgtccagcaatgatccggccaactggaacgtggcctatagcggagcaccactgttcactgcgacccgcaacaacgtggcgcagcccatcaccggaagcatcgaagtcagcagcggtccggccggcggcatcagtttgttcttcggtaccgggcagtacttcgcggccgacgacaacaccgtcaatgcgaataccggcgtgcagacgctgtatggcgtatgggacgatctgaaaacaccgatcgccgaccgcaccagcctggtccagcagagcgtcttggttggcaccgacagcaatggctatgagacccgcgacattacctccaatccggtcagctatacgaacaagcgtggctggtacgtagacctgaccgtcgattcaatcgttgatggcgagcgtttcattgcaacgccgacgattcagagtggccgtgtgttcttcctgacctatgttcccgggagcgccatctgtggcagcgggggggtcaactggcgctacggtgtgtacctgctgaccggcgggggaggcatgtctggcctcagcgacaagcccggcggtgattcgatctgcaccggcaattgtggcggaatcaagctgaccaaggggggcaagggcagccagggcggaccgattaccaacaacagtgtgtttgtccccaaactgacaccctgcgaccccagcaagaccaagtgcaaggtggatgagttgctggaaccatgcacctatatgcttggtacccagggggctgatggcatgtatctgccacggccctgtgggcgccagtcatggcggcagattcgatga

SEQ ID NO: 516877 - DNA, 483 bp, Stenotrophomonas maltophilia
atggctctacgcgcgccccgctggcaacctcctcgcactcaacggggtgcggtgctctacgttgccctgatcatgctcatcctgctggccctgatcggcatcgcaggcatgcaggtaacaggcatgcaggagcgcatggcggccaattatctacggaccaacctggcgttccagaacgctgagcagaatgcccgtcaggttgaggacaccatcgccaccaccatcgaaagtggtgggttgtacgctgcggcgcaggaggcctgcagcccaacctacgacccactgacctgggccaatggagtttccgccaattcggcgcagtacacccgtcggatcgacaagtgcttcccatcctccagccgtcgcgtgggtgcgaagttgaacgaagacaccggcaacatctatcaggtcactgccctgtccagtgatgccaccaccaacgcttcggccagcgccgtcatcgatacggttttcattccatga

SEQ ID NO: 516878 - DNA, 1140 bp, Stenotrophomonas maltophilia
atgatcgagctgatgattgcgctcgcgatcggcctgatcatcatgctcgccgtgatccaggtgttcgccgcctcccgtgcggcctatcagttgtccgagggtatggcgcgcgtgcaggagaatagccggttcgcgatggataccctgcagcgcgaactgcggatggccggccatttcggttgcgtcaacgaccagtcgcacgatctttcaggatcgctgcacagcactttgactgccagcgcgcatccaaccctggactttggccgttccatccagggctatgaagctgtcgggaccgcgcccggcaaagatgtcacgatcagcgctgatccgccgactggcggcgtggactacctccccgtgctgccgaaggagatcgctgatgctctgccgaaccgggtcaacggcagcgatatcgtggcaatgcgctacctgatgcccgacggtgtcccggtaaccctgatcggcggcaccgcgtccaagccgatcttcagtttcgacgccaagcgcgtggcggtgctcaacagtggtgtcagcaatccgggattgttcggtgtcgcagattgcatttccgcgaccacgttccaggccaatgcagtgaatgccgctgccggtaccgtgacctttgacaccgcgccgaacaacaccggcaccttcagcagcgtctataccgaagggcagaccatgttgcatcgcgccgaaagcgtggtgttctacgtcggtaaagatgccgacagggagcagacctcgctgtaccgcgtccgcttcggtgccgctcccaatggtgcattcactgccagcgcgcccgaagcgctggtcgagggtgtggccaacatgcagctgctgtacgggcaggatcgcggcctgacgcggaccgcaccaaccggcttcatcgaccgccaaggcaccgctgatgacgtggagaagtcattgaccgataccgcgcaggcctggcggcgtgttggtgccgtgcaactgggtctggtcatgtccagccccgacccggccgcagctacccaggccaaggacggggcggcactcactgcgctgggggtgacctttgccgcgcccagtgatgggcgcatgcgctccacctaccagacgaccatcgcaatccgtaaccgcctgtttggcaactga

SEQ ID NO: 516879 - DNA, 471 bp, Stenotrophomonas maltophilia
atgaatcgccgtcgcatccagtggaaagtgacgcgccatcgcgcgcagaacgggttcagcctgattgaagtgctgatcgccattcttgtgctcggcatcgggctgcttggctttgctctgcttcagaccatgaacgtacgctacgtacagagtgcgaactaccgcacccaagccaccaacctcagttatgaactgctcgatcaggtccgtatcaatcgcgtagctgccgcgttgtacgtaggtgactactcagcgactacaagcgagtgcaatccgccgatcggcaaggacattgaccaggcagccttcatgaaagattggcgttgccggctgggcaaagcgctcggcgacaacgccagtgcatccgttactcgcaacaacaacgtggtcacggtgcgcgtcagctggggagatgagcgctggagtgcagatgccgatgacactaccttcagtgcgagtacacgcctgtga

SEQ ID NO: 516880 - DNA, 519 bp, Stenotrophomonas maltophilia
atgtctttgcgccggcaaaacggctttacgctggttgagttgatggtcacggttgccgtgctggcgatcctgagcaccatcgcgtatcccagcttccaaagtacgatccgttccaatcgaatggccacgaccagcaacgagttgatggcctcgctggcgttggcgcgctcggaagcggtcaaaaatgcgcacggcgccggcatgtgtgcttccagtaccggtaccagttgcgacggcaagtcatggaccgaaggctggatggtgtgggatgacaccaacggcaatggcggcttcgatgccggggagaccgtcctgcgttacagcgagccacgcgcagcgatgtccggagttgatgtgaacacggtgtcggtggcgttcgatccccgtggacgcagtcgggctgctaccgccaccgacattactcttcgcccggacaaatgcggtgaccagccacttcaacggcgtctgacagtgtccctgacgggccagctcaggttgcacaaggaggcctgcaaatga

SEQ ID NO: 516881 - DNA, 729 bp, Stenotrophomonas maltophilia
ttgcaggatgatctactcggaatgttccgcgccggtcttccgcaagtattgaaagtgtgtccaggcggcgtccggatgcctggtggctttaggggagcgtttgttggtgcagggcggtacaccaccgtcactaccttcacgcgatttgctcggcagtcagaggtacatggccgctgcctccgttcttcaatgtcgtcctggatgcctgatgcgatactttgtcggaattctggcagtgtttcgttctggtcctcgccggtagcggctgaaggcaactgcccttctggtttctacccaattggtgggcagggtgtcagcgggtgcgcaccaattcccggtgcagttgctggaacggcctcaccctctgctcccgctcctgctcagccgttgggggagtggttgacaagatggggagccgtggctgaatcgcctacgtcaaatctcgtcggcaccgcagccaatgagtccagcgagcggtgtgcggtggatgtagcgataaagaagtgcgcggcagagggtgcaaaggactgcaagtcttcggtcacctattacaaccaatgcgttgcattcgctgtaccgtcctcaggaaaggggcagggctccttggatacggcggtggatgcagagaccgtagctggaaatgcaattggtcattgtcgggataccggaggcggaaattgcgccgtcgtctattccgaattctccttgcccgtcttccggaagtattga

SEQ ID NO: 516882 - DNA, 999 bp, Stenotrophomonas maltophilia
atgggtatcgaaactgacaagcggatcgaagtggccctgctgatctatccggattgccagatggcggcgatccatggcctgacggatctgttccggattgcaaatgagtgggcggcgtatccccacgaagatgatcggcggtgttccctgcgggtaacgcattggcagctggacccggtgtcggcgcaaatggaatgttgctgggacagcgatccaggcgaggtgaacgcccccgcgttcgtgatctcgccgcccagcgtcgcgatgcccgagcggatgtcggcgatgccgcgtgaggcgcagtggctcaaggaactccatgccggtggcgcaatcatgtgctcggtctgcgcaggggcgttcgtgctcgcccagaccggcctgcttgcgcgacggcgggttaccacccactgggcctttgcagggctgctcgccagcgcgcatcccgatgtccaggtgacgaccgagaatgtcgtcatcgatgacggtgacgtcattacctccggggcgatcctcgcgtggaatgatctcggcctgctgatcgtcgatcgcgtcatgggttccagtgtcatgctggccacggcccgcttcatgctcagtgacggcatccggcaggaccagcgtaccttgcagggattcctgccccggctcgatcacgatgatgccgccatcctggcgacccagcatctgatccttgcagaacctgggctgcgccacaccgtggccgggcttgcccaacgtgcccatttgaccgaacgaacattcatccggcgcttccagaaggccacggaacgcaatcccgccgactacatccgtcaggccaggatggccaaggccaaggatgcgctgcagctcggcgatcttcccatcgcacaggtggcctcgcgcctgggttatgacgacgcggcttcattccgcaaggcattccagagcgttgtcggcatgtcaccgtccgcgtatcgcgatcacttccggatcaggcggggcgggcaacgctga

SEQ ID NO: 516883 - DNA, 630 bp, Stenotrophomonas maltophilia
atgaagattcctaaccacctgataagtgcactcaaggccccttccgcgaacctagcgaaagacgtgatctcagcagtatgggaagccgcgctagacaaacacatcttggggaaagtacctgtggtttccgtcgtgctggccgtgagggacggggctgcggcgatcagtgaccgcttactagccgcgaaggtcgcccgcttcttaaacggagtcgacgacctgtcggccagcgaacgcgctcgtactgtcgacgagctcgcgggaacagaagcgaagcgggagcggctaggagaattgctgctagacaagcttgatcgggcggaccctctccacaagccacagatgcttgcgaagctgttcgtggcggtttgtagacggcagatcgcggcttcagactttgatcggctctcagacatggtgatcaatgtcttcctgggtgacctacgagacctcgcgtacaggggggacattgaggatgtgggtgaaagtagacgctttgcccttcaggcttccggcttcctggcgtgggaggtcgacgaggtgtatgccggtagcggagcaacactgaagtggtccatcaccaaagatggcaacaccattctctctcactgcccgccaggcgacggttag

SEQ ID NO: 516884 - DNA, 258 bp, Stenotrophomonas maltophilia
atgcagcaacaccaactgaccctctggcgcggcatagccaggcttgcattcattttgagcatcgcgctttatgtgatctcgatgtttaacctcaatgatcagtccaagtattcatactggtacgttggctttgctgccctccttttgggtgcggtactgcagttgcgcgcaaagcagacataccgatacctgatgtgtgcagtgactgcgtctttggtgtcagcctttttcgtgttctcaataccgattccgatctaa

SEQ ID NO: 516885 - DNA, 858 bp, Stenotrophomonas maltophilia
atgaagttgaattcgatttgggttattgcaactgcaatgtgcgttgctggtggctttgccagttccgctgaagcaatcactcttcgttgcgacgggtgctcatcgcaggagatgaaggaatgggcaatattggaaacggcccaaggtggctattcgtattctgatgtttttgtgatcaatcagactgatggatttgtcaaaaggtactctgtatcgatcgacaactggggacaggacataccggatcagattcccgatggttcaacaagctacggcaacgcgagtgaggtcaccgttccgacagaagtggcaggctatctgcgtgcagcgattgccatcaacggaactatcgtggccaccggcaacgtgccgaactcgatgtatgacgtagtcaataatcctgcacttgataaagcactttcagattatgcaggggagaccgatccagcgaataaaaacatgcttctgaactttctttcctcggttaaattcatccctatcgactttagcaaggtgaccgtgacaatagaagttatcgctgccgatggctccaaggcgacccttaacttcgaccccgttataaagcgctgggttcgagtaaagtctgaaacgagggattcagggaataacctcattcccgcaagtgccggtgatctttccggaggccccggtacgtaccgcgaatatcagtttgcaaattataatgactacatcaagttcgttcagcaggcaactcggctgggagcaaccttcacaggaaacaacagtactcagagtggcgttgtatgcacgtccgtaatgaaagaagtcgatggacaggagcatcgggagcaggtcctatgcagcaacaccaactga

SEQ ID NO: 516886 - DNA, 210 bp, Stenotrophomonas maltophilia
atgtctcatgacaccctggccgcgccgtcgcgctttgccgcccgtattgctcaccacctcggcgaaatcgccgacaccctcgattgggaccattgccgctggctgacgctgacagcgcgcttggaggccaccggcaaagcgcctgatgcgctaacgctgggcgaggtgcagcacgccattgcggcaaccgttcaggaggctgcgcgatga

SEQ ID NO: 516887 - DNA, 273 bp, Stenotrophomonas maltophilia
atgcttggttccccagcccctcaggcgaccgcacccggtcagcctgccgatcattctcggcccgatgccgcacgcggtgaacgcttcctgcgcaagcgcgaggtgctcagtcgtaccggcatttcccgctcgcacctgtactggctgatgaagcgcggccggttccccgcatcgatccccctttccccgcgcgtaactgtctggttggagtcggacgtggacgcgtggattgccacccacattcccgatacccacctgcgagcgcagccatga

SEQ ID NO: 516888 - DNA, 582 bp, Stenotrophomonas maltophilia
atgaacgaggtggatctaggggaggtgtggcctgtcatcggccaggcgtggcagtggctatgcaccaactggctcgaactgctcaaggcgttggcagcgccgatcatcgcagccgccgcgctgcgtgtttcccgtcagcaggtggagatcaacgccagcaaactgcgcctggatctctacgaccggcggtcggaggtctatgcggctgtgaagactctgctgggagagttctgggcagccgccaccgtcgaccaagagggcttggatcggttccgcaaggggaccgtgcaagtcgacttcctgttcagcgattcggtcagcgcctacatcgcgcagatggatcggaagggccagcgactcatattgtccacggccgcccactatcgcggcggcgagaacccgccgggtcggccgacacccttgcaggaaatggaggatctacagaactggttcgcggcccaagcgcccgttgccaaagatatgttcaagccgttcttgagattggagcagcctcgacctcgaaagtggtcccaccggattgctcgttcactcggattgcgcccacgaagaagccgcccgtag

SEQ ID NO: 516889 - DNA, 1794 bp, Stenotrophomonas maltophilia
gtgttgcgcgcgcgtggcgacgggcaacctgttcacgtgaccagcgtagccgaaaaactccacgtcgatccacgacgccaagccaagttcctgtactggatgggctggcgcgtgtgcgatatcgccagcctgatcggcgagaaagagaagacgatccacagctggaaggcgcgcgacgaatgggaccgcgccgacgccgtggagcgcattggcggcgcactggaagcacgcttggcgatcctgattcacaaggaggggaagaccggcggcgacttcaaagagatcgacctgctgcaccgccagcttgagcgtcaggcccgcatccagcgctaccaggggggcgggaatgaggccgacctgaatccggcggtggccaaccgcaatgccgcaccgaagaagaaggcgcgcaagaacgagtttagccaggaagaagtcgagcgccttcagacggcgttcgtggacggctgtttcgactaccagcgcgattggtatcgggccggcaacgagcgcacgcgcatcatcctgaagtcgcgccagattggtgccacgtactactttgcccgtgaagcactgattgatgcgctgactacgggccgaaaccagattttcctgagcgcatccaagagccaggcgcacgtcttcctgggctacatgcgtggctttgtgcgtcaggtgctggaccgggatctgaccggcgatccgatcaccctggccaacggtgccgagctgtatttcctcggtacgaacgcacgtaccgcgcagagctaccacggcaatctctacttcgacgagttcttctggacctacggtttcaaagaactgaacaaggtcgccagcggtatggcgatgcacacgaagtggcgcaagacgtacttcagcacgccatcaaccatggcgcatgaagcattcgatttctggaccggtgaccgcttcaacaagggccggccagtgtcccagcagatccagctggacgtgagccatgcgcgtctgatgggcggtcgccgctgcgaggacgccatctggcgccagatcgtgacggtgctggacgcggccggccggggctgcgatctgttcgatatcgaggaacttcgccgcgagtacagcgccgaggaattcgccaatctgctgatgtgcgagttcgtggacgacagcgccagcatcttcccgctcacgatgctgcagccgtgccaggtcgatagctgggtggattgggccgacgacttcaaaccgcttgccattcgcccatacggcgaccgcgcggtgtggatcgggtatgacccggccgagacaggcgatagcgccggcatcgtggtagtggctccgccgctggtgcccggtggtaagttccgcgtgctggaacggcatcagttcaagggcatggacttcgcggcacaggctgctttcattcagcagatcaccctgcggtattgggtgacctatatcggcatcgacgcaaccggcatgggcaccggcgtggcccagctggtgcgccagttcttccccggcgtgacgatcttcaactactcccccgaggtgaaaacccggctggtgttgaaggcgttcgatgtcatcaagaacgagcgtctcgaatacgacgcaggctggaccgacctcacacagtcgctgttggcgatccagaaaaccatcaccccgagtgggcgccaggtcacctacacggctgggcgctcgcgcaccacaggccacgccgatctggcgtgggcactcatgcacgcactgcagaatgaaccgctggaaggcggcaccgcagcgcgcagctccatggagatttgctga

SEQ ID NO: 516890 - DNA, 486 bp, Stenotrophomonas maltophilia
atgaagaagcccgaactgctccgccagcacctgatcgcggcaatgccgacgctcgccgccgatccggaacgcctgctggtgttcgtggacgacggcgggctggtggccagcttcacggcgggcctgtccttccagtaccgctacaccctcgaactgatcctgcgtgacttcgccggggcgcccgaggccgtcatggtgccgctgctgcagtggcttacccggcatcaacctgagctactggccaaccccgaaaaccgcgagaagctgaccttcgtggtcgacgtgctgagcgactcgctggtggatctggccatcaagctgccgttgaccgagcgcgtgcgtgtggtgcaagacaatgccggcgcattccagctggaatacctgtccgaaccgcccaccgaatgggaacaccgccactccctggctggtggcccgctgttcgctgatggcgaagtcgtggcaacgctgccggccatcgttgaatga

SEQ ID NO: 516891 - DNA, 1200 bp, Stenotrophomonas maltophilia
atggcaagaatcaaactcaccaagtccgcagtcgatgcggcgcaaccccaagacaaggccatcgaactgcgggataccgtggtgcccggcttcctgtgcaagatcaccccggccggccgcaaggtgttcatgctccagtaccgcacgaacgccggcgagcgccgcaagcccgccctggggcagtacggggaactgacggtcgatcaggcacgcacgatggcacaggagtggctggccgaggtgcgtaagggcggcgaccccagcgcagccaagaataccgctcgcaaggcaccaaccatgaaggagttctgccacaccttcatggaggactactccaagcagcgcaacaagcccagcacgcagcgcggctatcagggcgtcatcgaccgctgcatcatccccatcatgggacggatgaaggtgcaggacgtgaagcgcccggatgtagcggcgctgatgaagaagctggcctacaagcctgccgaggcgaaccgtgccttcggcgtgctgcgcaagatgttcaatctggccgaagtgtgggggctgcgcccggacggcaccaatccgtgccgccacgtcccgatgttcccgccgggcaaggaaacccggctcatcgtggatgaggaactggtgcggatcttccgtcacctggagcacttggaagccgagggactggagaactacgtcatcccgctggcgatccgcctgcaattcgagtttgccgcccgtcgctccgaaatctgcccgctggaatgggactgggttgatctggagaagcgccgggtggtctggcccgatagcaagaccggcggcatttccaagcccatgagcgaggaagcctatcggctgctttcgacggcgccgcgccgggaaggctgcccctacgtcctgccgtcgcccaacgacccgacccagcatctgacgcatggcgagcactatggcggttggaagcgcttgctcaaggccgccggcgtgccgcatgtcggcacgcacggcatccgccatcgggcgacgacggacattgccaattcgggcgtgcccaccaaggtcggcatgaagctgacgggccacaagaccgtggcgatgttcatgcactacgtccataccgaagacaagccggtgcgggatgcggccgagctggtggcgagccggcggctggcgatcacgggcgcgcggcgccctgcggaggcgacggcatga

SEQ ID NO: 516892 - DNA, 1140 bp, Stenotrophomonas maltophilia
atgagcaggaagacgcctacggcggcgggggacacccccgccgccttgccggccggctacgccggcatccacagcggcattgtggaagtcctcgatgctgcccgccatgcggcggcacgcagcgtcaatgcgctgatgaccgccagctattgggagattggccgccggatcgtggaagccgagcagcggggcaagcgacgtgccgggtacggcgaacagttgatcgaacggctgtcggctgacctgaccgcgcagttcgggcgtgggttcagccgcccgaatttgcagcagatgcggtcgttcttcctgacctggtcaattcgccagacagtgtctagcgaatcttccccggcgccggtggcgcgtccctggcgcctcgatgaactggcacaggttttcacgctgccgtggtcggcctacgtccggctgctgtctgtcaaggacgaacacgcccgccagttctacgaggccgaagccctgcgcggcggttggagcgtgcggcagctcgaccggcagatcaatagccagttctacgagcgcacggcgctgtcgaagaacaaggcggcgatgctggtcaagggcgccgtgccgaaggtcgaggatgccgtcacccccgacgatgccatcaaagacccgtatgtgctggagttcctcgacctcaaggacgagtattccgagtcagacttggaacaagccttgatccagcggctggaggctttcctgcttgaacttggtgatggatttgctttcatcgggaagcagcgccgtttgaggatcgaccagacgtggtatcgcgtcgatctgctgttcttccatcgcaagttgcgctgcctggtcattatcgacttgaagctcggtgcgctgacccatgccgatgtgggccagatgcacttgtattgcaactacgcgaaggagcattggacgttccccgaggaaaacccgcccgtgggcctgatcctttgcgccgataagggacacgcccttgcgcggtatgcgctggaaggcttgccgtccaaggtgatggcagcgaattaccggatggtgctgccggatgccgaggtgctgcaaaaggaactggagaacacgcggcggctgatcgaatctggcagaacgatcggccccaagaagcgcaagcgataa

SEQ ID NO: 516893 - DNA, 2976 bp, Stenotrophomonas maltophilia
atgatcggtcgtggatctgaatggcgtcgttgggaaccgcatatccatgcgccgggcaccgttctcaacaatcaattcggtgagggttctgcttgggacacttatctcgaaagtcttgaggccgcgaccccgaagatcgaggcgcttgcggtaacggactactacctcacggacacctacgaagaggtcttgtcgcacaaagcgtcgggccgtttgcccaatgtgcagcttatcttcccaaatgttgaactgcgcctagatgtcgccgccaagactggctttgtcaacttgcaccttctcgtcagccccgaagacgcaaatcacgtcgctgagctgcatcgcattcttcaacggctccagtttcaggcgcatggcgacaccttcaactgcacccgagccgacctgatctcactgggcaagaaggccgacacgagcatcaccgatgatcgtgcggcccttgcacacggcgccactcagttcaaagtcaatttcgaccaactccgccgtgtcgtgcgcgaaagcgagtgggcgaaagcgaacatcctcgtcgcagtagctggcgctgccggcgacggcacgtcgggcctgcgtcaggcgtccgatacgacgatgcgcgaagaaatcgagaagttcgcgcacgtcatcttctcaagcagtccagcgcagcgggagttctggtccggacgtcggagcctgacgctcgatcaactccgcgagcgttttggcggatgcaagccgtgcctgcatggaagcgacgctcacgaccagaaaacggtcggccgacccgtcgaagatcgctattcgtggctcaagggtggcctcgaattcgacgccctgcgccaggcctgcatagaccccgaaggtcgcgctcatgtcggcgcggaaccaccacgcactgcgctgccttcgcaggtaatctcgcatgtgaagatcgcctacggggactgggccactactcctgagataccgctaaaccccggcctcgtcgccatcatcggcgcgcgaggctccggaaagaccgctcttgctgacatgattgcagcaggatgcgacgcgataacgcccttggcatggcgcgcgaacgagaacgccagcccctcgttcttggtccgtgctcgcaagctactaggcgaagcgaccgccacgctgacctggggcggcggcgcgacggtcacgcgctttctcgacggtcgcgacgcgaacagccatctatccttcccgcgcgcccgctatctctcgcagcaatttgtcgaggagctgtgctctgcgaatggagtgtcggacggccttatcgctgaaatcgaacgagtgatattcgaggctcattcgcaggacgaccgtgacggcgccatcgattttgccgagttgcgcgactatcgcaccgcccgcttccagcaggcgcgcgaacgagaggccgatgcgatcgcggacgtctccgatcgcatcgccacggaattcgagaaagaggcatcgatcgccggtcttacggcccaggtcacgcagaagaccggacagatcaagagctacaaccaggatctagccaagctagtagtcaaaggcaccgaagctcaagccaagcggcacacgcaactagggcaagccgtccaggcgatccgcggcaccattcaggcttacggcaaccagcgccggacctttcttgccctgcaggatgaagtcgccagcacccgcgccaccaaggccccggaactgttgcgtcaagccaaggagcgccatcagcaaagtggcctaaccctacagcaatgggacgagttcctgctcatttacaagggcgacgtagacaagagcctgaccggctacgtggcttgggccgacaagcagatcgcgaccctgaccggcccgtccgttccgccgggtgacccgaatacgccgcttttccccgacacggccgatctgacgacgcttaccctgaatacgcttcaggccgagatgaccagacttgaagcgctggtcagcgccgacaatctcgtgcggaagcagtattctgctctctcgcaacgcattgctaaggaaaacactgccctgcagacgcttgaagcgcgcctgaccgacgctcagggcgcctctgcccgccgcaaggatttgcaaaccgagcgcgatgcgacctacggccggatcttccaagcgatcatcaatgaacagacggtgcttgccgatctctatgcacccttgatggcgcgccttacggcatcaaccggcacattgcgcaagctcggcttctccgtccggcgtgtcgtcgatgttggtgcctgggcggccgtggcggaggaggaacttctcgacagacgtaaggccgggccgttccaggggcgtggagccttgacgtccctggcagaatccgctctccggcctgcgtgggaaaccggatcagcggccgacgtgcaagcggctatgacaagcttcatctcgctctatatgcgggacttgatcggccatgcgccctatgcgcaaaatcagcaggctgagttccgaagctggctgaagcagttcgcgcattggctcttcgacaccgaccatatctcagtccgctacgaaatcgtctacgacggcatagatatccgaaagctttcgcccggcacgcgaggcatcgtgttgcttctgctctatcttgcgctagacgatgctgacgacaggccgctcatcatcgatcagccagaagagaatcttgatccgaagtccgtgttcgacgagctggttgcgctatttatcgccgccaaggcaaagcgtcaagtgatcatggtcacgcacaatgcgaacttggtcatcaatactgacgcagatcagatcatcatcgccgatgccggccctcatcctgccggcgggctgccccctatcaagtacatggctggcggtctcgaaaacgcggccatccgcacagccgtttgcgacatcttggaaggcggcgaggaagcttttcgcgaacgtgcacgccgattgcgggttaggctggatcgctga

SEQ ID NO: 516894 - DNA, 510 bp, Stenotrophomonas maltophilia; identical to SEQ ID NO: 355697

SEQ ID NO: 516895 - DNA, 747 bp, Stenotrophomonas maltophilia; identical to SEQ ID NO: 355698

SEQ ID NO: 516896 - DNA, 987 bp, Stenotrophomonas maltophilia
gtgaacgaacaggaaatccttgcacgatgggaagccgagaagcccttttatagggcttgggccaagctcgtcggccaggaaatcgaagggcgccttgtgcccgctattgctcccacggcgctggattacttcttgaaggttcctatggtgcctcgcctcaaaggtgacaccagcctgattgataaggccctgtaccgcagtaagccctataagaacccgtatgaagatatcaccgacaaggtgggcatgcggtacgtggtacttttgaccacgcatatcaatacgttctgctcgattatcgaaagtcccgagtgcgaagccttctggtcatggtccaaggacaaggactatgaagaggagcggctagccaagcccttagagttctcctatcaatcagttcactatgtgctgcggtcaaaagccggcttgtccattgatgggatagatcttcctgagggtcttacttgtgaagtgcaaatccgcacgctcttgcagcatgctcatagcgaactaacccacgacacgctctacaagccccaaaccgccgccaaaccctccatcaagcgcactgttgccaagagcatggcattgatcgaggctacagacgaattctttgagcaagccatgaaggacctcgccagcgccagcgagccccagcggcaactcttggactacctgagtacagcctacaggaaaggcaccggactggagcctggtcaagagcgatccaatcagcttgtggccgatgctttcatggagtttctgccgcaggacgtcatcgttcgcatcgaagaattcttgacggccaagagctacgtttttgaaaagatcaaagaacaaaacggtcagcgacatttcttcaatcaacccgccgtgctcctagcatacttcctcgcagacaaaatgcccgcccagacccgagagtactggcccataggttcggatgatctggcaaaagtcttcagcgacttaggcgctgcattctag

SEQ ID NO: 516897 - DNA, 714 bp, Stenotrophomonas maltophilia
atgtgcgtcatcaaagccgaacctcacggaggctttaccaagcgacaaacgggcgggcatttgaccctggagtacattaaggaacttatccttacgccccaggccaagctctacaagatcggagcttttctgcggcaggaccccgcagcagccacggcccagcagccgaccaatgggtggagggcctttttgtttgacgaccttattactcagggcaacaagctcactgctgcacagtatttttatgagtcctttttgggattggaatttccgtccaatagtgcatttcagaccaagcaatttcatgcgctgaccaaagattttattcgcaatgccaatgtcgatccagagaagaaaatcgacctattgaatgcgctaactacctacttgaagacggatcaggccgccacaattcaagtggacgttttttcccaaaactaccttggagatgcggcactgcaagatgcgtacacggcctatatggggcaaaagaatttccccaatacagccatccataaagatctctctgaggttcaaagccaattgaggctgcgcaaacttactttcggtcacgacatcaggctcaccgctccagcggatcaattcgagaactatgtgcgaattgagtccattgacggcgatgccgatgagcacggcaacgtgcctaagtggaccaaaatcacagtgcgcgaccacattcgagaccaagagtga

SEQ ID NO: 516898 - DNA, 294 bp, Stenotrophomonas maltophilia
gtggcggcagcgtactcgttggcgaaggcattgaagacagtcaggaaagcgcgtggcttgagccaggaagcgttctccgacgtgtcgagccgtacctatatgagtaccctggagcgcgacctgaaaagcccgaccatcagcaagctggacgaactgtgcgaggtgatggaagtccacccgctgacgttgctgacgctggcctatgccggcgtcagcgagcgcaaggccgagcagctcctggcgcaggtgcgccaagaacttgaagctgtgctgaaagagtccggcacaccgtag

SEQ ID NO: 516899 - DNA, 348 bp, Stenotrophomonas maltophilia; identical to SEQ ID NO: 355701

SEQ ID NO: 516900 - DNA, 771 bp, Stenotrophomonas maltophilia
atggctggcccgaacgccgaaaactggtatccgaccgccgcgtatctctacacgctgcaccttgatggccccgcgctggcctgggaatacctgcgccgcaatcccggctacagacgcgactggctgcgccgtcgtcgccggcctgattcggcgcacgcctggggcctgcgcctgctggaagacccggccctggatgcgcgagacgcgcatccggcctggttccccgatcacgatgccgtggtgcagatctgtcccgatgccgacccgccgcctgatgcttgcgccttcgagttctggcgcgtgccgggccgcaagcaactgatccatgatggcaagcgccttgtgctggtgtcgcactggcctggctgctgcctgcggcttgcgctcgcgccgggcctggaagacggcatggcctacctctacgcaacccgtgcttgcgccgtgccttgcgcccgttatcgcacgctggcggccgagctggatgcactatccgccgcgacggtggccgcgcctgcggcatcggcccgctcccggcctacgctcgctgcggtgcaggagctgcacaccttgcaggcgctcgacgcgaccctggcgggcgcgtccttgcgcgagatggccgaagggctgttcggcgcggttgccgtcgcggccgactggcacaaggacagcgccttgcgtgcccgcgtgcggcggctggtgcggcgtggcgaggcgttgatgcgcggcggctatcgcagcctggcgcagcttccgccagtggcatcgcagtaa

SEQ ID NO: 516901 - DNA, 309 bp, Stenotrophomonas maltophilia
atgacccaacgcactgctgtgaagaatctctcgcccctcgcgctgatcattgcgggtgttgcggccgcaggcacggcatctgctgccgcaccgaacagcactttcgtcaatgacattgcggcgtcgacgtctatccaggcggatatgcagtccctgagcattagtgagttcacagaggaaaaatctgcgcttctcgcagatgggcaccatcactccgattccatcgggtcgcatcaccatcatgacacggcgagcaagcagatggcatttgcttcgcgcagttccgccgattcccgattcgacgtctga

SEQ ID NO: 516902 - DNA, 1167 bp, Stenotrophomonas maltophilia
atgaagatcgctgttgtcggaactggctatgtgggcctctccaatgccgttctaatggcacagaatcatcaggttctcgcacttgacattgacgcggcacgcgtagcgctcattaatagtggacgcactccactggaagacagggagattggcgagtatttggcaaggggaaccctaagccttactgcaactattgacaagcaagaggcatacacgaatgccgattatgttgtgatcgccacccccaccgactacgacacgcagagtcattgcttcgacataagctcggtggaatcggtcattgcagacgtactgcggatcaatcctgaagccgtcatggtgatcaagtccaccattccggttggatgcaccaaagagcttcgcacacgttttgaaacggatcgaataatattttcccctgagttcctccgtgaaggcaaggcgctttacgacaacctccatcccagtcggattatcgtgggtgagcgatctgatcgagcgagggtgtttgcagacttgctgaaagaaggagcgataagcaaagacgcacccactctgctcactgattcaactgaagcagaggcgataaagctttttgcgaacacctacttggcaatgcgtgtcgcttacttcaatgagctggatacgtacgctgccactcacgaattggacactcgacagatcattgcaggcgtcagcctcgatcctcgcattgggagtcattacaacaacccttcctttgggtacgggggctattgcttgcccaaggacacgaagcaactgctggcaaactaccagaatgttccccagaacctaatccgtgcgattgtcgagtcaaatggcacgcgtaaagattttattgccgatgaagttatttctctaaaacccagggtggtaggaatttatcgcctggttatgaaatcaggatcagataacttcagagcttccgcgattcagggtgtaatgaagcgcattaaggcaaaaggaattgaagtgatcgtctatgagccaacgctggatgattcaacgttttatggatccagagttataaaggatcttgatgccttcaaagtggaggcggatctgattcttgcgaacagagcctccgaactgatcgccgacgtatccaacaaggtgtacagccgggacctgtttggggccgactga

SEQ ID NO: 516903 - DNA, 1122 bp, Stenotrophomonas maltophilia
atgacgaaacgcgcactgatcaccggcgttactggccaggatggctcttatctggcggaactgcttctcgataagggttatgaggttcatggcataaagcgccgtgcgtccctcttcaatacgcagcgagttgatcacatctatgaagatcctcatgattcgaaccccagattccacctccactatggcgacctcactgacaccagcaacctgacgagaattctcgccgaggtacagccagatgaagtctataatctgggcgcacaaagtcacgtcgcggtgagcttcgaagcacccgaatatacggctgacgtagacgccatcggcacactacgtctcctggaagcgattcgattccttaaattgacggacagaacgcgcttctaccaagcctctacctctgagctgtacgggctggttcaggaaacgccgcagcgcgaaaccactcccttctatccgcgcagcccttacggcgttgcgaagctctacgcgtattggattactgtcaattaccgtgaaagctacggaatgtacgcttgtaatgggatcctgttcaatcatgagagcccgcgccggggcgagactttcgtaaccagaaagatcacgcgcggactggccaatatcgctcaagggcttgaaagctgcttgtacatgggcaatctcgatgcacttcgggactggggtcatgcaaaggactacgtccgaatgcagtggatgatgcttcagcaggacgaacctcgagacttcgtgatcgccactggggtgcagtacagcgttcgcgagttcatagtgatggcatgtaaagaactcggaatcgaacttagtttcgagggaacaggcgtcaatgaacgagcgattgtccgatccatcacgggcgatgccgctccgtccgtcaaggtcggagatgcaatcgtctgcatagatccgcgctactacagaccagcagaggttgagtcactgctgggggatccctccttggcaaaggccgagttgggctggacacctcagatcactctgcaggatatggtcaaggagatggttcagtccgatctcaccgcagcaaggcaacacgcgctccttcggagtcacggcttcccggttgctctcggcaaggggagttaa

SEQ ID NO: 516904 - DNA, 1344 bp, Stenotrophomonas maltophilia
atggaggagcattgggggatactcaagcctcaccctagccgccgagctcacgaccgcctgcagatgaagcagagattagtccaactactttcaagatcgcggaccgtgtttgcggcgctcctgggtcaagcaagctcaagcttgtcgagcttgcttgtctcggcttggctcttgcttgccgcgaccaaggagaactttgggctttatagcctgtgcttttccatagcattggtagctgccggaatgatttcctccggcctcaccgtccagttcgtcgtaaacctaccgagtcgaaatactcccgagagagaaattgaactcctctctctgatttacataattgtcgctgcaaccctgggggctgcagccatctgtgcaactgccgcacccgccctttccataatcaactggcaactggacgtccctgcagtgctgatcgcggcgagcatggcgtgtgcaatgagttgcagggaattggtagttcgatacctcgtctttgctgaagcaaacacaaaagttacagcatcgagcgcagttctgctgctcacgacaattctacttattgtcctcgcgccaacctcagtcagcaaagtggtgtgggcgggctttacatactcggccgccacagtcgtaagcctgctcgcctgcaggccaaccaaattggcttacgcagcgcaagtttccccctcggcactggtacgcacgctgagggattcgtggagcggcgggaaatgggggattttgagcaacatcttcttctctgcccgaaatcaggcccacagcctcattctagccccacttggaatgagcacgatcgcggacgttaacgcagcgcgattgctgttcatgccgatattccagataattccagtaatatcgcaggttgggctgagcacaaccagcaagaagcgagaagagagcaagcagtctgcaatcgaatccggaaacaaggtcgtagtcatctccgtagttccgctacttctttatggcgtggcaatactcattgcgtcactagtggtgccagagcattggatcccatcagattacagaggcgcgctcccctacctggccggctggggattgataacttgcgcaatcggtgcacgcgcagcattctcaactactctcctggccttgcatgaattccgcgccattgcatcaggaaacggcctgtccctcgctatcatggctctttcctggctcgcattgtcaaatttggccggcccaccagcagcactttattcaatggccgcagcagagatatttgttacctttacctatgcgcgtagattgagcagtatcagaaaatcaatggatcttagcaaacatacgggagctcaatag

SEQ ID NO: 516905 - DNA, 1191 bp, Stenotrophomonas maltophilia
atgcgagcccataaccaatccttggaaatttggcgttacgtcatcgtagcttcgcttgcggtgctgggctccatattcatttgggcaccagttctatttcttttgatattctcagtcgcggtaagcacaatcaagtctggccgcgcacccgcagttgcatgcgctgctttctttaccttcctattcggctggatcaattcgaacaaggtacccgacggtgactggtcctggtacttgtatcactttcagctgctgcaggacattccaatctatgactacttcggccaagtacatatgggagtctcggctcgcttaaccgagccggtctaccacgttcttgcatggatcttatccattacaaccagtgcccagcctgaggtacttgctgttgttgtcactgcgatcatctacggatcagttgcatattttgttaccggcactgcagccgccttaaccgccacgcgactgtctggcgtctatgttgcgcttgcaatcatatgtgcctcgacaattggcatcacgttcaccctgaccactcatctcgtccgacaagagctcgcaatcgcgttcctgcttggatcgctatgtctggaaatgaaaatgagacggagacccgctctggcactggccatgctggctgtcctgacgcacaactccgcaatcattcccgcattcgtgcttatattcatcgtccaggtaaagctgatccgaaactccgttatacggaaaagcttgatcggcgcagcttcactggcactacttgggtttggctattacttctctaccagcgatgagatttacagatttggagacaagaacgacggcgcaattggccttctcacgtatgtactcgacgcggcgatcgtcataggagcctcatcgcttctcaacacgaagtcggtgggaaagctagtaaaatccttcttcatcccatttgtcgcaatgtatagcctgaccgtcattggtgcatcccagcagccccttgcgctcctgagaatgtatttctatttcgaattgattcgcgtggtcggggttactctaatctgcctgtggctggccgcaaacagagcatttatcgtactttccattctatccgtagtgggtttctactacgtgtcgctcagaatggataactcgccattctatttcggcggggaatttgttgattatttctttgcgcgaccgatatag

SEQ ID NO: 516906 - DNA, 1155 bp, Stenotrophomonas maltophilia
atgcccagcgcggacaacaatgcaaagcacgtcgttattgtacagagacggctaacgcactatcgcatacccttctttgaggagctgcgtagagcgttagctgttcgtgacatcaagctaactctcgtttacggaaatcccactcgcagagaagccagcaaggatgatggcgccgatcttccgtggggaataaaggtaccgtgcaagtattttctctctgatcgactttgcctccagtggtttgtgccccaggcaaagaacgctgatctggtaattctcactcatgagaacaagctcattgcaaatctatgggcacagtatgcgatgagcaacctgagagtaggcctgtgggggcatggcgctaatctccaggggagcaagaattccatacgagagatcttcaaacgacgcaccgccttgcgcgccgattggtggtttggatacacagagatgagccgaggccttatcctgtccaccggctaccctgctgatcgaatcagtatagttgagaattccatcgactcgctcgcgctagcgacggagtacacggctgctttggatgcaaagcttaacaatgctatctcaactgagatggcatgtgaggcacccaccgctgcctacatcggatcgctctataaagagaaacgactggaattcctctttgaagctgccgtaagaatcaaagacataattcctgagtttagactgattgttgcaggagcgggtccagacaaagagatagtcgaaagttttgtcgggcgcaatccttgggttcgctatgttggaccagtcgatgaccagaataaagccttgatacttgctgaatctaaggtgttgctcaatcccggtctcgtcggcctgggaatattagattctttcgtctgccagactccgatgataacaactgactgcggaattcacagccctgagatttcctatctagcaaacggagaaaatggagtcatgactaacgatgacatccattccttcgtccgtgaagcagtaagcgtgcttcaggatgcgaaatatcgcaatcacctggtgaatggatgcaagaagagcgcccttcattacacggttgagaacatggcagccaacttcgcggacggcatcatcagctgtctaaattcagcaccactacgaagtcagaaatga

SEQ ID NO: 516907 - DNA, 1185 bp, Stenotrophomonas maltophilia
atgaagatcctagttcttcacaactcctacagaaagcgtggtggagaagacgtagtcgttgaacgcgagctcaacctgctcaggaaatccgggcatgaagtcgagatatacatcgccgcgaacgactcgatatctggcgctgcgggaaagataaagacagccataggcacattattctccatttcttcctacagaaaattgcgaaggatgatatccgagttcaatccggatgtcgttcatgtgcacaattttttcccgatactttccccgtcagtgttctatgcatgccgttcaatgcgcaagccggtagtactgacgctgcacaactacaggattatttgccccacttccactctggagcacgcgggaaaactgtcaaccaaaagtatatataatggcccgtggtgggcattgcgccaccgcgtttttcaaggatcactgcttggcactttcgtcctctgcagcatgatatcgatgcacaggcgcatcggcacatgggcgagattcgttgatcgattcatcatacccagtgaaacaggtcgcgagcacttcgttgcagcgggaatctctgggaacaaaattacaacaaaaccccatttcgtcgatatccctctctcgccagaacgttcacgaagtggatttctatttgtcggcagactttcccctgaaaagggcatccatacacttctagctgcggccaagaagcttgtatcctgcgaagccactcataagagtgaatttacaattgtcggagagggaccagaagccccatcatgtgcatcctcggggctgaccactgtgggcgccctatctccacagggtgtcgaggacatgatgcgccgcgcagcggctcttattgtccctagccaatgccatgaaaccttcggcctcgtcataatagaggcatatgcatgcggcctacccgttattgcgagtcgtgtgggtgcatttcgcgacattgtgattgagggcgtgacaggaattttctttgagcccggcgacagtgatgatcttgcggagaagattgcttgggcaaaagccaatccagatgagctcgtccgcatgggcagagaggcaagatcccgatatgagaacctctatactccgcaccataacgaatcaatgctgaaagaaatataccagcaggcaatcaatgagaacgcggctgataataatgaatcctag

SEQ ID NO: 516908 - DNA, 402 bp, Stenotrophomonas maltophilia
atgccatggcagaagatcggcgaacttcctgaccagcgattcgtcggcccctacggcatcgaattctggcgtatccacaaaggccaggtcttccaccagggccggctgctgcgcaaggccgacgcggccagtttcgagttcatccccgcacactatttcgtcgcgcgcgatgcgcccgccgtctaccacgccaggacccgcctgcccgcgatcgaccgcgacagcttccgccagcgcggtggttactggcgggacaggcgcaattttttgcgtttgatgggaagtactgatctgcacatcaacggcaacgccgcgcatgcccggcgttgccgtctgcatcggtgcattggcacctgtagagccgagccaacgctcggctgtttttcccgccgaccgcattga

SEQ ID NO: 516909 - DNA, 774 bp, Stenotrophomonas maltophilia
atgcgccattcgctgcttgatccgtacgaagacctgccacgcgatgtcgtggtcacctcgaacgactacgcagccgagttcacgtttccccgccatgcccatcgacgcgggcagttcgcgttcgctgcgcgcggcaccatcagcgtgacgacgccacagggacgctggctggtgccaccgcagcgtgcctgctgggtgcctgcaggcctggcgcatgagatgacgatgcgcggtccggtgacgatgctcaatgcctttctctctgtcgggacggcgatggcggtggcgctgccaatgcagtgccgcgtgtatgcggtatcgccgttgttgcgacagttgctggaggccgccgtggatctgcctgcgctgtacgacgaggacgggcgggcaggcaaactgatgcagctgctggcagcggaaatcgcgtcgatgccggcactttccctgcacgcacccctgccttcggatccacgccttgcacgtgtctgccgtgccctgttcgatactccctcgctggcggcccgcctcaatggcgttgcggccgacgcaggcatgagccggcgtacgttcacccgcttgttccgcgccgataccggggtgagttttgccgagtggcggcagcaggtgtgcctgctggcggccatcgagcggctgggacaggggcaggcggtgacccgtgtggcattggaccttggctatgcaagcccgagtgcgttttccgcggccttccggcgtgcgctggggtgttcgccgagccggtatgcgcagtcgtag

SEQ ID NO: 516910 - DNA, 768 bp, Stenotrophomonas maltophilia
atggccaacactttccatcgcgtggggcacggccctcacgctgtcctggtgctgcatggctggttcggcgacgcgcacgcgttcgagccgatcgagccatggttgtcacgcgatgacttcagctacttcttcatggactgccgcggctacggcggcatgcgcgatgcgcaaggggcctacaccatcgacgagattgcatccgacgcattggacctgatgacgtccctcggccttgaacacttcagcctggcaggtcattcgatgggcggcatggccattgaacgcgtggcggtgcttgcgccggaacgtgtgcgcggcatggtggccattgcgccggtgccctgcggcggcattgcctacgacgctgcgacgcgacgcctgcttgaagcggcagccggagacgtcggcatccgccggaccatcatcgatcgcagtaccggcggacggctgcctgcgcaatggctcgactggaaggccgcgtattcggcggcacatgcgtcacctgcggcatttgctgcctatcttccggcgtgggcggataccgacttcagcagcgaggtcgtcggcaaccatcggttgaaggtgctggtaggtgggcacgatcccaccttcaaccgtgcactgatggagcgcacccatctgcgccgctaccggcaggccacgatggaggtcctggccgatgccgggcattacccgatgaatgaggcgccgctggccctggtggcggcgatggaatcattcctgaaagacgcgtcgggtccgcgatga

SEQ ID NO: 516911 - DNA, 5538 bp, Stenotrophomonas maltophilia
atgaaccgtatctacagacgtgtgtggaatcgaagccgtcaatgctgggttgttgccagcgaactggcgtcgaccgcaggtaagccgcggtcaacggttgcaggcgcagtgttgcttgggcttgttcttgcggttccctcagcggaagccggcgacatcattgcggctgatgaatgcgatgaatcgatctggcaggcgctgtgcctgaacgcgggggcgcgcgcaggatcctcttccgcatactcgctgtcctcagctacgccacgtgcaggcggacttgcgttggagcttggctatcaagccaaggccaatggctatggaagttcggccgtgggacctaacgcgcgatccgaggacttctactccgctgcgttcggctggagggcgcttgccagtgcttcctacagtgttgccgcaggttccaatgcccaggcaaccgagtctttcaccatagcgatgggtagggattcaaaggcgtccgccatgagtgcagttgctgttggcagccaggccgccgccagcgggcagtcgtcggtcgcgcttggaagctctgccgttgcatctgcagatagcgctcacgcgctcgggtatctgagccaggcaacagcaaagtacgcgacggcggtgggccccgtctccaaggcattcggcgcatactcaatcgcagtgggcaaccacgcaacggccattggcgacgacgccatcgcaattgggcgaagtgcaaagaccgtggacagttccgctggcgtgtctcgcatcgccatcggcgggggctcgtttgccggctcggatggatggacgggggcaatcgcactgggcggtctgtccaaggccgagaatgatgctattgccctgggctatgaagcgcgggcgttgggcgagggcgcgcttggcatggggcgcggggctcaggcatcagggcgaggagcgactgcccttggaaaatctgccttggccagtgatgagtatggaattgccgttggcttcgaagcgctggctggcagtacccacacaaccgccgtcggcactcgttcgagtgcggtgggcattggtgcgacagcctatgggaattcggcctatgtaaatggacgcaatggtgtcgcggtaggtagtggctctcgtgtcgacaatggaagttccgagggcgcgatagcgattggcgccgattcgcgcgcgggcgcagatggatacaacggcgccattgccctcggcggtaacagcactgccagccacgacagcattgccattggctacggcgcatccacgattgctgccggcgccattgcactgggtcggggttctgttgcgaccgaagcaaatacggtttcggtaggtagcggggccaccaagcgccggatcgtcaatctggccgatgcgaggctgtccagtaccagtaccgatgcggttaccggcaagcagctcaattccaccaacaccaacgtgaccagggcccagaccgctgccgatgcagcgaagacgacagccacggcagcacagtccacggccaatacggccaataccaatgccaacacagcgttggccaaggccaatgcggtcagtggcctggtcagccaggtctcggccagcggcaacgtgcgtattggcggcgagaacaccggcaccgtgctggatgtgcgcaacaagtccaacgcagttcgcagtatctctggtttgaaggatggggcgctgagtacgaccagcaccgaggcagtcacgggcaagcagctcaacgccaccaatgtgaatgtcagcaaggcgcaggctgcagccgacgcaacgactgcgcggctgaacgccagcgccgtggccctgggcgcgggagctgtcgcggagcaggccagctacggcatcagtacggcgctgggtaacaacgccaaggcctacaacggcaagagcgtcgccatgggcgcagacgctcgcgcaacagtggatgacgcgggcaacaagatcagtggcaacgcgggtgtgtccatcggtgctggcacccgcagtggcaacggtgcggtggcgcttggattggatgccgtcgcaacgggtgatcgaggcgttgccgtcggccatgaggcatccggcaaaggcacgcacgccaccgctctgggcttccagagcaacgcgtcggccaaccaggccacggcggtcgggcgcggcgccgtagccagcagcctgtatgcctcggcggtgggtaatcaggcgagcgccacggcgcagagcgcgttggcccttggtgatcgcgccaatgcggcacatgcgggcgctgttgcgctcggcaatggctcagccacgactgggaccaatcaggtctcggtgggcaatggctcgttgaagcgcaaagtggtcaatatggccgatggtgccttgagtacgtccagcagtgaagcggtgaccggcaagcagctgcatgccaccaacaccagcgtggctgctgtgaaggcgaccgcggacggtgcgcaggcgcgcgtggcggtgctggatggtctggtggggcaggtatcggcaagtggcaacgtgcgcctgggcgcggacaacaccggcaccgtcgtcgacgttgccaacaggagtggcgccaagcgcaagctgcagaatctggccaatggcgtgctcagtacgtccagcacggatgcagtgaccgggcagcagctcaatgccaccaacagcgaagtgaccagtgtgcgcaccgccgcaaccgcggcgaagacggcggccgacgctgcccgtggcgtagccgatggcgctgtgcagaaggctgatgccttgggcggactggtgggccaggtgtctgccagtggcaatgtccgcctgggtgcagagaacaccggcacgattgtggatgtcgccaacaagagcggtggcaagcggcgcatctacaacatcgccaacggcacgctgagtgcaggcagcaccgatgcggtgaccgggcagcagctgtttgcgaccaatgccacggtggagacacagcgacaggctttggctgggcacgcgcagcagctgacggatcaggacgggcgtatcaccgacaaccgggtcgagctggatgcgctgcgtgcggacttcgataacttcgatccggatctggatggcgtggtcaagttcagtgctgatcgtcacctggtggacatggaaggtgcgcgcgtatcgggggtggcagcgggggatatcagttctgcgatcagtacggatgctgtgaatggtgggcagttgtttgtgaccaacgcaaggttggaggagcttgcagaggctggagagcttgtttcagtcggcagtggtggaccgggtgttgaggcggtcacaggcttagttgcagtagcagtcggtgattcgacaagggccgaaggcgagggggcggtggcgctcggtagtttcgcggtagccgagggtaagaattccgtcgcgctcgggagggctgccagtgtcgcggctaaggctgaggatggtttcgcgctgggagtaagagcatcggttgagtcggcaaagggtgttgcaatcggcgccggaagttcggttgcggaaggtgcattcaacagtgtcgcgattggtgctggctctgttgcgaatgacgtgctgacggtctcctttggggagggggcattgaagcgccggctagtgaatgtcgcccggggcatgaatgagggcgacgcatcgacagttggtcagttgagtgacgccctggatgcgctgggaggcggcgctggcgttggctcaagaggtgatgttgttgcgcctatctatggtgtgcaaggcggagtgcagaacaatgtcggagatgccttggctacgcttgatggtgcagtggtcaggtcagacagtcgcgtagatggcctcgaaggtcagctgcgtgcgacgttccaacagtcgccctcgactcgggcagatggtttgggtcagctgaatctggcaggcgcgcaaggcatggttttgtcgaatcttgccgatggacgcattgctgcaggtagccgtgatgcagttacgggtagccagctgtacgcagccaagcaggaaatcgccaggaatggagatgaaatcgagcgtatgaagaacatgtcagacggaggtgtgaagtatgcccttcaggaagcacttgatctgcgcggcggaccgatcgatttcgctggatcgcgattgactgggattgattcgggggacatctcatctgccttcagtactgatgcagttaacggtggtcagctttatgcgaccaatgaaagaatcgcgagcgtggaatcaactcatcgactcttcaagatcggccgggatgatttcagtgaggaggccaaggctgggtcgtctggtgttgcgatcggtgaatccgcgcaggcgacaccgcaggatggaaatgagggtggaacagcccttggcgcctatgcgattgcttggggcaagaattcggttgcactgggtagaggggccctggttgaggagggggcagaaagtgcattcgctctcggtgtgggctcacgcgcagctggtatcgagagtgtggctctaggcgcggatagtaggacgaatgccactgcgctcagatccgttgccattggtgtgagttcttcggctaccgaggctgacactgtttcctttggtcacggcagataccagcgccgcctcgtaaacgtagccaacggccgcaacaccaacgacgcagccaccgtcggccagctccgcggcgccctgtccaccctcggcggcaacatcgacgccaacggcaacgtcaccacccccggcttcaacgtccagggccagcaccagagcaccgtcaacgacgctctcaccacgctggactccgccgttgtcaccatgggttcccgcatggaccgcgttgaaacccagctccgctcggtcttccaggaagcgccctccacccgcagcgacggcactgcccagctcaccctggccggcgccaatggcatggtcatttccaacgtggccaacggcctgatcgcggccggcagccgcgaggcggtcaacggtggccagctgcacgccgtgcagcagcagctcaatggccgcatggacgggctggagcagcgcgtggatggccagccgcagtcgcgtgcgctggctgcggcttcggccgcgccgaccgaacaggtcacgccaacgccggaggccagtgattcgccgcaggtggcctcggcaggcgagggcacgtcgcccacaccgcagccgaagtcgaagaaggacgacacgccgtcgcccacgccacagatcgataccgccgaactggagaagatgctggcccgcgccaacgaatacaccgatggcgcgatcagcaacttcgaacgccgcctggacaagatggacaagcgcttcaaccgcatggcggcgatgagcagcgcgcagacggccatggccatgaataccgctggcttggccacctacaaccgcctcggcgcgggcgtgggctatgccgaaggcgaatcggccatggcggtgggctaccagcgcgtactcaacgaaaagggctcagccaccttcagcctcaatggtgcgttcaccaacagcggtgaacgcagcatgggcgtgggtgtgggcatcggctggtaa

SEQ ID NO: 516912 - DNA, 579 bp, Stenotrophomonas maltophilia
atgtttcgaaaggtaggcgccttggtgctggtagcgctggggcttgcgggaagcattcgccagcttcttgatggtggctacgcacttgccgcagtgacgctggtggttacgctggccgctgccatcgcaattctgctggcggaggacctcaaggtgaacgcgacggcggcgatggtctgcactctgatttcggcatttgcgatcttccacgaccatcgcgccttcgatagcaagttgcagcaggccaacgcggaggcattcagccatctggcaaattcccagatcacccacgggtgcaggaacccggatgcgacggcgctccagaatgcggcagtccaagcctgcggcctccagcggcaccgcgacgctgccgcggcaagcagggacctgaatgagtcggtccatcttgggccaacaagcagcactattgtcagtggagccagggcattgcaggggccgacggaggcgccggcaacctgcgcccagctcgtgcggcgactgcatcaggaatgtcccgaggcaacggccggcatcaagccatcagatcttcagctgttgttgcaggacgccaagcgctga

SEQ ID NO: 516913 - DNA, 1824 bp, Stenotrophomonas maltophilia
gtgtcgtatcaggattgcgagcagcgattggagaaacttattcgtgatgaccgcatacaggttatcgctctgtcaggagcctggggcacaggcaagactcacctttggaatcgtattcgtgaaacatccgacaccgccatcgtgatgcgagctgtctccgtctcgctctttggcgtaggcaacgttcgagagctcggccttcgcatagctcagaaaatattgacgggctcagattcggaggagctcaggcagcaagtggctacgagctggcgctggatgaaggatgctctgaagagtgtacatccaggttttgaagtcctggatgagctcaccaatctagccgtacccaagctccttgagggccgcctgctagtaatcgacgatcttgaacggaagcacgcagacctccaagcggacgagctgctcgggttcgtcgacaactgcgcccgcgccctgaaatgcaaagttatcctgatcctcaacgcagagcgatttgccgatgacccggtctggcaagctttccgggaaaaggtaatcgacgaggaagtgtccctatcaatcacaccagctgaggcatttgaaactgcagaaattgcctctgcgaagagggaagagaatctcaagaacacagcgcgggcaaagggttcaaccaagaggcccgtggcaaacacgcgccatcctctgcttccgcctgaccgtaaagttctcggtgacactcttacgcgctgtggaatcgtaaacatccgcgtcatccagaagctgactcgccacgtcgaggatctcgtcgaggaactggacgtcagggcaaccccactgcgatgccgccttgtcacagcgatcactctactcggtgcaatcgatctcctcgccctgcctcagggccccactacggcgtacgtactcgcccatggtcgccccgcaacagatcctacatcgaaggcgtcgttcgaaaatctcgcatggagcaagctgcttgacgatctcggaattcatgcctcgactgaactggaggaggaagttgccgcctacatcgccagcaggaccaggaacaccgatttgcttgcaggtgccattcagaggtacacatcacaggcgcttcgactcgagacgattgagaacgctgctcggttcctaagggaacatacgtgggaagtgaacactcctgatcacgagttcatcgggaagctgcaggcactattacccaacgtccagcatctggatgctgagacgatcgacgaagtactgagtcgtgcaaggactctgaatggcataggcgacctcgccagcagaatggcatccgcatggatcggtcagtttgagagtaaatacagagacgacaaggagccattcgtgatgcaatggccaagaggcgccttgaagaacgaagaaatctccaaggctgtttcagagtatcaggactggaagaactattcgcgcacattcagtagtctcagcagctcaatcgtgcacaggactccactggaaaagagtgatcactacctgatgagcaacctgaccacagaacaggttcggagcgaccttcggcgagcacagggcacggagctacagaacatactggccgcgggactcatcctcacaggagagcctgacccttccctgggttatgcgcagtcctatgcggcggacaagttcactgaggcttgcttcgatgtcatcgatgccgacccacacagccgccgtgcagaagtccttcgcactcatctcattgctgccgggtttccagaggcctcggtggcggataccggagacctactagacagctcatgctccacagaaggcgagacactggaactcacgccctga

SEQ ID NO: 516914 - DNA, 1176 bp, Stenotrophomonas maltophilia
atgagcaagtacaagaccctggccgcgctggttgctaccgtgctgctcgctaccgtgggcgccgcctcggcgcagaccgttaccggcggcggtgcctcgctgccggccgacctctacaagggttcggccgacagcatcctgccggcgaacttcagctacgccgtgaccggatcgggtaccggcaagaaggcgtttctggaaaacaactcggcgctgttctcgaccaccggcaccgtccatttcgctggcagcgattcggtgctgagcagcgccgagctgagtacctacaccaccaacttcaaccagccgaccaacgccaaccgctacggcgcgctgatccaggtgccgtcggtggccacctcggtcaccatcccgttcaacaaggccggttcggcggtggacctgagcgtggcgcagatctgcggcgtgttctcgggtgcgatcagcgactggtcgaccatcgacaccaaccgcagcggcccgatccaggtcgtgtaccgtccggaaagcagcggaaccagcgagattctcacccgattccttgccactaactgcgcccgtgagcgggctgagacctcgaacctggcgggcggcaagttcgccatcaagtcgaccttcgccgacctctacaagcgcgatgccaacggcagcctgccggggttcctggtggccgctccggccaccggggacacctcgctgtacaacgctgtctacgcgtttgaaggccgtatcggctacgccgggccggacgtgatcccgagcctgaccgatgcgaccaaggtcgcaaaggtcagaggcttctcgccggatcgggcgcaatgggaatttatcctgactgttttcgatcctccgtccggcatcgctgctcaggatcctgccaactgggctccctacatgggcaatccttcagtcatctaccccatcatcggctacacctacctgttgattggtcagtgctacaaggatcagacggttgccaacaagctgagaggtttcctggctcgccactattcggcgacctacccggccgcctacgaggcatcgatcaccggccatggctttgccccgttgcccaagaagtggcgcgatgcgatccgcaaccgtttcgtgttggccagcagcactgccggcctgaacaatcccagcacctgcgccggcatcggtcgtccgctgtaa

SEQ ID NO: 516915 - DNA, 231 bp, Stenotrophomonas maltophilia
atggcgttcgtcttgttgacgggcataggcgacttgctcgggctccccaaacgcctcccggtgggcatccagcatgcgatcaatggcgtccacgtccccgcgggcatggagcgattcggtgtaaagcgcctgaagcaacgggtcgcgcgcttggtgaacctcttcgcccgtgccttcgccctggaacagcctgtcgtggcgagggcgggcgtcgacggggtcttggcgtaa

SEQ ID NO: 516916 - DNA, 444 bp, Stenotrophomonas maltophilia
atgcggatgaatgatctgatccagcgcgtgattcgcgcgtacccggatcgtcggaatcctgattgcgcttcggcggccgacgtcatgtgtcgcttgggcgttgatcctcactgcgatatgtggatgttctacatggcagtcaatggcgcgctgcctgctgtgagcggcaagcctgacttgctgcgaatggttggtcctggaattccgaaaattccagaccaggctgagtacattcgggatcgttacgagctccctgcggattttcttccgctgtcatctgacgaaggtgaggggatgtatttgtacgatgtgcgaacgcaggaggtacatgattactacctggctcggcacgatcagtttctttcaggtgagacccctgcccgttggaagaacttcgtagatttcattgcttggtacatcaacaatgatgatcgggctgcttag

SEQ ID NO: 516917 - DNA, 129 bp, Stenotrophomonas maltophilia
atgaggcggctgaggctcgccgttatcaccatgcagctcggctggatgacgccctcccgcactacaggcgagcactgctgctggatccgtctgacgatgttcttcgctacgacgcagcgctttgcatga

SEQ ID NO: 516918 - DNA, 807 bp, Stenotrophomonas maltophilia
atggatgcctccgtccccctcaccgctgtggtcgccttcgtccacgtggccgagcacgccagctttacccgcgccgccgatgccctgggcgtgtcgacctcggcgctgtcgcagagcgtgcgcggcggcctggaccagatcgaccaggcctttgccgaactggacagcgcgcgctcggtgcctgccgggcggctgcgtgtgaccctgccgcgcatcgtcgccgatcgcatggtcctgccgcggctgcccgatttccttgcgcgctacccgcaggtgcaggtggaactgtgcgtcgacccggcgctgaccgatctggtggccgagggcttcgacgccggcatccgcctcggcgaatcactcgcacagggcatgatcgcggtgccggtcgggccacctgagcgccaggtggtggtggccacgccggcctatttcgaacgccatggcgtgccgcagaccccgcatgacctgcagcgccacgcctgcatcgtgcaccgcctggccaatggccggctgatgccctgggagttcagccgcgaaggccacgacctggacgtggaagtgagcgggcggctggtgttcaacgatgccggcgtcgcccatcacgctgtgctggcggggctgggcatggcccaggggttcgcttcgctgatggccgacgacatcgccgctgggcgactgcagagcgtgctgcaggactggcagccgccgttccccggcttccacctgtactaccccgcgcgtgagcagatggcgcccaagctgcgggtgttcatcgaccacctgcgcgcggagatgcacgaccggtag

SEQ ID NO: 516919 - DNA, 1707 bp, Stenotrophomonas maltophilia
atggtcgacgtaaagatcgctggtctccccaatgccgcagctctcactggcaacgagcagattcctgccgtgcaaggtggcggcaccgtgaagctcctggtcagcgcgattcgggcaggaatggcctcgaacgacagcgtggtgcatacgacgggtgatgaatccatcggcggtgccaagaccttcaccggccgccctgtattcaacatcggcatgcgcctacccatttcccagcagctacgcttcggcgatggtgtggaggccgacgtgggggtgattactgccaacagcgtcggcacgatgattgttgccggcaacgcagcttctggaagcggcggcctgctgttgcgccccaataacgcggcatccgttactggtcaggtggctctaaatgccgatggcagcatggtcttcggaggcctgcaggctgccaagctggcgaccctgaccagcctcggcgcagtcaacaactccggcgctgaaaccattggagggatcaagaccttcgctgctcggtcggtccatacccttggcgcgcgcataggcgtagaccaggtccttgaaatgggcggggccggcgcgacttttcgcggtaacggcactggtagcctggtcatcggttcagctggccccagcacgggcggtctcatcttgctgcggccgcagggcgaccaggttgctaccaatcaggtgaccatttacaccaacggcgcaatggatttcagcggcgatgcggcgtctaagactcagacccgcaccagccttggcgcggtcggtctagcaggggccgagcaggtgtccggtgtgaagacgttctcgtctgaagtccggatccagaacgtggcaccaggcttctggctcgacgagtcggacggcgcaaacggtttctttgccgttgtggattcgggcgtcatgcagcttcaagtgagaggcccgaatttcggcggctatgtccgtcaaatgctgcaggtcagcgcatccggcggcacctttgcaatgggcggtgatctggttcgaccgctggcggataacgcccaggccttgggagcgtccaactatcgattcacttctctttggtcggtgaacggcgcggtccagacttctgatgcccgcctgaagacgccgttggagcatatgacggatgtggaggaggcggcgtttctggaaatcggcgctctcccggcgaaatggaagtggaaggctcgtgttgaggaagagggcgatgccgcccgttggcacgcgggcccgtcagtgcaagccgcgatcgccgtcatggagaagcatgggctgagtgcgtttgcctacagcgctttctgctacgactcgtggcctgcagaggacgaggtatggcgggagtggcccgcacaagaggccgaggttgttgagtggccggcagtgccggagacgtgggccgacatcccggcagaagttgatgaggccggcgagattgtcgttcctgcgcgacgtgagttggttcatgaagccatgcctgccggtcgcgttgtactgaaagaagcggtcgaggctggtcgcgagctcatccaatcggcggtcgaggccggcgatcgatacagcttccgcgtatctgagctgcaggcctggatcctggcggccactgcccgccgtgatcgccgcgagcgagaggcggccgagctgcgcatggctagcatcgagcagcgcctggctgctcttgaggccggagagtag

SEQ ID NO: 516920 - DNA, 975 bp, Stenotrophomonas maltophilia
atggcctacgccgagttcaataacgttcccaacgtccagacagtcatcgacctggtggttcagtttgcccaggccaacgggtggaccgtcgagcgcaacaaccttgtcggaaccaatcgcaccgcaacggttcgcattcccggggtctccgactacgttcacctgttcaatggtgaccagacatccttgggctcacggatttccatcgggtacaacggcgacgcagcggtcaccgcccagccgctggcctcgccgcgcaatgcgttttcctgggtgctcactggacccttcccgcggctgaaactgttcgccaacggcacggccatccacgtcgccctcgcccaggccgtggcgggcgaataccgtcatcatgccttcggtgtgcttgagaaggcgggcagctacgctggtgggacctatgccgatggcacctactggaacaagaccggcagctacagcggcatggtcacaacgtccggcagcaacgtcgtcctatttggtcacaataccagcgagaccggctgtggacacgtgcgcgccgattcggtggaggatggacgtgtcaacagctaccaccggctgtgcaactactacggcggtgcgctcgagaccgaagggcaggctggaagtggtgtcggctcgatctatcaaaccacgacgtcttccaactacgacagtctgtggctggggtacgcccttgcaggggccgacgagaacaccttctccggccgcagcatcctgcagcccatcgagctgagcattcgccgcccaggcagcagtgcctatctgtcgcccatcggtagggtgcctggcttgcgtgcctgctacctggaaaagctcgagcccgagcaggagatcaccatcggcgaagacacgtggatggtatttccttggctgcgcaagctggccatgagcagcgcgaccaacgcgcctccggccagcggcaactatggctgggccgtgaagaagtcctga

SEQ ID NO: 516921 - DNA, 975 bp, Stenotrophomonas maltophilia
atggcctgggcaaccgacaccgcagccaatatcaccgacctcatggcccgccttcgggatttcctgaccaccaacgcggccctggtggcagcgaaccagcagtggcaggtggtgggcggcgtggccagcggcccgatcgcggccggcgatttcgtgtcgctcaagggtcgagggttggctggcgaggatgaaatctatgtgtctttgctggcccaggtcgtgccggcaagcaactactacaacctgaccttgcgcgggcacattgcctataacccggcagcgcccagcatcgatccgcccggcgccaattcaaactacatctcgatcctgggggtgaactccccgatcaagtactggttcatcgccagcgggcgttgcttcaaggtcatcacccgcatcaatggccgctatgacgccatgtatgccggcttcatccttcccgagcatctgcccggggattggagctacccgctgttcattggcgcgtcctacctcggaaggaacgcccaggcatcgctggatgactactcccattcgaacttctggaatcccagtgccgacgggcgttccaacacgagcctgagccaatcctatctattcacgccgatgcaatcgtggttgccgatacgtaatgcctatgggacctcggccattgtcacgggacggatcgcttcaccgtggtgccgcagcttgcgcaaccagaacgtgcgtggctgcctggatgggcagcgttggttgcagcgcgggcaactgatcggcatcggctggagctcgggaagtgtcgatcgcggcaatcgggttgatgagatgcccgaaggcggccagttctacggcagcttcgatggcgtcttctacacgccgtcctttggcgccaccgccgaacagattgcaacggtcggcagtgtcgatcacctgctggttcccaatgtgttccgcactggtgatggcgagttcgccgccttcgccctggagtga

SEQ ID NO: 516922 - DNA, 3504 bp, Stenotrophomonas maltophilia
atggcttcctcgcgcaacctcgaactggcgatgcgtatcgccctggacatcgagcaggtgcgccaggcgctgccagtggtccagaaggggctcgcctcggtcaagggcgccggccaggatgccggcgtcggcctgggcgacgtcacgaaagaggcgaagaaggccgctgatgccttggatcgggccgcccgcagcagtgccgcctcgggcagccaaatggaggatgctggccggaaggcggccgccggcgcggcgggcatggccacggcaggagaatcagccaaggccatgtcggcggatgtggccaccgccgcagatcgcgtccgaacgtccggcgcggcggtgcagaaaacagtggccgatgagatccgcctcatctccgagctcgatgcacgtctggagcgcggcgcggcgagcatgtccgatctggccgacaccgaggcgatgcttgatcgggtgatggcgcgcggcctgattaccaccgaggactacaacagcgcgctcaaggcgctggataagcaggaagcaggcctggctcggtcggagcaacagcgccagcgtgctgttgagggcgccctggggcgctatgacagtgcatcggtaaagctgcagaagctggagcgggacgagcaggagctcaaggtggcggtggatgccggccgcatcagccgcgagcagtacaaccgtgccctcgcgggcatcaatgtccaacgcaacgccgtcaaggttgccgaagcgaccagccgcagcctgggcgccggggcgatctcggccggccagtaccagatggccatgcgccaactgccggcgcagatcaccgatatcaccaccagcatcgtcagcggcatgccgatctggatggtggccatccagcagggtggccagctgaaggattccttcggcggtgtggtccccgccgcgcgcgcgctcaccagtgcgctcaatcccgcggtggtcgtcctgggcggtgtggccgccggactgggtgttgttggctttgccgcgctgcagggctacaagcagctgcgagccttcgacgccgctgtgatctcgacaggccattcacttggcgtgtccagtggtcagctctatgcccaggcgaatgctgtcggtgcggtcactggcgaatactccgatgcaacggcagctgcgcagcaacttgcggccagcgggaagctgaccgccaacaccctgtctacagcgatcagcgtcgcagtcaacctggccaaattgacgggcgagtcgattgagggcaccaccgccaaggtggtcgaggtctccaaggcgccttcggccacgctggccaagctcaacgagcagtaccacttcctcaccgcagcggtgtacgaacaggttcgggcactggaggaccagggcaaggcgaccgacgccgccaagacagcgctggaggccatcgccaatgtcagcgaccagcgtgtcagagaaatggagtcgcgggccggatatctggagcaggcgtgggatgccgttgctcgtacgcttaagcgcgtctggcaaggactgaaggacatcggtcgcaccgactccgaagcgatgctccgggcagaaactgcggcgatgcgtggtacgaccgagcaactgcagcaggcgttgaagaacggtaatgccccagccatcggctactactacgaccagcagatcaagcagatcgaccggctccgcaaggcgcgggccgcctacgatcgtgacgtcaatgccgccgagagcaccggccaggcccagcgggtccaagatgccggcgtcgaagccgccaaggcgatcgcttcaggtctcgaagagggtgccagcaaggccgagaagctgaagaaggcaaccgaagaggttgccaagcagttccgcgagttgcgcaaggccaatccaggaagcgacctcctcaagggtgtcagcttcggcgacgatggcagcgtcagcggcggcgcctatgacaagcgggtcgcccagctgcaggagaagttcaaagagcgcactcgaaagacgcccaagaccgagagccagaaagatgaggccgccgcacagcgggagctggagcggctcaagcagcagatcgatctggtcggaacgctggatgagacccgcaagaaggcgaccgaaacgtcccgcatccaggcggccattgccgaggggaatttccagaacgcttcggcgaagaccaagcaggacctgctggacgaagccaagaagctggatctggccaacctccgggtcgaagccgaccgcaagatgctggacatccgtgatcgcattgcagccttgcaaggacgtggtcccgacgcagagctggccaagaccacgcgcgagctgacgaagctgaaggaagagctggaggctgcgggccgagcagcggatgccgccgacatttccaaactgatggatctgagcaaggccagtactgacctcaagaatctgcaggaggcctacgacagggtaattggcgggattgcactggagcagcagcggattcagctggagctgcaggctggcctgatcactcaggcgggcgcgcagcagcgcgtggtcgatctctaccgtcagcagtcaggtgccctccgtgagctggttccccaaatggaggccgcagctcaggcgctgggtgatcctgctgccgtggcaaacgtagagcagatcaaactcaagctgcaggagatggaggcgaccacaaacctgctccaacagtccatccgtaacacgcttgaaggatcgttctcgaacctgttcacctcgctgatcatgcaaaccgattcgctatccgagtcggtgcggaacttcttcctcagcatcgcccaaggcattgccgaattcgcggccgcgcagttggcgcaggccgcgaccatgaagttgatggggctcttcgccggcgacaaagggaatggcggtggtgacggcgcgcaggacatggccaaggctgcggcagctactgcggccgcgggcgcgatcgtcagtgtgggtgcctccaaactggagacctcggccaccacccttggttcgtccagcgtgggactcattgtcggcgcgcaggcgatttcccaggcggcccgtcagatgcaggctgctgctgcggcaatggccgtttccagcgcggccggctactccagcggcggcttcaccggaccgggtggcaagtaccaactggcgggctttgttcacgccggtgagttcgtccaccgacaggaggtggtgcgccagcccggtgcgctggcattcctgtcggccttcaaccaggtcggtatggcggcaatcgatcgttggcgcggctatgccgacggagggcatgtggcatcgatgcccatgctgcaacggtcccccgtgttcaccagcgcagcttcggcgccgccgagcactgccgcgcagttgggcttgcgagtgatcaaccaggtgtcgccggacctgctcgaccagtacctggacgatccgggcagcgacaccaccgtcatcaacaagatcaaccgcaactctgcggcgatccgccaagtattgggactctga

SEQ ID NO: 516923 - DNA, 474 bp, Stenotrophomonas maltophilia
atgaagcgagtagagttcgtcatcgccagcgtgctgatggcagcggccttgagtgggtgtgccaccaagcgttatgggcgtctgcagccggtaacgagctacgagacgctgaactattcttgtgagcagatccgaattgaactatccaaggtggatgcctttgataggcaggtcgagcagcaagcaaagttcagcggcatgtccattgccagctttttgggtgactttgggatcggaaatgtgatcgaacggaatgaagcaaagaggacgtcagtggaaaggcgagctcagcttcagggggcttttgccgccaagcgatgtggagacgttgaaattcccagggtagaagccccgggtcctgcggcgatcgcaccttccgctgtaaatcctggttatcaaccttccaaaccggaaacaccgcccgctgcctctgtcaacagttggtgggaagcgcataagcccaagggcgaatag

SEQ ID NO: 516924 - DNA, 936 bp, Stenotrophomonas maltophilia
atggcagagaagcaacccaacaagcgcggcgccaagccgctcgcccaggccgagccagttgtccaggatctggacgcggaaaagctggccgagcgcagccaggagctggttaccctcggtgagcaccagagcgaggtggtggatcagttcggtgacggcctgccgtggcacccggaccactacgagaacgccatccgcagcgagcttcgccgcggctgcgaagccttccttcgcgccggccgctacttgatcgtggcgcgcgaatgcgccgcgcatggcgaatgggacggcatgctggaacgtctgggcattgaaggatctcaagcacgccggatgatggaggcgtccaagcgcgtagccgcgctgccaaatcgtgcgacgtcgcacgatttgattgcagccgccaagtccggaagcaagatcatcgaactgctctctcttcccgaggagcagttcgcggaactggcagagaagggtgcgacggatggcctctcgctggacgatgtcgaatccatgacggtacgcgaactccgggcagccatccgcgaagcccgtgccgatgccgacgcaaaggatcagcgcatcaacaagttgagcgacgatctcaacaaggcggaggagaagacagcaaaagcgcagcggaagtggaagaaggccacccccgacgagcagtcccaggaactgctgacccagctggagctggccgcctcccaggtgcgccttgccatcgccagcggcagtgaagaagccggcttcagcggcgcggtgatcacgctgatgcagcacgccgagcaacacgacctcaacgttgatgagcaggtggccgggatcatcgccagcctgatcaacgacctgcgccttgtccgcgaccaccaggaggtgggcgtcacggtgatccatgaccgtcgcctggccgactggaagcgggagggctga

SEQ ID NO: 516925 - DNA, 369 bp, Stenotrophomonas maltophilia
atgaccatcaagcgctacaacatcgaacgtaattggggcgaaggccaggtacagcttgagatcgaccacaacatcctgacgccggagctggcggcggaaatcaacgagttctggacaggggccgatgagcggcttgacgccgccgacgacaaccccgtgctggccgtcatcaagatcgccggtgccgagttcatgggttgggtgctcgatgcgaactcaagctactcgaccgaaagcatgcagcgtgagtttgaccagctggaagggtggccatcgccacacggtatccgcctggttggctgggatgaccgtcctgacctcgattcctccctgatgcaggtcgaggaaattgaggtgccacatggatga

SEQ ID NO: 516926 - DNA, 177 bp, Stenotrophomonas maltophilia
atgcgccgtgatccgctgacaaagaagtcccaggtggccaccgtcctgaaggacggtggccgtatcgtgcctggcgtgcgcgaagggctgctgcagttgctggaccatgcgggccaggaagtgccggcatggcagaccgccctccgggccgctcagggcgcaaggagcaaggcatga

SEQ ID NO: 516927 - DNA, 645 bp, Stenotrophomonas maltophilia
atgccctgccatcacctatccatcgcccccctccgatacctccatcgaatcacagcaatgctcttctgcctgtgctgcgcgggatgcatcgctgacagcacaccagatccggacgtcagcctcaggagggccgcgacagaagcacaggtttctccagccatatcgaacgcggacacctcaccgaaccccggcgttccgacagcgtccacgcatcgcgcagcatcgtcgctcgcgctgcttcggtcagaatccgcactcatgttcaaggacggcatctcgatcctggccgccgaggacctcctgcagtcaagcagaaacatgtcggatgcgatcaaccgcattacacaggatgcggcttccagccccgaggcgcaggacctgacccggcactatcgatcatcacttgaacgtgcaatgggtcaagaaggtgtacttgaacgcttttcgtgtggccttagcatctgcatcggtatcgcccggacccgaagcagcgcggatcatgaggcgtggggtcgcaggtttgcgtcagatgcatcctctcccacttacagctatgccgaagcgtctgagcattactggatgggatacgagaacaggttcatcttctcgaccgacccggagatgagttcgatcagcggcaactga

SEQ ID NO: 516928 - DNA, 138 bp, Stenotrophomonas maltophilia
atgcgtgggcgggaagagaaagcgcgggcgcgcaccctggagtaccaggtcggccgatggcgctggctgcgattggcaatgcccgttccgggcggagcctccacccgtgtgatccatgtggaggcagagggcaggtga

SEQ ID NO: 516929 - DNA, 1014 bp, Stenotrophomonas maltophilia
ttgcacatcagattcaacaaggccaacgttgaagtagtgaacttacagggaagaggtcttatgccgggcaatctttacaagtacttcggtccacaggttatcgacttggttctgactgatgacggcgcgactatcaaactgtcaaagccagaggatttcaacgatccgtacgaattgttcttgacggtcgactacggagtggacgcctcagcattggctgcctaccaagagttggttggcaacattgatcagctacctacaacttgtttctcaaactctccggccgtcgttccgatgtgggcacactatggagtgaacggatctggattcgtaattgagttcgaggaagagtgccttgtagacgagtttccgaaaagtctgtttaaggatgtcacctatcgggacagcgcggatgatgaactcacggagatgctctacagagctcacgtgattggaaagcctcggtatacgtatttccttagaaatggggtattttttggcgcgtacttcaccaaggcaaactgctggtcgtatgaactcgagagacgcatggtggtgacggacgagtcagaagttcgctcatgcggagacattatccttgcagatgttccgaagcactgtattagatccctaatcgcaggagcgaaagccactccggatatcaagggtgcactcaaagagcgagcaaaatcgctcagctgctcatactatgaggccagaatcggcagaagctccataacccccttctttacagacctcaatggatatcctcacgtcttcaaagagggacgtatcgaggaagcggaccagtcttgcgaagagtgcagtgagcccacgttaaaaggcaacgatcgctgctcttggtgtcagatcagcgatgatgatcggcgaggcgccgccatctcaaacccgtatcggatgctccacagctatggacgtctcaatgattacatcaatcagatggatgcaatttccgctcgagcatcttcccggaagcgctcttctgacaagtaa

SEQ ID NO: 516930 - DNA, 915 bp, Stenotrophomonas maltophilia
atgaacgggatcgggattgatgtcagcaagcgccaactggatgtcggcacgacggacggagagaccctgcaggtctgcaataaccgctccggcttttctgaattggatgtttggctgaagaagcgtccggtcagccagatcgtgctggaagccaccggcggctacgaacgaccggtgctggattttctgcacgcagtgggccatccggtggtccgcgccaatgccctgcgggcccgcaggcaggctcaggggatgggccagatggccaagaccgaccggttggatgcctatgcattggcgcagatggcggccttggtgaaacttccggcctaccaaccgctggagccttggcagcagaaaatgcgggaattcgtgcgggcacgtcgacaggcgatgcacgcgctgaccatcgcgcggcagcagctggaaatggtcggtgatcgtgaattgcgccggctactgcaggccaacatcacccgcttgcagacgctggttgaacgtctgggaaagcaaattgccgagcaggttacccagcagcctcaactggctgtcctgaagtcgatgaagggcgttggccctggcctgcaggcggtattggcaagctatcttcccgagttgggaaagatcagcggcaaggccatcgccagcctcgtcggtgtggctccgatgtcccacgacagcggaaccatgcgagggaaacgcagcatccatggcggcagagccgagatccgccaggtgctctacatggccagcatgtcggccatgcggcatgaacctcaactgcgcgatttctaccagtcgctgcgagcccgaggcaaagaaggaaaagtagccatcgtggcggtgatgcggaagatgctggtgatcctcaacgcccgggtgcgcgacgctgaaaacgggttggtcccagcctaa

SEQ ID NO: 516931 - DNA, 192 bp, Stenotrophomonas maltophilia
atgaacgccgtccgctccgagctcgcctacgattttccgaccgcccagggcgagttggaatacaacgcttggctgcagaagaaggtcgaaaaaagcataagcgacgaacgtccaaccatcacgcttgatgagatggacatgcgagttgcggcccgcattcaggcgctgcgcgatcgcaatcaggttcgttga

SEQ ID NO: 516932 - DNA, 639 bp, Stenotrophomonas maltophilia
atgacgacgacctctctcaccaacggcaaacctcagctgacagtgcgcgatgtgcaggcaatcctcgccgactgtgacccggacgctgccatagagctgaatttgcccgccttctttgatgagaacgacagaaccgtagcggcggacagtgaccctcttggaatgtcattcggctacgtaccggcggtggaagtcgggtttcagaccagcaaagacgttccctatgaatcactgtttgatgcgcgtggcgaagcacgtccaggtgtgaagccaaacgccgtttcgattggtctgcgcaaagaagatgccaacacgatcctggcaaaccgtaagcaggcaattgaggacggagacgccgatgctgggaaggaggcagagcctgttgccggggatgtcgacaccgttatcgtggacatcgccatcccgcgtagcctgcatgcgacgattcgcaagcttttgctttcggtgaacacgtcgccccaggtccgggaagagcgcgcgtgcacgcacggcccgcttaccgtggctggcttgcttgccatgctggccgaggacgttggcatggtcgagactcggcccggctgctgggaagcgtcgaatatggctcaggtgttggcgggtcacgggtacaactactaa

SEQ ID NO: 516933 - DNA, 255 bp, Stenotrophomonas maltophilia
atgagctacctccccgaacaccttgccattgctgagaacctgactgccgcaaccagcgcaggttctctggtcgatgcatacgcagccctcaacgggcatccacgggccagcgttgagagtgccgccttgatctgcggatactcctgcatcgctacccgcaaccggcgggattccctcaaccatatactggcccaggtctcggaggcgacccgacgacggaccgatggcttcgggttgcgggatatagcccactga

SEQ ID NO: 516934 - DNA, 306 bp, Stenotrophomonas maltophilia
atgacagcccagaacgatccccacgctctcgcccgccacatcgagaacatcaacgaattgcgtgcttcgcacctccccaacatcggtgacttggccgtagtggtccgcgccgatggcatcaatttcattgtcgaagcatgtgctgaacaagagggcaggtactaccgcgtctccgctgcgactggcgaggaggcttgctggggcgattgcatcggttgggctaccgcgacttccctccgcgaggcggtcaatcgcatccggtcagcagtgctgagggccggtattcccccactcgctcccagctga

SEQ ID NO: 516935 - DNA, 225 bp, Stenotrophomonas maltophilia
atggccgtattgggggaagccgttggggggttcctgagccttgtagcccgacacgtcaccggcgacttcggagatgtctgcgcggaggacgccgagatgaaccgcgaggccatcaagcgcggggatcgaattctctccagctacatggttggagaacagacggtttgggtcatcaccgaagccgaccgaagccttaccacggtgctgctgccgtctgactactga

SEQ ID NO: 516936 - DNA, 447 bp, Stenotrophomonas maltophilia
atgcaagaatccatcgccttgcccgacgtctataccgcaaccgccgcgatagcggcggcattccatctgcgacacctgaactgcgggactgtgcatgaattggaagtagacatctcttcgatgcccgggcacgtcacaagtttcgtcttggactttgcaggcggcaactattctggggtgagcatcctccaggtcgaatcgattcaccgtggccctgagccacagtatgtcggagtcgtctacggtgaagtcactctcggggtgttcctctacgatcctgacatgttcaccctcacccccgagcgcgacgacgacgccgattacgactctgggcagatggtcacggcagatcctcaagcgatgggcgagttggatgcatttggcctgttctttcagctggagaacgtccagctacacgagctggccagcgtggatttcatgttctga

SEQ ID NO: 516937 - DNA, 447 bp, Stenotrophomonas maltophilia
atgcaagaagccatcgcatcgctgccgtccgcccatgcaacatgtgctgcggtaatcgcggcattccatctgtggcatgagcgccgtgaaatgattcccgccctggcccgggagctttcatcggtgcccggatacgccagcagcttcgacctggattacgccgaaggcgattgcgcaggtctgaccatcttcgaggttgatattcatcggggacgcgaacagcacttcctcggcgtgctctacggagaaagcgtcatgacggtgttcctctatagcccacgcactttcacgctcagtgctgggcgcgacgagtcggcggactacgactcagatcagatgctgacctccgatccgcgcaggatggacgagctcgatgccgttggcatgttccaccaggtgccgaagtgccgtcctcgccaattggccactgtggatctggcgttctga

SEQ ID NO: 516938 - DNA, 486 bp, Stenotrophomonas maltophilia
atgcccacgatttcagacgccgatcgcagctacaagctgcccgcccggccatccgccgatcagatcatctctctcgcgggggacattctcgcgggccgctactctgccggcgcacaggtcagtagcccggacactgcaatgaagctcctgcagctgcggattggtgacagttcgcgtgaagtcttccacgcgctcttcctggacaatcgccaccggatcatccacgaagagacgctgttccagggcacgatcaactcggcccccgttttccctcgcgaggtcgctcgcgccgccctgcgctgcaatgccgctgcctgcatcgtcagccatgtgcacccgtccggagacgctgagccatctcaggccgacataaacatcaccgctgagctcaagaccgtcctgcagctcatcgacgtccgcctcctggaccacgttgtcgtctcacgcatccaggcgatttccatggcttcgcgggggctgatgtag

SEQ ID NO: 516939 - DNA, 378 bp, Stenotrophomonas maltophilia
atgtccgaagtaccgccaccgtacctgcacaccgcgtatccgccctcgggcgatgctgcgggctacgtgccgctgccgacagtctatgctgcgctagatttcgttttgagctgcgtggacgacaccgatgccctgccctcctcagcagccgcccgtgacttcctcgtgcagtggctgcgcctcggcgagaatccgacgaaagaccagctggctgacgcgcggaacgccatggctgctgacgcaggcaagctcctcgacacactgcaccaagcgctcgagggattcatcgccgacctccatcggcacccgagctgcagtccaggaaccgtgttcggaaagtatcatctccctgtcacgctgctgcagctgcagccgtag

SEQ ID NO: 516940 - DNA, 1233 bp, Stenotrophomonas maltophilia
atgtcgaactacgagctcaatggcgcgcccttggacgtgcacgcgcccgattcacgcaggcgccttgccgcggcgcactctgcgcacgagcgtccgctttgcctgtgccggcgtcctcccataccgatgtatatcgccaagctgcaggaggcattcatcgtcaaacggatgcctggaactggctcaaagcattcgcctgactgtgaatcctatgatccacccgcagagctttcgggtttgggcgaagtgatggaccgggcgatcaaggaagatcccgagaatggtgaaaccacgctcaaactcgccttcagcatgagcaagggggcgagccggaacgcgccggttcccggggacggagagacgaccaccgtcaaatccgatggcacgaagctgaccctacgcagcgtgctgcactatctgtgggaccaggccggtttcaaccgctggaccccggccatggcaggcaagcggtcctatcccgtggtgcgcaggcacctgctgcaggccgcctcggacaagcgagcgaagaatgctccactgtccgacagtctgttcattcccgagccgttctcgcagcaggaggcagatgggattgccgagcgcgcccgccgcctcttcagaagtattgccggcgtacggggcggcgtgcgcaagctgatgatcgtagtggccgaggtcaagcagtttgacgatgcaagattcggcaagaaggtcacgttcaaacacctgcccagccagccgttctacatggacgccaagttcggtgagaagctgcaaaagaccttcggcaacgaaatcgacatgtggaacgctgacgaaggcgctcatctcatgttggtcggaacgttcagtgttctggaatccgggttcccgcagttggaggaggcggccctgatggcggtcaactcgaactggattcccttcgagaccctggacgaccatctgctgttgcagcgtctgcatgccgacggtaggcgtttcatcaaaggcctgcgcttcaatctgtccaacaagaagcccttggccacggtggtcaccaatgacacctcaccgaatcccgtagccctgtacgttgtggcgcccgagtccgaggaggatcacctcgctgcgctgagcgccctggtcaaagacagctccctgtcggcgtggttctggcgcgctgacgaggcgatgccgccgttgcccgagatcgaggggtttgaaagccagtctctggatctcgaagacgtttaa

SEQ ID NO: 516941 - DNA, 288 bp, Stenotrophomonas maltophilia
atgactgtcgctcgtgtcctacaactcgactgggtttctttgcttcaggaatactggtatgtgccgttgattctcattgcctgcatcgcatccggtgtcttcatcaactggcatcggccaaggtccgttcgctcgttccctcggcccatgcttgaggctgcattccagttcgaccagcagacgctgaggcgctattacctgatcggctttatcagcaaggcgcgagtcgagaagcaactaaggctgaccgcgatgcagattcgcgagcagctatcccgaaagatctag

SEQ ID NO: 516942 - DNA, 1293 bp, Stenotrophomonas maltophilia
atgtccaggattccacagcattttcttgacgagatcggaacagaggatctggtggccatcattggggccagaatcgcactgaaacccgcaggcggcgagttcaccggcctgtgtccgttccataacgagaagaccccgtccttcaccgtgagcccctccaagggcttctatcactgcttcggctgcccagctcatgggaatgccatcaacttcgtgatggagtacgagggcgtcgactttctcgatgcggtttcaatcgttgctcgcgagcttgggcgggaggtgccacgagagccgcgcaaaacatcctcgacggcggcggcgccgcagcagcacgcgagcctttacggtcactgcaaaggggctgggatgttcttcgcccatgagctcggtggcgacggccccgcgctgagctacttggcccgccgcggcgtcggccaggccatagccagcgagtacgagctgggctacgccccggatagctggtccgccttgaagctggccgcaacgctggccaagccgggcgcgtcgaccgagcgcgacctgcagaccttgggcctgctgtcgaaaagcgagcgccagcctggccgtctgtacgaccgattccgcaacaggatcatgtttccgatcatggatgagcgcggccgtgttgttggcttcggtgggcgcgctttgggcgacgcatcacccaagtacctgaattcgccggagtcccccatcttccacaaggggcagatcctctacgggctctggcaggccgtgcgccggcagcgccgactgccgcgaatcgtcgtcgtggagggattctttgatgtgctggccatggctgagttcgaggccgcgcccgctgttggcaccatgggtacgagcttcaccgacagtcaggcaaagttgctgttcaagtacaccaaccaggtctatttctgtttcgacgcggaccgggccgggcgcgccgctgcattcagtgccgctcgcacagtcctgccccacttgggcggcgagcgccaggtcggctttgtgttcctgcccgccggggaagatcccgactccctgctgcgcggtgctggtgtcgaggcctttcacgaccagcttgcagccgcgcaaccgctgtcggagttcctgttcgcggagctgagccaaggcgtgcagctctccagcttcgagggcaaagcgcagcttgctgaacgcgcgttcccgttgattgattccataccccctggcgctttccaagagctgatgcgccggcacttggtcggccttaccggactggatggccgcccttcaacgcactga

SEQ ID NO: 516943 - DNA, 192 bp, Stenotrophomonas maltophilia
atgctcgtgctcactcgcaaggtaggccagacaatcatgatcggcgacaacgttgctgttgtcgtcagcggaatcgatgccctaggcaacgttcggatcgccattgaagccccaacggagaccagaattctgcgaaaagagcttctcgctcgctcgcaggagggggacggtcggggagcggtgcgtcagtga

SEQ ID NO: 516944 - DNA, 339 bp, Stenotrophomonas maltophilia
atgacggattccattctttcgatgctcgccgaggccgaggccatccgggtccacggccaggtttcagcccgccacccggccagcgcaccgctggacggtttgctggccctggacaccgcctgcaggagcttcggtggccttctcccaaatcgccggcgcgtgtcgctgggcgaatgggcggagctcatcgagcagtacccggacgccggcgacgtccaggctgaaatcgtgcgagcgctacggactatgcaggccgtagcgcagccggcgccagcgccggcgattctcacaccgcgtccccggcagaacaccactccgcccgccaattcaaccctctaa

SEQ ID NO: 516945 - DNA, 306 bp, Stenotrophomonas maltophilia
atgatcttcttcgatgcccatcgtcaacccgcccgcgaccagtacgggttcaccgttcaccctgacctggacctgttcacagtcgcgggagcctatgaccagagcgcattccgccgtgccggattcgatctttaccagctgccgctggagtcggacaaccccaccctgttgaagcgctatgcggaagatccgcacgcgctgaccgattgggtccccgaagcacccgagggaggtaactggcgtttggtgggcctgtacgacaccgagaacgatccggtggccatcttcatccgtcccatcgcctga

SEQ ID NO: 516946 - DNA, 2067 bp, Stenotrophomonas maltophilia
atgaatgctgcatccctcgaaaccctcatcctgcctctgtcggccctctaccactctccgcgcaacgctcgtaaaaggggcgagtacaacatcgaaggcgtgcgctcgctggccgaatgcatcatgcagatgggactgctgcagaacctgggcgtttgcgaggagccgtcggttgaaccgggagaggagagccgtccgtttggcgtggtgctgggcgggcgccgtttggcggcgtacaacatgctgctggacgagggccggatcgatccgaaccatccgattcactgcctgaaactcaaggatgacctgaccatcgcatcgcttgtggagaatacacagcgcgaaaacatgcgaccggcggacgagtacgagaagatccgtgaaatgtccgaagttctcggatacagcgttgaccggatctcggacctgctcggcgtgagcgcgctggtcgttgaacgccgattggagctgtccaaggcgcatccggagctgatccaggacttccgcgacgacaagatcaccaccaaccagctgatcgcgctctgcacgaccactgaccgtgctcggcagctggaagtctggagggctgcaaagtatccggcgatgcgtgacccgaaggaattgcgtaagaaggtgcttgcccagcgtatcgactgcggctcggacccgcgcatcaagctgattggtggcctcgcggcattccgcgcagctggtgcggtggttcacggtgacctcttctcggattcgggcgacgctggcatcagcgaagatgttggcctgctggaaaagctggttgtggccgttgccgaggcaaaggtctccgagctggaaaccgagggctggaattgggtgcaattcctgccggaagggcgagactcggcctactggcgccttggtaatgctgtcccctcctctgctctttcggatgaagagttcgcatcgacccaccccgacctggcggctgagattgcgcgtgtcgaggcgcgtattgcggagatcgaggcgcaggaagacgaagaggccttcaatgccgagtacggccagcttgaggacgagctttcagacctcagtgagcgccgcgacatggcctgtgctgtttacagcgaagagcagaaagcgcacgcgggtgctgtggtttggttcgacgaagatcagatcatgattgagcgtggcaaggtccgtaccgaagatcgcaagggtgcatctgctgcgaccggtacaggcgtggtaggtgggcgcgaaaaggcctccgctggtcgcaaggaggcggcaatgtcggatgccatcacccgttccctgctcggccgtcgcaatgctcttgtgcagctgcaagttgcccagaacccgcgcgtggctaaggttctgctagcggtatcgatggcgtccttggtcaccttcgattcgcgtggtttcggggttcgtaatcgcggtgtctgcgacttgaccttgagcaatttcagcgacggtgcgcgcttggagcatccgaccgttgggtccgatggtgaggccctgcgcgggcttctccgctcctcaatcgcgccattggttgaggggatgccagagagcccgagcgagcgcttcgtcttcctctccgaaaagtcagacgctgtgctggacgcgattattgcgcacggtgttggcgcggcggtatccgtgaacgcgctgcacaagggcgcgacggcgaccctgctggagtcgctcgattttcagattggggatcacatggaaatcactgccgacaacttcttcaaccatgtccccaaggccatcactctttcatccctgaaagacgccgggcaggactacgaacttgcggtgctggaaggcatgaagaaggacgtgctggcagcggaggctgagcgccggatcaagggcacgggctggttccccgagctgatccgctcccctgcacgacaagcagcgccgcaggagagcgcaggcaccaatcaggcaccgaagacgggtgccactaccccggcgaagaagctggccgggaagaaggccgccgacaagaagccggtgagcaaggcagcaaaggccccggccaagcgcgccaaagccaagtga

SEQ ID NO: 516947 - DNA, 390 bp, Stenotrophomonas maltophilia
atgactattggcctgcgcctgaactccgaatcccacacgccaattacggtgcaaatcaccgatcggatagcgacgctcatcaggaccgggaagctgcggccaggtcagctcctgcccagcgtccgccagggggcggaggattggagtgtcaatttctcgaccgtcagccgcgcctataaggacctgcaggctgaggggctgattgagctgaataagtctcgcaggatgcaggtggcaaaggtggccccgatgacacctgacgatcgggcggttctgctccggccggcgattcttggcctgaaggcacgcgcgcgcgaactcggcctgaccgatgcgcagttccaggccgaagtcattgccacgctgggcttgaaggttgccggcagctga

SEQ ID NO: 516948 - DNA, 246 bp, Stenotrophomonas maltophilia
atgaccaagattccagccttcgatcgtgtgagcaatctgattctgctgatcgatgagtgcctgctgcgcgaggtggcggggcagctgtacgtcaatctaagccctgacggtatgcagtggacacacgtggacaacgcgggtcctgatcgactgatggcccttgcgagccagtgtgtggcacgtcgtgtcgagcgggaaaagcgtggtgacctgatgccgggacgcattcgtgcgtatcggagttga

SEQ ID NO: 516949 - DNA, 450 bp, Stenotrophomonas maltophilia
atgcatcctttcgtctacgttttggtgctcagcctcatcgttatgaacctcgcaggatcggccctttcgtcctcaatcaataaggcgagactggctcagcagtctgcggtcgcctcatcgctggccatattctccgcctatgccgatcgattcgcgcgtgcaaacccaaacgccgacacggtgatctcatacgcggcagcgtcgctacccggctggttccagcctcattccggtgtcgtggcctactcctatcagggccacgcgtatgtcacctatcaggctgcctccgccaaagatgcgtacgacattgccgccgcgtgccccgagggtaatcggtgtctggtttcgaattctggttcgctgtatgagccaggctcattcgctccgaccggctcccttcccgctggtaggggcttgccgcagaccaacggtgttgtgatccaaccctga

SEQ ID NO: 516950 - DNA, 273 bp, Stenotrophomonas maltophilia
atgcagatcaatgaaatccaccttcccgagctcgcgcgctacggcatctcgcgcgagatggtgatccacaacgagtgcgtcaacatcttcattggcgcgttcatcctaagtcgcgagcttgcgaagcctggcgctgactactggaccaatgtcggggcgtacaacagccggacgccttgcgagcggttctactcgaagggcaagaagtgcccaaacatcgagtatcagcgcaaggttgcccaacacttggccaacatactccaggggcgatga

SEQ ID NO: 516951 - DNA, 1479 bp, Stenotrophomonas maltophilia
atggaaccagtaaccatgaaacgtaggcagcgcggtgcaacgatgatcgagattatggctgtgctcgccatcggtgccctcttactggccggtctcgtcggctggcttacctggcgcgccagcgaacaacgaaacgagcttgctgctgagcacggcgcggcggttcttgatgctgccaagacgtacatgcgcgccaattttcagaatctatacaaccaggccgcaggtggtcctgtgactgtccctgccagttcgctgtacctcgggcagggcgttcaacagttcaacgcctactcgcaggttccagagcttcgcgtcgttcgcgacgggacggggctggacggaatggtcttctatcggggtggccagcagatcagcaaggggaatctcatttcaatcgcaaacaacatgggcttcgtaggcggctacgttgcggctgatgatccggcgaacgcggtgggcatgatgcagcagtggaaacgtccggtcgccgcctacggtggcagtcctggtactggcgtcgtggctgttgcggtattcgccgatatggcagcccagggaggggcctaccttcaccgcaatgccaccccgggcaagccggaactgaaccgcatgtcgactggcatcgacatggatggcaacaacatttccggcgccggtacggtggccggaaacaggatcgaggctggtggtgtcgagatcagcgagggcggcatggcaacggccgctctttccatcggcaaggcctcattcggcgcgttgccctatgcctatgaaaccatccaggttgctcctggcatgaacttccgggtcgcttctggcacacaagaacttatgtcgtttggcggccgtgacgtgaacttctggggcgacgtcaaatcctccatgagcgtacgggcgcaaggagtcatggtcaacgatgcttacgcctcgggtagcttccacgcgactggatcgggcggtgtgtactgggaccaatggggcggcggttggtacatgggcgatccatggtggatccgggcgaccaatgataagaacatctacacgggtggcgaggtgcaggctggcgtagtccggtctaacggtcagctgattgccaatggccgtgcgacattcaacgagtacgttcaactcaatggcggcgccgcggttggagccggctgcagtcccaacggcctgattgggcgggatggctcgggcaagattctctcctgcaccgatggggtttggcgcggcggtggcttcagcaccttcgttgttgaaggtgcaccgtcaagttgcttcggccctactacatcttctttcgcgtactgcccagatggaagcacgctcataagcggcggttcgatgtggctgtctacctgccggctgcataacgagcagtaccgctttaccactatggatcggcctgttggaaatgcttgggaggctcgaatcgaagaatcgtccgccaaggcctatgccatctgtgcgcgctga

SEQ ID NO: 516952 - DNA, 966 bp, Stenotrophomonas maltophilia
atggcttcgcggttgaatgagctgtccttcgtagggctcgttatcggcgagcgttacgctgatatgaaaaccgcccccggcaccggcgcgtctcgcgtgccggtaccggatgagtgcctggaggagattgagcagatccgtgcgatgtgcagggacgtctttgagcgccatcaggacccggagttcacgattgagcatgacggcgcaatgtaccgcgtcaccatcatgacggcgctggacatgacggacgtgctgttccttcgcgccattcgcgctcagatccgtcccattgaggccatcccattgtcagaggcccagcgctcaattctgctgggccgtgacacgcgtggactcatcatcgtttctggtgacatggcagcaggtaagagcagcactgcagcgtcgattctagtggctcgtttgaggggctttggaagcgacgccgtagcgattgaagatccacccgaagcagtcttgcacggcctacacggcgaggggcgctgcttccagattcctgcctcccgtcggcacgggagctatcgggagcagctgaggcgggcccttcgtaccggcgtcagtgcgcttctgatcggcgaaatccgcgacgaggacaccgcggtcgaggcgattcgccagagcaacgctgggctgttcgtcgtaaccacgatgcattccaagacgccgatcgaggcagtgaagcgactggtagaccttgcatcgcacggggacagcggcaaagcagccgcgatgctcgcgacagggctgacctccgtaattcaccagagtctgcatagagtccagttgccgaatggaacaccgactggtggcgtgcgcgtgcgcctctcgtcgctgctggtgtccgggcagctggagtccggcatccgcaccaagatccgcgaaatgaagttcgacatgctcacgcaagacattgatgcgcagaacaaggaccaggtatggaaccagtaa

SEQ ID NO: 516953 - DNA, 564 bp, Stenotrophomonas maltophilia
atgaagatgaagcccacccttgccgcccgccgctcgcggggttctctgttgattggcgccagtcggcagcagggcgcgacagtgctggaaatcatggcctggatggcgatcgccgcactgatcattggcggcgccatcgccggaattgcgtcaggctggagcagctataaggagagcaaagaaggcgatcacgtcacttcgctgatcgccaatacaaagaagctgcaggcggtcagtggctacggagcttccggaaccaatcttgttccgtccctcattgctactaatggcgtcccaggtgacatgacagtctcgggcaacacgctgaccaaccggtatggcggcaccatcactgttgtgtcgaccggcctcggttataccgttactacccccggcttgccggcgaacgcatgtattgcagttgctaagagcgttagctctgcgggtggtgtaaccacgaagatcaatagcggctcggcttcgactaccccagtcgataccgtaactgcgactgcggcgtgcacctcggcgaccaactcgttggccttcaccctggcgaattga

SEQ ID NO: 516954 - DNA, 1077 bp, Stenotrophomonas maltophilia
atggtattgcttagccccgcgctgtcggacaagttggttcgcctacaggtaaccacatcggtgcgtgcgcagctgtacgaagagatctcggcgatgatccagaacggcaagtcgctcaacgagacgttgagcaaggcctatgaggtgacttgccagtacggtgccggcgcagggtccgcacgcgcgcagttcatctatgagctaaagcaggctgcagctgctggcaagaaattctccggcgctttgaagcgctgggcgccccccatggaaacaaccctgattgctgttggcgaggggaccggcgacctggtaaaggcattcgagaatgtgcgcttcatgcatgactctgagggcgagattgccagcaccttcgtgaccaaggtgccctaccccgttgcgctcttcgtggcaacggttggcatgctctggatgcttgccgatcagcaggttccacagatgttggccattgcgccccaagaggcttggacggggcctgctggactaatgattcatctcgcccaggcgacgcaggcgtacagcatcccagttggcgcggcaattgttctgggggtcatcgctattgctgtgtctttgccccgttggacaggttcattgaggcaccgctttgatcgctttggaccttgggccgtgtatcggcgagtccaaggagctcagtttcttctgtcctacgcaacactcgtcaacgccggcgtgagccaagaccgagcgcttgagcagctcattggggaggcctcgccatacctgcatgaacgactgagcgctgcacggcttggcattgcccggggccggagctttggcgaggctttgcgcaaagcggagtacgactttccagatcctgaggctaacgcctacatcgagatgatgtcggacctggatgggtttgcgccggcgcttctcgactactcgaagcgctggatgaagcgaacggtgaggcgtatcggagccgtcctcaacgtcttctttttcgcgagcatcttgggcgtcgcatccatcgctgctctaaccgcagtgtccagctaccagatgacggaggtggccaagaggatacagcactga

SEQ ID NO: 516955 - DNA, 1596 bp, Stenotrophomonas maltophilia
atggactctcccggctacctgagcgggagccgggccgttgctgcagacggcaccgacgccccgcatatgaacatccaatcggaccttggtattcgcagacgtgcggctctgacgctgagccacgaaggcggccagtacccggccaacacgctcctgcgcgacaagctttgccttctggacgacggacagcttcatctccgaaaggggaccaggctggaccccgacgtgatggcctacatccagcgtttggaaatggctggggtccgctacacggagcacgataccgatcttgctggactccggcagctgtatggcatcgcgaccgctgccgcgggctctcgggccgctggcgccggatcagaccgccagaaggagatcgtggccctaattcaacaggctgtgcgtctcgacgcgagtgatctttacatcgtcacgcacgatgacaagggattcatccgagctcgtatcaacgggctcgtgcagacgctcgacaccattccggctagcgacagccttgaacttgcaacttcgctctacgcaagcatgtgcgatcagagcgagcaggtatttcaggttcataagccccaagatgcgcggctgaagtcggcgttcctgggccctgctggcctctacggtgcgcgcgtttccaccatgccccgatcgccagggcattcgctggtgatgcgtcttctctacaactccagcaaccgcccgaagtcgctcggagccatgggctatctaccggagcaagccgggttcttccagcgcctgaccgacagcaagacgggggtatacatcttctctggtccaaccggttcggggaagtcgacctcgttgcaggtctgctgcgaggagctcatgagcaaggctaacaatcaagcccatgggatcaccctggaggacccaaccgagtatgagatccagggctggacacaggttccttgcccgcgcggcgcagatctccgcgccgattggataacgggtattcgccacatgatgcgacacgatccggactactcgatgatcggtgaaatgcgtgaccgcgaatcgatggaggccgtgatggagatctgccttactggccatctctcgctcaccacggtgcacgccaacgatgccgttgcttgcttgcagcgcatcaaaaataagggtgtcagccgcgacctgttcgccgatccaggcctgatccggggtctcgtgaaccagaagctggtgcccgtgctctgcgagcactgccgtatcccgtgggccaagatcgaagcttcagtaccacaactgcagagggatcggatcaatcgccactgccataccaaggcggtgttcgtgaaagggccaggctgcagccggtgtaaagggggcgtgacaggccgcctagttattgccgaatgcatagagaccagcaccaggaatctcgccgtatttgcggacgaaggccgcgtcgcggcgcgccgattcatgaagcaagagcagaacttcattacccgcacggagtcgctcattcgcgcggtcaatgatggccgggtctgccctctcgtgggcgaacaccacgtgaacccgctggatgaggataaggagcttcacgatggtattgcttag

SEQ ID NO: 516956 - DNA, 507 bp, Stenotrophomonas maltophilia
atggccggtaacaagactcgcgcactgttggttggcgcgacacttctgattgcattccacgccggcgcatccgattcgagcgcgccgcccagcgccgctaggttggcagatctgcaggcgcagctcgtcattgctagggcggaggccgcacttgcggagcagcgccgtaaggccaccggcgacacgtcaacggtcgacctggcagtacaggcgacaggcagtgctctgcctgtggtttcgggcgtgtacggacgcgacaagaatctctacgccacgttgttgtactccaatggcttggaatggcaggccatcgcaggcaccagcgcgcccggcggctaccgcgtgcattctgtgtcgcagaaccgcgtcgagctggtgaaggaaggccgcacgttcgtgctgggcttctcgggctcgccgccggccgagccgacgccggcaccggcagcgcagccagcaggtggcccggctccctatttgccgctgcctggacaggtgaggaactga

SEQ ID NO: 516957 - DNA, 1392 bp, Stenotrophomonas maltophilia
atgttcgccaggaagaagaacagcattccgccacttggagccgccgcgaaggccagcgcaagtggtggatcagacgtcggcgtaaataccctcattgtccacggccggaagctcgtcggcggcctgctgtgggagccgctggagagctaccggaactacatggctgaggcgaagcgcatcggcaagcagcgcaagatggacatggttgcaatccggaaatcggattcagccatccaggctggattcgcgcctcgcacgaaggagcgtctcaagggccactactcgttggccgccaccctcgccggttcgctaggtgaaagctggatgggggcgttcgagcttgaggacggtcgctacgcgcttgtgaccgttatcgacggaatagtgctcccaggccaggacatcatcggcgatcgagagcggatctctgcggagctcaacaagacgtactcgttggtgacagctgatccggtgaaggctgcgaagcttgagggcaagatcatcgcgcccgcgtcgttcaacttcagcaacgacaatcgtgccgtcgcggagattattgggcccgattcgttcagaaaggagtatctgctacgtcagctcaccctagggctgactgcgcagcagatcgcgcttggcggtgtggctgctgcagccgtggttgcagcaggtgcgggtgtcctctactggatggagaagcgggagcaagctgagagagaggcgctggcactggcccaggccaccgagcaaaagcggcttgagctcgaggccgcacgcgccataccgcagccgtggacctcccaacccgacgcgcggaagcttctgggagccgcagcaatggtgcttgaggacgctccgcttagcatcgcggggtggtcgtacgcagagtccgcttgcgactcacagcagtgcgcactgatctaccgccgcgccccagggggaacatccatcggcgcatttctctccgccggtgctgctgcgggcgggaagcggctggatgacggtaccggggtgatctactcgaagctggagctggcgcccgagaagggtgacctgctcagccccatcgctgagcgtgaatactcgtttgtcaactatttccaggcattcggaccatacgtgtctacctcaatcacagcggccgcagcagtggctccagcggattcaggggcaccgaaaccgacctggctcaaacgcgagttcaccattgggaccgcttttcctccagagctgctgctggaagggctggataccaccgggctgcgcattaccaagattgtcgcgttcgtaccgagtaccgaaaccgccaacagtagcgagcgtccccaaacccaattcgattgcagcagcgagctgatctgctggaacattcaaggagagctgtatggccggtaa

SEQ ID NO: 516958 - DNA, 1704 bp, Stenotrophomonas maltophilia
atgcgcccacttctaatagcgctcgctatcacgatggtagccggctgtgcgagcacgcagtcgagatccgcacttcaggagatcaaagaagcacgtagccaggtggacgatgcgctggccgcgttgcggcagggcaaccaggagcgcgactccagcaacatccgtgtagtcgaggatgagatgttcgcaccgccggagcccatgctgctgaacgcagataaggaacttcctggcggatgcgaaatcacctatgcccctcgctttgggatgagtatcaaggcgttcggccagtacgtcacgcggacgtgcggtattcccgtgctggtcacgcaggacgctatgactgcaacagcaggcggaggtacgcactcacaggctggtgcagctttgcccgccggcccagcgccaagccccacatctgcctttgcttccgcaggaatcccgttgcctgccggcatcagcctgcccgcacccgtaacgggcggggcgccgctgcagctatcgggcggcatgggcggcgatctggtagacgtgagctacaagggccagctttccgggcttcttgacgccgcaacggcaaggctgggcctttcctggcgataccgctccgggcggatcacgattttctttaccgaaacgcggttctataaggtttacgcgctgccaaaggcgcaaaccatcaaatcgaccaccagttccggcagtacgatgaccgctggcgtctcgacgactggcatcggcggtggcagcactaccagcaccggtgccggtagcgacgcctccaccagcagcatcacgactgcagatgagatctcgattgacccgagcaaggacgtgcgcgaggcggtgcagagcctcctgacgccaggaattggccgcatgtccttcgcgccatcaacgggcactatcaccgttacggataccccggatcgcctgcagattgttgaggattgggttgcctcagagaacaacttccgcaccaagtttgttctcctgaacgtcgagctcatcacggtaaagctcaacaacagcaatgagctcggtgtcgattggaatctggcgtacaagagcatcgccaaccagtacggcttggggctggttagctcttacaacgccgcttccaatgccattgccgggtccatcaacgtgctggagggcagttcgcgcttctccggtagtgaggcggtcatcaaggcgctggcccagcagggcgagatcgtcaacaagcgcacgcccagcaccagcacgctcaacatgaagtccgtctccgtgcaattgggcacccagaccggctacatccagcaggcctcgtcaactcagaccaccgatgttggcgtcacccaatctctgacgccggggcaggtcactgcgggcttcaacatgacgctcgtcccctacatccagccggataacaagaccgtgctgctgagcttggccatcaatatgaccgacctgatcggcttggagaaggtggacgagaagacgcccgttcagacgccgaatctcgccaagcaaatcgtgaaccaagaggtgaagctcaagtcgggtcagaccttggttctctccggcttggacacggtcaccctgcaggacacccgcagcggtgttggccgtccctggttcttcctgtttggcggcggcaagaagacaagccgcgagcgcgaagttctggtcgccctggtaacgccgatcgtcaaggaatag

SEQ ID NO: 516959 - DNA, 168 bp, Stenotrophomonas maltophilia
gtgccgcagtgggatgcggaaatcgactaccaggttcccggcaccttgagcttcgagggcgatttccttgacgccgtccggggtctcttcaaggcctatgcccgcgcgaagcggccgttgctggttgatgcgtatcccaaccagaaaatcatccacgtcacggagtaa

SEQ ID NO: 516960 - DNA, 1542 bp, Stenotrophomonas maltophilia
atgagccagggtctcccgaactgtgctgccggggttggcgacccatgttggcttcggcggcgctgctggctttgcacttggcgtctgcggcggggaatcggcaggtgccgcggtgggcgccgtcttctcttgcgggtggctcgaagccaatgccgccgcgcctgtcggggcggcggagggcgaagaggtatcgccagacacgactgtgctgtctggcgacgtagatgccgggcggggctttgcttcagtcgccggctgaaccgccaagcttgccgttggggacggagcggagcttggcgctacagaagcagttggcagggcagggggcaggggaggcgcgggtttcgcttgctggggcgccggttcagaagcaagggcaacggccgatacctggtgctgcctagcagtttcgccagctggtttcgcgttgacgcgctccaaccagagggccaaatcctggttcatcggccgcagatgacggtcagacattgcaggcgtccgagccacgcctgcgccggtggcgcatccagagagcagcagcccgaagaccgctacacccgcccatctttcggaaaaactgctcactttttccccattgtttgccaacttttcggcaatggtatacatttcctgcgctgttgcaagcatccatacagtccagcagagccagcagggggcgcattgaaacgcgaggggccaatcaggggagtggcgaagtacgcgatgttgatcgcgtgcacctgcgtacccgccttcgcaacggcggcgggtgagacgttcgaggagctggcggctcagtgcgcaccggggatccacccccaaaccctggcggccgtggtcggccacgaatcgaatttcgacccgctcgccatcggcgttaagggcgtcagcgtcaaggtgcgtacgctcgaagaagcagttggctccgcatcgcgcctgattgcagagggcagatctgtggacatggggctcggccagatcaacgccgcaaatctcaggcggctggggctgaccgttcgggaggtcttcgacccatgcatcaacctggctgcagcagcgcgcatcctcacggagaactatcaagaggcgaggaagcagctcagtgacgagcaagctgcgctcaacgccgccctcagccagtacaacactggcaatcgcgtttccgggctgaagaatggatatgtggcgaaggtgaggaagcaggccggcctgcctccgcccatcgttccatcgccactggtggttgccacgcccctgacttcaaacacagccgcagaatcgggccacgcaaatccctacgccgcgttcggggccgagaatcaggccaaatacgacgccttctctagtccgcgcgcgaccgcaatcccccacgacaggggcgttcaagacgcgcctctccgcgcaattccccaaaccgcgaccgcaatcccccccactgacagaacagtggccagccaggcgcgtctgcaggcgactggcagggcggacaacggaaacctaagcagcacaaggctttcggacgtagaagggaaccggcagtga

SEQ ID NO: 516961 - DNA, 420 bp, Stenotrophomonas maltophilia
gtgacggttcccgagcagcagggcaccaggcatgcggcgttggcggcgatagagcgcagccaactaacgggcgtcaccttaaactacagggagccctacccctgttcaggtgacattttgaagcccaagcccatcactgaacccctgctgatctcctacatggatcatggcgccgtgaccggcatcacgatcaaggagacggacgaaggattcaaggtcttggtgtcggtcacctttgacgaccaagcggtgtacgagctccagacgcaacggtcgaacaagccgaagctctggagcagcctgaaccgcctcgtccagcaactcggccggtatccaagccttccacccatcaagttggaagtgaggactaccaaacgtgaaaccgtcaaagcaaagaagcgcgcacccaaaaaagcgtga

SEQ ID NO: 516962 - DNA, 930 bp, Stenotrophomonas maltophilia
gtgaaaccgtcaaagcaaagaagcgcgcacccaaaaaagcgtgacgcgtcacggtggcttgctgcggccggactgagccttctggccgccggccacctcggagcagccgaaccggcatcgacccagccgccgcctgcagcaaccccgccgcacatcgtcaccgtgcagcgtgattcgcgcttgcgcgagatcgattacaaccccgatcaggtaatcgacataaccgcccacgtgggctacttcgtacacctggtcttcgcgccaggagaggagccggtgcatgggggcgtggtgttgggtgacagcgatgcatggagcttttccgtcgctggcaacaacctgttcctcaaacccaagaacacggatggcaacacgaatctgactgttgttaccaacgtcgggcgtacatacacgttcatcctgctgtacgcgcagcgccgcccgacagatagacagctcggtaccgcgctgaatcttcgttacaagttccgatacccagcggaagaactcgcagctgccaagcgagcagcggagaagcccgaatcagtgcagatctcggagcgtctagcgcgcccggagcgcgagatcaggaatattgagtatttcgcatgtggcagcgacgaggtgaatcctgacgtcatcttcgatgacggccgatttacttacatgagattcctcgctaatcgcgagctgcccgcaattttcactgtcgcggatgacggatcggaagtcctggcaaactcaagaacggccgctgacgatcccgagacaataattgtgcaacgcgttgcaaagcgctttgttttccgacgtggccagacggtggggtgcgcagtcaacaaaggcttcagtccccacggcccagcgctgcagacgggaacgatcgatgagggcgtacagcgcgttgtaaagggcgcacagaccccataa

SEQ ID NO: 516963 - DNA, 669 bp, Stenotrophomonas maltophilia
atgagaattgcggccaccgaggcgggcgacgcctgcgaccaaaccaatgctgcgcacaatccaacgggcgtgagcttgttcgaaaatcagttcttcagcatcacgagccgcagaggcacgctccagatcaaagcgctgggagtagctggaaatcacggtgaggtagccatcacaccggcgacagtggaacagatttttgaggctgtcagctctccagcgataagcgaggtgagagcgcttatcagagatccctggggcatcgggccggaaaggccttgtctctaccggaatgatctgatcgggtggccggatgatgacgacgggtatcagcatcccattcagtcgacggagccatgccagctgtaccttgaggcaaccttccctgggcgtggccgaatctacttcggggaagtccaccaagaggcggcgcagatcgcaagcttcctgtcgatgaggaatcccctgatcgatctactcacggcaaggaaaagtccgcaggcgagggcagcggcggaacaacgggccagagcaatcagcgctgctgccgtgcgaagtttcctgccttccagcggattctgttggacatgcgaccaggacgttacgccctaccttgtcgatgagacgcacattaccagctgcccattgtgctggcggtcctgggatgactaa

SEQ ID NO: 516964 - DNA, 477 bp, Stenotrophomonas maltophilia
atgcacatcgtccttaccgaaagccaggctcgccagcgacggatcatcattccacttgtcgcgtacaccgcaatcgcagccattggcatttcgggagcactctactggtttaagctccttggacagggcagcgcaattgcagcaaccgccgctgctgtattcgccctcttctgtgcaatcgtacttttccttatcgcgtcaatcgcgagaatcgaccacacactcgcgagcagctacgacgttgagcatgtcctggcaatgctggaaaccggtgtgcctaaccttgaaaccattgccaatgcaatgcggaacggaactcggctagcgcacagggacgtggtattcgcccgccgcatggaatctaaatggaagcggagcaaggagcaggaggcacaatccaaggcgacgagcgccctatgcgtcaagcagctagacgccgcgagccgctatctggacgagcgccaccagctccgttga

SEQ ID NO: 516965 - DNA, 312 bp, Stenotrophomonas maltophilia
atgagccagatcaaagcatccaatgaggtctccgccgccgaccaagacacgccctgggtgcgtgcgtacgagcgaatctggcccgatcctgtggccgacgaggatccgcggcgcgcccaaattgcccaggagatgcgtgaactgcgtgctgcgacgactcttgccgaagggctgcaggccatcggctggtggtacaaccacagcggcttcaatgaaggagtccgtaatgccgaagtcagagacgccatgcgccggctacgtcgctcaaagcgtctctcgggcctcgcgggccaggtggacactaacaattga

SEQ ID NO: 516966 - DNA, 207 bp, Stenotrophomonas maltophilia
atgcgaattccttcagtaggccgtgagggccccccttcgatcatcatctcttacacagcggtgattctgagcccgttcgcgatcgccacagtcggctaccttctgtatgagaagaagtggctccaggccgcagccctgctcctggccactgcaggattcgtgtactccgcggtgcgcaatatcaagcgccggcgccaagatccgtaa

SEQ ID NO: 516967 - DNA, 321 bp, Stenotrophomonas maltophilia
atgaacaccagcgccgccgtatctgaagagcccatcagcattgctgctgccgcgacgttctacctcggcgccgttgccgcactggccctgctcatagcggtcagctttggcgctccctgggtgccaatctggctcttgccgttcatatacctggtggccggctgcgtcctcaatcgagtcgtcctccgccgcctggtggagttccacccgctctacaacacggtgggtgtggtcgccaagacaaagctcgtgtatgtcattttctggccgattgcctacgcatacctgctcgtgatgctgctcatcgatcgcgttctgtaa

SEQ ID NO: 516968 - DNA, 384 bp, Stenotrophomonas maltophilia
atggcagcagcagcaatcaagccgctcaagatgtacgccgtagcgggaaaacttcgcgagcacaaccgcatctatgaggctgagctgacgcagctgctgcagcagaaagcgatccgccaactcgtcatcacctgccaccaggacgacagcttttcgctggccgtgctggcagatcatcgcgccgattacgcctatcggccgtatgaacgagtcgacagcaaggtagtaaagctgcggcgcgtgagcatcgagcaggaggggtttgcccccctgttctcggtacgcaaccaggccctccggaagtaccgcagcctggacacccttgtgggtgccctgaagcgctgtggccagctgccgcccatctatctccgccaaggaaaatga

SEQ ID NO: 516969 - DNA, 342 bp, Stenotrophomonas maltophilia
atgaacatcgctgcaagctctgcattgccgcagccgacgctgctgaagctgggggcccttctgaaggcctacgctccgatcatcatcatggccgctgttctggccgtactgatgctgtacccggaccccgcgtttgccgacgccaaggccaaggttgccgagaatggcaagaagggcttcgatctgttcctcgaatgggcacagtacgcggccggcgcaattatcattggcatcggcctgatgacggcagctggccgcgtcgagctgaagaccttcggcttcgctgccctgggttgcggcatcgtgttcagcgcggccgtcatcgtcgaatacttccgctaa

SEQ ID NO: 516970 - DNA, 345 bp, Stenotrophomonas maltophilia
atgagcagccagagggacaacggttccgaggccggagcgggtcttcgagaagacccgctttttgctgccctgacgcggccctcgacagtcttcggcatcactgtcgacgtgttcgccttcatcgtgacatttgaaatggcgttgttcatgttcaccaagaacgtgaccgtcttcgcttcaggcctcgcgctctacggaattgcccgcgcaatgtcggcaaaagatccgagattcttccgctactacctgcttgccctgcagaccaagtggcggggtcagactcgtaggcgctggggcggaagttcctactccacccaccccacacgtaagcggagcaagccatga

SEQ ID NO: 516971 - DNA, 2427 bp, Stenotrophomonas maltophilia
atgattcgcgcattgaacgccttgctccaggaggaaaagagcgtagaagagatggtgccctacaccatccatgtgacgccgcacaatatacgcaccagtgcgggtgacatgctcacgattatcaaggtcgatggcctgtcgcatcagacggccaacgtcgaagaccttcagttgtggcatgaccagctcaacaacctcttcaagaacatcgcagatccgcaggttgcactgtggaggaccacaattcggcgcaagcaggcgatgtatcctggcggcgaatttccgccgggcttcgcgcacgatctgaaccagcactaccgcgaagtaatgagcaaggagacgatgatggtcaacgaccattacctgacccttattctgcgtggtgaaccaaagttggccagcctgttccgcagccccaagcgcacccaagcggaggtcgacaaagagctcaacgagcgctcggccgctctggatgaacttgcgcagaccgttaccgccgcgctgtcagactacaaccccaagaggcttgggttctacgatcgtcgcgttgcgaacataggcctgtcccctgaccggccgcacagcgctcctgcagagttcctgtcattcctcctcaatggcgaatggacaccggtgccggtcccaaggcgccgcctgtcggcgattctccccatcgcccgccccaccttcggcgtggacacggggcagctgcgcggagctactgatacccagctattcgccatcctgggcgtcaatgagtatccggagacaacggtggccggggacctgaacgagctgatggccctgccgttcgagatcgtcacgactcaaagcatgtctttctttgaaaggcagaagtcgcttgaaatgatgaagtctcagcagcgcaagctccgcaatgctggagacgcggcccggagccaggtagaggagctggacgacgccatggacgatctcgcgtcaggccgcatcacgtatggtgaccatcacctcagtgtcatggtcaaggcccccaacgacgaggagcttgcaaagagagtagcgaagctgcgcagcgcgctcaccaattctggcttcatcgtggcccgcgaggacgttacgaatgaagccgcctactgggctcagctgccgggcaattttaagtggcgccccaggacaggtcttatctcttctaggaatgcggcagggctgatggccatgcacaactttcctcaaggcaaggccgaccggaaccagtggggccctgccctggcactgctcaaaacgacttcagggacgccctacttcttcaacttccatcttccgatcaaggggaagcgcgaggacggcaaggaatcggatgacgaacgggtggcgggcaataccctgctggtaggccccacgggcgctggcaagacggtcgtccagacgttcctcgtcgctatggccgagaagtactctccgaccgttttcaccttcgacaaggactacggccaggagaatttcattcggggtatgggcggcgtctacagcgtgatccgcaagggtgaggacacgggcttcaacccgctgatgcttccaccaacgccccgaaacgtgctgttcgttgacaacctggtccagtcgctggtccgtcgcgctggagagaccctcacggccgacgccgaatatcaaatcacgcaagccgtcaccgcagtgatgaacatgccgcgcatggccatgaagcggtttgaaacactgcggtccttcttcccggagaccgtggacggcgtcaacgtgcgcctgaagaagtggtgtgccggcgagtcgctgggctgggctctggattgcgccaccgacacgctcagtaccgagggcaacaggtacttcggttttgatatgaccgaggtgctggatgatgggcaagtgcgatcgccgatcatcatgtacctgttccatcgcatggaagacatgatccagggccagcccttcatcatgaacatggatgaattctggaaaatgcttgacgacattgatgctgaaaagaaagcgaacgatgtggtcaagaccatccgaaagcgcaacggcctgggcctactcggcacgcagagccccaaggacgtcttgaagtcccggatcgcacactcgttgatagagcaatgcgtcaccaagatcttcctgcctgcacctatggcagaggaggctgactacatcggtggtttcaagctgacccagcgcgaattcgagtgcgtgaagtacgacatgccaatcgcgaagctgcgtggcttcctggtcaaacagggcatgaccagcgcagtgtgcgagctcaacctggcagggtttgatgatgaattggccgtgctgtccggcaccacggcctcggtcgatgcctgtcgtcgcgcgatcgcgaaggctggtaatgatccgcagaagtggctgccggtattccatcaactgaggaaggaatga

SEQ ID NO: 516972 - DNA, 654 bp, Stenotrophomonas maltophilia
atgatgaacagagcaaagagcacggcagctggaatcctgctggccgcaagcatggcagcagtcggatctgcacaggcgatgacggtgttcgatccgtcgaacttcgcgcagaacatcatgcaggttcagcagatgatccagcagatgaagaagctcaacaaccagctggccgaagcccagaagcagtcgagggaagctgtcgcccagaccgcggccatgacgggcacccggggaatggagcgaatcgtcacggaggcaacccgcaacaaccccgaactcaataagctgtcgtccgagatcgcgaagcaggcccagctgttgagcaagcaggacctggggtccatcaactccgcctacggtgacatggttgacaagcgaggcaagaacgctgacgccggcatggccgcaagtgcgcaggtgttcgccaacgccaacgagcggttcaccaatctgcagcgcctggtcaacagcattggcaccgctacggacgacaaggccatccaggacctgcaggcgcgaatccaagccgaacaggtcatgctgcagaatgaggccatccgcgcgcaggccatgaatgggcttctgatgcagcagaaggaacaggaactgcagctgcagcgtcgcaaggtgctcagcgagaggttcacgctgtga

SEQ ID NO: 516973 - DNA, 387 bp, Stenotrophomonas maltophilia
gtgaccgcgcgtgacactggcatgaaggccggccgcagcgcatggccaattgcgggcggcacgcgtgccttggtggcatcggccattctcgccggcgcaatccttaccggctgcgccggcccgggctcggcggatgaggatctccgcacggcaaagcacactgtcgaggaataccggaaagtcccggagctgcgcgaagcaaccctgaacgcgtgcagatccactagcgcgccctcgatggccgagcttcaccagcagtatcccgcatgcgaacgcgcgttcgaggcgcacaagctgctgatggatgaagcgatgagcgatgccattcgcacatccaatcagcgcgaactcgaacggcgcggcgctgccaagaagcccaaggagtga

SEQ ID NO: 516974 - DNA, 1062 bp, Stenotrophomonas maltophilia
atgatctcggctgcagtcaacaacccaatggtgtttcagttcctctttgaggacgcgctcgctgccatgaacaacttcgccagcaacgggtcggcaaaaatggcgaccattgcggctgcagccgggattcccatgatgggcatctacgtgatgctctacggcttcggaattctcagcgggaaagtccataccccggtcagtgagggcttggagcgcctcttcaagatgaccctcatctttacctttgctacttccgccggcgtctacaacgaatacgtcatcgacttcttcagccaagtccctggcgcgattggctctgagcttgcccaagagggcatgagcaaggagttctccatgtcggacaccaacagtacagcgcagatgctcgatggcgcgttgggggctgggctgaaggccgggcaggcggcatggaacatgaatgccgggctcgatattccagcggcggttggctacgcaatcatcgctattgcgatctggacattcgtcggcctggtgtgcgcgttcggcggcgccttggttctatgcgcgaacatgggtctgaacatcatgctggccatcggaccgctgttcatcatcctggcgatgttcaaggccacagcccagcttttcgtagcttggacgcgacagctcatcactttcggcgtcttcttcatcgtgatagcggcagcggtgaccctcacgttcgcgttcttcagtcccttcgttacacagctgggcgaagccaccaatgaaggtggcgcgactggaacctccatgatcgtggtgagctttatcaagctgctgtgcttctgcgccaccgcaattctctgcctggtgcaatccatatcctgggcttccggcctggctggcggcgtcggagtagcggctgacgggcacctgcgcagaatgatgggttcggccatctcggccgcaggcggacctgtagctgcagcgggcggcgccgcaatcaaggcgattcggaatcgggagtcttcgggcggatctatccgcaacactggcaagtcgcaggcctacctgcgtggcacgtccaagcgcgtttga

SEQ ID NO: 516975 - DNA, 690 bp, Stenotrophomonas maltophilia
atgatcgataccaacaacgacgaatacttgaaggcggcgagagagttcgagatcgaccgtgaatcgagctctgagaagaacagacgcgtcgcatggacggtagcggcgatcgcgatcgcgatcgccctggcctgcatcgtgtcgattacggtaatgctgccgctgaagaccattgagaccgtcgtcatccgcgtggacaagtccactggttatgcggacgtcattcagaagggggacgaccccgccgcgatgccgcaggaatcggaacacaaattctggctcgctacctacgtgaatgctcgtgaggaatacagcgacgctcagggctttgcgaactaccgtcgcgttgggctcatgtccacacctgaagaacaggtgcgctacttccccaccatggacccggacagccccaaaagcatgttgaacgtgttcgggactcatggacgggtggaagtgaagattcttagcatcgcgctcccggatgaaggggttgcgaccgtgcgcttccgcaagatcgagaagatgcagggggcgccgcgggagagccagtggattgccacgatcagttacagctatgaggggttgccgacggacgcggcagatcgcctcctcaaccctcgcggtttcatggtgagcgagtaccggatcgatcctgagagcagcacgatggctttcgggggggaccgctga

SEQ ID NO: 516976 - DNA, 1347 bp, Stenotrophomonas maltophilia
atggccaagaaggaagcccaggcgcccaccgaaggcgtgagcgaagtcgaggagatctcgcccaagcgcggaattccaagcctgaacgccggtggcaaaggctcgatgccggctgcagtcaagctggtggtgggttgcgctgtgattctagccatcctcggcgttgtcgctaccgtcgcctttcaaaaggccaagcagtctcgtgacgagagggcaacggaaaaggcagaggccacaaaggccacgtcagagtcgaaactgaggcagctgagcgagagcgacttcgagaagccgccgctgcccccagctgcaggcggcgagcttaacgatcagcaggcgccgcaggcgacagccgacgcgagcggcgccacgggcgctcagtatgcgtcggctgcaggccagccagctgacgggacggccacaagttccggccagtacgccgtgcctgcaatgtctccccaggagcagtacgcagaagccctgaaagcgcgcaggttggcgccggctctcggcgcatccatggcgccaacggccggccaggacaggcccgccgccggcgcagttagcgccctgcccggccagctgccaacggacggaagcgacctcgatgcagcgatggcggaggcgcttcgcgcgtctacccgggggatcggtcagggaggggctgcgggtgaccagcagcagtccactcgcaacagcctggaggattcacttcgcgcagtgaaccccacgctgagcatcgccgctcagctatcggacccgtcaatgaccatcagccagggcacgatcctgccatgctccctggacacggcgatcaacagccagctgcccggaatggtcaagtgcacgctgagcctgcccgtctacagcactgattcacgcgttgtcctgctcgatcgcggaacgaccctcattggccagtatcagggtggtcagatgaagcagggcatgagccgcattttcgtgctttggacgcgtgcagagactccgcagcacgtgatcgtacaactggactctcctggtaccgatggactcggccgttctggcattggcggcaaggtcaacaaccatttctggcagagattcggtgccgggatggtactgagcgtggtcaacgacagcctcacctatgcgacgcagcagcgcagcaatcgcggtggcgacacgcagaacttccagttcggctccaccagcgagacagctaaggatgctgcagccatcgcggtggagaactcggtgaacattccgccgactcagtcaaccgctcaaggcagcaccatcaacgtgttcattgcgcgcgacctgtacttcggaggtgtctatggactccgcctcgcaaaccagtga

SEQ ID NO: 516977 - DNA, 1071 bp, Stenotrophomonas maltophilia
atggactccgcctcgcaaaccagtgaccccctaccccacggcgaaagcagcggcgcctccggcgccgctgcgcgctttgcggccctggagctgtacctgagtcctgtcagggcgttcatgtcagcagaagtgacggaggtctgtatcaatgcaccaaagcaaatatggaccgaaacccacgagggttggcgagtgcatgaggcgcccgagctggattacggcaccctgcagctactagcaaaacagtgcgctacgtcctcgggccaagacataagcgttgcctcgcccctgctttctgcagccttgccgacaggcgaacgcgttcaagtggtcattcccggggcaacttccgcaggccacgtgtctttcaccattcgcaagccgacgccgcgatccttcactatggatcagtatgaagaccagggcttcttcgagtcggtaaaggtcacgcacgggaagctgctggagcatgagatccgcatgctggagctgctcaacggcggcaactatcgcgagttcttgcagatggccgtgcagacgcggcagacgattgtggtttcgggagcaactggctctggcaagaccagtttcatgaagacgctggtcaacctgattcctgagcaggagcgccttatcacggttgaagacacacctgagctcacgattcagaaacagcccaaccatgtgcggctgttctactccaaaggcggcaccagcgcctcaaagctcaccgccatggatctcatcgaagcgacgatgcgcatgaagccggatcgcatcctgctggcggagattcgcgacgaggccgcgtactacttcatcgaggccgcgaacacgggccatcccggttcgatcacctcggtgcacgcaaatagcgagcgcgacgcgttctcccgcatagagacgctgatgcgcagagccgagccggcgcgaggcatgagcgatgcgcttctggccaagatagtaaggaacacggtcgatgtggtcgttcacgtcgggaaagtagcaggaaaacgccgaatcacaggaatctactatgacccagaaagcaagcattccctcgtgggttaa

SEQ ID NO: 516978 - DNA, 1992 bp, Stenotrophomonas maltophilia
atgacccagaaagcaagcattccctcgtgggttaagtggcccatcatctgcgccggcggcgcagcgatgttgttcatctggattgccctggcctcgaagatcttcgtagcggttctgttcaagggtgacgccccgttcaaggccgagacgttcacgatcattgagtacctcatcgcgtactaccagcagcgcaaggttgtgaccatcgccgtgttctccctggccgcctccggcttggtgagcatcgctttccctttgttggtcatggttcccaagcagcgcaagctccacggtgaagcgcgcttcgcgtcgaaggccgagatttccaagatgggcttgaatagtggagacggcctggtcatgggaaaagcccacggggaatacctgaccagccccggccagcaccacgtgatgcttgccgcccctacgggcgccggcaagggtgtaggtgctgtgatccccgtcctgttgacctgggatcactcggccattgtcctggacgtgaagaaggagaacttccgcctgacctcgaagttccgcgaatcctgtggccaccaggtgtatttgttcgaccccggttcctccgatcgcaggacccatcgctggaaccctctcgggtatgtccgggaggctcacgcagaccgcgtagacgacattcagaagatcggcgaaaagatctatccggacgtagacggcactgaccccatctggagcggtggctgccgaggcctcttccttggcatcacgctctacctgttcgagactgaaggccgcttgcgcaccatgggccaggtcacgcgtgaggtttacggcctggacgacgacaagctgcttgcgcaactcgacagccggggcaagagcggtaagccctactccaccgaatgcgagctttcgctcagggactacctcaaggcaccagacaagactcgcgagtcaattcgcaagaccttcacctcgcggctcgaactgttcatgaatccgaacatcgatgcggcgacctcggccaacgatttcgatctgcaggcactgcggaaagagcggatcaccatctatctcggtgtcacgcccgacaatcttgatcggatgcgccccctcttgtccctgttcttccaacaagtcctcgatctgcacacgcgcgagctgcctgagcacaatcccgccctgaagcaccaactgttgttgcttatggatgagttcgtggctatgggcaagatgccgaccctgctcggcagcatcgcctacatccgcggctacaacatccgcctgatgcccattttccaatcgccctcccaagtggaagcgctgtacgggagagccggcgccttgggcttcttccagaaccacacctgcaggatgatgtttgagcctgcggactatgaaaccgccgaagcactgtccaaggaacttggaacggagacagtaacaaaatggtccaagtcgaagccgttgctcttgggcaagggaggcggatcgcaaagcgagagccaacaaggccgagccctgctaatggcccaagagctcaccaccatgggcaccaaagccatgattctgctgattcgtggccagcccccggtgaagtgccaaaagctcttctactacgatgaccacacgttccttgatcgcttgaagagcgttgccccgtctctcgctgccctcgacaacacctggtacaaccagctgctgagcaaggcagggatcggaccgattcgccgcaagccgaataagcagcaactggaccacgcgcagttcagcggcgagctgtccaatgagccagcccccgttcccctgccccagccaatgaagctggaccgcccatccgacaaacggccgatgcggaatgttgaactggcggaccttgacaatatagactcgttgccgctatcggacttcaacgtggatttctcacaggtcgaaatacctgacggggatctggacgaggatcagatagaggcgcttgccgatacggtctatcggcaaatgaacaaaaactaa

SEQ ID NO: 516979 - DNA, 696 bp, Stenotrophomonas maltophilia
gtgaccgaacaaagaaccgccagcgcgccgcgcaggccgcaactcgccttgaacgagatccgccgtaccgacgctcaggcttcagagaagccgagcttcatcatcccggcgagcgttgctccgtactaccacctggacggccgcgtgatgcggtccgctgcaaggccggacaagatcgaagtggttgatcgcggaagtcgcatgcacgcttaccgtcccgtctccgcctttaccatccgttccatggtccagatggctgaagcacggggcttccaggaaatcgccatcaccggcgacgctgccttccagagccgtgcatacattgaagccacggatcggaacattggggtgaaaggctacaccccgactgccaaggacatggaaatcctcaagaatcgcgcagaccggcgcgaggcgaaggagaatccgaaggtccaggccttcttggcggctaccgaaaagaagctgatgactgcggccgcgaagaagttcccggagctcaaggaagcattcgctgttcgggcggccaccgacaagcatgctgaaaccctgcagggcgacaaggcgcaggcgcagttccgcagcgcgatgaacgatcggatcgcgctggccctgcaccgcggcgaacccttgccggacgtgaagatcaggcaggaacctacgaaggccgccagcaaggacggccaggaacgctag

SEQ ID NO: 516980 - DNA, 1023 bp, Stenotrophomonas maltophilia
atgaccggcatgccctaccccatcgatggggtgcaggagggcgaccgtgccctgcttgcacaaatgaccagggaacagctgacgatcgccgctgcccaggtcaacctgcaccataaacagctccagcgatcgattctcggaatgggcgcagaccaggagctcctaaacaaacggagccttctctcgcgctcccaagccgagctggataagtcgctggccagcaatccgcagttggccaccccatttctccgcgtggaatcctggatcaagtctgcattggcaggcgacggctctgccctgcgagcactgcagggcgttgccggcgcaacgctcgccaaacaagcagaggttgagcttggcgaacgcccccaaatcaactctccaccggaaccattcgcaaatgccattgaaggcctcgggtcgagcgtcgcgacgcctgtggcgaagccgctgtaccaacaccactatcggcctgacggctcggtcgacaagagcagcgtccagtaccgcgcggagggacaacgcatcgagtcaaatttcgatgacggcgcaactgtagctgcgatgctggatctggctgcacggagcggctggacggccatcaaaactcgcggcagttccgtattccgacaggcggttttcatcgaagccatggcgcgcgggattcaggtattcgggtacaaccccaccaacgctgagttggctgagggcctgcagcgcgcagaggctcgcggcaacgccactgcggctcaccgctccccagaggcccaagccttcatcgaggcgcagtctcaggaggagcgcaagcgtaccgcagccacctaccccgagctcggcaaggcattcgttctgttggccagcgccgaaaaatgggccagctccgtgctccgcccgcaggacgctgccacctttacggaacgcatccgaaacaacatcgcgcaagacctggatagcggcatcacgttgcctgcaatccaactccgagaaacacagctggctgcccgcagcgcacaagcaaggtaa

SEQ ID NO: 516981 - DNA, 2100 bp, Stenotrophomonas maltophilia
atgagtactgaaaccaaccaaattaccgcgccggccactggcctgacggaaatcgatggcaaggccgcaacctctgtttcgtggtcgcgcgcggtcgatggcgagaaggtcagctacacgcttattttccgctccgggaccaagcagctggcccgactcaaggatctgaccgccgatcaggtcggcgccgccctcggcgacacgaacgcccgtaatacgcactactcgaccgaaagcaagggattgctcaagggcaaacagcttcactatgcgcaaggcatctcgccgcaattggccgcccagtacaaggacagccctgagaatgcggccgcgcaggtgtattcaactacaccacaggctgagcctgtcgcggaagaaacgaatgttgatttccgggacgacacacagaatgaacgagcaaaagagatcatggccagacagtctggcaacgatctacgcgcagacgccggcgaggaaacgtcgcgagcgagtgaggtcgatcagcctgcgcccgggatgacccgtctttatcacggtagtgccaccccagggcgttttgacggcgatgcgtggtactccactgacagagcgtatgccgagaactaccgccctggtgctgagttgcagtacgtggacatgcctaccgagtgggtgaattcccagttggaccccgacggctacggccagaccgtcgacaaagggcacacgctcaacattgagctcggggacgatgtcgccggcatgcgccaaccagtgttgcaaccatctggcaacaaagagtctgcaggccacactggcgttgaccaggacggagaagcgcagaacgtcgttgacaaggatgacgccgagcatgctggtgagcccgctgtcgatgaagaactagaggcgcgtgaggcgtcgcgaaaagctctgcaggaagagctcgatgcagctttctatcacgtcgacaacaagtattaccgccgcgacaacgacaacaagcttgcaattcttgaagctggctcaaagttgcgcacggctgactccgatccttacgtagcggtgtcgatggtgaagttggctgaatcgaaggggtgggattccatcaaggttgctggcaccccggagttccgccgcgcagtttggatggaggcggctcttcggggcattcaggttcgagggtacaagcctaccgaggtcgatctcctgaagcttgcagagaagcatgacgctcgcctcagcaattcggtagagcagcttgaacagaaggaccacgcctccacgcaacgcagcggaaaggccattctctccagcgaagcgatgcactctccgaatgagccatcgcaagagaagcccagcccagaagagaatgcccgcaaaggtaccgtgggcgtggtgctcagccatggtgccgccaagttcaatttcgacaaagacgaatcgctcaactactacgtccgtctgcagactgatgctggtgagaaggtggtctggggcatcgatcttgaacgagcaatggcgaaaggcgaagttcagaacggccaacgtgctgagctggtgtacctcggccgccaacccacgcaagtgctggccaataagcgggatgaaacgggtgctgttgtcggcaaggagtggattaccagccatcgcaatgcctggtccgcgacacgaatcgaagcggaccgcgaggacgcggcggtcaaaccgccggcggtagccgtgccggacaaggcagcgggccaggcgatggatagcgtgaagccctccgcacccgggattcctcagccaatagtggcgccgtctgcagcaagcgatgtggcggtaccggacaaggattcgcatcagcgagctgccaaggccttccgttccaaccagcaacctgaaacctggagcacagcggcaaaacaacatccgcagctcactgctgcatatgcccagctgagcgcgctcaaacgatatgcgcaggacagcttgcccgaggcacagcgtgaggctttcgtctctcgccaagttcataacatcgccaaagagcttgaggccgggcgtccactgagcgcgatccagattgcgacgcaggtggagaagaagtcccagcagaaagaagtatccgccgaacgctaa

SEQ ID NO: 516982 - DNA, 237 bp, Stenotrophomonas maltophilia
atgacaaacaacactcacattgcacacaacatcgacttcgatctcgcccgcgatcgactcgatgacctggccggcgtccggttccgctcgtacttggaattgagggaggccggcaagcccgaggcaaccatccacgctgcccgcgtggcctacctggaaacctccgcactcaggcgctcgctgaagccaacggacacccagcagattgaaagcatcctggagagttccaatggctaa

SEQ ID NO: 516983 - DNA, 1167 bp, Stenotrophomonas maltophilia
atggctaagtcgcgcctatcgcccaatgagatccacaccattgcgactgcctatgccgagctggagatctacaccagcgagcgatcggacaagccgactgcagtcctgcttctgggacaggaaggcgccggccgccacgcgctaatttctgaggttgggcataacctcaatcagcagggcggctacgtgtctgccaacaaggagactgtgcgccagctgctgccgtactacgacgagttgaagcgggatcagggaaacattgatgccgttacacgtgaagatgtgaagctgctctcgcgcgagattcaccaccaggcgcttgaaagcaagcgcaacctggtcatcgaggcggcccagcacgacaccagtgaatcgttgcacctggccaagtcgctcaaagcggccgggtaccacgttgaagtccacgcagccgcggtcaacgaccaaataagctatgcgcgtgcagctctaaactacgaaaagcaggtcagttccgggcacccgggaacctacgtttcggcgggcgagcatgggcgcaatttcgctgacgcatcggaaacacttcggcggatcgagtatgccggcgctgccgatcggatcgttgtctacaaccgcctgagcgatcctatcctcgacaggaagcccgagccaggtcagctgaccgcaagcgaaacattcgacagagcgcgggggcagctgtcggagtacgagcgggtcaacctggtggagacgtgggacgccgtggttgagagcatgcagaagcgcggcgccccgaatgcagagatggatcgtgtcaccgaatctgtcgagcgagcacactacaccatgcgtcgttctgagccagcgcgggagtcctacgaattccagaatcctacggaaaccaatagaagtcgcgaattgagcgagaactacggcgccaaactcgctcattcgttccgagaggatcggcgtgctgatgcggccatccggcctgagttggtcaatgctttcgcccagatggcccaagcagctcgcgtggcagagcaggcagaggcgcaggtgggccagaagttcttggaggcatacagcaagcgcgttgcagccggactagaagctggtacggactacaagccggttgtgatccgcgatagcagtgagaagcccaagactgcagagttggaacgatag

SEQ ID NO: 516984 - DNA, 1101 bp, Stenotrophomonas maltophilia
atggagcggagctcccccaacactctctattccattcaagcactgcgcgctttagctgcagcttgggtagtcatctaccatcagatcaacgcggaacgtgtgtatggcgcaggtgtctcggtgctcggaggcctggctcacttcggctttgcgggcgtcgacctgttcttcgtcatttctggcttcatcatggccacggtgacgagcgggcgttttgggaaaccgactgctgcagccgacttcctcggcaaacgcgtcattcggatctacccgctctattggatctgcactgctgccatccttgcagtcctggctgttcggccgtctgcgttggacccggcgttggctgagaaaagcgtgatggaatctctgcttctcctgcccgtacagggagggcctctgcttgtggtcggctggaccttgacctacgagctctatttctatgtcctgacagctatcgcccttgcagcagcatcgcagcggacggtgccttggttgctcggcgcttgggcagtcggccttgcactcgcgcaactgcttccggcgcaatcaccttgggccatcctggtgacaagtcctctggcctttgagttcattgccggcgccttagctggcctgtactggcgcagactcactgtggcggcagcatggggaatattggctgtgggcattacgtggcttctaggcgcctgcgccctgctcatcgatatgcccaatcatggtgagtctcccggcaccaggacgcttgcgttcgggcccgcagctgctttgattgtggctggtctggctcggcttgaactggccgacaagattcgagtgccgcgagtcgctgtgctattgggggacgcatcttactcactgtatctgacccatctatttgtgctttccatctgcggacgtctcgcagccagcttcgctatgacgggctctgctttggggaattgggcctttttcatcatgagcttcattgccacctgctgtgtggcgatgatcgtccatcgtctgattgaacggccaatgctgcgcttagggcatggagcgtggcgtaggttgcaggggaagcctaagcggcttggccagccactaaccagcaatgattga

SEQ ID NO: 516985 - DNA, 171 bp, Stenotrophomonas maltophilia
atggctgatttgttcccgatcgacttcgatctcgcggaggaaattgcggcggagaaagcaatggatgagtggggtcgcgacttccgggcggagcttgcacgccgggggcgcgggggggatgagtcgcgtcctctaggcgactgctttgcctcggtagctgaggggggatga

SEQ ID NO: 516986 - DNA, 1362 bp, Stenotrophomonas maltophilia
atgacacggccgaagatggaagacctgggaatcgtcatcgacgttccaaagcgtggcagacgcggcatgtcggaggatcgttccgatctttctggcagtggaggcaaggccggtcggagcaggggggatagcaatcgcgcttcgcggacgaagtcagacgcctctgggggcggacttgccaaactcacgcgcattgccgaaggccatccagaagtgatggttaaggtgtcgagttgctcgcgcggtcgcgaacagcttggtgaacacctgaactacatcacacgaaacggaaagctcatcgctgaaacgcctcatggcgaggtttccgggcgcaaagaggtgtcaaccgttgcgcaggcttggtgggacagcaacggtgaggcagtcggtcagcggcgtcaggccgccgcggaggtcctcaagctctccactgtcgttcgtagcgacgtggagcgcgcggccttgttgtccgaagtgcgggcagagatcacctcaatggcgcgcggctaccacctggcagagcgctggcagctcaaggaggttgcttcccctgacccgagaaagcaggttctttcgctgaggctgcctttgggcacggagttggaggggttcaaggaagcgttggcccgaggggtcgccaatacgctgggggcgcttcatgcgcatcgcatagatgagttccaagtcggttccaaggaatccgtcaatctggtgctgtcgatgccgccggaaaccgacagagacaaatttgttgtcggtgcaaaacggttcgcggagagggcgtttggagacaatcatgattacctgctagtcgagcatcgagacacggatcatccgcacgtccatgtgtcggttcgctcactcgggtacgacggcacgcggctttcgcacaagaaggatgatctgcgactctggcgagaggacctggctcagcaactgcgagggcagggcctgcttgccgaggcatcgcctcggcgcacgcggggggtcgtccagaaggcgatgactcaacctgtgttccacctggatgcccgtaaaagctcgacggcgcagcgcgataaggtgcgggacgcggtgcggagcattgctggccagattcagcaggggcagcacccttgggaggctgaaagcttgaagcgtcagcggcaaatccggggctcttgggctcgtttggcagaccagctggagcgcgaaggcggggaggagggggggatagcggtcgctattcggacattccttgcggatctgcccccggtcgaaaccgaacgccagaggctacgcagagccgtacaggatgagttggccaaccgtactgctggagccagcagaccaagaatcgcccgcgatgagccggacgcatag

SEQ ID NO: 516987 - DNA, 936 bp, Stenotrophomonas maltophilia
atgccgacggtgactcccgcgccccgggccagccctggctgctcgaaggacaacttctttgccggtcggttccccggggtcgtccagggccgcgccgagggcgtgatcccctcggcctctgccaaaccgcttttccctcggcgccgccggattctcaccggcggcgagcccgttttcagcgacgggcttttcgggttgcgcctggatgcccaggcggggccttcggcccgcgcgcggagggtccgcccctgccaacgcgtcccccggagcaaccgagcagccggctatgccgggcggtccgcatgcggaccgattgcagaagcaattaagctagggcaggatagccatgcggcggtgataatatatattctggattgtgagagccctgaaatggccataaaagagccggagagcgttgaaaaggccctgttgttgaaggtgccttctgatttgcactctcgatggaaggcgttcgccaagagccgtgggctaagcctgaaagccctacaggtgctgctgatgcggcaaatactcggtgagcaaggcgacgttggtttgcaggagagaaccgaagaagctgggagcggcaagcgccctagcctctcgatcaggctttatctggaagagatcgcggccgttaagaaggcagcggcagtcgaggggcattccatttctggatggctggcggctttggtgcgcgcacgtctatcggcggcgcctgtccacacgcaccaggaagttgcagcgcttcagcaagcccaactccagctcatggctctcggccgcaatctcaacactgccgttcgccggttgaatcaagaagaaaagtggatgtcgcaggtaaagctcatggaagccgtgtcgcagcaggtcagggcagtagaacgggaaatccaagccatcaagaaggctggactgcgccggggtgaattctga

SEQ ID NO: 516988 - DNA, 1215 bp, Stenotrophomonas maltophilia
atgagcaagccacagaagaagaagtccggctttgccgccaccttggcggcaatgggggagcggggcctgaagggcttcggcgctgacagcgccgacagcttcgaggccgtggtcgctgctgttgatgagccgaacggcaggacttacgttcaggcgatcgacgtgaacctgatcgacccctcccctcatcagaaccgggaaattgattgggatcacgtcgcctcgctcgcgatgagcatcgaagccgaaggactcggcgatccgattcgcctccgtccgaatgctgaggtccccggtcggtatctgcttattgctggcgaacatcgctggcgagcccatgtgaagctcggccgcggaactgtcgattcactggtgctcagcaatgtgaccgatgaggacagcgcgaaggctacgctgatcgagaatctgctgcacaaggagttgacccccctgcagactgctgagggcctgcgcacgctgatcgatctgcacaagctgagctatcagcaggtcgcgacgtctttgggtaagagcaagacctgggtgaccagccacatgggcatgctcaagctcccgcctgaaatccaagacgccgtgcgcgagggcaagttgcgggactacacggtcatcgctggcatgaacaagctcttggagcagtatcccgaccaggttcttgacgccttggccaacgccaccagcgatgcacctctttcccgcgcggaactgagccggattgaacgagcagccagtgaatctgcagcggctgccaccttggtacaggagacctccctccctcaatcaggtgacgccggggcgggtcccgcgactacagtcccccatgctgccggggtgggcgccgaaggtgattcgggcgcgcgcaaagattccgacggtgtcggcgactcggccctgcgatcggactcgggctccaatctggtgccgtccccggatgcaaatagcgacgccgggaacagcgcacccgccggggcttccgggagggggggaagccccgctgtgcagcccagccgcaagcaaaaggcatctaccaccctgcgcgtggtggttggcctggacggcagcgaaggccctctcggcttgttggtcatggacgaccagggacagcacgagggccacgtttctgtggaaatgcccatgggcgaaatctcgtccttcccgttggccgatctaaggattcttggattcagccgcgactga

SEQ ID NO: 516989 - DNA, 783 bp, Stenotrophomonas maltophilia
atgattaccatcgtcatggccaaccgcaaaggcggcgttgggaaatccaccttgtctgtccacttggcatggttcattgcctatgtaatgaagaagcgggtgctgtttgtggacctggacgaccaggccaactccagcgccacgctgatcgcgcatgcaaccggcatcaagtcgacggcgttgttccaacagggtgacctgccggcccttgaagcgacggagggcaacatctcgctgctgcaggcagatccgggattgaagaagttcttcgagggcgacttgatgatggtcggcgagttcgcggacaagatcgagaccctgtccgaaggcttcgatttctgcatcatcgatacgtctccggcctggaatcgcacccacgaagccgcactgttcgctgccgactattttgctacgccggttgatatggagagctacgccatccagggtttgaacgagttcctggacaacacccgtcgcgtcatcacgttcaagaagaacagcggccgcgggctggagttcattggaatcgtacccaaccgcgtcaacaacaccagcccggcgcacaaggaaaagcttgaacacttgcgcgaagcgtacaagggcctcgtcacttccaagtacatcggtaatcgcaccagcattggtgaagcgatcgatgagcagatccctgtgtggaaggtcgagaaatctgcggcccgggaagctggcaaggaaatgaagctcgtgtttgccgagctcttgcagcgcgtcgcgacccgtgagcgagccaaggtggcagcatga

SEQ ID NO: 516990 - DNA, 207 bp, Stenotrophomonas maltophilia
atggcatcgcctaagaaaccggctaaagcgaaggcgacgatgaagcaactgcctattcgcctgacgccggctaactggcaaaagatgcagctggccaagctgcagaccaactcggcatcgatgcaggccatctctttggaggcctacgacctgtggctgaagaagaacaagcttgatcccctcgacccgcaaggagaagccgaatga

SEQ ID NO: 516991 - DNA, 300 bp, Stenotrophomonas maltophilia
atgggcctctggctcttttacagcgacgattcgcctgatgacattgaagcagcctgtaaggcagcagaagcggtgttgaacacgcagggtttcactgccgaacaagcccagaatgccgcactcgcggcagctgacctgacagacgagacggggttgaccacacccaactcagatgcagttagtgcctggttcaatgctgaggacgccgcattgcagtgcatttttcaacttaccggcgagtggcctcatcaggcatcgctggtctacaccgacgaggaagagactgatggcatcgcctaa

SEQ ID NO: 516992 - DNA, 849 bp, Stenotrophomonas maltophilia
gtgaccagcagcaagcgcggcctacgcgacgctctcggaaacaccgaagcctaccagggcagtctgcccttctggcccgatcacacccgcggcgtgccatgggttgccctgcgctccgcgctgtttgctcccgtgcggtccggtacccgccgttcgatgcagcgcgaaaagctggctagcgtctctacctatgaaatccgctttacgggcatccagctcgatcaagccgatctcgacgtgtacgagcaggtgctgcacctggccagagcaattcccttgggacgcgcggtggaattcaagactcggcagatgctcgctgagcttgggcgatcccagggcggtaaagaccgggagtggctgttgaaatcccttgccaggatgcaggcctgcgcgatcgagttccggttaagtgagggtggtccggccgtatacatcggatctctcatcttgcggcaggggcgcgtagagagcgagaaggaagctgccaccggatcggggatgcattacctgatcctggacgagaagctggccagtctctactccagcggcttttctacgcagaactgggcgaaccggctgaagctcggcaagaaccagctggccaagtggctgttcggcttcgcatccgaccttagccggccgctgacattcaaggtcgaatcgctgatgcaaatgtccaacagcaattacaagcgcgtgagggacttcaaggcggcgttggaagacgcagcggccgctaatcgcgccgctggtgtcaacctgttcctggtgtttgaccgcaaggggaacgtgcggatggaacgccgcgaaacatttggccccgccccactcccgccgacggcgcgatag

SEQ ID NO: 516993 - DNA, 240 bp, Stenotrophomonas maltophilia
atgactcggatgcgacttcacagagccgtatcggcgatccctgtcgtgctggccgttcttgctctgagtggctgttcaacggggtactattctctgcaggggagagcctatctgcccaccctcccggtcggaaatggacgcatacagaccgacgtgcacgtgtacgctaccccgagcggggtgactgtaagcccgaacgtacgatacgaaacgccaccaagacgatggagctacccgtga

SEQ ID NO: 516994 - DNA, 210 bp, Stenotrophomonas maltophilia
atgaagaagttgaatttgatcctgatgctgctggtggccgttggtatgcaggctggttgtgcgaaccaggtcatcccgaccaaccaggccgctgccggcatcgacgccccaaccaatcgcatctcgcaggcggatctgcaggctgagatccgcgcccagaacgagcgtgagctcgccgctcgcgccgcacgcaggagcaagaatccatga

SEQ ID NO: 516995 - DNA, 243 bp, Stenotrophomonas maltophilia
atggtcaccggaaatcaaccgcaaccgcaaaagccggctcaggagcctagcaaagcatgtgtctcgaagcgtaagccgacgctgcgagagcgctattccgagatccgggagctactgattcttgccgacaaggtactggctgatgttgagaccgatggcctcgatctgaacaacctagggcgactgcaggcaatccacgggttgatccagatggagaacgcagagcctccgatgttccgttga

SEQ ID NO: 516996 - DNA, 852 bp, Stenotrophomonas maltophilia
atggccaagaaacttccatccaatctttcagagcaccagcaggaattcgtaaagctggcgcgcgcgaactgtggccgccaacgaatccacgaggtattccgcgatttctgcgaaatgaacgcgctgtcgatcagtaatgcggtcgaccaacatcactacagtgaacgcgaagagcgctatctgcagctggcagcacactacaccaaagatgaggtcgagcgattcggggcgatggcggcacgcgtcgttctcggccttgagcagcaattcggcgatttcctgggcgaggtgttcatggcccttgaccttggggacaactggaagggccaattcttcacgccctaccaggtctcttccttgatggctcgactgacgctgggtgttgatcggcaggggatcgaacagcgagggttcctgactgtgaacgagcccgcttgcggctcaggggggatggttatcgcgttcgcggaatctctcctggagcaggggtttaatccagctgaccacatgcatgcggttgtgaccgacattgattcaaccgctgtgcacatggcctacatccagctttctttgtgcggcgtacctgctttcgtgctgcacggaaacgcactccaaccaggcacggtctggagcagttgggtcacgccggtccacgtactcaatgggtggagcgagcgcttgcgcaatcgcgaccgcatcgatgcgatgcgttcactgctggacccagctggtgcgcatgaaagcaccacccatgcagctccgctgccggcatctgattcttgcgtgatcccgagtcgagctgacctcgttgcgcatcatgccggtgacgcgcagctgagcttgtttgcatga

SEQ ID NO: 516997 - DNA, 405 bp, Stenotrophomonas maltophilia
atgaactcctatgagctgaatcacttcatcggatcatcccagcgcctgattctgtcgtgcgctttgcgcggcacggaaggcgcctacttccgccgggtaatcgacgacctttcgcatcgcattgcgcagatgcctcgcgtgggagccaacgcgccgatctgcgatccgaactctgagaccgtgcaccttcactacttcatgggttcgcgccattggtacgtcctggcacgtgacgcgtcccacgcccaggaacgggcttacggcgtctgccggtgggggtcagaggagccggaagcagcgggctacttcccactcaacgtactgctgtccgccggcgcggaactcgacatgtacttcgagccaaccccgcttgcagaactcaagcgagcgtgggcgcgggaatag

SEQ ID NO: 516998 - DNA, 306 bp, Stenotrophomonas maltophilia
atgattctgaccgccactgccctgcccgcaaagcagaccagcgcccgccgcgtgaaccgtctcggcgcaatggaaattcccgctggccacatcgtccgagttggcaacaagctgcatgccaagcccgtccgcaacattggtcctcgcgatgaagaaacgctgcaattggcggtcaaggatttcgggttcctgctgcagcccaacgcggtcctgtcgctggccggcttcgcgtcctgcatcgagctctacacgcgcgatctgaaagcgcgtcgcgtcgccgacaccctgcaccgcctttcggcgtaa

SEQ ID NO: 516999 - DNA, 573 bp, Stenotrophomonas maltophilia
atgagcatcaagagtgaccgttggatccgccgcatgtccgagcagcacggcatgatcgagccgttcgaggccgggcaggtcaagcaggccaacggcgaacgcatcgtcagctacggcacgtccagctatggctatgacgtgcgctgctcgcgcgagttcaaggtgttcaccaacatcaactcgacgatcgtcgatcccaagcacttcgatccgggcagtttcgtggatatcgtcggcgatgaatgcatcatcccgccgaacagtttcgcgctggcgcgtaccgtcgagtacttccgcattccgcgcgacaccctggtggtgtgcctgggcaagagcacctacgcgcgctgcggcatcatcgtcaacgtgaccccgctggaaccggaatgggaagggcacgtcaccctggaattcagcaacaccacgccgctgccggcgcgcatctacgccaatgaaggcgtagcgcagatgctgttcttccaggcggccgccgacgacatctgcgagacgtcgtaccgcgatcgtggcggcaagtaccagggccagaccggcgtgacgctgccgcggacctga

SEQ ID NO: 517000 - DNA, 342 bp, Stenotrophomonas maltophilia
atggccccgtgggtaaacaacgaaacctggattgccgcgctggaccggcacaggcatggcccgggcggaccgttccgctggcgcagcagctatgagcggggacgggccggcgtcgaactatgggtggctatgcgcgaggacagactgcgggaggacgtggccaggatccaagcctggcgggagaaggtcaggggaaaccggctggccaagaccgaccttgatccgcctttcgggcagatggagtgggccttgttgaggtcgctggaggggttggaaatccgttccgcaaattccctcgccctatgtggctcaaggaattcaaatgtcagtttcgaagattga

SEQ ID NO: 517001 - DNA, 876 bp, Stenotrophomonas maltophilia
gtgttgaagggctgttttgctgggtttcttgcgctggttgggttcatttcttttgctcccgctgtcgaggcgaaagctgttcggtgcgatacgtgcaccaaggaccttgatttccgcaatgaagcagtaaggctgggtgcgggaacacaccttgtgtacaacgtttccgccaatttgatccagcagtactacatcggatatgacagcactggtggtggtggtggtggcgttgttccccgtgctgcaggtcctgtagtgcagcgtcagacgccaccctctggagctgtcgaggaggttaggcgtgggcatcaggtgatggttgagggcggcggtactctgcggccgacttatatcgtcccagttgatgtcttgggtcttaatccaagtgcgtctgccaagaccgcctacgattacgtcggcgatcacaacttgcgtgcgatggtggagtcggcagctggaagtaccggcgtgatcacaaaaatagttggtgccaacgttttgacagcgatgtctgatcttctccaacacgtgaccaactacacgggacttcgcgaccaagcccgactgttgatgcggatcgtgttcaaagatggatcctacgttacggttattgtgaatcttgagtatcagaacggccagagcgaagtcggtagtgagcgtactgctgcaggtcagttgattccttctgacatccagcaggtgcaaggggagtggacggattacaatggagagaacctgatgcagatggtcacgcacctgcacggccttggtgcaacgatgacttcgtctggtccatcatctggctccgtgcaagctattacttgtagcggtgccggcgctgccaagacctgtcatgtccagtatatgattcgctga

SEQ ID NO: 517002 - DNA, 1077 bp, Stenotrophomonas maltophilia
atgacagcggccgaattgccagaagattttttcgcagacatccaagggatttttcgcagaaccccggtgctgctcgtcggctctggcttctcctgtggctacggccttcccggcatggatgcattggcagagcatttggcaaccgctgtgcatgatgccctatccaccgaaggggcaaagaatgcctggggacaatcagtcgaagcgatcaaaacaaatctggaggctggcctaaatggcattccgcttggtatggcggaatgggcagagatcgtatcagccatacgaggagaaaccgcaaagctgatccttgagcgaaccatcgcagcggaggcagaaatccttggcgaaaaggttgccggtggccatgcgccgtcacgcctcttgaatcgcttgtttagcggctcgccgcagaacacggacagcatccatgtcattacgactaactatgacacgttgttggagttgttttgtgatctggcagaaattccactggatacaggattcacggggttccgtcggcgtaagccgcgcgcccggccactcttccaaacgcaatacagccgcgttctagtggccgagaagcggcagcagcagctcgagcaccgcatctgcaaaacagtccgcctatataagcctcatggctcaatcagctggctgacgacggacgaggggcccgtggaagccctcaacgatgtctccatcccggaacgagccattgtcgtccctggcccgtcaaagtaccaagacgcactgatcaatacgttgtttgacgacatgcgtactgcgatgaatgcggtgctagccgatgctcaggcgctgttgtgtgtcggttttggcttcaacgatgatcacttgcaaggcgtcatcaagcaccgcctggccgcaggcatgcccgccatcatcgtcacgcgcgacccgactccgaacattgaaaagctcctcggcgaacacctccacgtgattgccgtgttcaaagatggtgacggggcggtttgtcattggaatggcaatgcaattcggtcaccagagccgctctggcaactgggtgaatttctgaaaaaatttgtagagtga

SEQ ID NO: 517003 - DNA, 1794 bp, Stenotrophomonas maltophilia
atgagcattttcagtttcaccgacgagcaatccttgggcgaagtccgcagcgttgaaacctctcggatcaccgtgcgggtgacggacggtcaacgcctgcaaaaagcgcgcgtcggccgattggttgccatccagtccatgggcgatgaatggttgatcggcatcatcgaacgggtttggcggcatccggtggaactcccaacgttgcctgaagccgatccgcctgcggatctggctggcgcgcctcaagaggaaaacggcgtgtcgatcagcctggtcggcacctatcgcgctcgggatgggcagcgcaaggacactttcacgcgcgctgttttcattctgccggaaatcaatcggcctgtattccctatcgaggaaaaatctctcgaagacttcatgggcatcttgagcgcgtcatccaaggcggacgcggttgcaccgctcaaggtcggtacctacaccctggatgggaaggccagcgcctacattgatggcgacaagctcttccagcgccattccgcactgctgggcagcacgggctcgggcaaatccttcacagtcgcctccatccttgagcaagcggcgcaattgccgcacgcgaatattgtcgtgctcgatctacatggcgagtactcaagcatgaagtttgcatcccactaccgcatcgcaggcattggcgatatcaagaccaaaaaggatggtgcgatcttcctacctttctggctgctgacctatgacgagatgcagtcggtgtttgtagatcgctccggtgacaacgcacccaatcaggcgcttgcgctcatggattccgtcatggtgatgaagcgcgcagctattgctgagattgggaagcccgacttgctggaaggcttcaccgttgatacaccagtgccctatcggcttgctgatcttgttcaatcgctggatgacaagaatgacgaagctattgataccggcgagacctacgcaagcggcccgcgcaaagggcaagctaaaacagaacgaggcccattaaacggcaagctctcgcgcttcctcattcgcttgaaaaccaagatgaacgaccgtcgttatgcgttcatgtaccaaaccccagaggagtacgagacctacgaggcgctacacgaactcgctaagaaattgctcggtacggggaacgtcaacgaaggcgtcaatcctggcatcaagatcatcgacttttccgaggtgccctcggacattctgccagttgtggtgggcttagtcgggcggctgatctaccaaatccagttctggagcagcccgggcgaagagggcgatgcgcgccacccgattgtcatcgtctgcgatgaggcgcatctctacttgcccagcagcgccgcctccactggcccgcttgaaaagcgggcgctcgacaacttcgagcgcatcgccaaagagggccgcaagtatggtgttgggctgatggtggtcagccaacgcccatcggatgtcagcacgaccattctcagccagtgcagcaacatcatcagcctgcgcttggccaacaagactgaccagtcagtagtcaagcagctcttgccggaaagcctggaggggctgatggaggtgctgccgacgctggatgttggcgaggccgtggtggtgggcgatgccaccctgctgccgactcggatcaagatggccaagcctaaacacgaaccgcgcagtgcaacgatccccttctggacccgctgggccacgccgaaagcagaagtcgatctggtggctgccgtagaaaacatgcgcaggcaatcccgcgcacaagaaaattaa

SEQ ID NO: 517004 - DNA, 849 bp, Stenotrophomonas maltophilia
atggccaccaaaaaagaactgcttcaacaagccgtcgccaaagccgttggcgcgggtaaagccgtggcgctggaaaccgtcgatttcaacgaccccaaccgtcccaagacttgtcttgaagtggatttccctgttctcccgatcaatgagattgcaaaggtcgaggctgcatcaggggcaggcagaaagcctatttacacgatgacgaagtggtgggcgcgacgtccatcaagcgtgtttcggagcttgctgatcgcggcagcgacgaaagccccggacgatccatcggaatcggcaaaattagtctgggacaactattatgccaaccaccaaaagaaaggcgcattcaagcacctgaaggtggccgacatttttatgggagggggcaccactttggtggagggctcgcgcctgggcatgcagatggtcggcaacgacctcaatccggtcgcgtggttcgtggttatgcaagagctggccaacgtcaatctagagcaagtcaagaagctgctcgccgacatcgaggctgaggtcaagccacagatcatgccgtactactactgcgacggaccggaaggcgagaaaggcacatggacgcacctgccctcgaacagggcaatgcctgccgatttcgacccgctgaccatcccgcagggcgagcgcaaggactaccgctacgaaggccccgaggtcatctactccttctgggccaagcatggcccttgccaggtcacgggtttgtggccaccgcacgccgatcatgaccagcccggtgatggcggtgaagaccatcagtgtgaagcactgggaacacgcctgcgaccaatgcggcggcgaattccacgttga

SEQ ID NO: 517005 - DNA, 2355 bp, Stenotrophomonas maltophilia
atggcgccggatgcgccgctggttgtcgcaccaggtgagtacccgttctccgtgctggataaaaggcgcggcgttatctgcccgcactgtgggcacgctgcgttggcgaatctgggtaaggggaagaacaagaaggtagagctgagcttgctggtgcatccgcaatggctggcgggcgaagccaagcaggatgcgaatagccagccctacggcggctcggtgcaggacgacgtggcggcgactacacggtgggatgcggcacgcgctgcgaaaattcgcctactggaagtgcgcggcgcgttgcccaatgaggtgaccgacccggaaacgggcgccacgttcgcgccgtcgagcggcacggtgccaaagaaatcgcactatgcctgcgcggcctgcggcacggtgcaggacgtcttgaccaccataaaagctactggcaagacggggccgatggcgggctatgcaatacagggttacgcaccgaagcgcgatgcagcaggaaaaccctacagtggtcgttttttcgcagcctacgatagaacgcatgctcgacagtacgacgcggttttgacggagtgggaggagcgcaaggacgctgatttgaaggactattggccgcgatccgagcttccttacggttttatgacccatcatctgcaaggaggtgtgccgaaccacggtttcacccactggtggacgatgttcagcccacggcagcgtttggttcatgccctactgctaaaggctatcgcaacagcaggagaccacgaatggaatgtgcgggagttcgtcctcggtgcttttcacagataccttcagcatcagaatacgatgtgtttttgggacattcagcaagactgtgttgccccaagccttagtaatcaaaattttcacccaaagtctacggttgtagagaacagcgttttcgcccatctcgggcgaggtaactggaattcgtcactcgattcattaatagacgcactagattggctggcctcgccgactgaactggtgagcaacgaaagacttaacatcaagtttcccgacattggttcgcagacatcagggaagtcgacaaaactggctcttggcgatgtactaacaggtgcagatgtattgtgtggatcctcaacagacctccaacagtacgccgaatccagccttgatttagtcatcaccgaccccccgtttggagggttgctccattactcggagctgtccgatttcttctacgtctggcttcgtttggtgctgaagagcaagtacccggaatatttcaatgctgaatacacgccaaaaacgctggaggccgtcgccaatcgtgcccgtgagcccgaagatccggatggcttttatcagcggttgttgacccagtgctggcgtgaggcacatcgcgcgctaaaacccggcggcatattagctttcacctttcaccacagcgaggatgagccttgggtggcggtgttggagtcgctgttcgacgcagggtactacctcgaagcaacctatcccatccgctccgacgaaacaaaaggcgatggtgagttcggttccagaacaattgagttcgacatcatccacgtctgccgcaagcgcaccgaagaaccgaagccagtgagctggggccgcatgcgccgcgaggtgatggccgacgtgcgccagttgcagggcgtgctggaaaatcacgccaaagagggtctgcccgccgccgacattcaggtgatccgacgcggcaaggcgcttgaatacttctcgcgccactacggcaaggtctacgtggacgaaggccgcaccatctccgtgcgtgatgcgctggtgggtatcaaccaacttatcgacgaagacgccgacaagggtaaggaagcaccaccggtcaacgccgaaccgatgacacgccagtttctgcgcacctttgggggagccacagagctcaagcgcgaccagttgcagaagttcctgcgcggcaccatcaccacgccggatgactttgagcagcgtggctggtgcagcgaagtgaagaaggtgtttacgcgcaccgcgccgctcaatttcgctcgagattggcagggcaagcacaagcgcaagctcacctctgacctggatcaggcgcttgtgctgattggtgcatgcgtggatggcagcggcatcaatgccgcggacacactgacgaacgacaacttcaagccgcacatcgcgctcaggccgttgctggagtggctacagaagaatggcccggatcaaaccacccgcaacgcggcctcacgagcggtggcgatctttacggcctggcaatccagccaagcaccgaagccgcagcaggtttcgctgttcgacgatgaggagtacacgcaatga

SEQ ID NO: 517006 - DNA, 573 bp, Stenotrophomonas maltophilia
atgaaggagcatatcggcgtagatgagttttcaggcctggtgcatcacgtgaagtgcacagccgccaatgtaagcgaggtgacggttacctatgagctgctgaatggcaaagaagactccgtgttcggcgacagcggctataccggtgcagatacgcgagctgagctgtccaattgcaaggcaacgttctttatcgctgccaagcgatccaaggtgaaagccatttgcaacgcacgcgatcgcaagcaggttgagtgccgggagcgctgcaaggccagcttgcgcgccaaggtcgagcagccgttctgggaaatcaaacggcagttcggctacaccaaagtccgctaccggggggggcaaaaacaccgcacaggtgctcacgctgttttcgctatccaacctgtggatggtgcgccggcagctgatgccgggataggggtaactccgcccagaggtgcccgcaagggcatttcgagggctgatcaacatgataattcgctgcctccgatggctccagataactccggcgctggaaatccagcgctcagcggcgaatgttcagggcatccttag

SEQ ID NO: 517007 - DNA, 264 bp, Stenotrophomonas maltophilia
atgcgcttgtttgcccggcacagcggacttgatgcgattccggatgagaccacgaccatcaacttccgccgtctgctgaagacgcacgtcctagcagcgaagatgcttgaagcggtgaactcgcaccttgcccgcaacggtcagagcctgcgcgcgggcacgatcgtgaatgccacgatcatccatgctcccagctcgaccaagagcgccaacaaggcccgcgatcctcagatacaccagacccgcaagggcaagcagtggtag

SEQ ID NO: 517008 - DNA, 3600 bp, Stenotrophomonas maltophilia
atgacaattcttgctaccgatatcaagctgcgacagtcgcagcgcttgactgataaccctgacggcggtggccgcatggttcagaccgaaatcattgatggggctatgaacaacctctttccggatatcggtgatgaggagcggaccaccggccgaaccaccctccgcaagatgttcgtgcatgtggatacgccggcgccagacgtgctgaaggacgcgatcgcggtgctgatcgatcctccggcagacccgcgcgtgaccgtcacaatgtttgcgacgggctcttacagtgacgtgcgcctcgacgccaagaaccgcgtcgagagctacatcacgcgaggcacagagtcccgctttgtcctactggggaaccacttcagcggccagatgactatccaggtctacgcgatgaaggacgcgccaagccccgacatcaatgacaacttctcgctgctgaccctcgccagctccgggcacgatccggccgaacagtacgtgcgggtcaaaggcgtgctgtcccgtacgacacggacttttaccgatgaccaaggggcatttgagcgggatgtcttggtgatcgagctggtgaacgcgttgctgcgcgatttctacggccaggaggtggtgcggtactcggccaccaagcccgcgaccaggatctacgaaaccaacgtggtggaggccacgagctatcacagcgtcaaacgcctcaccgccgctgggaagcctggcgatctggctgtgcaagtcgataccccgtacgtgtccatcgttcctacctccacggctgaaaccccggtcagtgacgttctggccggcatgggcaccatcagccaggtcccatccggccctgccggcagcctcggccagaacttcagtgccagctttgctgctggcgtgccggtcagccgatacctcggtactgggttggtggtgggcgcagtaagggttgtcgcaggcagcgtcgaactcaccgacgacggtgctggcgggctcgcttccgccgtggccacgccctggagcggtacggtcgactatcagggtggggtcgtaaccttgacgcatgcgagtggcgtcggcagtaccagtatcagcatcaccgcgtccccggcgggctccatccccatgcagggcttcaccgacgagattgaggtgacgcagaacaaccagggcatggtctggcttttccagctgaccccgttgccggccccaggaacggtggtggtcgactaccgcgccctggggcgctggatcaggttgaccgacaacggccgcggccgtctgataggcaagccgggccaaggcaccgggacgatcaactaccagaccggctccgtcgttgtgaccgctggcgcgctgccggatctgaagagcagcatcatctccaactggggcactcccatcatcgcggaggcccgggttggtgatactgccatcctgccgccggcgctccgctttgtgctgggcgagggctcggcggtaccggggacggtgcaactgacgctgcgtgtcggcggctccaatgtggcggtcacggataacgggaacggcggcttgctgattggcgggcaggttcgtggacagatcagctactcgaccggcgagatctcgctccggccgctgagcctgcccgatgcggatagtcagctctcgatcgcctacgactgggggcagtcgctccacgcagcgccgcagcctgttccggacgcggccgggatcgtctcgttcaccctgccgcagggaccggtgaggcagggcacagtgcttctcgactggcttgtgagtgtacggcgcgatcgcgatgatctgtcgtcggcccctcaggcgatgcgggtcattgccaaggatgatggcgcaggcaacctggtgggcgtttctgtgggggacacggccttcagcactgtgctgggcgccgtgaactacagcacgggcgcggtctcgctgcaggccggaaagttcatggtccgccaggtctcctatccggtgtacgagatccgctctggtcgtctgaaggtggttgggtacgagcgtctggacgtgctggcccagttctccgccggcagtatcgtttcagccggttggatgctcgctggcgaggccgcccagtccgcgcatgaggtcatgccgctgccggcggtccagctgcaactcaccccgacgatcagcgacagcatcgttcctggcagcattcgcttcgcattccgggggcgcacctacgttgaccgtagcggcgggctgtatcactccatcgatcccgccactggctcgggcatctatgcagggacgatcgactacgcggctggtgtggtgaacctggtgcagtggctggcaggcggagagaacactgtccagatccaatccctcctgacacggatcgccgatccgggtgtggcggtcagcttcttccgtgcgcctggttcaccgctccggccaggcatgttcacgctgcgcgcgacccgcatcgatggcgagctgctcacggcgaatgcggacatcaatggtgtgctgtcggctgcggaaatccgggggaaggtcgattgggagagtggtgtcgtcaaggtccagttcggccagctggtgcccgtggccgggaatgagggcaagccctggtttgatcccgatcaggttgaggggaatcaggtctggaggccgacgctcgtgctgccgggcacgatctacatgggcgcggtcgtgtatcgatcgattccgttgtcggaggtagtgatcggcttgtcgtcggtgcgtctgcccagcgacggccgtgcgcccgcgttcaagccggggcagaccgtgctgatccaccacacggccaagcacgtggtgccgtcgccgcaagcgggacaggtggtcacctttggtcgcggcaggattgcaggcattgaagtgcgtgacgcggatgggcgtccggtcgatgccgcatggttcacggcggatctggacgttggcaatctgcgcttcagcgacccgttgaacgtggctgcctacacgctgccgctgacgatcagcgagcgcgtcgaagaccggcgtttagttgttcagccgcagattaccggcgaaatcgagatcaacacacctctgacccacgattatccggtgggggagacgatgatcagtagcgcactgcgactgggtgaggcaaacggctcgttggacttgcaagcacgtgtcgtaagtctgtttgatcaggctgcgtggaacaatgtgtgggcggactctccgagcggcagtgtcgcacctggtacctacaacgaaacggattacccgctggcggtgaagaacgcggatgcaatcactgagcgttgggccgtgcgattcaccagttcaacccagtttgaagtgatcggtgagacggtaggcacaattgccaccggcaacacgaccacagacttggcgcctctgaatccacgtaccggggcgccgtacttcgtaatgaaacgcgaaggctgggggaccggttggtccacgaacaacgtcgtccgattcaataccgttggtgggctggctcctgtttggctcatgcgcacgacgttgcctggaactccggatggcgcccgtgattcaacgcgattccaagtcgtcggcaacgtggcgggagagtaa

SEQ ID NO: 517009 - DNA, 1011 bp, Stenotrophomonas maltophilia
atggcaactgttccaaggctctatagcagtaccgacgctggtgccccgcagctgtctgggcaggttggcagtttgcttgtggtgctggacgctgtgctggttgatggctacggcgtgggggacgcgttcaagccgggcgccggttggacacggcacctgtccgcagccggcaagagggcatatcgaaatgacccgtatgcaggaagcggatttgtactggaggtggatgactccgccagtgttggtaccgcccggtatgcccgtgcacgcgggtactctgcactgcgtgcatttggtgacggcgccgacgcgactcctagcccgagtgctttgccagctggctcgatcattgcgaagtccaattcactaagcgccactgcgtcccgatgggtcgcggtggcggacagtcgctgcctctatctgtttacgaatttgaaccctgcggcccttgttgaccagaggcacgcgcacttttttggcgacttcatctcatacaagcctggcgatacgatggcatggtgtgtcagtcatagcggactgacggactatctcggcacggaagactttgacggattcgtcttttcaacgccgaacgaggccaccgcaatcgatttgaataggcctgcctgttacctgcccagaactgtggcctctccagtggcgtctgcgcctggattcttggtgggtggaatgaggtatggctcgttccgtgcttggaacacgctccctgaaaggcagtcagtctatcctgacggagtaaccggaggattgctctataccggggtacagattttcgagggctctgggcggcctcgtgggcagttgcctggcattgttgttccgtaccatgtcaggccgttcgcagatctgagtgtgcaggctgcgcctttcgagtttcgtggggcatcccagattgcggcggtgggttatgcgccgaactactactcaacgacgctgggtagtgagtaccgtgggcagctgctcttctcgctaggaggtgggtggtggtga

SEQ ID NO: 517010 - DNA, 156 bp, Stenotrophomonas maltophilia
atgtcggccgttgcaatgaccagatcgaaggccgatgggacgtggcgggtcgagggcttggatatgagtcgtaagttcctggtcattggatttgacgatcgcggcaatcacaacgctgcgattcaggactgggtttccccggctccgttggagtaa

SEQ ID NO: 517011 - DNA, 987 bp, Stenotrophomonas maltophilia
atgccgatcgaactggcccgcgtctcgctcagcgccggccgttcggcttggggctggacctttgacatcgagctggccgatgccgatcagctgggactgctcaagcccacggcctcgggcccgcgacagttcgagctggtgctgaacggctacgtctggacgggcatcatcgagagcttccagaaacagcgcgagtttgctgggggcggtgtgcgtttgagtgggcggtcaaggacagcactgctggcaccgccttacgccccggctcgcgtcaaggccaccacggaggagcgcagcatggcccagcttgtggccgaggagctggcggacacgggctttgtcagccagtacgacacagttgattggttggttccgccaggtgcatggttctatgacgcaaacacgccgctggatgccatcagtgcgctcgctggtgcgagtggcggggtggtgcagtcccatccctcggatctggcgctggttgtccgcgccagctacccggccagtccgtggctgtggagagagacaacgccggatcacctactgcaggaagacatcgtgctgaccgagagcctgcagatgcgcagtgcgcccctgtatgacgcggtggtggttacgggagagctggccgggaagggtgtcacctgcaaggtgcgcaaggccggcgaagcgggccagctctacgcgcagcaggtaagtagccccttgatcaacgtcactgccgccgcagccgagcgggggcgcaacatcctgtgcgatcgcggcgaacaggccgcagtggatctgaccgtgcccctgttcccgaagccgctgaaggcaggagagatcggggtgatcttgccgcttgacctggtgcaggtactgagttctgaaggaacctggcacggccagtgcgagtcgatccgaattgaggtcgtcgtggatcaacaggctgtcgtgatcgagcagacagcaactctggagaggcatttcactgatgcggactga

SEQ ID NO: 517012 - DNA, 672 bp, Stenotrophomonas maltophilia
atgcgcctgcagacccttgaaccaaagaactacacctacttggaaactggcgaccagtgctttcactacggggaatacacgagtgaaggcggctaccaagctagtgataccaatcagcaaattctgaacttgaagaaaaagccgaccgtgagtgagggtcagctctactacaagaggcaggcgattgattattggggccgcgcgctagcgagcgtcattgatctcagtaaaaccattggttcgcatacattcgtgccaatgcctggatctaagccggcaggacatgccgagtttgatgatcgaatgctgagggtacttaagcgcatggctgcaggcgcacctgacgtagatatcaggccgctgttggttcagaccgtagagcgggacgcgcagcatcacggtcaccgccttacgccagatgagctctgcgggactttggctgtggataccaaattcctgaccccgcccttgtcccagaacatcattgtggtggatgacgtaatcacaatgggggcttctttcgcagccgcaaagcggcttctggtcggcctacccaatgtaaagagcgtagtgggtatctttttggcgaaaacggtttggccagcgccggaatttcctgtgctatctcccgaggaaattcgtcgtcttctccatcctgccgtcaaacggtag

SEQ ID NO: 517013 - DNA, 1140 bp, Stenotrophomonas maltophilia
atggggaccgcttttttttctctgcacaacctggtctcggtcggctcaccaactgatcaacagctcaggcgttacatcggtgacttgcacttgtcggacttcgtaatcaacgaagtccatcagcgacacattgggccatggcgctttaaccagccacccacagatttctgcgaagttcttggagccgatgcgcctgctgaatgggcagaggaagtgatcctgagcttagagactttaccgtggcaatacaccgcttacgttaggattccaggcgagatcgatccagtactggtcggggaaaacgggcttgagctgacgtcagcgattgcgttagtgccgagcaacctcgcgccaagagcgccagtcaacaaaggcgtagcttcactcaccactggactcctcggaggcagctacagcgggccaaccgacgaaccatccatctacctgcgaatggccgtggaaggatatgtgcctgaacgtcgcgactccctcggcgcaaaccaagtgatcgcctcagtactttctacctatggcattggactatccctcggcattttttctcacgacccttggcgcttcactaccaagcgccccccttcatatagcgttgaaatgtatcgaactgagagctccgaaaagcaacacagtgggagtatcgcgttcgatccagcgcaggaaaaggaaatgggcaagatattccaaacgatcgcactgagacccggagaaaccgctgcccgaacccttgcactcttaggtacgctgggaaaagttttggatcgcgcggatgagcgcctgcgcaacgcggcgagatggtacttcgacagtcactgtggatctaacgatcaggtgcgctttgtccaagtgtgcattgcgctcgaaattttacttggagatgagaagcaagggcgcgaaacagggctaagccaattgatggcgaaccgttgcgcttacctccttggaagaaacagcagggatcgcgagaacatcacatccgggtttaagaagggatacgacattcgatccagaatcgttcatgcaggaaaaagtctcctctccgccgaggaaaaggctcactttagttacatgcagagactctgctcttccgtaatccaaaaagagtgcagagagcttgagcaatag

SEQ ID NO: 517014 - DNA, 213 bp, Stenotrophomonas maltophilia
atgcagcccgccttcccgggcgggctgcatggccgtgacgaccgcgcgctaccccgccttcccgtggggaatgcggataatcgacgcggtgctgtgcagggccatgccgccagcgtagagcgcagcacggtcggccggcaatgccctgcggcagtgcagcgcgcgcaaggtggttcggggatctatgctcggcgccattcccgcatggaatga

SEQ ID NO: 517015 - DNA, 1914 bp, Stenotrophomonas maltophilia
atgagtgaggcccacaaggcacccgccaggctgctgacccggcctggcatcgggtcgctcgcgttcatgctgcgcgcgttcggcgtgctgcttgcaatcgccgcctcctgcaacgcgttgttgttcagtgatgctgtcgctacaccgctggtgcagtccgatgcctggtatttcctggaaagttttctgccgcgctacttcgacggctcgctgactttcctggacctgttcatgcagcgcggcgtgggcgaccatgctcaaccgctgcagaaactggtactgctgttccacaccaagtacttcgacatggacttccgcgttgaaggcctgatcggaatcctcgtcggtatcgcctggtgctgtgccgtggcacgtgaaatgccacgccacgcactggccagtccgatgcgcaatgcgtacgcctggttgtgcatcggcctggtcttcgcgctgggcctgtcgctcaacagctccaacatcttcacctggccgctggcaacgcttggatacatcccactgctactgggcgcgttgtatttctcgctggtgatgacccagctgcagcaggcccgcccgtggctcgtgtttgctgccacgctgctgctggggctgtgtaccgacgagatcgcgctggtaatggtgatcgcaaccgcgctcgcctgcgtgcccctgctcaccgcctcgcggcgcgacaaggcaaccgccctcgttgctgcggtggtcgccttgatgctggtccggggtttcctgtggtgggtcgccatgcgggcaggcacgggtgcaaccatgctgcccagccgaagccttgccgaatcactgttgaccgccgatgcattgaaaggattgctgattccgttctcggacggcctgatccatctggaactgttgtcggctcgattccccaaggccacgcaggcagcggtcctggtctgcgccggagccgtactggccctgcaggtgttcttctgggtgaccgtattcggtgcctggcggaggcgtacctacaaccggacactggcgatggccacgttcctgatgctggttgcgtatgcactgaccgctggcatcatcctcagccgcgtgccggcattcgattggaactacctgcatcagccccgctatgtgatgtcctatcagatcaatctggtcgccatcgctgtgatgttccactaccggctgacacgttccggtgcatcggcgccggcttcggcgcacacatcacccaaggcccgcttcgtcgagcagggcggcatcctgctgctgatcgccggcctgctggccgtgcagtggcaggcatcgcgctacaactggaagctgccgcattacctgatcccctactggcagaacaccgccctggccatgcaacgcctggccaccgatccgcgcacgccgccgaccgcctgccccgacatcatgacggtgtgcggttaccccgaggaagagcgggtcaagttgatttcgctgctggtggacaagcagctgaatatcttctccaaccgtttccagatccggaaccgcctgtatccgtcactggcaacggtgccgggttttggccccggggcggtacaggagcagcgcttcgatcatcgaatcgctggcgcgccggtcaaggcatcgctgcttgcggagccgctttccggatcctgcgccgatgacacctccgctgtacagccggtgcgcatccacctggacacccgtgacctggcaccattcggcgcccagctgtgggtcgattcggtcggtgcgcaacgcacgctgctggcaagcactgctccggcggagccagcgctgaccgtggagcatgcgctccccgatcactcggtactgtcattggtccgctcggacagccaaggggtcctggcccagcagcagctcgatctgcctctttgcacaagcaactccacagcacgctga

SEQ ID NO: 517016 - DNA, 921 bp, Stenotrophomonas maltophilia
atgccgcatggatatgccgcctacgcggtatgggcattcttcgtgctcagcggcttcctgatgacgctggtgttgaccaccaagtacggctttgatcgcaccggcctgaaggcatatgcgttcaaccgcttcatgcggatcttcccgctgtattggctggccgcgatcatgggcctgctgacgctctggtactatggcagcgtcggcattgacctgcgcccgatcaatggcgagttccacatgcctcgtggcctgcaggattgggcctacgttgtcacgctgttcccgggcattacccgcggaggcctgccggttccggtggcgaatgcgctggccattgaagtgggcttctatctgttgatgccgatgatggcaacctcacgtggtgcagccgcacttggtgtggtcatcggcgcccttatcaatctcaagcttggcatccatcaggacagcttcggtgagcgctacgccaccttcctgccttgcctgctgccgttcgcgacgggcgccctggtctgccattaccgtgaatccctggcgcgaatccgcatgccggccatcagctgcgcggcctggttactgcatggagcggtctggttcttcgtgccgagctggccgtgggattggggcctgtatgcgtccttgctgctttcggcgtggatggtggtgtcactgcatcagcaacgtggcggcaagctggacaaaatgctgggcgacctgagctatccgatctatctgatccacaccacggtggcagcctggttcgtctgtgcctgcggattcactcgtccgttcacaacctttttcctcccagcgttcgcggccacagtcgcgctttcgtggctgatcgtcgtgttgatcgatcgccccttgtcgcggctgaagcgcaagccgcccacgcacgtggttgaagcgcgctga

SEQ ID NO: 517017 - DNA, 471 bp, Stenotrophomonas maltophilia
atggggattcaatcgcgcgcgctgctggcatgcgtgctggcgctggccctgacggcctgttgtgacgaggctggccgccgtcgcgcaggagctgtcggaaccacgtccgaggcgcccggcatgcaggctgctgtgactgacgcgtccgttgccggcctgaacctggtccatgccagtgttgcaggcatgatggtcgaacctacagtactcaagctggattgcagcggcgcggccggtgcgtcagccgaggtgcaggtggtatggaagtccgaggttccgaacgccgccttcgtgcagatcacggttggcagcctcacgcagacacccaaggtctgggtggaaggtgcggctgctggcacggaggtcaccggaccatggatcaatgacggttcggtattgaccttcagtgacggcaacggcaatacccttgccactgttcgcgcggtagccaccgcatgcccgtcccgttga

SEQ ID NO: 517018 - DNA, 3378 bp, Stenotrophomonas maltophilia
atgatcgagttcaccggcgaacgtttcgtccccaccgaacagggtgtcatccgccaggagcacctgcaccggtatgcgtggtgcctgcccctggtggaaggcaaggacgtgctggatgtggccagcggcgaaggctatggcagcgcgatgctggccagccgcgcgcgttcggtcaggggcgtggacatttcccatgacgccgttgcgcacgctgcggagcgctacgccgaccgcaccaacctgcagtacctgcaggggtcggctgcagcgattccgctgccggacgccagtgttgacgtcgtgatctcgttcgagacgatcgaacacctgtacgagcaggaagagatgatggccgagatccgccgcgtgctgcggccggatggtgtgatgatcatgtcctccccgaacaaggaggtttactccgaccgcgctggctaccacaacgagtaccacgtgaaggagctgtacctgggtgagttccaggcattggtctcgcggcattttcctgcctcgcgcctgtgcgggcaccgcatgtcggtctgttcgaccatcaccctgctcgatgatggtccggcacagccggtgtaccaggcgttgaccgataccggcgagggtgtgcaggagcgcgccgcggtgattcccgatgcggtgtacttcgtcgtcgtggccgcagccgatgcctcgctgctaccgcagttgcccgcgtccatcctgtataccgaagccgaagacctctacgcccaccaccatgaagtagcgcgttgggcgcaggcgcaggacgccgaaatcggtgagctgcgcggccatgtggtacgcgagcagggtgtggtggctcaactgcatggccagctcgatgcggcgcgtgagcagcaacaagcgcagcaggatgcactggctgccgagaaggccagggccgaccgcctggaaaaggcgatggccgaaatctgggatgcgcgcgcgcacctgcagcagcagatcaacaccatctccggtctgaccgatgccgcgcgcagcgccctgcagcagcagcatgcgcagatcgagcagctgatccagcgttccggggtcacccagccggcggcggcaggagggctggctgcgggaggagagtcgcaggacgtctcagcggtactggagtcgtatcgtgccgagctcgagtcactgcaggccctgactgcctcgctgatcgcctcccgctcctggcgcatcaccaagccgatccgcttggtaggccgcgtgctgcgaggcgagtggcacgcggtgttgcagtcattacgcaactccgggttggctcgccatcccttgatgaagcccttcgttccgatggccaagcgcatgctgctgagccaggcagcagcggttcctgctccgctggatgggctgctgctggaagaagtacaccgcgacccgcagtcggtgcaacagagcctgcgttttgccgatgtcgtggatccggtcgtcagcatcgtcattcctacctacggcaactacgagcagagcctggcctgcgtggcctcgatcgcgcgcgtgggtgcacgcgtatcgttcgaggtactggtactggaggacgcttccggtgatgcgcggatcgatgcgctgggcagcattccgggcctgcgctatcacgtcaatccgaagaacctcggtttcctgcgctcctgcaaccaggcgttgaccttggccaagggccattacgtctacctgctcaacaacgacaccgaagtgcgaccgggctggctggatacattggtggacgttttccagtcgcatccggatgccggcctggtgggctccaaactggtctacccggatggccgcctgcaggaagccggtggcatcgtctggtcagatggcagcgcgtggaatttcgggcgcctgcaggatccatccctgccggcctatggctatctgaaggaagcagactacatctccggtgcctcgatcatgctgccgctgcagctgttccaggagctcggtggcttcgacgagcattttgcgcctgcctactacgaagacaccgacatcgccttccgtgtgcgcgagcgtgggttgaaggtctacatgcagccggcatcggtcgtggtgcattacgaaggcgtgtccagcggcaccgatgagggcagtggggtcaaggcatggcaggcggtcaaccgtgacaagttcctcgcacgctggatgccgaccctggagcagggccagttcgccaatggcgagcatgtgttcctggcgcgggaccgttcgcgcaacaagcgccacgtgctggtggtggaccactatattccgcagcctgaccgcgatgccggctcgcgtgcgacctgccaggtgctgcataccctgctggaagagggatgccaggtaaccttctggcccgccaatgcctactacgatgaccagtacgcgccgccactgcagcgcaagggcatcgaagtgatgcatggggtcggctgtgttggcgcggctgggttcgaggcctggatgaccgctaatggccagtatctggacgtggtgattctcaaccggccacatgtgtcggctgagctggtagccagcgtacgccgccatagcagggccaccctcgtctattacggacacgacatccatcacctgcgcatgcagcagcagctgcagctgcagccggatgaggacctggcacgtgaggccgcgcgcttccgtgatttcgagtacgccctctggcagcaggcagatgtggtgttgtatccgtccacggacgaaaccgcccatgtacgtgcgtggctggccagccatgcgccatcggccgggacccgcgccgagaccattccgctgtacgcctatgagcctgttgccgatgccgatgtgccgggcccggagcaacgccatgacatcctgttcgtcgccggcttcgcgcatgcgcccaatgtcgacgcggcacagtggtttgtcagcgaagtgctgccccgagtgcaggcacaggtaccgtcggtccggttgagcctggttggctccaacccgcgtccggaaatccaggcgatggcgtctgaacgcatcgatgtgaccggatacgtcagtgacgaagtcctggccggttggtaccggcgtgcgcgcgtggcggttgcgccgttgcgtttcggcgggggggtgaagggcaaggtgctggaaagcctgcgcaatggcctgccgtgcgtgactacctcgattggcatgcagggcttgggcaatgcgtcggcgttcatgcccaccgctgaggacgctgaaggcatggctgcgcagattgtgtcgctgctgggcgatgatgcgcggtggcagcaggtgtctgatggcggccgagcattcattgcacagcactactccgatgacgcactgcgccggattctgaccgccgctgttgcggcacgctga

SEQ ID NO: 517019 - DNA, 459 bp, Stenotrophomonas maltophilia
atgaagaaccagaagggcttcacccttatcgaactgatgatcgttgttgcgatcatcgccatcctggccgccatcgctctgcctgcttaccaggactacaccgtgcgcgcacgcgtctcggaaggtctcacccttgcttcggctgcgaagaccattgtcgctgagaatgcaagcaatggctccgccgatctgggccaaggctacgcttttgacagcaccactgccgctaccaagaacgtcgataccattgcagttgcaccgacgactggcgttatttcggttggcatgaaggacaatgccaaggctgttgcgtttacgctgatccccaagagcggtggcgaggctttgaaggcaggcgaagtgccgggtgatgtgattacctggacctgtgaggtttccagcgacgcgaacaacaagtacgtgccgtctgagtgccgtaagggcgctaagaaggagtaa

SEQ ID NO: 517020 - DNA, 486 bp, Stenotrophomonas maltophilia
atgaaacatggattgctcttgacgtgcctgctttcctgcgccgctctgtcttccgttgcatgggcgggcaacgataaggccgcggtgatccggccgggcaagcccctgctggcagaagtcgagcggatcgagactgatatcaatgatggcaagacctattcggagctcaaacccgatgagcgcagccgcgtgcgcgaggtgctgggacgcctgcgatcggcttcggaacgcttcccggatgcggcgagcatgcctgaatcgacacgaacccaagtgttcaatgaccagcagatcgtgaacacagttttgacacaggcgcgtgaagatagtcgtctaatatgcaggcgcgaacggattgtgggttccaaccggccacagacgagttgcatgacggtggccgaacggaatcgcaagagagaagagagcgataaccagttgcagcaggcccaacgtctcggcacacgcatgaatacaagcgatttttaa

SEQ ID NO: 517021 - DNA, 798 bp, Stenotrophomonas maltophilia
atgtcaaggatgtctcagaacgcccacctggctttcgggttgattgcgatcgtcttactctttgcctcccctcgtgcggaagcaggcttggtctgtggacaaggtactgtcatggggaagcgccaacaggtttgctattccgatggctgggatgacccgggcggcggaccggtcgggagtggtcccagaggagctggtccggttggtggggacaatggagcggaccaatactgcccgattcttttgcggtcgaagccaagcggctgcgcctcagaaggcgctatccagggggctgactacgcctctgacaagttcatgatcggctccggactcgcgacggccttgtcgaatttgtcaaactcgagcatcacagcccagtcccggggagcgatccaagcctcgcttgcccagcataccgttgacctctccgacatcagaaggccattgaacgaggtgaacaggacgctgatcgatggactggtgcaggcatgtgaacttcaaagtcagcacgacgcagcgaacccgccattctcgcctcactcaggcggagtgtcgcctggacttagggcctgcctcgcaacggtttcgagagtcaacggtgaggcagactcaaacttcggaagcttcttccaaacctggctccacacgaaagggattgtcttgtccgacctcggaataccgcaaaccatcatcaactggtttgctcccgagaattcgctcaatgtgaagtttgaaaaggcaaatgagcagaagcaatgcaatctttggttcaaagaggtccgtgaaaatggctgctaa

SEQ ID NO: 517022 - DNA, 726 bp, Stenotrophomonas maltophilia
atggctgctaaggcgcgattgatgataccgggcgtccttcttttgaccgtcaccgcaatgctctcgggttgcggcaggggtgacgaagcaaaggacgtccattcgacccatgaggaggccgccgacatcggaagtggtgccacagaacccagacctgatgcggccttggttgcaaattcgagctcactgggcagcttgccggcaaccgcacttcagcagtattacgcctgcaaggcggattcgggttcttgcagcaaggacccgctggtggccgatagtcctgaggaagcacagtggctcctcgctcgaggctatccgactccggatcaggtcacaaattcgctctcgtccagcgcggactcactgaagcttgccgccgaaaagtccggcgcattggttgacaagagtttgtatggccatgccttgctacgcgaggggcgctacagagaggcggtaggctccatggttgatagctttattcaaggcgggaacatctacggtttgtatcttgcttcggacgcatacatgcactccggggagctgttgaaccctccgcttgcgctggcatacctgcgacttgcctaccttgctggcgattcaaaggccggcatagcacttgaaatggaggcacctcagctttctgctccggagcgcgccagcatcgacagaagggctgcggagctgcgaaatcagttgtcccctgccgggagctggccgcggccgtaa

SEQ ID NO: 517023 - DNA, 291 bp, Stenotrophomonas maltophilia
atgtatgtcagtgggaatggcgaaggcgccaaccccaacgaccccagtcaacgcatgagacggcttcagatcgactacaagggctttccaaagaagcactgcgtcgccttggtcagcgggcttgtgccgtttgtcgatgccgtttacgtcggcacgtttggaggaacattgggaacccctgacaccaaggtcgatcccggcgatgtccagtccatcgtgacccgatgcacccaaaccagcaccgtgcccaacaccgagggcaagctggtgatgctgatcctcatccgttga

SEQ ID NO: 517024 - DNA, 597 bp, Stenotrophomonas maltophilia
atgccggggtacggcagacggccattgtatcgggtgcgggtggtgggagggtcgatgcctgcggcaggcagaggcgcacggcaaatgcaacagcaacagccaaagcgctggcgcttcgtggtgttgtggctcgggcgcgccatccatggcgcttacgcccccgcgagcccacaccaccccggcctcgacaggttcatgaggcggagcggacggcaaaggcaagagcggtttctgatgtcggagaaaaatgtagagccgagcccgtgctcggctgggtctatcgcgaacagcagccgagcgtgggctcggctctacaaagagcgccctgccaagcagcttttgctcttctttttttctttccgtgggtggacgcacacggaaattgtcagaggccgggcggggtgggttcgcgggagtgtccgcggcatggatgccgcggccaagcccccagggacgggttcacggcgtctcccgcgaacccaccccgcccggccaagcacggcttttgctttacgcgaccaaccgcccacccacgaggggctgcgccgttcgccggaatctacgccgaaggcgccggcttctgccgaagcagactga

SEQ ID NO: 517025 - DNA, 834 bp, Stenotrophomonas maltophilia
gtgaatgatccctggaagaacgcccgccgcccgtcgtcgcgaccgccgcgggccaccccgctgccaccgcgtgagggcgggaccccgccaccgccggggcgtggcaacgacgaactgcgcctgtatggctggaacgccgtgcaggccctgttcgccaagcgcccgcaggcgctgcgcaagctgtacctggtggacgcgctgattccgcgcatgcagccggtgctgaagtggtgcgtggccaaccgcgtgggctatcgcgtggtggaagagggcgatctcaacaagctggccgctaccacgcaccacgaaggcctggtggccgacgtgctgcgcgcgccggtcgtgccgctggcgcagtggctggcggatctgggcgaaggtccggcgctggcgttgtggcttgatggtgtcggcaacccgcacaacttcggcgcgatcctgcgctcggccgcacacttcggggtcaaggcgttgctgctgccggccggcagcacgctggcactgtccggtgccgccgcgcgcgtggccgagggcggtgccgaggcggtgccgctggtgcagttgccggagaccgcagaggcgatggcacagctgcgtgcggccggcttcgggctggccgcgaccctcgttgatggtggcgacgacgtgttccgtgcgtccctgccggaacggctggtgtacgtgatgggcgctgaaggcgaaggcatggaccgtggcctggcgagccagtgcgatctgcaggtctcgattcccggcagtggtgcggtggaaagcctcaacgtggcctcggccacggcggttttgctggcacagtgggcaaaccgccgcagctga

SEQ ID NO: 517026 - DNA, 279 bp, Stenotrophomonas maltophilia
atggcctggccgccgaaacccagcaaggtagcgatattgaatacaccgttgatcgtgccgccactgttgttgttgacagtgatcgcgctggccgagctgttgccgaccaccagtccatccgaagcgagcagcagcgtgctgggatcaatcagcccgctgttgttgaccgtgacattgctgccccccagtgtcaccgcattgccgcccaaggtcgcagatgagcgcatcgttgcaccggagttgacctgcagcgtgatgccagatgcggggttgttgtaa

SEQ ID NO: 517027 - DNA, 447 bp, Stenotrophomonas maltophilia
atgactagccccgccggaatggccaggcgcgccatcgtagtgacactctgtagcgcgctcggcgcctgcggactggtgatggacagttcgttcgacactctgtgcgaggcgcttgacgccgacatggtgaacaagggatggattcccgattgggtaccccacgaggcgaccgacctgcgcgaggtacacgacctcgactcgaacaccagcgcgctggccttcaccaagccccctgcgataccactgcagctgcctgcggattgccaggcaaccatattcaacgacagcgatcctgttgcgttcaatcgacactggtggcctggcgacgcgacgctcagcgcgtcgtaccgcgtctttcgctgcgcacctgaatccggaaaatcggtcttcgtcgccatcaacaggaccgaagaccgcgtgctcttctggcgaacctacgcacggtga

SEQ ID NO: 517028 - DNA, 318 bp, Stenotrophomonas maltophilia
atgcgtatccatcgacctttcatcttcatcgcaagcttggccctgatggcgttgtgcgggctgatgggcgtaatggtgctcatttatggcttcaacgagcacggcctgagctgcggcaggctgtgctcactggagatctccatccgcctgctctttggtgatcggggattcgaaatactggttgcgatggggctcgttgccgcggcgctgatggtcgggcatatcgcactgcgggagggcatgcatgccgggcggcagcggaggcatgtggggcgcggtgggcgcaaacacccccgaccggagcgaccccggtcgtag

SEQ ID NO: 517029 - DNA, 1488 bp, Stenotrophomonas maltophilia
atgtctgaggaaatcctggtcaatgtgaccccgcgcgagacccgggtcgcggtgatcgaaaatggcatgctgcaggaactgcacatcgagcgcggctggcgccggggtgtggtcggcaacatctacaagggcaaggtacagcgggtgatgcccggcatgcaggcggccttcgtcgaagtcgggctggagcgtgccgcgttcctgcacgccaacgacgtggtgcggccggcgccggtagccagtgccgacaccgagaacaccacgctgccgccgccgtccagcgtgccgatcgtcgagctcctgcgcgacggccaggacatcgtggtgcaggtggtgaaggatccgatcggcaccaagggcgcccgcctgaccacccagatcagcattccctcgcgctacatggtgctgctgccgcagtccaaggtggtgggcgtgtcggcgcgcatcgaggatgaaaccgagcgtgcgcgcctgaaggcgctggtcaccgaactgtcggcgcagcacgggggctacggctacatcgtgcgtaccaatgccgagggccagccggccgaagccatcgccgaggacatcgcctacctgtcgcgcgtatggaacgtggtcgagcgtcgtggccgcgaagcggcctcgtgcagcaacatctatgaagacctgagcctgccgctgcgatcggtacgcgacctgatccgcaaggatgtggacaaggtgaaggtggactccaaggagaccttcgcgcagttgcaggcctttgttgccaagtacatgccggtgctggcggagaagatcgagctgtacagcggcgatcgcccgatcttcgacatgttcggggtggaggacgagatcggccgcgcgctggacaagcaggtgccgctgaaatccggtggttacctggtgatcgaccagaccgaggcgatgaccaccatcgacgtcaacaccggttcgttcctcggccagcgcaacctggaagagacggtgttccgcaccaacctggaagcggcacaggcggtggcacggcagctgcgcctgcgcaacctgggcggcatcatcatcatcgacttcatcgacatggatgatgccgagcaccgccgccaggtattgcgtacgctggaaaaggcgctggcccgtgaccatgccaagaccacggtgtacgacttctcgccgctgggcctggtggagatgacccgcaagcgcacggtggaaagcctggagcgccagctgtcggaaacctgcccgcagtgcagcggccgcggcagcatcaagaccaccgaaacggtgacctacgagatcttccgcgagatcacccgtgccgtgcgccagttcgatgccgcgcgcctgctggtgatcgcctcgaccaaggtggtcgcgcgcatcaccgacgaggaatccgcggcggtggccgagctggaggaattcctcggcaagagcatccgcttccaggcggacgagcagtacctgcaggagcaattcgatgttgttctgctctga

SEQ ID NO: 517030 - DNA, 1635 bp, Stenotrophomonas maltophilia
gtgcacgtagccaccggcacgcaggctcagacgaccgtcctggccgaggtggcgcaccgccagttcctcggcgccgaaaccgccgttgctgtagcgcgcctgcccatgcatgttgtcaaaggtgagctggaagcgcttgtcgaccagcttcacgccggccagatcgaccgttccctgcaggtggccgccaccttcatcgtggtgcagcggctgcagcagatcgaaggtcacatgcgccgggcccgcagcggtgaggttgtccagggtgtcgccataatccttgtgcagcgggctctgccgcagcatggccagcagcctgccggcctcgctctgcgcatcggcacgcacgtacagcggctgctgcccgaaatcctggatgcccgcctcgaatttctgcaccgccacgccggccagatcgccgcgaccgtgcatgtcgaagccggggccgatgaatgcgatatcggcatcgacctggcgcatcaacggccagtcgtgctggaagcggatgtcaccattggtgatatggccggtcgcctcgaagcggccatcgttgttgtcgaacggccagtcgtccaggtcgccactgaccaggccgatgccgttgcgcacctgcccaccggccagcgccatgtccagccagtcggtggcgcccttgctcatcttggagtggatccagaagcgcttggccgcggtcatcggcacgtcgtccagcttggccgccagctgcagccacggccgcgtaccgtcgccctggaaccagacaccaccgcgcacgtccgccgcgtaatcggtgccttccacgcgcatcgctgccgtgccgatgcgccagccaccgccttcatcgcgccagcccaccacctggcccgccaggtgcagatcgtggcgcacgccgaaaccggtcggccaatcgaactgcagctggcgttgcggctgcagctgcaggctgaagccatccgcgtcgccttcgaagcgcccgcccaggccgcgcaggccgggcgaattgcccacgctggcgaagcccagcgactgcagttcgccctgcgcccacagcgggccatcacgttcgcccgccagctgcagctcgcgcacgtccagctgcggcctggacaggaacagccagcgacgcaggccgggttcaagacgatcgctcagggccagcgcacgcagcgcgatgccggcctgcacttcgccagaactgacccgcagctgcttgccgagctgcagctgcaggccatcgagctgctgctcgccttcttcggttttcaggcgcaggcgcggcacctgcaatgcccagccatcggcctggcgctgccagcgcaggcgtgcctgcaaccgctgcagctgcagctgcggagccgccatcgcgggcatcggtgcgccatcgatgcggacatcacgcaggtccgaatcggtggtcaccgccaccggcgcgaaatcgcgcagggtcagccacaggttgagttcgcccttgccttcgcgcaggcgcacaccgccggccgccagcagcggcgaccaggcatgaaaatcgaccggatcggcgcccagccaggcctgaccgttgccgcgcacgcggtccacgtccagcaccgccgtcaacggcagcgcttcggtctgggcccaggcgcgcacgcctag

SEQ ID NO: 517031 - DNA, 861 bp, Stenotrophomonas maltophilia
gtgcgggcaccaccgctgcggcccagccagcgaccactgatgtcgatctcctggtcgggcgcacggaagcgcagctcatccacgttcaggccattggccagcggccgcgtacgcagcaccgcctggcccagcaccactttgccgaacttcaggtcggcgatgtccagcgcgaacggcggcagcttggccgggtccatgtcgttggcgcctgcctgtacccgtgccggtgcggccggtacacctggagccgccggcaatgactgccagtgcacgcggtcgagctggccactgatggtgccgccgtctgcattggggacggtcaggcgcccggccagcgacgggccgtccaggcgtacatccagtgcctgcgctcccgggcgcagctgcaaccgggtctgctcgaacacaccaccgatcagcatcagcttgccgacctgcacatccaccgcacgcagcggcatgccgtcatcgtcgttgccactacgggccaggccgatccactccagcgcatccagggtcgggctgcggccattcacggacagtccgctcggtggcggttcgcgatcggcatggtcgctgcccagcgtcacctgcacacccgtctggttgttgtggctgcgcgcagccagcgccaggcgctggccgaacgacacgtcgatgcggccggcccccatcggcagctgtgcagccacggtggtcgccaacggctcggcagccggtttgtccagcggcgccggcaggtccagccgggtcccgaccagatcggagctcaaccgcagctcgctgggcggcgcaggcgcccccggagcgaccttgggcagattgaccgcgatggtccacggcgaggtgccggcgatgtag

SEQ ID NO: 517032 - DNA, 498 bp, Stenotrophomonas maltophilia
atgcagcacggccatgacggcggccttgctgtgcatcagctcctccatctcgaaaccctgcacgtccgccatgcccagccggtcgtggtcggcatccagcagcttgccgtgcgcgccgcccagcacatagggcgcgagcgcctggcgcagcgcgttcgattgcagcagcaccgacaggccggtcatcgtgcgctgctcgacgggcgcaccggccaagctgcccagcgccgaccagatggcggctttctcgtccgggccgactgctacgccttcatgcagcaaacggccttcgatccattcggcggcccaggtgcggtagccttcgcggtcaatgcgggcgagcggctggaaggcgatttcgccgtccgtgcccaagtcgtagtgctcgccgccaagcccgaggatcgtggcgcgcatcgaacgccccatatcgaacgcgaagatgcgcgagccgaggtagcggcggaactgcatcgccagcgtggcgagcagcactga

SEQ ID NO: 517033 - DNA, 978 bp, Stenotrophomonas maltophilia
atgcgcgttgcgctcggggccggcccacacggccgacaccggcatcatgtgcgccaggttcagcgtcgagacgatcggctggcgcacgttggcataggcgttgccggggagcgaggacagccacgcatccacggcattgagcgtttcggagatggtcacgaagccccggccctggatgacgcgctccaccatgcgcagcttctcgtcggctgcggccgggtcggcatcgagcaccgtcaccgtggcggtgaggtagccgaaggcgacttgatcactgcccagctcctgcaacgcggcatcggcatcggtcgccttgttcgaggcatccgtgtccaccagcggcgactcctgttggaagatcgtttcgcgcagcagcgcgatgacgttcttgcgcttggcgaaccactggcggcgcaggcgggcgaggtctttttccgcctcggatttgtccatgcagaggaagcgcgtactccagcgatacgcaaatccgaggcggttgaggtcgtccagaatccccggccaggtcgaggtcggaaagccccgcaccgacaccacgcgcaggtgccggtcgcccagcatgggggccaggccgccaaccagcggcgagtcggccagcagcgcgtcgatgtggaaaggcacctcgggcacaccgacgcgatagcgtcgcgtcgagatggtcgcgtgcaggtaggtcagggtctgcgcgtcatcgagccaggcaatttccggcatgacgccatcgagctggtcaaagacccgatccgtttccgcgacgaaggcttgcagccgctcgcgccagtccacgccattcgtcggcgtgttctcgtagagcatcttggcggcacgagcgcgcgattcttcaggcggcaggtacaccagcgtcaagtgatagccgctctcgaagtgatggccggtgtcctcgaaggccgagcggcgttcttcgtccaccagccacgacagcgcctccggaaactctga

SEQ ID NO: 517034 - DNA, 273 bp, Stenotrophomonas maltophilia; identical to SEQ ID NO: 82561

SEQ ID NO: 517035 - DNA, 2004 bp, Stenotrophomonas maltophilia; identical to SEQ ID NO: 82565

SEQ ID NO: 517036 - DNA, 279 bp, Stenotrophomonas maltophilia; identical to SEQ ID NO: 82566

SEQ ID NO: 517037 - DNA, 945 bp, Stenotrophomonas maltophilia; identical to SEQ ID NO: 82567

SEQ ID NO: 517038 - DNA, 357 bp, Stenotrophomonas maltophilia; identical to SEQ ID NO: 82574

SEQ ID NO: 517039 - DNA, 378 bp, Stenotrophomonas maltophilia; identical to SEQ ID NO: 82578

SEQ ID NO: 517040 - DNA, 1239 bp, Stenotrophomonas maltophilia; identical to SEQ ID NO: 241731

SEQ ID NO: 517041 - DNA, 393 bp, Stenotrophomonas maltophilia; identical to SEQ ID NO: 82582

SEQ ID NO: 517042 - DNA, 1197 bp, Stenotrophomonas maltophilia; identical to SEQ ID NO: 82583

SEQ ID NO: 517043 - DNA, 267 bp, Stenotrophomonas maltophilia; identical to SEQ ID NO: 82585

SEQ ID NO: 517044 - DNA, 1995 bp, Stenotrophomonas maltophilia
atgaccgaccgccgcgacgacgatttccgcgtgcgccccagcgccccgaagaaccggggcaagggccaggggcagagcttcgtttccaaggtgctcaaacaggcgggcaaagccagcagcggcaagtccacggtgcgccgtccggcatcggcgagtggcaccggccagcggcccggctcgcgcctggggcgcggccacacggcagcacgcttcgccggggcgaagctgacgcctatgtcgcggcgcgcgaccatcaagacgctgctggtgaaccaccagcgggccagcccgcagtcgctcgccaagcacctgcgctacatcgagcgcgacggcgtgggccgcgacggcgagccgggccaagcctacgggccgcagacagacgtggccgatctcgacgccttcaaggaacgctgcgccgacgaccggcaccatttccgcttcatcctctcgcccgaggatggcgcggagctggaagacctgcgcacctacacgcggcacctcatgggccgcatggaggccgacctgggtacgggcctcgattgggtggccgtgaaccactggaacaccgacaacccgcacacgcacatcgtcgtgcgcgggcgcgacgacaccggcaaagacctcatcatcgcgggcgactacatcgccgatggcttccgctatcgcgccgccgagctggcgaccgaatggctggggccgcgcaccgaactggagatccagcagaccttgcagcgtgaggtggagcaagagcggtggacgagcctggatcgcaccctcaagcgtgagataggcgaggccggcggcgatggcctggtgcgcgtcgaaaggttcaacgccccccgcttgcagcgccaacgcctgatgctaatcggccgcctgcaacacttgcagcgcctgggcctggccgacgagacgcagcccggcacctgggccatccatgccgatgcggaaaagacattgcgcgcgctgggcgagcgcggcgacatcatccgcaccgtgcagcgggccatgcgcggcgagccgcgcgagctggccgtgttcgagccgggggacgatggccgaaccatcctcggccgtgtggccgcgaaggggctggccgacgagctgcgcgaccggggctatctggtcatcgacggggtggacggcaaggcccattacgtcgcgctcaacgcccgcgacgagctggcgaactacccgagcggcgccgtggtggaggtgaaaggctcggccgacgtgcgcgcagccgacaagaacatcgccgcgctggcgagcgatggcctgtaccgcactgaccatcacctggcgatcgggcagggccgggccaaggccggacgcgacccgcaagaagtcgtcgccgcccacatccgccggctggaggccctgcgtcgggccggcattgtggagcgcgttgccgaagggctatggaaggtgccggacgacctggccgagcgtggccgccagtacgacgcgcagcgcctgggcggcgtggccgtggagctgaaatcgcacttgcccatcgagcggcaggcccgcgtgatcggggccacgtggctcgaccagcagttgatcggcggcggctcgggcctgggcgacctgggctttggtggcgaggccaaacaggccatgcaacagcgcgccgacttcctggccgaacaggggctggccgagcggcgcgggcagcgcgtgatcctggcgcgcaacctgctgggcacactgcgcaaccgggaactggcacaggccgcgaagggcattgccgctgaaaccggcctggagcatcgcccggtggccgacgggcagcgcgtggctggcatctaccggcgcagcgtcatgctcgccagcgggcgctacgcgatgctggacgacggcatgggattcagcttggtgccgtggcggccggtgatcgagcagcggctggggcagcatatcgccgccgtggtgcgcggtggcggcgtatcttgggagcttggacggcagcgcgggccaagtatttcttga

SEQ ID NO: 517045 - DNA, 507 bp, Stenotrophomonas maltophilia
atggcaaccaagaaagctgcgaagaagaagcccgccgccaagaaagcggtgaagaaggtcgcgaagaaggctgctgccaagaaggcagtgaagaaggtcgcgaagaaggcgaccgccaagaaggcagtgaagaaggctgcgaagaaggtcgccaagaaggccactgcgaagaaggcagtgaagaaggcggcgaagaaggtagccaagaagtccactgccaagaaggccgtcaagaagaccgccaagaaggccgtcaagaaggtagccaagaaggccaccaagaagactgccaagaaggcaacggcccgcaagccggccaagaaggtcgcgaagaaggcgactgccaagaaggccgccaagaaggcagtaaagaagaccgcgaagaaggccaccaagaaggctgccccgaagaaggcagcgaagaaggttgccaagcgcaagccggccgcccgcaagaagaaggccgctccggtcgctctgccggcaaccccggcgccgctgatctaa

SEQ ID NO: 517046 - DNA, 420 bp, Stenotrophomonas maltophilia
atgaaagagagagtactggccactctcgcagaaggtgcgcaggaagcacgtcgacatgccgactggctgaactgggtatttggcatcaccacgtttggcctgacgctgaccgcattacagtttgcatcgccctggaagatcgcattgctatgtcttccgatcgtgctttccatgtatgtctacgcgtggtactccttccccccaacgctgaggacactgcgcaagctggcgaaagagcatccggaagatccagatattgcaaagctcacagccgaatttgagaagtcgcacaatggcctgcgggccttcatccgcgtcttgcccatgaccatcgcgatactcgtgtacctgtacgttcttgctacaggtatccctggatatgccttcttccacgcgggcattgaggctttgaaggcctag

SEQ ID NO: 517047 - DNA, 831 bp, Stenotrophomonas maltophilia
atggaacgcattgaacaccgcgcctgtttcggcggctggcaggacgtctaccgccatcattccaccacgctgggctgcgacatgcagttcgccgtgtacctgccgccgcaggcggaaacgcaggcgctgccggtgctgtactggttgagcggcctgacctgcaccgagcagaacgtcatcaccaaggccggcgcgcagcgctatgcggccgagcacggtgtgatcatcgttgcgcctgataccagcccgcgcggcgatgacgtggccgatgccgaaggctatgacctgggcaagggggcggggttctacctcaacgccacccgtgcgccctgggcggagcactaccgcatgcatgattacgtggcacaggaactgccggcactgatcgaggcgaatttcccggtcaccgatgcgcgtggcatcagcggccactcgatgggcggtcacggtgcgctggtgatcgcgctgcgcaacccggggcgctaccgcagcgtgtcggcgttctcgccgatcgttgcacccagccacgtgccgtgggggcagaaggccttccatgcctacctgggcgacaacccggcggactgggcgcaatgggatgccagcgagctggtcgctgtggcccgtgagcgcctgccgttgctggtcgaccagggcgaggcggacgaattcctgcagacccagctgcagccgcagcgcctgcagcaggcctgcgatgccgccggccatccgctgacccttcgcctgcagcccggctacgaccacagctactacttcatcgccagtttcatcggggagcacatcgcccaccacgcccgcgccctgcacggctga

SEQ ID NO: 517048 - DNA, 360 bp, Stenotrophomonas maltophilia
atgggctggctggatgccctgcgccggccgcgtgcggaagacccgcgcgcggcgctggtggccccgatcgagcaggcgttgcgtgcgctgggctgggtagtgggcgaggtggggccagcgcgtacggtgacctcggccttcggcagcgacgatggcatgccattcgagcaatggcttgcgcaggtattcctgccgcgcctctacgaggcgcgcgcggccgggcagtggccaccgcgcagcgatgtggcggtggcggcctctcgcaatcttgatggccagcctggcgtcgaaccattgctgcgcctgctggcgcagctggatgaacggatcaacaaaggcatccacgccgcgcgtggataa

SEQ ID NO: 517049 - DNA, 1110 bp, Stenotrophomonas maltophilia
atgaagtcccgtgccgccgtcgcctttggtcccggccagccgctgcagatcgtcgagatcgacgtcgccccgccgaagaaaggcgaagtgctggtcaagatcacccacaccggtgtctgccacaccgatgcgttcaccctgtccggcgatgacccggaaggcctgttcccggtggtgctgggccatgaaggcgccggcatcgtggtggacgtgggcgagggcgtgaccagcgtcaagcccggcgaccacgtgattccgctgtacaccgccgagtgcggcgaatgcctgttctgcaagagcggcaagaccaacctgtgcgtgtcggtgcgcgccacccagggcaagggcgtgatgcccgacggcaccagccgcttcagctacaacggcgagccgctgtaccactacatgggctgctcgaccttcagcgagtacaccgtggtggccgaggtgtcgctggcgaagatcaacccggaagcgaacccggaacacgtctgcctgctcggctgcggtgtcaccaccggcatcggcgcggtgcacaacaccgccaaggtgcaggaaggcgacagcgtggcggtgttcggcctcggcggcatcggcctggcggtgatccagggcgcgcgccaggccaaggccggccgcatcatcgcggtggacaccaacccgtccaagttcgagctggcgcgcgaattcggcgccaccgactgcatcaatccgaaggactacgacaagccgatccagcaggtcatcgtcgagatgaccacctggggcgtggaccacagtttcgagtgcatcggcaacgtcaacgtgatgcgcgcggcgctggaatgcgcgcaccgtggctggggccagagcgtggtgatcggcgtggccggttcgggccaggagatctccacccgcccgttccagctggtgaccggccgcaagtggatgggcaccgcgtttggtggcgtgaagggccgcagccagctgccgggcatggtggaagacgcgatgaagggcgatatcgaactggccccgttcgtcacccataccatggacctggacaagatcaacgaagccttcgacctgatgcacgcaggcaagtcgatccgttcggtggtccactactga

SEQ ID NO: 517050 - DNA, 276 bp, Stenotrophomonas maltophilia
atgccgcactcccccgaggagaagaagaaggtcctggcccgcgtgcgccgcatccgcggccaatgcgatgcgctggaccgcgcgctggaagccggtgccgactgcgggccggtgctgcagcagatcgcggccatccgtggcgcggtcaacggcctgatgtccgaagtgatggaggcccatctgcgcgaggagttcgggcaacccgcagcctccgacgaacaacgcgccgaacgcgtgcgcgacatgagcgcgttgatccgctcgtacctgaaataa

SEQ ID NO: 517051 - DNA, 420 bp, Stenotrophomonas maltophilia
atgggcgttggcatccagctcgggcgcatcaccgatgagatcggtaccggggcatttctctatgcctttttctcgaccatcgccggaaacctggaaccggatggctggggaagtcgcttcccaatcctcatgaagcagctatacgccgggggcttgctgcaatcagatgctgccgacgcgctggccgaactgcatatcgtccgccgcgagctggccgagattccgccggcccgtgtcatctggtcgttcgaggatcgaacccagcacccaccatggggagacgatatcgctcccgatatcgacagcctggcgacctacttcgtcaccgcacatgggcgcgatctgatcgtgcttctggctgaggtgtttgaagcactgcaggaaggcgaagacacgtccgtccggatcgtcaactattga

SEQ ID NO: 517052 - DNA, 906 bp, Stenotrophomonas maltophilia
atgctgccgctggagtccttgaatggcctggtgacctttgtcaccaccgcacgctcgggcagcttcaccgaagctgccgatgcgctgggcatctcgcgctcggcggtgggcaaggccatcgcgcggctggaaacacggctgggtgtgcgcctgttccatcgcaccacgcggcgcatcgcgctgaccaccgatggcgaggcgtactacgcctcctgtgcggcggcgctggaagagatctccgcggccgaggcctgcctgggttcggccggcctgcccagcgggcggctgcgcatcgacatgccgtcctcgttcgggcggctggtggtgctgccggtgctgttgcggctgtgccggcagtacccggacctgcagttgacgatgaccttcaccgatcacttcgtcgatccggtcgaggaaggcatcgacctgctgatccgtttcggtgggctgcaccaggcagagcatctggtggcgcggcggctggggcgccagcggctggtcacctgcgcatcgccagcgtacctgcaggcgcatggcaccccgcacaccgttgaggaactggcacagcaccgcagcatcgtcggcttccgccacggccagccggtggcgtggcggatcggcagcgatgatgcggaaggaaccttcattccgaatgcggcctaccagctcaacgacggtgacgcggtgatcgacgcggccatcgctgggctcggcatctgccagatgcccatctcactggtgcgccgtcatctggagtccggcgcactgcactcggtgctggatgcgcacatgcagcggcatatcgacatccacgcgctgtggccaccgacccgccacctgcggcctaaggtgcgctatgtggtggacgaactggcggggatggcggaagaaggtctgtttgattga

SEQ ID NO: 517053 - DNA, 1104 bp, Stenotrophomonas maltophilia
atgaccgccgccctgttccaccccttcgacctggcaggcaccgccctgcgcaaccgcatcgcgatggccccgatgacccgcgcccgaaaccccggcgcggtcgccaacgcactcaccgcgcagtactaccggcagcgggccagcgccggcctgatcatcagcgaaggcacgccggtctcgccgcagggccagggctacatcgacgtgccgggcatctggtcggccgaacaggtggccggctggaagctcgtcaccgaggcggtgcacgccgcgcagggcacgatcttcgcccagctctggcatgtcggccgcatgtcgcacagctcgctgcagcccgatggtgggcaaccggtcagcgccggcacgcgcccggtggccagcgcaccgaagaacacctcgttcgtctatctggacgacggcagccgcggccacgccgatcccactccggcgcgtgcgctggccaccgaagagatccccggcatcattgccgacttcgcacgcggcgccgacaacgccatcgctgccggattcgatggcatcgagctgcatgcggccaacggctacctgttcgagcagttcctcaacccgctcatcaaccagcgcgaagaccactacggcggctcgctgcccaaccgtgcgcggttgatcctggacaccgtcgatgcgatggcccagcgcatcggtgcgcagcgcatcggcgtgcgcctggcaccgaacaatctcaccttcgacatgccgttctaccccgacaacgaagccacctatctgtacctggccgaggaactgggcacgcgcggcctggcctatgtgcatctcaacgacaaccagcaggcgggccagtcggtgctgggcgaggcgttcctgcagcagttcaagcaggcctacggtggcaccgtgatcctggccggcggcatgacccgcgaacgcgccctgcagctggtcgaggccggcaccatcgacctggccgcgttcggccagccgttcatcgccaatccggatctggttgaacgcctgcagcgggacatcgcgctggccacgcccgaccgcagcacctattacggcggtggcgaagcaggctacctcgattacccgctggcaccgtag

SEQ ID NO: 517054 - DNA, 570 bp, Stenotrophomonas maltophilia
atgcatgagcaggatatagccgtacgattggagcgtctggagcgcaggctgcgtcgcaggaatctgcttgccacctcgatgttcgtgctgggcgcctcgttcgccctgatcggaaccagcgtggccacgcccgacaccggcgtggtgccggagatccgtacctacaagctgaccgtgctcgacagtgaagggcgcacgcgcgtgcagattgccgaggatgccagtgacattgcccgcaactcacgcgccacgggcatgacgatctacgacgcgaagggcgatgagcgcggtggcatcggcaccatggccaatggcagcgcggtgatggcgctggatgcaccggttggcgtgggctacaaggttcgcgatcgggcaggcatcagggttgcgcctgatggcaccgccgtgatcacggcgctgtccaacgagggcagttttgccgccagcctggtggcgcagggcaaccaggggcggcttgagctgacccgcaaggattcgggtaaaggggagatcagcacccgtgtgctgacctttgattcggactcgaccagggtggagaaggcgccgtga

SEQ ID NO: 517055 - DNA, 138 bp, Stenotrophomonas maltophilia; identical to SEQ ID NO: 516928

SEQ ID NO: 517056 - DNA, 432 bp, Stenotrophomonas maltophilia
atgacgaaagtccccatgaactctgtcaccacgtcgttcatcgtcaacctcgacgtgcccgatcctgctgccgctgaagccttctacatcgaagccttcggcctgcgggtcggccgccgtctcggaccagaggcagtggaactgctcggcgggccaacgccgctgtacctgctgcagaacgaagctggcagcgccgcaactgaagatggcgacgtacgcgactacgagcgccactggacgccactgcacctggactgggtggtggatgacatcgaggccgcactgacgcgtgcgattgcggccggggcgacactcaagcaatccgtgcgcgagcgtcgctggggccgcatcgccgtgctggccgacccgttcggccacggcttctgcctcatccagttcagtggcgaaggctacgacgcgctggtcgaatga

SEQ ID NO: 517057 - DNA, 696 bp, Stenotrophomonas maltophilia
atggataccgctgtgaacgcacgcgcctggctggaccaccacgatctgctcgacccggcgccgatgcacctggagaccggcatccagcgccgcgaagacggcaccatgctggtggcggtgcgtaccgatctgcacggctgcaagggccgcatgctggactggtggttcaccttcttcgagaccacccagcacatccgctggtggcatccggtcgatcatgtcgagcatcgcggctgggacgcggcgtggcagcgcgggcgcagctaccacggtgccagcatccatgcggtggaatcgctggccgacattccgccggtggcggcacgcctgaagttccacgacccgcgcacgctgctggtgccggagcgcctgcaggcggcacaggatgcaggcgatgtatcggcggtgatcgccgcgcgcatcggcttcggcgaccacgtccgcctggatgcaaacggtgatccctgcgacgggcagatgctgcacgtggcgcgtgatacgccgtttggctgtgtgctgcgcagccgcttcgtgctcggcctggacagcgccgatccgcaccgcgaggccggcgatgcggtcggcctgggcctgctcaagcactgctatacggagttcagtttcctctcgcgcttgctgccgtcgctgtactacggcgagagtgccaatggcgaggcagtgcctttgccgtggtga

SEQ ID NO: 517058 - DNA, 663 bp, Stenotrophomonas maltophilia
atgggcgcaatgaacagcacgaccctgtccgagtccacaacgccgacccgccgccgcggccgccctgcgcgcccggaggcggaagtccgccacgcggtactgcaggccaccctggagctgctgctggcacagggttacgaggccaccaccatcgaagcggtggcggcgcacgccggggtggcgaagaagacggtgtatcgccacgccagcaatcgcgaggaactggttgggcttgcggtgcgcgaatggaccgacggcttcgcgccacagttgcagcgcgatgcgcgcaatgccgaagaggtcgtgccgctgttgcaggacatcctgcaggcggtctgcgcgcaggcgctgtcggcgcaggcggtgcaggtgttccgcctgctggccaccgatttccccggcaaggacgcgctgctgcaggcctatctggacaatggcatcgaacgcggccgagcgctgctggctgactggctggcgcggcagcagcagcgcgggctgctgcgtgagggggattccgcacgcatggcgcgactgatcctggcaatggccgtggccgagccgctgcgcgaacgcgtgatcggcgtggtggccgaggatgtgccggtggaggtgcacctgcgtgagtgcctggcgttgttggcgccggtgttgcgggtgccgtag

SEQ ID NO: 517059 - DNA, 885 bp, Stenotrophomonas maltophilia
atggccactgacaacctcacccacctggccgcgtttgccgcggtcgcccgccaccgcagcttccgccgcgccggtgccgagctggcgctgtcgacctcggcggtgagctatgcgatccgcgcgctggaagagcggttgggggtgggcctgttccatcgcaccacccgcagcgtggccctgactgaggccgggcagcgcctgctggagcgcctgcagccggcgctgggccaggtgcatgacgcgctggaagagatgaaccagttccgtgccgccccggccggcctgctgcgcatcaacgccacccgcgcggcggtaccgacccagttggggccgcgactggcgcgcttcctgcacgctcaccccgacgtgcgggtggagctgaccgagaacgatggcctggtcgacatcgtcgccgagggctacgacgccggcgtgcgcctgcacgagttcgtgcccgaggacatggtggcggtgccgatggggccaccgctgcgcgggctgattgtcggctcgccggactacctgcggcgacacccggcaccacagaatccgcgggacctggcggcacacgaatgcatccgcttccgcttcgccagcgggcatctctacaagtggcagttcgagcgtagcgggcaagcgctggagatcgatgtgccgggccggctcacgttgagtgagcagggcaccgtcgtgggtgcagtgcttgatggcatcggcctggcctacgtactggaagacacggcaaggccctacattgattcggggcagatggtggcggtgctggaagactggagcgaaccgttcgccggcttcgcgctgtactacccgaagcagcggcagatgcccggtgcgctgcgcgcgttcgtggatatgctgcgcgaatga

SEQ ID NO: 517060 - DNA, 1059 bp, Stenotrophomonas maltophilia
atgtccctcgcccgtggttacgccgcccattcacataccgacccgctgattccgtacgagttcgaacgccgcgcggtcggcccggacgatgtgcgcatcgagatcctctacagcggcatctgccactccgacctgcaccaggcccgcgacgactggggtggctcgatctacccgatggtgccgggccacgagatcatcggccgcgtgaccgaggtcggcagcaacgtcacccgcttcaaggtcggcgaccacgccggcgtgggctgcatggtcgactcgtgccgccactgcgacgcctgcgagcacgacctggagcagtactgcgccgaaggcgcgacctggacctacaacggccgtgaacgcgaaagcggcgcaccgacctacggcggctattccgaccacgtggtggtcgagcagcgcttcgtggtgaaggtatccgacaccctcgacctgaaggcggccgccccgctgctgtgcgccggcatcaccacctggtcgccgctgcgccactggaaggtcggcccgggccagaaggttggcgtgatcggcctcggtggcctcggccacatgggcgtgaagttcgccaaggcactcggcgcgcacgtggtgatgatcaccaccaccccggaaaagggtgccgacgccaagcgcctgggcgccgatgaggtgctggtctcgcgcgatgtcgcgcagatgaaggcgcacgccggcagcttcgacttcctgctcaacaccatcccggttggccatgacaccaacccgtacatgggcctgctcaagcgcgaggccaccatgtgcctggtgggcgtgctgaccgaactggacccgccgctgaccggcggcagcgtgatcttcggccgcaagcacctgaccggctcggcgatcggcggcatggccgagacccaggaaatgatggacttctgtgccgagcacggcatcgtcagcgatgtggagatgatcgacatcaagaacgtcaacgaagcctgggaacgcatggcgaagaacgatgtgcgctaccgcttcgtgatcgacatggcgacgatgaagaacgcggcctga

SEQ ID NO: 517061 - DNA, 1365 bp, Stenotrophomonas maltophilia
ttgtcgagccccagccacgtcgccgatacacccattaccgaccgctcgcagctggtggaggtgatcgcctccggcgagaagccccgcgcgcagtggcgcattggcaccgagcacgagaagttcgggttccgcctggatgacctgcgcccaccgaccttcgagggcgagcgcggcatcgaagccctgctcaacggcctggtccgcttcggctgggagccggtgcaggaaaacggcaacacgatcgccctgctgcgcgatggtgcctcggtgacgctggagccggccggtcagttggaactgtccggagcggcgctggagaccatccaccagacctgcgtggagaccggcacccacctcaacgaagtggcgcaggtggccggcgaactgcagctgggtttcctcggcatgggcttccagccgaagtggaagcgcgatgagatgccgtggatgccgaagggccgctacaagatcatgcgctcgtatatgcccaaggtcggctcgctcggcctggacatgatgacccgcacctgcacggtgcaggtgaacctggactacgccaccgaagcggacatggtgaagaagttccgcgtgtcgctggcgctgcagccgatcgccaccgcgctgttcgccgattcgccgttcaccgaaggcaagccgaatggctacctgagctaccgctcgcacatctggaccgacaccgacgccgaccgtaccggcatgctcgacttcgtgttcgaggatggcttcggttatgagcgctatgtcgattacctgctcgacgtgccgatgtacttctcctaccgcgatggcatctatcacgacgccagcggacagagcttccgcgacttcatgcaggccaggctgccggtgctgccgggtgcgctgccgaccctgcgcgactggtcggatcacatgaccaccgcgttcccggaagtgcgcctgaagaagtacctggaaatgcgcggcgccgacggtggcccgtggagccgcctgtgcgcgctgccggcgttctgggtcggcctgctgtacgacgacaccgcactggatgccgcctgggacctggtgcgtgacttcaccctggccgagcgccatgcactgcgcgacggcgtgccgaagcatgcaatgaacctgccgttccgtaatggcagcgtgcgcgacctggcccgcgaagcggtgaagatttccgtcgaaggcctcaagcgccgcgcggcgcgcaatgccgacggccaggacgagagcaagttcctggacgtgctgcaggagatcgtcgaatccggcctgaccccggccgagcgcaagctggcgctgttccatggccgctggcacgacgacgtcgatccggtgttccgcgagttcgcgtattga

SEQ ID NO: 517062 - DNA, 705 bp, Stenotrophomonas maltophilia; identical to SEQ ID NO: 512760

SEQ ID NO: 517063 - DNA, 825 bp, Stenotrophomonas maltophilia
atgaccgccatgctgcccgcggccaccgcactgctggctgagatggccagtttggccggctgcgagcgcgccgacggctatgcctgcatcaccgcacgtcgcgagcatggcgccagctcggtggagattccgcaaccgcagttcgcgatcctgctggaaggtcgcaagcaggtgcgtaccgctcatcagtctctggcgttcgttcccggcgacatcctgctgctgacccagcgctgccgcatcgatgtggtcaacacccccgacccgcgcagtggccgttacctcagcgccatcgtgccgctgtgtgccgaagtgctggcggccgctcgcacgctgtggatcgaggggcttcccgcgcctggccaggcgatggcgcggttgccgttgatcgaacatggtgcggtactgcgccaatggcggcaatcgctgcaggacgggcgttacagcgaagcacgattggcgctggcctcgctggtactgaccttgtgccggcagggccacggcaacctgctgctgccgcaggcgccgagcctgggcgaacagatccgcgaccgcatcgccgccgaaccggcacgcgactggcagtcgcgcgatgtggaagaacagttcgcgctgagcggcgcgaccctgcgccgccggctcgctgccgaggacaccagcctgcgccagctgctcaccgaggcacggctggcgcatggcatgcagctgctctacaccacggacctgccgttgaagaccgtggccgcacgcgcgggctaccggtctgcggcgagtttcagcaagcgcttcgccgagcagtacgggctggctcccacagacatttga

SEQ ID NO: 517064 - DNA, 978 bp, Stenotrophomonas maltophilia
atggctcgccgagatgaaggacaagctggtgccggacggcaatgggctgttcgccctgcggcccgagatcgaagccggggtccgggcgaccctgccgccagcctgccaggcgccggtgcgcttcatgctctcgacagagatttcgaccatctacaagaagggcgagcgcacgcgcaaggtccaccatgtggtctacgcccccgacttcaccagcgtcgaccggctggcggcgagcctcgggcggatcggcaacatcgcttccgacggccggcccatcctcggcctcgactcgcgcgatctgctggaagtggtgctggaatccgggccgcatgcctatctcgtgccggcgcacatctggacgccgtggttctcggcactcggctcgcagtcgggcttcgattcgatccaggaatgctacggcgacctcgccgaccacatcttcgccgtggaaaccggcctgtcgtccgacccggagatgaactggcgcgtctcttcgctcgaccgcttccgcctgatctcgaactccgacgcccattcgccggccaagctcggccgcgaggccacgcgcttcgccggcgcgccggacttcttcgccatgcgccgtgcgctggagaccggcgacggctacgtcggcaccgtcgaattcttcccggaagaaggcaagtaccacctggacggccaccgcgcctgcggcgtgtgtttcgacccggtgcagaccatcgcccacggcgggcgctgcccggtgtgcggcaagccgctgaccgtcggcgtcgcgcaccgggtcgaagcgctggccgaccgcgcggccggcctgccgccgccgactgccggcgcggtgaccagcctcgtgccgctgcccgaaatgctggccgaaatcctcggcagcggcgtcgcctcgcagggcgtgaagcgggtctacgaccgcgtgtcggccgcgctcggaccggatttcaccatcctcggcgagacgcccagtga

SEQ ID NO: 517065 - DNA, 1008 bp, Stenotrophomonas maltophilia
atggacccttcgttgcttccctctctcgcatggttcgcccacgtggcccatcatcgcagcttcaccaaggccgccgcagagatgggcgtatcccgggcggcgctgtcgcagaacctgaaggcgctggagcaacggctggccgtgaaacttctctaccgcaccacgcgggatatgtcgcttactgaggaagggaaacgcctgctcgatgcgctgcacccgtccctggacgcaatcgagcgagccgtgcacggcctgggcgaggcgcgccacgagccgtcgggcctgctgcgcgtgtacacgtcccgcatcgccgccaagacgctggtggagccgaatctggccgaattcctgtcacgctatcccgggctgcaggtggaactggtgatggacgatggcctatccaacattgtggccgaagggtgcgatgcgggcatccggatcggcgaaagcctggccgaacacgtggtggccgtgccgatcacgcccatgctggagatggcggttgtgggctcgcccgcctacttcgagcgtcatgggaaaccggccgcgccggccgacctggcgcggcacaactgcctacgctaccggcagaccaccagcggcgcgatcttccgctggcagttttcaacgcctggggacgagggacacgacttcaccgtggagccgcacggcagcgtcacgaccaatgacgacgacggcatgatccgtgtggcactgcaggatgtcggtctcatccagcacatggaaatcgccgtgcgcccctacctgaaaatgggaatgctggtgcgcgtgttgcagccatggtgcaagccgtttgccggcttttatctctatgtcccgagccgcgagcagatgccgaccagggtgcgggccctgatggattttctggtcgaaaaacgcgagctgctgtgcactccgcccaacgctcggccgcaatccggatcacgattgaaagcccccgccccatggcccggcggaacgacgcctataattccggggaccccatga

SEQ ID NO: 517066 - DNA, 972 bp, Stenotrophomonas maltophilia
atgagcagaatgtccgcagaacgtatggaaaaggcgctcgagcaactcaagaccatttccgcagaagaccacgccaaggtcaaagggttggccaatatcgtcaggccgttgcgcagcgtgctgcacaaaacccccgacgactatggcatgaccggctggcgcgacgtctatttcccctcggacgacggcatcccgctggaaggctggtacatccccgccaagggcggcgagagcgacaagctgatcattttcaaccacgccctgccgatgtgccgcgccggcttcccgggacatctgggcgagccgtggagcaacttcgacgccgtcgagatcgatttcgtgatccagatgaagcatctgaccgacgcgggctacaacgtgctggcctacgacatccgcaaccacggcaacagcagcgcggcgaacggcggcatctgcggcatcgggcgctgggaatggcgcgactgcgtgggcgtcaagaagtacgtggacagccatccggcgctcggcgcgatgaaagtggggctgtacagccagtgcacgggcggcaactcgcagtacgaagccatctaccggaggcccgatctgttcgagaacgtcgcttgcatgtgcagcccgatggtggtgtccatggcggccctctattcggcgttttccgagttgcagggtatcagccaataccaggaactgatcgacctggaattattgaagatgggagccttcacgatggacgagatgacaccccatctgttcgcggccggcgtcaagatgccggtgctgatggtgcaggtgctgcaggattcctggacccgcaatcccgaggatgcgcagaagaccttcgatctgctgggtagcaaggagaaggaactgttctggatcgagggcaccacgcgccgcttcaaggacggttacaactacttcggccggcaccccgagaagatcatcggctttttcgacaagtacatgaaatag

SEQ ID NO: 517067 - DNA, 624 bp, Stenotrophomonas maltophilia
atgaaccgcccgatcctccatggcctgaccgccttgtcgcttgccctgggcgcctgcgcctcccctccggtgcactatcacaccctgctcccggccctggaaaagctcccgaccgatcaagccccggccggattcctgatcgacgtccttgccgtcggcattccggcccagctggaccagccgcaactggtcgtacgccaggggccgaccggcatcgccgtgctcgacggcgaacgctgggccgggccgctgggcgaggaattgcgcgacgcgctgtcggccgaactcgtatcccgcctgaaaacccgggatatcgccggtctcgcccggccggcgcacacgcccgtattgcggctcaaggtgcagattcgccgcctcgacgcctggcccggccacaaggccgacctcgaagccgattgggcgctgggattcgtggacgaggcggccaatgcccggctggtgtgcagcggccggttcgaaacccccgttcggggcggctaccccgaactggtgctcgggcaacagcgcaacatcgccgcgctggcggaaagaatcgcgacgcatgcgcgcaactgggaacgctcacgcacctcggattgctcgagaggcgcgcagaggcagtga

SEQ ID NO: 517068 - DNA, 714 bp, Stenotrophomonas maltophilia
gtggtgtcggtaaccctggactacgatcaggtcaagcgccgttttcccaccgtggtcggcatcctgctgtatccccagcggctcggccgcgtgctgaaaaagattcccgcgccggcaggcgatcagcagcagcagacagtcaaattcctcggcgacatggtcgcgcacggtctgcgcgcgcaggtccgttccgccaacctgctgaccgggcaactctacgtctcgatagaacacgtccccaacacaccgaaagtggcgttcgacgaaaccgcacgcccgctgacgctgccgactgtcaacggcagcctcgaccgcctgcaggaacaggtcgccggcatcgtcgacaaaatcgacaaggtgccgttcgaggccatcggcaagaatctcgacaccacgctggcggaattggacaagaccctcaggcagatggatagccaggtcttgccggaagctgcgaagaccctgcagcacgcgcagcggacgctcggcacggcggaaggcgcgctggcggaggatgcgccgctgcaacacgacctgagccagacgctgcaggaagtacggcgcaccgcccggtcgctgcgcgtgttgaccgacctcctcgggcgctcccctgaatcgttgctgcgtggccgcccggacgaccgccctgccgttccggccaatccgccagccgatccgccaatgcccgatacgaagcaggagccgccacgatga

SEQ ID NO: 517069 - DNA, 234 bp, Stenotrophomonas maltophilia
atgggttgggatcaaatcatcatgattgccgtgtcgctgcttatcagctatgcgacacgcaccaagccgccgactccaaggccggcagcgctggaggaattcaacgtgcccgtagcagaggatggtcgcgagtgcgcaatgatcttcggcacggtctggattgatgacccgaatgttctttactacggtgatctgcgcaatacgccgatcaaggttaagggcggtaagaagtga

SEQ ID NO: 517070 - DNA, 678 bp, Stenotrophomonas maltophilia
gtggcaaatagtgattcgaagacgcatatccgccacaagaaaggtggtgccacgcttccagacaggtgtcagacacccgcgactgccgccagtgctatcggtgggcgaacccagagccggcatggaaccgtgggcggtctcgttgcctcgccccatgagggttccggcgtgcttgagagcttgggtggggccgttgagctggcgctgcgtagcttgcgtgccgaggtagatatccccacggttgtccaggcagtggtccagcgcatcgccgatgagtacggcggggccaatctttgctttccagtttccgccgagagcgctggacgccttagctatacgagggtgcgccgcgacgggttcatgcagtgcctgaaagacgaggtcattgctcagttggcgaaactgggctgtgaccaggcacgccgggaatctgccggaggagctgcggtggcagcagtggccacgacattctctggcggctcggtctatatcccttcgatggcagctgcccgccaggccgagcagcacgtggcaattgttgctcgctaccgcgcaggcgaaagaacccacgacatcgccgccacctttggcatctctgagcgctccgttcgtcgcatcttgcagcgaacgcgcgaacggaacaggcgcagtgcaaacagccgaggaagcgctgattaa

SEQ ID NO: 517071 - DNA, 1677 bp, Stenotrophomonas maltophilia
atggtggacggcccgctgatcgtcgccgccggccccggctccggcaagacgcgcatgctgacccaccgcctcgcgcacctgatcctcgaacgcggcgagccggcggacgcctgcctggccatcaccttcacccgccgcgccgcggaggaactgcgcgagcggctggccgcgctgatcccggccggcgccggcgaatgcgccatccacaccttccattccctcggcctcgccttcctccacgccgaaggcgcggcggccggcctgccggcggacttccgcatcgcccttgatcccgaacgcgccgccgcgctcgccgccgacctcgatgtcacccacgccaaggcgctgcgcctgctgaagaccgtgtcgctgctcaagcgcaccggcgcgccgccggccgacgaggaaagcgcggccgcgctggccgcctgccgccggctcggccaagccggccaatgggtcgatttcgacgatctggtcggcctgccggtcgacatcctcgaaaacgacccggccgtcgccgcgcgctggcggcggcgcttccgccacctctgcgtcgacgagttccaggacgtggacgcgcgccagtaccggctgctgcagctgctcgcggccgacgccgccagcgtctgcgcgatcggcgacgcgaaccaggcgatctatggcttccgcggcgccgacgccggctgcttcgcccgtttcggccggtacttccccggcgcccgcacgctgcgcctcgggcgcaactaccgttccaccggcagcatcgtcggcgccgccgcgcagatcatcggcaacggtacgcccgacgacgtgacccggccgatgcacgaaccgctgaccctgcatgttgcgcccgacgagcgggcggaagcggacttcgtcgccgccaccatcgaaagcctgctcggcggccacgacatgctcgccgccaaccgcaagggcgccggccgcgatggcggcgggcacggcttcgccgacttcgccgtgctctaccgcaccgacgcgcaggccgccgcattgcgcgacgccctcgaccgggccggcatcccgttcgggaaaagctcgcccgcgccgatcgccggccagcccttggtggccgcgctactcgacgcgctagcccggcaggacggtgaacaacagaccgccgccctgcccgagcgcatcgccgccgcggccgaacaactgcgcccggaacaggacgccgccggccaggccgcgctgctcgaagcccgccactggctcgccgcgctcaccgccgacgcggcggacgaaacgcaactgcgcgaacgggtcgcgctctccaccgaggccgatttctgggacgcccgcgccgaccgcatctcgctgctcaccctgcacgccgccaaggggctggaattcccggtggtcttcgtggtcggcgtcgaggacgggctggtaccgttctcctggggtgccgccgaccaagccgcccccggcgcggccgccgaggaacgccgcctgttctacgtcgccctgacccgcgccaaggaccgcctgttcctcacccgcgcccgcgaacgcgcctggcgcggccagcgccgcgctctgccgccctcgcctttcctcgacgacatcgcgccggaactgctgcgcacgcaggacgccccgccacgcaaggcgcgcgcggaacagcagcagtacacgctgttctga

SEQ ID NO: 517072 - DNA, 447 bp, Stenotrophomonas maltophilia
ttggcctacgacgtgacgaatctggatcgggagttcgcgcgcctgtatcccgagcaatacgccgccaccgtgagcggcgaccagatgtaccgcgacgcgcaggagcgttggcgaaacacgctcaacggcttgcagaccacgatgcagatgcaagctcaggtgtcgcagaacctgggcgaagacgaaagcgtgctggccgacctcgtgggcaagagccagtcggccgaaggtgcgttgcaggcaatgcaggccatgaaccagttgctggccttgcaggccaagcagtcgatccagtctcaacggctccaggtcacgcaggatcgtgcggcctcgctggaactggcgcggcaggcggcggccgccgagcgcgcccgcgaggtgcggcgacgtttcatgggcgatggcacgccgtacacgccgcagtccgtcaatttctaccgcgactga

SEQ ID NO: 517073 - DNA, 165 bp, Stenotrophomonas maltophilia
atgatgtgcctcgcgcaccaactgtcgtgcggccacgatcagtccgtcgatatggaaggcgcccaactgttcgtcagggccgccttcgttgcgcgcatggtcggcggctgcagcagatcgagcaatgcgccgagcccagatagcgagcggcgcaacgaagcgtga

SEQ ID NO: 517074 - DNA, 282 bp, Stenotrophomonas maltophilia
atgcacggctatccgtcatcaccgtcggcatggttgatcgcattgagacgggcgaagaaagtgggcagctacgcggacaatttctgcgcgttcagggcgcactcgatctcgcgtgcgaggtcttccggcacatcgccgcccctgccgaccgtgcacgagacgactccagagcggcgccgccccggcaatcgcgtcaccccgcgcggcggaggcgggaccatgccacgcatggagccagaagattccatccctgcgctgtcccgccgccccgggcaggcgtag

SEQ ID NO: 517075 - DNA, 456 bp, Stenotrophomonas maltophilia
atgccgtcggccgaggcttttgagctggcgctgtcgttgttggggaaggaggacgtcgatgaggggcgggccgaacgggacctggtcgccgctggcatcgatgccgggtttgcgcgccgtctgttgatctggctgccggaagcctttgccatggccctgatcgggcatatggaactggagctgcagctgccgcgtaccttcagcgcacacgatgagcagggcttcctgcatgaacttccgctgcactgcgagccgatattcgcggagggtcttgagcgtgccttgatgatgtatcaccagggaccacgcggcgccttcaaggcggtctgtcagcgcagttcgtcgctcaacgcggtcgacaatgccttgaacgcgggcgccgatctgaaaggcgcagtgctttcgggcccggagctactggaaatcccggcggagacctatctgcggggcgactga

SEQ ID NO: 517076 - DNA, 2769 bp, Stenotrophomonas maltophilia
atgttgaaccacaagcgcagtgcgctgagtctcgcgctggccgttgtgctggcgccgacgctggcgtcggcacagtccacgcagagcaccaccacgccggccgccaccgccgccaccaacctggatacggtgcaggttaccggcatccgccgcggcatcgagagcgcgatcgcggtcaagcaggacgccacttcggtggtcgaggcgatttccgccgaagacatcggcaagctgcccgacgtcagcatcgccgaatcgatctcgcgcctgcccggcctggccgcgcagcgcgtggcgggccgtgcgcaggtgatcagcgtgcgcggcctgtcgccggacttcgccaccaccctgctcaatggtcgtgaagtggtcagcaccggcgacaaccgcggcgtcgagttcgaccagtacccgtccgagctggtcaacggcgtgaccgtctacaagaccccggacgcggcgctggtcggccagggcctgtcgggcaccattgatatgcagaccgcacgcccgctcagcttcggcgagcgcgtgatcgcggtcagcggccgctaccagaagagttcgctgggccgcgccgccaatgtcgatccgtacggcaaccgcttcagcgccagctacatcgaccagttcttcgacaacaccctgggcatcgccatcggttacgcgcacagcgacatgccgatccaggagaaccaggtcggcctgtacgagccgtggaccaccgagcacaccgacaagggcgagcgtcgcggaatcgcgccaggcacctacttcaccgatggcatcaaggcgctgcgccgtaccggcaacaacaagcgcgacggcgtgatggcgacgatccagttccgccccagcaacagctggaccagcaccttcgatgcgttccataccgaagccgagcagatcgacaccgccaaccagttcgagctgagcctcagcggcaacggcgaagacggcaataaccccaacgcgatcctgccggtgttcagcaatgtcggccgcaatgccgatggcagcttcaccggtggcacgatcagcaatgcgtacccgctggtgcgcggcatgtacaacaagcgcaaggacaagatcgatgcgttcggctggaacaacgagttcaacgtcggtggcgtgaagctcgtcgccgacctgaactactccaaggcgacccgccgtgagatcaacctggaaaacaacctgcagctggtgccgcgcccgcagttcgacacgatcggcctggtggtgaacaacaacagcttctcgcagatcacgccggggcgtgactactccaatccggacagcctgttcctgaccaacacgatctatggttccggctacggcaaggtgccggaggtcgaagaccgcttgaagggcgccaagctggcggcgacgctgccggttcccgaggcgatgtccagctggttctcggatgtggacgtgggcgtgaactatgccgaccgtcgcaagcagaaggcccaggccgaaggcaacatcctgctcggtgctcagggcgaatccaccattgccccggacctgcagtaccgcccggtcaacctcggtttcgccggcgtcggctacatcccctcgtggaacgtgccggcagccgtgggtcgctacatgaccttcaacccggtcgacaacctggactatctgattcccaagtcgtggacggtcgaggagaagatcaccaccgcgtgggcacgcctgaacatcaacaccgacatcggcgtggtcggcgtgcgcggcaacatcggcgtgcagatgcagcacaccgaccagagctcggattcacgctactgggacagctcgcagccggctggcagcaacatccagcccttctctgccggcaagacctacaaggattggctgccgagcttgaacctggtgttcatgttcccgcaccagcagacgctgcgcttcgctgccgccaagcaggtcgcgcgcccgcgcgtggaccagatgcgtgccggcctggaattcggtgtggataccaacaacggccgccccggtggcagcggcggcaatccgctgctggatccgtggcgcgcaaccgcgctggacctgtcctatgagaagtacttcggcgagaaggcctacgtcgctgcggccatcttctacaaggacctgaagagctacgtctacacgcagtcggtggacaactacgacttcagcggcctgctgggcaactacgtgccgccgccgggcatgaccgcgccggtgctgaccactggcaccttctccacgccgcagaacggcaagggcggcacgttgaaggggctggagctgaccgggtcgttcccgctggagatgctgaccgacagcctgcgcggcttcggcgtgcaggccagcgcgaccttcaacaagagcgacatcaccatcctggatccggagagcgcctccagcgtgggcagtgacccgatcagcctgccgggcctgtccaagcgcgtgtacaacttcacggcctattacgagcgcagcggctttgaagcacgcgtgagccagcgtcgccgctcggacttcatcggtgagatcggcaacttcaacggcaaccgcacactgcgttacgtggtgggcgagaacgtgaccgatgcgcagctcagctacaccttcagcgacagcagcgccctgcgcggcctgaccctgctgctgcagggcagcaacctgaccaacgagccgtaccgcacctacgccggcagcaaggaccgcccgctggagtacatcgagtggggccgcacctacatgctgggcgtgaactacaagttctga

SEQ ID NO: 517077 - DNA, 1164 bp, Stenotrophomonas maltophilia
atggcaaccccctccctagctggccgacggattcacattgctggcagcatctctaaagacacgtccgtggcggctaatctggaggtggaacgcgcgcgtcagagcgtcgaatttttggtcaaagaactgctcacccggggcgcaacatttgtggtcccaatagacgctgagaagccgcgtgaggatgggctgcctatctgctttgactggcttgttctgaacactatttttagcaacttggcgtcgcgcccttcctgcgacgccggccctctggtcgtcgccgtcaaacaccacaagaacgaggaccaaattccggaggagcacgcacatctgtggaacacgatgcgatcgtccgacttggtccagatcgagtctgctgcgcattggaacatgaatgcaaagcggatggaggtccaagctcggcatggcgacatactgatcaccataggcggaggggaaggtgttctcttcttggccaatctgtatcacgatgcaggaaagccggtcatcccactgaccttcaagctggaagccgcatccaccggatcgcagaggatttttgattttgcgacgagcggaagcaacgccaaacgtcttttcaaggtggaacgagcacctaacgagcatggatggctgaaccgaattgaggtcacaacgcgaaagaccgttgacgattgcgtcaaggacgtgatctgcctcctcgaatccttggtgcgcccgagcgcatttgtggtgcgcctcctcaatccggagcacgaggacttcgatagcgtgcaaagctacttcgacattgtcgtgcagcccgtgatggagaacaccctgggctacaagttgacggttgtcgatggtcgccagtcatacgagcactcccgtattgaccaagaaatctttgccaagctgcatcgaagtcaagtcgttctggctgacatcacgggcggacgtcccaattgcttcatcgagcttggctatgcgttgggacgcgggcttccgacaatgttgatggccaaggaagggtcaagccatccgtttgacatcacaaccttgtcgggccatcactggaaaacaacgggcaccgccgtagaacgtcgtatcgccttcttggaacattggaacgcaattaggaatcgcccctcccttgtgcccaccgagccgctgattccatga

SEQ ID NO: 517078 - DNA, 897 bp, Stenotrophomonas maltophilia
atgacccaacccagcgtgtttgactcaaaggtccccctccctgatgagcgcttggcctctagggaaggcactctgcttggattcaaggatcggtacacaaggacgcatgcccagctgaggttgctgctcaacctggccgagctcactccttggagcaagaagtaccacaagctcagacttcccctttgcgatctggtttcggagcagtaccccttggtcatcttccatggcgacgtgggtaccggaaaaacagcaacggctgaatgcatcgccaatcgccttgcaatagaggcaggaggcgatgacgctgttctgttccagttgagcaaccgtgtccgcggtggcggcaaggtgggcgaaatggggaccctgctcacccaagcgtttgaggaagttgtacggtccgcggggaagagccgacgggcatttcttatcattgacgagggcgactccatcgccgcgtcgcgttctcaggaccacagccaccacgaggacaaagtcgccgtcaacaccttgatccaaggcgtggacgacctccggcgatatggcggacgaatcgccgtattcctatgcactaaccgcttgtcggttctcgacgctgcgctacgccgccgagccgccgtggttgaagagttcagccgacccaccgacgaggagcggcgtgcacttcttcagatggacttggatggcttggctctgtcagccaacaacatcgagcagctagtaagagccaccgcctcccagggcgagcggccgggatggacctactcggacattcgaacgcgcctctacccggcggcaatggctagggccttccctgatcgtgcactctcgttcgaagacctccacaccgtcgttaagtccctttccccttcccccgttatggaagaccgctga

SEQ ID NO: 517079 - DNA, 492 bp, Stenotrophomonas maltophilia
atgagtcaaaccacgactgccactaacacctactcggtagccgatatcgaagccgtaatgcgccgagtgaccgccgacttggttatgatcgcatcaagcacgggagcgatcacggaagccaaggccagggagtgggctcatgacatagagctgctggccaagaacgggcatctgcgcgtagctgacataactctgcttagcaacggcgtcgagcaaagagctacacgatacactgtggattctgaaactggcagcttgagcatgagccggccgggtggagtgctgtggcccaaggttcccaacgcatatctgcgtatcgtcctctcctacaacaagtcgtacgacaaagacgccaaggaaaagctacgcgacaaacttaaggagagctgggttaactcagacgcagatacgagccattcgacgctcaaagccaacgctgatcgcagctactccagcaatgcatacggcatgcaacgacaggattacatctga

SEQ ID NO: 517080 - DNA, 951 bp, Stenotrophomonas maltophilia
atgcccctcagcaacactcagctcctctactacgacagcaccgtgctccggctgacagccgagaagcgcacggagtatcacaagcaagtggaccggctcgtcgccgcgctcagtgaacgagttcacgagcagaccgaagtcaagatcacccgggttgtcaaggctggctctttcgccaagtacacaatcctccgaaagagcgctatggatcccgtggacgtggacgtggtgttctacatctccggtcggtcagtcgacgaggaaacactgtcaagcctgagcgagctcatatacaaagccttgatcgagctctatcccaacaagtctgttgaggacttcaccatccaccgaaaggccgctaccgtcgagtttattggctctggactgagcgtagacatcgtcccagttatcgaggatccgacgcgggatggttacggctggcagttcgacatccacgatggcagcaaggttcagacgtgcgcgccagggcagatcaagttcgtcaaagttcgtaaggaagaggacaagcacttccgcacgctggtcaggctagcaaagaagtggcgcaaccaagctgagctcaagccactgaagtcatttgccattgagctcatcatggcgcacgttctggcaacacaaggtaaagagggctcgatcgaacagcgcttccgcaacttcctactgtacatcgctcaatccggcctcaaggaagtcattttcttccctgagaacggcggcattgttccagcgtttacccaccctgtcgtcattcttgacccggtgtccagcgacaacaacgttgccggtcgcatctcggaagctgaacgcaaagagatttgcaaagcggcagaagatgcgtgggaaatagccaatcacgcatcgactgacggagacatggatatctggaaggaactctttggcccccggtttaaggtggaggatgaggtatga

SEQ ID NO: 517081 - DNA, 900 bp, Stenotrophomonas maltophilia
atgacggaggcgcagaaagagacggcggctgcaggtcgggtgggggccaagtgggggcaggagcgccggttggagttcatcgactaccggctcagttggagcagggtgctcaacaggggggatctaactgccttttttggcatctctataccccaggcatccttggatctggctgagtaccagcggcgggcacctggcaatttggaatacgacactagtaggcggacctacagagcgtctgcaacgtttgagtctgccttcccatccagttcgcacgcccgctatctagaagacctgctcagggctgctgttgattcagaggttccgtatgggagctttttggggtggtatccgcctgtggcggtggtccctcggccttggaggcgactggacgcgagcgtggtcatcagcgtggtaggggccataaggaacggttccgccctccgtgttcggtatcaatcgttgtccagcctggagccggcggatcgcactctgagtcctcatgcgttggtcagcgacggttaccgatggcacatgcgtgcctattgccacgaccgtggtgcgtttcgcgactttctcctttcccgagtactggaaattcttggggaggaagctgatcgcgggagggcggcgacggaccacgcttggcatgaagaggttgaattagtgctcgtgccgcaccctctgctgagccttggccaccgggcagtgatcgaactggactacgggatggagaatggacgttgcatactgcgttgccgccaagcgctcttgttttatgtgctgcagcagttgggcttagatgaagatgcctgtgaccgggctccggaaaggcagcaaatcgttctagagaataggtgcgatatcgagcatttgcttccgcgtcgttcgagtcgttga

SEQ ID NO: 517082 - DNA, 1716 bp, Stenotrophomonas maltophilia
atgtccatagctgcctctaaacaagcacttatccagctgctccagaacaaggagctaaaggttatcgctctatcgggtgcgtggggtacgggcaagacgcacctgtggaaagtagtccaagatgagtccgcggacgatacgatcaagtcagcagcactcacctccctgtttggggtgcgggaaatcaatgcgcttaaaatgagggcgatacagagcgctgcctttaaggactttcaacagacttctactggtcgttcggttaatggtattttttctgctgctcttaaagcgctgaaaggtgctcacgcttcatttggtgcactggatgatttggcgctgctgctgcttccgtcggcacttaaggataagctcgttgtcattgacgacatcgaacggaagcatgcggacctcactcctgacgagattcttggttttgttgacgagtgctgtagccgctacggctgtcgagttctgctaatcttgaatgaggataagctgagcaatggcgagctttgggcgaccttccgcgagaaggtgattgatgcagaaattcagcttcagacagatccggtcgaagcattctcaattgcatcgcagttgacgccaagtccatatgcggattccataaggaaggttgttgagcagcatggtgtgacgaacattaggataattaggcgcgtaattcgtgcttgcaacgagatacttcagtcccagagtccacctcatccgagtaccgttgctcgtgttatcccttcagtcgtgctgcttggccttgcacattttaagggcatcaaggatgcgccagatttggacttcgcattggttccgagtagtgccgattacagagtgcgactttacttaaatcgagaggagcggccttggacacctgaagaagaggccgaaaatcgctggcatcaatggctggagcgcgttgggttggtgtcgatagacgagcttgaggccgaaatagtaaagttctatcggtcaggtcttccaaattcgcctgcaatttccacccttctggccgctaatgaagcggatcaccgaagattcactgcgcagtcgcaggcaagacagttcttcacgaactgtctttggtttccatcgcgttccgatgcctcgcttattgaggaggttgagcaacttgtcggcgctgtccagttcttggatgccggtgtggtgactcagttgtctattgccgccgcagagctcaacggtggcggcccggtaagtgaacgccttatagatgtctggttagatgcgtttcaggagcgcttgactgactcggaagccgagctggcctggtatcaggggcgccgccgtctttcgttgcatcccaagatcgaagccgcagtcgcactggcacgaggaaggctggtggatagagtcggaattgctgaagtctgcatgaaaattcgacgtgatcaggcttgggggaaaactgaggagaacgtgctgagaaacgctgacgtcggctcatacgtagatgcaataagagcttctcagggtgatgagttaatttccattatgagccaaatgctcgacgtcgccgcagtgagcttggatcagcaccctcattttggcgcagcgggaggggtgtttgttgatgcgtgcaaggccattatcatagatgcgccggacagccggttgtcgaagctgatagttcacttgttcaaagaagagaagattcatgatcttctcaatccggaagcgtaa

SEQ ID NO: 517083 - DNA, 1743 bp, Stenotrophomonas maltophilia
atgggccgcagggcatcgccaaacggactgcagacctggctctggatcctcggtggcctgttcgtgctgtgcacgctgccgctgatggccatcgcgctggtgcagggcacgcagcgctacaccgaagccgaggcgaacctggtcagcctgcagcaactgcggcagaccttcgaactggccaatctggtgtcggcggagcggggaccggccaacagcctgctcggcgccgacagcaccgatgtgcagcagcagcgccgactggccgcgcagttggcggtcgcacggcagcgggtggacgcagcgacgcagcacctgcaggacgtgttccagaacgacccgcgggtggtggacgaaacaccgcgcctgcacgaagcacggcggcgcttgcagactgcgcgcgccgcggtcgaccgggtggccgcgctgccaagaggcgagcgctcggcagaggaggtggaacacgcgatcaacaacatgttcgcggtgtacgaccggctgcaggcgctgacctcggtgcagatcagcgatctggtcgcggctgatcgcgaagccgcgattcctgccatgcaggggcagatcctgatcgacctgcgcgagcacggtggccgcttggcatccagcgtgatggcgccgctggccgtgcccggcgcgtggcgggagccgcaggtacgcgctgcgcagcagaccgagggccgcctgctggagctgtggcgattggcggccagccacgaatcggtgttccgcagcgagccggcgctgtccctgcactgggacatggcgcgccggcagttcttcggccagtcgctgccgatggtggaaaagctgatcgacgatggccggcgcggcgtaccgccaccctggacggcggccgagttcaccgcgcgctacgtgcccaccctgcaatcgctggaagcgctgcgtgatggctacctcggcgtttcgatcgcgcgcttccagcacacccgcagcaaggaagcggtacgcctgaccgtgctgggtgccaccgcgctgggtacgctgctgctgcttgcgctggcattgcgcatcgcccatgtgcagatcctgcggccgttgctgcaggcgcaggcgcaggtgatccagatcgcctcggacacgccgggtgcagagcagcatgccacccacccgatggcggaaatgcagcgcctgttcgatgccatcgaggtactgcgggcgaagtcgcaccagcgctcggcattgacccgtgagctgcgcgagctggccgataccgatcagctgaccggcctgttgaaccggcgctcgctggaggaacgggtacgacagcggcatgccgagggaagcacgcaggcggtggtgattctgctggacgtggatcatttcaaggcgatcaacgatggccaggggcatgcggccggcgatgatgtgctggtgcaggtggcgcagttgctgcgcagccatctgcgccgcaacgacagcatcgcccgttacggtggcgaggaattcctggtgctgctggccgatggtgatctggccagtggccggcggttggccgaatcgctgcgggtggcattgcgtgcgcaggacatcgtgctgggcagccgtgacatcctgcgggtcactgccagcttcggtgttgcccagggcgcgcttgacccgatcggctggcacgcgctggtgcgtgccgccgacgccgccatgtacgaggccaaagcgctgggccgcgaccgggtgcaggtgtcccctgctggacgtgcggcacgctga

SEQ ID NO: 517084 - DNA, 444 bp, Stenotrophomonas maltophilia
atgaccctgcgttccgttgtgactgccacgctgctggcgggcctgtccgctggctgcgccagcagcacaccgcagcccgatccgggcgccgatgcgccacgtcatccgtcgatcgccgctggtgccagcccggtgcctgccttcaccggcggtggcgccggctggtccatcgagatcgcctccaccggcaagggcaaccacgatgccacgctcaccgttgctggccgcagcagcgctggaacgctgcgctacctaggccagccggccggtgcgcccagttcgttgacggtgctcaacggtacgctgggcgagcagcccaccgtcgtcgagatcaaacgcgagccctgccgcaacgccgaaggcgtggatacatcggccagcgtgcaggtaactgtcgagggccaaccacaacgccgcggctgcggcttcctggccgtgtactga

SEQ ID NO: 517085 - DNA, 441 bp, Stenotrophomonas maltophilia
atgacttcccggtatgccgcgttcctggcctcgccccgtgcgcgcggcatgggcgggccgttcgctgaggtcgccgcgtgggggcagttctgccacgacctggccagctggcatctgttcggccacggcgcgttgatgatcgagcgccgcgacacgggcgagtgcatcggccaggtcggcatcaaccatggcccgctgtttccggaacaggaactgggctgtttgctgtatgccgggcaggaagggcagggtttcgccagcgaggcggcggcggcgctgcgtgattgggcgttcatggtgcgcggattgccgacgctggtgagctacatggcagcggacaaccacgcctcgcaggcagtggcagtccgcctcggcggcgtgttggacgcgcaggcggtgcgcagcgatccggatgacctggtgttccgctatccgcgctga

SEQ ID NO: 517086 - DNA, 1389 bp, Stenotrophomonas maltophilia
atgcccggttcgacccgcaccagccgttcgttcccgagtatccagcttacggcatacgacggtggtggcccggtggaagtcaccctgatcgcgcagctcggcatcggtgccggcgatgcgctggtgagcgatgccagccagcgccagcgccaccacccggccttcattgatgcgctggacgagccctcggcacggttgggtggcatgcacctgcagcacggcgatccgtcatcgctgtacagcttcgtggtgggtgccggcggccatcccttccaccgccatgccgggccgcgcatgttcaccgccatcgccggcagtgccggtgccgagctacggtttgccagcgcatccgatcagcagctggcgggcgatccctcgcacttcctgcggtcgctgcgtcgtgtccgcattccgcccgattgcctgttcaccgtgcgctttggtggtggcacctggcaccagttcgcctcgaacagtccggcccatcctgccctgttcgcgctctcgtgccacagcaatgagctggccggggcaatgagcgagcaggcgcgcgcgcaggcacaggcaaacgccgcggacattcccagcctgaccgacgtgctgccagcagcgcactggcccagcgcaaccacactcgccgccacgccgttgctgcaactgtcactgcaggcggcagcgcccagcctgcgcgcacgcctgtgcgtgcagacgcgcacgttgctggggccgctgcgtcgcttcagcctggagccactgcgcggattcgtggagcgggcgacgccggcgtacccggtctgcagcagcgcgtcgtcgcctccaacgggaatgctcgccagcgccctgccgcacagtcactacaacgacacgaccacgctgaccctgcacggcgggcagaccggccatcgatcggcctccgccctgctggccgacatactggatggattcctgtgcaacccgccggcgggcgtcggtcgcttgatggccctgcgcaatcgtctggttgcaccactgcgtctgcgcacctcgccgctgggctgcccggtgtcgtcgctgctgtccaccgatcgcagccgcgtgttctgcggacgtttcccggtgctggatgcccaagtagatgcggaagaccggtgtgccgaagtgctgctcggcgcagacgaccgccatctccgcttccgcagcagcgtgcgcgtgcagttctgcgaggacggccaggtccagatcagcctgggctcgcgcgtgcagacgctcaatgcgtttggtcgcttctacatggccatgatcgacagcgcccatcgtcattacgtggccccggcactgctgcgccgcgccgttgaacatgcgctggcaccggaactggccgcgtggtccggcacgcctgcacattcctga

SEQ ID NO: 517087 - DNA, 594 bp, Stenotrophomonas maltophilia
atgcgccctgcgttctggctgatcgctggcctgctgctgccgatcgtggtgatggcccagcctgcgcgagcgccgaaggcaccggcgcaggatcccttcagcgaactgttcgacacggcctgcatgcagcacatcggcgcgccggcgcggctgcagtcgctgatggatgccaatggcctgacgccgctgcagccggccgaggccgctacgctgctgcagggccagccgggcatggcatggatggtgccgttggccagtggccgctacgcggtcagttgggccgacgatggcacctgcaccgtgtatgccgagaaggccgacccggcggtggtgcagaagggcttcgcgcggctgatgcaggccgcaccgaagccgctgcagatccgctcgctgccctcgcgcggtccattgtccggcgaccaggtggcgatccagtacggttgggcaacgccgggcgaaagcaagctgcgcgtgcacttccggctggtcacccggcaggccaccgaggccggggtgcaggcgatggcctcggccacgccgggcgaggcgatgcgcgaacaggccacttcgccggcgccgacacccgcccggtag

SEQ ID NO: 517088 - DNA, 786 bp, Stenotrophomonas maltophilia
atgtctgagttgctggctacgctgcaacggcgctgggccgatcatgtgcgggacccgtcgatgcctgcgcccgatggcgtcgaggcacggcggatggcggtctaccgccgcctgtgcatcgacagtctggacagcctgctggcgggcagcctgccgcggttgaagtcgcagctgggcgatgcctgctggcgcgacacagtggagcactactacgccagccacgcctgtcacaccccgctgttcccacggatcgccggcgagttcgcgggctggctggcggtgcaggacacgctggcgctgccggcctgggcagcggaaatggcccactacgagagcacgcagcagtcgctgcatattgaagcgcgcgccgccgggcgttcgctacaccgcgttccggtggacagtgatgtgctggcggtttcgccgttggtgcgggtgctgggctaccagtggccggtacatgaggacggggcgctggagccggtgctggatacagctcctgtgctgctgatgatgcgccgcatgcctgaattcagcctgcaggtcgacgaactgtcaccgctggcctacgcgctgctgtcggtcttcagcgatgacggcacgcgtgtggatgacgtattgcagaccgtggctgaagcacatggtgttgcgccggatgagctgcgtgcggcctgcattccagtgctgagcgaactctgcacggccggcgttctggttgcgtcgactcatctccgggaatgccggccagcggccggcactaccccttctccattcttcgaggcctga

SEQ ID NO: 517089 - DNA, 702 bp, Stenotrophomonas maltophilia
atgcccgtcaatgtcgccattgagccaggcctttttcaatcgcttctccgcctcttttccgtatgcaataaaaacggaaccagcgggagaggcttgcccttcaattcccttcgaattgcagaacttcaaacggccttccgtaaaaaggacggctcggcacttccaatggttgaagacaaagcggtgcatccattgggtgtcagtgcgggcgaagaccagggtgatgttgttgccatgggtggacgccttttccatccaggcttcctggccccttccgtaaggcgggttgtgccagatgaacttatccttcggccagggcgtttccagaccgtcttctaccggcgtccacatctcttctgccgtcgcccagggcatcccttctgcgggagtgcagggatcaagatcaaaaggccccagagcatcaatgatgcgcttaggggtcaaccaagtcgtggtcgtttcaattgcatttgcataattcgctttattcataagtctcctcgttttgcgcaaccgaaattgattgcggtgaggaaattaaaagcgaatcacagagagcggtccaccggaacttgcgccaggaaggctgggacaaagctgggacaatctttgccgtttttttgccgttttgccccgtcccaggaaaggtcgctggaacaaagaatcaaggacttaggccgtattttgctgaatcgatggtga

SEQ ID NO: 517090 - DNA, 1200 bp, Stenotrophomonas maltophilia
atgagtaaaagtatagacagcttctttaacgatgaagagaattcagcgtcagcgaaagaacgcgccgtcgcactgggcaatttaaggttgaactcctcagccggtgaaataagcctcgacgacaagatgaaaagctttgaagtgcttgaaagacagcttcgacagcagcatatggattctggaaatcccttacccctcgaccgctcggcttactcgccggaaatgaacgacctacgcaacagcatcattgagcgtcagatcaaagcacttcatgttgacagagactttctcacccacatgattgccgccaaatcaatcgatcccaatggcgagaacggcgaatacctacgagatgcagaagtcaatcctgacgctcgaaaaatcttgatcgaatttggggctgacgcagagagagctaaaagactcgatcagaatcatctgacgtatcagctcaacaatcacgttcaagaagtcaatgatctaagagaaagcggaaaggcggctgattacaatgtgaagcttatcgactcgctcatcagaagaggagccgacgtgaacggcaaataccatcttgacggcgactacattcacgactatgacaacctttatgatatcaattatagattgctggaaaaagagcgcagatatccaatcgcctgccaaatccaggatcgagatgtgtttgagcacttgatcgaaaaccatgtgactgacttggactttgaaaacgagcaatcaccgctggtccaagctgtcgcgcacaatgacctttcaaaagttcaatatttgatcgatcaaggaagcagtatcgattcaggccctcagttccacgggcgcggattggatttctggtgcagcagttcggaaatgacagagttgttgggagagcacgggttcgacttcaatcacagcacaggagagttcagtgcccctccccttgtaacagtcgtggaaagaattgagcgcaacttaaaagaagacaaccatgaaaaggcaaatacaaatattgcgattgctgaaaagatgattgagtttggcgctgatatcaacgccaccaaccgccatcatcacgaatcgcccgctcagatgattgaaaagctaggcttgaatgatcacttcaaagaacatcttaaagcgccaactcttgaagcggccagtcctcaaagaaagcaagaattcaagcgaggctttgccttataa

SEQ ID NO: 517091 - DNA, 984 bp, Stenotrophomonas maltophilia
atggtcacaagctctcagaaatacttcaaagaagtgatggcgcagattgaagcagagagacagcttcgagttgctcccgatgaagcgttcgtcagcttggacacccatgaagtggacgatgactggctgaaggacagcagcacgacggacgctcaccgaaagaacgccatggaccgatggttcatggcccgcttccgtctccccgctcaggctggaatcgaatcgactgacggaaagggtgccgttgtcccggacggaggtccgcaggacgctcacaaagttcttcgtgagcgttttgatggtttagtagactctgttctcatcgatagtgttgccgaggacatcactgacgattggggtgtgctatgggtgaagacaccgctggcgctctacatcgctgaaaatgatgcggaggtgggtatggaagcagacatgttgtctgttctagacagacgagtagggcgtttgcagaaaattgcgcagatgaaaggggacggcgtaaccgaaattgcggcgcgcaatttggtctacgcttccatcatctccgcttacgaatcatttttgtgggaaacgctgttgttctgggtaaacaacgactcgcgcacagtgcagcgtctcctgtctcgacatccagactttaaaagtgcggcgatgccctatcataagctcttggatgtttcagacccaatggaagccggtcgtctcctaatcaagtcttacttgcagcgcgtgatctggcatcagcgagataaggttgcagagctgtatgaaaaagcgttctcgtttaaaatgccggacgccagcattctggatgatgctttgaagattcggcacgatattgttcaccgcagcggacgtatcgtcggtggaggcgagcatgcagtcacgcagaaagcgattggaaagctgtcaattgacgtttacgtgattgctaaccgcattcagtccgaagtcggcgacgcgcttgtaaagccaggtgcatga

SEQ ID NO: 517092 - DNA, 1650 bp, Stenotrophomonas maltophilia
atggcgcttgaacattgcatggggccggtgtgcttcttccacctggacccggcttcaccgaagatcttcggatttgcagaactgttggcgggcctggctctgatcgtcgtcgcttggacaattgccgacttccgcttcaagttccgcattgccacagcgccgattcctgtcgttcgtctttcatcggtagttgtgctcagcgtctcagtcctggcacttctcactgatctatggagagcagaaggttggttggtcccaggtggcggacctttaacggcctcttcctggcaatttgtgctcgcggcattgttccttctgagcttcttcgtatgggtctggtatgcggtcatttcgccaccagcgctcacttctcgaacgggaaagaagattcaccaccaactctttgaaacgatctcaaacggctcaccccaagaactcgcgattgtggccgacgaagttcggaggtatgcgaaaacgctcgctcagcaggccacaagactagacgaggcttactttgcgagaacgccagaagaacgacgccgcttgcctcagctggaatcgagcgccaacgacatttacggcatcctttctgatcgacggctgtgtagagtcatcgtgagaagttgccctggcgcagccgtcgatctgtttgaagcggtgagatcaacgtggcgctatcaggttcccattggaacacttgggcgttgcttgatagaagaaggaattgcagacaaagaatccgttttctacacggaaaatcgcaccagggcaggaggttttatcgtgttcgagcgttcaatcattcgaacgatgctcagcgattactcacttctgaaagcgcagcccgatctccttcgtgtcgattttgaagctacgagaacttggtcttcaaaagaactgcgattgtatgcagcgctggctatcactgcttacaacgggttctcgatgatgaggttgaacgagcgccctaccgccctcgcccctgtcttctctatcatgggtgatgcagccgagggcctgatatctgtcacaggaagcgatgatgttcttagccatgagagcgttgaaaaactacgggtcgtcatgcaatttgtggagagcggcgttgcagcacttcgctggcacggtgtgtcggaaaccgatgcggccgcgtcgctagacatgctggacgattgggtgaacctgatcgtcgtccaggtgttaaacgtggcggcgcttcgagtcgattactggacagctttggatttgacacagatcgtcactcaacgcacgtttacctctcctcaatttgacagttgggcaggtaagacggttctgcaacgggttcgccgccgcctcttcgacatgcttcaagtcgatggaggactagctgggatgggggtggcgaacgtggtgcgcttctgcctcacaggaatcgcggtcgatagttccggaaagctccatgctcctcattcccgagtgctgttcctagcggtcagagggtggctgacgcagaatttcctggcgtggcaccggctgtcccccgtgcttgcgctgtcagcgcttccggaagtctgtgagttcgatcaggtcaaccgcacaattacactcacccagttcgctttgcttagaactgccacgccgcaggatcgtgtgattcatttgagatga

SEQ ID NO: 517093 - DNA, 210 bp, Stenotrophomonas maltophilia
atgcgttttaaaaaagacaaagcccccaaatcggggctttttttattcctggtcgtgttgaccaatcagtcgtccaaggcccatttgaggccgtctggatcggatgaactcgaaatattcgctaccgccgagcttctgacccctctcaaaagcaggggttccttgaagcatggcagagtccaaagcgtaagagcctgggtcagtgactag

SEQ ID NO: 517094 - DNA, 156 bp, Stenotrophomonas maltophilia
atgaagccgtttaaggacggagtgatctgggtgatcccggtgatctgggatgaaaaacaagcccccagaacaacccgcaagctttgccaggcaggcatcttcggtgtcttgatctgggtgatctgggtgaagaaagcatttcacctttctctataa

SEQ ID NO: 517095 - DNA, 444 bp, Stenotrophomonas maltophilia
atgaactactcatatctgctactgcctgctgtgcaggccaaaaagttagacgtggtgaaagcagcgattggaactgccgttttccaccagcccaagcacgacttcatcaacgacgccgactcacgaggcatcaccgccctggcgcttgcaagcctgttatggagccaagagtcggatgcagagacacgccaagaactggatgccattgcggcgttcttgttggactttaaagcgaacccgtttcaagaggtcggcgtgaccctagtcagacgctaccacgcgtggaccggacgaaaagagttcgaaagacgctcaggaaagaccatcgctgaactgtgctgcggcaaagttcctccctcattgaaggcacacattagagccgacgcggagcgcgttccggtcccaggtaaacgcatcaatgaagagcaaaaggaggcagcgtga

SEQ ID NO: 517096 - DNA, 516 bp, Stenotrophomonas maltophilia
atgaaaaaaatgaaagacctgtctgccgcgctcaacgtcgtgcatcaaagcagacatgaagcagtgattcatgaaagcctggaagacgtgttgcctagcgacaaggttggggcaggggacgaaccagggcgggagacgtatttccagttcgaagagggcgctctgtctcgtaggaacaaacagacgggccgtagggtccatctacttctggggatgccaggggatttggcctcaaaaccctctctgcatgattaccgaacagatgaaggcaagcgtgccaatcggatgatgatgacggtgcccccaaagttgagggaacagttccgaaagctgaccggcgctgagttcgactacgaggtgcccattgcaacttcgatcattgctcttgcgtcttatgccgctcaacggcttatggatgaacgcaagtgcttgacggtaaaggcttgggaggacgaaaggaagagccaaaggcagctttataggcgagtcgtgaagaagcggaatggacgaaattga

SEQ ID NO: 517097 - DNA, 378 bp, Stenotrophomonas maltophilia
ttgaagaagcgaaaaacatacaacatcgaagcgacaacgctcagtcgaatgagtgaaagagccaagcaattgaggattccagaaaacgcgttggcacgcctcttttttgaacgaggcctctcttcttcggatgaccagaccaagaaagagctgacagatctcgctaagaagatcgagcgcgattcgattgaaagccaaatcaaaatctacgacgcggttcaactcatgcgacgttcgcatgacgaatcaattagccaaatgaaagagcagatgagccatttcatcgacgcgatgagcgagatccttttggcgtctcctcacatccagaaacagccggttcctaagcatcagacgggaaagagcttggctgatcaataa

SEQ ID NO: 517098 - DNA, 861 bp, Stenotrophomonas maltophilia
atgaatacagaaacaagagaagaacgcatcaagcgactgatgagagagcgggaagaaggaacgctgagtgagaaacctacgcccgcccaaattgaagaaagcccggttgagcccgcccaggagcacgattgggaagaagaagctcgcatcgtttctgcaaagaatcgagagcgcatcaagaagaatgccgagttggctgccgcccaagcaaaagcagcaacccaactggcagaaaaaggtgcgaagagtgcaatcaaatccttgcaggcgttcaaagaaaaggcgcaagcaaaaattcaagaaaagaaagagaagagacgactgaaacgcgaagagcaagaggcgattaaggagccaagcgttgaacccctggcaatcaaaggcagtcgagagtcatcagtagtaagcaacagtgcgcaacgtcagacacgaatgaagttttggatgctgtgcagtattccagtgactctcagcattgcattgaccgcagcctggttgttcaaaaccaatagcaccgatagagaaggagtcgagcccgcaactgtgaagcaggtaaagactgacgagccagcaacaatgcaagtgatcaaacctgttgaggtggtcgtgccgacgatagaagccccaccgaaggcattgccgccacttccccagggaccgcaggaaccacgtgcagaacaattgatcttggaagcaccagtcccttccgttgctcagaagggaccggtgctcgcacgtccaacggcaaaaaaagagcgagttgcgaaagcgaccgagaagaaagaagagtctgcaaaagagcctgcgaaaagcgaatggcagaaagacgcggctcaaaagctcgaaggctatcagttttag

SEQ ID NO: 517099 - DNA, 1239 bp, Stenotrophomonas maltophilia
atgttagttggaaaatttacaagaaatacagatgtaagaattttgcagagagcggtagatcgatatgaagatgtaacgattgaccccaactcgattcacattgtcgagtccaaatacttggatgtccctcttgaagaagaagaagccgcaatcctggcgggagctaattacgattccgacattcgttgttttgtcgttccagagaatctcgatttgcaagcgttcaaacgctggttcccaagagtcgaagcggacctcataccgcccaaggacacgaaaaactacttgacgagaagcgggaagcctttggagtcgtatcgacttccgcaagactcatcaacaggcgttacatcgctcgcaatgcctctcatgtatgccgctttgcctgccattgcagcactggctttctttggattccaagtcaccgggtctcttctcctgagtatcccgcttttgtttctgtcggccccatatctgctgacgatctatcaaagagcctggaacgggcaggttgaaatgatgaagtcagcccttcttctgctgcttcttccttattccgttgccgcatcatccgcaatgggtagctcagcgtctctttcaatgattggattcttatcgactgcgtgtttggcatgggtttttgtaagtgttttgccgttcgtttttggaaggcagaacgacatggcttttctgagagttcgacgactttggatggcggtcagcgttagtgtgttgattacgctgactgccgtggtatcggcttctgcgttcgcaatcagcggatttctaggctccgtgctttcgtctttcatcttcggtctaacatctctctacgcgctctactattgcaagcagcaagccaacgtgcgtgccgtgaatttggcgaatttcagcaacgacaattcaatgagcaggttgggatcggagcgagaggcgttccaaatccaaaaagctcgacaagcgaaagcttcggtggaagaccagtcgttgcgtattcaaatcggtcaaagcaaaggcatcgtatctcgaaaaggatatgccaattccccggcctccggcgcaggcatcaatttcagtatcaacgatgcagggagaggagctatcacgatgggtccgaccggctccggtaagacagtcgttatcaacaacattacttactgtgtgcttgcaaacaatattgcatacgatttaacccatcaaggaaaaccaaattctcataacaggggaggtgaacaatga

SEQ ID NO: 517100 - DNA, 2898 bp, Stenotrophomonas maltophilia
atgcagaacatcaacgttttgaaaatgacggcaaatggcgctcaggatctcatcaactatttgatgcaggagaacagccaggtctccgctgtcgtcaactattaccacgacaaccaaatgcaaatcctcgatggcttgaagctctctcgctggggtggaaatctgatggaagacgagatgatgcagctcaaagacaaagaggttaccgccgaagcgctgacggcactcgcggaaggatactctcctgcgacaggtgaagcgttgtgcatgaatgccgggaaaaaacccaagaaggagatcaaaaaggattcggcaggaaacccaattctcgacaaaaacggaaagcaaattgacatcgcggttggcggtcatgtgatgggaaccgagatcaccatgtctgctccgaaagatgtgactttggcaatggtcatggctcgaacactcgaagagcgtcagcgaatcattgaaattcagaacgaagcgtgcgccgagacgatgcgacggttctacgagcctttcatagaagcgcggcgcggagatgcaggcatcgatgtcattgaaacccaagggtgtgtctatgcttcgttccttcacttcacctctcgccctactgagaaaattctgccgtccggcgaaaaaatcatgtggatcgatcccaacatgcacaaccacatttttattcctggcatcaccaagggatgtgatgacaaatggagcacatgggataataacaatctgttcgcaaatgcgcgaaccgcagacgagttctacaaagcaacgatctacgagaagatgcaagccgagggttacgcactcgaacgcatagaagaggtcaatgcccttgggacaaagaccggaaaagtcattacgcgcatcgcaggagttgagcaagatcttgttgatgaaagcagcgagcgacgtaagcagatactcgcgtatcaaaaagaaaacggcgtgacagcgcaagaagccaactttgcaacgcgtaacaaaaaagaagagccaagcattgatgagctgttcgaccgttgggaaaagtggatcgacaacagagaagggtcaatgttgcgaacggcggctgaactcaaagcagtcccgcaacaagatatggtccaagccaaaagctttgaggaaatcgtggagcggctgcatcaaagcacatccgtatttacgcgaaaagacgtggagcgggaagtctttatggagtattgcggattgaagtctgtcgctgaaatggaagaggaggtgtctagctttctatcgaaccctgaaatacttgacgttggggcgaagagacttgcaaaggcggataaaggaaattccttgtcgattcgatacactgagaccaggtatacgtccaaatcaatggcggcagaagaagtaagggttttggaaggcgctcagcgtcgcgcgaaagagactcatcatgccgcgtcgctctccaatattcgactggctgaaaaggaatttgaagaaaagcgcggctttaagccatcagaagagcaacgcgaagcggttcgtcacatgcttaacgaaaaaggcatggcgcttctagaaggtttggcaggcacaggaaagaccacgacgacccaaattattcgggatgttctggaccgcgagggtaagcaactgtttggtgtcgcgttctctaacaaagcagcaaagaaactgggagatgagtgtggcatcaagtgcacgtcgatcacgaagctgatctatgactacgagaaagggactgtcgctttcactgacaaagacgtgatcctggttgatgaagcgggcatggttagcacacgcgacatgctcaaattgatgcagatcgctgagacgagcggagccaaacttctcgcgcaaggggacgcggaacagattcaacctatcgctgccggatcaggaatgcagctgatgagagaggtgatagggtcccgcaagctgactgagattcggcggcagaagcatgacaaggatcgtgaaatcgcttactcgttttacgagaaaaatggcaagcaacgtctggaaatcggcatgcgttctaacgctgaaacacgaagaaagggcgctgaaatattcgagggattgttaggtaggaattgcttcgagatttacgagactgctgaacaatgcattgatgcgatgaccagggactacgctaaaagcaagaccgtggcgaatgagaaattgatgttggcgagcaagcgtgatgtcattcagtcgctcaacgaagaagccagaaaccatctgacgaaagaaggcgtgatcaagactaagggccgagccattgaaatcgtgaacaacggtcggatcgaagagcgcatctttgcagtcggtgatcgcatcatgttcaaaaaaaacaatagaaaaatgggagtgaacaacggaaccgagggtgtgattgagaagatgtcggagtccaggaccgatggaagcattcagttcaaggtcagaacagaagacggcgaagtgctcaacttcaaccaaaagttctatcgagatattgaccactcttatgcagtcactgtgcataagagccaaggaatgggaaagcaggaaatctatcagcgagccgacgttgggatgttcgacaatcacagcacgcttgtctctttcacgcgaatgacttccggaacctacaaaatctacgtgactgcaaacgaattgtcatcgctctctcagcggttcgccaatgagcgcttgaaagagaacgtctttgagacagggttgcttcaagcggaaagtgagcaagcaaaggccatgtcgcctttcttcgagctaaaagagaaggctcgtttaatgcgcgaaaaggcgagggaggaggcgatgcccgtattggaaggcgagagagagcaaccgcagctcacccatagtcgtcaatcccaaacgcggtcattcagccgctaa

SEQ ID NO: 517101 - DNA, 477 bp, Stenotrophomonas maltophilia
atgcagaaaaagaaatggggccgcagccaaaaataccacaagcgcactcgctatctttacgcgctcttcttcgaccaagaaagagccgtctacattgggcagtcagtcgatttaaagaagcgctggcaacagcatcgttctgccgcagggaaatggaaccggccctttcgaccggttgaactggcttcatatgagatgactcagcacgaagccgaacgcatggaagaattgtggcgctgtaaagcgcacagccagggctggcgggtctatggcctgcctccgggcatcgttatcaacccttaccgcagagcgggtctgtggaagcgctggaaggccaggaagctggaatggaagacagggatgacgccaatggcccctgcccgctttccatggaagggattggggatgagcgttggggtgctgctgttcttcacgacggtccttccctggaccatggcactcctccttagcggctga

SEQ ID NO: 517102 - DNA, 1629 bp, Stenotrophomonas maltophilia
atgcagggaagacgagtgtctggggctgccagcacgtacaagtcccgcaaaggaggggccttgaaggcgcgtgttcgcaactggatcctcctggtctcaggtacctgtggcctgaccgcttttcatgcacaagggcaggaggttcccagttatgccgagtcgatcaaggttggaagtacggtcgcccctcttgaccagaatgccttcggcgagcgcctggacaaatacaaaggggacctgtcctttcaccagaccgatctggttctgaaaggcacggggccggatatcgtcatcggcagaacgtatgagctgggacgctatcgaaagggcgatggccccctgggttttgcagactggtcgccgtccataccccacatgctcacaaggggaagcgcggaaaagccctggcgtgtggtccagcaggacgctttgaagcgctgcaccttcttctccgcaagtgggccggtcattcccatccctgtgagggagtggtgggagggctacgagctcgttgacgagctggggcgaacgcagatgccgatgcgccgggatcccaacaatccggtggcgccctcaaacaatccggcaggctatcccgttgtgacccaggcgggctggcaggcgagctgcctgccgcagacatccaatgggcaggagggcgagggcttcagcttcctgtctccagcaggcaaccgctaccggttggatcgtctgctggtctcccgccgatcgcaggtccacatcctcgagagagacccggcaccgcctgtacgcgcacgcgtaagcacgctcgccatggttgccagtcgaatcgaagatcgcttcgggaattttgtcgactacaactatgacggcgacagactgatctcgataagcggcagcgatggtcgtctggtcacgttcgaatggaacgacgatgtcatcactgcgatgaatgccaatggtcgtgtgtggacctacagctacgccatcgaggggacatctgccatctcccagttcaagagcctgaaatcggtgactcagccggatggaagccgttacaccttcgatctgggcacgctctattcactggttgcgccgccgccgcccacggaatgcgcgcctcctgatacttcagccatcaatcggcccgtacaggcttcgatggccggaccctcgggcttgtccgcaacgtatctgctgaatgttgccagacgtgggcgatccaacgtgccctacgaatgtgttcccgcaaatgcgatgagcgaagaacacgtggtgaccccttccgcctatgacgtgtatgcgctgagttcaagaacgtacaccggtccaggtgtaaaccagacgtggcaatacgcctatggagcacccaatcccagctggactcatcagtgcgctgggggtgtatccgaactgtgcagacgaccgaaacgctgcccggcggccgctgggtgcgcagtaccttcagcaacgaatggggcgcatacgagggcaagctggtggtggtcgaggacggaggcacaggagctacgcttccaaccagaacgactcggtaccattacgctccatccagcgggaatgcctatcctgcggtgctgggcgctgtgcccgccagttcaccatgggcgtcaaatttcgctccgctga

SEQ ID NO: 517103 - DNA, 1065 bp, Stenotrophomonas maltophilia
gtggacatcgagctggatggtgattggtatcgttccatcttcgggggctacaacgcgtttgcgcaacccttgtcccggtccgatctggattccacaggcggaggtcgcactctggatttcgcgcccgtgaacaacgtgcagcattgggtgctggatctgcccggaacaacatcactggccgggaatgcggttgcttccgagcaggtgacctacgacgacaaggcccgacccatattggtgagcatctttgggcgcattgaccgcaccgccgagtactggcccgacggaaatctgcgcagtgtcgtggacggcaggggcaatgcgacactcctttcagagtggtaccgggggacgccacgccaaaccgtcttcgccgacggtacctcccagcgtgtcgacgtcgatgctaatggctggatcacctccgtggtcgatgaggccaacaacaagacctgctacgcatttgatcgtatgggccggataagtggcatcacttttccggctgccacggctggggtttgcgacggcagcatcagcaatccggtggcagttgcattcggacccgttggcagcgcggagcatggacttgctgcagggcattggcgaaggacggagacgcgaggcaatgcagtcaacgaacagttcttcgatgccctgtggcagccggtgctttctaccaggcgtgacaacggacgtgccgatgctgttgcctggattcggcgcagctatgacgaagcggggagaactactttcgagtcctatcccacacggacaccggaaggcgcgacgtcaggtgtatggaccgaatatgacgctgtgggacgagtgagttcgacatcccaagacagtgaagttggattgctgaccacagtcacgacctaccaggccggcaactcggcgctgacccgactccctgaagggcaggtcacggcctatcgattcgatggctatggtgctccggtgaaagagcttcctgcggtcattgatcgtcccgaatcggctcggacgtccatccagcgcgacgcgtggggcaagcccttgagcattgaaaggagcaagcgatga

SEQ ID NO: 517104 - DNA, 948 bp, Stenotrophomonas maltophilia
gtggcctacgacgcccaggggcaacgcctgcgcgcgatgtattcgttggccgggcaggtggtgcatgaagagcgacgaggcaagggcgcctcggagtacatccatgtaggtggtcgactgctggccacccgcagcccgacgggtgttacctgggtgcatgtggatgcactgggcagcccggtcgctgtcacggatggcacaggaagtgttgtcgagcgacgccggtttgagccgtatggtgccgagttgggcgggcaggtcaaggacgggccggggtacaccgggcatgtgagcgattcggccacagggctgatttacatgcagcagcggtactatgattcgcagctgggtcggtttctttcggtggatccagttgcacctgatccgagcaaagatcaaaactttagccgctataaatatgccaacaataatccctatcgtttcattgatccggatggtagacaagaaaggtctgccgaacgatttggtgatgcgttcgctgaggatcctggcgcatttgagcaatttggtcccgcggctgttacggctactcaggttgcactaaacacaacacctattgttggttctttccttggtgcggcgttcaggcaggtagctcaaggcaatgttgcaccgagaggcagctcgggtggtccgcgtgcgggtaaggactttacgccagctggtaagcgagaggtgattcagaaaaatgagcaggaaaacagtggtcagacgacgcgcgagggctgtttggttgctacgactcccgctcaacagagtcagcgaggggtatctatgccaaaaaacgaaaccaggattgaccacataattccgaaatcaaaaggcggggatggggcgccttcgaatggacgggttttgtgtagttcctgtaatattaataaaagcaatagagttgactggattcctcccaaagatcggatgccatga

SEQ ID NO: 517105 - DNA, 900 bp, Stenotrophomonas maltophilia
atgaaacttttggtgttgggcggcaatggtcaggtggggcaggaactgctgcgcgcactggcgccattgggcaaggtcgtcgcgaccacccgtagcggtatcctgcctgatggtagtgcctgcgaaacagccgattttggccaccctgacagcctcccggcactgcttgaccggctgcggccgtcaatcgtggtcaatgcggccgcctatacggcagtggaccgtgccgaacaggacgcagacgcggctttttcggccaatgcgctggcaccgggcgtaatcgcgcgatggtgcgcgctgcagggcgtgccgttcgtgcactactccacggactatgtattcgatggacacggcacgcagccataccgcgaggacgaacccaccgcaccgctgggcgtgtacggcgccagcaagcgtgatggcgaactcgccgtgcgtgcagcgggcggacgccacctgatcttccgcacggcatgggtgtatgcctcgcacggcgcgaacttcctgcgcaccatgctgcgggtcggcaccgagcgcgacacgctacgggtggtggccgatcaggtcggcacgccgacccctgcagcattgatcgccgatgtcactgcgctggcattgcagcacccgggccagttgtcaggcacctggcacctgaccgccaccgggcagacaagctggcacggatttgccgaggcgatctttgcagaagctgccgccatggggctgctggacagggtacccgtggtggaggcgattcccagttccgagtacccggcttcgaccccacgtcctgcctggtcggtactggacaatggcaagctgcaacgggatttcagcatcgcgttgccggcgtggcaggccgggctgaagcgagtgatggcggagatcgcgcacagctga

SEQ ID NO: 517106 - DNA, 696 bp, Stenotrophomonas maltophilia
atgatcgtgggtaacgggctgcttgcctccgcattcagccctgaatgggtaagcacccataacgctgtgttgtttgcttccggcgtatcgaattcccatgagtcgcagccggaagcattccagcgtgaggcggatctactatcaagccatctggaacgttgctctggcgcctttatctatttcagcacctgcagcatttccgacccggacagagcagcaagcttctatgcaaagcacaagctcgccatggaacgacgtgtcgcccagcacccggagcacttgattcttagactccctcaagtagttggacgaacatccaatcccaacacactgacaaattttctggttgacaaactgaaatcaggccaggtgattccgatatggacgcatgccctgcgttgcctcgttgatgtcgagcatgtggccgccgtgacaaaatcattgatagtcagcggatcagagcatcgcacgtacgaaatcgcgccacctgagacgatcaccatgagcctcctagttgatctcctggaggagctccttggcgtacaagccctccgctccaacgttgaaaaaggcggtggcgccattccggatccatcactgatgcaggaactggctcccaaactggggattgatatcaatcccggctacatcattcgactactgcagaagtactatggcccccgatccgactcttga

SEQ ID NO: 517107 - DNA, 966 bp, Stenotrophomonas maltophilia
atggcccccgatccgactcttgaactctcggtcgtcatccccgtttaccgtagcgagacgatcctgcctgcattggcggcgaagctgggccaaacgttacctctcagtttcggcgactcgtttgaggtgatactcgtcaatgactgcagccctgatcgttcatgggatgtcatcgtcgaactggcacgcgagcgcccttggctcaaggctgtaaacctcagaaagaatgctggtcagcacaatgccatcatggcagggctgaggctggcgcatggcaagaaaatcgttacgatggacgatgatcttcagcactcgcctgacgatctgcccgccctgcttgccgcgctcggagaggaccaagacgtctgctatgcgggattccacaacaagcgccatgcgttgtggaaacgggccggcagttcattcaatgacatcatggcaaccctgctgctgggcaagccgaaagggctttacctgtcgccgttcaaggcaatggtctccggcgttcgcgacgaggtagtcaagttcacaggtccacacgtctatctggatggcctgatcctgtccacgacaagtcgcatcaccagcatcacgatcgaccaccacgctcgcgccgacggccagtcgggatacagtctgcgcaagtcgatttcactctggctgaagatggcaaccagcttttccatccttccgctgcgggtggcatccatgctgggacttgcattctcggcgctgggattcctgctcgccattgccttcgtcatccaaaagttcactgttgacacgatgccaattggttggtcgtctcttatcgtctcagcattgatcattggtggcgtgcaactgctcgccgtcggcatgataggagaatacgtgggacgcgtgcttctacatgtaaatggtcgcccgcagactgtcatcgagtcgactcgaaacatcagcctgtcatcgggagaggatcgatga

SEQ ID NO: 517108 - DNA, 423 bp, Stenotrophomonas maltophilia
atgatttccatccgcgcactggcctccgacccgcgcctgaagcaattcatcatctactccatctgtggcggcaccggtgtcacactggatctgacgacctacacaacgctgatctatttcggctggaattatcaactcgccaatgcaatcggctacgccgcaggaacgctggtgagcttcctgctgaaccgccacttcacattcaagacctatgaccagacgctccgacgcttggcattgttcttcggcaccgccctgcttgggtacctgatatccagcgcattgctttacttgctggttgcagtgctccaattgtcgccacttgtttccaagctggtgacgctggccgtcgttctcattctgcagttctcgcttaaccgcgcggtcaccttccgcgcctcaacggacccttccaaaccatga

SEQ ID NO: 517109 - DNA, 1320 bp, Stenotrophomonas maltophilia
atgagcagcaactatcacaccgcaatcgttggcggcggtttcgccggcctgacggcagcatacgaactggcgaaggctgggaagcgcgtcattgtcctggagcgtgataacgagctcggcgggcttgcaggcggcttcaaggtagggaatgaagtccttgagaagttctatcatcactggttcaacaacgacgtcgaaattttcaagctgattgaagagctgggagagaacgacaacattctgctgcgccccacgcgcaccggcatgtacttttccaaccagttcttccggctcagtacacctatggacctgctccgcttcaaggcgctgccgttcatcgaccggatccgtcttggcgtcgcggtgctccgtgctaaatcgatcaaggattggcgccagctcgagggtctcagcgcgaaggagtggttgatcgacctgtgtggccagaaagcctatgacgttgtatgggacccactcctggtcggaaagttcggcgatgttgccgaagacgtttcggccgtatggttctggaagaagcttgtgctccgaggaggcagtcgcagcagctccggggatgaggtcctggcctactacaagggcggcttcgccgaattggccaatcgactgggcgaagcaatcatcaagctcggaggcgagatccgcctcaacagcggcgcaactgcagtaacgtctgacgaggggcacgccaccggcgtccaggtcggaagcgagttcatatctgcggacaacgtgcttctctccacagcactgccgatctccgcaggccttctggagggcgtcgccgatgacgactatctacagaagctccggcgcatccgttacctggccaatgtctgcatggttctgagcctcgatcgtagcctgtccgatacttactggctcaacgtcaacgaccccgggttcccttacgtgggggtcatcgaacacaccaacttcgagccaccgagctcctatggcggtcgtcacatcgtttacctctccaagtacctgccgccgcatcacccgatgtacaccatgagtgatgccgaactggtggagttctccatcccgcacctgcagaagatgttcccggaatttgatcgcagctggattcaggatctgcatgtatggcgcgcggattacgcacagcccattgcagagaagcactactcaaagttgatccctggccgctgcaccccgatcagcaatgtattcgtaacgagcatggcgcaggtttatccagaagatcgcggaaccaattacgcagtccgtgaagggcgcgaggtctgcgctcagatcctcaagacgggcaggaactga

SEQ ID NO: 517110 - DNA, 1965 bp, Stenotrophomonas maltophilia
atgctcgcagtatcggcccgcaacgggagcgcgcattggcgctccctcttcgtgacgttggggggatggcttgccatctcgatcgtgacactgtggctgctgctgcaggtgccagccgtgcggacgggagatggctctgagtactacgcgatggaggtggcgcttagttccagcaagcatccgtatctgaccgaagccgactggaacgcgtacgacacgctctatctcagcggcaccatcgagtccatggtgcccaccgacacgctgaagcagtcgttccctgccttggtcaaggacgggcaatgggatttcaatcatttctggatgtatcccctgctcgcatcgatcgttgccgagccggtgagactcatgggatatgcggtttcgcacaacgcatcattcctgatgctgcacgcgatgatgttcagctccctgctgctgttggcattcagaacatatggtgcccgcggcgtagctgccgtaatgatcctgacgcttgcgtctcccatcttctggtttgtcaacaaagtccacaccgagttctttaccttctgtctaggttgcggagcagtactgcttaccgggcgccgtcaacccggctgggccgctgtgtgcctagcactggcatccacgcagaacatcagcctggcagccccagcgggtgtactggttctcgccgatttcctgatgaaatggcgtgcatcgtccatcccccaggcactacgggggatgatgccgcctgccgtactgagctgctgcctggtcttgctccacccgatctactacttcatccgacacggtgcaatcacaccgcaattgattgccggtggagcatcaacagattcggcaggaatcatcaggggaacggtatttctgtttgatccggatgtgggcctgttccccaattggcccctcggtgcactgctcgtgctcgcgttcctgctcgttcgtcgcgcacgcaccgattaccgtgccccattgatgatgacgcttgtcatcagctatctggccttcaacctgtatgcgcagtcagctacagagaacgtcaatgccggagctacagtcgatgtcgcgcgctatggcctttggtatctgtgcctgttcattccagggatcattgccctgatagatgcattgatggcaagccgacaccctcgatcattggtcgccatggcaaccatcggcctcgccttgtacattccctacaacatttacacatacaatccttggcgttacgaggacacaggcactccgacgcgtgcctcgcggtttgttcaaggcacgctgccttgggcatacgatccgttgccggagattttcttcgagcgctactccactcgcggcgagactgacacgccgttctcgagcgttgtggtcggggccaactgcagaaagctgctggtgacccgcaaggacgatggagaccttcaggtactgggacgcgaacgttgcgcgatgagtgacgccgtaattcgggcactggctgaacctgtccttccaacaggaagcagaggggtacgctacatggagttgaccccaacccagattgaagaagctgcccagcctatccagcgtggcgtccatagtgttgccgaggttgagggtgtctttctttcaggttgggctgcacccgaggcctgggggcgctggagttcagcgccttccgccagcctgagaatgaagcttcccgacagcgcgaagctccttgtgcttcggacggaggccttcgtcaacgaacgccatccttcgctgaaggttactgcggtcgtgaacggtgtggctgtagagacgtacagttttgaggcagcgcgaccaacacgaacggtgacgctttccataccatcgaacagctcaactctcgatgttcagttcttgatcgactcaccgatctcgccgaagacgttgggcatgtccgaggatgtgcgcgatctcggcatctcggtcagtgcaatcgaggttcgatag

SEQ ID NO: 517111 - DNA, 717 bp, Stenotrophomonas maltophilia
atgtccaaccctagtgtgagcattgatccggcagcatttcccagacagctgaacattggatgcggcttcgacaagcgcgccgattttctgaacgtggacctgaatgatttccacgccccggacctggtcagtgacgcctcgcgtcttccaatgctgccatcccagtactacgtgcacatcctggccaatgatgtccttgagcacattcctagagccaagtgcctcagtacattgaaggaatggaatcgactgttgggagttggaggcacattgcatatccagatccccaacatcgtcggcgcatgcgccctgatctcttccaacgacgcgcgtgatcctgcctaccacgacagcatcgtcgcctgtttgttcggcactcagggctataccggggactaccatttcaacagcttcacgccagagtccgcgcgctggtggctcagccgtgccggattcgacgtagttgcgcttagcgagcgcgacacatggctgcttgaaatcgacgccatcaagacattccacgtcgaacccgagtactggatcgaggatggagatgacaacgcctttgtgacggccatgtacgaaaaactgctcgctcgggctccagacccagctgggctggagtacttcctaggccgactaagtaacggatgcgagcgggagaccgccattgccatcatgaggcaatcgaatgaagctgaagctttgcatgcctag

SEQ ID NO: 517112 - DNA, 2070 bp, Stenotrophomonas maltophilia
atggggctttcacttccagcaggtgcgccggctgaggttgagaagctgtggagtatcgtcaatagaaagcatttcgacaggtacgatcttcctgcgattttcgatgctgcgcagaaggttctgcgggagggcgggaattcggcgtggacagccttgcccagtcctcttgtacgtagcgtagtccaccggcttgatgccattgccatgcgtgacgtctcggtgttcagcgctatctctgcaactgtggcgaaacgtaagtcgtacttccccgcagaagctcaagttcatgtcgccgtgcctcccagcggcctggttcccaagtcacctgacgcgcaggactacatctttacggtcagtcggctggatgcaccaaagcgaatcgatctactggtgcaggccatgcggcagaccaagggcgagacaaggttgctcattgcaggtactggtccgcagctttcggttctgaagcagctcgcgggtgaagatgcgcgaattgagttcgtcggctatgtaggcgatgaacacctcgcggactactacaggaatgcgctctgtgtggcatttgtgccgcaggatgaagatctcggtctgatcacccttgaggcaatgtcgtcgggcaagccagtgatcacgacccgtgactcgggcggtccgactgagttcgtcgaggatggcgtaacaggttggatctgtgagccgacgccatcatcgctttccgctgcgttcaacaaggcggcgctcgacaagaatcgcaccgccgagatgggacgggttgcgcgggatcgtatcgctggggtcgcaaactggccaaacgttgcatctgtcctgctcggcccagttacgtcgactcaagccaatagctttgtcgccgggagcagatcggctcgcgtgagaaagcgaattgtcgtcctcagctccttcccggtgtttccgccacgcggtggtggtcaggcgcgtatattccacctttggagaagaatcgcgagacatcacgatgtcattatcctcgcgctgaccagtgcatccgacgccatgcttgatcgggagatcgcacccggcctgcgtgagatcgttgtgccagtaacgcaggaacagcaggatcacgagcgtgtggtttcgcaaagccttggatggcagcctgcatccgacgttgcgttcgcgatgcgaccagacctgactcccgagtatcgaagaatcctgctttcactgctgccagatgctgccctgctggttgcctcgcacccatatgcggcagcagtggtccgcgacgtagaactcccgactgtatggtacgaggcacataatcacgaggcgccgatgaagcgggggatgtacggggatacgccaggcgcgaactctgtggtcgccgcgattgatgagctcgaaggttggttgtgcaaaacggcgtcaaagatcgttgctgtatctgacgctgatgcgcgagccttgggtgagcggcacgaagtggccgctgatcgtttcatcattgctgtcaacggtgttgatctggattcagttgctttccgtgatcaggaggcgcgaaagctgcttgctgcgcgctttggattgcatcgtccagtagcgatgatgcttgccagttggcacggtccgaatctcgaagccgtggacgttctgatccggcatgctgaggaactcaagcatgtggatttctgcatcattggtagtgcatccggcgcattcaaggatcgagtgcttccggagaatgttcatttccttggtatggtcacggacgacgagaaagatgcgctgctcggtgcggcaacgttcgcggtcaacccaatggtatcgggtggcggtagcaacctgaaattactcgactatatggcctcgggcgcaccggtggtaaccagtgcatttggtgcgagaggcactggcgtcagcagtgctgaggcgtggatctatgacggggaagacctgtcgcaggttgtacgcagtctgctcaatgcaagtggcgaggatgtcgaaaccagggtgcgccatgggcgttccttggtggagcgggagttctcgtgggatgttgttgcaagtcgtgtgatcaagtacatctga

SEQ ID NO: 517113 - DNA, 879 bp, Stenotrophomonas maltophilia
atgaactggtgggctgcacaggatttgtccagtttctgcgcaggtcaggtggacaaggtcatccacctgaagtttccgtgctatggcgctgcgcatccagacgcacgactctggttgctgcatcagcatcgcgcttgctatgagctctgggataccgagtacggtcctggcgcaaatgcatctcctgatgagctgagagtaaagggcctggttcatgagtttgacacccggcatctcggtgccatctccagacgctacacaattgccgagacggtaagtgagcgtttggagcgattcaacggtgtcagctccagccccatctatcacccaccgaagaatgcggagttgctgcacaccggtccttcgctgccctacatattcgcaccatcccgtctggagccgctcaagcggcaaatgctgcttgtgaatgccatggccaaggtgaggtcgccgcttcgggcgatcatcgcagggacaggaggggcagagggtgatcttcgcaggcggatcgccgaactcgggctgcaggatagggtcgcattggttggtgcggtcacggatgaggaaatgcgtgcctactatgccaatgcacgcgcggtgtttttcgcgccctatcgcgaggactacggttacatcacgcttgaagcaatgctgtctgccaagccggtaattacctgcaaggactcaggaggcgttctcgagtttgtggaggacggcttgaatggacgggtgttggatcccaccgccgaagcagttgccgaagccattgaggcgtatgccagtaaaacacttgcggttgagcacggagcttccggttttgaccgctatgctgcgttgaatgtgagttgggacaacgtaatttcgacactgcttgactga

SEQ ID NO: 517114 - DNA, 984 bp, Stenotrophomonas maltophilia
atgacccataagaatgctcttatcaccgggatcaccggccaggatggcgcctacctgtcgcagttgctcctttccaagggatacaacgtgcacggcgtgctggcgcgccgcagtaccgatacgctttggcgcttgcgtgaactcggtatcgcctccgacgtggtgcttcacgacggcgacctcaccgatctttcgtcgatgatccgtgcgatgcagagttcaggcgcagccgaggtctacaacctggctgcccagagctttgtcggttcgtcctggcagcagcctatcctgacggcccaggtcgatggtgtcggcgcgctgaatgttctggaggctgtgcgcatcgtcaatccggaagctcacttctaccaagcatcgaccagtgagatgtttggcctgattcaggccgagaagcaaagcgagacgacgccgttctatccgcgtagtccttacggtgtcgccaagctcatggcgcattgggcaacggtgaactatcgcgagagcttcggcctgcatgcttccagcggtatccttttcaaccatgaatcaccgctgcgcggcatcgagttcgtaacccgcaaggtcaccgacgctgttgccaggatcaagcttggcaagcagaaggagctgcgtttgggcaacattgatgccaagcgtgactggggctttgccggcgactacgtcgaagcaatgtggctgatgacgcagcagccaaagggagacgattatgtcgtcgcaaccggcatgaccaccacggtgcgcgagatgtgccggattgctttcgaacatgtgggtctgcaggccgaggatcacctcgtgattgacgagaagttcttccgccctgcggaagtcgatgtgctgttgggaaatccggacaaggccaaagagaagctgggctggtcgccgaagacctcattgcaggaattgatctgcatgatggtcgacgccgatctgcggcgcgtcagggacggcggaactcgataa

SEQ ID NO: 517115 - DNA, 918 bp, Stenotrophomonas maltophilia
atgacctcacccatcaagcgacttctggtgacaggaagctctgggtttgtcggggggcacgtgatcgctgccgctgcgcagggagtctttggcgacgtcgtcgttcaggccttgccgcgctcggtcgatcttcgagatgccgcttcggtagcagccgcagtgctggagctcaagccggatctcgtgctgcatcttgctgggcagagcttcgttccgcgatcgttcgatgatcctgcagaaaccatagagatcaacctgctaggcactctcaatctgttgcttgcgctgagggccgcagcattcaatggccggatggtctacgtcagctctggcgatgtctacgggcaggttgccgaggtggatttgccggtagacgaaaggacaatcccgcacccgcgcagcccctacggcgtcagcaagatttccgctgagcaattgtgtctgcaatggcaccgtaccgaggggctggacgttatgattgcgcgacccttcaatcacatcggccccggacaatctgcgagcttcgttgtcccttcgctcgcacgtcaggtcgtggagatcagagacggagagcgaagcgccgtgatcgaggcaggggatattgatgtcacccgcgacttcaccgatgtccgggacgtggtggcggcctatgcggcaatgttgtccgcgggccgttctggggcaacgtatgtggtcgggtcggggcgggagcgcacggtcagatcattgctggagatgctgctggcacaggcaggtgtagttgccgaagtgcggcaggacccaaagaggatgcggccctcggagcagcggcggatgtggtcgtctccggagttgctaaggatacataccggctggatgcccaggattccggtagagacgacacttgaacagatactaatggacgtaaggacaaaataa

SEQ ID NO: 517116 - DNA, 1953 bp, Stenotrophomonas maltophilia
atgactgacactgagaaccagccccttgatcccgtccggctcatgaatgcgatacgcatggaagtcgctgtgcccgggcgagctgtcaccgaagaagatgtgcctgagagcatgacgatcgaggagattatcgctcgcatctcgacggccacgccttcgccggctcgtaagctcagttttgatcggcgccgccatgcggttgccaaggttgctgcagagcagcgaatgcgcacccttcctcgcaaggaaagctactctgcagccgagatctactcgttctatgatgtagagtttattcatgcagcctacatggcagcgcttggacgtgcgcctgatccaggtggagagaagtactacctcgggttgctgcgagccgggacgctgtccaaggttgatattcttggcgtacttcgctggtcagcggagggacgaagccacaatgtgccgatcagtggcttgtggctgccgtatcagattggccgggtcagccggcggcgcatcgtcggcccagtggttcggtggtcgcacgcgttgttgggaatctcccggatcaaattccagctccgcatgcacgacaatgcacgcgctctcgaatccatacagatgcagcgggagctcgctgatatcagcgcgcgcctgcgcacgcttgacgatgcttccggacagaccagtacgctttcaagcaggacagacagccttgagaatgaccacgtttcaagagacgagtacattcgtctcgaggctacccatgcaggattgaagcgtgcgtatgatctgctgagcgggcgcgttaccgagatggagcgctctcaggatctgttgaatgtgcgtcttgttgaggcacatcggttgcatgacctggtgcttgggcgtgtttccgagctggaacgttcgcagggcctgatgagtgttcgtgttgctgaggcacatcgggaacatgagctggtgatcgggcgcctcgtcgagacggagctctcgcttgatctgatcaatgggcacgttgccgaggcgaatgcattgcatgagctggcatccggtcggcttgtggaactggagcaggggcagcagctcatcaaaggacagcatgccgacgcggagcattcccatggtcttctggaaaagcgcaccggcgaggtggagcagttgtatgactcggtggccgcgcgtctaggtgagatggcccgggcgctgcaggtgatcgatcagcagagcgaagcccgagccagccaggagctgtcgaccagcccggaacagccttccgtagggatatcagatcaagtttatgctgcgttcgaagacgcgttccgcggaagccgtgagagccttcttcgcaaggtcgagccctacaacgcctggatgaaggagtgtggcgcaggttccagtgatggccccatcctcgatattggctgtgggcgaggcgaatggcttgagctggtccgtgagaaccagtgggtaggtcgcggcatcgatctcaacaagagcttcgttgaccattgcagatcgcttggtctcgacgtagcacagggcgacgccattgcgctccttcgtgagattcccgacggttcaattggcgccgtcacgtccatgcacttggtcgagcatctgccctatgaagtggcaatcgccttgattgatgaatccctgcgggtactgaggccgggggggagtctgatcctggagacgcccaatccggagaacctgatggtaggcgcgcattggttctatcttgatcctacgcaccggaatccgattcctcccgcgagcctcgcctggcttgtcaagcagcgaggattccaggaggccagaatcgagcgtctcacgtacggacgtgagatggacgtgcccaccccccttgaaggcgacgatgccaccagcaatgtcgtcaatttcctgctcaagcaagtatcgtttcctgccgactacgcgattgtcggtcggaaggctgcgatatga

SEQ ID NO: 517117 - DNA, 1239 bp, Stenotrophomonas maltophilia
atgagtgggcagctgaaggttgaaaaggtaggcaaggcatatcgcgagtggggttccgaatgggcccgcgtgctttcgtggttcggttttcctaccttggccagatccgagcattgggttctacgggatgttggtttctcggtaggcccaggagaggcggttgggatcatcggtcagaacggcgcgggtaagagcacccttctgaaaatgattaccggtacgactcgtcctaccgagggggagattcatcttcagggtagggtggccgcgattcttgagcttggcatggggttcaatgtcgaattgactggtcgccagaatgccaggcatgcggctgggctcatggggtatccgatcgatgagatcgaaagggccctcccagcgatcgaggaattcgccgagatcggatcttactttgatgaaccggtacggacctactccagtggtatgcagatgcgcgtggcattcagtgtagccacggcctttcgtccggatatgcttatcgttgacgaagcgctttctgtcggcgatgcgtatttcattcataagtgcttccagcggatccgggagttccgtgaggctggaacgacgttgctgttcgtttcccatgatcccactgctgtccagtcactttgtgatcgtgctgtgctgctcgatcaaggaaggcttgtgctcgacggtgagcctcagcaggttttcgattactacaacgccttgatcgccgaaaaggagaacagcaccgtccgctctgagtccaatgcggaggggcgcgttgtgacagagtccgggacaggcgaggccgtgatcgaggaattgaaactgctggacgaaaccggtagagcgattgagtatgtgctggtggggcaggaggtggtacttcgtgccgaggttgtcatcaatgaagacattgatcagctcgttttcggatacatgatccgggatcgcctgggacaggcgatttttggaacgaatactcattacactgaacaacccctcgcgaaccttcgaaagggggagcgcgtcgcttttgatgttgccttcaatgcagggctgggaactggctcctactcgatatctgtagcgctgtcgagtaccgaaacgcacttggtcaagaactaccagtggcgtgatctggcaatggtgttcaccgtggccaatgccgatcgaccgaccttcgttggaagtgcttggatcccgcctgcaattacgatcaccaaacagttgacgctacagcgttga

SEQ ID NO: 517118 - DNA, 795 bp, Stenotrophomonas maltophilia
atgcgtgaaacatttgcggctatttgggcgtatcgctacttcatcgcgtcgtcgataaagaacgaactccggctgcgctttgttcgcagtaagctgggagggctttggatgatcattcatcctttggtccaggtgctcatctttgccttgatacttagcgaagtgctggcggccaagcttcctggtgtggataacaagtttgcatacgcgctgtatctgctttcaggaatactgtgctggacgctcttctcggaaacgctcgggaaattcaccagcttgtttgtggataatggaaatcttctgcgcaaaatggcgtttccaagaatctgcctgcccataattgctggcgggtcaatgctggtcaacaatctattgttgatggcggcaatattcggagtcttcctgtgcctgggtcacatgcctggttcgcaagcctggtggttgccagtgctgattctcattacagtgagtctttccatggcagtgggcatgctgttgggcgtaatgaatgtcttcatgcgtgatatagggcagattgtccccgtctttcttcaggcgttcttctggctcacgcccattgtctatagtgtcgcgatcctgccagatcgctatcgggatcttttcaagttcaacccgctatacccgttggtcaccagttaccagaacgttcttgtattcaatagaccgccgctttggggggacctggctggactcgttcttgcaacggtagccgtcgcctgcgttgccctcgctgttttccgtcgtgccagtgctgaaatggtggactcgctatga

SEQ ID NO: 517119 - DNA, 1344 bp, Stenotrophomonas maltophilia
atgctcaaggtgctgatgtggatctaccgacggccgatggtgcgagggctggcacgcctattgctgcccagatctgtccgcttgaacgccatgcatcgagctgcactgaaggccagcgagaacacacggtttgtccggacgccaaactggaacgtggagttgccgccagctggattgcagaatgtgcccggcgaaagccggcatggagagcgcgcgggcatcaatgtgttcggctatcttcgtgggcagttcggtctggcggaaagtgctcgatactatgctcgggcactgatgggggcgggaacgcctgtggctctggtcgatctcgaactcgatctgcctcatggatggcaagacgacagcctccagcagcagcttggagaggtggcgccctatcccgtgagtctgattttcgtgaacccggactacttcgagcaggccctccagaagattggtccggagcgactcaagcacaagcacctcatcgcttgctggttttgggagcttgagaccattccctccagttggctgcctgtgatcgagcgtgtcgacgagattcttgttgcatcggagttcgttgcgggcgcgttcagacgtgtaacgtccaagccggtgctttgtgtgccgttaccggttggcggtccaagaacaagtgagctcactcgcgcggacttcggcctcgaagaagattcgttcatcttcctgtgcaccttcgatttcaactcttggatcgcacgcaagaacccgcaggcagctatcgatgctttcaaactggccttccctgatgatccatcagtacgacttcttcttaagaccatcaatgggcatcggcatgtggaggccttccagagattcctggatcaggcccggtccgatcctcgcatcctggtccgcgacgatctgattgatggcgcgcatgttggcgcgctgcagcgctgttgcgacgtctatgtctccttgcaccgggcagaaggattcggacttggcatggctgagtcgatgtggcttggcaagcctgtcatggcaactggatggtcgggcaacatggagttcatggacgccggatctgcagcgcttgtcgactacaagttggagatggtgggcgagggagaatatccacacgaggctggcgatcggtgggcaactgctgatgtacgggacgcggcgcgtcatatgcgtcgattgatggatgatccagaccttcgccatgaactcgcgaaggcgggatctgccaaggttcatcacgttctatcaccgcagcggtgtgcgtccctgatcaacgcgaggatcgcggaagtaatgtctggaaaagagaagcctgacggaggttgtggcaatgcgtga

SEQ ID NO: 517120 - DNA, 399 bp, Stenotrophomonas maltophilia
atggaccccaagctgaaagccctcatcgggcagaccaacctgtccgacctgctgcctcaggcaccgcaggaagtggatcttcagcaaccggtggccccacctgaaccggccaagccgcagcctgctcgctcgaccagcgatgcgctgcaggtgcatttcggcggcaccgacatggttggcaagttggccaacgctcccacaagcaggcgagtgaagatcttcgcgatgatcctgctgggtggcccgacgatcgtgttcggcctgctcctgctctcgatggtctggacagacccggcgaagccggttttcgcacgtgtctgcggcacgctgatatcggcgatgttgatcggtatctggccctatctactattccgcaaacgggaaagatcccaggcctga

SEQ ID NO: 517121 - DNA, 663 bp, Stenotrophomonas maltophilia
gtgttttattgcagggctgcgccctgcacctgcagaggccgaagccgaagcaagatcaagagcggcattccgtgggatggcggggcggtgtgggtggtcaggacacgccgtaaacccatccatgggggctcgatggcgccatccatggcgacaacggtcctgcccacccacaccgccccacctctgacagattccgcgcgctgttggtgggtgccgaccgttggtcggcacatctgtcagatatcgatagtcaaaattggatccgacccgtgccgaccaacggtcggcacccaccatcagcagcaggttccaacagatcgcggaaatctgtcgaaggcggggtgggtccggttgagggggtgtgagcgccatggatggcgcgaccaagcccccatggatgggtttacggcgtccccctcaaccggacccaccccgccaacccacggaaagccagcctttgatgttgacgttgcttctgcaggtgcagggcgcagccctgccgaaaactccaccctcagccgtcgccctggatgccgcccggtgcctgtgccgggtcgcgccagcggcgcaccgtgcgctggaaaaacaggttgttcggcagctgcagcaccgtgccctcgtggccgtcgccggtctcctgcagggtggtgtagatcaggttga

SEQ ID NO: 517122 - DNA, 168 bp, Stenotrophomonas maltophilia
ttggaggaaggcgcgcagaggcagggcatgatggagtgcctgcacccggcatccgagaatctgcctgccgggggcgaggaatcgcgagtggattccatccaggagaagtacgagttcgaacgaaacgtggaatgggtcccgaaaaggttgtcgttctgggcgcgatag

SEQ ID NO: 517123 - DNA, 630 bp, Stenotrophomonas maltophilia
atgttgtcgtttgcggcggaagtgctgaactcaccaggatttaacagtatcgttttgcttgtaggcgtatttgtagccctgcgtcagctcaggatcgccgaggacgggatcaagtcccagcttcttgccgtcaagcaacagattgatgcttcgaagtcggggcaagatgattcgcttcgcgaatcaaggttgatcgcgaagcgtaaagagaccgctcgtcttcttcttgaaagccggggagatgaaaagctacagcgaggctgccgtactgtcgaccgttactacaatagctctggtgtaaacatcagagatctagtaagcatggactacaagcctccaagagcagtcgacgagattgacgcggattacgataagcgctgcgtagaaaccttgtccgaccgaaacgatatcctctaccttcttaaccactttgaaaatgtggctatctgcgttgagcgagatatttattgtcgggatatgatcgtagacgcatggcgaaagatcatgatcgacggtttccggcattcgcgtgcgctaattgatgccatgaggacgaagtcggctaatccaaagatttgggaaaagttccagcagttcacgcaagaacttgagcgtgagtctcttggctga

SEQ ID NO: 517124 - DNA, 264 bp, Stenotrophomonas maltophilia
atgggcgcagctgagaatatccccgaagtcctgctgaagctcgagcaggtcgaagcccagaccggaatgaagaagagctatatctaccgcgagatgagcaaaggcaacttccccactgctttgaaaattggcgcagggagccggtggtgtcaaagtgaggtccagaagtggatcttggggaaaaaggaggcaggaaccagtagatcagatgactgtcaggcttctaatctcagccaagagactcacgctcaagttcttgcgtga

SEQ ID NO: 517125 - DNA, 1182 bp, Stenotrophomonas maltophilia
atgatccacgtcggagactgcctcgaagtgatgcgcgggatggccgacaactcggtcgacgccatcgtgaccgatccaccctacggcctgtcgttcatgggcaagcgctgggattacgacgtgcccagcaccgagatatgggccgagtgcctgcgcgtgttgaagcctggcggccacctgctggccttcgccggtacccgcacgcagcaccgcatggccgtgcgcatcgaggacgccggcttcgagatccgcgacatgatcgcgtgggtctacggcagcggcttcccgaagtcgcacaacggcccctggggcggtactgcgctgaagcccgcgctcgaaccgatcacggtcgcccgcaagccgctggtcggcacggttgccgctacctggcagcagcacggcacgggcggcctgcacgtggatcaatgccggatagatgcaggcggcgacgcccttggcggcggtcgcataagctcaacagctgatggatgggaccggccttggaagcatgatccggatgcactctcagctgcccatgctcgtggagagcaaagcgttgccaaggctgaagagcttggccgctggcctgccaatctgatccatgacggcagcgcggaggttctcgccgcctttcctgcagcgcctgggcagaaggccaccctcagcaacgacaaagggagtgccagattctcgaccgtctatgagggcggcccgttgccccgaaatggcgaagccagccggaacagcgcgaatgaaggagccgttggtttcaaaatgcggccaggtgctcgccgtatcgatgccggcagtgcggcgaggttcttctactgcgccaaagccagccgtgaagaccgcaacgacggcctagatgctggcccggatcctacggtctccgctggcgcgacgatgcgcgatcgcgagactgccgactggcgggcgcggaaccggaaccaccacccgaccgtcaagccgaccgatctcatgcgctacctgtgccgcttggtgacccctgccggcggcctggtgctggatcctttcatgggaagcggcagcaccggcaaggccgcagtactcgaaggcttccagttcgtcggcatcgagcaggatcccgtctacgccgcgatcgccgaggcgcgcatccgggtcgcccaacctggcctttcgtttggagacgtcgcatga

SEQ ID NO: 517126 - DNA, 372 bp, Stenotrophomonas maltophilia
atgagctggttcagccgtaagagcaaggctaccgagtcgctggatgaggcgatcaaaagggccaaggccgacgtaagcgcgcacctgcacactctacccatcgatgtggtggagcacgtcaccgagtatcgagacggcaggcgcgactggcggaatgacaccaacggtcaccacagcatgcgcaagtggctgcagacgctcaaagaccttcggggccgcgttgactatctggagcaggctgaggggaagcggaatcagatcgccgcccacctgggacttccagctgccagtcttgatatggagggcctgttgcgcctactgcatgaggccgacacccacgcaagaagcgagccggagccgaccaatggctga

SEQ ID NO: 517127 - DNA, 1104 bp, Stenotrophomonas maltophilia
atgagcaacgacaagacaaccctggcggacgcgcagcccggtgggagagtgaggctgggggatcaaccttggccagagatcgacgccattctggctgatgcgtattccgcaggcgcaacaggtctgccgttcgaaggcatcgcacgccgccatgccgtgcgtgcagccgtcgccgccctctccgcccagccctccccggtggcatatcacggcgacgttgatctgaaatggctatccggcagcatcggcgaggttgcacaccggctcagcacctacatgccaactgggcttgccgagtgggctgaccgtgcccgcgactgccgcattgcagctcaagttctgagcgaactatccgcccagccctccccgattggtcagggagtggagctggacctggaccgcgttctgtcactggccgatgtgcatgccgaggaaagccgggaagacggcgtgcgcttgctggaccgtggtggcttgctggcgttcgctcaggacgtggtattagccctcgccgcccgacagccggtgggtgtggccttcccgtgggagaacttccctgcgtacctgatcgacaagtgcgaaggcgacacgatcagcgaagaaggtttgcagcaggcactggcagcgatggcaaaagatgagcgctactgcctctccgcccagccctccccgggtggtcaggatgcgctggcagcgctgcaacaggactacgacaagctgctggactcgtttaatcggcaggtcgaggtcgccgagaagatcgcgggccgcgccctgcagcaggacgacaggatcgaggagctggaagaagccctcgccgcccgccagccggtgggggagccggtggcgtacacggacggaaacgagttcgtatgtgccgctgagtacgcaaccatgcgcggcctcggccatgacggaaatggatggcgaccgctctacgacggcccgcccgcgaaggctgtggacctggggcagttcatcgcgctggcagagtttggcgaggaatttgcgttcagcgccgagaagcagccgcattccagagtgatctattcgcaagcaagccgcctgctggccctgatcgacggcaaggcggtgggcaaatga

SEQ ID NO: 517128 - DNA, 750 bp, Stenotrophomonas maltophilia
atgtcagtagtagtcgcgcccgcggtaggcctaacaccttgtggcaattgcggcagcgaggaagtgcgcatgcgcgcgcgggggagcaccagcacccggcgcaccgcgcaggtcgtttgcgcgcgctgcagcgcccagagtgagctgtgcataggcgcaggtgcggaagctaaggcggtcaaggcatggggacagaaaccccacgcgcctctggcaccgccaacagcgagggtggtgcgcgaccgggcgccggtgccagacctccccctgcagcgcgacccgctcgaactgattgcccgcatgctggttggcggaagcttccggattcctacgcaggggcgcacgccgacgatgatcactgcggccgacgtggccggagctgtcgggatgatgcgtgatccggtggccaagcagacggcaattgtcgttgtccaacgtgccgaaggtagggcacttgtcgctctggggcgcagcgtggctaggagggtgtttcggacatgccgcgaaatgggcggcgccgcgccactgcgaattgatgatccggccgaccgctggcgtatgagactcgtgctacaagacgcaatcaatgacctggtgtggccagagaggaaagtgcccgcccaagctgcggcaatggcggccaaaatgcgaaaggctgtctatcttcaggcgtacacaattgcatctggtgtgctggtcggcgctctggaaaatgcacgtcaggagttcggcaggcggatattcacttga

SEQ ID NO: 517129 - DNA, 942 bp, Stenotrophomonas maltophilia
atggttgaggataggaaaaaccgattttggctctggttgcgagagctccaatggccggcgatagcaatgagcgttggggcgatcggagttgtcgtacttcgtatgcgctatccggaggtttttaagctcgacgcgatttctgtcgtgctcattgtattggctatccttccttggttgcgatcaatcgttaaatcggtagaggtcgctggtttaggaaagcttgagctgcaagatgttgagaatgcagcgcggagggttgaggattccggcttacctaagcccgatcctagcgagccggaagcacaggggacaagtgccgcaagcggaaacgtcgatgccgctgatagtgacgtcggagttaggcaagtgcaagacgatcccatggtcgacagagctgccgccgaagctgctcttgatatcgttagttcgctgcccagcaggagggttcagacgatagtcggagcaggttttgggaagcctgctgattcattttcgaagatgcattctttcggattctccagcacggacttggcgtactcggacagccgcctagccggagccgcgcttcttttcacgcgaggcctgcaacgcttggcaaaggagttcggaattgcgtacacgtctgcacaggacacgatttcacggcttttcggtgtcggtgccatcgacgcgaaacaggctgatgctctggtcactgcttcgagtcttcttagagccgcacgtggattggaggcgagcgggcttgctgttcagaagacgcttgacgttgtcatggacgtcgtggaatcgctcgaggtgctaagaaaaaaggagcattcgcgtaggaccaaagtttcggcaggtaccgcagctgtggctgataaaacatctggaaacgctagcgtcgcttcagcgcaaggtgtggatgctgaccgcggaacggagcccaaggcagaacgctaa

SEQ ID NO: 517130 - DNA, 333 bp, Stenotrophomonas maltophilia
ttgaaccagaaagctttcatgcagaccttcgacgcagtcgcattcggagccttccgtgcagtcggcgtcgccgatgcagcccactacaaggagccgggcggcacggcagaggtgccgtgcaccgtattgctggacgaggacgttgagcagttcacgccggatgacgtagctcccatctcgaccaccattgatcgggtcacgctgcagctggccgagatcagcccgcgcgctggcggcgtggtgtctatcgacggcaccggtcgccggctgaagctggtccagaagatccgtgccgacgaatccacggcggtgtgggaggtggccaatgtctga

SEQ ID NO: 517131 - DNA, 456 bp, Stenotrophomonas maltophilia
atgtctgatcgcacccccagcccacgccgccagctgctgctggccatggagaagacacttcaacagatcagcattgagaacggctatctgactgatgccggtgccgggtggacgctggagccgactcccggcgatcaggatacccaggccgtgctgacggccctgatcgagaagcaacagcggccggagagcccctcaaaggtcagtacgcaccgactgaccacggtcagcgtcatcgccaaggtgcccgccgacaccgaggactaccagcgggtgctggacgacctggtaaccgacatcgaggcggccttggacacccgcgaggtcgcccgcaacttccctgacggcatccaggtgccggtgtacgtcggcatggagccgcttatgccggagaaggccagcgcgggctgggtgggcgtgttgctcacctaccagtcccatatccccaagaaataa

SEQ ID NO: 517132 - DNA, 756 bp, Stenotrophomonas maltophilia
atggccgaagattacagctacctgggcagcggcatcgtcctcatccgcgagtggaacagcggcctgccgttcgaagagatcggcaacgtttccgcgttcagcaccgcggcgcagaccaacaccatcgagctggccgacaaccagaacccaggtggcggcatggccaacagcgtggatcgagtcaccgggtggaacctcaactacaccttccacgatttcagccctgcaaacttcgcgcgcgccacccgcggcaaggcctccgatatcgctgccggcaccgttgctgacgagccggtgcgcgtatcggtgggtgcattcgctcccttggcgcgcattgctgccgagatcacctcggtcaagccgatgacgggcaccgccacctatgaggccggcaaagactaccgcttcgagcgcggcatgctgttcattccggtcggatcctcgattgcagctggcgacccggacggtagcccgaacgtcaaggtttcgtacaagaatgtggctatcgggcacgtcgaagcagcagttaccagccagaagttctatgaagtgcagttctacggcgcgaacgaagcgcgcagtgggaaggctgtgcgcttggtctgccacaaggtgtccggcggcgtcatcgaaagcatggggctcatcggcaacgagttcggccagggtagcgtgccgggcaagcttctgaaggacgccgcgaaggccactggcagcgataagtccgcctacttctactggcagcaggagaagtga

SEQ ID NO: 517133 - DNA, 420 bp, Stenotrophomonas maltophilia
gtgcacgacatggacgccatcactccgcccactcgtacagtctctttccgtggagaggtactggtcgtggggccgctgcggctcgagcagctggggccgtttatcaccgccagccgttcgactatcgggcgtatcgcgatgatcgccggtttgcccgaggggtcgtcggcggtcgacgtcggagctttggtgctggatctgctcgaacaggacagcaccgagatcgccacagctctggctgtggtggtgaaccgcgaaccacagtgggttgctgcagggtcgctggaagaagtagcgcagctgctcgaggcggtggcgggcctcaatcgcgatttttttgccctacgactgaggcgaatggtggaggcgatcagggcgatcgtcagcccgtcggcatcgccgacttcgtccagtacctga

SEQ ID NO: 517134 - DNA, 2775 bp, Stenotrophomonas maltophilia
atggctgagccatctgccaacctgcgtgtccgtatcagcgcggacttggccgacattcgtcagggtctgggcgtgctgaccaggcagctacgcgaagtgcgcggcgaggccagccggccgttgccggcgaagaacccgatttctgacctcgggatctctgcgggccagacggcacaggccatgcgtcagcttccggcgcagttcaccgacatcttcaccagcctgcagggcggcatgcccttcttcaccgtgctggtgcagcaaggtggccagatcaaggacagcttcggcggtgtggaaccggcgctgaagggtgtgtcttcggccttgttgggcatggtgaacccgtacacggtcgctgctgcggcagtcggtgtgctcgtctatgcctggtatgacgctgaaaagcggcaggaggcatacaccaaggcactggccctgtctcgaaatgaggcggcggccaccacactgacattggtggcgctggcacagcgcacgagcgaggcgatgcaagtatcttcaggcgcgggcgaagaggcagcgctagcgattggttccaatggacgaattgctgagcgaaacatgcaggcagtcgccaatgcagccgtcgctatgaaggagataaccggccaatccattgaggagacggtgtccctctacgccaaactggcagaggatccggtgaagaatgccgcgaagttgaacgagaagatcgacttcatgaccgtggcactttacgagcaggttaaagcgctgcaagagcaaggacgaaatcaggatgcggctacggtgatcacgcgtgcatccgccggtgagaccgagatggcgctggccagggttcgtgctagtcaaaatcctgtcattcgcggttggcggtccatctggagcgaagcaacaagggcgtggggcgccatgcaggccagcaccggtgctggcccacaggccgagcagatgcaacaactgttgctcgctaaccagcgtgatgttgcaactatgaacaagggcgtcgcggacggcatgagttccgcatgggtatttcaataccagcagcggattcagacgcgggctaagcagatcaaagacatagcagctgatatttcgcaggagcgcaaggatgccgagctgaaggcggcgcaggccgcttctctcgacttcgttgcagagatggacggcatcatcgagaaacaagagtccaaggttgataagaagcgtgctgagattggccggatcaatggtgaggccgagatcgctcgcaggaaggccgtggccgctgggttgacagcagaggtcgagaagatcgaagagcgtcgcgcagctgcggttggagcgatcgaaaagaaatacaaggagaagtccaagtcgggcagcggttcagctgcaagaagtgcaggccttcagggctataaggacgactcggttcaggagcaggcaaccattgcagccagcacccagactcttcgtgcacagtatgccgcgcggcagatcactgccgaggcctactacagccgcatgcgggagctgacccaggccggcaccgacgccgatgtccgctctcttgaggctcagatttctttcctgagccggcagaacgtggccggcaaggaggggatcaccgtcaagcgccagctgggagagcttgaggcaaggctagccaaggtgcgcactgagggggcagcaaagctgcaggtgctgacgactgaggaagagcgtgcgacgaagacacgcaaagctgcgatcgacgcatacaccgacgcacttgaggccagcaacgtggccctccggcgccacctggaaacacgtgttgcacaggtcggcatgggcgatcgcgagtatgagattcagcagcgcatcaacgacgcctatgatgacaaggccgaaaagctgaggcagctcacgctgcagcgcaatgcggatcagatcgacgattccaccttcgaagaagagaaggcgatcctgctggccaagacattggatcgcgtgcaggccattcgcgatggatatgtagagcttcagtctgccgagagcaactggctgctcggtgctgccagtgcatgggagaactaccgccagcaggccagcaacgccgcgcagcagatgggcggcgttgtcggatcggtgttcagtggcctcgaagacgtgtgggtgaagttcacgcagaccggaaaggtcagcttctcggacttgacccgctcggttttggccgacctggcacgtatccagctccgccaggccctgaccggtgtgggcggatcgtggatgagtggggtactcggcgcgctcagtggtgggctgaacactactggcaatgcggccgtgacaatgggtaccagcagcatcaacgatgagttgttccagaggatgcgaggcttcacgccgcggggcttcaccgtcggtggctacaccggcccaggaggcgtgaatgagcctgccgggatcgtgcacaagggcgaggtggtttggtcgcaagcggacattgcacgcgcgggcggcctgggcgtggttgaggccatgcggcgcgggctgcgtggctatgcagagggcgggctggtcggagctatgggcgctggcggcccgattggtggagcagtgaacatcaaagtgtcgaacgctcccgcaggcaccacagctactgcctcgcgcaatggtagcggagggctcgacattgacgtgttgctgggtcaggtcgaccagttcattggtgggcggattgctggtggaacgggatcctcgtactcggcaatcaagggccgcttcggtttgggagattcgatctga

SEQ ID NO: 517135 - DNA, 357 bp, Stenotrophomonas maltophilia
atggaaacgttgccggctgtcgccaggattacgtttgacgggcagaagcgctcgatcgatccttcggtcgagcgcacggaaatggagaggggagttccgcggcagcggcttctgaacagccaggtgctcgtcaagcaatccatgattttctatttcgcgaacatcgatgacgccatggctttcgatgcgtggtacttcgatgcgatcaagcgaatcggttggtttgaaatggtgcatccatacactggaaaggtgatcaaggctcggtttgagaatggcgccattggtgatcttgtgcctgacgagaagctacctggcgacttcaggctggatgcggtcgtggagtacatgcgatga

SEQ ID NO: 517136 - DNA, 462 bp, Stenotrophomonas maltophilia
atgagcacattcacggaacgccggcagcgcaccgacgacactgccggcatcctgttgctactggagctgagtgccccatcgttcgtggaggtgctgcgcatcgtcaacgacacgaccgattgggtaagtcagggcaaggtctacacgggcttcccgttcggcttcaagctgcccgacgacgtgggcgggcaggcgccgcgcgcccagctggtgctggacaacgtgggccgctcgatcaccgaggatctggagcggctgcagcccggggagctggttaccgcgcggctgatgatcaccgatcgagctgaccccaacgtgatcgaggccagctacgacctgccaatgacgcaggtggttgtgaacacccgcactgcctcggctcagctgggtgtggacttcctgatgcgccagcaggcggtcacgctgcgcgccaatcccttcacactgccggggatcttctga

SEQ ID NO: 517137 - DNA, 396 bp, Stenotrophomonas maltophilia
atgcgcttggccgacgttgagaagttcgtgggcgtcccgtacgacgcggactgcttcgattgtgccgacctggtggtgatggtgcagctgcagctgttcgggcgggcaatcacgcttccgggaaggcgtcctcgcgggctacagggcgctgccgagctgggagcgctatcgcggccctacgcacaccgccgagacgggccacccgaagacggcgacctcgtcctgatgatcgatcagggacaccgaaaccccggccatgccggggttttctttttcctggcccatgagggctgggtacttcacagcaacgagcgcaacggctgcagcgtgctgcaccgcgtgcgcgatctgcccgacttcgggctgcgaattgagggttactacgcatgggcctga

SEQ ID NO: 517138 - DNA, 300 bp, Stenotrophomonas maltophilia
atgcctgcgggcatccagaccttcaatctcgatgggtcgctggagattgattacacgacccgcctggggctgttcatcggcacggttcagaccgacgccgtgcacggcaattcgacttgggtagggccgctgccaccaggggacttcttcttctacgtggtgcctccgcctgcgcagcctggccgcacgccgaccgtttggtactcagatggccgtgtgtactggggcacggatgtggatggcaatgggcagccggtctttaccctggtcccggcaactgttctttacggggtgcattga

SEQ ID NO: 517139 - DNA, 315 bp, Stenotrophomonas maltophilia; identical to SEQ ID NO: 170288

SEQ ID NO: 517140 - DNA, 315 bp, Stenotrophomonas maltophilia; identical to SEQ ID NO: 170289

SEQ ID NO: 517141 - DNA, 1161 bp, Stenotrophomonas maltophilia
atgaatcagctggttattgacgaggtgtctgggcaacgcctgaacgttgctctagaagaactatatttggatgctaagaatccgagatttggtgggttagggagagtgaatcccacccaggcggaggttcttgatcatatcgtcgacgcgtttggcgtggatgatcttcttagttctctgtcaattaatggttatttcgatgctgagccactagttgcacgcagcgaggacggcaagctggtagttgcagaggggaatcgccgcttggcggcttgcctaatgttggctggtgacgagcgtgcgcttcgccagcgggataaggccgcaccttacattgaggtttggaatcagaagaagaggccatcgcttgagcgtccgcctgttattgttttctcaggggatgaggatcagaccgggctgctgtcttacttgggtgttcgccatatttcggccgcaaaaagctgggactcttacgccaaagctgcttgggtagcagatgttgtggaaaagcataagctgagcgtgtctgagatagcgaagatgatcggtgatcagcatcggacaatcgatcgtcttttgcagggcttctatgtagttaagcagttggaagcctccgggaaatttatccctaccaacagtcagaagggtggtagaggaagcgtcacggcgtacccattctcctgggtttacaccattcttggatacagtgcgacgcgagattatttggatattgctgacacgcaaacggtgccgaatccgatcaagtcagagcagttggccaaggggacggtgctgatgaccgctatgtttggagacagaagcagagggcggagctcatctgttacagactctcggcaactcggacgactggctggcatgtttgcaaatcctgaaacgctcaccatgatcgaacaggggaaaactgtcgacgagattgaagctgctacacagaagatcgaggacaagcttcgtcagggcgttcacaccgttcgcgagatcttgagagacctagtttctcgattggacgaaactcctgttgatcgtgaagtcgcgatggccatggtgttcccggcggagaaggccaattccgttgcaggctccctcgcacgcaagctgaaagagattgcgaacgagtcaagcggggcggagggccatgaataa

SEQ ID NO: 517142 - DNA, 924 bp, Stenotrophomonas maltophilia
atgagcccaaaagcctcatggaagagtctggaacctaaagcgtcaaaggatgcggaccagtttgagtttgctgcaatgcgcgggacatctgccacgatagactcagctatcctggataacaccatctccggcgaaatagatgatgaaatggaggaagtgggtgtcgcgggacctcactggcaagctcaagatcttgcggaggaggggttgctagactcgactagaaacgagatattgcgtcgagtagagttgattgggtctggctatccatttagcttcgttaataataagctggtgtacaccccaagcgactctggattttacgaattctgcttatctgtcacccaggcgccctccattaccgagggagactatgtccgctttccgcgcctttttgagcgtgtcgtgacatatttgcttagggaatactttggtcgcaactctgagggccttcacaccgggcatcccaggctgccttcgacgtccttcaaacagattatggcgaagttgcagaaggcgccatatgagtgggtatggcatcctcagccggatatgagcgaagctgacgtaaaagacgagaccttagacttcgttattactcttccatccctggattcaaggtcgggtaatctttacattttagggcagtgtgcttgcggggataattgggattccaagctggaagatccaaatgtaaaattgttaaggaaatggttccaccctgattggcctattgcgccaatcagagcattcaccacgccatttgtaatgggtgatcaaacgatgcgaagcgttgtgaatgaaagcggagctctcgtttttgataggccgaggctgattaagattgccgagaattgggtccagcccagcgccaaaagaaggctaaagaagaaagtagatccggtttcaatgctgcttagctaa

SEQ ID NO: 517143 - DNA, 936 bp, Stenotrophomonas maltophilia
atgccaacggccgtttcactctttaccggctgcggtggttcagacgcaggattgacggccgcgggattcgacgtcctgatggcaaacgacatccttaagtatgctgcagaggtttacgaagccaacctaccgccgacggactatgtagtcgcgccaattgaaacagtcacaaaatttccttctgcagacctgcttgtaggctgctacccctgccagggctacagccagggcggcgctcgggaatcgagccgagatataaattatcttttcaaagagttcggccgcgcacttcgaatcattaagccaaaagcattcattgttgaaaatgtatccggactcatccggaaagataatttagatttattcaactggcagataaggaatttcaggtcggccggatacagagtgtcttggaaactaatgaatgcggctgactatggagtagcccaggagcgccataggataattatcgtcggaatcagaagttcactggatcacgattttgttttccctgatgccactcatggcataaccactgaagtgcctcacgttacaattcgagaggcacttcagggctttccagactggccaataggcgagttcaatgacgaacccttccattggtattacctgtcaagaaatcgtcgaagatcatgggacgagacatccaaaacaattgtgagccgatcccgacatatgcctctccatccgatcagtcccgaactccgcaacatcggacctgacaaattcgaatttgtatccaatgatccggcgcgtcgatttagctacagggaagccgctcgtcttcaaggctttcgcggcaacttgacgttcccagaatctcacgggatgcatagcagatacaaagttataggaaacgctgttccgccgcctctatttgaggcggttgcacggtcactcccagatcttagctaa

SEQ ID NO: 517144 - DNA, 714 bp, Stenotrophomonas maltophilia
atggaggcgcgtatcgccaatggatcaggcctcgagaaagccaggatctaccgggaacttgcggactgctacggacgcacagccaaggcgtgggagtaccgcatgcagaatatctcccatgttctggatcaggccggcaagccatggctacccgggcttcttccagcatcgaacgtgggtgcgagggttgagccgaaacttgccaagctcctcgggctttccagtgagatgctcacgtcggtctctggtcctacaaggggactattggagaaggaggccaaagcggcagaggcatctggcagtttctccccaacagatgaggtgggcgagaggcggcgtgtgctggcagctatcgttcagcgccgcgggcaacctgctttccgcaaggcactgctggacgcatacggaggacgctgtgcaatgacgggatgtgatgtggtggacgcgctcgaagcggcccatatccgtccgtactctggctcttcgagcaacacggtgaacaatggcctactactccgcgctgacgtacatacattgtttgatctctacctaataagcgttgattcgaaatctcgcaatatcgtttgtgcaccagcgcttcaggcgtcatcgcatttcaaatttgcgggtaggaagttggcatctacgtccgccctcgatagcgaggccaattctgatgccctggcttggcatagagcacagtgcccatggtaa

SEQ ID NO: 517145 - DNA, 660 bp, Stenotrophomonas maltophilia
atgccatggcagaaggtcagcgaacttcctgaccagcgattcgtcggcccctacggcatcgaattctggcgaatccaagaaggccaggtcttccaccagggtcggttgctgcgcaaggccgacgcagcgagcttcgagttcattccggcgcactacttcatcggtcgcgatgcgcacgcggtctatcatgcttggacccggcagacctccatcgaccaggacagctttcgtcaatgtggcgcgtactggctggacaaccacgccgtctacttcgagcacgagacctcgctgagggcgatggccgaggcagattgcacgacgtttcgcgatctcggcggcggctacggggccgacgaccatggcggctggtactgcggccggcggatgaagcactgccagcgtggcgagctgctgcaagggatgccacaggaccccctgtacgccgttgacgacagcagcgtctactgcgacgggaagcctctgcccggcgtggatcacgcgcgctggcggttgctgggcggacgcttctcgggcgatggcggccgtgtctactacttggaacggaagctgccgcgcgtggatgtggcgtcgtggcgtcgtggcgcctgttgcaggggagctggtcgcgggaccacaaacacctgttccatatgttcatga

SEQ ID NO: 517146 - DNA, 483 bp, Stenotrophomonas maltophilia
atgccaaggctcagtaaaggacaggtagctgcgggtgtgcgggacaagcagcttcgtgctgaacggagtgttcggggcatcatcgccatcctggacgaggcggtggcagttgggtcccttcttgaagagcatagtgatctctttagacgcatgagtgatcttgccgggatgaatgatgaggctcgaggcatctttccgatgtcggttcgaacactcaggaacaatgtggaatcgctgtacccaggcgggatggaagcgtttaggcgtgccatcggagagcttctgggggccgcgaggaagcctgttgcacagcaggaagatgaggcttggctggaggatgctgttctggacatgaccgctaggtacagtgatctcgtgcaacgcttcaagaggctggctcttggatcggaggtcgcagccgatgagctaaagcgacacttcgatcggtaccgcggctctagctccctacgggtagtgaagtga

SEQ ID NO: 517147 - DNA, 348 bp, Stenotrophomonas maltophilia
gtgtccgcacaggcgctgctgtgcggcaccttcaaggacgccgacagcggtacccgcctgcaggtggaaagccctgtgcagggccgcctgctcgcgcctggcgtggcgccggaaccgtacaacctggagcgactgggcgagtcgctggtgatggccagcctggtcaccggcaacgtcagcgcactgaaaatcgccagcgccggccgcgtcctggccggcgatgaccaccgctacagcttggagagcgcgaccgagcgccgcgcagcaccggcgtttgcggccgggagttgccgcacggacatcgcgcagtgcatcgatgacatggcactcgccggtcccgaacgctga

SEQ ID NO: 517148 - DNA, 1341 bp, Stenotrophomonas maltophilia
gtgcttgctgtgttcggcaaccacgttttcatattctttgatcgagagaaattgtttaaggaagacccggatccagatgcagatccgatgattgcttgggaaagatggaaaagtcgggcggtcgaccgacagatcatcactgcgcacggggcggagaagtacatccgcaagggccgctccatcttcctagacgccaagggtacgatcccgttccccctacagatcgatccggtcgcggcgacgatccataagatcgtcgtcgcacacggcgctaaagacgcatgcttgcgaagctcgatagacaacgtgttcggcagcttagcagtcacctacatggacaccgcgcaaccaaaaggcaatgaccacgcatggccctttcatatcgaaattgatcgaagcaagcccattcacctcttcgatagccacacgcttccaatcgttctaggggaacttgatacgattgctgacctatcgcgctatctggatgagaaggttcgagcaatctcgcgccaccagttgctatcgtactgcggtgaagaagacctgcttgcacattacctcttgaacttcgacgaaaagttagggaggcatgttataggtggcgatgagaagatcactgcattgatgatcggagaaggagagtggcaacggttcagcaggtcagaactttactcaaacactaaggcagagaatgagatctcgtacttctgggatgaactaatccaaaggacctgtcagaacgccttagaaggcaagctaggcgggaatacagacctatttcgcggccagagcgcgatcattgaaatggtgaaggagccgcgctttgtgcgacgcgctcttgctgcgaagatgcgggagaacgtgctttcatttccggacttgccaggcatcacacgccacgtgtcgctgatgccatcgttctattccaatgtgaactacgtgttcttgcagcttcgcgttccggaagacatgagacgtcaccccgactacttggccatgcgaagaaagcttctcgagatcgcatgcggcgctgcaaagaatactttttccaacttggtgaaggttgtaggtattgggatggacgccccgatgtacgctggcgacaccaactctgaagactttcttctcatgccgtgtgagacatggaccgaggagactcgtcctcattacgaagagctgaacaaagagtggcatttcttcggtactcccaacgcaaagtcatacgagcaaagaatcactgagtttgtacaacccggctcagcctactcgaaaggtaaaaccggccgcaatgacaagtgcccttgcggatctggcatcaaatttaagaggtgccatggctga

SEQ ID NO: 517149 - DNA, 522 bp, Stenotrophomonas maltophilia
atgctcttctcctcgctcatgaatctgagctacgccgaatcaggcaggattgaactcgatgcgctacgccaggcgcttccgtccactcccgaggacatcctcatccaagtttatgcagaccacggacgaaactgcgccttccagaagcaatatggtcacctcgacatcagtcgcatcgaatggcagctggatcgtgtccctgccgaggaaattgtagtctgtacggtgtggcgggatttccaggattggttcgatagtgtggcggcgcgagtcaatgcttttgccacccagggctggaaatgcgtcgatgtgcgcgccgacgtccgcttgagctgggaatgcgagcgcacttggataaggcctcctatccttctgggtggagtccttgctccatatgccccaaggctgcatcttgtcgaagggcacactaggatcggattgcttagagggctcatcgcggcgggcgtactgtcaggcatgtcagagcacctcgtatggattggaagagccccctgttcttaa

SEQ ID NO: 517150 - DNA, 195 bp, Stenotrophomonas maltophilia
atggtcaagaccaattccggcagttccgaatctgagtcagctgaagtggccgagagctacaaccagtggctccgtgaaaaaattgagcgcgccattgccgatacacgaccggcgattcctcacgatcaagtggtggcgcgtgtgcaggcgagaatcgatgcggccaggatgcgtcggaaagctgcagaagattga

SEQ ID NO: 517151 - DNA, 171 bp, Stenotrophomonas maltophilia
atgagcagatatccgtcattcgccgagctggcggagttcgatatgggccttgcggcagtcgccgcctttgtggccctggtactcgggttgggcatcatttccatagtcattgagcaggcgtggctggcacttcgtcactggttcaagcggcggaagggcgatgtccgatga

SEQ ID NO: 517152 - DNA, 627 bp, Stenotrophomonas maltophilia
gtgaccagcagcgcccgcgaattgctgaagtggttggccgtgatcctgatgactggggatcacgttgcaaaggtgatctatggcgggtacgtgcttggactcagcgaagcggggcgggtggccttcccgctgttcgcactggtgatggcctacaacctcgcgcagcccggtgctgatgtagccaagtccgtccggaggctcggcctgtggggcgcaatcgcacagccggtgcacgcgctgacgttcggctactggttgccgctgaacatcctgctgaccttctcgctgtcagccgcggcggtctacgcagccggccggcggaattggatcgtcctggctttagccgcggctgtatttccgctgctcgtggactaccagtgggctggagtggcgttcgtgctgctggcatggctgggattccgcacagggcggccgctgttgaccttggccgcgttcgcgcctctgtgtgtcttcaacggcaacctgtggtcgttggcggccattccggtggccgtggggctgtctcatgcgacgtgggcggtgccacgtggccggtgggccttctatgggtactacgtggcccaccttgcgttcatagggctgctggcgcctatactgcggtcatga

SEQ ID NO: 517153 - DNA, 1416 bp, Stenotrophomonas maltophilia
atgcactggcttgcacgcgtgttcgcttccgcgatagccaggcgtattgcgtatgtactggttgcgctacttctcgcgtggctcggcctgagtgacgcgcacgcgcagaccaagaactgtaggaatgagtccgaacgttgttcggttggtgaggcacaggcgcagtgtgaggccttccaacccagtatcgctggaaataccagcattgtttcgttcagtcgtaagaagtgtgatcgtgatggtggcgcgagcaatgggcgcttcatcgtcctgtattggggcagggacaggaacggggtagagcaaggtccgttcaatccgggtgcctacttctactggttcaacaagtgttcttctgagtcgcagtacacgggggctgggccatggtccagcattggcggctcagctcgtagcggaagtctcgggtgccggaatggttgctacgggatgtggacgaaaaacgcggattcgacgtttacgtgggattccgtggatattgtttgccctgttgatgagaagaatcagtgcgatcagccacagaatgccaatgcaggttactactggaaccctgttctcagggtctgtgagccgccgaagacgcaatgcgagggcggtaagaacccaaattcgctcggtcagtgcgcgcctgaaccttgccctgaaggcatggctcagcaggcagacggaacgtgcaagaagaaggacaacgaatgccctgcgggtcaggtccgctcacctgatggcaagtgccttcccggcgacggccagtgcgcaaagggtgaggtacgcggccaggacgggacctgcaagaaggacgctgacaacgacggtagtcccgatccagtgaatgaggactcgttcagcggtggcgacgactgtagcgcgccgccttcgtgtagcggctcgccgatcatgtgcgggcaagcccgtattcaatggcggatcgactgcaatacgcgaaagaaccggaacatcgcgggtggcacttgtgcgtccatgccgatctgcactggtgagaagtgcgatgcgatggagtattccgcgctgctgatgcagtggcggtcagcctgtgcgctggaaaagatggctcagggtaatggcaatggtggcggtgagaacgcggatgtcaaggcgattcgtgacgccctgaccggcaccggcggtggagtcacaacggcgccggatcggcccagctccgatgtatgggcgcctcgtagcggcacgccggtaaagcctgacacgggcggatacgggtggggtcgtacctgcccgcagccgcccagctttgaagtgttcggaaatgtcatccagatcaacacagcgccgctttgcaactggctgattctcggcggctatttcgtaatggggcttgctgcgctggcctcgcttcgcatcatcgcttctagggacgcttga

SEQ ID NO: 517154 - DNA, 234 bp, Stenotrophomonas maltophilia
atgcagaagatgttgaaggccctgaagggcaagagcgccgcggtggcggctgttggtaccgcagcactggcatcggctccggcgttcgcgtcgggtggtggtaccggcgttgatgtgggtccggtggtttcggcggtcaatgcggcgctgggtcccatcggtcagatcggcgctgctgtgctgttggtgctggtcggcatcaaggtctacaagtgggtgcgccgcgcgatgtaa

SEQ ID NO: 517155 - DNA, 216 bp, Stenotrophomonas maltophilia
atgaccgcttccaatgccttcgtggataacagcatggaccgccgggacgccctggcggcctccccccgtttcaccgtgcaacgaacccccgagggcatcagcgtgcagctccaggaggacgagggagaccccggcaccggtttgaccatcgaacgggccttggcgttgctggagaacgtattggagcagggacgcgccgtcaccattcgcgattga

SEQ ID NO: 517156 - DNA, 1029 bp, Stenotrophomonas maltophilia
gtgtccgatgccacccccaacgaaagcttccttcagcgccattcccgcgacgtcgtcgaacgcttgatccgccagatggaggagggcaccggtcccttcctcaaaccctgggacgcccgcgtggacctcgggttgccgatgaaccccacgacgggcaagagctaccggggcggaaaccttctccacctgtgggccctgcagagcgcctgggacacccaggacaaccgctggatgacttacaagcaagccgcggccgtgggcgctcaggtgcgcaaaggtgagaaggccagcgtgattgagtattgggattggtcgccggtggaggaggccaagaagagcgggggccccgagctcatcgccaaggcccaccccaaggtcttcttcccccgggtgttcaacgcgatgcagatcgatgggttgccggcactggtcttgccagccccgcggccagagcccgaaatccaccagtcctgcgaagcggtgcttaagggcagtggggctgagatccaccacgacgggggcaatcaagcgttctaccgtccgatgaccgacagcatccacttgccccagcgcaacaccttccactcggccagcggttactacgccaccgcgctgcacgaactggggcactggaccggctttcccacccgcctcaaccgcgatcagaagggggcttttgggagcatcgactacgccaaagaagaactggtcgccgagatctccagcatgctgatgggcgaacgcctgggcattggccacgaccctacccagcacgcggcttacgtgaagtcctggatccaaatcctccgggacgatcccagggagctcttccgagccgcggcggcggccgagcgggtggtggagttcctgaaggtgcccgagttggttcgcgagccgctcccgaaggttgagcaggagcggcagctcgtggcagccaaccagcaggagcttgaaaaacctaacggcacgaaggcccgcacgaaagcgcgtgagaagacccggcggcgaaatcacgtgatggtggcctga

SEQ ID NO: 517157 - DNA, 591 bp, Stenotrophomonas maltophilia
atgctgtggaaaatcgtggcggtattcgcattgttgggctgtgggtcggcatgggcgcacggcggttcgattccgcccgccggaatggaatccaatgcagtccaggccaaagcgtggccggtggcaacccatgtcagcggcccgggcgaagccaaggaagcatttttgctccgcatcgctcctgaggtcgctgcctggacggcagagaaccaggcggaggcctgcgcctttgtcgcgaccgatgggcagcggtggggcttgaagctcatcaccctgcgcagccagttcgaatgtgtctttgcctatggcgtggtgccggatggcatgaccacgaccgcagaaacctttcattcccatccgccggccgatgggggtggttacgtcacgctcaccgaaagcaccaaggctgctgccgacgccctgggggatacgtctctgcgtcgggttcggaaactgcgggtggagaatggcggagagttctccgagcgggatttcaacgcaggtcccggctacctcatcaccaacggccgtctgttgttccagagcggccgtggcaagaagaaccggcgggacgtaggtcccgccggctga

SEQ ID NO: 517158 - DNA, 1479 bp, Stenotrophomonas maltophilia
atgagtgctctgcgtcctaacaatctcgtcatgggctacaccttggtcgaggttctgctggtcctcggcgtctcgtccgcgatagcggccgctggctggctgctgtttggcccgaccagcgtcgccgctgacgtgaaggaaacgcagcttgattttagcgagacggccaacgccatcgaacggagcctaggaatcgtgggcggctattcaggcctgtccacgtcgctcgtgcgaacggatggcctggccgcactgcggctgaggcaaagcgacggcctgcgcaacgcgtggggcggctccgtttccttctggcctaacacggtgaagcgtgggaacgactcgtttttagtcgaaacccgtgacgtgcccaaggccgcttgcgccaaactggttgcagcgatggctggcgacccagcggtgtgggatgcgcaggtcaacggcgagaacatctatttgaacaacaaatacgacccggccaacgctgccaccgcatgcgaacagcacggcggggaccgggtgggctttgtgtatttctccggcctggcgtctggctcgtcagtcgcaaccccaccaccgattttgcccaacgccccgccatcggtggacccggtcaacccaagcactccggtgaggccggtcgatggggcccccgacgtggacgacgccacaccaggaacgcctggtgtggtgccgcccgggttgcccgttgcgctgccgcctgccgtgcccaccgccctgcccgctccagcgacgccgacgacccctcagccttcgccggaagtaacgcccattcccacggctcccccggttgccacctgcatagtgccgtcgcctgccacccggtccgatacggattttaatgtcatggggtgcccagccggatacctgggcagccagacccaaacccgcagccgcacaggggcctatgcttgccctgaggcttgggccgctccagttctgacgtggggtgcatggtcggcttggacgactacgtccaacacctgcgccccggcatgcgtggccccctcgcccacctcggtagccatcacccgcagcgccagcaatgaaacccagtccgtggcgtgtccaacgggacagacgggggcgattgcccagacgcgcacacgcaccgagaaaggcacgcgcaccacgtcctgggcgtgcccggcggccaccggctcgcccaaaagtaccgtcaccgacaagtggagtgggacctacacatatggcgggtgggcgaccacgtcgaacacctgcaagaccgcgaaaacgtatgagtggaagaagatcagccacacgggggaccaactcattgcgagcggtccatgcaccacgaccagcaccacgcccagagttgtgcctgtgtgttctagcgccacggaaggacagacctatacctaccgtatcaaccgtggcacctgcgccccggtgtatatgcctggcgtttccatcgacacttaccagtgcgtggggcagtga

SEQ ID NO: 517159 - DNA, 366 bp, Stenotrophomonas maltophilia
atggcggatgttgaaaagcaaaaactaaaactggcgaagattcttgaaatcgcggcgaaggagcaagcaaagctcatgctggccgagaaacagcagaagcaacggcaggcccgcgacgccgcacgagagaaggcaaaggagcgcgcagcactgtttcgcagcgcagatgcgcatcgcaagattgtgttgggtgggttgaccatcgctgcgggtgcggacgactgggacccggcagaaatcgtcggggcgctcctggtcattgcaacccaactagagcgtgagccgcaaaagcgggaagccctgcgggaacgcggcataaaacacttggaagaacgtgcagctgcacgtgaggcggcacggtcatga

SEQ ID NO: 517160 - DNA, 273 bp, Stenotrophomonas maltophilia
atgttctggaagaagaagcgcgaccattcggccgttattgaaaagatagcagtttcgcttgtagatgcggggcaggaaacgggtgttctacctttcctgtctctaccggaggccgctgactacgcaagcgataagagtccgctagtctcaccgggatttgtgcaatgccacgtggtgattggtgaagggttctacaacttagagttcaagccccatccagatacgggtgtctacatgagcgccttttactacggaaaggctgatgaactttga

SEQ ID NO: 517161 - DNA, 417 bp, Stenotrophomonas maltophilia
atgaagacagcccgaatcgtgctgacatttttcagccttgccttttcgttacttgcgtcggccgagaacagaaaaatggatttcgccccgtcgcaaagcacaatcaacgatgtggcacgctgcactgctgcagcaagctacgtgatggctgccgcagccacgctgcccaacgactcatcccggtggatagacttcgctactgatatcagcaagacgatgtcagaggaccaaaatcgttcccctgagcatcgcgctcaactcgctccctcggtagccgagatatttgttgctgctgctcacgtccgggggttggttgaagaagggtgggacatcaagaagccgtcgggtagagactatgtcgttgccaatgcggccgcctactgcacggcctcactcctcggttccaagaagccctag

SEQ ID NO: 517162 - DNA, 207 bp, Stenotrophomonas maltophilia
gtgggcgaatggtcggactactttgaggatttcccagaagagaaccctgcaaactgggttaatgggcgttttgacccggagggagcacgccgcgcgcaccagagggcctttgaccttgcgcagtcgcaagcagacttgaacagcaccgtgcgtaggatgattgacgaaggcaaccgacgcgcccgcgaaaagcaagccaaatcgtag

SEQ ID NO: 517163 - DNA, 486 bp, Stenotrophomonas maltophilia
atggtaaagctcctgacagtggtgcttctgattggagtgggattgggattatccgatggcgctttcgctatcggaaagcggcccttcaagatgatccagttctgcgtgcatgaccaagagggcgtgagacggttcaagcagaccctcggcaccatcgccaaggacgaaggaatgcagttcttcgatggcagcgaggaattagatcgccagctggccaggtcaaaggtggaggtgaagcaccctgttgtctatgtcggagtgaagcggggagatggctctggactggaggcggggagcctcggattggatcgcttcgagatagctatcggcttctccgaagggaagatgcccgccgaggcacggtcattttctgtccgcgtcgaacgcgccttggctgagcgctggaatgtccacgcgattccagcacacaagggcgctacaccgctggcatgtcgggcgggaaggccgctagcggccgagcaatga

SEQ ID NO: 517164 - DNA, 174 bp, Stenotrophomonas maltophilia
atggccgcgctgatcacctcggcgggaactgccggctacacctatccagcatccagccatcgactgactgcagtggatggtgaagagggcagccatgacgggaccggcaacaccaccagcgtcgatagcaatgcgttcgcctacaactatgccaaacgcatgaatgcacggtga

SEQ ID NO: 517165 - DNA, 2265 bp, Stenotrophomonas maltophilia
atgtccagaactgctttccatgtcgttgttttccttgtcggcctgctggccgtgtgctggatcggcattggctacgtttcggtgcatccgctgggtgcaacggtggcggcgatcatcgctgcctgctacatcgccggtagcgtggagctgtaccgctaccgccaggccagcaacggcctgcgcaccgcactgaacgatctgtccagcgcgaaggaaagcctcgccccctggctggagcgcgtgccggtgggcctgcgcaacgccgtgcgcctccgcgtggaaggcgagcgcactgccctgcccgcaccggtactgaccccgtacctggttggcctgctggtgctgctgggcatgctcggcaccctgctgggcatgatggacacgctgcgtggcaccggactggccctgcagagcgcgaccgacatggccgcgatccgcggctcgctggcctcgccggtgcagggcctggcggtggccttcggtacctcgatcgccggtgtggccagctcggccatgctcggcttgctggcagcgctgctgcgtcgtgaccgcctgcaggccgtgcagcagctggaccgcgccattgccggtgacctgcatccgtactcgcaggcctggcagcgcgccgaatcgctgcgcctgctgcaggcacagtccgcggcgctgccggcgctggtggaccgcctgcaggcgatgaccagcacctttgaacagcacagtgcggctgccaatgagcgcctgctggctggccaggccgagttcctgacccagagccaggcgctgcaggagcgcctggcggtctcgctgcagcagtcgctgcgcgaaggcgccgaagccagcgccgccgccatcggtggcgcgctgcagccgatggccgagaccaccctggcaggcctggcccgtcacggcgaagcactgcacgcccgcgtcgagcaggccgtgcagcagcagctggccggcctgagcgacggtttcgagcgcagccgcgtcgccaccgaggccagctgggccaaggtggtcagtgaacagacccaggcacaacaggcactggtgggtgatctgcgccagcacctgcaggccttcagcgatggccaggccacgcatggcgaagcgctggtcgcgcgcatcggcgagcgcctgcaggccgatgcacagggcaatgcagaggccttgcgcgccgccgccgaacagcagcaggccctgaacagcgcgctggtcgagcgccagcagcaggcgctgctcgcagccggtcagcagctggaggagcacgcgcaggcgttgctgcaagcactggagcagcagcacagcgccagccagtcgctgctgcaggaccacgaacagcagcgctcgcaggattggcaggccgcgcaggccgccgccgcgaccgcgcatgccgaactgcaggccagcctggacagccgcgaacagcagcgccaggcgcggtgggacgcggtcagcgccgagctgcagcaggcccacgccaccctgcaggcacagctgcaggccggcgatgaacagcgcctgcagcgctggagcgatgccttgcagcacgtttccaccgatctggccgagcgcctgcaggccaacggcgaacgcctggccgcgcagcagcagcaggtctgcgacacgctggcggccaccgcgcagcagatcggcgagaacggtcgcgcgcaggccaacgccacgctggccgaggtgtcgaccctgctgcagaccgcggcggcggcaccgaaagctgctgccgacgtcatcaacgagctgcgcagcacgctgtccgagagcctggtgcgcgacaacgcgatgctggaagaacgcggacgcctgctggccaccgtgcagaccctgctcgatgcgatcaaccatgcctcgcacgaacagcgcaccgctgtggacgcactggtcggtggctcggccgagctgctggagcgcgttggcaatcgcttcaccgaccatatcgccgccgagaccggcaagctggacggcatcgccgcagcgctcaacggcagcgccggtgaagtgggccagttggccagcacctttggtgaagcggtcgcgcagttcggcagcgcctccaccgagctgtccggccgactggagcagatcggcggcgcactggatgcctcgctggcccgcagcgatgaacagctggcctactacgtggcgcaggcgcgcgaggtggtcgacctcagcctgctgtcgcagaagcaggtgatggaagaactgcagcagctggccacgcgccgcggcaaggccggcagcgcatga

SEQ ID NO: 517166 - DNA, 639 bp, Stenotrophomonas maltophilia
atgagcgacgagctggaggtcgatggcggctcgcatgccccgatctgggccgcatttggcgatctgatgtcggtactgctgggtgcgttcgtgctgatcctggtcggcgtggttgctgtgcagttggaactgtcgcagcggctggatcaggaagtgaagcagcgccaggcagaagccaagcgcctgcagaccctcgagcaggcactggctggcccgctggctgctgggcgggtgaccctggtggacggccgcatcggcatcagcggcagcgtgctgttcgcgctgaactccgaccagctgcagccggaaggccaggagctgctgcgcagcctggccgcaccactagccgcctacctgggcagtcgcgaagagatcctgatggtcagcggcttcaccgatgacgcgccggtgcgcgaaggcaaccgtcgtttcgccgacaactgggagctgtccgcgcagcggtcgctgaccgtgacccgcaccctgatcgccgacggcgtaccggccgacgccgtgttcgccgccgcgttcggcagcgagcagccggtcagttccaatgccaatgaagaaggccgcgcacgcaaccgtcgcgtggagatcgcgccgattcccaagcccaaggcgccggatgccaagtaa

SEQ ID NO: 517167 - DNA, 378 bp, Stenotrophomonas maltophilia
atgccaagtaagccgccagcgctcgaaggcctgcgcgcactggtgcgtgacctcgatgcagggtcgcgctcgctgccgcattacccgcaggtgccgatgctggcgcaggtgcagcgcgagtggtcggagctgcgcagcgaactgcaggtgcgtcgctcgctgcgcgccgaggctcccgccgatggcggcccgctgaactcggcggtgctggtgcagcgcatgctggacacgatgcaggccaccagccccggctacctgcgccacttcatcgattacgtggatacgttgtcctggctgcaggcgctgcaggatggcgccgccagcagcggtgacaacgcaaagccgaagcgcacgcgcaagccgcgcaacgcgggttga

SEQ ID NO: 517168 - DNA, 417 bp, Stenotrophomonas maltophilia
atggacctaaaggaatttgtaagggaaacccttgtgcagattgccacaggcgtcaaggatgcacagattgacgtgcgcgccttgggtggcattgtcaatccggcaactcagaatcctttgaagggcggcaattcctatttctcctcggtcgacgatctacaccacgtcttcctagtcgactttgatgttgcggtttctgtcgcagagaatgccgggacaaacgctcaagccaagctcaatgtcgccactatcctttcgcttggagcgggaggtcagtctgccaactccagtgctgctaccaaccgcctcactttcaaggttcctcttgcgctaccgcttgatgagccgtcacatacaaagctctcaggagagattgccgcggaccgagcaagagtgcgtgatgccttgggctactag

SEQ ID NO: 517169 - DNA, 549 bp, Stenotrophomonas maltophilia
atgcccgccgtgctgatcgtcggtacaagccatgaatttcagcgtgccactcccaatgttccccctgatgtcatcgatgcttttcgcgactatctgcggcaggtgattgtcacaaaggatgtagttctaattgctgaagagatgagcagtgctggtctggctgagaatggcttggcgcagtccgtggcccaacacattgcgggtgagctcggcatcgctcatgacttggctgacccatcgcctgaagacagggagcggctaggcattcaacagcgcaatgaaattgagcttgccggatttttcgctggcatagaccctgatgaggtcgaggcccaagttcgtcgttcgtatgacatccgcgaaaatttttgggtttcaagattagtaggttcgaatcacttcccggttgtcttcatttgcggcgcgcctcacgtgaacacgttccgggacaagttgctggcactaggccatgatgttgtcatattggctgacaactgggtgcctgatgacgggcctagcgattcattcaagcggaactcgcttcgctga

SEQ ID NO: 517170 - DNA, 1110 bp, Stenotrophomonas maltophilia
atgctaactgtatatctggatagtcaagacttctcgcatttttccacgaagcacaaggatcacgcaaagtatgcttcgctaaagtgggagctgctccagctgaagaaggatgggaatgtcagatttgtattcagtgatgtccatgtttacgaggtttttcctaaggacgcttctgcgacagcagaaggtcttgaccgcatccgcacaatagcggatttttgcggaagtgaaagcatgccgtcatttacatctttgattgagtatgaagttcgttccgttgtatctaaatcaacaggcggtgaggcgccggtcatttccaataattggttccccgacctgggtatcgctggtacgcccatggagcgggcccccagtccgccgaacaggaaggagcggcgggccatggaaagccaggtgcgaaaaaatagcagccctctggccgctgagtttcgtagaaactatccgttcttcaaagactcaaatgttctaattaggtactacggacatgatgtagagtggtgtgacgtcgtagcgatgattgagaggagcatacaagacatcacgtcctttgcgacctggcttgcatgctccaaggatgccaatctgaatcttccagaaatattgcgtggcggctatgtttcttacgtggcggctgtaacagctatcagggaagaagtggcaaggcaagtcgtcgccattgagggcgcagaacagaggaatgaactggcagaggcaattggtagcgggctcgataaatcgcttgtggagctacgggcttcaatagcgcatagcctcatggatgaacttggagaatacgacggttccgtgattgtcgatgactcaatgccgtccttcgattctctattgcgctatttggcggaactgctgcgccgatcatctcaattatccactcctcgcaagcctatagggagcgactttgcggatgccttgcacgtctcttatctgcccagagtagacattttccgaacagacgcggctgctgccaatgcactggcgcacatctatccggcgcggaagaatgacgtcgtggcggatgtcttcaaacttcccgatatcatcagaactagggttggcgctgaaagccgctag

SEQ ID NO: 517171 - DNA, 672 bp, Stenotrophomonas maltophilia
atggatacccgacccattggtcattcgacgagtgagcaagccgcctttatcatcttgtcaagggtggacttggcaagtgttctcgaaaattctgctgaggaagttccggtttattttagggagtttaatggcctaggagagtactgtgctgagaaaaaactggccgtgaaggaacttcctggcatatcctccagtgatgcgatgctcgtttctggttacttcaacggatgtctaggattattcgttgattttgtttgggcgagcgccgccagcaatagatacagggatgcggtaaaggcaaagtgggagttgcgggatccgggtcggactcttccgtccaatctgcacgcagatcatatagtaaaccgggggtctttgaaggacttgcaagctgcaggcttcgatccttgggtcatgctgtttgaggttccgtggagcgcaaacgtcggcttcggaggcagagtggagagagggcgagaccagatagcaattactgaatcccgcatcaaccttaacggcctactgctctacaaactcttcgcaacagattttccgaaatcccaagatgatttccacaagactttagagaatattggggggcaaattaatcatgagggctggcttaaaaaggtaaaagaggaaatggcgccatatatgcctggtaagatctaa

SEQ ID NO: 517172 - DNA, 675 bp, Stenotrophomonas maltophilia
atggttgcagcacccatggtcaccgaagccgttggcgcggcgcaggctgccgaagtagcggctgtcgtgacaccccctgcgacgcccgtggtggacgcacagccggcgccggctgcggacccggcgcctgcgcccgttgcgcccgcagcggcggcgcctgtggccgcaccgcctgccgtcgtcgagccaacggtcccggcggtagcgccggcaccgcccgcgttggtcatcgtgccgttgccgcccgagcaggcgaccgagcgtgcgctcggtgcccgttgtccggtggatctggccgggcgactggcggcccagggcgagctgctgatcggcgcctgccagggtacgatgccggcgcatctggccgcgctgctggtcgcgctgcccgagcaggacatccacctgccgcgcagctggcgcgagcgtgaggtgcagcagaaggcctggttcaaggcggtgccgggctacggccagcgcccggacttcatcgtgcggatgggcgacatctgggtgcgttcgctggaagggcgcgacgccgacagcacgttctatctggtgtcagcgccgttcacctgcagcgaccgggtcgccaaccgcgacgagtacggcgcggagccggtacgcctgccagcgggggattgccgcgaggcctatgtggcccagcgtgtgtactag

SEQ ID NO: 517173 - DNA, 210 bp, Stenotrophomonas maltophilia
atgaaaaattttgccactgctaacgcgaatgagcgtatccatcgagacatttgccaagatttttctttgaagatgtggaagcaagacgttccagacatgactgaaaagtcggtggttgatgagttgctggatgcggctttgaagtctgccaagaggctgggcatcaagcccaaaattgaccagaacgggcccatccatcacggggactga

SEQ ID NO: 517174 - DNA, 606 bp, Stenotrophomonas maltophilia
atgcgtcggatggctgaggtgctggggtgcagccaaagcacggtggaacgcaaggtggcccatttggccgcccaggccaaagcccatcacacaaagcacctgaccactctaagcactcgttacgccatgttcgatgagctggagaccttcattcatgcccgctggaagcaggtttccgtgtcggtggtggttcgcgtcaagacgggagaggtgctggcgttcggggtggctcgtaagccttccagcatgcggcaaggcattgaaggcaatcgctgggtcatcaatgaccgcccccaggtgattccccgagtgctctccgaagcggccattggaatgaaggctggcgcgacgctggccagcgatggggatgccaattatggaaagtgggtagcgcaaacgctgccagggatcacccacgccaagctccggtctccgaccgtgcccgaatacgaccccttgttcgccatcaacttggcgttcgcgaaaatgcgcaatgacctggcccgattggggcggaagacctggacgaccaccaagacccttaaggggctggagaatcacttgtggttgtgggtggcttggacgaatgattatcaacttcgctga

SEQ ID NO: 517175 - DNA, 231 bp, Stenotrophomonas maltophilia
atggcccggcgctaccgtgttgctctggtaggtgccaaccttggttggcacggatgtaaccgctctgcgcgccgcctctttggcgtaacccttaaacgtgcggaacgggcgtgccacttcttggccgaatcgctggacgtgccgatcacccgcatcggccgcatcatggaagggcaggtcgtgcacactgaaggccacgacggctcgagcggatacgagcacttcgcctga

SEQ ID NO: 517176 - DNA, 993 bp, Stenotrophomonas maltophilia
atgcatcatcctcctcgcagtgcggtgcgtgtctgcctggtactggcactcagtgcgcttgccgtcgtttccgcgcaggccaacgagcgcacgctagacggcgtcaacttcaccggcccgctgatcacgcccaatcctgccggcatgccggcgagtcactggtacgtcgaaccctatctggtgcgggtcgacagttcctcgtccttcgaccacaacggcgaccgccagcgcagcagcgaacgcagcggcgcgtgggcgatggtggtgcccatcgcatacggtttcagcgaacgggtgaccggccaggtcaacctgagtgcatcacgcgccgaatccggcaacgcacacagccgaggcttccgtgccggtgataccaccgcacgcctgcaatacctgttgcaggcccccagcgccgatggcaccacgccggcggtgtcgattgccctggtacagcgcttcagcaccggcagccacgaccgcatcaccggcaatccgctggatgcgcagggtgatggcgtgcagcgcaccgtcgccgcgttggccgtgcagcaggtgctgtggctgggcaacgatcggccgctgcgctggcgggcgcagttcagcgcggggccggcgccatcgcgaacggccatctccggcaccagcgtgtacggcaccgaggacggcttccagggccatatcgcgcggggctcggtactgggtctttccgtgggcgccgagtacagcttcaacgaacgctgggtcggcgtgatggaagttgccgccagccgcgagaccggccagcgcctcaccggtttcgcgcccgacgctgcaggtggcgtccggcccatcaacgaacaccgcccggccagtcgcaacctgaccttcgcgcccgctgtcgagtaccacttcagcccgtcgctggggctgatcgccggcgtcgaattcaccgttgccggccgcaataccggccgcatcatcagtccccaggtcgccctgggcatgttcttctga

SEQ ID NO: 517177 - DNA, 222 bp, Stenotrophomonas maltophilia
atgagcaaggcaatcctccaatttaatgacctgcaggaactctgccagccgggcaagaggcctaggcttgccactgtgatccgatgggccgacggatgcggcatccgctttctttatgacggaagcggcgggatctggacgactatgcacgcgctcaatggagcgctcggcctagccggagcaaagccgcatctcgatctgtacgacccaagtgatttctga

SEQ ID NO: 517178 - DNA, 276 bp, Stenotrophomonas maltophilia
atgagcagggatacaagcttcgttgatgtcgagcgagagatcatctattggcgcatgcacttcggctccggtgcatttcctggagccagcttcggcctagatatccaacccatcatcaaaatcgcatgcgacatctacactagagatccacatggaagccgggaagcctggcttgacgatctagtgaagagactcaacttgcgatcaggcgacatgagcaatgagaccgccgccagagaatttgcttctcgttgctgggaccacctccttcactga

SEQ ID NO: 517179 - DNA, 336 bp, Stenotrophomonas maltophilia
gtgagccgggggcggtttgatgggggcgccgcgcagaccacgggccgatccgttgaaacgcatcccctgaaacgcatccccgctgactatgtccagcagaacctggctgtccgactggtcagcctgccctggatgacgatgggcgtggtgatgttcggtagcagcgcaacgattccgcttgagctgggtgtggtcctcaccattgcgaattgtgccgctgccctgtacctcgcggactacctgctgcgcttgagggcggcaggcggcggcctgtactggctgatcatttttttcagcacgtcggtgctggcgctggtatgtgcagtcgtactctga

SEQ ID NO: 517180 - DNA, 369 bp, Stenotrophomonas maltophilia
atgcgttggtccagggcctacgcggagcgccgtgcgcgcatttttctccgcaaagccaactcaccgtcgaaactgcgcatggtggctgccaagctcggcatgctcgacgaagcgtcgcctgcaccgaaaccgaagccgcttgagaagaaggtgccggggaagacagaacttcccaagaatcggctcaagccctcgaccaaaatgaccaaggctgagatagccaagctgccgcccgttgatgccaggccggcgcccaagacggcgctgcaacgtctagagcgtgcgctgggtccggacgatgggaggcggcggcgaggtggcagcccggtggtgcaaggcggcagtccggggctggggaggcgccgatga

SEQ ID NO: 517181 - DNA, 807 bp, Stenotrophomonas maltophilia
atgaacgctactttcaaccaaattctcatcgtggattccctcccggaaggtcagctcaacaccgcagcccgcctgttcgcggatgcccaagactgggcgcgggtgatcggcgacgttcctcacatcgccagcgttcgtgttccttccagcggggcttttctcgatctgttggcccagttggctcatcaatcggctagggataactacgttccgttgctgcacatcgagtgccacggccgggaagaagggctggagttcgcagatggatccggattgacgtgggacgagatgaagccggctttcgtagccctcaatgtggccacccgcttgaacctcatcgtggtggtggccgcgtgccatggcggcgcgatcgctggttttgttcgtgccgagcaacgtgcgccattttgggctttcctggctccaaagcgacagatatctgcaggtgatctggaggcggctctgtctgcgttctatcaggcgctgctcatgacacgatcgtcagagcgcgcgatggacgccctccgcgcaacccatgcggggcaggaattctggcagctgagcgcacaaaccatttatcgattgatagttgagggctacgcagaacgccgccttacggaagatgctgtgcagaaggacgcagaacgtctgcgagctcgcgctgccgcgcatggcgcgatgtggtcacaagctcaggttgaggcaatgatccgcgatcccggaatctttgaaggatttcgccgagagttcttcatggtagatctgtatcccgaccacgcagagcgcttccccgccgtggcggcttag

SEQ ID NO: 517182 - DNA, 372 bp, Stenotrophomonas maltophilia
atgttcggcctcgttgacggaaacaatttctacgccagttgcgagcgggttttcaatccctcgctgcgcggccagccagtgtgcatcttgtcgaacaacgacggctgcgcgatcgcccgcagtcaggagtgcaaggacctcggcgtgaagatgggccagcccatccacgaggtgccgccccacatccgccggcagctgcggatcttctcggccaatttcgggttgtatggcgacctgtccgggcgcgtggtgtcggtgctgcgggagtggttcccgcgggtggaggtttactccatcgacgaatcgttcgtgacgttcgacggtgtgccggcggatcaacgcgaagccatggcccaccaggcgcgcgcgtag

SEQ ID NO: 517183 - DNA, 720 bp, Stenotrophomonas maltophilia
atggcaaggcgtaagggccgcgggaggcggcactacagcagctacggcaactatgtcgtctcccagcgcagggagctgaccacggcgttcggtggcatcgaccgggatgtggagcgcctgttcctggcgctggatccttattcgctcgaagtgttgttccaggcatacaccagccactacggcgggtcggccggtgcttacgcccgaaagacctacccgaactggcaatcgggagcggtccgaatgagcggcgaggtggccgagcggttgctcaacctgcttccaccgcggctgccgtattcggtgcgctacgatctggttaagaagcttcggaatgcgaacttccggcccatgacccgtcatgttcgcaccactccggagcggtggagggaggatttgcgacccgcgatcgaagaggtggtcgcgcacggggaaaccgccaacctgtccgatcgcttgaaaggccgggtttcatggttggccaacggggacgttgccgcagccgaggcgttgatgtccgaggccattcgcgaagaatcgttgagccggctggcctacctgaaagtggagtttcagcggcttgacgcgatcatcgcccagctcggcgaataccagacggcggtgacccacgccatcgaattgccccaggggagcatccaggtgcacatcgccattccgaaagtgtcgatgtggaagaagttcacgaattggttgggatga

SEQ ID NO: 517184 - DNA, 378 bp, Stenotrophomonas maltophilia
atgagcaatgacttgacgaaaaagacgaccggcacgggattgagcgccgagagtgggcggttccggcaggatcttatcaaccagctgacacccgagcagcgtaaggagttagccttgaaagcgggtcaggagcagctcgacctggacaagtccgatgccgatgcggtgcgccgattcaatgcgtcatccgtggagatgcagcgggacgtccagactgcaaaggatctgaatgccattggttcggacttcacgatggagaattcttacaagaccgccagcggtgaaacgcggatcaaggtgacgaagaacaacaacaccgtctggattgttggcttggtggtcattgctgtcattttcttcgtgctcttctcgcgctga

SEQ ID NO: 517185 - DNA, 588 bp, Stenotrophomonas maltophilia
atggcccgtaaggtcgttgtccattccaacgccaagcgattcgttcaggtcgccgccgtggcgattctggctgccgccaccctgaccggtctgaagaatgtgtcactgtggtggcgagcgcctcgtgaagtgccggaaaccatggcagtggcgacggcccctgcagcaatgtctgcagccaccaatgtcttggcggggcgtagctcggtcatcgatgccgacacgctagaagtccatggcacgcggatccgcctggaaggagtcgatgctcctgagtccagccagcgatgcggaaccgcgggcaaggaatgggcttgtggccagcaagcagccttggcactgagcgactggattgcagatcgcccggtcacctgtcaccccaagggcaaggaccgctaccagcgtgtcctggcccgttgtttcgtcggcaacgacgacttgcaggcttggttggtgagtaacgggtgggcgttggcctacaggcaatattccacagactatgtggctgcagagcaacatgcccaagctgcgcaggtaggaatgtggcggagcgagtttgtgccgccgtgggaatggcggaagcggtaa

SEQ ID NO: 517186 - DNA, 591 bp, Stenotrophomonas maltophilia
atgtcagatgttgcttacaattttcaaaaaacgctgaaagagttccttgaacatgaactcttatccgatgatgatctgatcggcctgatggccgagcatagactgtcgctgattgccaagatcgagtctttggctaaagggccattctttgagggagcgcagcggcgctcgatgcggtttcatgaactagatcaggcaaagagatcgctcgaaatccacgatcaggcctctattgcggttgccgctggcaactataggcactacgccgttagcgggttcgcgaaggagtgcctaagtcctacacatgcccgagcttcatattctctggctgttgagccacttacagatgagaggcttcagcattacaccaaggaaatgagtgaccaccctgcgatgttggatggttggaaaaagtggcttgcttcagataaaccgctacgcggcgtggacgtaagcctactgacgtcggtcattgttgataaacaggcgtacttcaggatgcttgaggcatcgaaaacagagctggaaagtcgaaagagattacttgagcagttgaaagggccgccgccgctgccgtctaaggcagattaa

SEQ ID NO: 517187 - DNA, 483 bp, Stenotrophomonas maltophilia
atgaaagctctgaaactcttcgtaatcgccgcaacttgcacttggctcctcgcggcgtgcgatgccaaccgcgagttgcgcaacacggttcaacaactcgccaccgaatctcaggagaaccgagcaagctgtgacgaagcacgaaaccgtgagaacaccgcccgcgaccgccggtggtcgattcggacagagctttcaggcctcagggctgacaaggagtgggacgcaatcgttaagaccggagatgcggggacaacggagatgctcatccaaagcaaaaggacaatggaagatcctgcttacaagtccaagcgagatcgcgacattgaaagcctggagcgggaaattaagctgtatgaggctgacgagcccgagcttcagcgaaagaggcaaatcgcttgcgatgccatgttgaagagcggagaagcctatcgttctgccaagaaggcgctcgaagaggcggatgcgaagtcgcaacactga

SEQ ID NO: 517188 - DNA, 237 bp, Stenotrophomonas maltophilia
atgagcaaaccaaccctaacgctgtatcgaatgaccgccgaccacacaggcgagcacctccacgtcctgttccaggaccaccgtccaacgcttccatcggtcttggggccgttggaaccggttgaggtggcagccgaccatccaatcaggatgaccgagagagaatgctggttgcatcgatgcgacctgatggaccgagggtggaccgtgctggggtcaaagcacaccttcggataa

SEQ ID NO: 517189 - DNA, 288 bp, Stenotrophomonas maltophilia
atggttcagcaggtgaagcaggcactcggccacgtccagtgcggcggcggcccactcgtcatcatcgcccaaatgcggctcctccttgcccccgtggaagaggttgttgcgcacgcggcgtgcggcttcgaccaatgcactggcattggattgctgaaggggcaggcgctaaaagacggcgcggttgaggccgttgaccaccgccacctcttggaccatcgggcgatcacgtggaggtgtgaggatttgctcgtgcgtgctgtccgacacccgatcgaagaagagtga

SEQ ID NO: 517190 - DNA, 531 bp, Stenotrophomonas maltophilia
atgattcaacgcgtgctggtctcaccggctgacaccctggcagggcaaaatggtttcatgacccacgctgccgctccatccacccttcaagccccggcctacggcctgctgctcggccacaccgagtgccatttctgccacgcgccgacgcccaccgccgcgatctgggtgccctcgttcgaggagcacgacgacgagggcctggtggatcagggggagggtgccgtgttgcgctacatcgagcgtttggacgagaacactgccgctttcgtggcgggccacgcgccctggcttcgcttcgacgccacccggacgtccgggcaaacctacttggcccaccattgcaccacctgcggggcccttcaaggggaccacttcgtgttttcgccggatggtccctactggccccagaacgacgtcgagcttgcacgcctgacgtttgtccagggccttggcccgctcaccgctcaagcatcggcaggacagagcgcctggatggaccgggtccctctgacctgcacgcaggcctga

SEQ ID NO: 517191 - DNA, 498 bp, Stenotrophomonas maltophilia
atgaaaattcatcatctcgtcagcgacggcaaccaagcggtcgccatcacgcaatcggcttcgagtggcggtggctacgcgcacccggtgaagctctccgccattcgcttcaacgtgaaagacgccgaagcggtgctccaagaactcagcaagtctggccatcgtcatgagaagacgttcgaagtgatcgagcgttgggacgccgatgctcgcaaccaaggaccaaagtcgaagttcggtcgaacccttgccgcccttgtggatgaagcgggggatcacctggaggggcaggtgatctacgaagccaaaggcatggaagagggcaccgtgcgtgcgatcaacgccgcggcgaagcaagccaggctttcgcaggtccttcctgctgcaggcggtccgagcatggtcatcggtgggcaggtctggaacccacggcaagaggcgcagagcgaagctccggcggctgtcctggaagctccccgtcagcgtgtgcgcctgtaa

SEQ ID NO: 517192 - DNA, 222 bp, Stenotrophomonas maltophilia
atgaacgttcaaattgcggaagccatgaacaatgcaaaagacgacgcggaccgttacggaatccttgcagggttcgcctcctgcaaccgggccctgcttgagaagggggccgcgcaagaactggtggacgccctgtatttcgccggcgctgcgatcaaccgttggcgtgccatcgcggtggtccgagaagcggccgccaagccgttggacgcggcgtcctaa

SEQ ID NO: 517193 - DNA, 360 bp, Stenotrophomonas maltophilia
gtgcttcaacctgtcccttccccaaaacttgtcacccttccgtcctcccggggctactcccgtgatttggagcgcttgcaggcggccgccgcacgcgcgcaggtcacgcgcaacgaagccgtgcgccaagtcctcgccatgtatgccgccaaaccttacccactgagcaagcgtcggctgggtggggaacgggacgtgcggctggcctaccttccgctgcagcgcggcgtcttggaggcggtggagcagggcgcggtgaacgcgggaatttccaccgcagaagcggtgcgccagatcatccgagactacgtccaaggagatctcctcgggaaccaggttcggggcagccgccatggctga

SEQ ID NO: 517194 - DNA, 255 bp, Stenotrophomonas maltophilia
atgaccacgcgtgcctcccgccatcgctactacgcttacgagcgacaggatggttctgtgtgtttcctgccaaaactgttgcacgaggggattcagcgctacccacgaacgattgcgcactaccatctggtgcagtggttgggggtgtccaagttgctcagtagagacgaatacaagcagatggcgtggctgggttcgcagcgtggcacgctccgcaacacccatgattcaacgcaagctcgtctcaccggttga

SEQ ID NO: 517195 - DNA, 474 bp, Stenotrophomonas maltophilia
atgacccatgaagcccctgcatccatcctccacgccccggcctacggcctgctgctcgctcagaccgagtgccatttctgccatgcccccactcccaccgccgcggtctgggtgccctcgttcgaggagcacgacgacgaagggttggtggatcagggggagggtgctttgttgcgctacatcgagcgcttgaacgaggaggccgctgcgttcgttgccggccacgccccttggcttcgcttcgacgccacccggacgtccgggcaaacctacttggcccaccattgcaccacctgcggggcccttcaaggggaccacttcgtgttttcgccggatggcccgtattggccccaggacgacgtccaactggcgtctcttcgcttcatccgcggtttgggcccgctcaccgctgaagcgtccgcggcgcagagtggttggatgaacaacgttccccaggtttgctcatacgtatga

SEQ ID NO: 517196 - DNA, 372 bp, Stenotrophomonas maltophilia
gtggacggcgacgtgagggttgcgacctgggagggtcagccggcggcgtttctgatctgcatgcatgatcgcgaaggctacgagctccatctcgccggcacgcgaccagaattcacccggcgtggttgcttcaaggcattggtgcgccacgcgttggccagttcatcgggggaaggcagggtcttcgcacggtgctacgcgacgtccagcgtcgccattgaggcattgaaggcccatggcttcgtgcgcaccagtggcggcgatccgatcgagttggactgggacagggcgtttccattgccagagaacgcggaagcggttccccggtcctggtggcagcgcctccttggaggattcaggcgggccgattga

SEQ ID NO: 517197 - DNA, 441 bp, Stenotrophomonas maltophilia
atgttcgagccttccgacctcatccattcttacacccgcgcccaggcaatcgaggacggcgtcctggtggacgtgtccgatgtggccaaagaagccggcttcaagcttcccgtgaccatcacccgcgctgcgtggtctcgctacgtggaagtgcccatagggttggaactgcgcggccagtcggtggacggccggctctgggacgtgcttttcatgctccacgtggccatcaagcggcagcagggcaacggttcggagatccactaccagctccacgtggctctgcccgacgccggcgactggttgtcgaacgaagcccacccggcgaccgggtcgggcctgacgcggtcgacccatcgccagatcaccttgaaagcgctgtgcgggcccggggacgccttggaaccggtggtcagcatcatgctgcccaacgaggattga

SEQ ID NO: 517198 - DNA, 255 bp, Stenotrophomonas maltophilia
atggtgactatcccgccaaagctccgcgagaacatcgccaagctgttcggctttgacgattcggaggacgccggtagtgaagtcgcgttgaccaccgccatggtggcgctggcagactacgcggccgcgtcgctcatccaggacaacacgctgctaatcgtgagctcgccggtggacgagcacgcggaggtccgcaaggccgccagggtggcggtgcggaatctggggatgagcaagaacggtaagatctactga

SEQ ID NO: 517199 - DNA, 1038 bp, Stenotrophomonas maltophilia
atgacggcacagccgctgacgggttggctgcttcactcgatgggaatctgggcagacaagcgcacgctttctgatcgggtgctcaagatttttaaggtctccgccaagacgtgggagatcgggattccacgcaggcctaagaagcggcagcaggtctgcgatggtctggttgcttacgtccagcaaagccacactgaactgatgccggagtgtgcggagcgccaagcccgtgcaatggagcgagccgcacgcgcgctggccgaatatccaacgcttcctccatgcagttttttccaccagacagttggcatcgcgggtggagaccgcttggaagcactagcagttgccttagatgaggtttccgcagatgttgtgcacgggcggctatccagggatggcctttccgtggcggtggtcaaagcggcagcagaggtaattgggctacccgcgggagctatgcagccggacagccggctcgatccaggcttggacgggttgctcctgctattggctcagatggatcacgacctcaccactcccctgatggctaacgcgggtgagatcaacagcttggtggcacttttgattgattcgcccggaagtggggcgaggaagcgggttcagcaccgacttttggacatctacttcgccttggcgcttgccgcacgcgggcgtgacctgccagagagtttgccgaaggtcagggagatcgaggacgcgctcatgggcggcccgcctgaatccggaggccagtcctgggtggtgcgttggcgcaatggaaccaaagcgcttcgagaagaggatgtgctatcggtgatcgcgcacgtcggacacgtttcggggaaagacgtgtcatggacgatgcgccgtctctatgctgcagcccaagcgtgggggagggtggaagagcagggtgtggaggcggtaatgctggccggtgagcgctacaaccaatggtggaatgctctgtgcaaccaggggcgggtcaaaaccccatgggtccaaccctactggtcccagttctcgcagagcaaatga

SEQ ID NO: 517200 - DNA, 147 bp, Stenotrophomonas maltophilia
atgagcaacagcaagaagaagccaatgacgcagacggcccagcgacgcatccaaagcgcggtggatcggcaacccagcccctctcctcagcaacgggcgttcaaggccaaagcagcctcagtggttgcgaagcggaacggcaagtga

SEQ ID NO: 517201 - DNA, 897 bp, Stenotrophomonas maltophilia
atggatgaaaaggatcaggacaagggaagcgacagtaaggctaaccggaccccgtcgaagcctcagcggcgaaagaagaagtggaaggagcaattcaacaagcccttcagcagcctgttcaccatccgcgctgacgaagatggaaacccgccggagctggaggaatacctggttcgtcaacacctgcaaaaggggctgagccaccttcggatgagcagccgggatattaggtccgcgctgaaggtatacagccttaccgagctgaaccaactctggaacatgcgcgaaaagaagctcaagtatgtggaggacgccgcacttctgttggcgcacatccggcgccggtccgggattgaccttcagctgcgcccggcatccgagcttttcagtcacgacgtgatccaagccctccaaggcgtgcttgaggaaagcgggcgattaagggtggaaaagccattgccccccgctcctgacgctgtcgcagcagagggaaagcgaatggagcaggtcctccgtgtgatccgagagggccaagccgagtttcgcaaacgcctggtcgatcactacggagcggtgtgcatggtcaccggcaccgccctggcaagcgtcatcgacgcggcccacatcgtcccctacaacggggcatctaccaacgccttgagcaacgggctactgctacggaaggacatccacgcgttgttcgatgcgggcctgttgaccatcgggccggacctggtcgtttacgtcactgctggggtggatgatccctactaccgttcgttggacgggaaggatcttacgttaaccgccccaccgaagatgtccaaggaagctttaagaaagaggctggtggggcacgggtcgtccgagttaaacagcaccgccctaccgggatag

SEQ ID NO: 517202 - DNA, 822 bp, Stenotrophomonas maltophilia
ttggcctggcccgagttgagccagcggttgccaccagacaccctggacgccctactggccgaccggctgtttgtcctgcagcgctccgacaaccacctggtcgaggtggggcgctttgcgaagccggccaccgtccttgcccagcttcaagagcgctggatacacccccggttcctcgtccacgtggagcggcattcggacagctggatgttggggtggccactggcccagcgtgcccatctgacgcgaaacgacttggccgcgctcttgcgcaacgtgcaccagggcgaatggctggaacaccccgaggtggtggccttccggttgaccgcggatgtttttcaattggcggtgtggcagctgattgccctccacgcgttggtcattcccctgcctatggagacttatcccctccccgaccgcacctttgagaaccggtggatggcccggtatccaagcctgcgccagatccgcctgcggcgacagggcgcgcacgaaacactgtggcccagcatgggcaaagaccacgtcccggcttacagcgacaagcccaatgcggttcgcatgcggacccagcgtcaagccacacgtgagggggaaacgaaagcccagtggttggaagcaaggcggcgtttggcgaagcgagacgcgggcgtggccaaagggacgttgagggcatggctgcctggagagcgggccgcgctgcaggcagacgtggacgatctggcggcggcgtggttgaaagcccgcaagcgccagtcgaaagggcgcccggacaccagggatcccttaccattgaggcaagctcagacaatcaattga

SEQ ID NO: 517203 - DNA, 714 bp, Stenotrophomonas maltophilia
gtggcccaagcgctccagtggttgagcgagcagtggaaggaacccatcccgcccctccacgcaatcgtcgtcaacaagaacacgaaacaccctggcgagggggcgatcaccatctcgccagcttacttcgcggggaagaagctggacaccgaggaagagcgccgtgcgcacttgcgagaggcgatggaagacgttttcacctatcccaattgggaccgggtcgcccgcgctctgggagccaccatgctgaccccgtccgccggggcggttgaagaggtggcagcggatgcgcctcttccccttcctaaagtccaggagggggggcggccagagagcgacgagcacaaagcgttgaaggcgtggatggccagccatcccgaagagttcgaggactttgggtgcttccccatggggagcaacgagaagttgttgagctcgggtgaccgactggacgcgcatttcgataacggaagacatcgcctggcggtggaagttaaaaccagcaagtgctcggaggacgaactccagcgaggcgtctatcaagcggtgaaataccgcgccgttctccgggccgagcagaaggccatccgccacgtgcccaacggggaggcggtgctggtgtccacgcgcgctccgaacgcggaaacccgtgcgctcatcaagcggctgcaggtgcggttccagcaggtgccgctggaggcggagcaagaatga

SEQ ID NO: 517204 - DNA, 174 bp, Stenotrophomonas maltophilia
atgattgaaagccccacccgctcggcccgccccattgctggccttcccttcgcgcacatcccacccacggctcccgcgttcctgcccgaaggcaagcttcgccggcaagcccggctggcccgccaacaacgccacttcgagcgccaactgcggaaggagctgaaatggaaatga

SEQ ID NO: 517205 - DNA, 174 bp, Stenotrophomonas maltophilia
atgattgaaagccccacccgctcggcccgccccatcgctggccttcctttcgcgcacatccctcccacggttcccgcgttcctgcccgaaggcaagcttcgccggcaagcccgcctggcgcgcgagcaacgccacttcgagcgccagctgcgcaaggagctgaaatggaaatga

SEQ ID NO: 517206 - DNA, 204 bp, Stenotrophomonas maltophilia
atggctccatacagcgcgtcggaaacgtccacctcgcccgtctcaatcgaatgccaaggcatgtccgtctcgctgtcacgcagcttctcgcctcgcaagagcttctccagcagccctcgtgagttgagcgtgaacgattgcctctgttccggatgcatcgcgggaatctccaggaacgcccattccagcgagctctgcagctga

SEQ ID NO: 517207 - DNA, 906 bp, Stenotrophomonas maltophilia
atgcatcgcgggaatctccaggaacgcccattccagcgagctctgcagctgagacatgggacggaagagatccgggtggatggtctgcggagcgctctcttggcgaaggcagtgctgttgcaggtaggccgcgtaggccagccgcccttcttcgtcatggctcgtgtccgcctcttccaggcccaagtatttcaccacctccatcagctttgcattggcacgaggcgcggggctggcgggaatcacgcgttccacaatggacaacaacttggcgtggtggaatggcgtgtattgccattgcctgtcgtcgctcaccgggattcgatggatggcgatctgctcggcgatccgctcgatcaatgcctcggtctcggccacgtccttgcccagcttgcgctgtttgaccaactccagctccgcgtccaactgcgcacgctccaacccttccagcttggccgagcaccaggaccgataagccatctcgtgatccacgagcgcacgcaggatgatgccagtgtggtagaggaacgcgtcaccaccgtccgtccaaagcttggatttctcgtccacgcgccctccggatgcaccgcgcaatgcccggacgatctgatcgggcgccaacccttcgtagggccccacgcgcatcccgggcttgacgacgatgtcgaacaacccttccagatccgcgataattgctccgtctttgccgtcggcgacgagcgcgccgccgccggagagcttctgccgcatcaaacgttccctttcatcgccgtgggcagacaccgcactcgacatcgccagggcagctctacggaaccgacgagcgatgggtctcagcgcggcgaaggatttacccgatccaatggctccgaatacgagcaggccctgctgacaatcccgccatga

SEQ ID NO: 517208 - DNA, 402 bp, Stenotrophomonas maltophilia
atggcgttcgttcgtcaaaacgtaaacctcgaccgtgggcaactgaaacttgctcagcggctcgcccgtgaatcgggcagcgcgttcagcgcctacgtgcgagaggcgctggagcgacacaacaccgccacgtcagtggtgagcgtgttggagaacgccaacgctcagctggagcgcctcatcgacgatctgcgggaagagaacgcgctgttccggagtgcgctccaggaagacctgcggcggctgcgagacgaaacgaaggcggagcaggacagcgccattcagcgctacgaagaagcgcttcgcaaggtcgtgacggcggccctctcgcaaccctctccaaaaggtcctggtgcggccaaggtgcccgcaaccggacccatgactgctccacgcacctaa

SEQ ID NO: 517209 - DNA, 1260 bp, Stenotrophomonas maltophilia
atgccattgcctgtcatcgctcaccgggattcgatggatggcgatctgctcggcgatccgctcgatcaacgcctcagtctcggccacgtcctcgcccagcttgcgctgtttgaccagctcaagctccgcatccaactgtgcacgctccagcccttccagcttggccgagcaccaagacctgtaagccatctcgtgatccacgagcgcacgaaggatgatgccggtgtggtagagaaacgcgtcaccgccgtccgtccaaagcttggatttctcgtccactcgcccaccggctgcaccgcgcaatgcccgcacgatctgatccggcgccaacccttcgtagggcgccacccgcatgccgggtttgacgacgatatcgaacaatccttccaagtccgagatgatcgccccgtctttgccgtcggcgatgagcgcgccaccgccggcaagcttctgctgcttcaagcgatcccttgcatctgcgtggcctggcgccacacatgccatcgccaacgcggctctacggaaccgacgagcgatgggtctcagcgcagcgaaggatttgccagatccaatggctccaaatacgagcaggccctgctgacaatccctccacgagaacatcatcacggtgcccaggtcgggcgagtagccatagcccttgtcggaaaggtgtcccgtggcgcgcccaatggtgatcagcggggtcttgtcccgcagtgccgcctcagcttgctgttcacgcgccttgacgtgcgcgttgatcagcgccccctgggtggccaggttgttgtcgttgttctgcaggtaaagccgggcggcgttttggacaaagttgccttcggcgtattgcatcgcatacatgcatgccagcacgtaaggcgccgcctcgcccaagccaaatggcaggaccttggcgaccaccagtgtggcaaagatgagccccacccacttcatcgcttgaatgaagcgcgcggctgtcccgccaatgacgccccggtgcgggtgcgaggccgccgacacaaagcaaaccacaaacaggatgcccaccaagccaaaggcccaccacaggtaggtcttagccatctgggcatacacagccatgccgccggcttgcattgccacctcggtgctgccatcgctgtcgccgaccacgaactgaagcgccatcggaacccattgcagcagcaccagggctttcagggcctccttcatgccctcgccttgcttgagggcgatgaagtatggaatggtcagcagtag

SEQ ID NO: 517210 - DNA, 204 bp, Stenotrophomonas maltophilia
atgtccacgttgttcaatgccctcaaagacttcgctttcgaaaacgcggttccactgctgaccagcttgttcctgctgaccgcggccttcgcagcggctgttctcgtctaccccccggccgttccggttctgctcaaagtggtggccatggcggtggcgggctttgtgaccatcggggtggtggtccagagttccttccggtga

SEQ ID NO: 517211 - DNA, 312 bp, Stenotrophomonas maltophilia
atgagcggaaccttcacagtccacgaaaccaagatcatcgcgttgggattgaatcccggcttgattgaagattatgcagcggtctccttggagcccgtgagctttgaagaagaggacagcctaggctgggcgaccacttggaccgcggttcatgccgtcgagctccacaacggcgggaaggtctacgttaacggccgatccttccacgtcacccaagccaagcccggttacaagcacttgctcaagtgctggcgagaagagcaggggcggcgcgcggacttgccttattgggaggctcgggatgggcactga

SEQ ID NO: 517212 - DNA, 1071 bp, Stenotrophomonas maltophilia
atgaccccagaagaaagaatccagcggcgcaagcgcgaagagtggctgaagcgtgccaacgcaaccccgaccgctccgcccacgcaggaagagcggctggtttccgacggcatgaaagagaacctgaaagctgccggtcactgggctggggtgttcggcaagcgcactgccgagttgacccagaagggcgttgctgccgctgccgaaaaggcgaaggaggtcaaggcgaccgtggacgccaaacgggcaaggagcgcggaggaaagagtccaggcaacagaagccgagtctggccccaccgtccagccgaccgaagccgaggtgggacccgagaacctggtcgatgcgttgtccgcccgggagacagcggcaattgccgtcgaagcagaagcggttgacgtgagcgaagcgaatcttgagccaggagtgacgaaacagcggcctgtcgtggaagcagccagatttgcaccggaggcggacgccccttcgtatcagccagcagatgctgtcaaagagccgcaggtgaccgatgacgtttcgacagggcagggaaagttggccgccactgccgcagaggagcttggcccctcacccgacgccaaggctccagaggcagcgaaagcgtcactgcattcctcgccccgctctcgttggccttgggtcgtggccggcgtagtggcggtggcattggtcgctgggacgatctacttcttacatgggaagagcgaccaggtgccaccgagcacaccgcaacccgtggcaccggttgccactccagccgctcccgagcagttgcctgaggtggtcgaagtccccgtggttgcgcctgctccagcagtgctttcagaacaggccaagccagaagccacgatcgagaaacccgcacctgtcgccgctcccacggtaacgacgacagcgccgattgcgtcccagcccaagccttcgccgaaacgtgcgaccgccccattgccgaagaaggcccccgcacccgccgccgaaccgcggaacgactggcagcaaaaagccaacgcagacctggacgcctgggcgaagaagtcggggatcgactga

SEQ ID NO: 517213 - DNA, 714 bp, Stenotrophomonas maltophilia
gtggcccaagcgctccagtggttgagcgagcagtggaaggagcccatcccacccctccatgcaatcgtcgtcaacaagaacacgaaacaccctggcgagggggcgatcaccatctcgccagcttacttcgcggggaagaagctggacaccgaggaagagcgccgtgcgcacttgcgagaggcgatggaagacgttttcacctatcccaattgggaccgggtcgcccacgctctgggagccaccatgctgaccccgtccgccggggcggttgaagaggtggcagcggatgcgcctcttccccttcctaaagtccaggagggtggcaggccagaaagcgatgagcacaaagcgttgaaggcgtgggtggccagccatcccgaagagttcgtggactttgggagcttccccacggggagcaacgagaagttgttgagctcgggtgaccgactggacgcgcatttcgataacggaagacatcgcctggcggtggaagttaaaaccagcaagtgctcggaggacgaactccagcgaggcgtctatcaagcggtgaaataccgcgccgttctccgggccgagcagaaggccatccgccacgtgcccaacggggaggcggtgctggtgtccacgcgcgctccgaacgcggaaacccgtgcgctcatcaagcggctgcaggtgcggttccagcaggtgccgctggaggcggagcaagaatga

SEQ ID NO: 517214 - DNA, 339 bp, Stenotrophomonas maltophilia
atgaccatttttctggtggtcgtgctgtttgaactcgtcatgtttgcggtcaccttcggaattgcgtggctgtgcgcctccaaagcccgcagcgcacgcagcggctgggaggcgttccaagccggccgggaagatgccccatcggtggttgcattggtgtggcgtctggccgtgttctacgcgtgcttggcgttgctggtctaccaacttcagcacgcggtgaccggggtctggttggatccctccaacctttccctgtcactggcgttggctcttgtcgtctattcgatcgcgtgcgggctgcttcaaggcagcgggctggcccggaggcgagcatga

SEQ ID NO: 517215 - DNA, 660 bp, Stenotrophomonas maltophilia
atgaggctcaccaggaaggttgccagaacgccgatcacggggaaggcgagatacatcaagggagtggccaggctgtcgccgccctgccccatgtcgttgccctgcaggaagccctcggcacgccgtccaagcttcgtcgtgatgatccgcgattgggtgtcccgcaaatcttccggaaccttgggccaccactcctggaattcgtcctcgctgcgtccgtcgggcaccttgaacacctgggctttctcgtcccagacggcgccgcactccagcgcgaaatcccggtcagcctctggcacatcgagctctcgactacggacgcgatcagtcacgtcaaagcgccccaccaggttttcatactcctcggcggatttgacgatgatttcttccttcacgttcgaaggctcgccgctcttccggcggaacttgcgccccaggccgctcgtccagtcaagcacgttgaacaaactgattgctgccatctctgtctccctcccctgtcagatcaacgaagccaatgcgccaagacggcaagcaccaagcaaagcggcgcgcacgccagaaagcccgctttggccacccagcgctctgcgacctgctcaaccttgctcgcgtagagccgatccttggtccatgcgtcatacgcggcgtcgtctctga

SEQ ID NO: 517216 - DNA, 513 bp, Stenotrophomonas maltophilia
atgcaccgctcccagattgagcaattcctgcgggcggtgtttgtccagttccttgccgacgacgaacagctggaggactttctccaggaagatcgcggcccccgaaagaagaacgagaaaggaaagtgggtgactattgccctcaaagacctggccgcggacgtggagcaggccattgcacgcatcgggcaggacgatgagcctcagaagctggctcggacggtgaccaattcgtgggaccctctttgcggactggtccatggcgggaaggccattcgggtgatgtatcaagatcccaatgggaagatcggggcgcacgtgccggcagccattctttttcagaccaccgtcaacgcggtggccaccaccaacttgtgcgtcattgcagcactgacagcggttggggttggggcctttgaggaaagccccgttgttgagcagtgcgccagcgggatgttgcactacatgcaacggaggaaagctcgcatggaagagctggcctggccgccttaa

SEQ ID NO: 517217 - DNA, 285 bp, Stenotrophomonas maltophilia
atggggatggacaaggacacggcgtcggcccgaatctctcggtatgaatccgagggcatgtcgatcagcttggaagccctcttcgagctggcccaagccttggaggtgcccccagcctatcttttggcgaccagcccagcgatggccgatgcaatcttggctttgggcgagcagagcgcggctcagcaggaacggtttgccgaactgctgggcgttttgggtgagctgtcggcgaagaagcgcaacgcactcatcgaaaaagtgttgtcgcccaccaaggactag

SEQ ID NO: 517218 - DNA, 669 bp, Stenotrophomonas maltophilia
atgtgggacagccggaaggcctttccgtacaaaggactgtttatttcggccatctatctacatgaggcacgacgcttgtgtggacaaggagagagtgatcgcgcatggcacattgttgcaatggcgtattaccaccttggtctaagcacccctcattcgaccattcagaacaccgcgaaggccgctcagctcatgcatgctgcccgcacagagaagcttagaggcatggtggttgggacgcttgatgcgattgagaaaaacggggcagaagacagcattgaaggtgcgaaaaaccgggttgtagagatactacgtaaggtggcggcaaaagaccctgaagtcgccagctggctggctgagttcgatgcaatggtgtctgacaaagtaaaggggcgcaccgcagcaaaacacaagaatgatgtttttgaccgcatacgaaacctcctagacaaatgggctctacccagcggcccatacccggaaatctccgaggcattctcggttttcagcaagcgcacccgtaagctagaaggcaacaatcatgtcccgcgcgtggaaaccaccgagggcatcgagctggacgactctgacttctatctccgactcgtacactacctcaaagacgagttccgactgacggtaaaggtttcgcggagcgaagccccgtag

SEQ ID NO: 517219 - DNA, 324 bp, Stenotrophomonas maltophilia
atgaacaccacttttcacgctctttcgcagcaccaccagggcactggcaatgaaaggtccgcgctgtgcgggtcgtcgcctggtccgctggatctgcgctcgcttgaattgcagcgggccatccggctgccggaagtcctccgcctgacgggcctgagccggagcacgtggtacgccaagctcaaccctcgtgactctgcctacgaccccgaagctccccgccccttcaagctcggggcatcgtccggctcgccgtcggcatggtgggcgtgggaggtaatcgcttacctgcaggcaaagtctgaaactcggcaggcgcggtga

SEQ ID NO: 517220 - DNA, 300 bp, Stenotrophomonas maltophilia
atgacgaagatgattaacgaagcgtcgtccagccagagggacctggacaccgctgcccgccacgtcgccgataagctgaaggcgcttcagccgaatgcgcagcaccgaaagaaccagctttttgaattgctgtacccgaccatcgttgagatgctggaccagaaggtcactcagaaggcgatcctcgaggttctggcaagcgaaggcttgaagctgcatcccgcccgcttcaaggagttgatgtcggcagaggcaaagaagttgtctcggcactcgggcgcgacggagggtgtgaagtga

SEQ ID NO: 517221 - DNA, 1461 bp, Stenotrophomonas maltophilia
gtgacttactcccgcctctcccacgcctatccgactcatgcgatgtacagcgatgtcaggcaggctattcttgaagtgcaagggaaccttcaggcacctgacgcgctgattgcaggttcgttcctcaccgcgatgtccatcgcatgccagggtgacgtggacgttgaacttccgaccggccaggttcgtcctgtctctcttagcatcttgacggtcgcggactctggcgagcgcaagaccgccaccgatagcattgtctgtgcgcccatttacgaccacgacgcgcgtatggcacaggagcacgccagcgcgatgcttgggtatcacgctgatctccgtttatgggtggcgaaggactcgtcgattcagcgcaagatcggcaaggccctgaccgactgtgaggaggcctccgagcagcagttgcgccaagaattgatttctcatgaggcgtgtaagccgaccagaccggcaaaggcccgcatcgttcatcagaacatcaccgaacgcccgttgatcgaggcgatgcagggcgatggcaagtcaattgcgatcctcagcgatgaaggtgaaattgtcttgaagggcggcgccatgcgcacgttcggcactctcaataaagcttgggacggcccgaagacgctgcagctggaccgggtggacgacaacatcgaggtgcgcaaccctcgcttgaccatcagcatgatggttcaggagaaggtgtttagcgccttcatggacaagcgaggacacgcggctcgcggatcagggcacctcgcgcgctacctcgtagcgtacccgccgtccacgcagggcttccggttcacgtcactcgatcagccggtctgggaacacctgccgaggttccactcgcgggtcagtgagctccttgaggccaatcatgcacgccgcgcctcgggcgaccacacgcgccgcgcactttccttcacagctgaagcgaaggaattgtgggtgcagacgcagaacacgatggaaccgcgcctgcgtgacggtggagacctcgtcagcgtccgcgatttcgcatcaaagtcgatggagatcgctgggcgtgtagcagcgattctccatcacttcagcgctcaggaaggtgtgttgataacgatggagaccctgcatcgggctctcgacatcgtggggtggcactttcaagagttcgtccgcttgttcggcgacagcaacgacgagcctgagcagcacagggacgtccgcgcgctggcgatgtatctgtggcgccgctactggactgcgggctacacggcggctgttcggaatgaagttcgcaagtgcggcccgattcgcgaccagcgacggttcgagctggccctgcaccagttgtggatggagggctctgtccaagtgatgcacgaaaacgcggtccgtggcaagggaaggctctggatccacctcaacccgactgtgttcagtcaggtcaccgccggctag

SEQ ID NO: 517222 - DNA, 723 bp, Stenotrophomonas maltophilia
atggcaacgtttcatttcgagatcaaaagcggccgtaaagggactgctggagatcacgcgaactacatagcacgtaaaggattccacggtaaacgcgaagatctgatgtatgcggaacacggcaaccttccagcctgggccgcgggagacccaagcaccttctggcgagccgcggacaagtacgaacgaaaaaatggcgcggtataccgagagaccatcattgcgttgccaagtgagttgaccgacggggagaacgtaaaattaacacgcgctctcgttcgacagctggcacaagggaagccgcaccaagccgctgtccatggacctacgtcatccctggaaggtgcagccaatccgcacgtgcatttgatgatgtgcgaccgagttgatgacggcatcgatcgcccaccagagcgattcttctcgcgctacaacaggtcaagtccggccgaaggtggtcgcaggaaggtgagcggcggccggaatcggatggaactcaggaacgaggtgattgcgacacgaaggctagtggctgagacgatcaatcaccatctggagctgaacgggcactctgcgcgtgtcgatcaccgtacgctgcgggagcaaggagtcgagcgacgtccggagcgccacttggggccggcgcggatcggaagcatgtccactgaagagaaaacgcagtacatcaagctgcgcagccaactcaggtgcagtgcaaggtga

SEQ ID NO: 517223 - DNA, 1185 bp, Stenotrophomonas maltophilia
atgaagaatgaattcctgaagcccggctggcgtcgggtgcgatttggcgacgtggtgcgcctctcgaaagcccgtagtcaagatccgttggccgatggcattgaacgctacgtcggtctggaacatctcgaacccggtgatttgcgcatccgcagttggggcagcgtcgctgacggcgtgaccttcaccagcgtgtttcaacctgggcaggtgctgttcggcaagcgacgtgcttaccagcgcaaggtggctgtggcggatttctctggggtgtgttccggtgacatctatgtgttggagaccaaggacgcgcaggtcttgctgccggagttgctgcccttcatttgccagaccgatgccttttttgatcacgcggtgggtacgtcggcaggctccttgagtccccgcacgaattggacgagtttggctgatttcgagtttgccataccaaccgtggatgagcagttacgtgcagtagcagccctgaccgcgttcgacgagtgcttcgaatccttcaggtctttgcaggctcacgggaatgctttgttgcaatcactgctcgacagaatgtggaacatgtttccgcaccagaaaattggcgctttgattgaggacggactgattgcgccgccacaagatggcaaccatggggagaaacatcccaaggcctcagattacgtcccggaaggggttccgtttgtgatggcttctgatctgaagggcggcgaagtcgactttgcgaattgcagcaagatccctgaggtgctcgctcgcacactgaggataggatttgcgaaatccggcgacattcttttgagccataagggaaccgttggtgaagttgctcggctaggcgaactggcaacagattttgtgatgctcacccctcaagtgacgtactaccgagtagcggatcaatcaaggcttgctcctgactggctctacttttcatttaaaacgcctgggttcaagcggctactggagcagtacgggaagcaatcaaccagagcttacgtaggcatcacaacgcaacgcgaactctcaatcccggttgccgtgacacaagatcagtcgcagatcatttcagaactgctcgcagcagagaaggcagtctcggctgcagcgctacgagcaactgctgtagctgaattacggcagcgtctgcttgcagaagcacttgcttaa

SEQ ID NO: 517224 - DNA, 1905 bp, Stenotrophomonas maltophilia
atgaagctccaagctattcgtttatcgaactttcagtcattcggtgaagatcccaccgaaatcacgctcgacgacatcacctacctgattggtccgaatggctcaggtaaaacggctgcgctgcaggcattgtgccgactattcgccttcgacccgtcgttgcgccgaatcctgcgctcagatttccatgttcccagcagcgagaaagaaacgccaggcgaacgacacctctggatcgaggccgacttcctttttcccgagctggcagaagacgaagacaacacaaccgtagcgccgcattttgcacatatgcggctggatgagcacgacggtattccgcgcgttcgttaccgtctcagtgcgagcttgggtgtggatggtgatatcgaagaatccatgtcgtacgtgctggacctggatgctgacggcgagccactcagcactgcgcaagttcccagagctgagcgtaaccaaatccacgtccactatcttccggcacagcgtgatccggccgaccacatcgcatacggcgccaatgcccttctaggaagaatgcttcgcgcagtgaagtgggatgcggagcgtgacgagatcaagacgctgaccgatcagatcagtgacagcttggcgacgaaccaatcagtcaatgcgttgagcgaaagcctcaaaacaacgtggtccatgctgcacaaaggcaagttcttcgccgatccgaagatcacctttgtggcctccgagattgagaccttgctgcgccacatgtcggtttcattttcgcctgggcacgatgagagtctggtcgatttttcccggctgagcgacggtcagaagtcgatgctgtacctgtctctcgcactgtcgtctcaagccattggccgcgccgtactcgccgggcaagacacttcgtttgatcccgacaaattgcgcccacctgtctttactctggtcgccgttgaagagcccgaaaacagcctctccccgcactaccttgggcggatcgttagtgctttaagcaccatggttcagcacccggacgcccaggccctcatcgccacgcatgcgccgtcgatgctgcgccgcgttgcgccagagcacatccgctatcttcgtctgaccgaagctcggcaatcacgcgtcacgcaaatcctattgccagaaagcacggacgacgcacacaaatttgtgcgggaagccgtccaggcatttcctgaggtctatttttcgcggctcgtcgtcctgggcgaaggcgatagcgaagagatcgtgttgccacgcctgctgcaggtcaaaggcgctccagttgatgaatcagcagtcacgatcgcgcctctggggggcaggcacgtcaatcacttctggcgcctgcttgcggcattgcagatcccgtacctgacgctcctcgatctagatgtagctcgctacgccgcaggctgggggcgtatcaagaacgcgaatgatcagctggctgcgtacgagccgagcaaggttctcccagcagaccatgtcatcccgcattggaaagatgtcactcacaaagtccgggattacagcaactacctcgaagcactcgaagaaagaggcgtgtacttctcgtaccccatggacctcgacttcgccatgctgctttccttccccgaagcttaccgagccgaagaagaagaaccggatgactcaacgatcaaggccgtgcttgggaaaagccaccacgacgctagccagtacagcccagcggaacaaaagctgttcagcacctaccaccagcgcttcaagctcggcagtaaaccggcagcccacatcgaggcactggcccatctgacggatgcagagctgctggagcacatgcccgcatcactgagcaggctggctgataccgttatcgccaaactggcggggctgcccgagtga

SEQ ID NO: 517225 - DNA, 1791 bp, Stenotrophomonas maltophilia
atgagctcgaagattttgcggcaggtgacggaggcgctcgggggatcacccatgcctcgccaggacatcgccatcctcgcggtgcagcttctggtttgggcaaggatcggcaagaaggagtgggtgactaacaccgtgcctagcttgagcgaggcggccgactcgaggttgcgacttctcgacgcgggtgtggctgccctggagcgcgcaaacggcaccctaggggaagcgtttgctggcatacagcggcgagccgagctcgctggtcccagcctcctggtcgccgcgaacatctgtattcgtctcgagcgcgacgggttgttggaaggactcgatctccacgagttgatcgccagcttgggcgcggaggtcggtgccgagtgggcgctgtaccactcttccttggttgacctgatggttcgcttggtaggggttacggctggcaccaccacctattgtccttgggaccagatcgcgcaagcctcgtccagcgtgctccgtgccgggggtggagcagctgtagagaatccattgatcactccgtttccggcgctggcagccatcttctcggggaaggaaagccggactgcctacagcgaccccattgggtcaccatcgtttatcgagagcggaaagctcgagcgtttcgaccagtcagtcgctctcccccccctcggggtcaaggtgcgtggtgacgtggttgaccgagacctgtttggccgcttcgacaaccccaaagccacttggactgtcttgtgcattcaacacctgatggcgcactcgcgacgtcgggttgtcgtcgctgttccgtacagcctgctggtcggtgttggtgccgacaaaaagctgcgggaacaactggtccgagccggccaggtccggaccgtgatctcgctatttcctgggctggcgtccggcaccgcgatccagctggcgatcttagtgcttgatcctcggggcggcaccaagcaggtgcgcttcgtcaacgcaagtggcgagtgcttcaagatccagcaagggcgctcccgggtggcggtcggcaacttggagaagctccttgaagcggtccagtcgagaagcgaatccaacctggcacgctctgtggaaatcggagagatcgaggccaatgacttctcgcttcaggttgaacgttacgttctagacgagggcaggatggaactgcagcgcaggcttgcgcatctagagacagttgcccttggtgacttggtttccaccgtacgaacccctcctgcatccaaggcggattcggatggcgttccggtgctggaggtcggcgcctctgacattgctcgtaccggctatacgcgcccaggacgagagggaacggtgcgggatgtcgacagtcaggagccggatcacttcctcagggaaggcgacatcgtgcttacgatccgcggcaacgtcgggagggtgggaatcatcccagcggacgtcgccaggccggggcgcgggggctggacggcaggctcctcgttaaccgtcttgagagctcgccctgagaatcgcgttgatccggcggttctcgcactcttgctccggtcgccgttaggacaagagctgctgtctgggatctcgtccggcgtcacgattccgatgattacgttgcgtgacttgcttcgacttgagctaccggcgccgggcacgaatgcctcgcatacagctcgagcaattctcgatcaggaagagactctcggcaggcagatcgccgagatggtcaagaagcaacagaacgtggctgggcctgactcggcctatggccttttggactag

SEQ ID NO: 517226 - DNA, 279 bp, Stenotrophomonas maltophilia
atgaacacgacacttcacttttcacaacggatgtcccagcgagaagtcagccgtgaaatggtgcgactcgtccgtgagtacggagttctcgaaggcgagaaggtggtgctaggccaacgtgccgctgggcaagtgattgatgagctcatggacaagctcagggtgctcaagaagatccaggacaaggggggcgtgatcgttgtcgaggacggcgactcgcttatcacgacctacagctattcccgacgccgtaagcggacgggtgcgaggcgctcatga

SEQ ID NO: 517227 - DNA, 504 bp, Stenotrophomonas maltophilia
atggagatcacaagcgcagtagctgcaccgctctacgtacggagcaagtcccgctcctacaaggcggcaagcagcgacgagatcttagaggcggcgagggccgtcgttgggcagcggatgaggcgcggtacgtgcttttcggaccctggcactgccaagagcttcttccgcgacaagctgggagggctccatcgcgaggtgttcgcggccgcgttcctcgacacccgccacaggctgatcgagtacgtggaactgtttcatggatcgattgatggcgcagaggtgcacccgagggaggttgtgcggcacgcgcttcggtgcaatgcagccgcagtcctcatcgcgcacaacaacccgtcgggcgcggtcgatccttctgcagcggaccgagcccttaccacccggctcgagcaggctctcgcgctcgtggatgtccgattgatagatcacatcatcgtcggcgggctgaagacagcggcactggccgaacaaggggggctgtag

SEQ ID NO: 517228 - DNA, 123 bp, Stenotrophomonas maltophilia
atgctcatgaaagcaatcggcagcgtggtcgtgtacggcttcgcgttgtacggcctgggcgggttcctgaagagggtccacgccgtcagtaaagcgaagccgcaggtgcacgttgatgggtga

SEQ ID NO: 517229 - DNA, 894 bp, Stenotrophomonas maltophilia
atgttgaagggcttggtgattaccccgcccgtggtggggaggatctcgatcgggcgagtggtggaacgcaacggcaagcgcctgcccgagaaggacgaccagttcaccctgaccagccaggtacagaaccgggcagggtgggtgctccatccgttggacgaagcgttgcgcaaggatgcagggggcaagctgcgatcgatcccagtgcgcctgctgttcaacgacccgaacctgaacctgcgagcggactactcgttgttcgatcgggccaccgggcggccgatgtgtgtaggcaatggcgagagctgccggcgcctggacaagggggagatctcacagctgccatgtccggggcccgacagctgcgcgtatgcagggggcgactgcaaggcctacgcccgtctaaacgttggcatcggagacgaggacgaattgggcagcttcgtgctgcgcaccacgtcctacaacaccatccgtaccctggcggcgaggctggagtacttcagcgcggtgtcgggtgggctgctggcgtgcacgccgttggaactcaagctgcggggcaagtccaccacgatgagctttcggtcggcgatctactacgtggacctggtggtccggtcggggatgaccctggaagaggccatcacccacgcgcgtgaggtggaacgggtacgcaaggaagctggctttgaccaacaggcgctcgacgaggctgcacgacggggctttgcgaacggcgcgttcgaggacctggacgaggacgtccccagcgtggtggaggagttctatcccgctggtgacgacaccgcagcggcagagccggccaccgcgacggcgatcaccttgaacgaccggctcgcacagaaggtcgccaaggcgaacaacaaccactag

SEQ ID NO: 517230 - DNA, 975 bp, Stenotrophomonas maltophilia
atgagcagatcaccggcattgcgcctgatcgatacgcgttcgctcccgcgccaccagtggctggaagttcgcaagaaggggatcggcagctcggatgcggccgcggcagttggcttgtgtccgtacaagagtcagctggagctgtggatggaaaagaccgggcgtactgtccggcaggaggagccgggtcaggactcgccgatgtactggggcaccttgctggaaccgtacgtggcgaccgcctacacagaacgcactggcaacagggtccgccgcctcaacgccgtactgcaacaccccacctacagctacatgctcgccaacatcgaccgcgaggtcgtgggcaggcaggacgtccagatcctggagtgcaagacggcaggggagttcggatctcgcctgtggcgcgatggggtgcccgagtacgtccagctccaggtccagcaccagttggccgtgacgggcaagcaagccgctgatgtggcggtgctgctgtgtggccagaagctcgagctccaccgggtcgagcgtgatgaggacctgatcggacggctgatcgtgctggaagcacggttctgggagcacgtgacacaggacgtgccgccgtccgcagacggcagcgagtcagccgccaaggcgctgcgcgacctgtacccgggcacggacacgacgatcgatctcaccgaagaccggaagctatgcggtgacttccagtccctggtcgggctgcgcgatgagatcgccgagaaggacaagcaagccgagtgccttcgccagcgcctgcaagaggcgatgggcgatgcatcccgcgcgctcttcctcggcggggagatcaccttccgtcgatccaaggacagcacaagcgtcgatgccaagcggctggcgcaggagcaccccgagctcgtagcgcagtacacggttgagcgccccggcagccgccgcttccggatcgtcccccacaaagaaggagagtga

SEQ ID NO: 517231 - DNA, 315 bp, Stenotrophomonas maltophilia
atggacgtggatccactcgatatcgcgtacatcgctttgggcgcgaagcaggcgttgtcttcgagccgtccgtcccatggagtaggggccttcgacggcgagctagcctacgtgcaggcgtgcatcgagcacgcgtccctgctcgatgaagcctgggagaggtgcaacgacacctttccgggcgtctggtgctacgaggtcgccgagcccttcggcttccagatgggcaagcacctggtccacggcggggacgcgaaggaagcccggtccatcctggacaggatcgtagcggccgtagacccagtacctgcgtaa

SEQ ID NO: 517232 - DNA, 957 bp, Stenotrophomonas maltophilia
atgcatcttgttgagtcaatggcctacaccggggccaccccctggcacgacctgggcaaccgcctcccgtccaatcaggcgatcgacgactggaagaagagcgccggcatggactgggacatccgtgagtccgaggtccgctacatcaccggcgacaacggcattggtgtcatcaatgccttcccagaccagaaggtcctctaccgttccgacaccaaagcgccgctgtcggtggttggcaagagcttcaaggtcgtccagcccggggagatcctggagttctatcgggacctgaccgaggtcggcgggttcgagctggagacagcaggtgtgctgcggcagggccggaagttctgggcgctcgcaaagacgggccagagcacgatgctcaagggccgggatcgggtcgagggctacctactgctcgcgaccgcgtgtgacgggaccttggcgacgaccgctcagttcacgtcggttcgtgtggtctgcaacaacaccttggcgatcgcactggggagcaacgcaggggccgtcaaggttccgcatcgcagtcagttcaaccccgacgtggtcaagcggcagctggggatcacggtgtccacgtgggatccgttcgttgcccgcatgaaggcgctggtggagtgtcccgtcgacccggactcggtggatgggctcctgcgtcgcgtcctcacctacccgacgcccgacggaagcggagtggcggtgaacgagcaggcctacaaggtggcgcgggcgctctatgacggtgctggcaagggtgcggacatgaagtccgctcgcggcactgcctggggcgtcctgagcagcgtgacggagtacgtggaccatcatcgacgtgcacgtagcgatgaccatcgcagggacgccgcgtggttcggggtcggtgcccagatcaagcagcgggcgtgggatgaagtcctgaagatggttgcctga

SEQ ID NO: 517233 - DNA, 1011 bp, Stenotrophomonas maltophilia
atgtccacaaagcagctgattgcgctcctcaactcgcacattgagcgcgacgaggagcaattcttgtcaattgctcttcaagttgcagcccaagaggctaggcaaggccgccttgaggaggccgataagctcaagcgtctggtgcagcgcgcccgggaccagcaacggaacgaacgacagccaggcggacagacaccgatccccctcgcccgtccgcgtggagagctacagggtctcgtcgagagcacctatccgaaggtgactctagagagcatggtcctatcggaagatgtgcatcagcggcttgctcgcgtcgtgcgtcagcagcgagaacgcgcacgactacgagagcacggtcatcgcccgacgacgcacatcttgctggttggacctcccggcaccggcaagacgatgacagcgtctgcgttagcgggcgagctccatcttccgctcttcaccgttcggcttgaagcactgttcagccgatttctgggagagacggctgcgaagttgcgactcctattcgatcagatcgcacaaactcgtggtgtctacttactcgatgagttcgacgcgataggcgcacgccgtggcgatcctaacgacgtaggtgagattcgacgcgtcctcaattcagtcttggccttcatggaagagccgaactcaaccgacagcttggtactagccgcaaccaatcacgttgaaattcttgatgaggcactagcgcggcgattcgacgaagtaattgaatatcaggtgccggatgcgttggccgctcgagccattcttgaacgacgccttggtaagttgaagcccggcccaaaggtgttggctgggattgagccggcgtcgtgtgggctaagccaaggtgaactagtgcgtgccgcagacgcggtggttaaggatgcgatccttgagggctcgtccaaggtatcggggaatgcgctcatgcgcgccctaaggaaccgtcacacgctgaagggaaagtttcgccgctctacgattgattag

SEQ ID NO: 517234 - DNA, 2538 bp, Stenotrophomonas maltophilia
atgacagagtctaatgagtacggagcgcgcgataagccgcacctaaccattaacgcgtttcgtgaatccgccaggtatgggtttccttcacgcgcccaatcgaggagacctctgcgcgaaaactacgccgcacatgcggaggggctcatcagtcagctcgccgccgcgctggatgaagtacccgcaggcgaggcggacacacgacttccggttccggatttgaagctcggcaggatagttgaggttacaacgcgcccgccagatgaaggctcgtttgtaaatgccgtcaaggtgccgaccacgcttgactttgcctcacaggacatacgaactctgcgaactcagcgtcttgacaggatcgagagcgctctccttttcattcctgacgacgcacgtgcgtttctacgcgaccgcctcgccgcctacggccgcgcgccgcgcaacacacggcggcctgacatcgagcgctttgaagtgctcgagacaatcagcgctgctagggcagagtcgatttttgtcggtgacgtcgacttagaatctacaacagcggcctggtgggaattgtgggttccgggggattcacggcgctcggactacgtatcgaatcttgcccgctcattgaatctcgacgttcattccgaccgactggtgtttccagacactgttgtggttttcgtgcatacgcacgcccgcgctttggcggagttcaccgcccggctgccgggtgcaatcaccgaggtcaggcgcgcaacagggacgatccagccattccttgaccgcgacggcaccggtgttacttcttcggattgggttgacgaattggccactcgggttgtccggcctattgagacagccggcgtggtatgcactcttgatacgggggtcgcggccgcacatccactcctttccttcggcctggaaggcgcgtgggcgtatgacgaggcttggggagccgatgatcactacccccacggcgggcacggaaccgccttggctggtctgatcctctacggcgacctcgagccttacatgaacagcacgggtcccgtagaactcactcatgcggtggagtcgatgaagttgctgccgccgaacggctttcctgcaacggaaccgcctagctacggggtcgtaacacaaggtgcagtagctcaggtagaagtcgcgcgtcccggggtcgctcgcgctttttgtcttgcaaccactacaacagacttcccgtcggaccaaccttctacttggagtggcgcgctggaccagatagcttctggctcgacggccggagatgcagcagacaatagccatgcttcccgtacgcccaagcggttgctcatggtggccaccgggaacgtctctggagggatgttagacgacgtcgtgcagccaaagccgctcgaagatccttcgcagagttggaacgcactgaccattggcggctttactcgcaaggagcagatgcccgcaccacccccgacatataagcccgtggtcaaggccaataatcgtagcccgttcagccgcggctcgcggtctttaccttacgacctcactccaatcaaacccgaggtcttgtttgaagccggtaacatggcagcggattccagcaacttctgcggttggcacgaagcaatatcgctgcttgcaaccggttcagaggtaacgaccgagccactggtgccattctgggcaactagtgcagccgtgggcgtagccggaaactttatggggcgactacaagccgcgctgccagatctatggccggagacacaccgcgcgctaacagtcgatgctgcaagatggcccaagccgatccgcgatcagttaattggccgaggggatcattggagaggctcatccaaacggcagcggcagatgctattgcgcgaagttggctatggggtaccggagttcgagcgcgcggctctttcggcaagtaatgacctaactctcgttgcagaagcggagatccagccgtttgccatgggcgccgatgatcggtcaggcgtgttcaacgagatgcacttttatgatcttccgtggccgcgcgaagcgcttgagcagcttgagaaccaagttgtcacaatgaaagtgaccctatcttatttcgtcgaacctaacctgtctggaaaggccgcaacgcgcccggagacctaccgctcatttggacttcggttcgcgatgaaaaagcgtaacgagacggcggcggccttccgcgctcgcgtcaacgctgcccaagagcgcggcacgtcccccgctgaacgcgaacaggattactggctcctgggttccaaggccgtacaagccggctcactccactgtgacctatggcggggtcacgcgatcgacctcgcgggacacgattcgatcgctgtttatcctgtcgggggctggtggaagtcacataccggtcagcggcgcgttacagatatcggacgctacgcactggtgatctcgatttcagcaccagggactacagttgatatgtacaccgaagttgcgtcgcttgtggacgctgcgaccgttgaagctactgtgtaa

SEQ ID NO: 517235 - DNA, 1200 bp, Stenotrophomonas maltophilia
atgctgacagacaccaagctgcgcgcactgaagcccaaggagaaggtctaccgcctcgctgatgcgaatgggctgtgcatcgaggtcaggccctcaggatcccggatctggcgctaccgataccggtacgccggcaagcccaacatgctgaccatcggggcctatccggccgtctcgttggctgaagcgcgggctgaaagggaaaaggctcgcgcccagctcaagaagggcatggatccgtcgctagtggcgaggatagatcgagccgcccaagaggaagaggcaggcaacacgtttggcgcaatagccaaggagctcaccgcccagcgttcgcagaagctcagccctggatctgttgtgcgcgaacgcaggatgctggagcgcgatctggggagcattgccactctgccgatccggagcatcaccgcgccgatgctgctgaaggcccttcgcaaggttgagggccggggggcggtcgagacggcgcatcgtgcccgtgctgcagcgggcatggtttttcgctatgccattgccactggccgggcggagaacgatccgacggtgagcctcgcaggcgctctggcgccaacgacgacgaagcatttcgccagcatcacggatccagacgaggttgcgaagctgctcagagcgatctactgctaccaaggctcccccatcgtggccgttgcgctcaagctctccgcattgctgtttgtcaggccaggcgagcttcgggcagctcgttgggttgatatcgacctctgctccgcggagtggcgctatgtcacgagcaagacaaaggcttcacacgtggtgccgttggccagccaagtgatcgagttgctcgaagacgtcaagccttactccaggaacagccagttcgtcttccccagcgtgaggaccatctcgaagcccattagcgagaacacaatcaacgcggcccttaggaaccttgggtttgatgggacgatgatcacggcgcatgggtttcgcgcaatggcacggacacttttggatgaggtgcttgggttccggcccgatttcatcgagcatcagctggcgcacgcggttcgtgacccgctaggccgagcctacaaccggacaacgcatctcgaagagcgaaaaaaaatgatgcaatcgtgggccgactaccttgagcaactgcgactcacgtccgtcgatgggaagcgttcgacctaa

SEQ ID NO: 517236 - DNA, 567 bp, Stenotrophomonas maltophilia
atgccctcccattccgattcccgccgcctgtcgggtatgtcgtcttccttcgtttccttccgccgccatccgctggccctggcctgtgccggcctggctctggtcggcagcttcggtgccgccgcgcaggacagcgcgccgaccccgaccgggctggacacgatcaccgtgaccgccgaacaccgcgagcagaacctgcaggaagtgccggtctcggtgggcgtggtgcagggcgagcgcatgcgcgacttcaccgccggcggcgatgacaccctgctggcgctgtccggccgcgtgccgagcctgtatgcggaaaccaccaccggccgcatcttcccgcgcttctacatccgtggcctgggcaacatcgacttctacctgggtgcctcgcagccggtgtcgatcatccaggacgacgtggtgctggagcacgtggtgctgaagtccaacccggtctatgacgtcgaccaggtggaagtgctgcgcggcccgcagggttcgctgttcggccgcaacaccaccgccggcatcgtcaagttcgacaccctgaagccgacccaggattaa

SEQ ID NO: 517237 - DNA, 345 bp, Stenotrophomonas maltophilia
gtggatatcagtagctacgacatcgcctcagcactgtggaacgcgcctgccaacaccctccgggtgggtatcgttcatgagctgagcatacttgcctccgcaactgacttcttcgtatatctgacggccaatcccaactacgcgaagtctctgcagaccccagatggttcgaggaaagtgtttgatagcgaggtaaagcttcgcgctgtggccgttctggcacaagaactgctgaacctctctcgtgacgtcagcgccgagcacgtgtcggatacggccagtgtccagttgcgagacgattggttgaacactctcaagcgaacctcagtgccggtaatcgattga

SEQ ID NO: 517238 - DNA, 738 bp, Stenotrophomonas maltophilia
atgcctgcccggtgcgatcgagagctgtgtcggtgggaatgccggcgcagcgcgccggcactacgagagatccgtcgtggtcccagcaggcgctgtgcgcctgcaggccgccggcgcatcgcggcggtggccaccaccggtcagcctgtggctgaccggcgccatcgagagctggccgaaagggatgccggcgccgaccggcgccggatctgcgcacgacatcgaggtcgaccagcgccaggccgggacgtggctggcgctgcgatcgcgctgtttccttccagcccggccgcgctgcagctgcagcgcgccgggcgtgccctggacgttggagctcgggcagctggccagcgcgcctcgatgctgccggcatcgagctggccagccgttggctgtgctcgtccacgcctaatccacggccggcgtgccgtgcacgccgcggcccggccccggagaacctctatagatcgcaggggccgccggcagcggtggagtaggggtgggcgaggagcgccgcgtcctgcagggcgacggcgcggtagggaccagatggcggggatttatcccgccacgtcgctggcgctggccagcgccggctacggcgagcgcgtagcgatcgctacctggtccggggtgtgctcctgggcgcgcggagcgcgcagtgccgcgcaggcggcacggaaaggcgaggaccaggcccgaaggggcgagaccgccgcaggcgggctcgatgcgtag

SEQ ID NO: 517239 - DNA, 312 bp, Stenotrophomonas maltophilia
atggcgctcccggccctgcacgacccaccgccagatttcgggatcttcagcagcgagccgctccagggccgcaacgccatcccggtcgagctcggccatatcactgccggcgtctgcaaggcccataccgaacgccatgccaaccgcggcggcaagcccggcggatgcttcggcggggccctgcacgagggcaagggcagcaaccgcaaccccgccacagatcatggtcatgggatgcgaggcgattgcccgcgcggtgagctctacacagccaggtggacgaccgaacgcgcgaaggcgggccatcagtga

SEQ ID NO: 517240 - DNA, 825 bp, Stenotrophomonas maltophilia
atgagcaaggtcaaaatttcagtcgagcaactgcagcagttgattgcctgggcgggtgccgagccgcacaccgaggtcactatcgagcgaactgatggtgacgaaggccccggcctgtacgctttcaacagcgatcaccccgaagaaggtgccatccgcctcgatgaaggtgtgcaatcggcatccgaaggcagcgccgtctccctgccctggtcaccgccgatgctggacggcccgaggtcgcccatcgccggtgcgtgcgtttccccagggaggctgcgtgcgctggtcaagcattcctttgagtctgcatatgatcccgatgacgccgcgctacgtatctgcttggcgatcaacgcggagctcggcctgtcgggaaatgggtggtttgacgatgacccggcagtgctggcggctggcagcaccgccaattctggcgcagcggacgccaccgatgtaggcgagagtgccctgcacctgcacctgcacctgcacctgcacctgcatctgctggatgagtttcacgctagcccatatgccttcaacagcgatcaccccaaggaaggtgccatccgacttgatgaaggtgtgcaagcggacgagctcgctcgggatctgcaggcccaggaggagtcggacagtgctccggcgccgcctttgacggggctgaccattaatggcgtggccgttccatgcttgggtccagatgcaggcctggcggagaaagcagcgcatgcaaaactgctggtgtcgatgatgttcggggacgatggttctgaagagctcagcggaattcccgaacctgcatctggaacccttcactga

SEQ ID NO: 517241 - DNA, 507 bp, Stenotrophomonas maltophilia
atggcggttgactcactctgcagagcaagcactttgaagatcttctttaccctgcccttgctggctgttggtctaggtatcgcatcgagggccgatgccaacaatgtctccgtctcttccacggtccaagctggacgcgtgctgctggtactgcacaacaaccaccccgaaacgcctgtgaccctggaacgtattgaagtacccaccggcatggtctggaagcgaggtggcctcgccgctgtcgaccaccgggttatccagcggcacctggccattggcgaggcgagtaccgtggaccttggcagcatcgagcaagtgttcgatggcggcggtacccccgaggtgtccaccgcggccatccgcagtattacggcagtgggcgccgatctatgcctgaccaggcatacccccgtgaccgtgcacatgcgcttggcaggcggctcgatccggctgcttcatggcgtgccggttagttactgccacccgcgcgccgacaccgccaggtag

SEQ ID NO: 517242 - DNA, 525 bp, Stenotrophomonas maltophilia
atgaacgatcagctcaacgagcaagacgcgctcaacatgggcgcctactttggcttcctgctagacgcctacaagctcggcgcagcatcgaaggaacactgcaccgccattctgaccaagttggcggccctgctggacgatgggaattacgacgagtttcggcgtctttgcgcggagggccgaaagcttggccttgacgagggcgtaatgcacttccaccagcattggggtgccatgggcctgcccgctgtcaagatttcggaggcatcccccatgggcgaacatgccgagcgagtccgctcccgcattgatagagacgtccccaacctgatgacccccaggtcgccgcattacatcgaggacgtagatgactggacggctcggatgagtggctatgtcgcggcggccgatgatttcggccttctttcgaacgccgaatcacaggcgttgcgaaatcacttgaggttcgtcaatagcaccgccatggaatggcggttgactcactctgcagagcaagcactttga

SEQ ID NO: 517243 - DNA, 348 bp, Stenotrophomonas maltophilia
atgacgaccagcaccaccgttccgtttcacctgacgaccgcaggccagtccatccgcatgctgctgcagttggttcacgcagcctttgtcgctgcactgtggggtgcggcggctgttggcgccctggtgggctacattctgcttgttgcccaggagcccgtgtctctccctttgattccgctggatagcccgctcaagcacttcgcggtcatcgtgttcattatcggggcgattgtggggctcatgttcaccgctttcttcgatggcttcctgttcaccaagcgagctgtggaaagcgagggtgttgccctcacggtcccacttgctgagcgtcagggccataattga

SEQ ID NO: 517244 - DNA, 411 bp, Stenotrophomonas maltophilia
atggctaacttgacacaaggcgacatcaataccttggctccgccggcccggaattgcccgggcaccctctacagtcgttattggacggccttgagctggatgtaccgtctcctttggatggtggctggcgtgatatttatctcttacgagctcaaggcgatcgggctggcactggcctggattgcgagtttctggattgaacaaatatcaagtgctttcccatcgctactgaccgatttcgcggacgctgcacttatggtgcttattggggcttggtttaaacggcagtttgaggcttctgcagaccgctgcgaggctgttgctgaggcgggctcagtttcggatctgtcgccgaactcgctatttccatgcaacgccggcgcctcccaggcaggcgtcgcagaacgctag

SEQ ID NO: 517245 - DNA, 411 bp, Stenotrophomonas maltophilia
atgtttgattcttaccttcctaccattgtcaccaccattgctgctcttgttgtgtggagcgcaactaactacctcgtctttgacaggccgaaagcagaacgcacagtggcagcgctaaaaaggcgactgtccgaacgacttgagcaagctctggatgacgtcagacggtacgaatcaaaggccgctcaaggagtggccggctacacgccgggtggcaacgtagcgatcgtcaaaatcgagtttcacgattggttcgaagggttcactaccggcttgcatgattctgttccatacgcgatccgtgagaaattgaacctgcatacgtatgacgacatgcttcgcaagattgatccgaaccataaccaagctctctgggatcaggatctgaaggttcgagctaaccgctggtga

SEQ ID NO: 517246 - DNA, 246 bp, Stenotrophomonas maltophilia
atgagcactggtaacggtaccgcgcgattcatcaacgcgctgatgaatcacgcgatgacaatcgcggcgctgacgatatcagcatccctgttcgcaatcctgggtgtcgggattgacgttgctcactatctgctaggtggtggaccggccctgacgtttgatctgctgatcactactgctgtgcgagcagccgtcgtaggggcaccggtccacctggtactcgtggccgccctgcagcgagtgtga

SEQ ID NO: 517247 - DNA, 1269 bp, Stenotrophomonas maltophilia
atgaataagctagttccaacaacgctgctgctggccatggccgcggtggcaggtgcccagcaacgtcctgccaagacgtttgacggggctgtagttgtcgatgggcggccccagcagcaaggcggcgaaagagcgggctccgcaccaccgcttgttgtcgtaagcggatcgcgcgtcgacccgacaacctggaatcctgctgacaccggccaggtagtcatcaagggcgtcaacagtggggtatcgcagtcggtgctggtaaaccctggtgctgcggcaaagctctccggttccggtgctggccaaccggcaacgatcgttcggactggcgccaacaagcgcgtggtgaagtacaccagcgcgtgcccggctttccattcgggaaccatcacgtgggatcaggaggagattcggacggtcaatgatccgaactggaagccgatcgggcccaagatgaacctggtggacacgtgcacgccgatcgaggaattccgctgggttgccgaagcccaggcttgcccggcgtattacaacggctcgatcacctggcaggcagaagagcgtcgcatcggcggcgggccttgggccaggaccggccgcacgcagaatcgcgtggagagctgcacgccagttgtggagactcgatgggtgccggcgtcccagggctgtccggcctattacaccggcagcatcacgtggcaggcagaggagcaacgggttggcggaggcgcgtggacgccaaccgggcgaacgcagaatcgggttgattcatgcacgggcgtcgttgaaacccgttgggtgggggcgtctgcaggctgccccgcagggtacgcaggatcaaacacctgggaggccgaggaacggcgaaccgctggaggcccctggtatgcaacaggtgctacgcgcaatgcctcaaatacatgcgcgccggtggccaggccctgtacccccagcacgcggaccgacaccaggggctttggtacggtgattcctgaaccctggaccgatctgagggtttgtgacggtagtaaccagggtcagcgggctttcgctgcgtatgtcgtccaggcccggggtggcagtttcagggccttggtatgccagggcggtgggtgggccgtcacagcaggatcaggcagctccccctacaacggcactccctcgggcgaatacgcgcccctgcagcagcaaggtaatgacgactggaccgcgctgaatggcaacaccggctacgccaacaggtcttggacgacctaccagtgtaattag

SEQ ID NO: 517248 - DNA, 261 bp, Stenotrophomonas maltophilia
atgaacgcaaccacgattgacaccccgatttcctacggcctggcgctggaggtactccgcggccatcgtatggaacaggtaggcaaggcgcgccggcaactgcgggagctgcgcgccagtgcagcagctgctggtgatatcgagcttgccgaacaggcactgcaggatgctcgcgaagcggttggccagtgccagcgcatgagcgatgccgaggcccgaagcaccctggccgcagaggggattgacctatgcaagagttga

SEQ ID NO: 517249 - DNA, 732 bp, Stenotrophomonas maltophilia
atgttgacgcgcactgaagcccggtttaccgggcttttttgttggctgctcggggggcgatcgccattgccgcgccgcgctggtggccagcagcacgccctggtgcgcgatcgccgacgccggcggcgaccaccagcggcacgggcaatttctaacgcggctctcgcgccctgcagctgctgcagggccgatgcccgctcgggcctggccaccctgccccgggcccggccgcgccgcactggtggccagcagcacgccctggcgcgcgatcgccgacgccggcggcgaccaccagcggcacgggcaatttctaacgcggctctcgcgccctgcagctgctgcaggtccgatgcccgctcgggcctggccaccctgccccgggcccggccgcgccgcactggtggccagcagcacgccctggcgcgcgatcgccgacgccggcggcgaccaccagcggcacgggcaatttctaacgcggctctcgcgccctgcagctgctgcagggccgatgcccgctcgggcctggccaccctgccccgggcccggccgcgccgcactggtggccagcagcacgccctggcgcgcgatcgccgacgccggcggcgaccaccagcggcacgggcaatttctaacgcggctctcgcgccctgcagctgctgcagggcctatggcctaagcacctatcaccggcgagtcagccgcgataagcaacccagaaatgggaaccgatga

SEQ ID NO: 517250 - DNA, 2646 bp, Stenotrophomonas maltophilia
atgtcgcagcaaaccaccatccgcaagcttgccgaactggtcaacacgccggtcgaaaaactgctggaacagctggccggtgccggcatgaagttcagcggtcccgaccaggtcgtgaccagctccgagaaggtgaagctcctgggcttccttcgtcgttcgcacggcaagcccgagcaggccccggaagagagcgatcagtctgcaaagaagatcacgctcaaccgccggaagcagcaggaagtgacggtcaattccggtcgcagcaagacgaccgtgaatgtcgaggtgcgccagaagcgcacctacgtcaaggatggtgcgcgcgccatgacgccggacgaagagcgcgccgacatcctgcgcaagctggaagagtcgcgcgcccgcaacctcgccgaacagcaggccctggccgagaaggatcgtctgcgcgacgaagccatcgtccgtgcccgtgaggaagagattgcggccaaggaacgcgcagaggccgagaagaaggctgccgaggaagctgcggccgccgccaaggctgccgaggcactggcggccgccaagcccaagcgcgctccgatcgatgaaaccgcgccgcgtccgccgcgcacgccggccgccgctccggctgcgccgcgcagtgcgccgccgccgccgcgcaacgacgaccgcaacaaccgcagcgcgccgcgcaacgagcgtggcccgggcgaccgtttcgccggccagatgcacctgtcggctgccgaccgtgcgcgtcgtggcaacagcaacaacagcaacacccgtggtcggccgggcggccgtaaccaggccggtggccgtcgcgacatgtcgcgcggtggcaacaatgccggcccgcacgccttcgagcgtccgaccgcaccggtggtgcgtgaagtggcgatcggcgacacgatcaccgtggccgacctggcgcagaagctcgcgctgaagggcggcgaggtggtcaaggcgctgttcaagatgggcgtgatggccaccatcacccagtccatcgaccacgacaccgccgcgctggtgaccgaagaactcggccacaaggcgatccgtgccaacgacaacgacgccgaggacgcactgctggcctcgaccggtgaaaaccagggcgaagccacccagcgtccgccggtggtcaccatcatgggccacgtcgaccacggcaagacctcgctgctggattacatccgccgcaccaaggtcgccaccggcgaagccggcggcatcacccagcacatcggtgcttaccacgttgatacgccgaagggcgtgatcagcttcctggataccccgggccatgctgccttcacctcgatgcgtgcccgcggcgccaagctgaccgatatcgtggtgctggtcgtggccgccgatgacggcgtcatgccgcagaccaaggaagcgatccagcacgcccgttcggcgggtgtgccgctgatcgtggcgatcaacaagatcgacaagtccgacgccgacccgatgcgggtcaagaacgaactgctgtccgagcaggtcgtggccgaagatttcggtggtgacacccagatggtggagatctcggccaagaccggcctgggcatcgacgacctgctggacgccatctcgatccaggccgaactgctggaactgaaggccgtcgacgaaggccgcgcctcgggcgtggtgatcgaatcgtcgctggacaagggccgcggcccggtcgctaccgtgctggtgcagcagggccgcctgaagaagggcgactacctggtgtgcggcatccagtacggccgcgtgcgtgcgctgttcgacgaaaccggcaagcagccggaattcgccggcccgtccatcccggtgcaggtcctgggcctgtccggcgtgccggaagccggtgacgacttcgtggtggtcgaggacgagcgcctggccaaggacgttgcccagcagcgtgagaccaagcgccgtgaatcgcgcctggtcgccaccgccggcagccgcatggaagacatcatggcgaccctgggcaagggcgagggccagcaggtcctcaacctggtcatcaaggccgacgtgcagggttcggtgcaggccctcagccaggcgctggtggcgctgtccaacgaagacatccgcatcaacgtgatccactccggcgtgggcggcatcaccgaatcggacgccaactcggcggccgcttcgaaggccaccgtcatcggcttcaacgtgcgtgcggatgcttcggcccgtcgcatcatcgaatccaacggcgtggacctgcgctacttctcgatcatctatgacgtgatcgatcaggtgaagcaggtggcctccggtctgctgggcgtggagatccgcgaagagatcatcggtatcgccgaggtccgcgacgtgttccgcagctccaagctgggcgccgttgccggctcgatggtcatcgagggcgtggtcaggcgcaacaagccgatccgcgtgctgcgcgacagcgtggtgatcttcgagggcgagctggaatcgctgcgtcgcttcaaggagaacgtcgaggaagtccgcaacggtaccgagtgcggtatcgcggtgaaggcctacaacgacgtcaagccgggtgaccagatcgagtgcttcgagcgtatcgaagtgccgcgcaccctgtaa

SEQ ID NO: 517251 - DNA, 612 bp, Stenotrophomonas maltophilia
atgggggggtgtagtgaggaaagcgttgcgcctgcctggtgtcgggtggggcagcgggcgccggacggtgcaggacacgccgtgaacccccctccggggtccggcccagccgctggcggctgtgcgttcgggcgcttgcgaggcatgcctcgcaagcaagcgccctcacccttgggggctcggccgcggcttgctcgtgtgcgcttcctgcgcacaccgcaagaccggggtcgggcgtcctgcccaacccgcccgaggcatgcctcgggcccatgccgcggacggtcctgccccgcccggcccccgctgccttcccatccccccgcgagcgcggtgggttggctcttagaagcaagagcagaagcagtgcggaccaacggtccgcacccaccaaagcacaagacaccacagcagcggcgcgccgcttccgaagccatgaacccccgcttttgcccccgctttcggggggcaggccgcgcccgcgggacaccgccagggagtgggagagggggctgcgcaggaccgttggcgccatggatggcgccatcgagcccccatggacgggtttacggcgtgtcctgcgctgccccctctcccactccaaaccgatag

SEQ ID NO: 517252 - DNA, 462 bp, Stenotrophomonas maltophilia; identical to SEQ ID NO: 498158

SEQ ID NO: 517253 - DNA, 951 bp, Stenotrophomonas maltophilia
atggctgttaaacctgtcggcacggcgccggagccggctactgtcgtgcagcatgttgccgacacctttaccgtcgctgggcttggggtcgggcctcaaatgtctgagctcaagcggcgcgaggccaagtggtggcggcgcgggaagaccgtcgcactgatcggtggtgttctcggcattcttgccgttgttgcgatgggtgcggtgtcaatcctgtggcccgccagcctgtccatgagtgaattggacgtaccctcgcagattgcagcggccctgccctcggaggcttcctcggcgctagacgcgattgacctcgcgaccacgggtatgaccaaaacgattttggcgctcggcttgtatctgggcatcctgattttcttcgtgggcctggggatgtggatgattgctgagacctctttggcgctacccgcggtcgggttttcgttcgccgcgctttcatttcttgttcaaagcacgggcagtttggattctgctgattcagcgaggcggacggagatggctgtagtccgttccgttgaggcctcggctttggcgagcacccccgcagggttgtatgtacgggcgcaggaagccctatcgcgcgaagagctgaacgccaaggacagggctctactgaaggctgcggcagactcgatgcagggtgcatcgcccggtttcgtaccgcagccacgcgtggccgccctcatcgaacaggctgcttacggcaaggcccgttctccggccgcagttgaatacgccgaggcccggtccgtaaaaagcaatctgttccgtgcgctgacctcgatctttgctgttctggcaggcacaggcgcagtggtttccgtaaccctgtgcctgcttggcagttcggtgggccgccgccgccagcgtttgtcggactccatccggacccgtcgtgccgaagctgtcaaatcgggtggagcagaatga

SEQ ID NO: 517254 - DNA, 843 bp, Stenotrophomonas maltophilia
atgccagtactcacattgtacccgcatggcgggaagggcggtgttgcgcccatgaaaaacagccatacccgcgccctcaggggtgacgttcagggctggtctcacggcgcgacacgccgtaacaccgagttcctcatgtcggtccgtgaagaccgacttaccggggcaggggttgctctcacacttactcttcgggattgcccgcctacctctgacgattggcacaagctccgccgagcttgggaactccgtatgcgtcgctcaggcatggtccgtcttcactgggtcacggaatggcagcgccggggcgtaccccacctccattgcgcgctctggtttgaggaccggtacgacattgcctctgcggtagaccactgggtggcagtggcaggcgcctacggcgcgggccaccgtggtcagcatggccgcatcatcgatggtgctgtgggttggtttcagtacctcagcaaacatgctgcccgtggtgtttctcactaccagcggtcaatcgataacgtccctgaggcatggcagaccaagacaggtcgcgtatggggcaaatgcggcgaatggcctgtccaggagaagctgaagatccatctccaagaccaattcggtgacggcggctggttcgcctaccgtcggctcgttcgctcttggcgaagggctgacgcccggtcatcaggggatgcgtaccgcatccggtcagcgcggaggatgctgcaactctccgatccagtccgcgcccgcctgatcgggttcatggagtggatcccttacgaaatccaaagcgcccttttggccaacctggctatgcgtggctatcagatccacagcatctga

SEQ ID NO: 517255 - DNA, 597 bp, Stenotrophomonas maltophilia
atgccgctgccaggcgcgggcggggcatgcaccgcacgcgcgatcgggggtgatcgagagagcatttctgcaggcgcgagcgcgcctgcaggccgccggcgagcgcagccggtggccaccaccgggcaggcccggcctgaccggtgcccgcgcgccctgggcgagggaactgccggcgccgaccggcgccggatctgcgcacgacatcgaggtcgaccagcgccaggccgggacgtggctggcgctgcgatcgcgctgtttccttccagcccggccgcgctgcagctgcagcgcgccgggcgtgccctggacgttggagctcgggcagctggccagcgcgcctcgatgctgccggcatcgagctggccagccgttggctgtgctcgtccacgcctaatccacggccggcgtgcggtgcacgccgcggcccggccccggagaacctctatagatcgcaggggccgccggcagcggtggagtaggggtgggcgaggagcgccgcgacctgcagggcggcggcgcggtggggaccaggtggcgggatttatcccgccacgtcgctggcgctggccagcgccggccacggcgagcgcgtag

SEQ ID NO: 517256 - DNA, 639 bp, Stenotrophomonas maltophilia
atgccgaacgatccaacggcgcgaagtgccagcagcagcggcggatgccgctgccaggcgcgggcggggcatgcgccgcccgcgcgatcgcagttgatcgagagcatttctgcaggcgcgctcgcgcctgcaggccgccggcgagcgcagccggtggccaccaccggtcaggcctggcctgaccggtgcccgcgcgccccgggcgaggggactgccggcgccgaccggcgccggatctgcgcacggcatcgaggtcgaccagcgccaggccgggacgtggctggcgctgcgatcgcgccgtttccttccagcccggccgcgctgcagctgcagcgcgccgggcgtgccctggacgttggagctcgggcagctggccagcgcgcctcgatgctgccggcatcgagctggccagccgttggctgtgctcgtccacgcctaatccacggccggcgtgcggtgcacgccgcggcccggccccggagaacctctatagatcgcaggggccgccggcagcggtggagtaggggtgggcgaggagcgccgcgacctgcagggcggcggcgcggtggggaccaggtggcgggatttatccggccacgtcgctggcgccggccagcgccagccacggcgagcgcgtag

SEQ ID NO: 517257 - DNA, 408 bp, Stenotrophomonas maltophilia
gtgtacgaaaaaggaaaggccgaaggactgccttcctcgcgttgggtgcgcgcggaagtgcgtctgtacggcaagcacatggaaatcccgctggatgtgctgttgaacccaggtgcgtacctgcgcggttcgtacagcgcgctgcacgatctcatcaagggcgtgtgcactcgactgcgcacgatccgcaagcacgtcgaagtatctgccgaggcaatggtgctctggatggagcgtcaggtcggcccggccctcagtgttctgcgcggagcgttcggagattcatggtccgacttctgcgaggcccgcatcgtccgtgacggtcaccccggacgttttcgcggtattgccaagggtgacgcactccatcgtttcgtgagggaagaactatgcccatctgccgcgtaa

SEQ ID NO: 517258 - DNA, 705 bp, Stenotrophomonas maltophilia
atgactacgcttgatgacattgccagggaccttggcgatacattccctcatcacaaggtatgcctttcactcaaggatgtacctcaagatgtcgcattgcccagaagctgggagaacttcggactcaggcccgacgtcgccccggtctttcctgctggctggaactcattctccaatgagttcccatcgaccattgcgctgttcaacggctgcctgctgggcacagcactactactaggtgatgaaattgaattggcgtacatctttcacgatggaaacagcctctactactacgtagggggaaggcccgtcgaaggtggagccgcagagaccttcgagttcaagcatctgcccaggagactgcaggacttctatcgcgaagtgcacgacggatataccttctttcctgcacgctccatgggcccgcaacgccttggcgaccagtcacggatctccgaactggtcgacgagtcagacgactcctttgcagcaggttggatcaccgtattctcaaacggcggcggagactatgtcgcagtaaacgccgacaaccatggtgattcggatggcctgatttggtggcatgagaatcctgaaattccagaattcgacattgatgtcttcagcgtcatggatgcatggatgaaaatttttctggaggacaccaagcctcgcgagccaaggaccaagtctggtgcgcgatga

SEQ ID NO: 517259 - DNA, 288 bp, Stenotrophomonas maltophilia
atgaacatcaacaccgaaatccatggcatctgggtcttccacggcgcaggcgcgcgcttcgccggaggtgtcttcgtcagccgggagtcgggactgacttgggccgctaagcactccctgacaggcgtactgacccgctatccattgaatgaaggcgcgtacgaccaagcactgcgcttgggcaccttcacgcccaagtgcccagagcaatgcaatgccctcttcattggacggtttacatgcgcgtcgatggagcatgtacacgtcgaagacggcataccccagtag

SEQ ID NO: 517260 - DNA, 246 bp, Stenotrophomonas maltophilia
atggcgtggatctactgggtgcagctgtggcctttgatctgggtccgccttgagcgagccgagcaccgcaggtccggcgagggcgaagaggcgcgggtgtctgagcgcagcgagttcccgcgccgtccctcgacgggccgaggagcgcagggtaccggtgcgcagcaccggctcgcgacctggcggcgcgtttcttttggttacttttctttgcgtacaaagaaaagtaacgcccatgaacaatga

SEQ ID NO: 517261 - DNA, 348 bp, Stenotrophomonas maltophilia
atgaacaccgcacgcttgttcgccattgctttgaccacggctgccgcgctggccgcggcaccggccttcgccgatccgccgcaccatgcgcgcggcaacgggccaccgccgcacgccggtggcccgcacaaccgtgatgcaccgccgccgggctggcagaagaaggcctggcgtcgcggtgagcgcctgccatgggcggaagtggaccgccgttactgggtggatgactatgcgcgctaccacctgcgcgagccgggccgcgaccagcgttgggtccggcagtccgatagcgagtacctgctggtggagattgctaccgggttgatcatcgacgcgctgcatcgttga

SEQ ID NO: 517262 - DNA, 288 bp, Stenotrophomonas maltophilia
atgcagacatcaagagcaccactcgccctcctcgcgcttctgctgtcagcgtcgtcaggccatgccggcaacaacagcccagcccacagtccagccgatgaaaaagccatcgaacaggtggtcgaatcgttccgcacctcgctgatcaacaaggacaagccgacctacatgggcctgttcttctccgacaaaccggaagacttcgatccgcgattcacgcagcccggccgaatgagtgatctgtcagactggtgcccaccgttcgtccatgccagccagacccgatga

SEQ ID NO: 517263 - DNA, 216 bp, Stenotrophomonas maltophilia
atgtcctgcgtgcgccccatggattcaagcaaccgaccggacagcacgaatgcctcacccagcgaacgcgacaccgccttccggtccaatgcctctaccgtacccagtccaatcgcgatccgcgtgcgcgcccgcgactccgacgcggcaagcttggccttgatccaggtcgccaacctcaggaaaccgtgcggctgggtgaccgccagctgctag

SEQ ID NO: 517264 - DNA, 240 bp, Stenotrophomonas maltophilia
atgccccactttgaattcataacgctgcaaaataagagcatcccaggtagcgttgccacctaccttctgatcgtcaagataaaagaagccacctgcaacccacttcgcccgttccagaagttcatcaccgtcatcaaaaagatgactgaatgccgcgcaaaacgcttcttcaatgtctttattagtgcacatattaaaagctccactggtcatcagaaaagtccttgtcgggcagcgtaa

SEQ ID NO: 517265 - DNA, 1611 bp, Stenotrophomonas maltophilia
atgctttcacccgcaccgtgccgccactggctgacctgggcattgctgctggctgcgccgatggccgccgcgcaatcgccgcagtgcggcctgttcaaggccgaagaaggcagcggcacgctgcgcgtccaatcagccaaccgcggcgagcaagcgttcttcggcagcgcaccatctccagtcgtttttcagcagatcgatgggaagctgcagctggtgaatctggaatacggtgcggttcgcgaattgcggatacgcgatcgcggccgcactgtcgagatgagtgacacgatctttagattgcaggtaccggcagtgtgcgcagctgcagccgcgccgacggagggaagctgcctagccgatgcggcggcctgcctggacaatcgtcacgaggcgacgccggccgcactggaagcagcgtgtcgcgagggtgtgcccggcctgtgtcttgagttggccgatcgttggcatgacgacgcaagggcgccggccgagacccgggcatccgaacagaaagcagtcgtcgatagggcgctggccggcatcgagctgcccgccccgtgccgcgaggatggcttcaacaacgggacgcccgcctgtatggctgcactggaagccgataaagcgctgcaggaaaaggtcatcagggccgtgatgggtgcggcgatgcttgagacgatgagctcgctggcatccacatacgcacccgtagtggttccatccggacggcgcatgcagttgctgcaattttgccagcagatgccctctgaccgcttctgcaagcgcgtggctgaactggcctgggactcgggcgaccacctgcaagcagtgcgggcactggccctgtcctgcgcaacgggcggtgaaggcggcgactgcgcccgcctgcccggcttgcaggcagtgggcccagcgttgaggccacaaccggcaacggtgctgccgtgcggcagcttccattccgatggcagcttcatgaatacgttgacgttcggcgatgcaggcctggtcggcaacggcgggaacagccagctgcgtgcgcggatcgaagacggcgacatccgcattcgtcacgacaagggcggcgacttcgtgctgcgcccgttgccgggtggcaagctcctgggcctggacaactggacccgctacaaggtgttcaccgccaccgacgaaggcccttccaactgcagcgcgccgaagcagtacacggtgctgccgctaccggaggactgcccgcaggcactggccgatggaggtgccaatgcgtgctgcgcacagggcagtctgcagggctgccatgtgctcggaaaccgcctcgcgttgtccgagcagtggccgcaggcggctgcccacttcaccaccgtgtgccgcgcgggcgtgcgcgagggctgcgagaatctggtcaccgcccacggagaaagccccgaggtggatgcccgtgccacgctggaacagctctgcaacgccgatggcagtggccaccacgtcgcctgcgacgtgctggaaaccggcaactggagagcactggaactgggccgcgccctgcagaaggccatggaagatgcggcggaagggggcatcccgccgcgcaactccaaccgcaagcgctga

SEQ ID NO: 517266 - DNA, 993 bp, Stenotrophomonas maltophilia
atgcgcttgctgaccctgctccccgcactgctgctgttcgccgcgctgcctgcgttcgccgacgcgttgcgatgtggcgagtatcgcagcaccgatggcggcatggcgctggtgttcgaatcatcgactaccggttatcgcgctctcgatggtcaggaacgcgcgcctctgcgcatcgaccgcggcccgacacagccacgcctgctgctgcttgatgacggcgtggcgcaacccctgcacgtcagcgacgacggacgcaccgtagacgacggggtggtgagctacacattgcacactgcgcaggcctgcgcggcatcgccaacgcctgcgcacggcagttgccaggcggcgggcagcgactgcttcgcacgcttgcctggcgcgcccttggcgcagctgcaacgcgcctgcgatgaaggcgtgggggcggcctgctcggcgctgctgcagcggacgcgcgaaggtgcgcgcgacgcgaccgggcaggtggacgaaggcctgcagcgtgctgcagcggatgacgctgccgctctgcccaccacagcacgcgcgtggctccagaagctctgcctgcagcagcgcggcggccgcttctgcacccaggttgccgagcagcagttgattgcgctggacccggcgttggcggtgcaggccctgcaggtggtctgcgaaggcggccgcgtcagcgcctgtgagcgcatcgcgccgctgcgtggccttggcgctgacctgcgcctggttccactccagcacgtaccgtgcggtcgctaccgcgctgacgtgaacagcacgctcgagatcggcgacggcacccgtgcccacctgcgtgacggcgccgtgcaactgcagcaggacggcgaaacccttgtgctgcgtcagcttggcaatggcgatctgctcggcatggatgcccgcaccggctaccagcgttaccagcgcgtgccgggcacggcacaatgcacgtccccgcgcgagggccgtggttcgccgtag

SEQ ID NO: 517267 - DNA, 768 bp, Stenotrophomonas maltophilia
atgtctgattctctcgatattggcgtggacgtggactccaaggagttcgtaccggcagtggccgaccgcaaggccggcgacaggatcgccaacacccgggccggcatagcccagtggctcaacaccttgccccagcgatgccggattggcatggaggcgacggggcggtactacgagttgttggctcggatggctggccaggcaggccacgttgtctatgtgatcaatcggcgcgccagtgctgcgccagatgctctacatggccgccatggggctcaagcggtgtcgccgggggcaaccgctctacgacgagctgtcaaaacgcggtcaccccagcaccgccgtcttcaacatcctggccagaaagctggccaggatcgcctggggtgtcttcaaaagcggccgggacttcgatccggccatgctgaaggtgggtcaagcctgcttccagcaggcttgaccacgaacataggatctcgactattgcctgccatgggcctgaccctgggggcgttggcctgctactgctcatccttctggcgtcttcccgcagccgatccacacggcaatgagtccagcatcgtgcacggccgtggcagctcgcccggaccacagcgcttgctgaccaccgacgcagcaccgtatccgagcgccgcatggcgcagttccgcagaccagcccacggcgcgctttgggcctgtctgggcggctttacctgggcatcaatacgctgtccaccaggcccacgtttgccagaggcggcgctga

SEQ ID NO: 517268 - DNA, 861 bp, Stenotrophomonas maltophilia
atgttcgagctgggatcgattaccaaggtgttcacggcgctgctggtattccggctccagcagcgacagttgctcgacgtcacggcgcccatcggcctgtatgtggagggactgccttcagagtgggcatccacttcactgctgcggctgctgagccatacctccggcattcccaattatttgaatgaagacaacttcctgcgattgatgccgacgagtccgcaaccccgtgaactgttggcaggggtggagcagatgccgctggagtttgcgccaggtacgcggcatgcctattccaatacgaactacattctgctcggtctggccatcgaacatgcaacccgcatggattactggaacgttctccaggaagagatcctgtcgccgctaggcatgcgcgacgcgggaccgcgccgctcagaggatcggcgccggattgcccaggggcatctattccaggatggccagtggcacgacccaccgcccactgctgcgggttcggcgtgggcggccggcagcctgttggcgagcatcgatgacatggcacgccttgctgtggcattggaccagggtcggctgctacctgatggtgcgctgaggcgcatgtggtgcgacacggttctttccaacggaagcaaggcgggctggggggccggctggcaggttgccgatgacggcaatgtagtcggtcacggaggcggaaccgcaggctttactgggtacttgcggcacgttcctgcgcaacgaagaacggtcgtggtcctgatcaatcgtgccggagacatcaatccccagcgcattgcagagcgcctcgatcttgggatgcgccgctgcccggattttcagccgccgctgctgtaa

SEQ ID NO: 517269 - DNA, 123 bp, Stenotrophomonas maltophilia
atgaatgacaccgcccccgccactgaagcaacacacagcagtctgcccatcattcacgtcctgatgggattcatctgcgtctggcaccgacatgaacccgggcaggcccgtgatgaggagtga

SEQ ID NO: 517270 - DNA, 855 bp, Stenotrophomonas maltophilia
gtgaccaaggcggttgccgggcgcaatgacgtgggcgccgattacccggatcgggtcgcgcagacggtcatggtgttcgaactggacccgatcccggatgcgtgggaaatggactttcattcgcatcggaaagcgcagctgctggtggccacgcatggcctgatcacgctagagtcgccagccggcctgtgggtggtgccgccgcagggggcgatctggattcccggcgggttgacccaccgcgccagcagcagcggaaaaccccatgggttcgtcgtgttcattgatcccgaggcggttccgggattgccagcccactgcttcgcgatggcgatcaccccgttcatgcatgccctgctgcaacgcaccgcacgcctgccgctgcagtacgaggacggcagcgcccatgcccggctgatgaccgtgctgctggatgagcttgctgcggcgccgccggagtggcttcacctgcccatgccttccgagccgcgactgcgcaccctggccaatgccatgctggctgcaccggccgagcgcgcaacgctcgacctgtgggccggccggattggaatgagcgagcgcaacatgtcccgcctgttctacgctgaaaccggattgagcgtgaggcgctggcggcggcagatgcatgtgatggttgccctgccgatgctggcaaggggcaggacggtgcagtccattgccgatgaccttggctacgacagcgctggcgccttcgtgaccatgttccgcaaggcggtcggcgccccgcccaagcgcttcctcgccgaacgcggggcctggctgcaggcgcccgacgcaggcgatcaaccgcgggcgtggcccgcctgcggttga

SEQ ID NO: 517271 - DNA, 1356 bp, Stenotrophomonas maltophilia
atgcaacgccacatatccgaagggcgtagtgcgcagtactacgcgcttattgaaccgttgaacgagccagaggaaggcgaagaagatcgaggggcgccgttgctcattgatgcgattccggtagatggagcgaagaactatctggagtcaggggcggatctctcctcccttgatttcctgctggcatatgcggaagaggggagggggccaaccgaccagcttctgtatgagacgatccagctgatcacactctccgatactccctctgacggggcgatcccggtgtcaacggccgttctggacgatcgtggtgacggcgagcgagagcagctgttcatgacgattgagaagatgtcgcctcaagatgttgaggtctgcggaacaataggcaggttttccgtcggcaagcctgcaagtgaggctggcatcagaaaactgctgaagaatgcagaagcgggagtaccccatggtatcgcgatctatgatgtaggccaggcaaacttcaacgcggttgtcgattgcaacgaacatcctcgcctcttctttgatttcggccgcccgattgggctcaaggccagaaccaaaccactgcttgtcaatttcaatcctcttgcgttcaatcatgctgaaccagtcgtgctctctcatctggatcaggaccattggctgtttgctgtggagtccggtcgggcagcctgggactcaacagaaaagtactggaaaacagccccgaagtatcgcgatagtgccctgcaaaggaagtggattgtccgtctgccaaagggtgttctgtactggggaagccacattcatttcctgcggacgctagcgagtaatggttcacttttcgtctggcctgaagggagtgtccacattcagggggcgagcatcggaatatggtcctgttcgccctccgccggctcaccgaacacccagagctacctgaagaacaacagctcgctggcactcagggttgattctgcacattccgccgccgtgttgtgtggtgatgccgactacggctcatttgccccaggagttttcgttggtgtaactgctgtagtcgctccacaccacggaggtaagattcaactcggcgctacaccagccgtgcgggggccaggtcgcatggtcctctcgacatatgagaatgcctatccgagcgtgccccatgaccaaaccatcgccgacgcgctgaacaatggatggttcgtaactcgcacggatgcaagacatagctgtggccgatgcggcgaggttcatggccacaagtacattccactcgctggaacccagccagaatgtggatgtggagttgtcacttctgcgcagatctgcctgccgcacgtgcaatag

SEQ ID NO: 517272 - DNA, 585 bp, Stenotrophomonas maltophilia
atggctgccccgcttgcccgtagctgcctgtccgcgctgtgctgcctggccctgcccgccctggcccaggacgcctcgttcggcttcggcgaacaaaccacccgcaccgaacagaccacacaatccagcagcacccagacccggaccagtggcgcgatgaccacccagaccaccaccagcggcagctcgcagtccgagacacgcagcgaaagcaaaaggatggacgtggacttcggcttccacgacaacagcgatgactggggccatgaccgccggcgcgatgaccgcgatgtgcgcgacagcgacctgttcggcagctggacactgggccaggagaacggcagcaactgcacgatcgagctgaagaacatcgaatggttcggtggctacagtgcctatgtgcctgccggctgcccggatggcttcttctcggccaatcgctgggtgctgtcgggcaaccagttgctgttgaccgacaccagcaacaccgtattcgggcgcttccgcgcgtcgggcggagggcgttggtcggggtatcgtgaaacggatggggcgcgcttgtatctcaatctcaaggggcgctga

SEQ ID NO: 517273 - DNA, 1251 bp, Stenotrophomonas maltophilia
gtgtctacgcccggatcctacccttcaggaatgaattcatccacacgcgaggaacccgctctgtggtcgcgtgcggcgtcagtactgggagtcatcattgcgcatcgctgggccttcgctgctgccggcactttggcgatggtggtgttcttctggcgcatccgtttcctacccagcatcaccctgaccgatatcggtctggttgcgatcgcgatcgtggtgttttccatcctcttgatgcttgttttcctagcgacgctgctgattccagccgcgctgctagtcgaatggcatcagaggggaatgatcttcagcgcgagtggtccgcgtagcccagggtcccgagagcgacacctcgcattaaacagcattctctcactccttgtgggggctgcagttgcactgctccttctgtacgcgtcactggccacagcatttggcaagagccatgaccatgcgtttctcattctcgtaggtctgggcgccattgccgcactgggcccggtgcttcgcaaaaccacaccttcagcaaccgctgagcgtatagcgaacacacgcccttggagggggctgtggccactgtccctggcgtttgcttctacggcactgtacctactgtacatgcccatcttcgttctcgtggtgattggaacacatgaggcggctacggccctgacggactggcagttcggcctcatgctgttgcttcttccaccgctccactatctgttcttcctcgtcctgagttcacccgcacgccacaaatccattgctgccctcgctataattttctacgtagtcatgtttgcaggcacactcactgaagcgcttgaccgcgctgcgaacatcttccagctgggcctgttgaagcatcacagcgtggtggtctccagcgagggttgccgcatcgctaagtcctcgcgcgtggtgagagcgtgccacaaattggaaggacccggtgaagccctttacgagatccgggacgtccaaatcctgactcgccttggcagtcacgcagtcattgcccgcaaccaatggacccccgcgcagcgaaccggatcggtgcccatacccagtgcacatgtccggtcatggttccctaccgctcctgtgaagggcttgccacgggcacctcattcaagggcacccgccgccatggtcgacattccaacgcaaagacccgtccccacgccccgagcatcccgaaaggcgcccgctcggcgcaagacggtcagctgcgtggcgcggtag

SEQ ID NO: 517274 - DNA, 1050 bp, Stenotrophomonas maltophilia
atgagtaaggagttgattcacgagcgtgcttacatatggggcgaggatgggacgatgtacctcactcaccagtacgacacgacgttcgatgtgaagaggatcgtcgtaatgatgggtaggctgatgcggagcaagggagacctgttctctgtcagcagaacacatggttgggatacggtgcaaagtacggatcttggtgaggatcttttgctttgcattcgatccaattttcaggccattgacgagcagttcccccagcacaggcagagcccgcttttcacgctgttcaagcgcttcttcaggccgttctcatttaccagtggtcgtctctggcctgagatcattccctacatcaatgaagcggtggacaaggtcagggcgtttgccaaaggtagtgcgattggtggccgcatcaagttgctcgcaaggtgtgagcgatcgaatgccgcgacaagcaaaaagctcttgaccgcgcttcggaagacgtactcgaagttgctgacgatccggctggatttggggtactactccaactactgcccgggcgtcggctatcgaggtcaagtgatgaccctcgaagaggcacaggagcaccgcgataagctgctcgcacgaattcgtaaaggaccggggtccagtcatctggctggctatatgtggaagttggagtatggcttggagaagggataccacttccatctggcaatcttctacgacggccagaaggcctcgcacgatatcgtccgtggcgacgaactcgggaggtattggaaggaggacatcacgggcgggaaagggatgttctacaactgcaacaggaacaaggctgactatgtgcggtgtgggatcggcaccattgcgcgatctgacgaccagaagtggtcggccctgcaggacgcactgcgctatctgaccaaagtggacctctatctccgattccgtgtagacgggcgtagcagaaccttcggaacaggaggtccctataagcgtgtgcgcggagctaagacgttccaggcaggtctcggccgcccactggcgcccactctctag

SEQ ID NO: 517275 - DNA, 777 bp, Stenotrophomonas maltophilia
atgaactctcttgccctgactctcgataccatttctagtggtacttcatgttccattcccaagagttggctgcaggggcgtacggcctatgggggcctttccgcagcgatggcattgcagctcgcgatgaaagagcactcgacggacttgcctccgctacgaacagctcagatatcgttcataggcccggtcacggagtcagtctgttttcggacggaggtgctgcgccgaggaaagtcggtaactcaaatcggtgttgatgggcatgtggcggatgcattagccgtgagggcgtcgttctgctttgctgcggaacgtcaaagtaccatccatcacatgcgcgctcagcgcccacacgtaggcccgccttcggactacgacgaatctatcgcttgggcgaacccgcctggtttctttcagaacttcgatgttcgattcgttggcgaatcgctacccgattcatcgtccaccgtcccggagcttctggcctgggtgcggcttcgtgatgccgatgacataagaccggaagtcgccctcatggcgacgggagattctttgccaccggcggcgatggctatgtttgccggcccgaccccaataagttcgatgaactggacaatcgacttggttggccctgcaggaacgcccggatggctcttgcttcgatcacgcagtctagctgcttcaaatggatattcatttcaactaatggagatctgggacgttcacggtaatttggtcatgctgagcacgcagaccgttgcaatctttggctaa

SEQ ID NO: 517276 - DNA, 996 bp, Stenotrophomonas maltophilia
atggcagaggccaggtcacggacccttcattacaagcgagcgatcctcaagaacggagacgccgccgaccttcagcagttactgacagcggcgattgcggctcgcaaagacgttgaaacgcgtgagcagtccctcggtgagggcgctggcactcgggtcgtatccggaacccgcgtttctcacggcatgctcactggacgcctcatgcagtacaccgctggtcagaagcaaaagttcttcgagaaggacgctgaggccggtgattacaagcttgatacgaccgcgcttccgacagctgacgcgaatcaaaggcgagagttcgttgagtcgttgacccttttcgccgtgtctaactctcatgtgatgtttgttgcgacgctgcatcttggttccaaagccatggaagaccacttcacgtggctgttgcgggaaaccggggttttcactaatgaggactacgttttgctagcggatcagcagtcgcaacatgctgaacagcagttggcaggctctggcgttgatggtgtgactatcggtgcggatctggagtttgaagtagtcgagtctgtacctactgttcgtaagaccaagaatcgtgagacggtgcccggccataagctccttcgtcctatcggcccgctggcggaagcgttgaaagagctgctcggtgatgcttttggtgatgctccgttgaagagcgcattggggcgccaggataggatcgctgtcacccttgaccttaagtactcgaataggaacaagaccgaggaaggcttcaagttgatgcagaagctggcagttgccggcaggcatttcgacgagggagagactacagttcacttggtaaagggcggcactttgaagggatcggatctgaaggtcaggacctctttgccggtgagaattcaagactcggggctcattgacgagattgatctatgggtacgaattcacggatggttgcagcaggcggtagcgacgggaatcgtccactga

SEQ ID NO: 517277 - DNA, 933 bp, Stenotrophomonas maltophilia
ttgaaattgaggaagaactacatggctcgtcccaaacccgccagccgaattcccgactggttcaatctggatgcatacagccacttatccgagttggatgccaacggttggttgagggtagtaagcggccttcgcatgctgctcgacgaaatacccgatctctatcggactggagatgatgattctgacctggacctggaagagcttgaagaggtctttgtaggcttccaggaggatgaaggcagaggatgggccgactggaagaagcaagaatatgttgtggatgaggctgtctttgacttcggcagtgtccagtcactgagcaactggaccgtcgcgcatatgggcgcaacacttgatcacatcgagaacggtcctgagttgttggtcggcatgagaacggcggttgaacttgaaaccaagaaggagttcaaagcagctaggaaggcattccagtccattgactatcttgaggagttttccagcacgccattctttgtttcactgagagactctaggcagaattcaggctctggggttgggcttcctaggcggagagcgctctcggtcaacatgcgagctcctgacgagatactccgtaaggacttcgaccggtggcttcgggcgatgcgcgctcttcaggggcatcaagctgcgaagaagtcatttacggacactgatttcaaaaggtgggtgcgcaacgcgtacgtcccgctgcttgtgctgactaagtggaaggaactcaccggtgcgaggatcacctacggtgacctctgtgaggcggcgttcccaccaatgagaagagtggaagtagatgacgttcgtaagactttcctgccaaacgctaaggcctgggcatcgcttgagaccattgatgctcttgccgcgcaggcagctagggaggacgaaaagtcggaaaattctggcggctag

SEQ ID NO: 517278 - DNA, 549 bp, Stenotrophomonas maltophilia
atggccggtaacagcagcaggttccggaggccgatccggtttaatcggacccgcgcgaacccaattcagcggttgcccttctaccgccagagccatgccaaggtcggggactactggcgaatgcccgaagcccatgggcatctgatgggccgagaggtggggagggtctgctgcatcgccttcctccaagctctcagggcggctgcagcggacccgcgcactagcgggagtgcccatctggccgatattgtctgctccgtggctgaggttcacggcggtagcgttggggaagtacagaggggaatcttggatggtttttttgggtgcggatcgccgctggtggaggccttgcttcgcggtatctgcgctgagaagggcgtcgaagaggtttacacaatggaccaactggaggcagcgctcaccgacctgtcttctgccagcgttgaggagtacgcagggcggcgcaacgttccggtccagtcgctaatccctgataggtccgaccatcctgctttcgaattgtcatcccaggacgcaaagcctcagtag

SEQ ID NO: 517279 - DNA, 207 bp, Stenotrophomonas maltophilia
atggattgcagcattgtacttgttgcgcctgaacgggcgcgctcggccgaaaaccggcccacatctcaggccgtactggccatcaggatagtccgcgcttgccacagctggttcagcgccaacgacgacctcaatacctaccgagtctgcctcgcacttttcaccgcggcactggccctcgaattctgggggcgcgccaatggctaa

SEQ ID NO: 517280 - DNA, 333 bp, Stenotrophomonas maltophilia
atgtatgtagtggattatgatccttatttttacgtgagcctagccaaggttttcgttgagtatggatatgacagctcgaccgctcaagaccgatttgatttcgttcaagcgcaatgcgagtcctacgatcaattcccccatcgactacttgcatacgacgagattttgccaggcttgaagtgcacttggtgcgagcgaaacggccgagtcttcatatatatggccgcaatcgtagacgacctctcaaagactgttgtatttgtcgccgccgctaaaggcagtcttggaagagacgagtttgttgcaaacatgcgattggactggaagccctag

SEQ ID NO: 517281 - DNA, 219 bp, Stenotrophomonas maltophilia
atgagaaactccgccgctaagatgccctaccaagaatccgttagcggatggctgagggacgttgttgccccaatagcgcaggcggcgcaggagggcaagggattccgactgaaagaaaacggagtagaccctagagagtttttcttggctgagttcaagaaccaacgagttcttgcgcaagctgccgaacatgactctttttacgacaaggctgtctga

SEQ ID NO: 517282 - DNA, 735 bp, Stenotrophomonas maltophilia
atgaccggcaatacagaaatagcgcaaaacccgaacagctcacgcgaggcggagctagacggccaccagtggcccgcttcagtccgcttcattccctactggggcgaccattactgggacgggatggatggccgaagggtgctcttgttgggtgagtcgcactatcggcgagagggcttgagcgaagccctcgaagtgacccgtcccttcactcaatcccatttccgagagatggcctcgccggtccggcgcggccgggacggccccttcttcaaagcactcgacctggtgctaatcgggcggcaggacttccaacttcaagatgccgcagaggcctggaagcgcgttgccttcctgaatctatcccaggcgttcgcaggttcccaggcaaatcaccggccaaggaatcaggcgctgcgcgatggcggggacgtattggttcgagacattctgccggcgctgcggccagatgtggtgctagtgctaggtcgcaccgcatggcgattctttagtcatggtgagccgcaactttgcttggagcccttcattgcccgacaggtgaatcgaggagagagcaagcgacgttacatcgaatccagggaagtctggtccctggactacgagggagggtcagccctgatgacgtgggtctatcatccatcgtggaacgtcgatacatggaaggaccgggcgggagcgctgcgtcaccttatggcgcttgcgaagcacagctga

SEQ ID NO: 517283 - DNA, 231 bp, Stenotrophomonas maltophilia
atgagcagtcgactgcacagagcaatcccccacctcaaagtttgcgagggagacccctctctgggacacactccttacatcgctttcgaagaatatctggatattccagggctcgaggatgccggcattcgcttggagttcgctaacaagcctagtcttggagaggtggaagacctgcggcagcggctgaagagcgctggactggtctttgtggtccagcggggagcctag

SEQ ID NO: 517284 - DNA, 462 bp, Stenotrophomonas maltophilia
atggatcatttcgagagcgtggtgctggacttcctacgggcggatcggcggttgttcatcaatgcacagtgctgcatccagctaaaccctggcaccaatcctgataccagcgggccccactggtattgcgacgcggtcgctgtgagcgtccgggaccgatcggctttcctttgcgagatctcttatgcggtccgccttcctgcattggtggcccgcctgaaaagctgggatcagcattggatcgccttgaaggaggctttggctagggactgcggcatccccgtcgattggacgcttcagccatggctgttcgttcccaatgaccgcgtggatcgcttgcgtttgggcgcacgtgcgctatcactgatgccagagccgcggataacggccttggaggaggtcctcccttggcgctaccgatcttgggaccgtggagactgtttggattctggtcgtgactga

SEQ ID NO: 517285 - DNA, 294 bp, Stenotrophomonas maltophilia
gtgaactgtcaacgaagccagatcatctcgggactggagaaaaaacggcccattgacacccatcacgaagtgatctccctggaggacaccacagtgagaacaatggttggcccaatagctgacgccggcagtctgggagctaccgatacgcatgagcggcgcgacctgggcgacgaccgcctcgacggccggatccagggattcgacatactgcaggacagcagcatcagcaacatccagctcgccctcctcatcgaactccgtgaggcgaggcacccaaatggcagtgactag

SEQ ID NO: 517286 - DNA, 162 bp, Stenotrophomonas maltophilia
atgagtggattgaccgaacacgatctcagaatccttggcagctatgccagagatggcaaccgcgagctttactggaactacctgtcgcagctgccgggcgccgatgggtacgggacactgggctgggtgttgtacgcaatgacagcctgccggggcgcgtag

SEQ ID NO: 517287 - DNA, 426 bp, Stenotrophomonas maltophilia
atggcagcaatcagtttgttaaacgttctggactggacgagcggcctgggccgcaagttccgacggaagagcggcgagccttcgggcgtgaaagaagaaatcatcgtcaagtcccacgatgagtatgaaaacctcgtgggtcgctttgacgtgaccgatcgcgttcgcagccgagagctcgatgtgccggaggctgatcgggatttcgcgctggagtgcggcgccgtctgggacgagaacgcccaggtgttcaaggtgcccgacggacgcagcgaggacgaattccaggagtggtggccgaaggttccggaagatttgcgtgacacgcaatcgcggatcatcacgacgaagcttggacggcgtgccgagggctttctgcagggcaacgacatggggagggcggcgacagcctggccactcccttga

SEQ ID NO: 517288 - DNA, 210 bp, Stenotrophomonas maltophilia
atgctctacatggccgccatggggctcaagcggtgtcgccaggggcaaccgctctacgacgagctgtcaaaacgcggtcaccccagcaccgccgtcttcaacatcctggccagaaagctggccaggatcgcctggggtgtcttcaaaagcggccgggacttcgatccggccatgctgaaggtgggtcaagcctgcttccagcaggcttga

SEQ ID NO: 517289 - DNA, 1035 bp, Stenotrophomonas maltophilia
atgttcgtctttggccgcacccccaaagaggagtggttccaccatgatctgcaggacttccaggtcatgtccacgcagcttgtccccgaggaagaaggcggtcgcccccgtcgcgtgcttgccctggatttccatggacagttggaagactactcccgctctggcgccacgatcgagcgcgtatgcgcaggcgcaggcgcagttggtttgactcgaattcgacgactgggcgaggatctattctgctgtggcgtgcacggtatggtctatcaccgcagcaagaccgaatggaagcaacttcccaccaacttccccaagcccgagcacagaactctcaaggacgatcttgattcactcgatttcgacagctgggttgagtctgttgcccacgtgtttgagttcgacggcatggttccgctacccatcgatccggtcgagcgggagactgagcttcgccggaagtatgctgggacgcgcgctgagatcactgagagtcttaagagccctgcattcactcagatgcgtgccaatcttgatgttgccagcgtaaacgacctctgcggaacgggcgttgctgatctctacgccattggctctgatggtctgattgcgcactggaacggcttgaactggacacaccctgatccagttgcaaccgccgatctgctgcacgcctacaggaccgacgatggccactgcatctttgtctgcaccgaaggcactatcgttaccggcaatatctccaatggatttggacgcctgccgcatgacgcaagcgggcacatcaacttcaactccgcttgccaacacgggcaacagatctacatcggtactgaatatgcaggcctgtacgtctacagcctcgtaactggcgtacttgaacctttgctggaaggcatccccgaagagctgagagatgcgacgatcgttgacatcagttccgccggtagcgtgctgtgggtgctgacgccttgggacctgctgcgatttgatggcactgagtggcaggtcatcgttcaccctgacaacggatga

SEQ ID NO: 517290 - DNA, 849 bp, Stenotrophomonas maltophilia
atggactaccgcgagcaccctgcccccgacgacctgagccgtcacgtacagtgcatctggtggctgcgcgacgatgcacccgggaatgacgtgcaggtcatctatcccgatggccggtgcgagctgctggccgaactgggcgtgccgctgcagctgcatggcgcagaaggccgtatccgttccgatctaccgttctgtttcgctgcacagcagtgcgggcctatccggctgcaagccgctggtgcggtgttctgcatcggtgtgcgcctgcagccggccgcgagcgccttgatcgccggtgcccgcttacccggccttcgtgaccaggcccctgacctgtacacgctggatgcctcctttgccgagaccttcagtgccgccgcacgcgccagtgcggtcatcaacacgcccgagcctctctggcaggctctgcgggatcgttgcgccagcttcatcctggacgagcgtgttgaacaggccgtagcagatctggatgcgatggagggtgacctgcgcatcgccgaactggcgcggcggcttggcatgtccctgcgcggcctgcaatcccgctttctggctgcggtgggcatgactccgaaggagtacgcccgtgtgtgccgtctgcaggcaattctgcacacacttgatgaggaagccacgagcattgccgctgcagccgcacgccatggctacagcgaccaggcccatgccacgcgcgaccttatccgctggacaggagtcacgcccggccgactggcgaatgccctgcgtggcgatcgtggcagcgacgatgcactgcgattggctgccgccttcgtgcgcggcaccagcggcggccgcttactgtga

SEQ ID NO: 517291 - DNA, 984 bp, Stenotrophomonas maltophilia
atgttggacgaagtcatcaagagcgccagggagtacttcttggatagagtggcaagccctttgactggagcttttgttttgtcatggtgcatttggaactacaaattcatcctaattattctttcagatgagcatgtagttcgaaaattgcaccttgtacgagcaataatatttcctgactggacggcgacagccatccagggatttgccgctcccctggcgaccgcgctcatctatttgttcttgtacccacgtccagccagacttgtctacgaacatacgcttaaggaaaggcggcggacgactgaaacgaagaggaaggtcgagaatgaagacgtccttacggtcggcgactcgcaaaggctgcgcgagcaatacgctcagcgccaaatagcccaccgggcggaaatctcaaaacttacagcgaacatcgagagtcaggaggatcaaatcaagctacttgcggacagagccgagaaggctgtccaagagctggccgaagcgcgagtcgcctcggatccagaaggaagactcgctgcatttgatgcagcggagatgttcaacctggagcacgaactggcaattgccaatggaaagatcgaagagctccagagtcaaatagactccgcatccagccagcgcagccaagaagggctgtttgacgaatggtcctccgaggaaaaaccaagcccccccagtaatttcacttggccacatccagattcccgcgtctatcacgccatgcgtcgtgcactgcagaagctggccgagtcggaatatcttgtctttccctctgactacaacaaggaagctggaatctcaatcgggttcgcgcgatacatatttgacttgctcgctgatgcgcacttggccacttgggaggcaacgaactcggaaggggattccaaaggattcagaatttcccccaacggaattgaggtgcttctgtcagaaggctggaccggagcgagcagggcagtgtag

SEQ ID NO: 517292 - DNA, 672 bp, Stenotrophomonas maltophilia
atgaagacggagctgcataaagtgtccacaacggcgctgtgcgcaattgttgtgtttgctttctctatcggtgcagtctgcgccggctgggcaaccggcatctttagtaccaaaggaaacgcggcggattggctcgcagccctctgcggagcggtagctgcgcttggtacttgggcgatcggaatcggtgccaacaactatgcccgcgaggcacatcttcaaagagtggccgagcgagctgcccaggataagcaggagcgcgatgcgttgcggcgacgctacagcgtcatgaagctgaagctcataggactgacatacgagcacgacgcattctgcgccaccaatgatgctgcgtcgtttgatgatttgaaccgatttactatcgaagcaaggagcgtggcgctgttgcatcgtctcggtagcgccggattcgctcccgaagaatttgtcctcctggaggaagatgccagaagaagctacaaaattgtcgagcttcaaacccagctcgtagctcagcttattgatatggcaattaaggacgagggcgacacctttgtggtatttgtccgcagtgctgcggaagatctcaagaggctggcagtcgtcgctgaggactgcctcacgctcgttgacgcggacatggatgctgcgctcgcactggatccgcggtga

SEQ ID NO: 517293 - DNA, 768 bp, Stenotrophomonas maltophilia
atgaagaagatcgctctagcgcttttgatggttgcttcaggtggtgtgagtgcggggaatttcaccaagccgattacagtgaatctcctgcccggcggcatgatcgaactggctagcgatgtcatctataccgatgatgcaggccgaaagtggcacgctccaaagggctctattgcagatggagcgtcaattccgcgcatgttctggagtgtcataggcggtccgctcgatggcgactatcgaaacgcgtccatcatccacgatgtctactgtgttagccgcagcatgccgtggaaggaggtgcatcgcgtcttctatgaggcgatgcttgcgagcaaggtcgacccttacaaggctagagtcatgtatgccgccgtgtaccatttcggaccacgctggaatgtatcagttccgataaaatccaaagatgtcgccgccgttaggcatgagcttgcggataaatcagagcagcttgggcttccagaccgaacctccgaggtaaagttcaccctgcctgggaactcggacatgctgggtagcctgaagggcggcacttccaagtccatccttgtttcatattctgcccgggatgtgatggatcttgatggggccacactgaagaagctcctcgcgtcctccgactccgttcaattttttgcgacggcagctccagcgtcttcggccagcgctgaagacctagaaaagattaaggagtacgtgaaaaacgatcgcagccttgacgatatcgaatcattgacctttgaatag

SEQ ID NO: 517294 - DNA, 342 bp, Stenotrophomonas maltophilia
atgacgcgctggccgttggccaacgccaacgcgtggatcgcctgcaccggcctggatccccggcctaacgagtctggcggcagaacgggacggcgtcggctgtccaaacagggcgcgccagtgctgcgccagatgctctacatggccgccatggggctcaagcggtgtcgtcgggggcaaccgctctacgacgagctgtcaaaacgcggtcaccccagcaccgccgtcttcaacatcctggccagaaagctggccaggatcgcctggggtgtcttcaaaagcggccgggacttcgatccggcgatgctgaaggtgggtcaagcctgcttccagcaggcttga

SEQ ID NO: 517295 - DNA, 171 bp, Stenotrophomonas maltophilia
atgggagcccttcactcggtcgtcatcgacaatagccaggtcggcttggacgaccacccgctgggctgctacgcggaccttccaccgcacgaggcagtcctggtgttcggcagcaactacgacgtggagccggacgatgggcagcggctacagccgggcgtgcctgactga

SEQ ID NO: 517296 - DNA, 1806 bp, Stenotrophomonas maltophilia
atggatatcttccgcgcccagtttcaaggcgcggagcaggccttgggcgaacgctgccgcaagccgcaggtcgacctaccccaactgcacttctcaaagtaccctgccgaacccgcgctgcgaattctaagagagggcggcagcattcgcggcacttacggggtcattgcgaatgggaaattttccgtacttgcgcaggacatcgaccaagtaatcatcgatgaaacttggtatccgattgacctaacctccttgacggaaggccgccagcatgctcacgagtatggcgccatcgaagggccggtaagcctcggaacgctcgtcaaacttcgcctagcaaagcagctctcttttcacctcgttgacgaagttgcttccaatgaaggcctaaccgagccaagagccgtcggcaagtctctgaaacgtgatggtatcaatgcgactctgtatccatatcaggcagacggaatcgatttcctcaacctaatcgcagatcagcgtattgggtgtgtgctggccgatgagatgggactaggaaagaccttgcaggtcatcggcatgctagtccatctctcgtcgagccaatcttatccaatcctgattgttgctcccgcgagcttacttgagaactggcgtcgtgagatttctcaattcgcgccgtcgctgtctgcgcggattcatgctggcgaaaatcgagccggaacaacttccgcacttggcagcatcggtattcttattacatcttacgaaaccgtagtgcgcgacgccgcacttctcagctcgtacgactggcacgcggtggtcctcgatgaggcgcaagccatcaagaaccctgaggcacagcgcacgcgagcagtgaaggatctaaatcgcagagtatcagtcgcgatctctggcacacctcttgagaacaggctcgatgatctttggagtgtttccgacttctgcctacctggcatcctaggtgacttggggcacttccgaaactcctattcagatgaagtggtagacgcccaacgcttgggcagtgcattggccccattgatactccgcagacgagtagcggacgttgcctctgatcttccggagaagatcgagatcaggcaacctatcaaccttacagatggagaggcccacgactacgctgcagttcgtgagcaggtcatttcagagcatggcgctgcaggggcactggtcgctactacgattctgcggaccttctgtgctgatcccgcactgaccaagtacccactccagcagtcaagctctccgggctcgaagttccggcgcgtggtagagctcttggaggagatctttgcgaacggggaaaaggctctaattttctcttcattccatggagttgcagatctactttcccgcgaacttccactattgtatccccgagcacatttcgacacgatagatggcagaacgccagttgaaaatcggcagaacattgttgatgtcttcttccaacaccaaggggtcggcgcgctcctgcttaacccgaaggcggcgggctcaggattgaacatcaccgctgccaatcatgtcatccactacaacccagaatggaacccggctctcacagcccaagcctccgcccgagcgtttcgccggaagcagacgcggccagtcacaattcatcatctgtaccatccgggcacggttgaagaggtgatcattgaaagatcacaattcaaacaggcattggccgatggcgcagtgaccggccacgatggctctccatcctcgtcagacctggcaaacgcactggcaatctccccaatggatcagcacaggtag

SEQ ID NO: 517297 - DNA, 417 bp, Stenotrophomonas maltophilia
atgaccaccgtccgcaaaaccttaagcgcaaacgacttagggcttactggtagccatcaggccggaattctggttccgaagaacaaggatgttttgttgttcttcccaagcctggatagcaaagtcaagaacccgcgagcaaacctggtacttcgagaggtcggcgacggctcgcgccggaattttaatttcatttactacaatagcaaactttttggcggcacccgcaacgagtatcggctgacatgcatgaccgcgtatctaagagaatgcggcgcaagcataggggatgaggttgttctctctcggagtacggagggcggttatctggttgacgtggctcgcgcaaattcagctcctgccgatgagccagaggatgtcatcgtcctctctggtggctggaagatcgtcaagtag

SEQ ID NO: 517298 - DNA, 1608 bp, Stenotrophomonas maltophilia
atgcaaggtgaaatttcttatatcgaggtggcccccgacgttcagcggataagcgaaggactaagggatacggggtacgacttcaatactgcaattgccgacgttgtcgacaattccatcgctgccgacgcaaggaatgtaagcatccgcctagcgattgacttcgcgggcgagatcgtcgtcgcagtagcggatgacggcactgggatggaccgcgaggggctcatcaatgccatgcgctacggctcagaacgacgccccagtgcaaagagcctcggcaaattcggaatgggccttaagaccgcgtccaccgccttcgcgcgtcgactctccgtggtttcaattgcagaaggcgggagccctattcgtgccacatgggacttggacaaactcgctaaagatcgaacttggtcgcttgaggtttccgcaccatctgcggaagaagctgaactgctcaatgagttggccaaagacgggccaggaactctggtcctttggcaaaaagttgaccgccttcttgatggctacaaggaaccgacctcgaaggcccgcaaaagaggtatggatcgcctgattgatcggcttcgtgatcatctagcagtggtttaccagcgtttcctcgacccgagcgacacccgcgagcgaaatatttccatctccattaatggagatgcagtccaattctgggatcccttcctgacagctgtaacaaaagagcccgtcctggaaaagacgatcaaggtcaagacgacggatgaagataccgctgagtttacagtaagagcattcatcttaccccgtaaagaggaatatgaaaatcaagcaacacagtcgcttgccagggtttcgaacgaaagacagggcgtctacgtttacagagagaatcgtctcattcacggccctgattggatgggaatgtacaagcaggagccgcactacagccttctgcgggttgagctttctttcgaccataaattggacgctgcattccaagttgacattaagaagagcagaattcttctcgatgagagcatgtttgaatggcttagggacaaattcctggctggcccacgacgcgaagccgaacttcggtaccgaagaggtgccgccgcagtggctaccggagctagccttctaatccactctgctgcaagcaacgtcattgagcagaaggcgggcgcgctatcgaagccggaagtctcggtgttggataaggcaaagggggagattcagactggaaacacgaaagctacgattagaatcgtatcccctcaagacgagggaagccttaacattctgactgcaagcacactcgagcacggagtcctttgggagccaactctgcggagcgaggacggagcggccggctcaattgccgtcgccctcaatacagggcacccgtactatgtaaaggcttatctcccgaacaaagctaatagtcccgtaatccaagcgcttgactatcttctttgggcacttgcccaggcagagattgacaatatgacggatcataccaaagatgcgtttgaggagtttcggatcgtcgtctctcgcaacctcaagaaactagtcgctgacctgcctgatcctcctgcgactgaagaatag

SEQ ID NO: 517299 - DNA, 843 bp, Stenotrophomonas maltophilia
atgagctcacagcttgatattgagtcgctaagggattcggtgcagtccagacttggaatcagtctagccgatacaacggtcacggttgacggaggaacgtatccggcgttgcgacctaccgatctcgagaaggatcacggcttcttcgtggccattgcccgtacgcctcgacagattacagccagcgtgcacttcgatccttatgcaggaacattgtttcggagaatgtcggaggctgacgaggctagcaagtctgctatgttagcgctttccggctctgcgcctgcgcttggattaagctctttttgcatcattgaagaagctgaccccgatccgtcttctcgggtgagcggacgctggaagtccctcgaaatcgaggtgtccgcacgtttaccgcagaaggacgtgcccgaagcattacaacgcgttgcagcgaacgttgcatcgttcgccttctcccttcccctccacttggtacagatggaggaagtagtttcaaatggggagactgatggatacccggaaggagccgtgacacaggttctggtgaatcgatacgagcggaatcccgccaatcgagcagcttgcctggcattccatggaacacagtgcatgggatgtggttttgattttgaagccaggtacggaccgatcgccagtggtttcattgaggtccatcacaccacgccagtttccaagcttggtgccggctacatcattgatccagccaaggacttgatacctctttgcagtaactgccatgccattgtccatagggtcgcgccgccgttgacgctggaacaacttcatcaaatcattcgaacaagcactcgcaaccaatag

SEQ ID NO: 517300 - DNA, 3723 bp, Stenotrophomonas maltophilia
gtgcgcgagtggtgcaagaagctgctaggagaattatcgaagcgctgcagtgggctggtcgagttcgcttcgcagcgtggcgaaaggcgaatggtgttggtgaagcgtcttttacgcaggctgtgggtagggccgcgtgcgctacccgcgcatacactggaagcgttgtcgccggttgatgtcgatgatgctcaattcgcaatctatgaatctgagctgcttaacgcactaaaaagtccagatgtaaagaatgttgcgataactggtgggtatggcgccggaaagagcagtttaatcaagagttttgtgcgtagacacccggagtatcgatacgccttcatctcattagcttcgtttgaggagggccgagcgctcagtggggacgagggaaaagattcgcaaaaagataagagttttgaggatgcagttgagggggcgatcgttcagcaacttctctattccgtccccgcacgagatgttcctggaaccaggcttcgaaggatctcctacgcaactcgtaagagcattgcccttaaagctctcataggatttctcagcttggtcttctatctgagactaaagccggagctgccaaagtacctcccagacatctctcatgcgattggatggattcctcaagaggtcgcgcagatatccatcgggggcgtgtgctttgccgtaatctattggttgtttcgttcgctttcaaatctccgaattcaagagctcaatctgaaaggaataaagtgggacggagggggctcggtctcggtgcttcataagcacgtggatgagattattcatctgtttgaaatggtgccgttcgacgttgtttttgttgaagacctcgacaggtttaacgaaaagtctccatttgtccggcttagggagatcaatttcgtaataaactcggccgcatcaattcgccaccctgtacgattcgtctacgctctcaatgatgggctctttgctagggatgaacgtgcgaaattctttgacatggtcattcctgtagttccggtaattaattccgacaactcgagtgacatgcttatgtcgttgttggagacgcggcttggtaagaatattcctcactggcaagatgtggctcagctgctagagacgatagcggactacgtcggggatatgcgccagatcaagcacttagtaaatgactttgacattcatcgttcgatactacgcggggtgcacgctggggacgtccgaaaggagttggtcatggcggctattcgctgcgtctatcctcaagagtatgccgctctgttgagaggcgctggcgagataaagaacattttttcaatgttcccgtcctggattcaaagtcaattggctgatactttggagaggcgagaacagcttcttctgctagcggaacggaggagccacgaatcactccaggatgctggggagatcatgactcttatatggtcgaaaattgaggatgcctataatggacaagtcaactttgagttggacgttcccgatattgggaggcttaataaagtggcattcatcgagtctctcgatcgagccagtgagatcctatcttcgcagtcagtcaggattatttcgaggggggctttcgtccgcaatgtgaatttgaccgagctggcttccgcagacggaaagaattacatccagagaattgctttgaagctgaggccgattgagcctgatcaacgagagctcactaaaattgaccgaagagtcgaagagctacgctcgctgactctccaggatgcacttgtagacagctctttcattggagaggtaagtgagtattgtgaccgaaaagggctcaagcttgttccgtacttcatgcgcaagggattcttgagcacggactactcggactacattggctacttctatcctggcgctatgagtcgctcagacaaagctgcgcttctggacatccgttcaggaaaactgttagaaaccgactacacttttgacgctccttcagtcgtgctggagaaactttctcccacagagctgaaagccggtgtcgggatcatcttcccacttgttgagcagcttcttgacgacagctcgggaaggtccgcgctcagaacccgtcgtattcagatgatattcgaggacttcgacgatcacgtagaaaggatcgacaacctctgtaagctgatgcatcagcggggaaaactggccaagctcgtatctgccgtctctgcggtttcaccttgggtgggtgtccgcgttgcaaacgagggtgcatattgctcactcccggacataagaattgagatcattttggccctaatgcaagaaattgatccgctctgcgggatgagctatgtggagggagtcgttgcactcttggcaggagttaatgatccagcagttctagtcagtgcgaacgcgagtgatctcgtccagcgttggttcgccatcgacgcggcgaaactgaattcaatagatcgaagtgtcacgaaggaggttcttattttcgcgttgcagctgcggatgatcagggtaaattccgggaatgtctctgcaataatcgcgatccttgcgcctgatttgcaagagctgtcgccaagctactcaaatgtcctttccataaatgacgagaggctgatagatttcgtaaaatctgattggtcttcgtacatcgagtcagtgtacctgccgggaattaattcgcgcgagactgaggctgcgttcgttgagatggttcgattgtccgcaactgacactagtactatcagccgggtgatgagttccgttgatgtagagatttctaacatcgcggacttggatgagcgtgtctggcggttggcggcgggatcgggaagggtccttcccaccttggacaatgttattgctgtggccagttccgactggatagaggacgatgaagtagacttcgttgtggggtctattgttaatagaattgacctcaatggtttggtgccattgatagacgatagtgagagggcttcgaaagtgaagcgtctactttctttgttccagagactcaagggcggcgagatatgccccttctccaaactgatagccaagttaaatttggccgctgatgcgtttgatgcaggtgtgcttgacgagaagtcgtcaatggagatggttgccgctgggttgccattcactgaggccaactttggtgcgctattaagcgtttctgaggcggcagcagttagtttggcgaagtttaacgtcagatctttctctgagtatgtagctagggagtcggtccctcgatcagtcatatcggaggtattatcatctggcgatatccttcatggtctgaggtgtggcctattcgatgcagtaagtgtgatggacattgatgagtatccggacatggcggtcgcaagcgcaaggcttctgtcgaatgaagtggacccgaatatgctccgacggctctattccaaggacaaagtattggctgtgcttaaacacgttcattcagaagccgagagaattaatgtccttgcctcggttctcgccgtagcgccttggagtgattttgagactgtttttgatgggctcagagaatcaggtttcgctggaattctcgggtctgaaaacacgtttgaagtgacaaatagcattgaaaacatgagacttctggggacgatgagttctcggggctggatcaataaggttgatgttaaaggcgcgaaagttaaagttcatgttaaactttcaaagacaaagtga

SEQ ID NO: 517301 - DNA, 216 bp, Stenotrophomonas maltophilia
atggacaagccagcctccgcgctgcgaaggccatcgggcaacgcagaggacaatctggcgggcgtatgtctattgcagggccggcaagagcatgccgggaccgcatcgggtgaacagtggcagatgctgtgggtggcggccatccgtgccggcaaagtggccgtatcagaccagggtcaacaccacgcgttgcattgcatgcagggtaaagcgtga

SEQ ID NO: 517302 - DNA, 414 bp, Stenotrophomonas maltophilia
atgagcgcactgaggcgtgtacaccaacgtgactggaacaacggtgattgcggcatagcgtgtgttgccatgctggcgcgcgtttcctatgaggaagcgcttgaggcattcaggacgctaccgggaaaggcaaaaggcaccagcttcttcactacgcatactgacatcgcgcagatgctggcgcagttcagtatcgcgaccaagcgcgtgagcttcagatcatggcgggccattgatcgacatgcaattgtaaaagttaatccttatcagtcgggccggagatggcattgggttgtcctcgatgcaggcagggacgagctcgtcgttcacgatccgaagccgggcaagacgcacttgatccgagactttcgtgggctaaagggaagtggccacttcattgcagttgcggactag

SEQ ID NO: 517303 - DNA, 297 bp, Stenotrophomonas maltophilia
atgaactttgaagacgaaaattatgtaagggttataaaggccgctggtgccttgtcgaaatcggctggcggcgcggttgagttgaaagaattcttgaactctattgagaacatacccgatctgaacgttctcaacgaaaaaggaaactcattgatgcacatggcagcctttaacggtcaagaactggttttgagggaactggctgatgcaggggcagatatcaatgtgaagaatgaaccggacggttggccccccgcttcattgcgccatgtacagcaattcttttggatgcgttaa

SEQ ID NO: 517304 - DNA, 1587 bp, Stenotrophomonas maltophilia
gtgaccaccatcgaacgaattaccaccccgcgcatccgcatcttcgacaccaccctgcgtgacggcgagcagtcccccggctgcagcatgagcccgccgcagaagctggtgatggcgcgtgcgctggacgaactgggcgtggacatcatcgagaccggcttcccggccagctcgcagtccgaccgtgaggcgatggcactgatcggccgcgaactgcgccgcccgagcttgaccctggcggtgctgtcgcgctgcctgcaggccgacatcgaaacctcggcacgtgcgctggaggccgctgccaacccgcgcctgcacgtgttcctgtcgaccagcccgctgcaccgcgagcacaagctgcggatgacccgcgagcaggtactggagtcggtacgcaagcacgtatcgctggcccggtcctatatcgacgatgtcgaattctcggccgaggatgccacccgcaccgagctggactacctgatcgaagtcgcgcgcgtggccatcgctgccggcgccaccaccatcaacctgcccgacaccgtcggcttcaccacgccggaagagatccgcgcgatgttccagcaggtcatcgccggcgtcgccgacgtgccgaattccgccaacgtgatcttcagcgcgcattgccacaacgacctgggcctggccgtggccaactcgctggccgccatcgaaggcggcgcgcgccaggtcgaatgcaccatcaacggcatcggcgagcgcgccggcaactgctcgctggaagagatcgcgatggtgctgaaggtgcgccaggccttctacgagcaggacagttcgatcaacaccccgcgcatcgtcggcacctcgcagctgctgcagcgcctggtcggcatgccggtacagcgcaacaaggccatcgtcggtgccaatgccttcgcccacgaatcgggcatccaccagcacggcatgctgcgccaccgcggcacctacgaaatcatgcgtccggaagacgtgggctgggaagattcgcagatggtgctgggccgccacagtggccgcgccgccgtcgaagcgcgcctgcgtgcgctgggcttctggctggacgaagacgaactgaagctggtgttcgagcagttcaagggtctgtgcgaacagcagcgcgtggtcaccgatgccgacctgcaaaccttgatgcagggcggctccaacgcgcagggctaccgcctggcgtcgatgaccatcagcgacgtcggcagccgcgccaatgcactggtcgaactgtccgacccggacggcaaccgcgtggccgagaccgcgcagggcgatggcccggtcgatgcactgttcggcgcgctgtcggccgctaccggcgtgcagctgatgctggacagctaccacgtgcacagcgtcggcatcggcgccgatgcgcgcggcgaagccaatctgagcgtacgccacgagggcgtggagtacgacggcaccggcaccagcaaggacatcatcgaagcctccgcgctggcctggctggatgtggccaaccgcctgctacgccagcgccaggctgccgcccacagcaacaccgacgttgccacccccgccaccgcctga

SEQ ID NO: 517305 - DNA, 1035 bp, Stenotrophomonas maltophilia
atgttccctcgcacgttccaagctttcacgttgatgttgattgcctccagcggcgttgccgatgcaacgcccgcaggaaccgatgcccagcagttccagcagaacctgatcgcagtgctggaatgccgcgcgacacctgcggtgcggcaggcactgggcagccagctgcgggtcgtccgctatggctctgcaacggaacgaccggcgcacctgcgtggctggcgcttcatcgcagccgatcaccccgagatcgagagcgcggtcacgcgcatcgaactgcctgcgcccatcaccgccaacggcatcaccacccgcgagctgctggctgacgacctcggtctgggcatgttcctcgatgcggtgcagcgtgagcgcatcgtggccgaggacggcctgcagatgcggaccagcacgctgcacgagccgttccgggcctggtggcgaccagcgtcggatgttgctgcggcggcacaggcctggcgggtgatacgaagcgagggcgcaggcaaccgcctgtcgtgtgattaccgggagcgatatcagaaactggacgaccagcaggcggccgaccgcctgcgcgaggacctggtagcggttctggagtgccgcgcggacgcggcggcctggcagcgctttggcgaattctggacgcgtgtcagcgcgcacagcccgcttgggtggccggcgcaggtacgcgcgctggacgcacctgcatgcatggctcgcgaaggcggctcccgttgtgagcggatgacgctcgatgcgccgatcaccgtgcatggcctgaccgtgtcttcggtgatgatcgagcccagctacgcgtcaggccatgttgcagcggacctgggcatggtgcccgtcgacgatgcacttcaggcggcgattccaggtgctaaggcggccggggaaatcatctggaccttgccggcatcacctctgcaggagcggccgcgcgagcgcttcgtggtgcgcaccgccgatgggcgcacactgatggggtgtgcgacgtccaaggcggtccacagaggacggtag

SEQ ID NO: 517306 - DNA, 1167 bp, Stenotrophomonas maltophilia
atgcttagagtcttcattagctatgcgtccgacgatagagagcgagtgctcccgtactttgaaagattgaggcagcaggggttttctccttggatagatcagctaattcttcctgggcagagctgggagcttgagataacgagaaacttcaagtctgctaacgccatcatcatcttcatgagcgctaggagcgtcaccaagcgcgggttcgtccagcgagaagcgaaggacgcgctggagctcatgcggaacaagttgcacggggacattttcatcattcccgttctactagaagattgcgaagttcctgaccaaatatcggacaactatcagcacattgacctcaacgtcgagggggcttgggatcaggttgtcgcgtccctgaagctggcagcgcagcaacaaagtgtggaccttgccgacggagcaacgcatggtcccttcaaggtgtttacggaggaggtcaaggaagagtggaagggtaggcctggtcacgacatcgaagtttcgtatccacggttcgagtccgagacccatcaagacgctgcaagagagctgagtcagctcttcgctggccgcgctgcacggactctgattcacgcgaggcagcggccttgggagcagaaccctgaattcttcgaagaaggagcggggaatgcattcaacgggcgttgggatcacttttcaattgagttagtgaacgatgaagttctcagtcttcattactcagtcggttggtatggagccggcgcggcgcatcccaatactcacttcgaatcctacaacttctacatcaatggcagagtcactacgatggagttgtccgcccttttcactgactctgacgaagccttgaagaggataagtgctgcctgcattcagcaattgtcgaaggagtactgggagagaactgcggagcttccagagcagtcagacattgaatcattcagatctggcgcgggtgaggagtgggagaatttccaggtattcacgatctctcgtaacggcttgaggttcctgtttcatccttaccaagtccatgcctacgcgatgggttcatggggggcggaggtgtctttctatgatctcttggatcttctgcccgctgatggaattcacgtaaagcttgggcacaagtcactagccgccgcaaagactttggactag

SEQ ID NO: 517307 - DNA, 1083 bp, Stenotrophomonas maltophilia
ttgagtgggaatggattcgagcatgatgcatcaagctttagcgaagcgcgcatggctctcgagcgggagcgcgcccttctcaataatgcaattgaacggcgtagcagaactaatcgtctgtatcaagttgtcaccgtcgctacatttggcgcgctgatagcggcaaatttactgggtacttacgcagaaatcgttaagcagaacatcggaattattgactggcttcgatccgctgcaccgaccagcctcgcggggacaattggctccctggccgtcgcggttattgccctcttgttcgccacttacacatacttagacgcttccgcgcaggcgaaggcgcggcgagctgtcagactagccacggccgtgttctcccaatctgagcaggattcattcactccacctgcagttccaagtcatggtcactttggtgctgcaggtcaggattcctctgcttcagcggcgcgcctgcggccaacccagcatgagattgctgacatagccaatcaagtatcaacagaactattgtcccgttctaccgaagcagattcaatcaggcagattcgtactctctacgaaacggcccaggagcggttgaacgcagagatcattgctcttaatagacgcgctctgctcaatctgatcattggcagtttcgtgaccgttcttgctgcattagtgctggtctatgttgcggtgtctgatcctttgcgagacatcctggccacagggaccactcgacaactgagatggtttgaattggccgctcattacgttcctcgtcttggcattgtgattttcctcgaggtcttcgcattcttttttcttcggctttacaagaacactctggcagaggtgcgcctatatcaactcgacttgactcgagtgagtacgcaagctgtcgccgtcgaacttgttttcacatcgagcgatggcgctgaacgagctgccacggcagctgcgctgatcaatgtcgaatggcgggggccaagagcaccggatagtccaagtcgcgggctagacccgaagcttgtgggagagcttgcaagcattgcagcgaagatggccagcaaatcggtgtaa

SEQ ID NO: 517308 - DNA, 1215 bp, Stenotrophomonas maltophilia
atgcaagttggaatcatcgtggcggcgctgaagaagcacaaactggccacattcttgatcaccattgagatagccttagcgtgtgcagttctatgcaacgcaatcttcatgttcatggagaagagtcgagcgctcaaccttgatagtggcgttcaggagtcgtcacttgggatcgtccagctctccggattcagcgcagaagacgcacatgacatcaacgcccgtgtgatgaacgctatccgggctattccaggtgtggaggctgtgggcgccattagtgctgttccctttggcgatcctggagtccgtgccggtgtgaacactgacgaagcgcttgagcgctctggcggtgttctggatttctaccttggggatgctgtggcgctgaagttgctcggtttgaatgtggtgtctggtcgtatgccggagccggccgagtatgcgcccatcgagcagtacgtcccatccaacgccccggtgctggtgactcggcagttagccgatcgctattggccggggcaaagcgcaatcggccaaagcatttgggccatggatacccgattcacggtaataggtaccgtcgaccaccttgctgtctctcaaccgggattgggagaggcattgggcaatgactggtcgctcatcgttccagcattggccgggcctcggctcgctggcagatacctggtgcgagccaatccggaagatcttccgcagatctttggccaagtagggagggctatatcggcggctgcacctgatgtggtttttgaccattctgccagtcgcccggtctccgaactcaggtcagaccactttcgcggtgccaaggtcatgatggggttgcttgccgcagtgatcattgcccttcttggggccactgcattgggaattgtgggcttggccagctattgggtagagcagcgccggaagcagatcggcattcgtcgtgctttaggggccacgcgatcggatattctgcgttacttccagatcgagaattttctgatcgtcagtctcggcattgcggttggactggtcctttcctacgcgatgaatattggcctaatgcggttctacgagttgccaaggctaccggcagcctacttgccggtgagtgctatagcattgtggttgctaggccaagcagcggtcctggttccggcactgaaggcctcagcaatcacgcccctagaggcgatccgctcgctctga

SEQ ID NO: 517309 - DNA, 1320 bp, Stenotrophomonas maltophilia
atgtttggctattacgtgaaagttgcgctgcataacgccgcaaggaacaaggtcatcactggattggtgattctggcgatatcggttggcatcggagcgagcatgacaaccctcacagtcatgcacatcctgtctggagaccctcttccaggcaagagcgggcacatctattaccctcaagttgatgtgaacccagagtccaaaggacgtgagccctatgatgtaatggattaccgcaccgcatttgacctatggtcggccaagcaggcggacagccaggcgatggtggtatccaatcccgtcaaggttaggtcagagcttcctagcggagtaccgctgatgatctcttcgatctcaacaacttcagaattctttacgatgttcgacgtgccgctacagtacgggcgcgcttggggtgctgaggatgacgcgcgtcgcagccgtgtcgcagtgatctcagatcgactcaaccagcagttgttcggcggccgcaacagtgtcggtcagagcttaagagtcaaagatacgaatcttcagatcatcggtgttctaggcccatggcgtccttccccactgttctacaagatcagaggtgggcgcttctctggtggtgagacatccggcttctacggtgtagcggacgatgtgtttcttcctctctcagctagcctcgagatcaacgagggcgacttccaaccgtttacctgttgggctaccccagatcgtcctggtgttctcgagagctcgccctgtgtcgcggtcgcgctatgggtaaagttgagtggtccggagcgcgttcagggatacgatcgcttcctccgtaactatgcagctgagcagaagcgccttggacgtatcaagcacgacgacaacacccggttgaggtctctgatggaatggctggacttcaatcaggtagttcccagcgacgtaaaagtgcagacggttttggccttcgcgttccttctgatctgcctcgcaaacgtagtcggcttgctgcttgcgaagttcatgagacacggcggagagatcggcctgcgtcgcgcgttgggagcgagcagagtcgctatcttcacgcagtgtctggtcgaggccggtctaatcggtgctttgggcggcgtgcttggcttgttcctaacgttacttggcttgtggatgatacgcatccagccagtagcatacgcagatctggtgcacctggacatcgcaatgtttctggtcacagtcattctatctttgctcacaagcctcttggcgggtgcgattcccgcgtatcgagcgagttttatccagccggttacccagctgaagctgctttga

SEQ ID NO: 517310 - DNA, 1605 bp, Stenotrophomonas maltophilia
atgagtacgccgagcggcagcactgcggtggatcctggccgcggccacacaccatggcgtgacttctcgcgtttgctaggcgagaaccggaatgagtacgtggcggtgacgatcacctcctgtgcaattggtgcatttgaaggtctgatacctcccctcctgatcaaggcgattcttgatgaggcgtcgttgaggggcgatttttcgcgtttgatgtacctgatccttggctatcttgcgctaggtgtgtcgctcaacgtgggtgcctacgtgacttcgctttggcagcagcgattggacaatcgcattgtgaggcgagtcagtgaggaacttctgcgcgtcttctacagtgaacgctacgaagacttcctgcgaaacggagtgggatactacatttcgcggatcagatctgacgtaaaggatggtctggtaccaatgcttgccttggtcagaggagttgcagtcaagatctccatgcttgtggccttggtcatagcactgctctacatctcatggaaggccttcgcagttcttgccgcgatcatcccaattgccacgattgtcagcttggtggtcggcaaacgcatcagtgctttgacatctacggagcgggaaaaggaagcccaggttctggttgtccttgccagagctgttggaagcctgaagatggtggggacgttcggattgacaagcaagacgttgagttcgttcgatagaggcatgcacggcctcttggatgcaggctacagtcgattcaaggtggtgcgcacacttcaaggcgcaagtgatctgacgatggttctgtcggatgtctgctcgatattcgttggtgcgatatttgtctttcagaagaagatgacatttggttcgttcattgcattcatgaacgcattctggcgtgcggctacaaccctaattgccatcttcaagaactgggcagatctgaagagctacggcgccacggttcatcgagtttcagggtttcttgagttgcgaaaatcgtctgaatttaagtattcagaaagtgtcatagccgatcgcttgtcctttagcttcggccaaaccagcgttcttcgaaatgtatccacagtcattgatcgggggcagagggttctcgtcactggtgacaacggctctggaaagaccacacttgccaacatcctcgcgaggcacctgctgcccacagcaggtagtctttcactgcctgcacgaatcagctcatccactctgccgctcgcatttcctcctctcgccataaaggaccttggggttgacgtagagcttctgaaaacactggctgtattttcttcagagattcttgaggcctatcctgaccagctgtctgcgggtcagcaacagaaggttgccttggccatggcacttagcaagagggccgatctctatgtattggacgagccacttgcgaacctggacgccggcatccaacgtatcgccatggatatgatcatgacgatcacgaaaggcaaaatactgataatgatcatgcacggcggaatcgagtaccgaaatctgtttgatacaactcttgcgcttgagtcagagagtgctgggactatggatgagaacgcagtccagcaggcttag

SEQ ID NO: 517311 - DNA, 2742 bp, Stenotrophomonas maltophilia
atgtcttccagaaaacctacgctgcgcgagctgcggcatgttgacaaggtcaacttcatcagcagcgacgagcgcttctacgagccgaactacgagcattacaggccgagcgatgagctagtgtcgattgttgatcagcttctagtggcgcatgggcaaggctggggcattcgccggatcggagtgtggtcccatgtcttgccactcgcgaggtctggctcgcggtcgcttccagctcagggttggaagatccatttgtcagcaatcgaagataactgcaagcagattcttcagcgtgttgctgagcttctgcttcagcgtgatgtggagtttaagttcgccaacgaccgccgcacgatgaggatgatgacatccaagcgttggccccgaggtggatctgggaagttcattacggtctacccgcatacggagactgagttcaaagaactcatcgagctgatgtaccaagaggtgggggcgaatgtcggatcttacatcctgtccgacaagcgctacaaagacagccgctgtatctactaccggtacggcggcatcatccaagtgaaccgtctggacttcatgggaagaatgatcccgatgcttgtttcaccgtcaggagaccatgtccctgatcatcggaccccgtacttcgagactcctgagtgggctcaggaccccttccctgccgaggaagaggaaacaggggagatggtcttgaacaacggtcgctacttgatcgagagcgcgctgggcttctcgaacactggtggagtgtacctgtcaaaggacactctcaccggtcgccaagtcgtcatcaaggaggccaggccccatgtggagctctatgaaaatggcggagatgcaaccacccgcctggaaagagagatgtcgaatctgagcatcctcagtccgctgggagtcgcccctgcagtcttggactcgttctgggattgggagaatttctacctcgttgaggagcatttcgatgctctcgacatgcggcaggtcatgctccagttctcgccgctgatgacggtgcgcccaacggtggcagacagtgagaagttctatgggatgtatcgaacgatcttcattaatctcttcagagtcgttgatctggcgcatagggcaggaatggttattggcgatctgtcacccccaaatattctggttaagaaggaatccctggaggtgcggttgattgacctggaagctgcattccgaccgtctcatggagaatccgacgacatccatacacctggattcagaagcaagatgaagagcaggacaaaggtaagcagcatcgaggatgacctgtacgcagtttcggcgatcatgatgtactccatgtttccgatcgtggcgatggcgtatgtcagagacgacctcttcgacaacgtccttcccattctcgtccaggatatcggctgggaagggaccccggtgctcgatgtgattcgtggtctcgcgcagggacggatcgatcttcgcgaggccgaagaaaggctacaggtaggagcctcaatagatgagccgtacggtatgcgcgaggcttcttctgagccagtggagcacttgatagaacggttgtctaggttcgttctgatgaactatcgactgaattcgaagtacacgctgtttccttgtgacccctttgctctctccacaaatgcaactagcttgggatttggttcctccggcgtaatctacgcactcacacgcgccggtgccgaggtggccaatgaagtactcgagcggcacttttcggatgcaggacgtcttcatgaggcgaacacagcgcccggtgtgctgacggggctggcgggaatcggatgggcccatttggccatgggctacgattctgtcgggcttggcttcattgacatggccaacagaagttcagtttcgaagggccagatctcgttctactacggagcagccggcatcggaatggcgaatctggcagcctttcttgcctcgcaagtcacgaactatctggaaactgccttagagctcggtctgcagctgaaatcatctgcggttcgtacggagaacggaatctattgggaggacgacggcgtcattcgagtaggactcggctatggtcaatccggagtggcgcttttcttcctccggctgtctcaagtgaccggcgattctaagtggagggcgataggagagttggcactggcctacgacctgtcgaagggaaacgagctggaggcaggtatcaccacgtttgccgccgcacctactggcctaaccacctacgaaccctacgtggagcagggtaccgcaggcattataaaagtcgccatcaggtacggtctctgggatgtagttgaatctctggccttggatctctaccgcaagtattccggatttccgggtcttatttacggccttgccggattgatagacactctggtagatgcctatgtgtattcaggagatgcaaagtacctgaatctggccaatcgcccttatgaggggctgaccgacatctatgtttttggcgacgatgacacagcggcgataccgggagagaacctgtttcgcatttcctgtgactacgccacaggtgttgctggggctatccgggccttgcatcgactgagttcgccgtatcccgatgaattctgtctggacatcttggacgcccccttcttgaaggtgcaggcaggccatcagctgggccctaccctcatggaagggcctgagtggggaatagggcaagaatga

SEQ ID NO: 517312 - DNA, 123 bp, Stenotrophomonas maltophilia
atgaatcgtgtactgaatctgcagcgcctgtctctggatacctcgttaagcctgatgggcaacagctctaccagttcgacccattcatgctgcggccccacggaggagcagaaactgcagtag

SEQ ID NO: 517313 - DNA, 123 bp, Stenotrophomonas maltophilia
atgaatcgtgtactgaatctgcagcgtttggccttcgataccaatgtcagcctgatgggcaatagctgcagcagctccacacacagctgctgtgatggcagcgtagaggatccgcggctgtaa

SEQ ID NO: 517314 - DNA, 1308 bp, Stenotrophomonas maltophilia
atgtcactgagtacaacgcctggaatcgacatcggtgcggttgagcgggtcatgagatccgttctgccccagttgaaggcgctgcgtaagagaaatgagttggatgaggatgaggaagccaagctcatctacgcgaaccagaagttgggagccgccttctataagtcggagtacacacgtagtcacataggttgggagcacgcgctcgatttaatctatgcagtgctgaatgctggcgatctcgacgatgcccgagcgtttgcaacgcggcttgatgctgcgctgaaacaaacagcggtgcatctcgactatattgccgtcatccctttagggttctttcagcccatagctttcgcttcgaagaggcagagcgtttttcgcccattccaagttggtccatttacactagtgccagctgcagccacgagcgaagcgctgaacaagcgcatcaagatgtttaactccaaagctgtgccggacgacttattcgaacatcagcaacggcagactgaccaggcactgagcagcaatcctttgttgctcctgccaacccatgggtcttcggattccctacgccatcagacacgtgcagctgctcgccgcgtgatcggattaattgaattgtttggtcgagttttcggcgtaaagaagccggtgctggggaaggaggccacaccaagctatttgttcctcatcaacaagcgtacggggtggcttgatcgggttatggcgatgcgcccgttgactgtgtccatttcgctggagagaaagcttcttcaagtaatgaagcggcccgacgtaccaattgccctcaagctgctctccttgggtgaggaaaaaaccttgaatgcacagcttaggaacgcgctggaattctttggtcgagccgtgggcgagaaggatagcgtggcgcgattcatattctttgtcatatcaatggaggcaattttctctcgcgataagcacgcgcccatcaagattactctggctgactacgcgtcactactttgctttaagggcgaggaccgaaggcgcgtccatgcggatcttggaaaaatttacgatgctcgatcagaaattgtgcatacaggtgtaactagcgtcaaacatacgttgctgataaaagccgaagcgctagcggcaagagcgttgtactgtagtttgatgcttgccattcatctcgatgatggtcaaggggatcttcaaaataaattcttcgatttgctcaagggcatgaagatcggtgtcgaactcaatccaattaagctgcccgcttggcagggctatggcccggatgcaggcgaatag

SEQ ID NO: 517315 - DNA, 360 bp, Stenotrophomonas maltophilia
atgaaagaggaactttggttcgtggccgaatgcgaggacctggcggacaattgccactatctagtctgggtgcataggatcggctcgtccgcaaggctaacagtggacggtaggggtagaggggttcttgttgatgcgaagactgaggacgaagtcgtggaccagatcctcgtcgtgcttaaaatggtggtcgagaagacccttagccgggaagaggtcgcaagggcgacgaacaaacacctagaagatgcggaggaggcatcctcggatagcgaagccgacgactcagagcagatcattgacgaggaatcagaagagccttccgagtcggcacaccagcagcagggttcggcctcctga

SEQ ID NO: 517316 - DNA, 159 bp, Stenotrophomonas maltophilia
atgagttcgccgacctgctggatgggtggatcggggaatgatctggtagatgcccaccttggtgggcgtctttgccgcgtgccaaccaaggttggcacctaccagagcacggcggtgtcgttggcgttgggccgcgcgccgaccaaggccggcatctag

SEQ ID NO: 517317 - DNA, 213 bp, Stenotrophomonas maltophilia
gtgctcgctggcatgctgccacaggtcgattgccaagactcgatcaccgggtggaggatgagcgacgaagcggagcgctatctcgttgaggccgccgcgtggaaccatggcgatgcccgcgatgtgctggcccggcaggcttgccgcagcaagtccgggttgaaccgagcattggaggcgcgcattgcagagctggcacatgacggcgactga

SEQ ID NO: 517318 - DNA, 357 bp, Stenotrophomonas maltophilia
atgacggcgactgactcctacagaatcaccaggcagccggccccgagccggttgcctacggtccacatcgacgctgacagggcgggcgcgtttcgagccttggcgcggcagcagggcgtaacacccaccgcagcccttgcggcactggtgaacacgcacgccaaggtccgcgagccgttctcggcccgggttcgggccaaggccgggcagggtaagcgctacagcgatcttcttccggacccgaaggttcccaagtctcaagcagagcttctggcagtagatgccaaggccgctgggatcacgctgggcgaggcgctgaggcagctggtggaccggtgcctgaggtatagccggtaa

SEQ ID NO: 517319 - DNA, 1065 bp, Stenotrophomonas maltophilia
atggccggccgacgacagcattacctccctcgattcctgcaacgcacctttcgctaccgaacgagcggcacgcaggactacgtgcacgcccacgagagcacgcggagctatgcgcccagcaccatgggcctagggcaagaaagggatttctacggaaatccagaagaatcgtgcgctgacgacaacgttacggagagcgagaaccgactcgccctgatacttaatcggctgaacgagaacccatccagcgtttcgcaaggtgagcaggcgctgctcgttgctgcacttgcggtaagaacgaagaagatgcgagagtcgctcgagaccacggtgaaagttttcatcaacgagctggcgggactgatccagacgcacggcatcagacgccaggagatagaagcctactggagcgacaagtccaaacttgaggaagtcatccaaggggaactgaagaaacttccccccatgcctcgcgagatgcgcgcaaagctagtttctcggctaaagcaggagtggcacaggcgacgtgagcagataatagcccagatgcagatcaacgggagagccttggctgctgagctttttgcacgcatggatcatgaaagcgcgcaaatggccgatagagctttccgcagagtcttcgaagatgacccgacgatcccggagcgagtggcctctctcacccagctttacgatttttccgtcatcaatgcatccgtaggcgatgagttcattcttggggactgcgccgcaatcggctttcgcgctgatcgctcacctcgcttgcccatcggagattttgacgaagattctccgctggatcagatctacctcccagtctcccccacgcgatgcattgccgcagtgcggaagggagagagcgcctgggctcaactgaaggagatcaatagtgcatctgcagcgttgtcgcatcgcttcttcatctcaaagtcgggggagcatccagatctgctcaaactccaagcgcttattggaacggccgatcccttggcttcagaggaagatatgcgatcccttctgacgaagatctatgaagaggactga

SEQ ID NO: 517320 - DNA, 1839 bp, Stenotrophomonas maltophilia
atgagtgacgttcggcggacacttcaagaaaggagtgccgtttgggcttaccagcagtttcagtttgcttatcccgaactggagtcgatcctgcacggcgaggatggtcgttatgaaatccacgtcgtgggtcctgtgggcgattgggacgagctttcccgaatttttgatagagagattcgaccaatcaccgccaatgtgaagttggtgagtgagccgccctcccttgaaaagctgaacatctcgaccacagctgctgacgacgcctggttgatcaacgagccgatgacccacccctggatcaatgatctgctgagccttgctgcacccggtctgcctgcgggaaatttggtgtttaagttcgaccttgatggcttcttctttgagcatcaagggttgtcgaatgaggagctggcatctgtagatgcagcgtaccggaaacttcagttgccagggtctttgcgcttcgcgcagctgtccgcgtctcctacaaaggaagaagtagtttccgccgcggtcgcgcctgagaattttctcgatctgccagtcgttcgacggttcagggcttcatctcaagctatccgcgggctggttgaagaagatgaggactcttggcgagagttcaccagttcccgcagtcaacagcggttctccaggagcgagtcgagtcgtgaaaagttctcggtactgttcggtgcagatgatctaagtgacgtaaagctggctgagctattgtgcatctacgatgtcgtcaacatcgtgccaacctatgacctggggtggcttggtcgccacgagattgacttggcttcctttgaagagcttgtcggcatggggaggataaggctcgtactgccggtgccggtcgctcgttatccttcgtctctggtagaggcggccgttggagcaaacaagtcctcggtgatcctgagccggcgcctggcttcgcttacggtgtcgcacgggcagcacaaggatccactcctgtatggaccattcagtaaccaagagcgcattgatctcctgcgaatgattcaatctgtcggatcttcgactccgttggcccctttggtctcggcctacggcagggtccttaggcaacagcataccgcgttgttccgtcatggcgcggttgcgaccatggagtccggctttggagcactggtaggggagttggtgcacgcgacacgcggcgtcgatgcgcgcttggagctgagccacgccggcgccatggtcgaatgggcggcgtgccttggtgcgacctacttgccccgcgagtttgctgattacgatgagtccggcaatgcaaccaccatcgccaactactttaaccggacgtctggaacgactcctggacacgtcgcggatcgaatgcatcgcgtcgtcgatggccttctagccccgcgaggcttgtcagcgttggaagtggctcggggcacaactgccgaatcgttctggaagttccgccgggtggcgcgcggcctattgacggcggatatcgatcgagaggagctgagtcaggcggtgagaatgcttaacgacgatgtccggtcctttgagcgtcggcgagagtttcaagccaagtaccacataagaactacattgacggaactggtcacgcttccgcttaacaccaagattgatttgctatttccgggcgcgtctttcgttgctgcaagcctcgctcgcatctgcaagaccgtgcttaaggacaggggggtgtttccgagtgaggaggggccttggggagacgttgtggatgccatccatgggttggctacgtggacgtcactggatgcggtcgttatatcgagagcccgtgaccgactgaggaattga

SEQ ID NO: 517321 - DNA, 303 bp, Stenotrophomonas maltophilia
atgatgggagtcatcacgttcgcgtggcaggcgggggatggttgggccgggggttcgctgctcctaaaggacattgaatccgtggatgtcgctacggaggaaagtgttaagcggataggtggaacagtagggtggggcttggtgggtggtgcattgctgggcccgctcgggctgctcgcagggctgctggcaggtggtcggagtaaggacatcacgttcgtggcgaagaccaagggaggcaagaaattcctagcgaccacagattcggcatcattcaaaaagattgccgccgccgccttttga

SEQ ID NO: 517322 - DNA, 837 bp, Stenotrophomonas maltophilia
ttgttgttgctcactacgtcacggaccaggtggtgccagcactcccgccagtcctctgcaccgaccgggccaccgcctggcacgtccaacggcgcgacgatcccatgggcctcaatgagcgcccaaaccgcccctaggaaggctcccgccggcaggcgcaggaggtgggtgtggtcctccgccagcacctcacccccatcccgcattcgcaacgccagcagggcctcgcccagtgctagggcatcgcccgcacgggtgctccagccaactacgcacactcgctcaccatcgaccatcccagcccacgcatggacccggaaccggggcttgttgaaacgagaagttaggtggtccagcacgcggcccctcttcgcatggcggctgagtggggtgaagtggttctcggcatacagcaacgccgacctacggcgttctagcagcagggccgctcggtcagtgggcgctgtcgcttgccactctgaccagctcaccaaatcgcgaaggccctttgcagcagcgcaggttcggcaggcaggcgcccagttctcgctgacttgggctggaccacccagttgtggcggcaccagtgctacggcttgccaagcacggccactggtgccctccagaggggcggagcagaacgcgcagcacgaaccaaactctgccagcagcgctttgcggttccagcgctgtgagaacttgcgcgcgggggcttcggcacgggcaacggcttcaaggaacgggacggtatcaaacaccgcatgcccccacgccgttcaaaactgctttcgtcccccgacttcgcaacgcgacgagagcggcccggcagtggcttga

SEQ ID NO: 517323 - DNA, 723 bp, Stenotrophomonas maltophilia
ttgggctccaatagccgttgctgggccagcgacgaagtcagcgtaggcgccacttctgagggcggaggccagagctcccgccggattaccaacgtgcgggccgggacgtccgacaccgatgtagcgaacctcgggcaggtccgtcaggccgcacaagcgcttggcggtggtgccacgttcgttaatgggaactttgtagcgccgatttatcagttccggagcggggccactcatcaaaccgtgggagccgctttggacgacctagatggacgcgtgacttcccttgagcaaaacccaggcagcggcacgggtaccccgggcccgcgtggtgtcgatgggctaagcgcctacgaggtggcgctggccaacggcttccagggcaatgaacaagattggctggcaagcttgaaagggcaaccaggagcgcaggggcctgccggcaacgatggcgtggacggaaccgccgggaccggctcgggttcgacagcaaaggcgggcaagaacgtcgaagtcaccaacaactcagacggcacccaaacggttgcggtcttcttcaagggtttttggagttgcgttttagccgggtcagcgttaccgaaagccaccaccttgctcagcgcagggaggggcactggcgggctttctgccatttgccagtgcggggactggggaactggctgcctggtgcgaggatgctccctgaggcccgccaggtcgttttag

SEQ ID NO: 517324 - DNA, 663 bp, Stenotrophomonas maltophilia
atgtcgtcgcttcgcatttcgatcttaacggctttgatgggagccacgttgctttcctccccatcgtttgctcaaaccgccacaggaaccggggctaccgcttcaggccccaactccaccgccaccggggaatacgcacaagcttcaggtccgaatgccactgcaacgggcgcatacgccaatgcgtccggcgacggggcgattgcaaccggcgttcaagccagcgcctccgcagacaacgcgattgcctcaggaacaaacgcgcaagcttccggcgtgaactccatcgccacgggccagggcgcaaatgcgacggccgtcaacgcggtagccactggcacgttgagctacgccagcggtgaagcggcgaacgcggtagccactggcacgttgagctacgccagcggtgaagcggcgatcgcactgggaacccaatccgcggctaccggcgtccactccttagtggtcggtgttcagtcacaagcaagtggagacctgtcgatgtcgataggctatttcagcaggtcgcgaggcaacgcttcgatcgcacaaggcaacttggcccaggccaacgccgatcacgctgttgcccttggttcctctgccgtcgccgatgcacgccagtctgtggcggtgggcgtcggggccgagtcacgggcgtag

SEQ ID NO: 517325 - DNA, 756 bp, Stenotrophomonas maltophilia
atgcaactccgctttacaatcgccgctgctctggcttgtctggccttggctgggtgttcgaccgtcgaacccaaacccaagccgttctccgcctgggcttaccaacccccaaaatcgcatggcgctatccaccgattcttccatccgaagagtggccgggtttggaaaggggtctctcctgctttgagggaaaaggtggaagccgtccaagcccagcttgctgtggaagggttcgacgtgcgcccacttgagggctaccgttcgccagagcgacaggctgcgctcctcgcttcagcttctggcgtcaccaccgttggtgcctacagcagttgccataactttggtctggcactggatgcagccgtgttcgtcaacgggcagcccagctgggacctgggcgatccgcatgtgatggccggctactttcggttcggcgagctgtcagaaatggtcgggttgaactggggaggccggtggaccagtccgaaggactacccccacgtcgagctcagggccgaatgcgtccaggcgaagtgggcccaccgaaacggaaagccgcgccgcccgtttgctcccgtcattggcaaacccgcgccgtacgccctggccctagccctgacaccgcagtggtgccctgccggcatggcaaccgagtgcttgctgtggagcaatgaaaaccgctacgcatggagcttggctatcccggagcgggtttgttctgcgacctttcctaacagcttgagaaagatcgcctga

SEQ ID NO: 517326 - DNA, 462 bp, Stenotrophomonas maltophilia
atgaccggcatcctgcctgtgctgcgcgaaatgttccccggcaaggcgatgctgaccgtcgaggacgtggcccgcgtgctcaaccgtacgggtgcgggcggctatgagcagacccgagatcagctttccagaggactcatcgtccctggcctgaggaagttcggcggaagctggttggtgcctatcaccaccttggcggccgccctcgatggtctggtggagaccgacgggacgggcagatcgacaccaaatgccttgcccgctacacatacggtggtctctgcagagccgctggtacctcgccgggccggtcgaatgcccacccgagccaagcagcggctcgagcttcagcaagcccgggctagtcagttctggccgctggtactgtcaaccttgaggggctgggaactggacgccgcgcttccgcctccggccgccccccttccccgaaatcctttctga

SEQ ID NO: 517327 - DNA, 324 bp, Stenotrophomonas maltophilia
atgaaaattctttcgaattctgttgctttgtctttgctgcttgttggctgcggtaacggggagccccaggaagagcggctttcccgaaatgagaaatatgatgaggcgccaagtctggccctttccgaggaggagttggaacgtcagacttcgatggctgaaaacgggagtgcagaggcccgtctaaagctcgaatggcactactcgacgcgtggcgacatggagcggtatcgctactggcttgaggagtcgcacgaattgacgttagttcaatgcagcgattggcactgttcctctcccttgagcaaggcgggggggctgtag

SEQ ID NO: 517328 - DNA, 462 bp, Stenotrophomonas maltophilia
atgtttggtgatgattccacgctattcatgaggtatgtgaaggggcggggtaatgctgtatacccgtggtcgttgtcaattgtagattgctattttatgtggctcgcattttccaaggtctctgggagtgatcggccgctgctgtcgaggatatctgataatggcaggcagattgaggatgttctcattgctgatgcctacgatatctatgagattgatagtcgtgccgcgggttttgaagttgtgctgcgccatgattcgtcgggctcattgtgttattgggatgttcatgagcgctttgttatagctgttggtggtcgtgactttcttggggtggcaagcccatatcccggggacatagaaaagcatcgttatattgaggagatgatgcatagagaggcgttcggatttgatgggccgcctgaggcgatttatgcggccatctccaatccgttctcttga

SEQ ID NO: 517329 - DNA, 939 bp, Stenotrophomonas maltophilia
atgaatggactctcttcgctgttgattcgggcggtactcgcggtggtggtgctggcggcctgcgtggctccggcagtcgcccaggaagtggtcgagtacatccacactgatgcactgggttcaccggtggcgatcaccgatgccagcggaaacgtcatcgagcgtacggtgtatgagccgtatggggcggtggtgaatcggccgttgaaggatgggccgggatatacggggcatgtgacggactcggggaccgggctgagttacatgcagcagcggtactatgatcctgcgttggcaggctttctgtctgtcgatccggtcgctgcatatcagagcccgattggacagttcagtcgctacaggtacggagatggcaatccctaccgctttactgacccagatgggcgtcaagtgtcggatccacgttcttgccacgacacttccagctgcctgacccttgatcaggcacaacagcaagtcgggcgagatggccgtctgatgctgagaattgttggaggatcggcggtcgcgggcacaaccggtggtgcagcgatagagggtggaggattcgtttcagcgttggctgcggcaatgcgtggcgccataatggccgggaaggatttttcccaagcacggaagtacattgactcggttgcagatcagttgggtcccaccggggggcgtgctggcagaagaaccaaccagtacgaggggcatggtggcgccgctggcgcaaaaaaaatgttcaatatattgactcgcggtcagtctgaggcgcgggatggggggcagttagggaaactgggcgacggctcagtggttcagatgagtgcaagaattacaagggatggttcgggcgagacttcagttcggctcagcgctgaacgaaccggaaccaagattaaagaggttattaaagttagatttaaagaggagtag

SEQ ID NO: 517330 - DNA, 5319 bp, Stenotrophomonas maltophilia
atgcagtctcgcctcatttctcatccgcgcgccgcaacggctgccaagggtctgtttctcggtttcattgccctgtgtgtgctggcaccggtcggcgtttcagcccagatcgttcccacctggcgccaggagtacgacaagcgactgaagtacggggaccttgtcgaaccgctgaagggcgagatcttcggcgagcaggtcaacctctatgacggttcgatcagcttcaaggccacggatgtttcgattccgggcaatggcagcctgacgatgaccttgggccgcagctatcgcgatggcgatcgcagtagtgagagcccattctcggattgggatctggatatcccgtccatgtccggcgtctatggcgatctgccggagaccgctgctgtcggctattgggcgcccgctgcgcgctgcagtacggtggcggcgcctccgtcactggaggtctggaaccgtcgccgcacccaaaccgtaaatttctatcccaatactttctgggatggcgtgcgcctctccctgccaggtggtggcggtgagccggtcctgggaggcagcggtgatgcgcgtcagccgcagccacagtttggcgaaccggcgccttggaataccaagggcggctggacgttcagttgcctgaccgccctgaagagtggacagccgggacaaggcttccttggccatgctcccgacggcaccaagtactacttcgactggatggtcgccaagccccacaacggtgcaacgctgcaaccctacggacctgaaagcaatgcactgctgaatcgaaagcttgtgttcctgtacccatcgcaggttgtggatcgcttcggcaactgggtgcgctacgagtggagcggcgaccggctgttgcgcatggttgccaacgatggccgcgagatcagcctggcctacaacgcgaaaggactgatcgcatccgcaaccgctgcagggcgcacctggatttacgggtacacggaggccgatatcctgcggacagtgacgctgccggacggaacccaatgggtctacaacctgccgccgctgtcagtcacccacaagtacgccgactacatcgggcagggcatctgggagtacatggactacccggccacatgctcgcgcgtcaacaagatcgtggccagcgagatcaccctgagtatccagcatccgtcgggtgcgttgggaacgttcctgttccgtccgttccgccatgggcgcaagaatgtgaagctggattgccagacctctggtgacaatcacctgtttgccgatggctggaactacacgccggtctaccgtgacgcaatgtcgctggtgaccaagaccatcagcggtccgggcatgcccactgcacagtggacctatcaatacaccaatctcaatggtgctttcgcccaggacctgggcggtccagtaatccccgtaggccaggcagagccgaagatcaccaccgagacgttgcccgatggtgtcgttcgcgtctacgagttcggcaaggaagttgcctacaacgacggcctgttgctgtccacgacaacgcgatcgggcggctcggtcgtgcgcgttgaccgcaataactactatccagatgcccagctggatgcggcgcccttcccgaaagaggctggcaaggacttcaagtacggtgcgagcgatctcaaggcccattacaaccgccccgttcaatccactgttgtggaacaggatggcgtgcagttcacccgcaccgtgcaggcctttgatgcatttgcgcgcgaagtcaccgtcgtcgaagcgaattccgctggccagagtcgcaccaccagcaccagctactacgacaatcccgcgctatgggtgaacggccagacagcgcgcagtgtgctcaatggcatcgaacagtcccgcaccgaattcgatacggccaaagcactgccgctgcgcgcctacgcatttggccgcctggcgcagcaggtgacctatgcagccgatggcacggttgcctcggtggccgatggccgtggaaataccagccatctgtcgggatggaagcgtggtgttccgcagcagctccgcatgccggccacgcccgaagcgcccaatggtgcggtgcgcacggttgccgtcgacgacaacggttggatcacctcgctgaccgacgaaaccggcgcaaccaccagcttcagctacgacagcatgggcaggctgcgcagccagcagttccctggcggcgacagcgtgaactggaatggcgtaaccatggacctgcagcgactgggtggcgcgcagctgggggtgcccgccggcgcatggaagcactcgcgcacgcagggcgggcggcgcacggatacctacctggatgcgatgttccgcccggtgctggtgaccgagaacgccaacaacgtgctggacagcgccgtggtgacccgctacgacaccagcggcaagaccgtgtttgcctcgtatcccacgcggcagctctccgatatcaatgccgccctgaccggcaccacgacgcagtacgacgcgttgggccgccccaccgtggtcagtcaatcgtccgagcttggggcactggttacccgcaccgagtacgtgggcaacctttcggtgaaggtgaccaacccccgcggccaggccacgacgacccgtcaccttgcctacgaccagcccagctacgagatgccgctgacgctgcagcacccggaaggcgtggtgaccgagatccagcgcgacacgctgggcaagccgctggcgatcacccgccgcaatgcagacggcagccagtcgctcacccgccgctacgtctatgacggctaccagcagctgtgcaagaccatcgagccggaaaccggtgcgaccgtgcaggactacgacgcggcaggaaacgtgctgtggtcggcggccggcacgggtttgaccagcaccaccgactgcaaccgaagtgaagccctggccagcggacgtgcggtgaagcgtagttacgacgccgccaaccgcttgtcgtccctgatcttcccggatgggcgcggaaatcagaactggtcctacgcgcctgatggtctgccggccgagatcagcacgcagaacgatccggcccggccgatggtcgtcaaccgctaccagtacaaccgccgccgcctgctcagcggcgaaaccctgcagcatccggatctgggaagcctgagcctggcctatggctacgatgccaacggcacactggccagcaatacctatccgggtgggcgtgtcgtcagctatacgccggacgcactgggtcgggcgacgacggtcggcggctatgcgaaggaggccagttactttgccaacggcgcgttggcccgcttcgtatatggcaacggaatcgtgcacacgttgacccagaatgcccgcgggctgcccgaccgcagccgcgatgccactgcagcggccgcagtgctggatgacagctatgactacgatgctggtggcaacgtgatggccatttccgatggtctgcccggggcgcccggcaaccgggacatgacctatgacggcctggaccggttgcggacggtcactgcgccgggcttcggcaacgccttgtatgagtatgacgcgttggacaacctgcgccgtgccaaggtcggcagccgcgatcgtacgcactacttcgatccgaccaatcgactggtcaacgtgattgaaaccggaaccggcgcaaccgtgaccggtcttggctatgacgtgcagggcaatctttcggtgcgcaatggtcaggctttcgcgtttgactacggcaaccggctgcgcgcggccggaacagcagagagctacgagtacgacgcccacggccgtcgggtgaaggccagcgccagtggcaagggggcaatctactcgttctacgacaacggcggcgtgctgcgattccagcgcaacgaacgtaccggcaagcagaccgactatctctacctgtcaggcagtttggtttcccaggtgcatggcgaagcggcacccagcgttcccgcgctgagtgcgccgggctacatcacccagggcagcgtgaacctgacctggagcccggccggcggtgccaaccgctatgagttgcagcgtgcccttgcgggcacctggagcacagtcttcgatggcgcggcgcaatcgttcaccagcacaggcctggtcacggggacctatcaattccgggtgcgcggctgccgggcggtgtgcggcggatggagcaatgtcgcgtcagtggccgtggcattggcgccatccaccgtgccgaccctgaacgtgcctgccacagccttcaacggcagctacaacgtagcttggtctgcggcttccggtgccgagcgctatgagctggaggaaagcgccaatggtggcgcttgggcccaggtgcacaacgccatcggtcagtccaaggccttcagtggcaaggcagcgggaagctacaactaccgggttcgcgcatgtaacccggtagggtgcacgggatacagcgccacggctgcggtgacggtcgtatatccgcctgccactgcgcccggactctctgcgccggcacgcgctgcgccgggcagtattggtattggctggaacggggtggctggtgccacgcgttacaccctgcaggagagtagcaatggtggcggatgggtcacgctgttcgacggcaacgcgggttcctatgccaccgctgcgcgcggtgtgggcaactatggctatcgggttgccgcctgcaatggcgcgggctgcggaccgtggtcggctacgtcgacggtagcggtgatcgggccgccgacgatcgagccggtgatcagtgcgccgggcctggtgaacgtgccgcagtacagcctgagctggtcggtgccggccaacagcgagagcttcgtgctggaggagagcgccaacggtggtggctggacggtggtgcataacggcgacgggaacagctttggtgccagccgtggtaaaggcagctacgcctatcgcgtgagggcgtgcaatttcgcggggtgcagtccgtactcgggagtcgtgactgtcgcggtggtgctgccgccgggggcgacgagtctctatctagcagagtggttgacgacccgcaggccgccctatcaggtccagtgctctgcaggatggagtctggtggcagacgcaaccgagtatcagcttgaaagcggtggcggtggcaagcgtctttacacgggccccaagacctacgtgcagtcgaatggcgggacctactgcgcgcatgagtatcgcgtgcgtgcctgtaatgcaggcggttgctccccatggtcggccgaacggccggtcacccaaggtgtactgagctgggactaa

SEQ ID NO: 517331 - DNA, 1455 bp, Stenotrophomonas maltophilia
atgaatgcgtttggtaatgcgcgctgggtcgcgctgtcccagctgtccaagatcgctgcgcaggtggtcatcgcattcgttctggccaagcttctaccccctgccgagtacggcgtcatcgccatggcagggatcgttaccgcgtttgcgatgcttttccgggacatgggtgtgactgcggtcatcatccagagggctgaactgacctcaggcctcatgaatacggcgttccggctttccttggtgagctcgctggcggtcggcaccatcatcgccgcaagctcgcccttggttagcgcctatttccgcgagtcggcgcttacgcctgttcttgttctgctgggtctctcatttccgctatcgggcctgattgcggtaaatcaggctctcctcgaacgcgagtcagcgttcaaaaagcttgcacgcatcgaagtgatcgccaatttgaccggggcgatcgcatctgttgtggcagctcttgctggtgccggtgtattcagtctcgtcgtactggttctcgttaccggaatcctgagcgtggtgcagatgatgtttgcatctccctggaggccgggcccaatgacacgggccgagtccggtcgatatcgagaggtgctgtcgttcagtgcgggcgttgttggcttcaacatcgtgaactatttctcgcgaaacgctgatgggctcatcatcgggcgactctattcggcatccatcctgggcgcctattcgttggcgtatcgcatcatgctgttcccactgcagagcctgacatttgtcgcgaccaggtcgcttttccctgtactcgctgatcggctgagaagaggcgagtccctgcgggcaccataccttgccgtcgtggagacgatttctctggtcgtagcgccgatgatggcgggcctctacctgatcagggagcaggtgataggcatggtctttggtgagcagtggggactgacatcggagttgttgaagtggttcgccccgaccgggtttctgcagtcggtgatgagcatctccggagtcgtgttcatggccacgaacaagccaggactgctgctgcgtcttggatgcattggtgcgtttcttcaggtaggagccttcgttatggcagctccctatggagttgagcggatggcggaattctacctgtatgcaaacgtcatcaattttgtccttgtgatggccgtctgcacacgcaccgtcggcgcaggtttcgccaggatgctgttcgtgatggggcgatcagcggtctgcgcacttctcatggtgcttgcgctggtcttggtatttggtgcgggcctgtccagctcgggttccagtctgctttggcttgtttcagtggttctctctggttcgattgtctactgtttgctgtgcatggtgctggtgccttcggcgcgtgcgctgctggttggtcgcgcacgaaagctgctagttgccaagacgggagtctga

SEQ ID NO: 517332 - DNA, 1365 bp, Stenotrophomonas maltophilia
gtgtacgcgattgtaatttttctgtcgatagtggcttcgctgaccgtattcacgcggaacatgcgtggtgtcgcagcttatggtttgctcgcgttctacatgatcatcgactattcgaactatctgttcaggttgggcgacacggctacaggaacattggcgaagtcgttcaaggaaatgctgttgatcacgctcgtgcttgccattggtgcatctgctgcatcgcgtcgcacaatcgacagaaaggtcgtcgtcatgatcggtgccactctgttacttctgctctacggaagcatcatgaatgggttcctgctggcctcactcgattggagaggctctatccttccaatcattctggcgattcttttggttaacgctggacttcttgacgagaggcgtgtcggcaggctgatgtcattcctggccatcgccatcgctgccaactcggccttcgcggtgcttcagtactacaccttctccggcgatttcgaatccacttggcgttatgacttcctgttgcaggaggcgcttcgtgctgatagcgatttcgaatcgaggttgatggagtaccagattgttcgcgatggaaacctgcgatcttccggcgtgtttgccagtgccttgcagttctcctattcggctgctcttgcctgcttctatttctattgccgatcgtcggatcttattcgccggggacggcttctctcctcggttggctggggcgctctgatgattctctgtgcctggggcgtgtatgtcagccaggtacgggcgtctctgatcatagtccttgtatcgatcgctttgcatgtcatctgcttctccgcccgcgatggcggtcggttcaaggcaggcattgcaatctcaattggtgttggcgccgtagtcgtctttgcctgggcactgatgttccacgcgtccgcgttcgatgcttctgtgcagggcagaatcccgcagtacgcgttcctggtccagaacttcattgcggcggggcatggtgtggggtcgttcagaagcaagttcgactcttactacatctatggattcctcacgtttggcataattttcgccgcgtggctcatctacgtgctgcgtgttttctggcgctctttcggcggtaggatggcgaaatggaagccgccaggcgacacgatgttgcgtggattcatgttttcgtcggtgattccgatgctggtaatctgtagcttccagcacgtttcaggttctctttactatcaggtgatatggatgttgctgtttgcgggatcaaggatgtcgatgcggatcggcagagcgtcaacggcagagtcggattgcccgcctcgtgcgatggctggtgttgcctcggctcggagtggcgcttga

SEQ ID NO: 517333 - DNA, 1125 bp, Stenotrophomonas maltophilia
atgaagatgctcgcggtacatcagagttcggagatgtatggatctgaccggagtttcctttcggcaattgaggccattatcgaaaatgcaggtagtccgctccaggtttgcgtagtgctgcctgatgaggggccgctgactgaacatctacggtcgatcggagcaaatgttgacctggttccggatggatacctgcgacgttcagagctccgctcgcccctgaggttcctggctgcgctttggcggggcgtcaccgccctcaggcgtaagctcggcggcggcgatgtgatctacgtaaatactctggtctgtgtgtcggcaatcctgtccggcggcatgttcagcaagcgtctgatcgtgcacgtcagggagatcccacgcccgcttgaggcggttttcttccgtgtgctgctccggatttgtcgggccgagctggttttcaactcaaacgcaaccaggaaggcacttgggttggatgggcgagtgctttacaacggagtggattcgccgcaggactacgtttccgctgcggcgtgcaagcgacggagtgcggaccagctgcgtatcctcgtcattggaaggataaatgcctggaaaggccaagggcttctgctggacgcggcggcgatactggagcgcgaggtatccattcgcatagtgggttcatcgattccgtcccagttgcacatcgtcgatgagctaagggcgcaggcgcgtgatctgccggataatgtgaatgtcgaatttttcgaattctgtgatgatccgggcatgcactatcgatgggccgattacgtagtggtaccttcgacgcggcccgagccattcgggcgggtggcgattgagggaatgtcatttggaaagcctgtagtagctgccgcccatggaggcctattagaaatcattacggatggcgccagtggctgcctcttcgatccaggaagcgtgcaaagcctggccaccgtacttcgccaccttccagaacatgggagcgatgggtattgcgcgatgagttctgctgcgcgtgaagccttcatgtcgcacttctcggtggaatcctatgcacgtgaagttcgtgaactgttcaaggaatttggggcaactgcatgtctggaacagagctga

SEQ ID NO: 517334 - DNA, 1155 bp, Stenotrophomonas maltophilia
atgtctggaacagagctgaaaattctaggaatcagaggtattcctgccgcccatggtggatttgaaacctttgccgagcagctggccatccatctggcagatcgtggctggcgtgttgtcgtgtactgccaggaagagggcacgggccctgttttcgaggacgagtggcatgggatccgccgagttcggatcccggtctcggtttccggtccggctggaacagtactctttgatctcaagtcgacgctgcatgcggtccggacgaagggtttgtgcctgacacttggctataacacagcagtgttctccgtgttcctgcgattgcgcggtgtcgtcaatgtcatcaacatggatggcatcgagtgggcacgtgcgaagtgggggccggtggcaaaggcgtggttctggatcaatgagcgcttcggctgctggctcggaaaccacctcattgccgatcatccccggatcaaggaccatctctccacacgtgtaaggcgcagcaagatcaccacgatagcctatggcggcgaaaggattgaatcggctgatccgtcggttgtcgcttcgcttggactcgttccgggcagttactacaccgttatcgcgcgtcctgagcctgagaattcgctcttggagatcgttgaagggttttcgcgtgctccgcgtgaacggaagctcgtgatcctgggtaagtatgaccgggacaacgattaccatcggaaggtcctcgaggcggctggagaaggtgtggtgtttcttggggcgatttacgacaaaaaggtcgttcaagcgcttcgattcttcagtggtgcgtacatccacggccaccaagtgggtggcacaaatccgtctctggtggaggcgcttggcgcgtcgaatccggtcattgcacatgacaatctcttcaatcgctgggttgcgggcgatggggcgcgctactttgatggcgctcctggatttgctgcgttgctggacgagattgaagcagacacgacgcagctaggcgccatgtcggtggcttcgaaatcccgtcatcaggaggcattcacctggacgcagattctagctcggtacgaagagttgcttttggcgttctcgcatgggcatcagcgtggtgccgatgcggctcgcgcgatggatcaagatctgtgttga

SEQ ID NO: 517335 - DNA, 780 bp, Stenotrophomonas maltophilia
atggcgccagaggactcgccgacattgcagtctcttggtgagatacttcgtcgcccggcgggattcggtgggcgtgtcgtggtctgggataacagccccgattcatttggcgccgattcaatctcgggcctggatctttccggattcgatcggagctacattgcatgcccggagaatttcggcctggcaaaggtctacaacacggtcagcacacagttgccgggcgacctgcttctgattcttgatcaggactcgatgctgccggatgatttccttgggattctggatcgtgagatttcaagcaacccggactgcagcctgttcctgcctgtcgtggagtccaatggcaggtgcgtcagcccggggcgcctccgtgttttcaaggggaagcatgaaagcgctccgcaacaaggcgtccggtccccaaagaatgttcttgcgatctccagtggaatggtgattcgctctggctacctgcagcagccgcgatttgacgagcgcttgaccctgtatgggatagacacgcgcttcatgattgactttgcggacaatgagcggcagctcgtagtcatgccctcggtgattcgccacgacaccgcgctctggtcggacatgcccgcagacggaatgctctggcgtatccggtccttgataagttcgtggcccgtcgtgttcgaacggagaccactggcgcggatgctctcgtggctttatgcgcgctatgtgctcgccaagctcgcgatcaagtatcgcgacatcagattcctttacgtcctttga

SEQ ID NO: 517336 - DNA, 2169 bp, Stenotrophomonas maltophilia
atgacccagtcccgcctgcccccgcgcctgctccgccccgccaagctcacgttgagcgcgctcgccctgtctctttccttcgctctgcatgcccaggaagcaccgcccgccacggccaatgagtggggcggcataggcctgctgcagacaccgaccgcgcggatggcgcacgatggagacctgaacttcactgcgtcctacaacgcaccttacgcgcgctacaacctcacactacagccactgccatggctggaaacgtctttcaggtacataaacgtcaacaacctcctgtatggcagaagcgtggcgggcgaccagcactacaaagataaatcgatcgacttcaagctgcggctgtggaaggaatcgcgccttctgcccgaagtcgcctttggtgtgcgggatctcggcggcacgggctttttttcgagcgagtacgtcgttgccaacaagaatttcggaccgattgacgcatccctcggctttgcgacgggctatctcggtaatcgcggtgacttttccaacccgctcggagcgatcgacaatcgcttcaaggaccggcggccaattgcaaacagcgacatcatccaggccggcaagtttggcctgagcaacatgttcaagggaccggtcggtatctttggtggcatcacctaccagacgccgatggacgagttgttactgaaggtcgagtacgacggcaatgactatcgtcgcgagcctcgtggcaacaacctgcgccaacgcgcgccgatcaacgttggcgtggtctacattcccagccccaacgtcgagttgaccgcagcatgggaacggggtgacgccgccatgttctcgcttacgctgcgcggcaacccaggaaatgccccagcggcacccaagccgttcgacccgccacctcagcgcctgctgcccgggccctccactgccgcccaaggcacgatcaccacgcccgcggcggaagccctagactggggcgcggtcaccagcgaactgcagcgcaacgccggcttccgcgttgaacgcatctcccgccgcggcgacgagctgtacatcgacggctatcagacccgttacctgcatgcttccaagggcttggggcgggccacacgcatcctcgccaacgcaaccgacgacgactacaactggtacaccctgcgcaccacccgcgtgggcatgcccatcgccgacctgtcgatcaaccgtgaggcgttcgcggggtacctcgatggcacggtcagcgaggatgttctgcgccgcagcaccgaacttcaggcgccagacatgcgtgcgcgcgagacgctttacacgcccaagcgctccccgttcggcggaggcttcaacattggttatcgacagaatctcggcggtcccgacggattcatcctgtaccaggtggccgccaactattcgggcagcctgttcctgcgtgacaacatctggctgaccggcaccgtcagtgccgacatcaccaacaattaccacaagttcaagtacaacgcaccgagccggttgccacgcgttcgcacggatatccgccagtatctcaccacgtccgacgtgatgttgccgaacctgcaggcaaacatcgccggacgactggcaccagacctttatggcatagcctatgcgggctatctggagtggatgtatgccggtgtcggcggcgaactgctgtaccggcccagcggcgaacactgggcggtgggcgccaacctcaatcgtgtgcaacagcgcgactatgatcaacactggggcctgcgcgattaccggatcaccaccggccacgccacgctttactatgctttcgacgcgcgcgagcgcatcataggctcactctcggtcggccaatacttggctggcgacaagggcgccaccctggatatcgcccgcgtattcgacaacggcgtaacgatgggcgcctacgcgaccaagaccaacgtctcggcccgcgacttcggcgaaggcagcttcgacaagggcatctacttcagcattccgctagacggtttcctgccccgctccacgcgcggccgtgctgccttcaactggaacccgctgatccgggacggcggcgccatgctcgggcgcaagtacagcctgtacggcatgacaggtgaccgcgacgaacgcttcttctacgacaacctgcgcgcgatagaagattga

SEQ ID NO: 517337 - DNA, 753 bp, Stenotrophomonas maltophilia
atgaaatttcgactttccaacgcggcgatcatcgctgcgctgtttgccacgagctccgcacaggcaactccggtgcgcttcgagggagccagcgaggcaagcggcatgcgggacttgcctgccaacgcccgtctcgccgacgctctgctgcaggctcgccctcgacctgacgcctacctgctgggcaccagcttcgagcgcccgcaggcgatggaagaacaggtgcgccttcgtgccggcctgcagtacggcgcagagcagcttgcagactccagcgacgcagagacctcagccttggcgcagacgctgatggactggttggccgcacaccctgcgaccggacggaaacccatagccggtacagcgcgactgatccaggtgcaaccggccaacaacccggtactcgccgccggcgatacgctgcggctcccgcttcagccacgcacgatcactgtcatgggcgcagttggccaagcctgcgtgctgcgacacgccccgcagcgcgacgcacgtgactacctgcgtgactgcaatcccagcagacttgccgaccgcaacgatatctatgtgatccagccagacggccgcgtccaacagcttggcattgcactgtggaaccgcgccgacccgcaggccatcgccgccggcggcacgctattcgtgcccctgcgcgcccagctcatcaagcgcatcgatccgctgttcaacagagatttcgccgcgttcatcgccacccagcctgtcagcccgtga

SEQ ID NO: 517338 - DNA, 684 bp, Stenotrophomonas maltophilia
atggcgcgcaaggatgcggccagacatcggtcgacgcagcgtgtgcccggtgcgctgctgtcggccgctgtcggggctctactgctggcaggctgcaccactggcagccgctccacggctgataccttccgcctgataacccatcgcccggcacaggcgaccgtcgaaagcgtggccagcaaccgcttcccgcagatgcaggtggagacacctgaaatcgaggctgtcgcggtgctgggctacatcgatggaggccgccagcagtggtatgcaggtacgtacgccgtgttcgaaatggaccgcaatggcttgctgttgggcggtagcggcctgggtgaggagtggcgtgcgcgcatcgaaggcccctcccccttcgacaacctgcttgccgtgaccacacccgtgacgttgcagcgccgctatgactgggtgcctgcttaccaggtcaacgtggccgtgaccggcaccctgagcaagggggcactggagcaagtagagatcctgggaacgcggcgcaccctgcaacgattcgaggagcaactccagggcggcggcatgcacggccgcaacgtctactgggccgatccgaccacgggcttcatctggaagagccgccagcacctggacccgggccgtgttgcagagctgacccagctcaaaccctatcgcccggccaaggattga

SEQ ID NO: 517339 - DNA, 354 bp, Stenotrophomonas maltophilia
atgttcaagaagacgatcgcagttgtggccctggcggccttttccgcctccccgatgatgagtttcgcgcaggaagcgcaggccgttgctggcgcgcagtcttccgcggaagcaggtgcggctgaagttgccggtgctgaagcggcgggcgtctcgaccgctaccgtggtgggcaccaccgtgatttcagtggcagcggcggccgtggcctacagcgtcggcggcgacagcaccagcggcagcaatgatggcggcggcggcaccgatcccggcggcccgggcctgggcggccccggcaccggtggtactggcggcaccggcggcaccggcggcaccggcggcaccggcggctga

SEQ ID NO: 517340 - DNA, 639 bp, Stenotrophomonas maltophilia
atgatgattgtctgggagggcctgtccgcaatcggcgacagccgtgcccttctacctttggttaccgtactggcggtgttcctgccagccatgcatcgccccctgctgaggcgttggacagtggccatcatcgccgtggccggggcgaccctggccagcaagatcgcattcatgggctggggcctgggcgtggagtcgctggacttcaccggcatttccggtcatgctgccatgtccagtgcggtgtacccggtcgcgctgtggctgctggcatccggccgcagccagcgggcttggaactgggccctggcgggcatgatgcttgcaatggcgatcgccatctcgcgtttcccactgaaggctcattccccgtccgagattctcagcggacttggcctcggcatcgttgcgtccatttgggttctgcgccgatcacaggcactggggcaaaccttggctgtgcgtatccgcactgtggtcctggccatcgtggccgcgattggcttgccatttctgctggcagacctgcacacgcatgatcttgtgaaagccgctgcaaaggctctgtccggtcgtgagcgcgcactggatcgtcacgacctgcgcaaccatgcatcgccgaccgatcagcgttactga

SEQ ID NO: 517341 - DNA, 1203 bp, Stenotrophomonas maltophilia
gtgtcgatcgatctttattcgcctttcgtgccggctggaatcgccttgctcgcactgctgtgtgctttgccgctggggaggttcgtgccgctaccggactccaaggggcgtgctacttcgatcgatggtctcagggggctgcttgccctgggtgtgttcgtccaccactcatccatctggtatgtctacgcgaggagtggggagtggaaggctccagcctccgccttgtacgcgcagcttggcgaggccgcagttgtcctcttcttcatgatttcggcctatctcttttatcgacaaattgccggtggcgtcactgattggacgaggctctacgtcggcagagtcctgcgtatgttgccgctttatgcgatctgcgttgtgctgttgctgcttctggtcttgatcgagagcgactttcaccttgtcgatccatttatccggtttggagtgggggtgatccagtggttctcattcactgtgcttggggcgccggatatcaatggtgttgttgggacccgctacatcatggccggagtcgtttggtcgcttccgtatgagtgggtttggtattcagtattgccactgttggcgtatttcatgcgtcagcgtgtccggcgcggattgctgctgctgtcggcacttggtctggcgtatgcggctgtccgcttgagttgggtgctgatgttgccctttgccggtggtgtcgccgcgtactacgcaacaactcgaatggccgttgtgagctttctccgtgggaagtggggctcgattctggcggtttcgtgcatgatcctctcggttgcctgcttcgattcagcccggcatccagcggcagtcgtcttgtggtcggctttctttgcggcgattgcgtgcggtaacaccttgttcggattgcttacacttcgggtttcagccattttgggtgagctgtcctatggcatctatctcctgcacggatttgtactctttcttgcctacaagagcttaggtacggttgcctttgcagatctctcgcccgccttgcactgggctttgactgcagccttgttgcttccactgctcatcgcttgcgttgtcagttatcgatgcattgaacttcctgcgatgctgtcgcgtagaagtgtcctcgaaaaaatacaggttgtgagcgaagtccttattgccagatggcgcattttgcttaggcctgaacgagtggactga

SEQ ID NO: 517342 - DNA, 342 bp, Stenotrophomonas maltophilia; identical to SEQ ID NO: 517294

SEQ ID NO: 517343 - DNA, 735 bp, Stenotrophomonas maltophilia
ttgagctggacccatttcatcgcgctgatcccactggcggacccactcaagcgcgacttctatgcacagatggccgccaccgagggctggagtgtacgtacgctgcgccagcgcgtcgattcgatgctgtatgagcgcacggcactctccagtcagccagagcagaccatcgccgaagagttggcggcactgcgcggcaaccagcagctgtctccggggctggtactgcgtgatccctacgtactggactttcttggcctcaaggacagctgggacgagcaggaccttgaaaccgcgatccttcgcgagatgcagggcttcctgcttgaacttggcacgggcttcagtttcgtcgcccgccagaagcgcatccagatcgacggcgatgacttccacctggacctgctgttctacaaccggcgcctgcgcagactaattgccatcgagttgaagatcggcgagttcaagccggcctacaagggacagatggaactctatctgcgctggctggaccggtacaaacgtgaggacggcgagcaggcgccgttgggcatcatcctctgcacagggaagaaggcgggccagattgaattgctggagctggaccgctcaggcatccatgttgcggagtacctgaccacgctgccctcccgtgaggtcctcaagcaaagattgcagactgccatggagcgggcgcggcagcagctgcagaccgcggcgcccggcctcccgtag

SEQ ID NO: 517344 - DNA, 1644 bp, Stenotrophomonas maltophilia
atggccgtcgtcgcgcggattctgttgaccctgttgctggggtacctgtgcctggtggctggccgcgccgtgctggcattccagcacggtacctggggaaagagctattacgtcctggtggacgacggtgggaagaaggtattcgaccagcgtgcacggccggtcccggaagaagtgctgagggggcgtggcctgggttgggaaggtgatgtcctgacccaggacgggcaacctctgtccagccatgccgacgaccaggtacgggtgttccgtgccgacggtggtccgctggatttggcggtggtccgctggctgggccttggtgccgtgctggccctgatggtcctgatgtggcgcctccaggttgcagggcggtggctggttcggctgcgcaccaccttcccgtggttgcggccggtggatctgctggtggtgacgggcctgttgctgttctccctgctcaaggtcggcatcatcgacatgggtcccttcgggtgcgtcatcaccgggctgcagttcggcctgaactactacgtccatgacgtgctggtcggtaccagtggggcgctgacgatctacccgtacaacccgctgagcctgatctggatgcaggccctggccggcatccacagcgacctgcagtcgatcgggatgaatctgcgtccctatgcactggtcagcctgtcgatcgtggctgcctatatctggctgtgcctggaattgcagttgctgttcaaggagcgctggcgcggcaatccgcgcctgctgttcttcgtactgctgttcaatcccttcggcctctactattcgctggtcctgggccaggtcgatgtgattgcggtggccctgctggtggcgggcgcgcgccgggttctcgctccgggaacactggccgccggactgggcctggtggtgctgggcctggtgttcgccaagcctcagcacatgctggtcctccctgcattggccatcgccctattcgctgcccgtaggcaggcactcaaggggcgcatcctgctgatcgcggccgcggtgacagtggccagcctggccatctactggagctacggccgggtgccggcctatgccctgtcactgggggtgaacccgcagtcgcagcggatcggctgggccacctggttcccgttgtttggcgatgcagtggtgatcaaccgaccgttggccttcctgaccattgcgttcctggtcctggcttaccgggtgaagcacgttgccgatggcatgggggcctggcaggttgtcgcgctggtgaccgcagcattaactgcctggttccaggcggcctatgcgcacaccttcggcatggccatgctgatgttcccggccctgatgctgctggtggccgaagctgaggaccgttggcgtgccgcgggtgtctggctggcgtcgatcctcctgttggtgggttggggaaccggcgaggtcggggacatggcgggcatcttcggcaaagtgcttttcagcccggaaagggtccatcacatcgtggcattgggtgtgaactatccgtccctgctggcgacgttggaggcggcagcctacatcgcatttggcgtgatgttgatgctgcgcctgctgggtggtgcggaaacggcagacgccggtcgctacatcgatcgttga

SEQ ID NO: 517345 - DNA, 1305 bp, Stenotrophomonas maltophilia
atgaagaacaagagcgttgccatcatcggtggcggattcaccggtcttaccgccgcctatgaactggcgcgcaatggcgtgcaggtgacggtgctggaggcagaagccgacgttgccggcctggcagcggcattcgacgtcggtggggaaaaactggattgcttctatcaccactggttcaccaacgacctggaggtcatgcagctcatcgacgagctgggtctgaacgatcgggttgaagtgaatccgacgaataccggcatgtactacgccaacaacttcttccgcctgtccacgccctgggacctgctcaacttcacaccgctttcgttcgtcgatcgcatccgcctgggcctgctcgccctgcgcgcgcgcagggtcaagcattggatggagctggaaggcctgaccgcgtcccagtggctgaagagcctgggcggcgagaaggtctatgaggtggtgtgggagccgctgctgaagggcaagttcggtccttacgccgacacggtttccgccgtatggttctggaacaagctgaagttgcgtggcggtagccgtggcaagggcggtgaagagcgcctggcctatttccgcggtggctttgccagccttgccgaggcgttggcggctcgcatcgtggcgttggggggcaaggtcatcaccggtacccgtgtcgacagcttcgcccccaagggtgacggctggcagttgcagacaagtgccggcccgatcgatgccgacaaagtgctggccaccaccgcgctgccgctggtggccgacatggtctccggctgggcgtcgccggagtatgtgcagtcgttgcagcgcatccagtacatcggtaatgtctgcctggtgctggagatggaccgcaagctgtctgatacctattggttgaacgtcaacgatcccagcttcccgttcgtcggcgtcatcgagcacaccaacttcgagcgtgccgagacctatggtggcagccatatcgtctacctgtccaagtacctgccgcatacggatgcgctgtattcgatggaccgtgatcagttcctcgacttcgcgttgccctatctgcagaagatgttccctgcactgcgccgtgagtggatcaccaagcaccacctctggcgcgcgcgctggtcccagccggttgtcgagaagttctacagtcgcctgatcccgaaagtgcgcgggccggaacagggcttctacctgtgctcgatggcgcagatctacccggaagatcgtggtaccaactatgcgatccgtgaaggtcgcaaagtggcgcacgcaatcctcgggggctga

SEQ ID NO: 517346 - DNA, 993 bp, Stenotrophomonas maltophilia
atgagcgggacccgaaaggtcctgcgactgctggtcggggtgggggtggcaggcttgttcggctggctggtgctgcgccaggtcagctacgagcagctgagcaatgcctttgccaacgtcggctggggctggctgggattggccctgctgtgcttcctgctgggctattcggcacgcatcgagcgctggcgccggatgctggcgcgcgacaatgccgccctgcgctggcgcgactgcgcgggaccattcatgggcagtttcgccatgaacaatgtattgccgatgcgcgctggcgacatcctccgtgcctttgcgttcaatgaccgtctcggagtcacctccggtgttgtggtggcgaccctgtttgtcgagcgcctgctggacctgctgatggtcgtgctgctgcttggcattgcgttgtgggtcagtggcgtcagtgattcgctggccggcggtgtcgggatctggacgctggcggcggcagggctggtgattgccctggtgttgttgttcccgggcgcgttctcgccgttgctggcctggggcggtcgcctgctctcgcgcatttcgccccgcatcggagcccgcgtgcaggatgagctgttgaagggggtcgatacccttggccatctttccggcaagggcaccatggctggcctgatgctgtggtcggtgctggcctggactggtgaggggctggtgttctacatgtgcgccaaagcgctggccagcctcgcggttgccgccgcagcctggctggctttgccgctgggaaccctggccacgctgctccccggcacacctggttacgtgggtactttcgactacttcgtggtcagggcgatgacggcgatgggcaacggtgttgccgaatcgactgtctatgccctgctggtccatttcatgttgtggctgccgccgacagtgatcggcggtctgttcctgatgacccgctcgatgcggggcaagccgtcttccgaggataggaaatga

SEQ ID NO: 517347 - DNA, 990 bp, Stenotrophomonas maltophilia
atgagcattaacaatccggacggcagattgttgtctatcgtcgtaccttgctacaacgaggaagaggtgctggccgagacactgcgccgcctctccgagaccgcagaaacccttgaggcccgtggactgaaggttgaattggtattcgtagacgatggcagccgggatcgcacccgtgaactgctgagacactatgccgccagtgatcgtcgtgttcgcatgctgggctttgcacgcaatttcggccatcagctggcggtgaccgctggcatcgacgcggcgcgcggcgatgcagtggtcctgatcgacgccgacctgcaggatccgccggaagtcatcgcggaaatggtcgatcgctgggaagaggggttcgacgttgtctatggaacccgcacggaccgcccgggtgaatcgcggttcaagctggctaccgctcgggtcttctatcgcgtgctcaaccgcctgtccgatgtgccgatcccgctggataccggtgacttccgcttgatgagccgcaatgtcgtcgaggtgctgaagtcgatgccggagcaggatcgcttcgttcgcgggatggtcagctgggtgggtttcaaccagatcgcgttgccctatcgccgcgacaagcgctttgccggcgaaagcaaatatccgttgcggaagatggtgcgcttcgcgaccgacggaatcctgtctttctcggccaagccactgcagctttcggtgacgctgggcgtgctgagctcgttgctcgcgatgctggtcatcgtctattcgctggccatgcgcctgtttacccaagaatgggtgccgggctggaccgcactgatgatcgcggtgctgttcctggggggcgtgcagctgatctgcgttggcatcctgggcgagtacatcggccgcatctaccgtgaggtaaagcgtcgcccattgtacatcgtgcaggaaacaagggatggcaccacagtcgtcaggcaggcggaggctggcgaatga

SEQ ID NO: 517348 - DNA, 2028 bp, Stenotrophomonas maltophilia
atgacccaacagcattgcaccgatatcgacccacagcgggtcatgagtgaaattgaacgcattcagccttcggtggtctgcttcgactacttcgataccctggtatcccggggcatccacccggaggatgtaaagcggctgtgggccgagggaattgcccgcgtgtttcccgagggccccgacggccccgagctgtatcgtcagcgcaacgtccgtgaggccgcccattgcgccattgatcgcggccccggcctggacagcgaattccgtgccagcgaggtctataccgaactctgggatgccaacccgggcttgcagtcgatgcctcgtgccgcattcgccacgctggcgctggacctggaagtatcgctggaactgtctacccagcagttggacgaacaggtcgtgggcctggtccgggagctcacggcaaagggagtcgaatgctggctggtcagcgatttctatcttgaaatcgacgtatttcagcgattccttgcccatcatgggctggattcggcattcaaacgcatgttcgtctcatgtgattcgttcacaaccaagcgcggcagtggaatgtatgcccgtgtgcttgcggaaacgggcatcaccgcagatcgcgtggtgatgattggtgacaacgagcacgctgatttcaacaacgccagggccgccggcctgcacgccatccacctggatcgcagccagcgtcatgcccactaccaagtgctggctgaacgtgccgccgaccttgccggcacccgctccgacatcaatcgcctgctaggtgccggccccggcgtgttccgtgagctggcgctcacgctccaccttttcattgatcgcctgcacgcccgccttgtccgcgaaggcgcccatgacgtgttcttcctggcccgtgagggccagttcctgaagcgcatgttcgatcactatcagaacacgcggcggcttcagggcgcagttcgcatccgaagccattatctggaagtctcacgccgtgccacgctactgccctcactgcagccactggccgaggaagcctttgagacgctgttccgccagtaccggcgcatttcactcaacgatttcctgtccagccttggcctgcagtcgatgtctgcggaactggccacgcgtcttggcgtggatgccgatgccatccatgacgacctgccgtccagcgaggtcttctctcgccttcgtgccgacgcgctgttccagcagacctatgagcaggagcgcctagcacgccgctcagcattcctcgcctatctggacagcttcggcgccgacaccgcagtccagaccctgcacctggtcgatgtgggctggaagggcaccatccaggacaacatttcggccatcgtgatcggcgcggataccggcctgacagccgtacagggccactacatcggtctggtcgccagcggctcggcttcggaccggaaccggaaggatggcctgctgttctcctgcatcggcagcaccagccgcaacttcgccattttcaacgagaatcgagccctgttcgaagtcgtgctcgctgccgaccatggctccgcattgcgctacggcttcgatgccagcggcctgcccgtggtcagccaccaggaattcagcgaggaatcgctgttccgcagcaaggtcgcaccgctgcaagcccagttgtgggacctgttcgtcgagctggaccgcgtcttccgccaccacaacatccctgcccgcgagctggaacgcctggctacgcacgcgcatgcacgcatgctgctgcagccggaccaggccgcaatcgagtggttcgagaacgtttaccacgtcgagaatttcggcgtgttcaatcattccaccttcgatgtcggcgcacatcaaccttcgttcatcgacaagcttcgtttctacctgtcattgcgccgcaatggcgtggacaaccttggcttctggcccctgttgacctgcctgcagcgcggcggccgctgggttgcctcgcgctacgcatcaggtcgactgcgcggcattgaagattga

SEQ ID NO: 517349 - DNA, 1200 bp, Stenotrophomonas maltophilia
atgaaaattgcgttctttgtcggctctgccgacatcagcggcggtacttacgtggtgttccagcatgcactgcatgcgatccaggaagggcatgacgtcacccttgtcctgcagtacccctatgtcgcgagccaacgcaaatggcaccccgcgctcgatgtcctgcggatcgtgcagatctgggacctgggtgaggagcacttcgacctggcgatcgccacctggtggcgtaccgccaccgaactgcacaagatcaatgccgaccagtatgcctacttcgtgcagtccatcgaatcgcgcttctacccggacgcggaacgacctctgcagtcgctggtcgacagcacctacgatctggggctgccggtcgtcaccgaggcgacctggatccaggagcacctgcaggaacgccacgccaacgatgcccgcctggtgcgcaatggcatccgcaaggacctctaccgcctggacggcccggcccacgcgccgcgtggtcgcgatctgcgcgtgttggtcgaaggacccttcggcgtgttcttcaagaacgtcggccgcagcctgaaactggccaggaccagccgcgccgatcagacctggctgctgacgtccagccagctgcgctggtacccgggagtcgaccgcctgttctcaagggttccgattgaccaggttcccgcgatctatcgctcgtgcgatgtgatcgtcaagctgagctatgtcgagggcatgttcgggccgcctctggaaatgttccactgcggcggcaccgcgatcgtctacaacgtcaccggccatgacgagtacatccgcaatggcgagaacgccttggtcctgcagcgtgacgacgaggccggcgtggtcaacgcgctgaatctgctgaaggactctccggacgaactccagcgactgaagcacaacgcgattgccacggccgaggcctggcccgattgggatacctcgtcgacccagttcgaggcagtgcttcgccagatgcacacggtgccggcggtcgaccgcaccgaactgcgcgaacgcaacgagcacttctgggcgcgctatgttgccgacgagaacgagcgtctcaagcacatcccgcaacacgtaagcctgcgcaagcgcgtgggcgcgcgcctgtaccgcatccgcgccatccacgacttccgtcagtggtgccgttacatcggcgagggctggttctga

SEQ ID NO: 517350 - DNA, 1014 bp, Stenotrophomonas maltophilia
atgaagatcctggtaactggcggcaccggctacatcggctcgcacacgtgcgtgaagcttgtcgagcagggttacgatgtctgcctagtggacaatctctgcaactcctcggcacgtgtggtagaccagctggccaagatcatcggcttcactcccgagttccatcagatggacatccgcgagccggcattcgccgagctgctgcgcagcagcggtgcggaggcggtgatccatttcgccgcgcttaagtcggtggcccagtcggtcgccgatccgctttcctacttcgacaacaacatcaccggcaccctgtgcctgctgcgggccatgaaggacgcaggtgtcggcaaactcgtgttcagttcatcggccacggtctatggcgatggcaacacctcgccgatcacagagtcggccggccttggtgcggtcaatccctatggccgtaccaagctggtgatggaacagatgatcggcgatctgaccgcctccatgccggagttcggggcagcgctgctgcgctacttcaaccctgtcggtgcccacgagagcggattgatcggtgaggatcccaacggcccgccgaacaatctgatgccctacatctcgcaggttgcaattggccgtcgtaccgcattgaacgtgttcggcaatgactatcccaccagtgacggcacgggagtgcgcgactacgtgcacgtggtcgacctggccgaggcccatgtgcgcgccatcgatgccctgcagaagcatccgcggggcttcaccgtgaacctgggaacggggcgcggctatagcgtgcttgaggtggtgcatgcattcgagcgggcgtcgggccagagcatcgcggtggacttcgcgccgcgccgggaaggtgacgtggccgagtgctttgctgatacgggcctagccgagcagttgctgggctggaaggcgcagttcgacctgcagcgcatgtgtgaggacagctggcgctggcagacgcagtatccgagaggctatcaggacgcttga

SEQ ID NO: 517351 - DNA, 2265 bp, Stenotrophomonas maltophilia
atgggtgagaacgagagcgtagcggtctaccagctgcgttgggaccggtgctggagtgccggagtggaggatgaccatccggcaattgctgcgttcgcgcagaccatcctggccactgccggtgcaggcagggtgctggatgttggctgtggccgcggcgggctggtcaccgagctgctcaagcagggcctggacgcccatggtgtcgatgtatcacaggtcgcgatcactgctgcgcagcatcgtgcgccggatcgcttcatctgcgccgctgcaacgtcactgccctatcctgatggccatttcgattgtgtcgtggccaacggcctcatcgagtacctggatgaagcggatgtgccgtgcgtgctctccgagctgcggcggatctgccgagggcagctgctggtgcgcgtgcaggtgtcggcggtcgtgacggagggcgatggccggcaggtcatccaggggcgcagctggtgggagcagaagtgcttcaacgcgggcttccgcaagcaccccggctacttcgacctgatcaacttcgagtcgctgaacttcgacgatggtgtgattctgctggcgctggaggcgatgccagcggtggcgggcgatgcaatgcacgactcctgctgcagcacgggtatcgcggcagacgctgaactctacaagtaccactgggcggccggttatgtacggccgggtgaccgggtgctggacctggcggcagcgactggagcaggcagctatctgctgtcacgccgctccgaggcggacacgctgtactgcgtgatcgatcccgccgcacgtatggcctttgaagcggcctacgccgcagtggagccccgtcttcgcccgacgctggccggcgcagcgcctgaagtcgattttgtcgcggcgcttggtgacccggtgacgcgcgggacgatggagggcctgctgggctccttgcaggatggggtctcgcctggaggtcgcgtactgctgtcgctggtggctgatggaggcaacgctgcggagccatggcccgagctgcaggatctgctcccgcccggctggtacctggaacaggccttcagcctgctcggtggcattccccggggcaggggcggtgcggtccgtgcattttctccctgcgggctggagtccgcggtcacggtgccgaaggatgccgagttgttgctggtcgtgatgcgggatccgctggcgacaggattcatctaccgcgaatcggtctatggatccagtgacagaccagctgaagtactggaattcgcccgcgactatcgaaatccctggctgctgcgtgcgctggtggagtttccgttccgcgcacgcaatccgcaggtactcgccgatatcgcccggcgcgtgctgggggagccggcgaacgagggtgccccggacgtggcggctgcattggcggtgctcggctaccagatgcttgagcgtcaggagctggcagccgcggaggtcaacgccctcatcaggcggatggtggaacacctggactgcgccattccgtcgccacacgccgtgcgctggtcgatctcgctgcgctatctgtgcgcctccctgctgcgtcgtatcggtgacctggagggggccctggaagcgcttgatgcggttgttgccgttgactggcgctcgttcagcccgaccatcggtaccaagattgtcgatgctgcctacgaggccggacagttgctggcagcggccggtaggctggagcaggcccgggcccgctggcgcatggccagtgaagtcgcgttcgagatgcttgcgtgcgggcatgaggcttacctgggtgattcgcagcagccacagcagttcgcgtcgatcgtcggtgtggaacttctggactcggcaacgcgcagcatcaaggcgctgcgctggtcgtctccggcgcggcaactgccccaggagcggctgctcgagcagagccggcaatgctggaaatggatgatccgcgagcgtaccgactcgatcgcatcccaggcgcgcctgctggaccagcgttggcagatcctgcagtcgctggaccagatggtgtccgaacgggatgaggtgattcaatcgcaggggcacctgatcgatgctcgcgatgaatcgatccgttcgatgactgccttgatcgacgcgcgcgatgaggctctgcaggggcaggccgacctcctggaggctcgctggaaggtgatgacccatatggataccgaaatcgcggcgcgtgaccagatcattgcgagcctcaaccagaagctcggcaagtag

SEQ ID NO: 517352 - DNA, 1428 bp, Stenotrophomonas maltophilia
atgtcctctgatgaagtagcaatcagtgtccgtggcgtcagcaagcgctatgagatgtatgacactccgcgtcagcggctcaagcagttcttcgttccggcacttaaccgtgtctcgccgggcctttgccacgaccagttccgtgagttctgggcgctgcgcgacatcgatttcgaggtcaagcgcggtgaggcggttggcatcgttggtcgcaacggtagcggcaagagcacgctgttgcagatcatcacaggtacgttgtcgccgaccactggtgaagttcgcaccagcgggcgcatcgcggcgctgctggagctcgggtcgggcttcaatcacgagtactccgggcgcgagaacgtttatctcaacggcgcactgctgggactgacaccagccgagatcgacgagaagttcgatgccatcgccgggttcgccgatatcggtgaccacctggaacaacccgtcaagacatactccagcggcatgctggtgcgcctggcattcgccgtgcaggtgcagctgcggccggacatcctgatcgttgacgaagccctggccgtgggtgacgcgctgttccagaagcgctgcttccagcagatcgagcgcctcgtcagtgacggcgtatcgttgctgttcgtttcccacgatcaggaatcggtgcgcaccttgaccaatcgggcgctgctgttgcgcgatggccggcagatcggctggggaacgtcttcggaagtgatcgtgagctaccggcgactgctgcatgaggaggagtcgcgctacttctcgtcattgaccgagaagatcgcggcgtcggcagccctccacaagcaggaagcggagccctcgcttcccgtgctgcccctcgatacgcaggccgatgcggcttcgtcgccgccggtcggagaggacgaggtggcccagggcgcacgctcgggcaacatgtccttcggcgaccagcaggccttcgtggtgaaggtggagacgctggacgaggcgggtgacaacgtatccgtgtactacccctcgcagcgcatcaccattcgtgtcgaatgcgagagtcgtgtcgcgatcagcaatttgaatgtcggaatccgcattcgaaacaaggaaggcttcaagatctattcgtggggcaccctgaatcaggacatgaagcgcctggcaggcttggcagagggcgaggtcttttggaaccgccagttcgccgcgggggagaggttcagcgtcacgttcacctgcgattgtgatctcggtgtcaatctgtatgaaatccaggccgctgtgtcgtttgaagagcggccggactacaccagccagcgcatactgcactggatggatgaagcggcgttcttccaggtgctgatgcgcagggacgagcatttctttggcggtgtcatcgacctgaggatgcaggccgattgggatcgttag

SEQ ID NO: 517353 - DNA, 864 bp, Stenotrophomonas maltophilia
atgaatgacgttgtcgtccatacaccgaactcgatttccgagcgtaccaacctgttcaatgcgcccaggaagctggcgcggagcatctggatccatcgcagtctgatcgtgcagatgacccggcgtgaagtgaccggacgttacaaggggtcgttgctcggcctggcgtggtcgttcttcaatccgctgctgatgctggtcatctatacgttcttcttctcggtgatcttcaacgcccgctggggcactgatgccccgggcggcaaggctgcattcgcgatcatcctgttctccggcctgatcatgcataccttcctggccgaatgcatcaaccgtgctcccggtctgatcgtgggcaatgtgaactacgtcaagcgcgtcgtgtttccattggagattcttacgctgatctcgatgggctcggcgctgttccacgcggcgatcagtctcctggcgttgtttgccgcgcagctggccttcatgcaggagatgcactggacggtggtgttcctgccgttggtgatgttgcccctggtccttgcggccatgggcctgtcatggatcctggcctcactgggcgtgttcgtccgtgacgtggggcagatgaccggtacggcaatgacgatcctgctgttcctgtcaccggtgttctatcccatcagcgcgcttcccgagaagtaccgtggctggctgatgctcaatccgctgaccttcatcatcgagaatgcgcgcaaggtgatcgtgtttggaacctatcctgacttccgccagctgctggtgggtacggtgatcgccggtgttgttgccatattcggcttctggtggttccagaagaccaggaaggggtttgccgatgtcctctga

SEQ ID NO: 517354 - DNA, 1437 bp, Stenotrophomonas maltophilia
atgccgcgccgcgcgcgcagggctgcgctggtgctggcgaaaggcggtggcctgatgcgctacctgtccctgttctccggcttggaagccgctcaccttgccctcgctgcgctgggctgggaatgcgtggccgtgttcgagatcgatcccgcggcctgtgcggtgctgcggcatcgcctacccaacgtgccgaaccttggaagcgtgaccgatatcaccgacgagcagatcgctgcgcttgggcccatcgatgcagtgataggcggcagtccgtgccaggacctttcagtcgcgggacgccgtgctggcctcgccggcgcccgctcgtccctgttccaccaccaactgaggattttccatgcagctcgacatttttgcggggcccgctggctctggtgggagaacgtccccggagccttcagcagcaacgacggccgagattttgctgtggtggttggtgaaatggcaggatgcgacctcactgtcccccgcgatggctgggccagcgaaggcatggcagtcggtcagcacgggctcgtcgaatggagcgtgctggatgcgcagtggttcggactggcgcagcggcgccgccgcgtgttcgctgtcctcgatactggaaactggaccgatcgacgcccggtacttcttgagcccgacagcctgcgcggggattctgcgccgcgccgaggccagggggaaggaattgccagcacccttacggctggcgctggaagcagtagcggcccaggcatgcgagccgaatgcgacggcggaagcggcctgatacagcacaccctcggatacggcggcggccgcaccagcggcgagattgaggtggcagcatgcctcactgccaagggcatgcgcatcgacttcgaagtggagacgttccttgtccagcccgtggcgcacacgctgcgtgccggcgggtttgacggcagcgaagacggcaccggccgcggcacgccaatggtggcattcgactgcaaggctgcaggcgataccagcctgtccataggtgacatacccggcaccctgcgtgcatcccatggaggcgggcatgccgcagtcgcctttcaatcctcgcagtccggtgttcgcgtggatgatgttcacgcaacgctagacgcgaataacggatctcgtcgccacaacggcatggtgcaaggcttgaacgtgcgccggctcacgccgcgagaatgcgagcgcctccagggcgttcccgacgactggaccttggtcccgaacgctcagggcaaaccgatggcggatggcccccgctacaagatgctcggcaacagcttcgccgtgccggtcatccactggatcggcctgcagatccaacacgcgcactacaggtccagcgagatccagcgcctgcgcgatgcagcaacccacgccaccgagcagctgcgcgctgcgctggccacgaactga

SEQ ID NO: 517355 - DNA, 984 bp, Stenotrophomonas maltophilia
atgaacgatatcgaccagaccgcgctggaaatcgcgcgagcattcatcccggtggacgtggtgggccagcagcgcgccaacctgcaggtggccatcatcgaggccatcaagaagcacgcgaacccgaagaccctggcggacgtgcagcccggtgggagggtgaggctgtgggatgcgccttggccggagatcgacgccattctggctgatgcatattccgcaggcgcaacaggtctgccgttcgaaggcatcgcacgccgccatgccgtgcgtgcagccgtagccgccctctccgcccagccctctccggacagaagcttcgacctggaagcaatgctcgctgtatgtgtccccgggggcgacattgccgacccgcaggtgatcgctgacaacatccgccactggttcgccgcccagccctccccgggtggtcaggatgccctggcgactgcacgcgagctgttggccgctgagtacgacaaggccggagaaagggtcttcgctgatcgcgcccggaaggggcagtacgacaatgatccggacgtgcacgccatcgtggctgccctcgccgcccgccagccggtgggggagaaagaagtcgttgatgcgatggttgataaggcatggaatcgcttcgaggtagcgctgaacgctgaggacggcgacaccccggaagaccgcgtgctgtccgaaaccatcgaccagcgcgaccgctatcacgaggtagccgacgacctcgccggtcacatcgcagccatcaccggcgtggaaatcggcgaacacagcagcgccaactgcccttggcagaacgcaatcgaggcagccgaggagtacaagcccacgcaggccgtggacctgatgcagttccgtgattcggtcgtgcaggccatcagcaacgtcagctacatgaccggatacggtccggcgtatgaaaagttgaccgaactgctggccctgatcgacggcaaggcggtgggcaaatga

SEQ ID NO: 517356 - DNA, 222 bp, Stenotrophomonas maltophilia
atgaagggcctgaactacgtctacccgcaccggggaacgatccgtggcggcaaggctaaggcggcgctgttcgcccgagtggtcgagggcaagagctacaccatgcgccagatcgccgagcagctgggcgtttcgctcaccaccgccgacaccagggtgaagcgcggcccctacccgctcacctgggagaacctcagcaagtcgcgcctggagcagccatga

SEQ ID NO: 517357 - DNA, 558 bp, Stenotrophomonas maltophilia
atggcttttaacgttgaaaaggactggacgaccgaggcgggcctgcgcgcggtggtgatcatgaccgatcgaggccatcggtgcggatacgtcgcgctgccgaaggaacaccgtcttcacggggtcgactacagcgacttcgattccgatatcgaggtgcatggcggcatcaccttcaccgggggtgatgagggctatccggtcctgcacgacgggatgtggtgggttggctacgactgcgctcatgcctgggaccgcccgagtgacgaacaccttgaacagcagcgcctaaagtatcccgacaagccgtacatgtgggacgaccgcgctgacggcactcaccgcgaactgccgtactgcgaacgcgagtgcgagcagttggcaacccaactggccaacgccgcgccgccgccgtcttccaaggttcttgcggccctcgaatacgcacgcgagtggatcgtggaggtgggtgaacgcaagcgcattcccaacgacggaacgctggcacggatagacgaagcgatcgccatcgccaaggccacgggcggtgcgcaatga

SEQ ID NO: 517358 - DNA, 318 bp, Stenotrophomonas maltophilia
gtgacgccgcgcaccctcaccctgctgggcctgctggtctgcgaggccaaggacgttgagaacagcgcgagcgtccgccgggagcgcgtgggcaaggcgtacctcgacctgttcaacgaactgcaagccgaggatcgccgcgtcgctgaagtcttcgaggcagctcgtgaagtgctgagtgtcagcgactttcccgacctgctccatgccgaagagcgcctgcgcgaagcgctggacgcctgcgaacccaccgacaccgatcacaaccgcgaggccgtggacggcctgtgcgtggaggaatctgacaatggcttttaa

SEQ ID NO: 517359 - DNA, 312 bp, Stenotrophomonas maltophilia
atgagcgcctacgagatcaaggtgtcgatcaccccgctttgcccgagctgcggcaaggaaagccattcgggcggttttgttgccgagagccgcgcaccgcagggcgtgtttgatcgcgacagcccgaccgaacgcaaagaccagcgtgtgttcatcacgccctgcaatgactgcttcgtgcaccgcgccgcagtcgccgagctgatcgaggcatccgactatgccttgcaggcaactccgggtgcccaccagctcaacgccaatacgcggctgatggccgccctcgcccacgtcaaaggcggtgccgcatga

SEQ ID NO: 517360 - DNA, 180 bp, Stenotrophomonas maltophilia
atggacgcccggatccgccaccggctgaaccctcgcatctggctgcgcactgccttccgggccgtgttcggctggctgatgcggccgagcgcgtgggagagggccgagcggagcctggccagccgcgcagtcgacgagtacgccgattcgatcggtgcgcccacgaggctccgtcggtga

SEQ ID NO: 517361 - DNA, 276 bp, Stenotrophomonas maltophilia
atggaaatggatacggctacgctgacgcgcctggcctcggttcttgcggccactgcgaaggccaacgaagccctgctatcggtcctcattgccacgcaccccgagccggatctactgcggcacgtgtgggaccaatcgaagccggattggatcgatgaccagcatgaaacgttgtttgcccagcacggtccctacatgcaggcgttcctcgcacggctcgcaggcatctcgggtgagatcgacggagcggccggccagttccagcgagggggctga

SEQ ID NO: 517362 - DNA, 660 bp, Stenotrophomonas maltophilia
atgagccgcgatctattttctccagaggggcgctctaatcttcttaagcgcctgattgctcatgttctgtgcattttccagatgctcaatgaaagcgcgctcgtgctttctaagaagaatgtctcccttaatcaaggactgcgcttcaaggaaggagttcgtcactgtcaggaaatccccgccggcttcacccatcaagtaacagtctcgctccacgtcctttacctcgtcaggcaggggaagtggatggatatcgggatgaacattgcccgcctgctgggttcgggcgaaatcaagctgatcagcgatcaccttctgaaatcgctccaatgcccgattcgcgcgggtgtggcgacttttcatttccaactcgtctttcttggcttccgcagctcttgccacgcttcgctcgtgagcggctattccaattgccgccagtattgcacccacgctcccaacggcctgaacccatgcaggccagtcaatgctgatcggtgggcgtggctgaggcggatgtttgctcaacagagcccatgccagaagagcacctgcggcaaaggccattacagctaccaccgcccaatcccggtctgttcgtccctgcttcatgacttccccctgttgttggcacggattctaccgtccggggtgtccccgtga

SEQ ID NO: 517363 - DNA, 240 bp, Stenotrophomonas maltophilia
atggctgatttcagttggttgaacgatctgcccgatggcgattggagttccgagggcggccagagcgtaaggaacttcagctccaaggagttcgctgaaaatagcggcgtcgatgccatagaccatgcgcagttcaaccagtggggctcgacccagcagcgtaagtacaggctggccgatagctcagtgatcgttggcgatcccgagcccaaagtcatggtgatctggcccaactattga

SEQ ID NO: 517364 - DNA, 375 bp, Stenotrophomonas maltophilia
atgccgatcaaagaccctcaaaagcgcgccgagaaccggcggaagaactacctgaagaaccgggaacgcgagatcgccaagatgatgcagtggcgccgcgacaaccccgagaagaacgcccgggttcggcggaatgtccatctccggagcacctatggcatcaccacgacggtctatgagcagatgcttgctcagcaatctggccggtgtgcgatctgccacagggagccagagggtgagcctctgaatgttgaccatcgtcactcggatggagtcgtaaggggtctcctgtgcggccgctgcaaccgcgccattggcctgctcgctgacgacattgagtcggtgaagcgggctctaacctatttgggcgggtaa

SEQ ID NO: 517365 - DNA, 480 bp, Stenotrophomonas maltophilia
gtgcataggttccgcgaacacgaccatggctacatcagccagtgccatatcccgctgaagcgcagcggggaagactgcgccctcgatcgcgacggctactcgcgggccagcaccgtcggtgccgggtcgaaccgcatgcatcggcgcgtctacgagagcctgcacggccaggtgccggtcggaatggtgctggatcacctgtgcggaaaccgtgcctgctgcaacccggctcacctggaagcggtcacccaggccgtgaatgtacgtcgcagccgccgcgcgcagctgtcttccgagcaggtcgcccgcatcagggagctgcggaagtccggcatgcgccccacggccattggccggctgttcggcgtgacccagagccatgtgtcgcatatctgctccaaccgctattggcgcaccgacggcgcaccgtcctatcgaaccatcaagctgcggcaggccaaggcctgtgccgggcagtaa

SEQ ID NO: 517366 - DNA, 1962 bp, Stenotrophomonas maltophilia
atgggcccgcaggtcaggaacactgcgcaggttgatctttcgccagccatccatgcagcaggccaggtcgggcaggccgcggcgcagatattccagcagcagaaggatcgatcggacctgactgctgtcatgcaggcgcgccgggagctgtccgagtgggaaggaagtgcattcaatccggccaatcccgacggtgtggcgaagtaccgtggaaaggactcgctgctcgctccagacgcgttgctgggcgatctggacaagaggtcaggggagattcgatcacgactcactgccgaccagcaggcccgcttcgatcaggtcgcgttctccttccgtgacaccgtgcagacccgcctcaacgggtacgcagagcgtcagtattcgatgttcgaggaggctgagaacaaggccgccatcgatacggtagggcaggacgccgttcgcgcaggcctagccggagacttcaacctggccgagacccggctacaagaagtgatcggtatcgcgatggcctcttaccaaaagcaggggtacgggccggaggcgctgaaggctggtgaacgagggatcatttccagcgtccgcaaacagacggtcatcggcatggcgctgcaggatcccttcgcagctcaggacctctacgaccgctatgcagaccagctgaccccgactgatcgggcagtggtggaacgcgagttgcggccctacgttgaggaccgacaggcagacgcggacgtggacgcttgggagacccgaaatcctgtcatggccgcacgcgcggatgctgccagcgttcagacccagttcgcatcgctcggcgcgcaacatggtttcaggaccaccagcgtcacgcggtctgaagaagagaaccgtagcgtcggcggtgtggccaacagtcagcacctggaaagccgcggcaccgcccgagactggtcggtgaagggtaagacgccggagcagatcagcgcgttcgtagcggatctgaaagcggcaggcttccaggtcatcaccgaaccgcatgggactggcccgcacatccacgcggaactgcctccgcagcgtaaggccatggcgcccgaaggagatccaggctcgagggccgacgccctggcgtacttcgattccttcgctgacccacggagacgtcgagcagcccggcagcgctatgcagatcgattggctgtcgccgaggctcgccgtgcagagcaggatcgggatgtctccgagtccatcaatttggccgtggagaacgcagacccgaacagcggcgcgagcctgcggcaactgctgggccggaactacacgcgtgcagcggagcgtggctggatcccgtcgctcgaagcccgctggaggcagcgccagaccggccaggccgaaaccagtagtcccaccaccgtgctggctatggatgaagcggtgtaccgcgcgtcccttggcggcgagccggcccgcgtcgccctgacccacttcaacccctacgacccgaacctgcagctgtccgcgtccgaccggaagcggtatgccgacgcccagctgaagctgctctcgggcaagcccgaacagacggccagcgttgccagcgaggcagagatcaacgccatcgtgaaacagtacgtggtgggcacattggggatcgatgcgagcaacatcggagcggacaacgagaagggtagaaaggcctggcagttcaccacggacatgcgccgctgggccgagcagttcgagaacgagaagaagcgcaagccgggctatgacgaggtgctgaagcaggctgatttcctgaccctgcagggcactgtcgagagacctggacggttgtgggggactaataccgagacctaccgggtacaggacctcaacattcctgcgactgatcgtatccagatcgaggaagcgctccgcgctgctggcaagcctgtcactgccgacaacatcaacaagctctggctggggaagaaatga

SEQ ID NO: 517367 - DNA, 6039 bp, Stenotrophomonas maltophilia
atgaacaatccgtactctgctgcagctgctgcgctccccgacgacgcggccagcaagactgcgccaacttcaaatccctatgcagaggcggctcgcggtctccctaccgatactggtagggcagtggttggcgccggccagttctcgcctgacgccatcgccaccgcacagcgccaggcaaccagccttggcgtaccggccgacgttctggcgcgcaacccggaacaggccgcgcgtatggagctgcagcgcaagatcgaaggcgtgcgcgagcgcaatccggccttggccgactggctcggagatcctcgccgactgggcttggtgaaggatgaggtggacggcgtcgagaagttcgccggtacgctgtccaagccaaagcagcaggactgggcgcaggagctgctggccaacatggtctccaccggcatcggcgtgtacggccatgtcaaccgggcacgcaccggcaagtccacgccggaggacgttgagtcgtccactgacgtcctgcggtccctgccggctggcgccgtgcgtggtatcggtatggcagtgggcggtgtgggcgagacctacaacctgggtgagcgcaccttggatcggggtctatcgggtgtgggtgtgcccagcggcggcggccctgctcgtagcgaagtgccgatctggctgcgtccgggcgattcgtttgtcggtaccggtcagtatctgaagcagctggccgactggatcgccccaccgaagcagcggcagacgttcggcacacaggtggccgaaggtgtgggccaggtcggtccgatggtcatccagagcatctacgccccgcaaaccctgccggccagcacctatggcatgggcgtggaccagatggcggacgcggttcgcgagaagggtgcctacggtaccggtcggggtgatttggccatcgccaccggtggcttggcgcagggtgcactggagcgtctggggatcgagcggttggtggagcgcctgccgccgaacatccgcagcagcacgatgcgctacatcgccgacatcagcatcgcggcggcgaccgagggggcgaccgaggcggggcagcaggtggcccagaatgcggcgctgcaggcgttcgtggacccgaagcaggccctgactgagggagtcgccgacaatgcagcacagggcggtgctgtgggcgcgatcgttcgagcgctgctgggaatccccggcgtgccgcggtcgcgcacgcgcgctgccgccgagcaggtgcagaacatcatcgggtcgcaggacaccaacgccgaactggcagcggcaacccaagccgcggcagagctgaagctcggcgcgcgctcgcctgatgacatgcgggcgattgttcgacagctggtgggcgaagattcgaacctctacctggacgccgagcaggctcagacgctattccagtctgcaccacaggttcttcagaatctcgtgggcggacaggaggcactggccgagcagatggcaaccggccagatcacgatctccaaggcggactggatggccgctgttccgcagctaccgaactggagcgagatccttcaacacacgcgaacgacgccggaaggcctgtcgccggccgaagtggaagggctggatgtcgaagcgatcgcccgggagctgggcgtgcaagaggatgggcaggagtccgttgattccgcgcagctcgacaccgatggggtccgacagtccgtgttggcgcagctcgctgccaccgagcgatacacacctgcgcaggcggacagccaggcgcggctttggcaagcagtgttcggtaggttgggggaggtgaccggacaggaccctatggccctgtacgagcgctactccgccgggatccagattgcagatgccccggcagagggtggcgcaccgcgtgcaccgcgtaccctgatgcagcggggcatggacgcactgcgcggcctgttcggccggccgcaggtgaccaccgatggccgcgggcagcagaccatcgagcgtgagggcagcgcctatgtgcagcgcggaggccagtggctgctggccgacgatcagggccaggcccgcgacttcctgaccctggaccaggcgcgcacggaagcagagcgcaccggcggcgagatcgtgcgggacgatcccatcgaggggcagcggcagacctggagcgtggcgctgccggataccgctgcgcgcgaggtgctggccggcgacatcctgttccaaggcggcgccgcaccgcgtggtcagattcagatcgggcccgaccgtgccatgcagatcagcctgttcaagggcgccgacctatccacgttcctgcacgaatccgggcacttcttcctggaggtctaccgcgacctagccacggcggaggacgcctcgccgcagatccgctccgatctggatgccctgctgaagtggttcggcgtcgagtctgctgaccagatcggcgtcgaccagcacgaacagttcgcgcgtggtttcgaggcctaccttggcgagggcaaggcgcccacgccggagctgcagacggtgttcagccagttcaagcagtggatcctgggtgtctaccgcagcctgcggaatctggacgtggagctgaccgacgaagtgcgcggtgtattcgaccgcatgctggccagtcaggaagagatcgaagcggcacaggcccgggtggggttcgagccgatcgcgcgagacctggccgaagcgcaggcgctgggcatgaccgagcgccagttcgccgattaccaggcgcaggtcgctgcggcgcgggagcaggccgaggccgatctgatggcgcagctgcaggaggccgatgctcgcgcccgcaagcgctggtggatggacgaaagggccaccattcttagagaggtcgaggctgaggtcgaggccacgcccatcgtgcgcgcctaccgtgtgttgacggggaagaaggagatcaacggcgagccggtgcccgagcagctgcagggcctgaagctggatcgcgccgtgctggcggcgacctacggcgacagtttgctggacaagatgggccgggtgcacgcccgcaagggcggcacccacccggaagaggttgccacgttgctgggcttcagctccgccgacgaactggtccaaggtctctggacggtgcggcagacgctggatagtgttgaggccgaggctgaagcgcgcatgcaggcccggcatggcgagcccatgaccgacggcacgctgccgcagcgcgcactggatgcggtccacagcagccgcaagatccagctgctggagcgcgagctgggcgtgctggccgatctggccaaagagccgcggccgaaccgacgtgaactgaaggcagtggcgcgggccgtgctggccgagaagaccgcgcggcagatccgtccgaacgactatctggtcgccgagcgcaaggctgcccgcgcggcggcgcaggcggcggccaaggggaagtatgccgatgcgctgcaggcgaagcggcagcaggccctgaacgctgttctgttcgccgaggcgcgcgcggtgcagcaagaggtcgagtccaaggtcggctacatccgccagcagatgaccccgcaggcgcgcgagcggctgggcaaggcaggcgccgactacctggaagcgatggacaccatcgccgacacctacgagttccgcgacgtgtccggccgggctgtcgcgcgtcggcagagcctgcggcagtgggtggaagcccgccaggccgacgacgacctgacggcggtgagcgatgcgctgctggcccgggtcgaagcggaaagcgtgacgaactacgccgacctgccgattaccgagttccgcgagctgcacgacgcggtgaccaacatcgcgcggttggcgaagctgaagaacgaactgctgggcaacaaggatcggcgtgactgggagggcgcacaggccgagctggccggcgccattcgtggtgcgatcgctgaaggcaagccgctaccgctatccgatgcggacctgaccgcgatgcagaaggtgggcgcgacctacaccggcctgatggactgggtactgcgcccggagaccgtggtcgagtggctggacggtggcgagaccgggccgtggcacgacttcctctggaaccaagccgaggcagcgcagcagcagcggattgagttgcgcaaccgcgtcggcggcatgctggagcagaccatgaaggccctgaccccggcgcagcgggcggacctgaaccgactggtgtacgtgccgagcctggggcgctcgctgtcgaagaacacgatcgtggcggtggcgctgaacatgggcaacgccggcaaccgtgacaagctgatgcgcggcgggttcattggcaagaacgccgaggtcgttcagttcacgccccagaacattgcggagatgttgggccacctcacgccggcggacgcacagatggtgcagggcatctgggacgcggtgaacagcctgtggccggacatcgtggagcagcagcgccggctgtcgggtgtcgcgcctgagcaggtcgagccgatgccgctgatctttaccgcggccgatggctcaacggtcagcctgcgcggcggctactacccggcggtgtacgacccccgggcgggtgccggcggcgtcaagcaggcgcgcgcggctgaggaacagatcatgggcggcaccttcagccgggcgatgaccagcaaaggccacaccaaggagcgcaccgaatacgcagcgccgatgctgctggactaccaccgcgtgctgtcgcgccacctcaatgacgtgatcaccgacgtctcgcaccgcggctacgtgaagcaagcgctgcgggtgctggaagaccaggagctgaagaacctgatccagcagcggctgtcggagggcgcctatcacgcgctctacggcagcgtgaagaacgcggtgcgcggcgcgtcggtggccgagccggggtccagcatgatggagaaaattggcgacgccgctatgaccaacacggcggttgcggcactgggcttccgtatcccgctggtcatcgccaacactctggtggcgcccatccaggcggctgcacgtgttgatccgaagtatcttgccaccggctacacggcgtactaccgaaatccggtcaagatgacggagatgatccactctctgtcgcccttcatggcggagcgtgccaactcgctggattcttcctatcaggtggtgctgggcaagctgtcggggaaacgcggcatccgcgcggcggccatgaagatggccatggaggtccaccgctggaccgtgccgctggccgagcgcgccatctggctgggccgctaccagcaggcccaggcgcagggcgtcagcatcgacgaggcggtgcgcttggccgacaagtcgatccgcaccacccagcaagccggcgcgccgaaggatctcagcgccgccgagcgtgacccacgctacaagtgggtgcgcatgttcatcggcccgatgatcatcatgaacaaccgcctgcaggaatctggcctgcgtggcctgtatctcgggcgtgtgcagtctccggcccgggcccttggcacctggttgtcggccggcgtgctgtccaacgcggtgttcgaattgctgatggggcggggcccgggcgatgaggacgacgacggggacgtggacgcggccgattgggcgatgtggctggcgcgcaaaacgctgctgttccccttccagacgttcccgctgcttcgggacgtcgcgggggctatcgacgcgacgctcgacggcaaggcggtcatgtcccgacccaatccattcgtcgattcgggcgtcgctctcgcacgattcggtttcaccgccttgaaagaggggcgggactggatcgccgacgatgacgagcccgacgcggaaaagctgatcaagaccggcgtgcgcgctgccggcccgctgaccgggatccccagcaatcagatgctgaccacgggcgaatacctctacgacgtcggtaccggccagtacaccccggacaacccagcggaggcggccgcatacctcatgtaccgccgacccaaggacgagcagtaa

SEQ ID NO: 517368 - DNA, 1758 bp, Stenotrophomonas maltophilia
atggccggccgcatttttgatcgccccgacctcgaccagcgcgccggacggaaggccctgtacgtatcaggcgcactgactttcgccatgccgggcaaggcttacgaggggcgactccaggtctacaacgggatcggcggactgtctgtgcagcaggttgacggggacacgcttccaagcgggaccagcatctacatcgacggctccgaggtcgtggtgtcttggccggcctattcggagaccgcggcgaccatccccaacccgggtttcgaggcgggggacgttaactgggagaaagggccaggctggtcgatcgggaccgagaatcccccggtgggcctgcgtgctgcccgctatggggagaatcatggggacgcactgatctccaatacgagccggttcccggtcaatccaggcgtgatgattaccgcgagctgccaggtccgacagggcgcaagttcggaaggtaacgctggcgctgccgtccagttggaatggcgctcttccgacggcgcgcttgtcaagacttccgaagggaacgcggtcatgtcggcgtcgaagaaccgggtttatccgtcgacggtgagggccattccgccggccaacgctgcgctggtcaacgtggcagcaaaaggtatccgcaatcgggaaaacaagccgctcttcattgaccagttcgaatgggatcaccatcacgtgaccggcatcaacagcacgcgggtgttcaccttgggcctgatggtgcgcgattcggccggccgatcctacctgtggcggggaactatccgggtgtctcgcggcgaatggaacggtgcttgggagactgctggaatctcgttcccgacgatgcacggactttacgatgtgatctggtcggagctgttccagaggtacatcgcctgcggctactacaatgcgaaccccaacaccgcgatcatcagcagtcagaccggcttcacgtggtcggatgacctccgtgggagtggccagtatttcgtcactttggtcgaggccaggacgctcgggcgggtgttctgctacggaacaagcaaccgggttgcggtttctctaaacggtacgtcctggaccacgcagacgccgaacatcgagcagggaggaaatggattctatgatgttgcctggtcggatgagctgggggtcatggttgcgattgggaacaatgggatccatcgcagcacgaacggggtaagcgactgggtgactgtcgctgccaacgcagcatctaccatctattgcaaagtcatttgggtccggcagctgggcctattcgtactcgttaatggatcgatcgtacggaccagcccagatgggttggtgtggacagttgtctggaacggcgctggccagggaaagccattgaacgcgttctactccgaacgagatcgtctactgtatgtgatcatcgctcccaatccactggtgatccgcccatacataagctctccagacgggatcaccttcaccacctaccctggcaatcctgcaaatgattggggatccgagatgactgccaaaagcaggtattcccctgaactggaaggtgccctgctggcgtcgagcaacaacatcgctttcttgtttaaggggcctggagaagtaatgcccgcgggcacttccacgggcggacttgtacagtccagctgttggtctcccaagctaggcaggtgggtgatggtcaactcaagtgccggcaacgcaaacatggtttccatctccaagacggcatacaacgcctga

SEQ ID NO: 517369 - DNA, 339 bp, Stenotrophomonas maltophilia
atgacgcgctggccgttggccaacgccaacgcgtggatcgcctgcacgggcctggatccccggcccaacgagtctggcggcagaacgggacggcgtcggctgtccaaacagggcgcgccagtgctgcgccagatgctctacatggccgccatggggctcaagcggtgtcgccaggggcaaccgctctacgacgagctgtcaaaacgcggtcaccccagcaccgccgtcttcaacatcctggccagaaagctggccaggatcgcctggggtgtcttcaaaagcggccgggacttcgatccggccatgctgaaggtgggtcaagcctgcttccaggcttga

SEQ ID NO: 517370 - DNA, 2454 bp, Stenotrophomonas maltophilia
atgctgaacctcgccgaataccgccagcgcccggccttgctcgccgattggctgccgtgggccgggctcgtcgcgccgggtgtcgtcttgaacaaggacggcagtttccagcgcacggcccggtttcgcgggcctgacctcgacagtgccacgcaaggcgagctgatcgccacgtcggcgcgcttgaacaatgcgctgcgccggctgggatcgggctgggcgctgttcatcgaagccgagcgccggcttgccgccgactatccgcactcggagttcccagaagccttgtcatggctggtggacgaggaacgccgcgccacctttgaggactcgggcaaccacttcgagagcggctatcacctgacgctggtgtacctaccgcccgaggagtcgcgcgcccgagcggcggggatgctgtacgagaaccggcccaccgaaggcgtggattggcgcggccggctcgatgccttcgtggcggagaccgatcgcgtcttcgacctgctcgatggcgtgatgccggaaatcgcctggctcgatgacagccagacgctgacctacctgcacgccaccatctcgacgcggcgctattcgctggcggtgcccgaagtgccgttccatatcgacgcgctgctgaccgactgcgcgctggtcggtggactggcacccatgctgggcgatcagcacctgcgcgtggtgtcggtgcggggcttcccgacttccacttggccggggattctggacgacctcaaccgcctcggatttgcgtatcgctggagtacgcgcttcctctgcatggacaaatccgaggcggaaaaagacctcgcccgcctgcgccgccagtggttcgccaagcgcaagaacgtcatcgcgctgctgcgcgaaacgatcttccaacaggagtcgccgctggtggacacggatgcctcgaacaaggcgaccgatgccgatgccgcgttgcaggagctgggcagtgatcaagtcgccttcggctacctcaccgccacggtgacggtgctcgatgccgacccggccgcagccgacgagaagctgcgcatggtggagcgcgtcatccagggccggggcttcgtgaccatctccgaaacgctcaatgccgtggatgcgtggctgtcctcgctccccggcaacgcctatgccaacgtgcgccagccgatcgtctcgacgctgaacctggcgcacatgatgccggtgtcggccgtgtgggccggccccgagcgcaacgcgcatctggacggcccgcctctcatcgtgacgcgcaccgatggcgccacaccgtttcgcttggtcacgcacgatggcgacgtgggccacatgctggtggccggcccgacgggcatgggcaagtcagtgctgctcgccacgctggcgatgcagttccgccgctacctcggctcgcgcatcttcgcgttcgatatggggcgttcgatgcgcgccacgatcctcgggcttggcggcgagcactacgacttgggcacggacggcgaaatcgccttccagccgctcgcccgcattgaccgcgaaggctaccgcacctgggccgccgaatggatcgaaggccgtttgctgcatgaaggcgtagcagtcggcccggacgagaaagccgccatctggtcggcgctgggcagcttggccggtgcgcccgtcgagcagcgcacgatgaccggcctgtcggtgctgctgcaatcgaacgcgctgcgccaggcgctcgcgccctatgtgctgggcggcgcgcacggcaagctgctggatgccgaccacgaccggctgggcatggcggacgtgcagggtttcgagatggaggagctgatgcacagcaaggccgccgtcatggccgtgctgcattacctctttgcgcgctttgacgaacgctttgatggcgctcccacgctgctgatcctcgatgaagcgtggctgttcctggatgacccagtgtttgccgcgcgcatccgccagtggctcaagacgctgcgcaagaagaacgtgtcggtgatcttcgccacgcagtcgctcgcggacattaaggattcgagcatcgcgcccgcaatcatcgagagctgcgcaagccgcatcttcctgccgaacccgcaggcgaccgagccgcagattcgcacgatctacgagggcttcgggttgaactcgcgccagatcgagatcgtcgccaccgcgcaacccaagcgcgactactactaccaatcccgcctcggcaaccgcctgttcgacctcgacctgggggcggcgacgctggccttcgcgggcgcttccacgccgcaagaccagcgcgacatagaccgcgtgctgctggacgccggcacgcccggcttcgcgggtgcctggctgcgccatcgcggcctcgattgggcggctgacctgctgccctcgttccccggcctcgcgccggattccctcgctgaccaaccacaggagatcctgccatga

SEQ ID NO: 517371 - DNA, 186 bp, Stenotrophomonas maltophilia
atgatcttcgcgtttctcaaccagaaagggggcgtcggcaaaaccacgctcgccacccacatcgcgggcgaactggcgctgcgcggccagtcggtcatcctgctggatgccgacccgcagggttcctccctggactggacgcagcgcagaagtcagcagggcttgccgcgcctgttcagcgcgtag

SEQ ID NO: 517372 - DNA, 342 bp, Stenotrophomonas maltophilia
atgacgcgctggccgttggccaacgccaacgcgtggatcgcctgcacgggcctggatccccggcccaacgagtctggcggcagaacgggacggcgtcggctgtccaaacagggcgcgccagtgctgcgccagatgctctacatggccgccatggggctcaagcggtgtcgccaggggcaaccgctctacgacgagctgtcaaaacgcggtcaccccagcaccgccgtcttcaacatcctggccagaaagctggccaggatcgcctggggtgtcttcaaaagcggccgggacttcgatccggccatgctgaaggtgggtcaagcctgcttccagcaggcttga

SEQ ID NO: 517373 - DNA, 417 bp, Stenotrophomonas maltophilia
atgaagaaccagaagggcttcaccctgatcgaactgatgatcgttgtcgcgatcatcgccatcctggctgccatcgcgctgccggcgtacagtgactacaccaagaaggctaaggtctctgaggttatcctcgctgcttcgtccgttcgaacctctgtctccgaatatgctgccggcaatggttcgctgcctccggccggttggacccccgagacgcaagcctcggattatgtgactagcgttgcctgggatgctaccaataagcgagttgaggcagtttcgaaggtcagtggcgccactggtagcgtctatttgactgctaccctccagactaatggtcaggtcacttgggtttgtggcggtaccgttgataaaaagtaccttccgggtacttgccaggcaggcgcgggcacctga

SEQ ID NO: 517374 - DNA, 990 bp, Stenotrophomonas maltophilia
atggaaggtttcgaaatgctcgacaaaatggaattccacttgggattccacagcgcccatccattctggctgggagaacgcatcgacatctacgatcccgaacagaatgattgcctgcgcggcattattccggaggtgagggcaagccttcagaccgatcaattcgatgcggcaatctgcgtcaacggtctaatgcttttgcacgtgcatcacctttctcgaaccacaccagacatgagcgttgcaggtgattttgatcagtccgcgctatggatggatcgacatctggattacgccaacgcactgcagttgtgcctggaatcagagtcgataaagcatccggactcctacgaagtttccgctacagcaacccgtgctaacgacatctgcaagatcggatttctcgatggcttcccggtgaacgtcagttttggcagcgcccgcaccttgacgacggtcatgcatgcaatgtcgcgatgggtttccgacggcgcactggccccgtctcctctcgaagcacccggctggaggattccacacgaggtagttgatgtggaggttgcgcgtcttgcgcttcagaagttcgcgctcattgcacgcgacgaacatcgcgttacctggctctcttatctactcaaagccaaaactgcatactccgacaacgactacagaatgtcgttcgtcctgtcgtggttcgtcatcgaatcctcccttcgatggcactggatgatgaagaatccgggaagcgcggaatctcccaaaacctggaagctcatcgacaatctttgtgaaggaggaccgcttagcgaccagcataagccagctctcacttatctgcgcaatctgagaaaccagctcatgcataatcccgccgacaccacttgccagcccggacaatgtttcgaggctggagagatggcgtgcgctcttgcgttgctgagcgccaacgtggagctcgtaacctcctggcagacgaaagtgcagttctag

SEQ ID NO: 517375 - DNA, 342 bp, Stenotrophomonas maltophilia; identical to SEQ ID NO: 517294

SEQ ID NO: 517376 - DNA, 369 bp, Stenotrophomonas maltophilia
atgtatcgacatacatggggccgccgctgcgacccggagcactacaccgcgctgcgtgccgactttcgggaagatttccatgggatccctggcggctatgacctaaagctccaaaaggaacagaagatacacagaacgccatccagtgttgtcaacaacgtgaacatcactcactcaacgggcatccaagtcagagaccgcaatcttcaaaatctgcaagccgcgtttgtgagcctggagaaggcgattgacgctcagaacgcccctgccgaatccaaagctgatgccaaggccaagctcaatgctcttctgcaacatccactggtcctcgcagtgcttggtggcgtcgcaagcggacttgcaggctaa

SEQ ID NO: 517377 - DNA, 504 bp, Stenotrophomonas maltophilia
atgggtgccaacacgatgaagaaagacatcatcggatacgagagcattttcagcgtgattctgctggtgttgttctgcgtcctcctcccttgtatggagttgattaaagcgcaagcccagccttgggtgtaccgacttctggcaggcgttctacttgggagcatggcttcgctggcctacgttgcagtggaggacgtcatccgcaagctccgcagtgggggttggaaagcagttcagcccaagctgaggtggttgcccgtgaccgtcgtcacatacctcgtggttgttgccgcagggctcgggatctggctggtcggctgggaagggaaggggacggggtgggtgtatggattgggggtcttcgtcggtgcctttgtggtcaatcaaagcgtgggttcgcttctcttgcgcgagcatcaggctctcgtggcgacggtctgcccacggtgtggtggatcggcggcggcgggccaatacagtgaccagcctgactcgtcgaactga

SEQ ID NO: 517378 - DNA, 312 bp, Stenotrophomonas maltophilia
atgacgggcccactaccagctgtccatgcccgccccctttccacgaccaccacgaccgaggatgtcctggaacgcctctccgcctttgatgctcaattgaaagcacactacggctacctgaaagcgcttgagtacggattgtgcgccgttatcgtgacccatccaaagcctcaggatctcgcccagatctggaagcaactgcctccccaaatcagcaccctccacggccagagcggcagttccctttttgacgcagccctgaatcaagcgctggggctcttggccgagcagatggaggagtttcgcacctag

SEQ ID NO: 517379 - DNA, 258 bp, Stenotrophomonas maltophilia
atgatggccacggcctacgccaagaacgacagtcgacacccggcagtagtccagccgatcagtgggcagctggcatctcccggtgagccacttcgagaggttgcgcccagcatggggcaggctgacctgctggcggccggccggttgcaggccaactacctcaacctccagattggccggaaagtggctgggggacgtctattgatcgggtttcttcagaagggacaggcggttgtgaaagacctcggcgcgctctga

SEQ ID NO: 517380 - DNA, 1635 bp, Stenotrophomonas maltophilia
gtgaaggacatctactttagcgtggtggcaccgggtactcgcacagatgcgagcagcgcctcggattgggtgctggctcaggacaattggaacgactactcctatcaaacgctttaccatctttcccatttctcgattaaggatgggaagcgacaggagagcgtcattggtccggtgaagatcctcaagcggggacaaacccagagcgatggcattctggtaagggagaatttcccggagctgggcgaggagttctgctctgtgggggactctctggactactacgagcggcttcgcgcgatcggaccgttgggtgagcagatattggctagccttcgggacgtaattcacgctccggaactggtagagaggttccagagggagcctggctggcgcaagtctctgtttcgtgaccaggacgatggcggatccagttaccgaagtctggcgacgggaatcgttcaagggcactacacgaccccgccgaaggatcagcaaccgttcgagttccaggtcactggctggtcgcgtagcctgaagatcgacacgaggtcgcaggcgtcggggtccggcaacgagaggctgcccgagcgagtgaacgtcctggtgggtcgaaatggctccggcaagagcaccttgctctcacgcctggcgcgtgtcgccttcgcgtccacgacagaacgagcagcgtcaccactgagtgatctcggcaagatgcttccggagggcgttggcttcccgcgtatcgtcgtcatcgcattcagtccgttcgacaatttcaagctacccggagcggatgcacgcaaccgcacccagattgcgaaagacatgcagaacggggtcggacgatatgtcttcatcggacttcgggatttcgcaggagaggccgagatcgcgatctcggacttgccgggtaccaggcttggccaactcgaagcggacaccgatcgcgtcagtcagaccaagctgaaatcgatcgccgatctggccatcgacttcgatcggtaccgctccatgatcagcaacgattcccggcgcgagctggtcctcaagaaggcgctggatgccctcgaaactgggctgatatcggacgaatggctggacagcaccagtagcgggatcgatcaggaagcagcgacatggttcatgaggctcagcaccggtcacaagatcgcggttctgtccatctacggactggtcgcgtgtctcgaggatcgatccttggtgctgatcgacgagccggaaacgcaccttcacccgccgttgctgtcggcgatgatgcatgcgttccgtcgggtgttgacccgctttgagtcatctgcgctggtagcgacgcattctcctgtggtcgttcaggagtgtctggccaagcatgtgcacgtggtgcgccgtgagggcgaaagcttctcgattcgtccgctgtgtgccgagacctttggtgaaagcatcggactcatcacggctcaagtgttcggcatgcaaagcgatgccaccgacttccatgcagtgcttgatcgattggtggacaagtacgactctcgcgagaaaatcgaaaaattgttcctcggcggcgtgatgagcggtcaggctagggcctacgtcatgtccaagctcgcggaggatgcctcggagtga

SEQ ID NO: 517381 - DNA, 840 bp, Stenotrophomonas maltophilia
atgtggaacttgaggcctctccaggacttcgatcctcgagagcatctggatgtggcctttgccgatgacgaagtcacggaggctgagaaggttttcttgattgacctctatgggcagtatcggatagcttccgggcgcccttccgatgctatgcgcgcggatggacaacgcgccgagttgtaccagttggtgcacgacgcgtaccagctcgtgcaagacgatcgtcggctaaagacgctgcgtgccgatctgaagcttctggccgactactgtccctactgtgggttcgccccgatctcggatctggaccatcacctgcaacgatcgcgcttcaagctgttgagcattttcgcattgaatctggttccctgttgtggtccctgcaatcgagggaaacggaagattccgtccatagagtcgggcgagcatcagctccacacctaccttgaatcggtgacacaactcgactttctgcgtgcctccgccagtattgatccagacactggagcgctatccgtggtgtactccattgagcagtgcaacgggatgtccgaggagctttacgctcgcctgaattgtcatcttgaggagttcaacctgcacgagaagtacaaaaagcaggtcaatatccatcttgctgagcagatcgccggtctaagaggcaccttcaagcgtggggcgcacctgctccaggagtttctggtcgagacggcagaggcccacaaggagaactttggaaccaacgactggcgtacggcactctttcggggtttggcggagtgcgaacccttctggagcggtgggttcgagaaggctttggggaagcggcccaaggcttga

SEQ ID NO: 517382 - DNA, 342 bp, Stenotrophomonas maltophilia
atgacgcgctggccgttggccaacgccaacgcgtggatcgcctgcaccggcctggatccccggcctaacgagtctggcggcagaacgggacggcgtcggctgtccaaacagggcgcgccagtgctgcgtcagatgctctacatggccgccatggggctcaagcggtgtcgccgggggcaaccgctctacgacgagctgtcaaaacgcggtcaccccagcaccgccgtcttcaacatcctggccagaaagctggccaggatcgcctggggtgtcttcaaaagcggccgggacttcgatccggccatgctgaaggtgggtcaagcctgcttccagcaggcttga

SEQ ID NO: 517383 - DNA, 258 bp, Stenotrophomonas maltophilia
atgcaggaatacacccatcaacttgaactacgtgggcgctaccgattggtagcggtgacccacgcgccggtgtacgctgccggcgatgtgatcgggcatgcggtcatcgccgatgacggggaacgcctgtccgatctgatgtcgctggccgaagcgcggcagtacctggaagggttgctgcgggaagagggcatcgagcccgggctggagaacgaaaaccacctgcggaagaaggcgtcgcgctggcgccgccgctag

SEQ ID NO: 517384 - DNA, 834 bp, Stenotrophomonas maltophilia
atggaatggattgctcgcgcccgcacgttggccacccaggcccaggccgggcagttcgacaaggccggccagccttacatcggccatgtcggccgcgtggcggcacgggtcagcggggacgacgatgccgaagtggtggcctggctgcatgatgtggtggaggactgccctggctctgccgcgcaggtgcaggactttcccgcgcacatacagcacgccgtgcacctgctgagccgcaaccgcagcgccgatacggacctgtactacgcaggcatcgcgggcaacccgctggcgctgaaagtgaagctggccgacattgccgacaatgccgatgagcaacggctggccgcactggacagcgccaccgccgaacgcctgcgcggcaagtaccggcacgcactgtcggccctgggcgcacgccgcacaccactgcaaccgccccgctacagcccgtccagcgagcgcgaagagccggcaccacgccagcgcctggcagcgctgatgcacgccggtgagcaactggacgcagtggtgtgcggcttggatcgcatcaacgccggcttccgcgaggaaactgaacaggccgctgcgcttctgctgttcatgcacgaccagaaggtgctgcacagcctggcccgcgtccgccgcattgtcctgctggagctggaggcgcagatggaactggaggcctacgacacctggatggacacggggacgccggactggacgccgccctatggggaaagcgccgaaggcatactgcagcgcttcatcgatacctgtggaccgctgccgcgctgccaaggcgtgcctgccgacccgcccggtgactga

SEQ ID NO: 517385 - DNA, 558 bp, Stenotrophomonas maltophilia
atgtttcaactgcttccgctgctctcctgtttgcttgcgctcagtgcgagtggcgccgaagaggtttcggcatccgtgtggcagtggcacgaagccaatggcgaggaaggtcgagagatcctgcctatgcccggcgtgaaactggcgccagccgctcggggcgcattcgtcgacaggcgcatgcatgaagttgggggaaagcgctttcgcgcgctgtatcaggtattcgattcaaacgccgataatccgatgggccgttgtggcgcggggcgcgagatcgaactctacgtctacaaattgatcccgcccaagcctgtcgagcggggcaggatactgatcagtagttgccttgagaccgtgtccctggccagccagaactcgggaagtcccgaaagtgagtccgacttttcctcggtggtctggcagcacgacgggttcaccatcacgtggtggggtgccgggtccgacggaaagggctcaagccactatgcactccgcaatggccgttttgtcccggctcaatcggacgagagaagccgctgggggcggacaaaatag

SEQ ID NO: 517386 - DNA, 1197 bp, Stenotrophomonas maltophilia
atgagattccgtcgttgccggaccttgttcgtcgagccggtcgaacgcccgtccttcaacctgcaggaactgctggctggtggtaccggcgtgcagctgcagccggtcctgcaggtgcgtgcggcgcacctgccgtcggtgcaggtgatcgacgcggaaagctgtgcctggttgctggcctgcagtgccgaacagtggcagccgttgccggaagcagcggacgcgcgcggtcgggtgctgtcattgctgcagcagggcctgctggtcagcgatgatccggcccacgccaaggcctgcgctgccgagcagcgtctgcgcgatagtcattggtggccgctgtcggcgctgcactaccagcagtcgtgctgggacgaggtggacagcgtgcaggacatggagcagcaccagctggtgaccgcacgcgatctggtgcgcagctacggcagtccgccacccgaggcacctccgcgtatacatggcgcgcaggcactgccgtgctacgaggatgatccgatgcagtcgcagctgcaggcacgggctacctgccgcaacttcgatagcgcgcgtgcgctgccgttgccactgctggcgcgcgtgctgcagcaggtgctgatggcacaggccgaggtggaaaccgatccaggtgtgcggttcctcaagaagaacgtgccttcagccggcagcctgcatccgctggaggcctacttgctggtacgcaacgtggagggaatggccccggggctgtatcactaccatgcggtggcgcacgagctgggccggctgccggcacagccacaggacctggagtcgctgtgccagcgcttgctggccgggcagcattggttcgccgatgcacacgtgctgctggtgctggtgtgccgcttcgagcgcaacttctggaagtatcggaaccatgccaaggcctaccgcgctgtcacgctggatgcaggccatgtttcacaggcactgtatgcgtcggccaccgcactgggcctgggcgcttttgttacagcggccatcaatgaatccgaggcagggcgtgcgcttggcctgcagccgatggccgaaggtgcgttggcgatctgcgggctgggctggcgcagtggcacaaagatcaccgcggagctggacccggatggccacgtgtggccgcgggcggacccacgcgcagggaatgccgatgcagccgggccctag

SEQ ID NO: 517387 - DNA, 288 bp, Stenotrophomonas maltophilia
atgtctgcttcccccctttccgccgacgttgtccagcagctgctggagcgcctggccagcgatgatgccttccggtccgagtttgccaaggatcccggcctggccctgctcgcactgggtgcggacgaagacaccgtacgtgcctgccgtgcatcactggcgtccctgggcagcaagatggagttcgcccaggccgcatcacgcatgcggaccctgcttgggacacgcgccgccttcaatgtgccgttccttttcgaggatggcttgcctggtctccagcaggagtaa

SEQ ID NO: 517388 - DNA, 2517 bp, Stenotrophomonas maltophilia
atggacggcattccggattttctcccgatgcagagttcgcaggtgcggactctgctgttcaccgatctgtgcgattcgctgcagctggtcgagcggatcggtgacattgccgccgctgagctgttccagcagcatgaccgcctggtgcttggcctgcagcagcgctggaacggccagctgatcgatcggtctgacggattgttcatcctgttcgaacgtcccatcgatggcattggctttgctctttcctaccagaacgccgttgatgcactggggcgcgaacgtggcgttgttctgcgtgcacgcgccggcctgcacgtgggtgacgtgctgctgtggaacaacagtgccgaggccgttgcccacggcgcaaaaccggtggaggtggaaggcctggccaagcccatggctgcgcgcctgatgcagctggcgtggcctggacaggtcctgctgtccgcggccgccgaacagatgacgcgtcgggcagccagcgaactgccctgggcggctgacgagctgcgctggaaggatcacggctgctggcgcttcaagggcatcggcgaacgccaggaagtattcgaagtgggattgcgtggcagcgccccgctacgtcgcccgcgctcgggtgaaaaagcgtggcgggatctgccgctgtggcgtcgcccagcggcgctggtgaccgaggcggcactcatgctggcgctatgcggagtgctgtggacgctgtttcggccggcaccggccatcgccttcgccgaacgcgactgggtgatcgtggcggcggtgcacaacgccacggcttatccccagttggacagcagcctggagcaggcgctgtacatcagcctggggcagtcgcgtttcgtcaacatcctcagcgagctgaaggtgcgtgacaccctgcagctgatgcagcggccgccgcaggcgcggctggaccgcaggctggccatcgaggtcgcgctgcgtgacggagttcgtgcggtactgatccccagtgtgctggagctcaatggcaaagtacgggtcagtgtcgaagtcgtggatccgcgtagcggacagaccgtttacacgcgctttgccgacggtcgcgggctggattcgatcctcgcctcgaccgatcacgtggttgcggcgctgcgtaccgaccttggcgaagcgcttcgtgacgtcggcgcagaccagcggccgctgccaaccgtggctaccgccaatctggacgcactgcatgcctatgccaagggcgtcgatgcaacggctgccgcgcgctatgacgatgcgttgatgttcttcgagcaggcgacccggctggatcctgcctttgccttcgcctacgtcgggcagatgaacatccagcacgcaaagggcaatctggagcaggccgcggcgctgtaccgcaaggcggtcagccaacgtacgcacctgaccgcgcgcgaccagctctatctcgatgcctgggcggccgatttcgaaggggcaccgcctgcacgcatcgctgataaatggcgcatgctgaccgagttgtacccggacgacccggccggctggatgaactactcgatggtgcagttcgcgcagggtgactacgatggcgcactggccgcgacgcagccgctgctgggacgccagcattcgcgccgtgcattggtgctggcgtttgttgcacgcatccaattggcccgtggcgaagcctccgcagcggaagcagccctgcgcggtgcgcggctgcacccgggttggaacggcgatggcatggagccggtgattgccgcattggctggcgacttcgaagcggccaacgccgggttcaccgcgatggggccactgggccccgggacacgcatggagcgggctgccgtgctgaccatgcagggtcgcagcgctgaagctgcgggcgacatgcagcaggctgcgtcgcagtgccccagcgcaggtgggatgtgtgacatcctcgctttgcaggcgctggcctggcgcgcacggcaaggcgtttccgtgccggggcaggagtaccagcaggtgctcgatcgcgcgctcgcggcgatcgatcgtggccagcctgcaccggcacggcgcaacgcattcatcgctcttgccgctgcctaccatgcgctgcgcgccggccaggcaacggtggtcatgcagcgaagggacgcgctgcaggcgctgcccgaacgcgacgacgatccccgcctgcgcgaactgtggaacctgctgcaggcacgcatggccctggacgctggagaaacgctgcgtgcgcagcagttgttggcgcagcagcgccaggcaagtttgttccagtggcgcgtgctgcagttggatctgctgcgatcccaaggtcagcacgatgcagcgcagcgtcagctgcgctggcttcaacaccatgccggcctggcctttgcagagaacatcggcgactacgcactgctgccgttgaacgtgaacgacgtgcagcggctggcattgatggagagtcccgtggcctctcacagcagcccggacgcagcggcaccctga

SEQ ID NO: 517389 - DNA, 261 bp, Stenotrophomonas maltophilia
gtgtcgaccaaggtcgacacctaccaacagccgcgggaatctgtcagaggcggggcggtgtgggttggcaggaccgttggcgccatggatggcgccatcgagcccccatggaagggtttacggcgtgtcctgacaacccacaccgccccgccatcccccagaaacccgctgttgctgttgctgttgctgttgctgttgctgttgctgttgctgttgctccagctctggcctctgcgggtgccgggcgcagcccggccgtaa

SEQ ID NO: 517390 - DNA, 1524 bp, Stenotrophomonas maltophilia
atggcacaagtcatcaacaccaacaccatgtcgctgaacgcccagcgcaacctgggcaccagcggcgccaacctggccaccaccattcagcgcctgtcctcgggcatgcgcatcaacagcgccaaggacgatgccgccggcctggcgatctccgagcgcttcaccacccagatccgcggcgccaaccaggccgcccgcaacgccaacgacggcatctcgctggcccagaccgccgaaggcgcgctgggtgagatcggcaacaacctgcagcgcgtccgcgagctggccgtgcagtcgcgcagcgccaccaactccgattccgaccgccaggccctgaacgccgaagtgcagctgctgaagcaggaaatccagcgcgtcgccgaacagaccaacttcaacggcaccaacctgctggacggcaagttcaccagccaggccttccagatcggcgccgaccagggccagacgatcaacatctcgcagatcgccaacgccaacatcagcaagctgggtagctggaccagcgcatccaccaatggttcgactgcaggtgttcttcctgatggcggcgcagttaaggccgagaagtccgaatccgtgcctgcgggtactttcgccacagtggcgcctggcactgcgtacaagctgacggtcggtaatgttaccgttgtggatgagccgacggctggcgtcactgctaccgctatgcaaacggctctgaatgacaaagcagatgacttcaagaaggccggcatcaccgtgagcggcactgtggctggcggcgatcttaagttcagcaaggctgacggcaccgatctggtgatcacccagaccggcggcggctttgatggcaccggcttcgcaggtacgttcacgggtgtcgaagcgaaggcagctacgtacactgccaccagtttcacgatcaccggcaacgttgatggcaagcccggtcaggctgtaacgatcaacctcgacgctgcgaagaacgctggcgaccgcgccacgcagaccgtcaacgcgatcaacgccaagacccatgaaaccggcgtgactgcatcgctggaagacggaaaggtcatgttgactgccaaggacggcaacttcacagtggcctcctcgacgaatgacgctgctggcaacgccgcgctcaaggagcagacaggcctgactgcagaaaaaaccaacaactacgccgctggcggagcggaaaccggctttgctgctctggacatctcttcggtgggcggtgcagacaacgccatcctggcgatggacgcagccctgaactcgatcaactccgcccgcgccgatctgggtgcgatccagaaccgcttcacctcggtggttgcaaacctgaacacctcgtcggagaacatgtcggctgcccgcagccgcatccgcgacgtggactacgcttcggaaaccgccgagctgacccgcaaccagatcctgcagcaggccggtaccgccatgctggcccaggccaaccagtccagccagaacgtgctgagcctgctgcgctga

SEQ ID NO: 517391 - DNA, 342 bp, Stenotrophomonas maltophilia
atgacgcgctggccgttggccaacgccaacgcgtggatcgcctgcacgggcctggatccccggcctaacgagtctggcggcagaacgggacggcgtcggctgtccaaacagggcgcgccagtgctgcgccagatgctctacatggccgccatggggctcaagcggtgtcgccgggggcaaccgctctacgacgagctgtcaaaacgcggtcaccccagcaccgccgtcttcaacatcctggccagaaagctggccaggatcgcctggggtgtcttcaaaagcggccgggacttcgatccggcgatgctgaaggtgggtcaagcctgcttccagcaggcttga

SEQ ID NO: 517392 - DNA, 378 bp, Stenotrophomonas maltophilia
atgaaggctgttgacaggatctgcctcgatctcggcttgccatccggtgattcctatacccaggattgggcatatgagctttctgatgagtatcggaccagtgcatggctggatcgatacatggcggcatatcgcaccggcggctatccacgggatgtcaggaatgagttgatgatcctggcgcttgatgtgagcaatgatctgctttcctcgggcgcgaaccctcaggatcacagcatcgccgctgtattggacgcgcttgccgctggccttttggagcacctcgatctgattgagtactgggcgctggagggggaaccgttggaggactgctttgcactgaccccagaagtcagaaggatcaaggccgcagcctga

SEQ ID NO: 517393 - DNA, 228 bp, Stenotrophomonas maltophilia
gtggtcaagtcgaagataagactggagagaaggcgaaatgatgacgttgcctatctgtaccttccggcacatgcgggaaagggcgacccaggctcggtcgcgaagcacatttcgttgggctcgctgattgagaactatcggggcccagaagtgcttctggactttgacaaggatggcgaactggttgggctggagttccttcgtgttagcgagacactggtcgattga

SEQ ID NO: 517394 - DNA, 234 bp, Stenotrophomonas maltophilia
atgcacgccctggctgagtcgatccgcggcagtcagcggatgaagagcctgattctcagtggtatgtgggcgagggaaaggaaggtcatccggtttaaccttgtacaccttactttcgagcatctgtcgcaaacggctattcttgaatattttgtcgatgatgaagaatatccgcaggttgcaattacctacagtgagctggcagatgtgctcaacggcctgtgtcagggctga

SEQ ID NO: 517395 - DNA, 705 bp, Stenotrophomonas maltophilia; identical to SEQ ID NO: 517258

SEQ ID NO: 517396 - DNA, 318 bp, Stenotrophomonas maltophilia
atgttggatttgggcttcagcaagcccggcgaggtcgtcaagcgactctgcgagcgcttgcgcacagagcgcatggcgttgggcatgacacagtcggatctggccgggcgttccggcattgggaccaacaccgtgtccaacctggaggccgggcgcaatgttggcttcgaggcggtggtccgcgtggcgatggtccttggtcggatcaacgaactcgaaggcctgttccagccaaagctggacagcatcgaagacattcggcgctacgaagaggccgcgaatcgcctgcggacgaagaggaagccccgcaatgcctga

SEQ ID NO: 517397 - DNA, 1284 bp, Stenotrophomonas maltophilia
atgcctgagcaagtgaatgtcttctacgaggggtggggagagcgatggctctggggaacgctggtctccaccaccgccctgaccggccgcccgctgatcgccttcgagtacagcaacgaggccaggcaaaaggggctggagctgtcttcgtacaagctgccgctggccggccctccgttgcggcgggatttcccggaccatcaactgcaactgcccgggcccgtgtatgacgccttgccagacggctggggcatgctgctgatggaccgcatgttcaggcgccgaaggatcagtacagcacgcatcggcccgctccagcgtttggcctgcatcggtggcaacgcgatgggggccatgacgtttgaacctgtggcgcccgagggtgaggcgccgcaggtccacatcccgctggagcagcttgccgccgaagtgcaggaggtgctccggggagaaggtggcgaatttctgcagaccttgctgctggtgggcggctcaccccaaggtgcaaggcccaaggcacttgtctatcgcgatccgcagttcggtgggttcaccacggccgccgagccagggttcgaagcctggctggtcaagttcccggccagagaagagcatgccgaggcgtgcgccatcgaaatggtctacgccgagtgcttgcgcaggtgcggcatcgagaccccggacacgcagtacttcagcctgccaaatgggctggccgcgttcgccagcaagcgctttgatcgccacgatgggttgcgtgtacccatgcagagtcttgccgcattcacgggcgccaactaccagacggcggggtccttggactatgtcaacttcctgcgcgcgacccagctgtgtaccaatgacgtgcggcaaatggccgtggccttcgagcgtgcggtcttcaacgtcgccttcaacaaccgggacgatcatccgaagaattttgcctacatcatgtcgccggatgggcaatggcgcttggccccggcctacgacgtgaccttctgcgagggacccaacggatatcaccagatggacgtcatgggggaggcactggcgatttcccgtgctgacatgcttcggcttgccgaggaagcagaagtgcagcagggtgacgccagtctggcgattgacagcatctgcgaggtggccagccaattcaccgaaatcgccaacggcatgtattcaagcgttattgctcaagacaccttgagcatgatccaagggcgtatcaacgagaacgtggctctgctgcggcaagtccggcctggcctgcggacctga

SEQ ID NO: 517398 - DNA, 342 bp, Stenotrophomonas maltophilia; identical to SEQ ID NO: 517294

SEQ ID NO: 517399 - DNA, 342 bp, Stenotrophomonas maltophilia; identical to SEQ ID NO: 517294

SEQ ID NO: 517400 - DNA, 342 bp, Stenotrophomonas maltophilia; identical to SEQ ID NO: 517372

SEQ ID NO: 517401 - DNA, 294 bp, Stenotrophomonas maltophilia
atgaccaaccaagctgacgaggcgctgctgcgcctgttgatggcaggcggcgcgctggcgccacggcgggccctgctgcaggccgcaggcagcgcggagattgcgatcgcgcagggcgccgcgaactggcgcgcgcacggctgcacgcccgagcagtgcgccgcgctggaatgcccggacacccgggcctgggccgtggcacggcgctggctggaagacgacaaccagcacctgctggccttcaccgatccggcattccccccgcccctgctgctgtctcttatacacatctga

SEQ ID NO: 517402 - DNA, 387 bp, Stenotrophomonas maltophilia
atgaaaggaaagtcgaaacgcaatcgctggctgatgatcgtggtcgcgtgcctgggaggcgcagcaatcgcagcgtcggttgggaaattctactgcggcaagtcttgcagtttcgatggaccctacctacaggacggtgaagcacatggattcctccgatcaacgatcaatccaaaagttgattcttggattgacgcgaaaggatcccccaagactgtggagctctgcaacggcagcgtctgcgcgaagtatcgctacgggaaaggaactgtgctgtgggaaaagatctctgagtacagcagcaactgggttggctccaacgtaggtggaggaggtggcggtggcggcggaagggtgaccatcggagctacttcggtagctcaatag

SEQ ID NO: 517403 - DNA, 603 bp, Stenotrophomonas maltophilia
atgagtgtcacgtcagtcgttcgtaagaagggtgttggtcggcagggcttgcagccctgcacctgctgcgagccgaagcaacagcaacagcaacagccgaagcagaagcgggtttcctgtggggtggcggggcgggtccggttgcgggggacgctgcaagtccccctccggggcccggcccagccgccggcggctgtgcgttcgggcgcttgcgaagcagtgcttcgcaagcaaagcgccctcacccatgtaagctcggtcgccgcatccatgcggctcacgcccccgcaaccggacccaccccgccttcgacagtcttctgcgatctgtcggcatttctgtagagccgagccatgctcggctcaaatctcacagatatcgaaatattcgatttccatagtgattcatccacgcatggcgtggattaccgtgtcgaccaaggtcgacacctaccaacagccgccggaatctgtcagaggcggggcggtgtcggagtgcggggtgtcagccgcatggatgcggctgccaagcctacatggacgtacttgcggcgtccccgcactccgacaccaccccgccaacccacggaatgcccgctgttga

SEQ ID NO: 517404 - DNA, 939 bp, Stenotrophomonas maltophilia; identical to SEQ ID NO: 517329

SEQ ID NO: 517405 - DNA, 264 bp, Stenotrophomonas maltophilia
ttgagcgctatcgatgaaaagaatctcgttttagcctgtctgcggagactgttggaatccgagcctgcttccgtggaacaggcgtctggctggtaccagagggcggaatttatcaaggacgtgcttcggtcaatttcgtatgaaatcggggttcctcacgtgatatggcactatcttgatgacgccgatatccgtattcgcgatccccgctatgccgaagcacaggtgttggccgttaggcagagtattgatgagtgggcttga

SEQ ID NO: 517406 - DNA, 738 bp, Stenotrophomonas maltophilia
atgtgttgggtagatgccgaccttggtcggcaggcgtgcgccaaccaaggttggcgactaccggtagccccaagccacgcatggcgtggctctactgatcttgcgggtgcagtagattcaggccctgcgtggatgtgttgggtagatgccgaccttggtcggcaggtgtgcgccaaccaaggttggcgactaccggtagccccaagccacgcatggcgtggctctactgatcttgcgggtgcagtagattcaggccctgcgtggatgtgttgggtagatgccgaccttggtcggcaggcgcacgccaaccaaggttggcgactaccggtaaacccaagccacgcatggcgtggctctactgatcttgcgggtgcagtagatccacgccctgcgtggatgtgttgggtagatgccgaccttggtcggcaggcgtgcgccaaccaaggttggcgactaccggtagccccaagccacgcatggcgtggctctactgaccttgcgggtgcagtagatccaggccctgcgtggatgtgttgggtagatgccgaccttggtcggcacgcgcgccaaccaaggttggcgactaccggtaaaccccggccacgcacagcgtggctctactgcgctgccacctgcggttcacgcgcagctgcgctccatgcgcgcaggccgaacacggccaggccgaggaagaacacgtacagcgctgcggtcacgtgcagcgacttgaacaggtag

SEQ ID NO: 517407 - DNA, 135 bp, Stenotrophomonas maltophilia
atggccgtgggttgtcagaaaaaattcatcaaatccgcgttctccacttcggtggatgcgggctcttacttgggagaagccgctgccgagtcacgcagcggcacctgctgctttctctcttccaaggacccgtga

SEQ ID NO: 517408 - DNA, 342 bp, Stenotrophomonas maltophilia; identical to SEQ ID NO: 517382

SEQ ID NO: 517409 - DNA, 771 bp, Stenotrophomonas maltophilia
atgctcgctatacgggttgccggccagcggccggcactaccgaacggagtagagccacgccatgcgtggatgcgcggtatacgggttgccggccagcggccggcactaccgaacggagtagagccacgccatgcgtggatgcgcgctatacgggttgccggccagcggccggcactaccgaacggagtagagccacgccatgcgtggatgcgcggtatacgggttgccggccagcggccggcactaccgaacggagtagagccacgccatgcgtggatgcgcggtatgcggggttgccggccagcggccggcactaccgaacgcagtagagccacgccatgcgtggatacgcggtatgcgggttgccggccagcggccggcactaccgaacgcagtagagccacgccatgcgtggatacgcggtacacgggttgccggccagcggccggcactaccgaacgcagtagagccacgccatgcgtggatacgcggtacacgggttgccggccagcggccggcactaccgaacgcagtagagccacgccatgcgtggatacgcggtacacgggttgccggccagcggccggcactaccgaacgcagtagagccacgccatgcgtggatgcgcggtatgcgggttgccggccagcggccggcactaccgaacgcagtagagccatgccatgcgtggatgcgcggtgtacgggttgccggccagcggccggcactacccgccaaaaccgcagcttcagcccttgtagccgttgctga

SEQ ID NO: 517410 - DNA, 342 bp, Stenotrophomonas maltophilia; identical to SEQ ID NO: 517294

SEQ ID NO: 517411 - DNA, 342 bp, Stenotrophomonas maltophilia; identical to SEQ ID NO: 517294

SEQ ID NO: 517412 - DNA, 696 bp, Stenotrophomonas maltophilia
gtgccgttcttcagcgtggcgcgctgcagtgccgggaacttcagctgcgggaactcgcgggtctgcggcacgccggccttgcggtccacctgttccggcagggtgctgtacttcgggtccaccgccggcacggtgaacggcttcggcatctggctcggttcttccttcagcgccacgcgctcacccggtgcgatcaccagggtgtggctgcccttgtccagccactgtgcgcccaggcggctcagatcggcggcactggccttctcgatgttggccagcgaggtgcggaagcaacccgggtcgccggtgaacaccgcgcactcggccagcgcatcggccttgccgccgaagccaccgatgcgctcgatgccacggatgaagccggcacgggcgccggtcttggcgcgctccagctcggccgcggtcgggccctgcttgatcaggcggtccagttcctcgtcgatgatcttctcgaccttggccgggtcctggccctgcttgacggtcgccacgatcacgaagttggagcccagctgcgacgtcgacaggcccgagccgatgctgtccaccagcttgtcctggtgctgcaggcgctggctcaggcgtgaggacttggcgccgcccagcacttcggagaacagctgcaactggtcgatgtcggcggtgccgacctgcggcacgttccaggcgcggtag

SEQ ID NO: 517413 - DNA, 696 bp, Stenotrophomonas maltophilia
gtgccgttcttcagcgtggcgcgctgcagcgccgggaacttcagctgcgggaactcgcgggtctgcggtacgccggccttgcggtcgacctgctcgggcagcgtgctgtatttggggtccaccgccggcacgttgaacggcttcggcgcctggctcgggtcttccttcagcgccacgcgctcacccggtgcaatcaccagagtgtggctgcccttgtccagccactgcgcgcccagacggctcagatcagcagcactggccttctcgatgttggccagcgaggtgcggaagcagcccgggtcgccggtgaacaccgcgcactcggccagtgcgtcggccttgccgccgaagccgccgatgcgttcgatgccgcggatgaaaccggcgcgggcaccggtcttggcgcgttccagctcggccgcggtcgggccctgcttgatcagccggtccagttcctcgtcgatgatcttctcgaccttggccgggtcctggccctgcttgaccgtggccatgatcacgaagttggagcccaactgcgaaactgacagtcccgaagcaatgctgtccaccagcttgtcctggtgctgcaggcgctggctcaggcgcgaggatttggcgccgcccagcacttcggcgaacagctgcaactggtcgatgtcggtggtgccgacctgcggcacgttccaggcgcggtag

SEQ ID NO: 517414 - DNA, 417 bp, Stenotrophomonas maltophilia
gtgattgacttcaagcgagtggtaggaaagtcgttcagagcgatcgcgtttgaccgctggcggtctctcgctgcctgcactgcattttccggggtgtcttttgtgcttgagctgcgctgcccggactcaggtctatttgccgcctcgggcgcaatttacaccctcggcggttttcttctgaacatcaaacagagcgcgatcttccatcgccaagcggcagacgggtctcctctaccgacccgtgcgaagttctacgcgataacgagggcttccactttcgcaagcgagaccgccgaggaagcaatggctaccaaggtcaggtcggttgaggccgacgagatttggggctgcgtgatggtcatcgcaggcactgtgctttggggatatggcggttgggtcttcaaagccatcacatag

SEQ ID NO: 517415 - DNA, 228 bp, Stenotrophomonas maltophilia
atgagcgcgattcaagcggcgtcagcggacccgaaccgcaccaaggtgccgtacgtgaaggacatgggatccgccaacgaacactatttcgcctggcctgccggggccgggctggtcctttctgaaacaggcggttccacgaagcctgcatccgcgtcgtgtgtcacgaacgctgacggaaccgtgacacagatgaccatcaacgggtcggaaatcccgattccgtag

SEQ ID NO: 517416 - DNA, 246 bp, Stenotrophomonas maltophilia
atggacgtaaggacgaaaacggttgtccgggtcgagatcgagctgaacaccggcacattcggatcgggagccaccatggaggagatcaccacccaggcggcagcagagggtgtgcgcatcgccaccgaaatgctggctggagccagggctcccggtggtggccgagtagtcggccatcccagggttcagacagtaacgaccctgccggacgacttaatcttgggggtgttcaagtgcgcagactga

SEQ ID NO: 517417 - DNA, 474 bp, Stenotrophomonas maltophilia
atgctgattaaagcgaccgcgtttgcggtgggaagggactttgacaggccgcttgggtcgttgatccagtcggaggggcgctggtttcttcgagcgcaaatcaaggaccgggaggatatgttggacgtagcggtcgcgatgagcggcaaggaactgggggagatccgatatctggagagcccttccagctgcgtccacctcgctgacggcgtgagggtcgaattccgggttcttggagctatcgaggggccagggaagccgcccgtcggcgccttggtgtggtctacggatggcaatgagcaagccattgcgctccacgggagctatttgacgacggctggaaccgaatccaaggatttcagcaaagagcgcgcgttctactccaagagttggggggcatacctcgtcggagaggatggaaaggacttggcccgcgagccattgttcttcaacgaaatcgacaagaagggctga

SEQ ID NO: 517418 - DNA, 369 bp, Stenotrophomonas maltophilia
atgagaaatctgacattggcacaggccgctcgcgatgcggtgtacctgtgcgcagcctgcggcgccgacggggtagtccgaatcagcgtttcccgaaaccccgagggcagcatctgccgccggcccagcgtagttgccgttcaatgggcctgggtgggtagcgaatcgagagcgaagctgctcgtgcgccggcttcgccgtcagtgggctgaacgctacgttgtgggggagggctaccggttcgactatggttccgaaggcagaaccttccgggacgagctcaaccgggtctttgaggaggttgtgggcgggtcggcggcatgggagaagctggggccgagcgccttggcgatcctcagggggcgatga

SEQ ID NO: 517419 - DNA, 342 bp, Stenotrophomonas maltophilia
atgatcaccgacaagaagaccctggcggacgtgcagcccggtgggatggtgatgcttcatcaggccgagcggacgcagcgcgtaatggataagccagagatcatcggcggcgacaccatcgctgaggcaaacggaaagctctgctctttctcgatgcgatgggaactggatggcgactatatgcgctgccggatctgccatcggccacagctgaccagctacgcccgccacccattcccgcacgctgacggctgcgagggcgcgcggaaccatgaggcgcatccgtggatcacgctcgcccagctgctggatccgctcagggaggcggtgccaaatggctga

SEQ ID NO: 517420 - DNA, 315 bp, Stenotrophomonas maltophilia
atgacccaggaacatgtcagccacccggaagggttgccgaactgcgccgccggccaccgcgcgcgccacattcacgacaaacgccgcgcgtccgccggcggtggccacctcgtggagtgcgcctgcaggtcgaccagcaagcatcccgatccggacaaagccatcgcagcgtggcgacggctcaaccgtcccgagcgcagcgcgcgacctgcgacggcgccagaagcgaccgacaacgtgctgcagttcaagctcaccctgggagaagaatcaacgcggcagcgcgcggtaggagcagggaatggccgcagctga

SEQ ID NO: 517421 - DNA, 501 bp, Stenotrophomonas maltophilia
atgccacctagcacggatgatgcagtctttccagaaatggaagctgcggctaaacaggccgaggatgagttcaatgcgaatccggccccgccggaagcagacgcgccgactgagctccgcgagctgttccagagcgaagcggatcgaaaccacaagacgcatcgctacatgcgcgtggccgcgttcattgtgttgggcgcactgatagcggccttcctcatcgtccttctactcgtactgttaaacctcctgagcagcgagttcttgtcggtcttggttaagggggggacgacaatgaactggcacattctcgttttcgccggcgctgcgttagccgtgtttgccgctgtcccactctctttggctatggcattggtcaagatgatcagcgttgagcagaactgcgacgcagacggcaattacaaaacgccaacgacagagcttggaaaggtcatccttgacctcatcaagtccgttgcgcaggctgccaagtcaaattga

SEQ ID NO: 517422 - DNA, 492 bp, Stenotrophomonas maltophilia
atgccttatccctcgaccagtatcgccaactacttcttggagcgcgcctcgcaagatagccgtgcgttaacgcccatgcagctgctcaagctggtgtatatcgcgcatgggtggcacttgggctacacgggccagccgctcataactgaggaagtgcaggcgtggcgccatggcccggtgatcaagcaactgtacgaccgacttcggcactttggccgcgagtctgtgcgcggcctgattgctagtagcccttttggagggctgccccagccggtaggcactgaggtcgtgccgctgctcgatggtgtctggaaaaactattcgcgtttcagcggcatggagttgtcggatatgacacaccggcctgggacgccatggtctgttgcctggcatcaacaaggtggcaaggacacgatgttcgcccccatgagcaatgatctgattcgtgatcactatcaggcgaagatccgcgaggcccaccaaggagcgtag

SEQ ID NO: 517423 - DNA, 327 bp, Stenotrophomonas maltophilia
atggataatgtctacatcgtctttgctgaagaaggaatcacgttgagcggaatgaatggtcggaaggtgctgctggcgacctttctcgggagcaaatcccctcctgacgatgttcggccctccgaagactactggaggttgatcggtgccaacgggaccattgttcttgaggaatcccagacttccatgaccaggcatcaacgtggcatgcgggtgctggtccagtttcctgaaagcatcacggatatggggcttgcttgccacaacgacataccggacagcctctggattttcgtctccgacctgataattcacccagtcgattga

SEQ ID NO: 517424 - DNA, 207 bp, Stenotrophomonas maltophilia
atggctgaccagccgttcccctccacgcaggcgatccacaccgccagggtgttcctcagcgagtgccgggcgcgccgacacggcctcggcttctggttcgccttcaacgctgcacagcgcgcgcgcagccgcgccactgcccccgccccgctgccggcaccggcccgcgcaccggaacagcccgcccaactggcgatgttcgcgtga

SEQ ID NO: 517425 - DNA, 615 bp, Stenotrophomonas maltophilia
atgatcggcgcatgcgaagtcctgagccacgagccgtcgattcctacgcgctcgcgtgagcatcacccggccgagcacgcctaccgggaccagtggcacctactggtgcgcgcgcagtgcgacgactactgggatctggacgatgaggagcagctcgcaggccccctggggcacatcctccacaacatgccggttctgctgaccgaccgctattcgcggatcgcggcgaccttcatcacctggctgggcaccaacgtaggcggttccatcatctggcatctgcgggtgaagggccctacggccaaggaaccccttttctatgaccgcagcgtgctcaggaagtggcacgagcagaatcaccgctattcgttctgcaaccgcggcttccgctcatccgactacttgaccagcgcggactgggagaagccgacggtgtgccgagatgcgctggaaatcgaggtattcgatcacttggccaactggctcggctctgccgacggcaggcagttcgtcgcagccgccgaagcccgcgccgtggcctacgccaagggattgtcgaccaacgagatactgacaatccaagccggcggcaaggaggcgtgcacccatggctga

SEQ ID NO: 517426 - DNA, 321 bp, Stenotrophomonas maltophilia
atggctgaccagctgctcaccgctgcaatggacccatccgagcccgtcgagtgcccctactaccacggcccggtgtgggacgcgttcgggctaacccgcgccgcctacctagtcgtgccgcgccggaccctgcagtccatgccgatggattggcagcagcgcttcgtcgccctgatggccgaggcgtacgagcgccttcccgactgcgcctttcccgagtacagcgtgctgcgcaaggaacacggccgattcatcactgacccgctccgcgactaccgccacaccggccccatcgctcctaaggattcctccaatggctga

SEQ ID NO: 517427 - DNA, 210 bp, Stenotrophomonas maltophilia
atgagccgcgtcacttggggcgtgtgcaacagggagcggaccgtgacggtgttctgcaacgtgtgccgcacggtgttcaacctgcacgcaccgatggtcgaggctctggagctgaaaatggcagccgagaccagccatgtgtgccccggcacgacgatgcctgtggctgctgatctgttcggattcccgctggagcaggcccatggctga

SEQ ID NO: 517428 - DNA, 951 bp, Stenotrophomonas maltophilia
atgagcaacgacaagacaaccctggcggacgtgcagcccggtgggagggtgaggctgggggatcaggccctcagcactagtgaaggtgcgcgccgctacgtcgccgacttcttcgccacgcagctgcgccgccaggacttcggcgactacatcctgaccgaactggcagctgacttcgcatgtgcgttggctcagcacctctccgcccagccctccccgggtggtcagggggatgcgctggccgaagcaatcctgcggatggccgaccactacgcaaaacaggccgaagtttcccgtcgtacggtcaatgaggcggcgtggctcagccaaatcgcccatgaactgcgtatcatcgccgcccgccagccggtgggggagccggtggatgactatgattccgcatttcaggacgtggaccgtccgccgtatctggtggatgccgctggcatctatgcgctgaaatccttcctgaccgtggccgaagaattccgccgcagtgccgaaccctacattgaggcgatcaacgaaggcgcctgcggtggtgaggatgaggtatcagaggctttcgacactcaacttgcccgcgcgaaagaagcgatttcacgatctgtcatctacgccgccccgcccgcgcaggccttgtcgcaggactggcagcacatcgcaaacgaatgggccgatgcagcgaccaacggtgtgcagtggctgcgcaatatcagcgatggcgcttcgaccgtagccgacgcgctggcgtgcatggaaagcaatgtcgaacgcatccatcagttgaagccgcccgcgcaggccgtggacttggggcagttccgggccgtggtcaattactggattgaggattgcaaaactaagccactcggcgacgagcgtgcgggttttatcgcgtacggtgaaaggctgctggccctgatcgacagccaggcggtgggcaaatga

SEQ ID NO: 517429 - DNA, 783 bp, Stenotrophomonas maltophilia
atgtcggcagtggccgcgcccgcggtgggcctgacgccgtgcgccaactgcggcagcgacgacgtgcgcatgcgcgcgcggggcagtgccggcagtcggcataccgcacaggtggtctgcgcgcgctgcagtgcacgtggcgagctgtatgtaggagcagatgcagaagagcgtgccagcagggcatggacgcgccgaccgatctacatgccggtgccaaaagtggtcagggtggtgcgcggccgagggccggtgccagaaccaacactggtgcgtgaccctctcgagctgatcgcacgcatgctggtgggcgggagcttccgcgagccatcggaaggcaggtcaaccatgccgccactggctgcggccgatatcgctggtgctgtcggcatgatgcgtgattccgtggccaagcaagccgtactggcggtggcgctgcgcgggcaaggcgtctccctttcgttgctggggcgctccctagccaggcgggtgatcaggcagattcggtggcagcggcgcagcgacgcaaagcctgcacttcgaatggatgatccggccgaccggtggcgcatgaggctggtgctgcaggacgcggtgaacgatctggtgtggcccgagcggaagactgcggcgcaggacgcagctaaggccgtgaagatgaggaagggcgactacctgcgcatatatggaatcgcggcagcgaccctccggcaagcacttgaagatggccggcaagagttcaaggtcaggctgtttgcaggacgtcagggcggatcggtttag

SEQ ID NO: 517430 - DNA, 198 bp, Stenotrophomonas maltophilia
atgactttgcaaatcaacaacatggcgatcaatcgtgctgcctcgccacccaaggcacaaattcacatgtccgatgaggacaactgtgccgtcatcgtccaagtggagctcggcgctaagcccatcgagcagtactcgctacaggagatcaccgacctggcgatgcaggcagcgaagcatctagtttcgtccatctag

SEQ ID NO: 517431 - DNA, 699 bp, Stenotrophomonas maltophilia
atgctgatctgtatgttaataacgcatcttgaatcatggaagaaggcgggtggcggaatgaaatcacccattaaagtggcaatgctgttcatcgcgctttgtagcagcaatgttgcgatggccgacgctcggctacaagtcgaaatagttccgctgaagggcgacctgggagaaacttcaatcgcgttgaagctctcgaatgtcggtgaccaggttgcggtagtcgctgagtcttctctgccgacgctcaatgctcgcaaaatgttgttggatgatcccttcatagtgaaacagcaggatgggcgcgaagtccagttcttcgggataatgagggatacgctctccgaaactccgagttctttgtccatacctcctggcggcagtttcagcctagatataaatcttgcaagtggctatagtctgtcgccagggctgggttacaccattggcttgcgagccccgatttcctatcgcaccgccgacggcaggaatgcggaagctgggcccataaagcggcaatcaggcaagtggcaaagtgcgtatcccgcaccccgcacggttgttgtacccgttactggaagaacaatgaagcaagcccgggcgggggagtttcttgaacctgtggcatgtgtcgatccggccggcaccccgccttcggccaaaaaagtgcaatttttcagagtgtattggctggggtaa

SEQ ID NO: 517432 - DNA, 153 bp, Stenotrophomonas maltophilia
atgggcaaggcactcacctggcgcaccctggcctgcacgctgctgccgatgttggccgccgcaggcggcgcgcaggcgcagagctatggctacggttatgacgacgatcgctatggcggtcgcgacggcggcggcatcgtacgctgcgaatag

SEQ ID NO: 517433 - DNA, 579 bp, Stenotrophomonas maltophilia
atgcgcgcaaccttcagtgccctgctgctcttggccgtcgccttgccggcgggtgccaagaatgtccagctcccgcccaacgtgacgctgcggccgggcaacatgagcggggactacatcgacacggtgagccaggaggtccgaggcgccgagttcggcaagctcaagctctgcctggcacagaacgtcagcaaccaggcggtcaccatcacgggggggaccgacgcgccgctgacgttctattcgggcaaccggacccagaccagcacgatccagggcggccaggtcttcaagtacgaggacgccgcagcgggcgccgtgatcgcggttggctccgccgacgccggtcagtccctgatggggatgacgcgggccgtcgtccggttcgaggtcatggcggtggccggccctgagcggaccaccctcaagttcagcaacatcggtcggaccgacctgaacaccgggtccgtcacgaacgaggggttctccccggtcggtgcctggaagggggccaagcccctggccgttatcgagacgctccaggccctcggcaccaggctcgactcctgcctccagtga

SEQ ID NO: 517434 - DNA, 777 bp, Stenotrophomonas maltophilia
atgaagacccaaacgcttgttccttggccgggcggaaagagccgcctcgcgccgcagctgttccagctctttgacaatcagcacagcacctacgtcgagccgttcgccggcgccgcggcgatgctgttcctgcggcccgagccggccaaggtcgaggtgctcaacgacatcaacggcgagctggtgaacctgtaccgcgtcgtgaagcatcacctggacgagttcatccgccagttccgttggcagctggtcgcccgcgaggagttcgagcgattgcaggccagcccacccgaaacgctgaccgacatccagcgcgcggccaggttctttttcctgcagaagaccagcttcggcggcaaggtcaccgggcagacgttcggcaccgatcccggtggcccgccacggatcaacctggtgcggttggaggaagacctcagcgccgcgcacctgcggttgtccagggtgaccatcgagcacctggcctgggaggcgtgcctggctcgatacgaccgcccaggaacgttcttcttctgcgatccgccgtactggaagaccgagggctatggcgtacccttcggcctcgaccagtatcaggcgctggccaaggcgctgcatggcctgaaggggagggccttgctgaccatcaacgatcacccggacatgcgccaggtcttcgctgggttccgacagaagcgcctcagcacccggtacaccatcgggctgtcgtcgaaggccaagtcgaaaccgcgcgccgagctggcggtcatgacctggtga

SEQ ID NO: 517435 - DNA, 408 bp, Stenotrophomonas maltophilia
atgaccccgtcagcactgctgttgtctgtcttccagcacgccagcctggcgcacctgatcggcaacgctgcagcgctggccgtcgtcggacctcgcgtgatgcgcgcgctcggctgctggaggatcgcggccctgttcctggtcgccggagtcgccggaaatggtgttgccgcgctgctgctgcaccgtcaggtcatcggcgcaagcggcgcggtcgcaggcgtcatggccgcgtacctggcgctgttcccgcgctcgcgcctggcgctgctgatcggcctgtggatcgcattgcagttcgtgttcgtaatggtcgccctcgacttcggtggcgttgcctggcccgcccacatcgtgggcgcggcggtcggctcgctgggcgcggtcgtggtccgagcgacgaaatga

SEQ ID NO: 517436 - DNA, 3669 bp, Stenotrophomonas maltophilia
atgggcggtaagagcaagaagaccaccgtcggcttttggtacaagcccgccttccatgccggcctcggcatcggtcccatcgacgctttcctgcagttccgaggcggcgacaagcccgcgtggatcggagagctgacctccagcggaaccatcagcatcaacgcgccgaacctgtggggtggcgagaaagatcaaggcggcatcgtcggcgcagtggacgtgatgttcggcgaggccacccagcagccgaatgcctacctcgcggccacgttcggcagtcagcagccggcctggcgcggcctggccacattggtgttcaagggcggcaagtacggggcgatgaatccgtatccgcagaaggccagctacaagatcaggaagacgaagaagggctgggacaacgacgcctgctggtatccggagaaggccgagatcgccatgaaggcgccggcgtccgcctcgctgtacttcgccctggacctctccggctcgatggatgaggttgccagcaacgggcagacgcgcctcaccaacatgaagacggccatcaacgccgtgctcgaccaggtcggagaagccgtagcacgcggtgcagccatcgattgcatgatcgtcgggttcggcacctatcccagcagccgccagtccatcctgcggcgcaatctgaccgcgggcggcatcgcagaactgaagagctgggtcagcggacgcagcagcagcttcacgacctacttcaccgccggcgtcatggacatgcccgacttcttcggaggcggcgaggcgttcgcacggcggcttgcgttcttcattacggacggcgagccagtggacgcaggctctggaatgaccagcgcgcagatcgcagccgaggctggcgccatcgtcagctccgtggctggtgtgagttgttacggcatcaatatcgacctcaccgacaccagctacacgtccgttgtggacaacaccgatggcgatggcgtgccggtggtatcgggcggcgatccatcggcgatgatcggcatcatccgcagcgcgatcttcggcggtgtgatcgggatgaacccagcacacatcctctattactcgcgcacgcaggccgacatggggcgcgagacgacggcgaacatcaacgccgccagcttcacggcggccgccgactactacttcgggcagggcttcgggctgtgtacctcctacgatcccagcgccgagagcgtggaagagttcgagcagcgcatctgccgcgtcgcaggctgcagcctgacccgcagcctggttgatggccagtggtacctggacgtggccaacggcgtctacacgctggaggagctgccgatcctgaccgatgacgacatcctggacttccaggagcagccgacgctgctggacagcgccgtcaacagcgtctcggtgaagtatttcgaccctgacctcaaggaagccatcgtcacgccgccgacgcaggctccggcgcttatcgacgacttcggcaccaaccacctgaccatcgagtacctggagattccgaccggcgagctggcagcgcgcgttgcgcagcgcgagctgctggcacgcatcaccccgctgcgaggcttcccgctcaagacgacccggaagccctacgcctggcgccccggcacctacttcaggctccaggcgccgaagcgccgcatcaccgacctggtctgcatcttcagcgagaagtcgagcgggcagctccgcagcggcgccatgtcgatcaccgcgacgcaggacgtgtacagcgtgccgtccggctccttcgtggaggtcgaggagggcgtcgataccagcccgtcgcagaccccgcagccgatcaccctccagcgtgccttcgaggcaccgtatatcgagctggtgggaacgctctctcgtgccgaccttgaggtgctgccggcggacacgggcttcctgatggcggtggcatcagacccggccaccagccgggactacagcgtcatggtggcgccggatacggtcacctacgctgaggtcgccttcggctattggtgtcctaccgcggtcatcgtggaagcatcggaaacgcgcctcgaaaccacgttcaccgtcgccggtggaaagatgctcgaccaggtcgccgtcggctcgcctgcgctgtggggcaacgaactggtgcgggtggacgggctgaacgtcggcaccggcgccatcaccctgggtcgcggcgttggcgacaccgtccggcagccacatgccgctggccagcgcatctggttctatgccgaccacgcggccgccgacctgaccgagtacacggacggcgagagcatccaggtcaaactgctgaccaacacgcccagccagcagctcggcctgagccgggcgactgcgatgggcgtgacgttcgaccagcgccagttccgcccgtacccacctggcaacttgcgcgtcaacgacgatccggcgccggtccacgtcgagttcgagttcgacgtgacctgggcgcaccgtgaccggatcgcacaggccgaccagctggtcgatgcgagcatggcggacatcggaccggaggccggcgtcacgtacaacgcgcgcttctacctggacaatgtgctgaaggcgaccgagaccggcatcgtcggcaactccatcagcggctatagcgtctcgggcaatggcacgctgcgcatcgaggtcgaggcagagcgcgacggcctggccagctggcaggcggctgccatcgagttcgactacatcggcgccgtccagctcagcggcacgctgcccaatgcgaccaggaacgagccatacagcgccagcctgacggctatcggcggtgcgacgccctacacctggagcctcggcacgggcgcgccggcggagttctccatcaacagttcgacgggcgtcatttccggcaccccggcgaccaacggcacgtacaccttcgacgtgacggtggaggacgccaacgccaacaccgacaccagctcccagaccatgaaggtcgaggacgacatctactggtcgagcgttcgttcgctgctgcacttcgacggcgccgacgccagcacttcgatgaccgatcagaagggcaaggtttggacggcttctggcaatgcgcagctcgatacagcgcagtccaagttcggcggggcgtccctgctgctggatggcagcggcgactacatcagcacaccgttcgtctcgggccacttcagccccgttaacgacttcactgctgaggcttgggttcgtccggcaacctcgaaacgccacacgctgtattacttccttaccggcacggcaggtactgtcggccattacatggccatcatgccgactggcgcgctccgcatcgtcttcggcaccgcatctgggttcgccaccttcgacacgatcaccacgggtggcaatccgacagtgcctctgaacgcctggacgcatgtcgctgttaccaagcaaggaaacaccgttcgtgcgttcattggtggcgtgctggccgggacgttcacgttgactgcagcaaccgccgagagcaactcggcgccgacgctcgggcgcgatagttctgattcgtcgcgcgatttcaacggctggatcgatgactggcgctacacagacggggtctgtcgctacaccgcgaccttcacgccgccgaccgcggcgttcccgaacggtggtatctga

SEQ ID NO: 517437 - DNA, 234 bp, Stenotrophomonas maltophilia
gtgatcgtgaccacgcagcacctgttcacgattccaggctacagccgccgtgctggattctgccgcagcggcgcgcgggcgttcttccagagacacggcctcgactggcgcggattcgtgcacaacgggattgaggcggagcagctggaagccaccggcgatgcgctggcgttggcgctggtgaagtgggcgcgggagagcgagcagcagaaggggcatcgcgatgggcggtaa

SEQ ID NO: 517438 - DNA, 429 bp, Stenotrophomonas maltophilia
atggggctgatcacctccatccgtcgcctgcactacgtttggtcgtggcgcgttcgctattggtggctcgacactcgccagggcgagcaagcgcactgggttgcctgcggcctcgccgccgtcgcctgcctggtgcagctgctgcgcatcgtcgtcgccgccaccgtgccgccggcaccgagcgaacctgcgaaggcgatctactggtgggtcatccagatcatcatcgccatcatcgcggcagcgatcagctatgccatgcggcccaggccgcagccgccgcagccgcaggccgcggacgcgccgaccgtcgaggacggtctctcggcgaagcactacttcggcacctgctgggtcaacgatgagttcctgcttgcctggaagctgatgggcaccgagccgatcaagaccaagggtggcaagaagtga

SEQ ID NO: 517439 - DNA, 1092 bp, Stenotrophomonas maltophilia
atgtttgagcagcgcgagcagagccgcttcacaggcgagccgatctggctgttcgtattcacgcgccagagcctggtctggcgctactgcaccgccgaccgcgacctggtcatcggcggacagacctacaagtccgcgcagatcacccgcagcgagatcaagcagaccgccgaacgtgcgaaggacaagatcacgatcacgctggcatacctgcgcgatccaaccgccaagaagtatccggtcacccagccgctgggcgacaactggttcccctacgtgcccagcagcaccgtctatgtcacgtgcctggccacccactatggcgacaccgacccgccggccgttgagtggatgggccaggtcacgcagccgaagttcggcgacgtggagctggagctgacgtgtgaacctaccggcggaacggatcgcgcgcgcaatcagggggcgaagtggcagcgcggttgctggaagacggtgtactcgaccgggctgcgcgggtgcaatctgatcgccggcccgatcccagtcgccggcactctgaccgcggtcagcggcgccgacatcaccgcggccagtttcgtctcgcaggcccgcacgttcgtcgggggcacggcgacctggcagacgcccgaggaggtggaaggcgaaggcccggtacagcacaccgccgccatcatcgcgcatagcggcaccacgctgacgcttgatgatgcgacgggcctggccgtggacagccaggtcatcgcctacaccgtgccgctctggacggaagcaaccctgaccgacgtggacggcctgacgctgaccgcaccggagttcgccggcgcgccgctgaatctcgcgggcggctccctgacctggacgaatgtcgatggacttgtcgaacgccgttcgatcatgtctcacagcggcgatgagatcgccatcctctacggatcgtccgacctggaagcgggtctgccggtgattgccgttcctggatgcccgcgcacgtgggccgcctgcgacgcgcgtggcaacaccgtccactacggcggcgcgatctacaagcccggcaagaacccgaccgaggattcgatgtcatggggctga

SEQ ID NO: 517440 - DNA, 1200 bp, Stenotrophomonas maltophilia
atggctttcgcatccgacggcgagaaaatctggccggtcacacctgactggtcgagcggaatgcaggagaccctgtcctggctgaccgactacatgctggccagcgcgacggccgtcagccagcaccgtggtttgcgtactggcccgcgccgcggcttcgtgttcgagctgctggccaccggcaaggagcgccgcgttgcagacatgctgctcgcggggcatagcggtacctggctgctgccgatctggcccgacgtgcaaatcccggcaggcccgctggaggccagcgacgagttcatcagctgcaggacggtcggcttcgacttcgtcgccggcgggaaggcgttgctgtggtcggcggtaaaccactgggccgtgatcgaggtcgatgcggtggacccgactggcctggtgctggcctcgccactggcgaacgattggcccgccgccacgcgcctgtacccgctgcgccgcgcccgtgtccaggacggcgccgaggaaatcctccgcaacgacaacctgagccgccgaagcatcgcgttcgacatcgacgagtcatgcgactggccggtgctggccgatcccatgacctacctgtcgcacctggtactcgacaagcgcccggacgaaagcgaagacccgacggccagctacgtgcgattgccgcagaccgtggacaacggcacggccttgccggtggtgcatgacctgcccggcgtcgcgctgcgctctcagcagagccactggaagctctgggggcgcgccgagcacacctggttccggtctctgctctatacccttggcgggcgccgcacgccgatctgggtaccgtcctatgccaatgatctgaagccggttgcggcagtcgccggcggcagcatgtcgctgagcgtcgaatgggcgggctacacgctgttcggcaagggccagccgaacaggaaggacgtgctgatcgaactgcgcgatggaacgaagctgtgccgccgcatcaccaatgctgcagaggtcggcgacaccgagacgctgaccctcaacgcggctctgagcggatcgagcatcgcgcccggcagcatccgctcgatctcgttcctcgccctatgcacgctggccagcgacgacgtggagatcgaccacgccactgatcaggacggggaagctacatcgaccacgggctggcaagcggtggtgcccgatgtttga

SEQ ID NO: 517441 - DNA, 2808 bp, Stenotrophomonas maltophilia
gtggccaacggcagcccaaatctcgacttcgcaatgcgcttgagcgccgacctgggcgatgccgcccaggaggtcgcccagctcgacgctgccctcgacaaggtcgagggtgcaggcgcgaacgcggccaaaggactcaacagcgcagccacggcatccaacgccgcagcagcggcgaacacgaagaacaccaccgcagcgaacgcgaacgcagcggcgatgggaaagcaagccggtgcggccaacaacgcggccaaggccaccaagaacgcggcgatctcgcaggcgcagtacaacatggccatgcgccagctgccgatgcaggtcaccgacatcgtgaccggcctggccagcgggcagagtccgttcatggttctgatccagcaaggcggccagctgaaggattccttcggcggcgtcgttccggccgcgcgcgcgctgctcggcgcgatctcgccgctggccatcgctggcggtgcggttgccgcggtcctgggcaccgtcgcggtcggtgccttcaagggctaccaggaaatccagaacctggagcgcgcgttgatctcgaccggcggcatcgctgggcagaccgcgggccagatcgccgacatggccgaccgcgtcggggaggccactggcgagttcggcgatgccgacaaggcggcccagcagctggcgcagtcgggcaagctctccggcgaaacgctggaggcggcgatgggcgccgcggtcaacctcagcaagctgaccggcgagagcatcgaagagaccaccgacaagatcatcaagctggccgattcgccatcggccatgctgctgaagctcaacgagcagtaccacttcctcaccgccgaggtttacgaccacgtcaagtcgctggaggaacaggggcgcgccgaggacgccacgcgcgtcgcggtggaagagttcgcccgtgtccacgaacagcgcatccgcgaagccgaggagcgtgcgggctggctggagaaggcgtgggtcggcgtgggcaacaccatcgccagcatctgggattcgatcaagagcatcggccgcgacgacgcggaggcgcagctgcgcgccgcacagtcgcagctcgacagcctgcgccgcaaccgcggtaacgaccgcgctggctggtcgccctgggcggaagagcaggccgagaagacgctgaaggctgcccaggaccgcgtcgcggccgagcagcaggtcgccgcccaggagaaggctgcacgcgacgccgaggaggccaagctcaaggcccgccaggacgccgagaaagccggccaggagtgggaccgtctccgcacctccaacctgagcaagcagcagaagctcgaagccgagatcgccagcatccgcaagctgggcatcaccgccggcaagacggaggccgagatcgaggcgcagatcgcccaggcgcgcgcccgctaccaggagagcctgccgaaggcacccaagggccagaagtccgacgcgcagcgcgaagaggaagcggcccagcgcgagctgcagaacctggccaagcagaccaccctcctcggccaggtcgaggacggcgagaagcgcgtcagcgaagaggcgcgcatccgctacgagatcgagcacggcgcctaccaggcagcgacggccgccacgaagcagcagctgatcacgcaggcccaggcgctggacaatgccaggaagcagcgcgaggagcaggaaaagcagaagaaggagctggaggacaccgagcgcgcctacgagcgcctgcacgaccgcctgcgcacgcccgtggatgccgccaccgattcggtgaccgagcagatcgagacgctgaacaaggcgctggccaagggcatcatcgacgcgaagcagtacggcatcgagatcgccaggatcggggccaaggcgctaacgcgcgcgcccggcttcgacctgacgcagttcggcatcggcgacccggacgccgatcacatggccgaggccaacaaggcgctggaggactggttcacccagcagctggcgatcatcaacgccggccgcgcggccggaaagcagagcaacgactactgggacaagcaggaagctgacgcacgcgctcagcactatgcggccttgaaccagcttgccatcgcacagaaccagctgcagctcatgcaggcgtcggccatcttcggctcgatggcggagatcaccaagtccttcgccggcgagcagagcaagacgtaccaggcgctgttcgccatcagcaagggattcgcggtcgcccagctggccacgtcgctggcgatcaacgtggcaaaggccagcgagcaggggttcccgcagaacctgggcctgatcgccgcggcgatggcccagggcgcgcagatcgccgcgatcctgtccggcgcgaacttcagcgcaggcggcggcgccggctatgcgacgggcggccacatcaccggcagcggtaccggcaccagcgacagcatcccgatctgggcgtcgaacggtgagttcatgacccgcgcggccatcgttcgccaaccgggcgcgctgcagttcctggaggacttcaacagccgcggaatggctgcgctccgcgaccggcgcggctacgccgtcggcgggctgatcacgccagagccgatctacacggcgccagagccgcggtcgcgtgttggcgatgcgggtgccatgcaggccagcgtcaacaacaagatgcgcgtgtacctgctgcagaacgaggatcagctcgcgcagcgcctcgcccagcatccggcgatggaaaaggccgtggtagccatcgccggacagaacggcaactcgatccgtgcggagtggtga

SEQ ID NO: 517442 - DNA, 516 bp, Stenotrophomonas maltophilia
atggccaagaaggtcgaacgcaagccgaaggaggcgcccaccacgggcgcctctgcgtcgcagccggatgagctgtcgatcctgcacccggagcgcaccttcaccctcgctgggcgcgaggtgacgatgcgtgagtacggccatatcgagggcctacgcctcctggcgtgggcgaagccgttcaccgatgacctgtacgcccagatcgcgcgcggatcgcaggcaccgagcgtggcgtcgatggcggcgctgctttcgacacatgccgacctggtgcgcgacatggttgcccaggccgccggcgtggagtcgtcgtgggtcgagggcctcggcgatgtcgagggcgacctcctggtcatggcgtggtgggaggtcaacgcaggtttttttatccggcgcctgctcgcgcgggcggccgccgaaaagctggaggcaaggcagcgagctggggccgcgtctaccacgtcctcatcgccgcaggccacggccgcaccgccgccgacatcggacgtctga

SEQ ID NO: 517443 - DNA, 759 bp, Stenotrophomonas maltophilia
gtgaaccgcaacctcttctccctccagggctacgtccgcatcggcaagcgcaaggctgacggccgccccggccagacctactgggccggtaatgtccccgaggcgacgctggagctgaccgccgaatcgtcggacaagaaggagagcttctccggcaaccgcggcaagtaccaccgcatgtacacggagcgcggcggcaccttcagcggcacgttcgatgagtggagcctgcgcgtgctgggcctgatgctgcacagccagcagatgagcaccgccagcggcagcgtgaccaacgaggcgttcccgtcgctcctggtcgtgggtgatgagatcgccctggatcacccgtatgcgtcctcgctggtgctgacggactcgacgggcacgccggtgaccgtggacacggacgactacgaactggtcggccacaacgaccgcatcgttcggatcaagggcctggccagctatacgcagccgttcaaggccgcctacacctacgcggcgtacaacaccctggacttcttctcgcagaatcccgaagaggtctacgtgatcttcgatggcatcgacaccgagtacaaccagccggtgctgatcgacctgttccgcacgcagttcaaccccgtgacgggcctcgggctgatcaacgaggagctgggcagcctgccgttctccgccgagctgctgttcgatccgctcaacgtcgatgagaacggcaagggtggctacgcacggttcctctccaaggagccggcgtaa

SEQ ID NO: 517444 - DNA, 186 bp, Stenotrophomonas maltophilia
atgagcgagaagcaggaaaccaagctggtcgaggtcaccctcgccgtgccccacaccgatgccggaaccaagtacaaggccggcgccaagatcaaggtcgatgagtccactgcgaagtggctggccgacaacaagaagatcgtcatcaccgccgcgccgaccgcggctaaggaaggtgccaagtga

SEQ ID NO: 517445 - DNA, 477 bp, Stenotrophomonas maltophilia
atgagcagcactccgttcgacgtggcgccggtgatcgagcgcgtggccgctcaggtttcggtcctgcagcaggtgcgcggcgccgccgactacgctgccatccaggcgctgcgcgacttccgcacgccagaggctttcgtcctggtcaccaacgagcgtgcagcgtcccaggacaacgcgcgcatcagcactggcgccagcgcgggagctggccaggcacgccaagcggccgccgtggagatcggcgtggtgctcgcggtccgcaactaccgctacgagcgcggcaagcccgcagtgaacgacgccatgccgatcatcggttccgtgcgcgactcactgatgggctggctgccgccgaacgtccgtggtgccaggccgctgcgctggctccgcggctacgtcctcgactacgacgccggcacgctgctgtgggccgacaccttcaccacccaacacttcatcgggaagacgccatga

SEQ ID NO: 517446 - DNA, 507 bp, Stenotrophomonas maltophilia
atgccctacgtcacgctcacgcagctgtcggaaatgccaggcgcgctggaactggcccaggtggccagcgacaagcatggtcacctggtcgatgccgcgctgctggagctgacgctgctcgacggcgaccgcagcggctacgattccgacgacgtggccgctgcggatcgcgcgcgcgagcgcatcgagcaggccagcaccgaggccgatgcgctgatcgacggctatctgggcaagcggtacacgctgccgctgccctcgccgccgggcatcctcaccacctgggcgcgagccatcgttcgctacaagctgcacggcgaccgcctcagcaccgagacgaacgaccccatcgtccgcgactaccgcgacgcgctgaagttcctggaacagatcgccgccggcaagttcagcctgggaatcgaagatccgacttcccaggggagcggcctgggcgaggtccgcatcgatcctggcaagaaggtgttcggccgggagttcctgccatga

SEQ ID NO: 517447 - DNA, 423 bp, Stenotrophomonas maltophilia
atgtccaagatcatcgtgaagtccaagtccgagcgcgggttccgccgcgccggcatccagttcacccgcgagggcgtggagctggacaccaccaagctcaagaagggcgtgctggaagacctgcaggccgagccgaacctggtcgtcgccgaagtggtcgaagagaagaagtccggcggcaagggccagggcagcggcaagtcgggcggtaagagcgccgacggcgacctctgctatcgcgtactgaagccgttcgagctgggcggcgtgcagatcgagccggccgtcgaaggccaggagccggtcttcgtccagctcggtgccgaagaggctgcgaagctggcgggcgatggcttgatcagcaccgccgagggcgacgtgtcgctgccgccggaagcgaagccggccgggaagggcaagtaa

SEQ ID NO: 517448 - DNA, 900 bp, Stenotrophomonas maltophilia
atgttcatcaacaaagcgaatctgagcacgctcttcgtggccttcaaggcggcgttcgccgcaggcttcgcgggcctgactcccatctacggtcgcgtcgccatgaccgtgccctccagcaccggctccgaggagtacggctggctgggccagttccccaacatgcgcgagtggatcggcgaccgtgtcgtcaacggcgtgttggcccacggctacacgatcaagaacaagccgttcgagctgaccgtcggcgtgccgcgcgcggccatcgaagacgaccagtacggcgtgttctccccgttgatgaccgaaatgggtcgctccgctgcggagaacccggacaagctggtcttcaacctgatcaagaacggcgccagcaccctgtgctacgacggccagaacttcttcgacaccgatcacccggtcaccgacgaagcgggcgccacgcagagccaggcgaactgggacaacaacagtggctccggcaccgcctggtatctgctggacaccagccgcgccatcaagccggtgatcttccaggaccgtaaggcgccgaacttcgtggccaagacctcggagaccgacgacaacgtgttcgaccgcgccgagtacgtctacggcgtggacagtcgctgcaacgtcggcttcggcctgtggcagctggcctacggcagccgcaagacgctggacgaagcggggctgatcgccgcgtacacggcgatgaccgagcgcaagggcgacggtggccgtccgctgggcgtcaagccgaccgtgctgctggtgccgccgtcgctggaatgggccgcacgcaagctggtcaacgcgaccacgctggccaacggcgcggacaacgtcctgaagggcgtggtgtccgtcgaggtctcgcccttcctggcgtaa

SEQ ID NO: 517449 - DNA, 402 bp, Stenotrophomonas maltophilia
atgaccgcagctaccgaaggtcgcaacaccaagcggcgcactggcgacaagctgagtgtcgtccccaactccggcgccacgttgtacgccggcaccctggtcaccctgctgaccgcgaccggcctggccgtcgcagctggcacggcctcggccggcgcggccgtcggtgtcgccaccgagacgatcaccggcgacggcgtcaaggccaccgatgtcgagcgcggcatcttcctgttcgccaacagcgcctccaccgatctgatcgccaaggcggacatcggcgcgacctgctacgtggtggacaaccagaccgtggccaagaccgacaacagcgcggctcgcaaggccgcgggcaagatcatcgacgtggacgccggtggcgtctgggtcgaggtcggctga

SEQ ID NO: 517450 - DNA, 1209 bp, Stenotrophomonas maltophilia
ttgaatctcacccggcaggcccccggcctgaatctggccgggatgaccaccaagcccgccaagtccggttcccaggctggagcgatccacggcctcaccgccgccatcgccctggccgcctgcgccttcaccgtgccggccctggccgccgacagcaacgtcatcgaaatccagctaaccccggcgggcgacttcaagcccagcgacggccgcaagctggacgtgcccgcctggcgcatcgaccaggacatcgccacccgcgtcatcgagcgcttcaaggcgcgcgtcaatccgccggttgtcgattacgagcaccagactctccacaaagagaccaacgggcagccggcgccggcggcggcctggatgcgtgcgctgcaatggcgcgaaggttccggcctgtgggcgacggtcgagctgaccgcgcgcgccgccgatctgatccgcagcggcgagtacaagttcgtctcgccggtgttcgccttcgatggcgacaccggcgaggtgctggccatccacatggccgccttcaccaacgatcccgccatcgatggcatggaaccgctcgccatgcgcgcggccgcctcgttcggctacgcctcccctccagaccaccaggacaagaccatgaacaagctcctcgcggcgctgtgtgcgctgctcggcctcgacgccgccaagaccaccgaagacgaagcggtggccgcatgcaacgcgctgcgcccgcagctcgatgcgcttcagaagatcggcaaggaggtcggcgtcgaagacgtgggcgacggcaccgccgtgctggccgcctgcaccaccatcaaggccaaggccgccagcggcggtgcgcccgaccccgccaagttcgtcgccgtcggcgtcgtcgagcagctgaagggcgagctggctgcgctgtccgccaagcagaccgagcgcgaggtcggcgaactggtcgaatccggcctggccgatggccgtctcctgccggcgcagaaggactgggccaccgacctgggcaagaaggacatcgccgcgctgacgtcctacctgaagaacacgccgccgattggcggcctgcgcaactcgcagaccggcggaaacgcgccgagcggcgacgtggacgagaacggtctgagccaggccgagctggcggtctgcagcgccaccggcgtctccccgaaggactttgcggccgccaagccgaagtccgcctga

SEQ ID NO: 517451 - DNA, 453 bp, Stenotrophomonas maltophilia
atgaccgcgcgagtcgagatcaccaagaacaccgtcagtcccgccctgggccgccttctggacaccctcgaaggcaacggccgcgacctgatgcttcgggacatgggcgagtacctgatggggtccaccgccgcgcgcgccgcgcgccaggtcacgcctgcaggcgaagcctggccggcgctttcgccccggtacaagcggcggaaggacaagctgcggcctggcgtgccgatgctgaagtacgacaaccacatgctgggcgacgggctgaactaccaggtaccgcccggcgagggcgccctctaccacggcaccagcgtgcgctacggcgccgcccagcacttcgggaatggcggcatcaaaccccgcaactggctgggtctgtctgaggaggacgccaccgagttggtggccatcgcccaggaccacatcggccgggcggtggagggctga

SEQ ID NO: 517452 - DNA, 1230 bp, Stenotrophomonas maltophilia
atggcaacggctagttacggcgccgtccgcttcagcgagcagatcgagttcttccggcggaagctgcggctgccgagcaacggctggacggacatctacggccaggagcacgactgggcattcaccgtcgccggcgccaaccgcgacgagatcgtgagcgacttctacgcggccgtcgaacgcgcaatcagcgagggtcgaacgctggcggagttccgcaaagacttcgacgccatcgtggccaagcatggctgggactacaacggtggccggaactggcgcagtcgcgtcatctacgaaacgaacctgcgcaccagctatgccgcggggcgttacgagcagctgcaggcgctgaagtccgtgcgcccgttctggcagtacgtccactccgatgcggtcatgcacccacgcccgctgcacctgagctggaacaacctggtgctgcccgcggacgatccgtggtggatcacgcatttcgggccgaacggctggggttgccaatgcaccgtgcgggcactcaaccagcgcgatctggatcgcctgggcctcaaggtgggcaccgcgccgcctacgaactgggagaccctcaccatcggccagcgcagcccgcaggggccgcgcaccgtgcgggtacccgaaggcatcgatcctgggttcgagtacacaccaggccgctcgcgcttccattcggcgatgccgcccgaaatgcccgcgccgacggtgcccggtgtaccgaaccgacgtgcgcctggtgatctgccgcttcctcgcgcggtaggcgccgcgcgtcttctggcccctgggctgaccgaagccgagtatgcgcaggctttcctggcggagttcggggctacgctcgatgcgcctgtggtgttccgcgacgccgtcggcgaagccctggtaatcggcgccgatctgttcgcggactccgcaggcgatctgcaggtcagtggccagggacgcgcccgctaccttcgtctgctcgcggacgcgatccggcaaccggacgaaatctgggtccggctcgaatggctcgcgtcatcgaacaaggccagcgtgcgccgccgctacgtgacgcgctttcagatcgacgacggcaccgcgccggtactggccgtgttcgagcgcggggcagacggctggtggggcgtcacgctccaccaggacgaaagcctggacgcggaagcctggcgggtcggcgtccgcctctaccggcgcggacagcagtaa

SEQ ID NO: 517453 - DNA, 1608 bp, Stenotrophomonas maltophilia
atggtgaccacctcccgcattcttggccccgacggccagcccatccgcctggacgcgctcaacgagccgcagaccagccgcgtcatgcacctgcaccaggaatggcaggggcacccagcgaagggcctcacgccgtccaggctgacctcgatcctgctcgctgccgagcagggcgacgtggtcgcgcagtacgagctgttcgaggacatggaagagcgcgacggccacatcctctccgagatggggaagcgccgccgcgcggtgtccggtctggactgggacatcgtgccgccgcccaaccccacgcccgaggaggagaaggccgccgacaccctcaaggcgatcctgcagggaatcgaagacatcgagggggcgctgttcgacaccaccgacgccatcggcaagggcttcgtgtgccaggagttcgatggctgggatcgtgtggacggctactggatgccgaaggccatcgtgcaccggccgcagtcgtggttccgcctgtaccgcggcttccagcaggaaattcgcctgcgcgacaacagcgccgatggcgcaccgctgcagaacttcggttggatcacccacacgcacaaggcacgcagcggctacctggagcgcgcgaacctcttccgtgcgctggtgtggccgtacctgttcaagaactactccgtggccgatctggcggagttcctggagatttacggcatcccgctgcgcatcggcaaatacccgcctggcgccggcgagaaggagaagctcacgctgctgcgtgcactggtgcaggtcggccacaacgccgccggcatcatccccgatggcatgtcgctggacttccacgatacggcggacggcgacgccgccgcgttccagctgatgatggactggtgcgagcgcaccgagagcaaggtcattctcggcgcaaccctgaccagccaggccgaccgcggcagcaacaccaacgcgctcggcaacgtccacaacgaggtgcgcaaggaactgcgggacgcggatgccaagcagatcgccgcgagctggtcgcgcgacctggtctatcccatcgccgcgctcaacggcctggcgccgaacggctatcggcgatgcccgcgcctgcgcctcgatgtcgcggaatcgaaggacatcaagacctacgccgatgcactgccgaacctggtggatgccggcctgaaaatctcgcgcaagtgggtccacgaagagctgggcattcccgaggctgaagacgacgccgatgtgctggtgcgttcgcagcccgcggccggcgatgccacgatccctgccgtcgccgcggcgtctgcgaagcacccacgtgtcgcggtgctcgcggcggccagcgaagcggagaaggacgcacctgggcgcatggtcccgcaggcagagcgcgacacggcgccatcggtcgagtcctggttcgggaagattcggcaactggtcgaggaagtcagctccctggaggaactgcgcgaccgtctgctcgatctgtacccgaacatgagcctggaccagtacgcggatgcgatggcgatcgcgctcggcgcggcgcgcctggctgggcggtcggaagtgcaggaccaggccaatggcaacggctag

SEQ ID NO: 517454 - DNA, 1575 bp, Stenotrophomonas maltophilia
atgactgacctcgcccgccagcttgttcccgacaccgccagcgctgcagttcctgcggcgctgatgccataccagcagcgctggatcgccgacacggccagcctcaaggtgatggagaagggacgccgcaccggcatcacctgggcagaggccgccgacgatgtgttgatcgccgcgaccgccaaggacgccggcgggcagaacgtctactacctcggcaccgacaaggaaatgaccgaggagtacatccaggcgtgcgcgatgtgggccaaggcgttcaactacgccgccgacctggtcgaagaaggcttctgggacgaagaggaagacgacaagcacatcaagacgtacacgatccgtttccctgccagcggcttcaggatcactgcgctggccagccgaccgcgcaagctacgcgggcgccagggcgtcctggtgggcgacgaagcagcgtttgttgatgacctgccggagctgctgaaggcggccatcgccttcctgatctggggcggcaaggttcggctgatctccacgcacgacggcgtggacaacccgttcaacgagctggtgcaggagattcgaggcggcaagcggcgcggcaccgtgcaccgcgtgacgtttcgtgacgccgtcgccgagggcctgttcaagcgggtttgcatgcgccttggaaaaccctggacggaagaggccgagcaggctttcatcgaagaggtctatggcacctacggcccggcctcggaagaggagctggactgcgtaccgcgcaacagcgcgggcgcatacctttcccgtgcggtgatcgagcagcgcatggacgacggcacgcccgtgctgtcgctggagcgccccgacagcttcgccgagctgccggagtacatccgtcaggccgacgtgcaggactggctggagaagcacgtcaggccgcacctggatcgactggcgctgcaggaaacccacatccgagccagcctgttcggccaggacttcggccgctacgtggacctgtccgtgctggtgcctcagatcgaggaccggaagacgctggggcggcgggtgccgttcgccgtcgagctgcgcaacattccgttcgaccagcagcgtcaggtgctcttctacgtcgccgaccgcctgccgcggttgcgtgcaggcgcgctcgatgccaccggcaacggcatgtacctggccgaggtggccatgcagcgctacggctcgcagcgcatcagccaggtgatgatcaacgacaagttttacgccgagaacttcccgcccctgaaggccgacctggaagacggcacgctctcgggcctgccgcgcaacggcgactggatggacgacctgcgagctgtcgaggtagtcaagggcgtgcccaagattccggccaagcgcagcgtcggccgcgacggcggaaagcgccacggtgacgcggccgtcgcgctcctcctgggcaacagcatcgctcgcgtcgaagccgtggtcatcgaatggacaccggcaccgcgccacagccgcggcttcgacaacgtgggcgacgacgacaacgacatccgcatcccggaaccgcaagcatggtga

SEQ ID NO: 517455 - DNA, 579 bp, Stenotrophomonas maltophilia
atggccgcccggaagcgccgccgcaagtccagcgtcgatctgctgccccaagagcagcgggagcacctggagctgctcctgcgccgccgcgatctgacgctggacgacatcattgccgacctccaggcgaagttccccggccagcccgccgcggaactgtcgcggtcggcggtgcatcgttttgaccagcgcatcgaagaggccgggcgggaaatccgcgagatcgaagccgccgccggcgcgctggtcggcgagctgggcgaaggcttcggcgagaagtcggccgacttcctcacccaggcgatcaccgtcgtggcggtgaaggccgccatgcgcgcgaaggacgatcccgacctcggcacgaaggaggcgaaagacctggcactgatggccaagaacgccctcgacgccaagcgcatgaatgcagcacagcggaagctgatccagcaggaggcccgcgacaagctcctgcgcgagcaggaggcgaagctggacaaggtggtgaagaagggcggcctgtcggcggaggcggccgcggacatccgcgcgcagattctgggcgtgaagagcgacgcatga

SEQ ID NO: 517456 - DNA, 315 bp, Stenotrophomonas maltophilia
gtgagcaagaagacctttgcggaccggctgaaggaagaccgccgcctggtgctgctgcggctgctcaacgagcagcccggcaagcagtccaacagctcggtgctgcattcgggtctgcagttcgtgcacatcgtggccgagcgtcacgaagtcatcgacgacctgcggttcctacagatgcaccagctggtcgagctggagcagctgggcagcctgaaccctgacctgtacggcgtgaagctgcgctcgcgtggtgttgacctggtcaacggcctggtcgagatcgacggcgtcagcccggcccggcgcccctga

SEQ ID NO: 517457 - DNA, 258 bp, Stenotrophomonas maltophilia
atggaacagctgatcctcccgctgctcttcgtggcggtactggcatccctggccggtgtcgccatgcagttcctgtcctggttcctgcacaacggcctggccaaccgcgtggccaagctggaagcgcagcaatccaacaccctgacccacggcgaaaccatccgcatctacgaacggctgtcgagcctggaagcccttgtcgaggcccaggccacgacgctggattcgatcaaagaccatctgctggagaacgactag

SEQ ID NO: 517458 - DNA, 225 bp, Stenotrophomonas maltophilia
atgattgacgacgccgaccaggccgccgccaacgaggaacgagcgatggagattttccagaggagccggcaggagcgcgtcagcgcgccgaacgcagccggcaatacaagcatcaactgcgtggactgcggcgagatcgtgccgccggcgcgcctgcaggcggtgccgcgcacgttgcgctgcgcacgatgcgcggccgatgtggaggcacgatggaacagctga

SEQ ID NO: 517459 - DNA, 678 bp, Stenotrophomonas maltophilia
atgcagctgaagctggaagacctcgccgcggtgaagaccaccggcctgctgccggtgttcggttatgccctggtcgccgcgctgctcctgggtctcggcgtcggcggcttcgtcgcctggaagtggaccgccggcgcccaggcactggaggagaacgcgcagctgcgtgccgacgccaagcagtgggcgcagatcgccgaccagcagcgtaagaacaccaccgagcaggctgcggccatcgacgctgccatcgggcgattgaacgccatttcacagggccgagaagatgaccgtgaagccatccgcaagttcgccgagcagctcagcgtcagcctggagaaggtgggcgctgcgaaccctgctctgcgcgatctcgatcttggcgctgacttcctgcgccactggaacgaagccaacgctggccccggcgccgccgcccccgccgccggcgccgccggcgaacctggtgcagccgtgcccgccgctcccagccgcgaccagcgccaacccgctggcgatcctggcacagcacgacaaggaggcggcgctctatcacgactgccgcagcgcgaacgcgcgcctgatcgagacagtgcgcgaatggcgagcaacggcatggagctggtactgcaaggccgcagcagccgtggacagcaagccggacggctgcacgaatga

SEQ ID NO: 517460 - DNA, 681 bp, Stenotrophomonas maltophilia
atgaagcgccggctggaatccatcggcttgcgcctgatcctggcagccggcgccgtgctggcggcgctgctggttctcgccctggccgcatcgccggcgcaggcgcagtcgcgcgtcgccatcccggaggccagcgcgttgtatcgccatcgcgtcgaacaggctgtcgccgacgtgtggggcgtcaacgcctcgccggcgcgcctggctgcgcagctgcaccaggagagtggctggcgcccgaaagccacctcgccggtgggcgcccagggcgtggcacagttcatgccggcaaccgccaagtggatcgccgagctgttccccgacaagctcgggcagttcgatccctgggacgcgcagcaggccatcctcgctgccgcgatctacgacaagtggctgctcgaccgcgtccagcccctcggctggacacgcatgagcgaatgcacgcgctggaacttcgcgctacgcggctacaacggcggcgagcaatggctgctgcgcgaccgcggcctcgcggtggccaacaaggccgacccgaacgactggcgcagcgttgagcgcttccgaacccggagcgtgtccaaccatcagcagaacatcgactatccgcgccggattctcctggtactggaaccggcctatatcgcagccggctggccggggaccgcggtatgcagctga

SEQ ID NO: 517461 - DNA, 327 bp, Stenotrophomonas maltophilia
gtggaagagaaactgatcgaccgactcaagcggcaggccggcgtgatcgctggcgtgttcgactccatcgggttcgtctggctgtggctggcgatctccctggcgctgctcggcctggtgctgctgatcaacccggcgaagctgggcgcctatctgtggttcatgtcgaaggtcgcgggcgccgcgtcgctgggctacggcttcgacctggccttcttccgcggcagtgatccgcgctacctcgacggcatcgagaagacaatgtcgcagacgcggcgcgcgacgctgatcgcggcgagcatcatcggcgcgggcctgatcggatga

SEQ ID NO: 517462 - DNA, 414 bp, Stenotrophomonas maltophilia
atgagcgatcagaacgagctgccgggaatgggcacgacacccgaatccctggtcgaacaggagatcctcgacccgaacagcgacaagtggccgccgctgctggccgagctggtcaccgtgacggaggcggcgctgctgaagaccggcctgccggcgagcgacgcggccgatctggccgtcgtcgcagtgctggccgtaggcgacttcgtcggcggcaagctggtgtacattccccgcggcgaccgcctacgcaccgccttgaagcacgccagggcatggcgaatgtggaagggcaacaacatcggcgagatcgccgagttcctggacgtaagcgaggttcgcgcctacgccgtgatctccgagcaacgggcgttgcatcggcagaagatacaaggcagccttcccctcgaatga

SEQ ID NO: 517463 - DNA, 588 bp, Stenotrophomonas maltophilia
atgcgagcgacctgtcctgactgcggcgctcaggcgcacctttcggccttctttgctgaggacgatggcaagcgcctggccgcgcaactggctgatatgcagccggagctgggccgggccgtgatcgcctacctgggtctgttcaagcccgcgaagaacgcccttcgactcccgcgtgccgtgaagctggtgcaggagctggcaatcctggttggcgccggcacggtttgccgcgatgagcgcaacggtgtgcgccgttccgcgtcgccggcaatgtgggccaccggcatcgagcagatgctggcgcagcgcggctcgctgaccctgccgctggagaaccacaactatctgcgcgccgtcgtgttcggcctggccgacaaggctgacgcggcaacagaacgccagcgtgaggagaacgcgcgcgtcggccgccacctcgacagcactgcgcccgcgcagccgaaggagacgccgctgcagcgccagctggcctggatcaggcagcaggagggctacggcgcgtttacgcccgagcaggccgaggaagagcgcgccaaggcgcgtgcgaagtacggagcgagcgaatga

SEQ ID NO: 517464 - DNA, 267 bp, Stenotrophomonas maltophilia
atgagtccgcgccaacccgatttgttccagcgtcctccgcgacaatctccgcgcaagctgatgcacttccgcgatgtcggctacatcgacggcatcggcaccgcggcggtcttcggctgccatcgctgtggccacgagaccgattggacgcctgctacggacaccgaggttcggcgcggcattccgtgtccgaactgcaacgtgccaggcaatccggttatggccggaatcgaccgcaccaccagcggttcgattgggatgccctga

SEQ ID NO: 517465 - DNA, 291 bp, Stenotrophomonas maltophilia
atggcgacgaagaagacagggccgatgtgcgtagtcactatcggataccaggagttcctgctcccggccgccaacggcctgaagatcatgcagctgatgaccggcgccctgcaggtcgatgcccgctacgacgatggccgcatctacgagctgcgggacgaacccgtccaggtcgagtacacctcggtcgatccgcgccaggtccgtgcccgccgttcgcgctatcccgcgccggaaccactggccattgaaggccgtgcgatccgtttgttggaggggccgacgcgatga

SEQ ID NO: 517466 - DNA, 426 bp, Stenotrophomonas maltophilia
gtgaccaccgcccgcgatccgcgtcgccagcagctggcccgcatccacctggccaagaagcagctcggcctcgacgacgagacgtaccgcagcctgctccagcgcgtaggcgggcacgcatcctcggccgacatgaatccctcgcagcgcaacgccgtactgcgcgaatttgcccgcctggggttcaaggaagagcgcaaggcgcagcagcgcaagcgttggccaggcgagccagccaactgcgaccaggtgccgatgttgcgcaaggtgcgcgcgctcctcgcagacgcgaagcggccgtggagctacgcccacggcttggccaagaagatgttcagcgtcaaccgcgtcgagtggctgcgcgacgaccagctccatagcctggtcagcgccctgcaggtcgatgccaaccgccgggggaagtga

SEQ ID NO: 517467 - DNA, 687 bp, Stenotrophomonas maltophilia
gtgaaccgcgaacaagccattcggaaggtgctggcgtgccttcggctgtcgaagtcgagcaacccgcacgaagcggccgcggccctgcgccaggcgcgtgcgctgatggagaagtacggcctgaccgaagccgatgcccacggcttcgacatccgcgaggcagacagcgccaccggcttccgcggcggcatggttccacagtcgctggtggtgctgagcgtcgtcgtggccgactgctatcgctgcatggcaatcatcagccgccagaagaacttcgtcggcggaaagaccaccgttcgcttctacgggacgggtgccgacgcgcagatcgccgcctacgccttcacggtgctgcgccgccagctccagggcgccaagggcaggcacaccgcccgcatccgcaagagggccaatcgtgatgcgcgcggcgaagcgttcgccatcggctggattcgggccgtccgcagcctgctgcccgaaggcgacatgccgccagaactgggcctggccatcgaccaggcgatcaagttccgcaacggcgagctgcgcgagacgactgggaggcagatcgggaagtcgggccgagtgaaggagaacgaccacgccgccggctatgtggccggcaagaacgcccatctgaacactgggatcgatggcgcccaacagaagcaactggagtgcctgtga

SEQ ID NO: 517468 - DNA, 267 bp, Stenotrophomonas maltophilia
atggcaaccaggaaggcaccgaccagggacgcgaaggcgtcccgccccaagttgctgcaggtgcgtgttctgctcggtgaaacaggcttcgaggcgcgccctatcggctacggcgaaggaacggtcggcaaggcggccacgtcctcgatgtccgtccgcaatctggcacgcgagctgggctaccagcccggcttcgacgcgcgttacgacggcaaagcggccgacggcgtcggaactatctggagcatcgtggaggtcacagcgtga

SEQ ID NO: 517469 - DNA, 342 bp, Stenotrophomonas maltophilia
gtgatcagccaggacatcatcgccaaagcggtatccatcgccgacgaagccgtgcgcagcgacatcgagtgctacgcggtccagcagcaggccgaggtggacggcgctccgtgctggatttacagcaccacccaggcgcagccgttgcgcgattcgctgagcgaggaacagcgtcggaccatgcagttcgccgatacaccggccgaggcgctgcgccatctgcagatcgtccagcgcgccgtcgagtacatccgcgagcgcagccatatcttcgagtgggcgctggtcgaggtggacgggctccccggattcgttcggttcgccgagaaggtcaccccgtaa

SEQ ID NO: 517470 - DNA, 540 bp, Stenotrophomonas maltophilia
atgagcaagaagaccgccacccgcatcaaagccaccgccgtcgagcattgggtgccgcgcgaccgcgacgaagtcaacgaggccatcgccaagctcggccgcctgcagcgcgaacgcctgcgcatcgaaaccgcgatgaacgacgaaatggcgaaggtcaaggaacgccacgacgccgacgcgaagccgctcggcgaggaaatctccgaactgaccaagggcgtgcacctgtggtgcgaggccaaccgcgcggctctcacgcgcgaggaacgggtcaagttccacgacttcgccaccggccaggtgaagtggcgtctcacgccgtggtccgtcgcggtcacgaaggtcgccgacgtgatcgcgctgctcaaggccaagggcctgaagaagtacatccgcaccaaggaggaggtggacaaggatgcgctgctggccgcccgcgccgaagtcgccgacaccatcaagggcatcaccttcaagcagaaggaggagttcgccatcgttccccacgaaagcaagatcgaggaggtgcaatcgtga

SEQ ID NO: 517471 - DNA, 255 bp, Stenotrophomonas maltophilia
atggcacctcagaagggccgctacgccagtctccagcgcgccttcgagttcgcgcactgggctgcgtcgctgcccaagccaccgacctggcagcagattcagggctacctgcaatgcacccgcgccgccgcgcttttctggcgccgcgcctggctgagaagcctcaaccgcccgttggttccgcgagggcaagccaccgaaacagccaacgccgacggcaagcggcagggcaccaccaccagcgacaaggaatga

SEQ ID NO: 517472 - DNA, 177 bp, Stenotrophomonas maltophilia
gtgaacggcaggaccgcgaccgtctgcgtgtactgcggccagccgacggcgaccaccgagccggtgtgcgacgactgcgcaccggatggcgagctggtgcccgccatcggcgccgcgtaccgcgacaagctgcagcagcagttcgaccgcgtatttgggccggtcgaggtcgagtga

SEQ ID NO: 517473 - DNA, 222 bp, Stenotrophomonas maltophilia
atgtgtgagccgcatttcgtcgtcctgaagcaggaacagatcggcgcgttgagcgccggtgtcagctgcgccggcctggacgaagcggtacgtgtcgcctccgagaagaccgagggcgacaaggagccgcgctacgtggtgcaggtgatgtaccgcgtccaggtcgatccgaagccgcacgtgatcgtcacgccccttcacgaagaggaacccaagtcatga

SEQ ID NO: 517474 - DNA, 306 bp, Stenotrophomonas maltophilia
atgagcacgaaccgtccgcttaacccggcctgcgcccgcctcagccacgcgctgaaggacgcgctggatgccgtccagcacctcagcgaccacaacctcacgcccaccggcattcggctggacggccggaagccggtgatcgtcatcgagccgccgcagtacatcagcttcctgcgcggcggcctgctgctccggcaccgcgtcggaaacgtcatgcgtaccacgatggccacctcgttccgcggctgccaggtcgaatggcagaccgagacgcgcctgcaggcgcaggcggccgccgatgtgtga

SEQ ID NO: 517475 - DNA, 396 bp, Stenotrophomonas maltophilia
atgaagcacgcccggcaagagcatcagatcaccccggacgccgtcctcgacgcgctgaagcgccgcgtcgggaaggccaacggcatcaccgccaccgccctggtgatctacctggtcgaggacgccagcgcagcagcggaaaggaagctgcgcgcgtgcatcgagcacctgcgcggccaagggcatccggtctgcgccacgccgggcgacggctacttcatggcggccaacgacgaagagctgcaggagacctgcgagttcctgcgcggccgcgcactgacctcgctgcgccaggagaacgcgatgcgtcgcatcgccctacccgaacttgcaggccagctcggcctgcccgtcaacaacgaaggggaagaccatgagcacgaaccgtccgcttaa

SEQ ID NO: 517476 - DNA, 252 bp, Stenotrophomonas maltophilia
atgagtgcattccagcaagagctgcaggcgcttcgcacgaagcacgacgcctacatcgccaagtggaaggcggacggcaagccggtcctgtcctaccacacgccctgctgccaggagctgctacagacgcctgcgccaccgctgggtcagcagtgggactcgctgtgcacctgcccgaggtgcggcgagctgtacatgaaggtcgtcaacagctcgcgcgtgattgccgaagtcccggacgcggagggctga

SEQ ID NO: 517477 - DNA, 198 bp, Stenotrophomonas maltophilia
atgaagcaggacgccaccagcgccatcccgcgcatcacggccgacttcatcaccgccacctcggcaatcgccgacctggccgtggccccgctgcgccagaagtgcgacgtcatccagcgcatcgccgaccgcggcctgcaggtggatgacctgaccatccgcgagctggtgcagctcgcccaggagaccacccgatga

SEQ ID NO: 517478 - DNA, 336 bp, Stenotrophomonas maltophilia
atgagcaacccggacaacgactggctggaagtgctgcgcgccgcctgcaaggcgccgaacagctcgcagcgcaaggtagccgaccgcctgggctacagcacgtcggtcatcaaccaggtgctgagcggaaagtacaacggcgatctgaaggccgttcaaacgaaggtcgaaggcgtgttcatgggcctgtccgtgaactgccccgtcgtcggcgacctgccgcgcaaccgctgcctggaataccagcggcgcgacttcgccgccacgaaccacatccgcgtgcagctggcgcgcgcatgcccctcctgcaagcacttcagggggaggcacgcatga

SEQ ID NO: 517479 - DNA, 345 bp, Stenotrophomonas maltophilia
atggccttcaagcggcaccccagcgagctggccaagttcatccaggcgtccaagggcgaccgctgtgtgcgcgcccgcctgtggtacgcgatgcgcgtgctgcgcgccttcaccgtcagcgacctgctggcggtggccgagatcgacaaccgcaagacgaccgcctcctacctcaacacgctggtgcgcgccggcttcctcgtagcgcgccgcgggaaccgtgggcgccgcgaagaaacctccttccgcctggcccgcaacagcgggcctcaatgccccgccgtcctgcgcaagggcgcagccgtgtgggacttcaacacgaacacggagtacccggtcaaatga

SEQ ID NO: 517480 - DNA, 708 bp, Stenotrophomonas maltophilia
atgcgttccaagatcgtcccgatctccaacgtcgcacgcctcgccgaagccggcgaggcgttgctcaaccgcgccaatggcatgcccggcatgggcctggtctacggcgccagcggttacggcaagaccacagccgtcgcgtggcttgccacccgccaacacggcgtcttcgtgcgcgcgctggccaccaccacgccgagcagcctggtcgagagcatctgcaaggagctgggcatcgcccgccgcccgacgaacgtcggcaccatcgaaaccatcgtggagaagctggccgagaccaaccgcccgctcttcgtcgatgaggcggactacatcgcggatcagaagcgcctagtcgaaacgctccgcgacatccacgacctggccagcgtgccggtgatcctgatcggcatgcagaacctgcgccgcacgatcagcacgcgcgagcagctggccgggcgcatcgcccagtgggtcgagttccaggaatccaccctggatgacgcacgcacgctggcccgcgaactggccgaggtggacgtggccgacgacctgctgcaacggctccacgcatctgcgcgcggcacggtccggctgatcgtcgtcggcctcggccgcatcgagcagttcgcgcgttcgcgcagcctgtcgaaggtcagcgcggccgactggcccaagtccgccgacttcttcatgggggcgggacgctga

SEQ ID NO: 517481 - DNA, 2262 bp, Stenotrophomonas maltophilia
atggccgacgggaaccgcgccgcggaatcgttcgatctgccgcagatcgccgaggccctcaaccgcaacaagtccagtgtcatccgccgcgccgcgaaggaaggctgggctttcatcgagcaggccgtccgtggcggccagcgccggctgtattccctgcccctgctgccggaagacgtgcaagccgcactgcggcgcagccagtccctgcgtgctgccaacacggtggccgtctcgccgcactaccaggccggcgccgcgctcgcgcgtcgcctgtccatcggtgaagccgtcgatgcacgggtggcgcagcgtagccgcgaacagggcgccagcgccgccgctggcctggttggcgtggccaaggcccggatggaggccaagctcgacgtgctggcgcgcttgagcgcctacgcccaggcacgacgcctgggccaatgcgccgcgctggaggagttctgcacggcctacaacgccggcgagatcgacgttgccgctgacgttcgccagttcgccggcgaaaccgttcacccggtcaccctgcgccgctggaagaagctggtgaaggcccaaggcccggcagcgctcgcgggcgcatacggcaaccgcaagggcggcggaaagctggacaccgatccggccatgcgcgacttcgtcatcggcctgatcgccgacaagccgcacatcagcgcgaagctggtgcgcgaagccatgctcgcgcgcttcccaggctcgccgaacctgccggacgagagcaatgtgcgccgctggctcgcgcgctggaagcaggacaacgccgaagcctacctcgcggccaccaatcccgacgcctggaagaaccgccacatggcggcgttcggcagcctgtccgacggcatcacccgcgcgtgccagctgtggatgatggacagcacgccggccgacctgcagctggtcgatggccgctacacgctggtcggcgtgatcgacatcggctggcgcggcttccgcctgcatgtcgccaagaccagcagcgcggaagcggtgagccagctcacccggcgcgccatcctggaatggggcgtgcccgagtccatcaagatggacaacggctcggactacgccagcaatcgcttcgcgcagctcctcacgggcctgcagatcgaaccgcgcttcagcgcgccgttctcgccctgggaaaagggcaacatcgagcgcgcgttccgcaccttcagccactcgctgctggaactgctgcccggctacagcggccacaacgtggccgaggcccaggccatccgcgcgcgccagtccttcgcggaccggctgttcaagaagaacacggtggtcgagatcaagctgaccgccgccgagctgcaggagttctgcgaccgctggtgccgcgacttctacgcgcatgagcagcacgacggcctgcagggccagacgccgttccagcgctacgcgcaactgcgcgacgttgttccgcgcatcggcgacgcgcgcgcgctcgacctgctcctgggcgaaggccgcctgtgcaccgtcacgaagaagggcctgcgcctcgacaggctgaactacatcgcccccgagctggcgaccgtcatcggtcagcaggtgctggtgcggatcgacgacgccgacatcggccgcgccatcgtctactccaacgagcagttcctctgcatcgccgattgccccgaagtcgccggggtgtcccgccgcgagatcgccatcgaggcgaaggccaagcagacggccgcggtgcaggaagccaaggcgcagatgcgcgcggcgaagcgcaaggccaacgtcggcgacatcgcccgcgaaatcctcgatcacaaggcgcgccagaacgctgcgctgaccgcgctgcctgccccgaacgtcgtccacatgacgcccgcgctcgaagctgcggcggaagccgccatcgccctggacgttgccgagcagcccgcagcgccggccccggtcgtgtcgctggagcagttggcgagcctcggccgcgtgatgcgcgaggagcagtcccaggacgaaacggccgaggatcgcttccgccgcgccctggcgatgctgctcaagccagaagccgagcgcaccgacatcgagcgccgcttcctgaagaaccacacgcaatcggccgagttcctcggccgctggtcgatgttcgaggacttcggcccttccagtttcggcctcaccgaagagtacgcggcgctgttgcccgacggcgccgcctatgaccgccttcaccgggcacagcaaggggaataa

SEQ ID NO: 517482 - DNA, 450 bp, Stenotrophomonas maltophilia
atgtcccgccgctccgaccccctgaccggcgacctgttcgccaacatccccaagccgctggcagaagtgccggcgtcgatggacttccgcacgccggtcgcgcagctggtcagcagcatgatccaggacagcgacatgagccgctgggccatcgctgcgcgcatgtccgaactgtccgacgtagagaccagcaaggccatcctggacagctacaccgcggccgcccgcgaggaatgcaacctcccgttctggaaggcaccgctgatcgaactggccgtcggcaaccggcgcctggccgaatggcacgccagcgtcctgggcggccgcgtcctgtggggcgccgacgtgatcgacgccgagatcggccggcgtaagcgcgaaatggccgacgccaacgccgagatcaagcagctggagcggattcagcgcctgcaccgggggcgccgctga

SEQ ID NO: 517483 - DNA, 339 bp, Stenotrophomonas maltophilia
atgaacaccgcccctgtctacagctccgaacggagcatcgacttcgttcctccttcggcggacggcctggaagtggaggagatcgagaccatcgaagcgagcgaaccagtccagccctaccccacggcggacgggctggtggtggtcgagctggcggtcgagcacatcgagatcagcctggcccaggcaaacgggcggggatcagccggagagtgccccgcgaggcatagcgcgaaaaccccggcagtgcaggagcgggtcatccgcgtcgcggcaggttccggcctggcctccgcccgcgcgactgcacgtgcggccgaaggtcagggggtcgtctga

SEQ ID NO: 517484 - DNA, 363 bp, Stenotrophomonas maltophilia
atgccaaatggagctaacccaaaaaagccagtcccgcaggactggcaccgcgctgacgtgaaggcggccttggacaaggctggctggtcgctgcgccaactgggtttgcactacggctacacagctgacggctccccgctgggcgaggttttccgtaagccgtggccgaaggccgaggcaatcattgccaccgccatcggcgtcaagccgcagaccatctggccgagccgctacgacgccaacggcgtacccaatcggcgccagaagcctggccccgcacccaaacgtccgcctcacatcaagcccttgaagggtagcacccccaccagcggcggcaatccacaaaaggcagcccgcgcatga

SEQ ID NO: 517485 - DNA, 450 bp, Stenotrophomonas maltophilia
ttgcgcatcgcttggcgccgcgaaagcggtgcgggggcaaaagtgataggtcagcgcctgatccaggcgcgcggggatgtaccccaaacggatttcgccgcccagctcggaatcccaaagagcacctacgtgcgatacgaacggggcgagcgcgagccggacctgcgcacgtgcctggcgctccattcggctggctggaacctcaattgggtgctgacgggcgaggggccggagcgcttggccgacctgggcggcgccgtcgcgtcgcatccagtgagccacaagagcctgacgattgccctccagcaggttgaggaggtggtggctgagcaccagctccccatgccgccctctcggaaggccgatcttgccctcgcggtagccgacctgatcgaagaagggatgcccgaggcgaaggtgctgcgcttcgtccgcgctgcggccgcttga

SEQ ID NO: 517486 - DNA, 354 bp, Stenotrophomonas maltophilia
atgaaggagaacgtggcccgcatccgcaggctgctggaggagtctgtacgcgagaagaagcagctcgacgcccaggagcgcgccaaacgggcgttcgagctattcgagttcaacaccagcctgccggccgtcgatacatcggccagggcgcgtgggttgcggacggtggcccggatcgtgggttggtacgcctgggccgggccggaggtcgcccggcaactggatcgtagcggcgtggccacggtggacgacctggacgatgaccaggttgtcgagctagtgaccaggatgcggcaactggaggaatgcgcccaggaagggctggactcgccggacgccccgccggctcgctga

SEQ ID NO: 517487 - DNA, 477 bp, Stenotrophomonas maltophilia
gtgaccagtggcctggcggcgggcatcgatgccgccgcccaccaggccacgctggacgcggggggctgcaccgtggcggtgatcggcaccggaccggaccgcgcctatccggacagccacgcccggctgcaggcgcgcatcgccgccgaaggcgtggtgctcagcgagtacctgcccggcacgcccgcacgccccggccactttcctgcccgcaaccggctggtagccgggctggccctggccacggtggtggtcgaggccgcccaacgctcgggtgccctgatcaccgcacgcctggccgccgaggccggccgcgaggtctgcgccctgcccggctcggtgctcaatccgcgtgctgcgggctgccacaggctgatccgcgagggtgccgcactggtcgagcgcccggaggaggtcctcgaactgctggcccccgccctccgtgtgcgggggcagttggattgttatccgggatag

SEQ ID NO: 517488 - DNA, 342 bp, Stenotrophomonas maltophilia
atgtctcgtaatggcttcccgcgtcacccgctcacccgcgccgtcctcagcggcctgatcctggccggcagcagcgcgatcgcgctcgcccaggaaaacacgcccaccgatctcggacgcataaccgtcaccggctcactgatcccgcagacacagatcgagaaccacacgccggtcctgactgttaccgccgaggacatccagacccgcggcttcaccagcgtggccgaagtactgcagcagaattcgctgaccactggcgggctgcagggcggccagacctcagcttcgttcacccagggcgccgaagcctcaggcatgttcggcctcagcccgagctaa

SEQ ID NO: 517489 - DNA, 426 bp, Stenotrophomonas maltophilia
atgacgcaacgcgagcgacacgaccagcgcgatatgtcgcgcgcagttactccatcgatccgtctgatgctggcaatcctgctggtttggcagctttcttcgctggcagattcatcgggcttttcgctcaggattctgcgcactgcatttcagccgttcgccggcgaattggagtcgctgccgcccgcagtcggcgagttcgcacatttgctgcgtactcagtccgctgcgccagtgacctgttcgctcagcgatgaggttgcttcggacagcctgctgatgcagcgaagctacgaggccgtctaccccgtgaggatcgattcgagcagcaggagctgcatgttgggtacggaatcagctgctgttgcttcgtcctgcaggctcgagctggagggcgaacatgcgcgcatcttcaattgtaggtaa

SEQ ID NO: 517490 - DNA, 204 bp, Stenotrophomonas maltophilia
atgagggcgaatctgctagttgcctttctcgtggcgggagtaacccccatcaacccgcttctcgggctgtgggcatacggtcgcgggcatgcttgggcgctgccgctgtcggccctatggggcttgggagcactggcggcgtttttcatcaacgcgggcagaaagcacggtggcagcccggaagcacccgacgggcgtgactag

SEQ ID NO: 517491 - DNA, 264 bp, Stenotrophomonas maltophilia
atgtcgtcgctggcgatcagccagtgccgaacagagggaacgactttggacacgacaggctggaaggcatgcaccatctacggtgacatgtcgagtgacagggcgagtgagaactatccgatggtgaacgtttgcccggattgcttcgaagaagatcaacgccgcgagggggacgcgcaaatcgtctccgtccagggcgactacgatgacagcctcgggccggagtgtggcttcgaatgtggaaactcggctgacgacgagtaa

SEQ ID NO: 517492 - DNA, 744 bp, Stenotrophomonas maltophilia
atgaccgcttctccggctgcggccgcgtttgcgcgcatcaccgaacatttccttgcccaggcgcgcgctgcgctggctgccggcctgcatgatcccgccattgccctgcagcccggcgaacgtgcgctgctgcattcgcagggcgaggcggcgctgcgtgagcatgcccagctcaagctcaaccgcgtgctcctgctggagctgcacgccgccgcacgcagcggtgacatcggcccgcttgacagtgctggtgcgctggacgaattcgttgccctggccacgagcgagggcttccgcgcgcatctgcagcaacgttatccggtactgctgccgcgcctgtcgcgcatgctcgaaggacaatgcgcggccgtggtggagctcgctgcacgcatcggcagtgatcgtgttgcgttggccgagttgctgggtgcgccggcgggcacgctgcatgccgttgcattgggccgcggtgacctgcacggtggcggccgcaccgtggcacggctgcagttcgaaggcggcacggtgatgtacaagccacgctcattgcgcatcgatgccacgctcgatggcctgttgtccgcggtcttcggtgatgcccctggccgcgtgcgcgtgccgaaggtgatcgatcgtggcagccacggctgggctgcattcgcgcgcatcgctattgttccggcgaggctgaactgcggtgctattaccgcggcctcggccactggctggccatcctgcgcctga

SEQ ID NO: 517493 - DNA, 876 bp, Stenotrophomonas maltophilia
atgctatcgatcattttcagaacgttgctgatcttgactctggttgcgtggggctctgctgccagggcgcagacgatcacctatatccacaccgatgcgcttggatcggtggtggccgaatcggatgccaatggcgcagtgaccaagcgccacatctatgaaccctacgggacagtagttggtggtcaggttgatgatggtcctggatataccgggcatgtgagcgattcggccactgggctgagctacatgcagcagcggtatatggatccgcagttgggtatattcctgtcggtggatccggtgacggcacatcaacagccagctagccaattcaatcgataccgatatgcggacggaaatccctacaagttcacggatcctgatgggagggccgcgctgcaactgctcgttcctttcgtcttcattccgattgctggtgcgaccatctactacacaagtaccactcctgaacaacgtgtggaacttggcaataggctggaagcgggaatcagggagctggtgcaggagtcaaaaccggcaccacatgagcctgcattgaagagtgatggttcgatagtctcggatcgagagcctggaagtgatggaaagcgtggctcaactggagggcctggtgcggggaagcggttcccgaaggagtctcccgaagctaaggggagcaaggagggtgtcccatgcgtctactgcggagttcctacaaccaatacgcaaggattgccaaattcccgagagagggaccacattgatccaaagtcgagaggtggaaataatagtcctgagaacgagagagacgcctgtaggacgtgcaatcgagacaaggcggcaaggaaccccgatgagtggagtggaagatga

SEQ ID NO: 517494 - DNA, 735 bp, Stenotrophomonas maltophilia
atgcagtatgacgatctggacaggctcacccgggcgagctcagcaagattcggtggcgacggagtaatgacctatagctacgacgcactggacaacctgcgatcagctcgattagcccgagtgaaagaccacatctactggtatgacagcaacaatcgtcttaccaatgtgcagtcttccgatggtgcaaccaccatggggctgggatatgacgtgcagggcaatctcgccacgcgcaatggacaggccttcaggttcgatttcggaaatcgcctgcgcgaggctgaaggtgccgaaaagtatgcttatgacgcacatgggcgtcgcgtgctgagccaggcgccaggcggggatatcctgtcgctctacgacagcgcaggcgtgctgcgcagacaagaaaaccagcggacgggtgaaggcacggagtacattcacttgaatggcagtctgcttgccaagtctgtgaccgccatggcgccgggggtgccggtgattactgcgccctcattcagcagtactgggagtttcacggttggctggtcgagcgtagtgggtgtatcgacttatgagctgcagcagagaaccggacagggggggctggctctctgcctattctggatcggcgctggcatggtcgaccactggcaagcctgccgggagtcatgggctcaggattcgcgcttgccgtgccgtactgtgcggcggttggagcgccgaagtgacagtggtggttga

SEQ ID NO: 517495 - DNA, 2790 bp, Stenotrophomonas maltophilia
atggacaatggtagtcgcgacgggttccggcttacaacgacctcgggtgagcgctactacttcaatcaattgaccacgcgccgtgaggcaccgttgcagaagctcgtacccactacgcgtggcaacgatccggtgtcagtcatcctggagcgaacgcgctattaccttttggcaaccaggttggaggatcggttcggaaactgggtccagttctcatacaacggcgagggcctgcccacgcggatctggagcaacgacgggcgcgaaatcgggtttgtctacagtcagggacgaatgaccagtgccactgccaatgggcgctcctggggcttccagtaccagacgaccctggcggaaaacctgttgacaaaggtcactcgtccagacggtagctcatggcgctatgcctactcaggaacacttctgccgtcggccccgctacccatcgatacgctgccaggcttgccgtggtgtagggactcctcccttccgctgccagctgactatgttgtgactgcaacacatccggcgggcgctacgggtaccttttcgttcgttaatcaacggcattggcgacacggcgtgcatctcaccgaatgcatgcagaagggcgatccccgtgaggatccagagtacgtattgggtgttcctcatttcttcgatgtactcagcatcgtcggcaaggccatcaccggtcctggcctgtcgaccatgcagtggacctatgactatggcaattctccttctgacctgtggggaagccagaatgagcccgccgtctacccttgtgcgacgtgcatccagacgaaggtcgtacaggttcgtcgcccggatgctactactcagaagttgacctttggcaatctctacatgctcaacgatgggcgggaactgcgcgaggaggttctcgatgcccaagggcgtgtggtacagacacgatccagtgactacttggccgatgcttcggctgccggtcaacccttcattggggagtatggtgcgattctcggaagcttgaacgatccagcaacagttcgcgtgcgtcctgttacgcggacacagttgcaacaggacgatactacctacacttggcaagcggcagcctacgaccgctttgcacgcccagtggagcaagttcgcactggacctagcggatccgttcgtgagcggctcgattatcacgacaatacagttcactgggtgttgggacagctgtcacgagtgaccgatcttgccagtgcaaccatagttgccgaagcggccttcgatgccaatgccatgccagtcgagacgttcgcatttggaaaacggacccagacaaggacttatcatgcagacggtaccgtcgcatcggtccgtgatggaaacggcaacaccactaaactctccgagtggaggcgcgggattcctgggctggtgcagtttgcagacgcgacgacgtcaagagttctggttgacgagaatggttggatagcaagcgcaactgatgaaagtggatttgccaccagctacggctatgatgcaatggggcgagttgccagcgtcgtctatcccgcaggggatgcggtgaactggactccgatgacccgcgtctttcaacaggtgggtgcggaggagtacggcattcctgcggggcattggcgacaggacatcgcaactggaaatgggcgcttggagacgatctatgatgccctctggcgacccgtttttacgcgcgagtacgatgctgccaacatcgcggaaacgcagcggttgcagcgcttcagctatgaccatgaaggtcggctgttgtttgcgtcttacccgggcaggggagcgaatctgaccacgggaaactggagtgagtacgacacgctcggtcgcaggactgctgctatccaagacagtgagctgggtacgctggtaacagtgaccgagtatctgccaggcgcccgaatccgggtgaccgacgcgcgcggaaagcagacccagaccagtttccaggctttcgataagccggcctacacggccccgatcgctatcgtgaagcctacaggcgtcgtgctggatataccgagaaatgtattcggtaatccggtgagcgttacgcagcgtagcagcgatggatcggtctcgctgacacgtcgatatgtctacgacatgcatcaacgtctttgcaagagcatcgagcctgagactggtgccactacgcttggctacgacgcgtccgacaacatcctctggtcagccacgggaatgaatcttcccgcagtcgactcctgcgatgcatccagtgcctattcctctggacgtcgcgtagaccgtggctacgacgcccgcaaccggttgaggaccttgacgttcccggatggcaacggcgaccagcaatgggtctacaccccagatgggctaccgcagcaggttacgacgaggaacgccatcaataccagtccggtcgtcaacacatacgtgtacaaccggcggcgattgctggtgggcgagagtgcctcgattgccggtgcgttcaactgggcgcttggctatggctatgatgcgcgcggcgtgatggccagcatccagtatcccagtggcctgtcggttgatctggcgcccaacggtctggggcagatcacgcgtgttgggggatttgcattgggtgtttcctatcatcccaacgggggtatgcgcgcattcacttatggaaatggcatcgtccatggcatgacccagaacgcgcgccagttgcctgggcgcgtaacagattccgcaggtgtgctggacgatgtctacagctacgacggcggaacgtga

SEQ ID NO: 517496 - DNA, 447 bp, Stenotrophomonas maltophilia
atgcgcggcaacatcgcccaactgatgcagcaggcccagaagatgcaggagaacctgcagaaggcccaggaagaaatcgcaaggatcgaagtgaccggcagtgccggtggcggcatggtcagcgtgaccctgaccggcgccaaggaatgccgcaaggtgcgcatcgacccgtcgctgaccagcgacccggagatgctggaagacctgatcgccgccgccttcaacgatgcttcgaacaagatcgatgccgagtcgaagtcgaagatgggttcggccaccgctggcatgcagcagcaggcgccccgccaagaatcagaacggcagcttcatgcccggcgcccgctgcaaccctcagtcgagcatggctcgactctacacgtagctgtcgagcttgctcgacgccatcaaagcacaccgccgtgtccgcacccctgcttgaacaattga

SEQ ID NO: 517497 - DNA, 2343 bp, Stenotrophomonas maltophilia
atgggatccaggtggttgcggttcgcaccagtattgctgtgcctcgttgcttcgtctgttgctgcccagcagcttgtgcaaccagaatcggagtacgcgaacaaggtgggcaaggcacaacagatggggcgccttgacgaaaagaccttcggcgagaacatctcactgttcaatggtcagctcagcttttcggtaaccgacatcgcgatcccaggaaatgccggacctccagtggaactggttcggaagcgctcgataagcgagcgctatctttatcaagacagcaaacctggcgatcttgccggcttctacgattgggacatcgatattccgcatcttgagggcgtgttcagcagccgtgggtgggtggttgggcccgacgacgacgcttcgcgctttcaaaggtgttcccagcagaaaaagccctacatcggcgacggcatgggtagttttccggaagccgcattctggaatggatatggattgaatctccccggcgatggaacatcgcagttgttggtggcttcggctggcgtgccaatgcctgccgatgggctgacgtatgcatgggtaacgacgggtaatgtccggatccgttgtctgccgcagacgcagaatggagtaccgggcgaggcctttcttgcattggcgccggatgggaccaagtactacctgaactgggtggtcacccgggaaatgccgttgttcagctacagggacaatccgctggcaccgacccgcgttctttcgcgcagccatgtgttcttcctggcgactcgggttgaagatcgcttcggcaactgggtcaactatgcctactcaggcgacaagctcacctcgatcagcagcagtgatgggcgatcgataagcattgcctacaacggcgaacgaatctccagcgcttcggcaaatggtcgcacgtggacctatcagtaccgcgaaccaggtgcccttggatcgggcatcgacggtggcttggcggcggttgtgcagcctgacggcactcgctggacctacacggttacaggcaccctcaggccgcccacgtttggtcctacacagggagggtcagaatgtgatccgcgaatgggaaccgtatacggaccctacagttacaccgtaggtcacccatcaggtgccaccgcagcctactcgcttgcctatcgctatttttaccgggcgacagacataagcccctgctcgtcgccggaacagattccctataccggcgtctggagcctgcagcagcgcacgatcacgggtgccggcctgcctacgatggcgacgtcctactccttccaagacggattctccgccggcggtcgatggacgacgattacccagccggacagtagcgtcgtgagctatcgtttcggggtgcggccgcgcatcgatgaaggaaagattctggaaacgcgcaccgccaacgctgcaggagccacgctggagggtgtgacctaccaatacctggccaaggaagacgccgcagggcagttcattcctctagtggggcagtcgctgagcatcatgacgcccgcggagggcctcatccagccgcagaagctggcagtaaccctccgcgaggggacgtcctacaccgaacgggtagatcgcttcgacgcattcgcaaggccggtggaaacctatagtggcagcgatgtcggtgtatccaaggaccggaccacgttccatgacgatctctcttcctggacattgggtcagaaggcgcgtgtcgtcgatatcgacacggggatcgagcaaagccggactgagtacaatgcccaatcgcttccacaagcaacgtggctgtttggcaagctgaaacagacgcttgcgtacgacgcattgggaaacgtggtgcaggcgaaggatggcaacggcaacattacgcagatgcaggactacaagcggggtactccccgccgtgttatctacgcggatggcaccagcatctctgccacggtagacgacaatggctggttgctgagcaagaccgacgaaacatcagcaacgacggtatttgcctacgatgcgatgggacgcgtgagtctgatccgctatccgtcggatgacaccgttggctggaacgataccgtcatcaatcaccaacgtactgccggtactgagcgaggcttggctgctggtcattggcgagaaatcgaggcaacagggaatgcgcgtcggattacctatcgcgacgcactcctgcgtccagtgctgagggaggagtacgacgcgacaagtcgaagctccacgctgatgcaggtgattagcgcgtacgaccacgctggaagaaccaccttccagtccaatccgggccgctatcgtctgggggagccgtga

SEQ ID NO: 517498 - DNA, 3774 bp, Stenotrophomonas maltophilia
atggcagtggtggttctggttctggcagccagccccgccgcgtatgcccaggcatgggtgaagctcaccgggcccgcacagacggtgtatatcgcgcccgctaccgtcagcatgacggtcgggtatggcagcaccaacggcggatcaaaatcggagtacattgacaacgtacgcctgacacagaacggagttctgctcagcaatttcgccaacggaacctacaccgtttacggactcccacctggtacgtaccagtacatgctgactgcccagggcatccgcaatctcaacggtgaggaaattgtccggtcgttgcagagcggaccggtggtcatcacggtcaatccaccgcctgcacccgtggattccgctgagaaggttgctgcgtcgctcaatacaaatcgggtggtcgcggggcaaccgttcgtcgcaactgtgaccatgaggaacacgggtgagaccacctggtcaccggagggaggctatgcgctgagcatgccggacaacgggctggtctactggaacgcagcgagctcagccgttcctgcggtcatacctcccggtcaaagcgccactttcaacgtcacgcttacacccagcacaggggctgccaatggaggctggtatggcgtgactttccagatgcagcggaatggaagctggtttggtctgagcacgggccagattggcttctttgtgtggcagccggtgaacagcgccgagtttcagagtcagagcgttgcgcctgcaatgaaaacgggtagcacccagacggcgtttgttaggatgaagaacacgggcgatacggtgtggcaaccgggtagccattggttgggggcgcaaaacccgaccgattccacccaatggggagcggcgcgtaccgcgctcccacgagccgtagcgccaggggaagttgtggatatcgctgtcccgctgcaggcgccagcgacgccaggaaactacaacttccagcggcagatgtgggcggatggcaaaggatggtttggccctgcgacgtcgaatgtagtgatcagtgtggcggcaccggtaaacaatgcgcgtacggaggagggaggaggcatcccggttgaagtgcaggcagggagcactgtccagatgcgtcttcgctttcgaaatactggcgagacgacctggagcagtggtgcaggctacagccttgcaacggaaagcccttcggacaataccgtctggggtgcagcgcgaatccccctgccgcatgatgttccaccgaatggaatcgtcgagttcctgttctccatcactgcgccatcaacggcaggtcagtaccctctccagtggaggatgaatcaggaaggcgttggacgcttcggagacgctaccgccaacacaaacactcgcgtcgtccttccaccattgaagggtgtctggaccgaatacgatgcactggggcgggtgacatcgatttcaaaggatactgacgcgggactcgcaacgaccgttgtggcctacgagcccgggaatcggagagcgacgaccgaccctcggggagccactacgagattccagtatcaggctttcggttcccctatccagtcggctgtgatcgcaatcagtgcgcccgaggggcagtttactgatatcccccgcgacagatatgggcgcccgacggccattgtgcgtagggatgctactggcagcatccagttgcgcagaactctggtttacggcgagggcggaagcctgtgcaagtcgatcgaaccggagtctggcagcacagtgatgggatatgacggcggggacaataccatctggacagcgagcggcttggaccttccggatccgggcaactgcgatatagctgccgcccatggctcgcctcgtcgtgtcgatctgacttatgacgctcgcaatcgggtgtctacgctctccttcccggatggcaatggcaatcaaatctggacctatgccgcagatgggttgcctgcgcgcatctctacggctaatgacggaggagcaaatcacaccatcaatgcctacagctacaacaagcgcaggctgctgattggagagtcgagttcacaggagggatggtacacgtggggacttggctattcctacgatgccaacggctcgcgtagcgggatccagtatcccagtggcctgtatgtggccttggcgcctgatgctctcggccgggcaacccgggttggagactacgtgcttggcgcgtcccatcacgcggcaggtgttgcaagccgcttcacgtatggtaatggcatcaggttcgagcaggacctgaacgtccgagggctcccggcgcgcctcagtgcgcttccgaatgtcagtattctgaactacgactacgatctgaatggaaacgttgtcacgattgccgaaatcggacaaggaagccgtagccgcacgatgatgtatgacggtttggatcgtctcacccaggccacctccgccgcctttgggggtgatggtgttgttcgtttcacgtatgacgtcctggacaatatgcagagcgcaaagcttgcgggtggcaaggatcattcctactactatgaccagcacaatcgtttgaccaacgtcagatccagtgctgatgcgacaacgatggggctgtcctacgacgtgcaaggcaacctgtcgatgcgaaacgggcagagctttgtcttcgacataggcaatcgaatgagactggcgccgggtcctgagacataccgctacgatgcgcatggtcggcgcgtactggcatggttgcagggtagtggttccattcactcgatgtacgacagggagggaaggctccgtcgccagcagagcgagcgtgatgggacatccagagagtacctctacctgggagagctgctggtcgcgacattggagactggaagtgatggcgtgacccgccccaagtaccagcatctcgatgcgctgggatcgcccgttgcggtcacagacacggccgcagccgtagtccagagaagcgtttacgatccttatggggaattgctggagcgccctcttgctgatggcgtcggctatgctggccatgtgagcgacagcactaatggtctgtcctacatgcagcagcgctactatgatccgcaggtggggcggtttctgtcagtggacccaatcgctgcccatagaactccagcgggatcgttcaatcgttactggtacgccgacaacaatccgtacagatatattgatcctgatggccgttccagcatgaatctgttcggcgaccacgatccggcgggattaaggagggctggagacgcggtagattcacgctcaatgtttacgctcaccgctcacgcaaatccagatctggtacaggaccagcgcaactcaacgcgctacacggacttcaaatcgtcggagtcccttgatcgcgctcgaagtgacttcggcttgaaacgtgggcaaaccgtattcatggctgcgtgtcatttaggcgtggccccaacaggattgaacaagtcaattggccagctatgggccgatctgaacgattccaccgtctatgcgccgagtggttttgtcatgtatcccacaaactactcaggtggccctgttaccctgcgtgttaacatgcagcaggacggcaagggcgcgccaggtgtctggaatcgattgactccaggcggtactggaagttcaggcccagccatcaagacgattcgattcaatgcaaacggctcgacgaccataacatttgctggatcacagactggaagtaggcttcctcttactcagaccatcggaaaaccaaaatga

SEQ ID NO: 517499 - DNA, 966 bp, Stenotrophomonas maltophilia
atgaccacgttcaactacaaaggagagcccatcatcccgaccctcggtatggaagatgcgctcaccaagatcatctctgcacttgaggttgattaccgcggtatcggctttcattcgctcacacgatttgggaaaagcaccctcgcgcaattcatctgcgctaatacggagtggaccgagtgcaagtacgtggccaggcaggcaaacctccgggtgcttggtccgggagagtccgcattcctagactggttcatttcacagcttggttcacaggtgatttcacaccagtctgctgaccgcaagatcgagaggatcgtgaataccgttgatctgatgctcaggtcggcaggcggcggatcactattctttatcgccgatgatgcaaacctgctggagcaagccgcctttcaacacttcatcacgatagacaacgcgctggagaagaaaggcatctcgctctttgtcatcttcttgtttcaggacaatcacacctcgagtcggcgcgaggagatcaatagaaccacggtcacgcctcaggtccgtggccgttttctgacccgctaccaccgcctgcatggcatccgaggcgctctagacgttgagacgttcttggagcgcttcgaggacgaggtagaggttagcccgggggccgggattaccttgcctaggagcctcgcgccagagctgtacgacgggaagttccgcttacggcatttcggtgagcagatctgggatgccggctgcaggtttcgtgctgccgccgggcactccggtcaagatgagtggcctctaaaggctatgcgcctcattgcgtactacttggcgaccagggtgatctgcaaaagcggcttcaaagaggtcacatccagtgacattgaaatgtcggtcgccttctcagatcttgctgcttttgatggcgaatcgggagctctgactttcacggcagatggaggcctcaatggatag

SEQ ID NO: 517500 - DNA, 1890 bp, Stenotrophomonas maltophilia
atgagcggggtgagtcgcgaagacctactgtcctgggatgttgttagtcctagagggttgacgccaggacagctgaagtcctaccaggctcgcgttgaggcagttcacgccgtcgccgctgggtcgtcagttgcttcagctgcgaaacgtcacggactcaacgcgaagacgcttgcattgacagttcgaaatgcacagcaaacttccccggatgggcggccgtggggttggcgcgcctgcttgccctacaaggtacggaatgccagcgaaagggctgccgaagactttcctgttgccgcaggaccgggagcattcaatgctttcctaagaaaactcccggagttcaaagagttgctcatcagctacgctggcccactgccttcgagaaatgagcgcagccccaagtttgatcgcttcttcaaatcactgaagaagactgtgcacaagtcggttccggcagatcgctatccagcgaacgatagatcgtgcgcgaggagaagcatcctgcagtacctgaagcgactgcgccaaggttctctgtatgtagatgatggcttcgaaatagaggatgcaacactcgccagccagatgaacgaggtgtttgcactccagatgggggattgggtgcagttcgatgggcacgcgctggacacgaagttcagcgttgaaggcgaggacgctgacggaaacccgttcttccaaactatcccaaagacttggctgatagttggctacttcgcgctactgaggctctgctgcggctggaggctttcgttcgccaccaattacaacgggaccgatttcaacgcggcatgcgcggatagcttgagggagtggttcggtcgagaccttgttgcgccctccatgaactatgagccaggggcgtgcatcggatcttcgtccgccattggatttgtcgcaacgggggcaattacgagtgtggacaatgcaatggctcacaagttgcgggtcaatagggtgcggatggcatccgagctgatgggtgtcatccactttgggtatagccatgttcctgagacacgtggccatctggaggcttggaacaagcgtatggaagaagcggtgattcgaaagctgccaggtggcttccggccagcgggtgagttatcggaggcgaccaagacgaatggctacaagttcgaggacttcccactacagccaacggcgctcgaagatctcatggatgtcacgatctcggcttcgaacatatcgccgatcaacgcgctccagaaccgcgcgccagtgcaggcactacagtcgtttgccgcgtctggcggatggctgttcgctacaaaggatcacgaagaacgggctcggtcactttcaaagcacaatttcaccgtaaccattcggggagatcgacgtgaagggcgtcagccctatgcgcaatatgaacacgcaaggtatagatctgcctccatgaagaacagatgggacttgttaggccagactttcgcggcagaagtcgacattcacgatggaagatttttgtatctgtacaccgcgtcaggagagctgttcgtagtccttagggcgctccggccctggggccgctcaccgcatagcatcgcgcttagacgcttgatccagcgccgaagccaaaaagatggcttcgaaatcaacggtgcagaagacgcggtcatcgcgtacaggcagcatgtaagaaagactttcacctcaaagcacggcacagctctcgcagcaacgcgacactggcgggatcttgatgcgccgactgaggccgctccagcggctcaggatgtggcattgtctgtggccgagatcgcccaacggcgaattcctgcagaagacttgttcgtacccatcaccggccgggtcaacctgggaaggaaaggggcgaagcaatga

SEQ ID NO: 517501 - DNA, 723 bp, Stenotrophomonas maltophilia
atgaatagccctccgagccttccagctgctgcattgggcgcctcgtccctactgaacacgcaggcgtatgcaccccgtccgcttgcacctgctgaattcaccagactggacacgtacaactaccactcaccaaggaatgatcaccgcctagtgaccgtcgtcgagccctgtcgcttggccttggcgttggacctggaatttgaccctagcgtcgcagcttatgtcgagcgccctcgtactctaatggtgcgtgaccacatgattgagctctgcttctgggtttccaggaaatctggcgccgagagcttcatcgtattccgaaggcaggccgtcgcgagcgtcccggcacttcgcgccgagcagcagttctgcgctgagctattagaagcttcacagcgtgcgggcctgaacctggtgatccggaaggtccagtccattttggcgtcgcgagtggccaatgcaacgcgattggaactgttgccctacgtccaggcagcgagacgctcgccaggaatcactgtctttgttgaagcggtgatgactcacatgagaaagaaccccgttagctcattccaagcgatcgaggcaagccttcgaacaacgttcgactggcgtgacattcgcagtgcgacatgtcttcttgtgcatcgtggcgatcttgagatcaacttcaatgaaaggcttcggacctcgtcccaagtttcgctgggagcagcccaatga

SEQ ID NO: 517502 - DNA, 315 bp, Stenotrophomonas maltophilia
atgacgcagaaacacatcagccatcccgaaggcctgcccaaatgcgctgccggccaccgcgcgcgccacatccacgatctgcgcggtccggccgccggcggcggccacctagtcgagtgcgcatgcagttccaccaagaagcatgcaaatgctgacgcggcactggccgcctggcgacgcatgaacaagccggcccgaatcccgcgcgcaccggctctgccggaggttgccgacaacgtggtgcagttcaacctcagcctcgccgatcagtcgacgcagcggcagcgcgcgggaggcaatcatgggcgccgctga

SEQ ID NO: 517503 - DNA, 591 bp, Stenotrophomonas maltophilia
atgaccgctgcaagcttccccaccaccccggctgccgccgctgacgcctgccaggcatcctcgcccgtcgccgcggtcgtcgccaccatgcgtcgcctgggcgccgccggcgcaccgatctcggccgaccaggtccgcgagtggggcgacaccctgctgcaggagctgtattcccagccgcccgtgcgctgggagtaccggcaccaaggcgactcacgccccggctgctggatgaccgcgaccccggaacacgtctatcacgctcgcgttcgccgctgggtggtccgggcactgtgggaaaccccgcgcgtcatccagcccgagcgtgaccacgcgttcaaggccggcgtgtgcaccaggtgcggcgatcccgaggactgggccggccccgactgcaagccgacggtcaaacccgtcgatccgcgcacccggctccccgtcgacccgcgctggctggtcgagcccctgaagtggctgcgcgatgccgggccccacccggtcggccgctacgacagggaacgacgcgccagggaagccgctttcctgatcgaaaagctcgaagcccacatcctggagtgccagaagccatga

SEQ ID NO: 517504 - DNA, 717 bp, Stenotrophomonas maltophilia
atgaagacgatcaccagcgtcatggatctggacgttgcgcgcgagatcgccgcggcaatgatcgccaggcgggttgcacgaggctggtcgcggcagaccatcctcggctgctccttcgaatgcggaaccacggcatgccggcggggcttctacgtcatcaggtctggtggcatcgcagtcgccccgttcgcgttcacctgtttcagcgaagcaaacgggcgcggcggcatcttctctatccgcgatctgctgcccccgcttccggaccgcacgcacgcgggcaccgaagaactgccgccgttccagcctggagacaaggtgtggtcttggtacaaagacgagcccaacgccaactatggccttcctgacctcccgggcgatgccagcaactggcgccgtaggccgcggctgttcaccgtgcgcagcgtcagcggaccacacacagaaagcgggttctgcgccggccggcctcactacctggtgaagctgcgctatcaggaaggaccctctgccgaccactacaacgccggcaaccacgacctttgcccgatcagtggccgcccgtggcagatgcgcgcacgcggcgagtacctacagctggcacagcgcgcggcgcgcagcgcaacgcagcgccgcaccaaggccaccgctcgccccgcggcagcgctgccgctgccccctccggctctgccggctcaaatggatcttttcgcatga

SEQ ID NO: 517505 - DNA, 363 bp, Stenotrophomonas maltophilia
atggctgaccagatcaccaccgccgcgctgccggcggctgaattgcacatccttcgtcacgcccttggcgtcggggacggtgtcttggagcgcagctaccgcaaccacttcgtcacgggcgaaggcggagccgaccatcagcactgcatggcgctggtcgcgcgtgggtacatggtccagcgcgcgggcaatgcgatcaccggtggcgacgacctgttcacagtaaacgaagccggccgcgcagcggtgcaggagcacacaccgccgttgcccaagctgaccaggtcgcagcagcgctaccagcagtttctgcgctacgacagtggcgtgacgttcggcgagtacctgcggggctggcgatga

SEQ ID NO: 517506 - DNA, 225 bp, Stenotrophomonas maltophilia
atgcacaggcaagaagactgggatctgaaaattcggggccgcgacgtgacggtccgggtggcgctcgacggcatcggccgagttggacaggggacgttgacgggcttccatgtggtgtacggccccagccgggtcggcctggaggtgcgcgtggagtccagggaggacgctgcagccaagaccgaggcgctgctctccgacctcatgggtgccgactggtactga

SEQ ID NO: 517507 - DNA, 228 bp, Stenotrophomonas maltophilia
atgaagacagagggctatcgccggacactgcagggcgtgatcgacgggcgtcgcttccacgtcacgatcaccagcgcggtcgaggacgtttttcagttcgctgccacggttgatggcgctgccgtggccgcgccgcgcgccggcgcgatccgcaacaagggtgacgccatgcaactcgccatggctgccatcgagagccacatcgaggagcttcgccgcaagggctga

SEQ ID NO: 517508 - DNA, 591 bp, Stenotrophomonas maltophilia
atggaccaggtgaacaatgagcaggccgaggcgcttgccacactgcagaaggactacgacaggctgctggccgcgtttgatcggcaggttgaggctgccgagcagatcgctggcagagcgctgcagcaggaagaccgcatcgaggagctggaagaagccctcgcagcccgccagccggtcgcgcagcagcctgcctacaacgcggccgggatttcgctgaccgcctgccagttgcacgaagcactgctgatggcgggcgaccctgagctggacgttccgtttgaggaccggagccttgtccggatcttctctacggaaatgggccacagcggccccggcctctactgcgaatgcgtcgacgccgaggaagagggttgcatcttgctggacgggaccgctcccgctattcgccaggccgcgcaggccgtggacctggggctgctccgcgacctacacgccgccaccctgcgcgacatgcgcgaacacatggctgccgggacactgagcctcaacgactggcgaggtttcggtacggccgcgctggacgcagtgctgggtctgatcaacagccaggcggcgagcaatgggtga

SEQ ID NO: 517509 - DNA, 906 bp, Stenotrophomonas maltophilia
atgttctttcgcagcctgaccatgttccgcttccccgtcgccaccgacctctccgagatcgcgctggtgctgcctgccgccgcgttgaagccggtgggctcgctggaaatgtcctcccgtggcttcgtctcgccgtttggccgcgaggaaaccgagcagctgttccatggccgcgatggctggctgtggctggccatcggcggccaggacaagatcctcccggccagcgtggtcgccgaccgcctggaagagaagctgatcgccatcgaacgcgccgaggggcgccgccccggcggtcgcgagcggaagcgcgtcaaagacgaactgctgcacgaaatgctgccgggcgccatggtgaagtcgagccgcaccgacctgttcctggacaccgaacacggcgtcgcgttcgtggacaccaccagccgaaagtccggcgagtccgtcatgtccgacattcgtggcctgctgggcagcttccccgccatgccgctgaacgccgagctggcgccgcgctcgatcctcactggctggctcgccggcgaaccgctgcccgaggggttggcgctgggcgaggaatgcaagctggaagatccggtcagcggcggcgccgtcgtcaactgccagcaccaggaactgcgcagcgacgagatcgacaaacatctggaagccggcaagcaggtcaccaagctcgcactcgtctatcaggacgcactgtcgttcgtgctgggcgatgacctggtggtgcgcaagctgcgattcctcgacggcgcactggacaagctcgacaacaccgactacgacggcatacgcgccgagctggatgcgcgcttcacgctgcagacggccgaggttggacgcctgttcgccgtgctggcctccgcattccgcatcagcgcagccgactga

SEQ ID NO: 517510 - DNA, 384 bp, Stenotrophomonas maltophilia
atgaccgattccgtcgttgtcgatttccagcacgaacccgagttcgccaagaaggaaaacggcgagcagccccgcattgagctgattcgcgaccaggtagctggcttcgtggatggctacgccaccgcgaagggccatcagcccgcccgaatcatcctgcaggccaccgatctccagcactgcgtgcgccggatccttgcccgcatgcagaagccccatcgggaacaggcgaaagccgcatggcgcgaacagcgcgcggcgggctcgaagcagccgtggcgtgaagccaagcccgaacccatccccggcgccacccttacctggcacggcatccccatcgaaggcgtcggctacacccgccaccgcgccgtcgataagtcctga

SEQ ID NO: 517511 - DNA, 243 bp, Stenotrophomonas maltophilia
atgcaccacctggccctgcccttctgctgcgccgtgatcgtcggcgccctcctgtcgctgctcgcgcgcgccatctacaccggcgccgcctccttcgttctgatcgccctggccggtatcgcctacttcggctggcacggctggaacgacgcccgccgcggctggcccgccttccgcgccgaaatgcagcgccgcaccgacgagcgccgccgccgggccatgcccgccgacgacacgcactga

SEQ ID NO: 517512 - DNA, 258 bp, Stenotrophomonas maltophilia
atgaccaccctgaaagccttctacgtcgacgacatgccaaccatctacgccgccgcgaccatcgaggatgccgcccacctgtatgagcacgacctgggcgagccctgcgaggacggctacccacgggaagtgagtcaggccgatctggacaagcaggttcccgactacgacgacaatgaacagccgactggcgcgatgaccagcatgcgcgtctggctggaaggcgccacccccggcttcctgtgcggggccgagtaa

SEQ ID NO: 517513 - DNA, 162 bp, Stenotrophomonas maltophilia
gtgaccgaccaggacttcttcgcgcagatgcagatcggcatcccgcacatcccctcccccaacggcctcgccgctgtcgacgccaccggcgtcatcaagggcaacgccgatatcgccatcaaccatccggacgccgtcggcgccacccaggagcaagcctga

SEQ ID NO: 517514 - DNA, 225 bp, Stenotrophomonas maltophilia
atgatcgtcgccgccacctatccgctcgcccagcgcgcggccaacgcggccaaggccgccgccatcgccgccaactccatgggcttctcgcccagcctggtcagcgccgccgcagacgttgcagcccgcgccgtcctcgaccaacgcgccagcgccggccgcgccatcgccgacgtgcgcaagagcctgcgccgcatgctgcgcgcccaaggcggtgccgcgtga

SEQ ID NO: 517515 - DNA, 423 bp, Stenotrophomonas maltophilia
atggcaaccctcgtcctcggatgcacccaggccgccatcgcagtcaccgctgacggcaccagcggccgcgtcgtcacccacatgggcagcgccaagctgcatctcactccgtgggaagccgaacagctggccctggagctgcagcgcaaggcgcagcagctgcgcatcggcgccgccaccgcgcagcagtacacggaggccctgagcggcatggccgatgcggttgccgatagcagcgcccgcgcccgaaacatcaccgttacggcagatggcggctcctccatgagcctcacccaggtggaggcccggcagctggcggagagccttgtcgacgccgctgcggccatcgaggaagaggcaaccgactgcgtgcagatcgaccagcgtcgcccccagccgcgcccacagggagccgccgcatga

SEQ ID NO: 517516 - DNA, 468 bp, Stenotrophomonas maltophilia
atggccaggcgtagacgctcctccaatgagagcaaagctgtcgaacagctgatcaaactcgtggtcaagggaattggttcgttggtcaccgccctgctcgtctcccgcgccacgtcaaaagcgaaacgcagttccaccaagtcgaaggtgcagagcagcgactcgccgagcggtttctaccaggaagtagttggtgagaagagctatcagggcgctcttcgatccaccgccggccgcggtgaggttcggctggagtgccaggcggaggtatcgcctgaagacggcaacccgtacgacgaccaagccgtcgtcgtcactgtcagaggcgagactgttggctaccttccacgcgccacagctcgccgctatcggaagctccacggacataccagtacgaattgtggtgcgctgatagtcggaggcggcaggggcagatcactcgggatctggctcgacctacagctctga

SEQ ID NO: 517517 - DNA, 528 bp, Stenotrophomonas maltophilia
atgggtgcatggaagcgaattgccgctgcaacagtcatgctggcagcactggtcaatggaacggctgagggagcagatctcaccgaggaacagcgcaccgttgtgcaggtgttcgatgctccaggcgcagacaaggtcgaggtgttccgcgcaggccgacagtggattgcggagaacttccgctccgccaaggccgtgatcgagtatgagagcgcggcggacggaacgatcatcggaaaaggcttcattccctacccatgcgccagcgcgtgggagtgcgtgggcaagcctgattggaaggtccccttcactctccgatttgaagcaaaggatgagcgctttcgactgaccttcactgatcttcgtatccagtggccagctaagtttgccaatggcgttacgcagccggccttcgacggtgtggttcgcactcagaaggatatggacaagatccggcccaagctgctgcttatgggcgaagggatccgcgcgtctgtcgcccgtggcgcatcgtcagacaattggtga

SEQ ID NO: 517518 - DNA, 486 bp, Stenotrophomonas maltophilia
atgcagaccctccgcacctacctctcgaccctgagccccgcccaacaggcggtcttcgccgagcgcgcaggcaccacgatcggttacctacgcaaagcgctgagcaagcgacagcgcttcgacggtgccctggtccggcagctgaacctcgaaagcgccggctccgtgtcgctgaccgacctgcgtccggatatctggccgggcgacgagaagccgcagccgacggtggttgagcagatccgtggcgaggtagacagccgcatgagcaagcgcgcgctgcgcgctcggctgggggtgtcgaacgacaagcagctggccaaggtgctgcagctgccagtggagcaggtagagggctgggcggaggagggtgcgcttcctgcgcacccgagcatccgccggctgttgggcgtccaggaagagagccaggcgccaagcgcgccggcggacccggacgaagaccgaatcatccccgtggaggctgcctga

SEQ ID NO: 517519 - DNA, 255 bp, Stenotrophomonas maltophilia
atggacgattcacaggagcagaagccgctggcaccggtggccggctgggacagcggtgtggtcacgcagtacgggatcggcttcttcacgctgaagtacctggtgagcccgacagagaaagttgcgcaagctcattcgagccccaactacgcgctgacctcagttcaacttcgcgaactgggacagcgaatgctgacgctcgcagagcatctggaacggaaccctccgaccagcgccgggtctccacagcactga

SEQ ID NO: 517520 - DNA, 567 bp, Stenotrophomonas maltophilia
gtgagcgaccaggccacggcctacctgtgggagttctggaagcagatgacggccatgttcccggggaagtgggagcgcgagaacggcgcggccccggtgaagaaggacggcagcctgaccatcgccggcacgacctggttccaggtgctgaagggccgcacggtggcgcagcacgcgaagggcatgcagtgctgcctgaccgagggccgcgagtggccgccgaaccctggccgcttcctgcagatgtgcctggatgttccggtgatcgccacggtggagcgcgagatggcgcctggccgtccgcagagcgggttcacggtgctggtgcgctcgctgctggacctgcacgtctacgccgcggcggagaacgggtttcagcagcgccggatgctggaggaggcctacacgcgcgctgtgcagcacgtcgtggacgggaagcccctgccgcagcagctgctggcggtcgagcaggagaagcacggcgtgcacccggtgcgcgatcgcgagtcagcccgcgcggccatggcgcgcgcagccgcagacctcgggttcggggagggcgcgtga

SEQ ID NO: 517521 - DNA, 135 bp, Stenotrophomonas maltophilia
gtgagcaagcacgacacggtgcggctgctgcacgccgagcgctgcagcgtggtggagatctccctggctgtgggctggctgccgtgcaacgtgcgctggttcatccgcaactggatcgacgccgatggcgactga

SEQ ID NO: 517522 - DNA, 201 bp, Stenotrophomonas maltophilia
atggcgactgacgcggagctggcgcagtccgaacaggccgggcgctgggcacgcgatgcgtgccgggcccgggaatcggcaccgcgctatgagatgggcatggacgggctgcagcgccgccagcgctggcaagccgggtgggacaagcgggaccaggaactgagcgcggcacgccgcgagacgacgaggaagacgcgctga

SEQ ID NO: 517523 - DNA, 204 bp, Stenotrophomonas maltophilia
atggatttcaccaactacaacacgcgcagccggtacgccaaggagatcaacgccgggtactcggcgcacttggccggagtttcgctggatttctgtccgttcgaccgcgcgacaaatctcgagaaacggcaggcatggcagcacggctgggatttggctgatgacgaccactaccggcaggggcgtcccgcagatgtggtctaa

SEQ ID NO: 517524 - DNA, 348 bp, Stenotrophomonas maltophilia
atgaaggatcgaaccaccagctacgcgggccaggttcgcgcgctgttcgaagctgcgccgcaggcgcggctgcagctgtgcgaaatgtacgagagggcgaacgccagcactgttctgcatcgtgagcggatcagcagcgcggcgcgcgaccttgttctggccggctacctggtcaaggacggaaaggggaagaaggccgcgttccgcgcctcgggcctgggcatgcctcgcaagttcatcgtcaccgccgagcagcgggagcagtcccgggccgacaaggtggtcaagcaggctatctaccgggcggccaagcgcgccggccgcacccctcgcgtgccggcaagatga

SEQ ID NO: 517525 - DNA, 339 bp, Stenotrophomonas maltophilia
atgaagcgatgccccttctgcggtagcggcgacgtaggcgtgcatgagttccttgacggcgaaggcgaccggctgttcgccgttggatgcagcgggtgcggcagccagggagccccgcacatcccgcttatggatgacgctcggccggcagctatcgcgtcatgggaacgccgggcaccggctattgagtggcagcccatttcttgggcgccacaggatggaacgcggctgatgctgtgggacgctgtgagcaagcggccggtgttcgccagttggcgcgggggcaacccggcgatcacgcactatgcggccgagccggccggcccggaggtggcctga

SEQ ID NO: 517526 - DNA, 417 bp, Stenotrophomonas maltophilia
atgaatggcctcaggatcgcgcaggatctttacttcatgggtttcccgtttggctgggccgccgaaatggatgctaatctgaaccgtgattttccgatgccgtttatcaagaaagccatagtttcggccgtttgccctccgtctcctggagttcaggacgtcctgttccttgacgggcacaacaaccccgggttctctggtggcccggtcgtttttgtcgatgcaaacacgggagcgcacaaaatttgtggggttgtgagtggatatcggattcagcctgagaacgtgttcgtcggcgaggaaagatttgaggcctacgtgcaggcaaattccggactgatgatttgcgagcagatcatgcgcgtcgatgaagtcatcgctaagaacccgattggactgcttaaaccggatacttga

SEQ ID NO: 517527 - DNA, 429 bp, Stenotrophomonas maltophilia
atggcgaacccgcgcaaaccgacatcgctgaaagtggtggccggcacggatcgccccgaccgcgcgccgccggcgccagcttctgaccttccgctggtgtcggacgttccgccggcaccggactggctgccgaatgctcatgccatcaaggagtgggaccggctcgcgccgattctccacgcaaacaagctgctcaccgaggccgggctttcggcgttcggccagctctgcgctctgcacggaaacaccgttcagctgtacgccgccgggctggcgcccgtggcgtcgatggtctcccagctgcgcgggctgatgaacgactttggcctgacgccggttgcccagggcaaggtgaagccatccggagaggtcgagaagacggggaacgcgttcgccagcaatggtgcgaagcggaagccccgtgcgtga

SEQ ID NO: 517528 - DNA, 1695 bp, Stenotrophomonas maltophilia
gtgcgtgattacgtcggcatcgccacggcctatgcggaagaggccgtagccgacaagaagggccggaagttcgggaagtgggtgcgtctggccgcgaaacggtttcttgcggacctgaagcgagcgaggcggaagcggccgccgttcgtcttcgacgagtggcatgcctgcgacccgtgcgacttcatcgagaagctgccgcacgtcgaagggaagtgggcgcggcctgagatcgagctgcatcggtcacatgtgttcttcgtcgtgcagttgttcgggttccgcaacctggacggcagcaggcgtttcacctcggctctgttcgcagtagcgcgcaagaacgccaagtcgaccctggcagcggcgatcctgctgtactgccagtgctgtgaggaggaggagggcgcccagatcatctcggcggccaccactggcagccaggcgcgcatcatcttcaacgtcgccaagcggatgacggagaaaacaccggacctgcaggaggctttcggcttggcctgctgggccaactcgatcagccggatggagaccggggccagcttcaagccgatcaacgccaaggccagcacgcaggacggcctgaatccgtcccatgtgggcttggacgagatccatgcccacaagtcggcggacctgctgaacgtgctgacctccgcggccggcgctcgcagcaacccgctgtggctttacaccacgaccgaggggtacaccaaccctggcccatggggagaaattcggcagttcgccaagcaggtgctgcagggcatcctcggcgattcggccgaccacttcctggtggtgttctacgcggtcgacgaggaagacgacgagttcgacgagtcggcgtggcccaaggccaatccgctcatggacgcgaacccgcacctgctgaaggccatccggaaggaggctgtcgaagcgcggcagatgccatccaagcttgccgaattcaagatcaagcggctcaaccgaccggcgtcctctgcaaccggctgggtcgacctggcgaagtggcagaagggtggtgggacggtcgatcttaactggctcgccgggcatccctgctgggcgggcttggacctcgcgagtaacctcgacctgacctcctggcggctggtgtggaaggtcgacgagatctactacacatggggccgccggttcgtcccagaggatgcagttcgcgctcgaacagagcgtggggtcgtgccctacgcgggctgggtcgcggccggcctgatcgaagtgactgaaggcgaagtcactgactaccaggtggtagaggcgcgcatgagggaggacatcgccaggttcaatcccctggtgatcggcttcgacaagtggaacgcccaggagatcacccagcggctgctggcggagggtcatccgctgatcgagttcggccagaccacgcagaactatcacccggcgatgcaagagctcgagcgcgcctacatcagcaagaagatccggcacgggaacgacccggttctgaactggtgcgcgtcgaacctcatcgctgtgaaggacggaaacctgaacatgaagcctgacaaaaagcgctcgccggacaagatcgacgacatgtcgaccctgttgatggccatcgggctgagcatgccggcggcctcgcaaggtgaagatgccggtgatttcattgccagcccggtgatcggatga

SEQ ID NO: 517529 - DNA, 360 bp, Stenotrophomonas maltophilia
atggccaaggtcatttcactcacctcgttcgaacaccacggaagccgtagccgcggcgcggagttcgatgtatccaaccaacacgcggacttgctggtcaagcgtggcctcgtgaagctggctggcgaggcggcggccgccggcggtggtccggctgctccgactggcgcggccagcgatggcgctcagctcgtccgccagaaggctgccgacgcgatcgcggcaattgcggcggtgaccgatctcgaattgctgggcgcggcgctgaaggcggagaccgccaagggcgaaaaagcccgcgccaccgtgatcgaagccatcgaaaccgccatcaaggcggcgacgccggctcaggcctga

SEQ ID NO: 517530 - DNA, 345 bp, Stenotrophomonas maltophilia
atgcagctgatcaccatcgagcaggcccggcagcactgccgggccgatagcgccgacgacgccatgctggagctctacggcggcgccgccgaggaggcggcgcaggagttcatgaaccggaaggtgttccctgacgccgccagcatggcggccgctgtgctggccggcaccgcagggtgcgacccgatggtggtgaccgacgccatacgcgcggcggttctgctgatgctgggacacctctacatgacccgcgaggacgtgcagtccagcgcaggagccacagtgaagatcccgatgggtgctcacagcctgctgtggccgcaccgggtcgggatcggcgtctga

SEQ ID NO: 517531 - DNA, 207 bp, Stenotrophomonas maltophilia
atgaacgagcaaagcgaattgctggccgcgctgcgtgcccagaccgaggcgacgcaccagctggtggcggcgctgcaggaaaagacgaaggccgacgtggagaacgccaaggcggttaaccggctggtggactacctctgcgacagcgaaggcggcgaggcggaggcggctggctccggcaactacctgagcgggaagccgcgatga

SEQ ID NO: 517532 - DNA, 366 bp, Stenotrophomonas maltophilia
atgatcgccccgatcttccagctgtgcctgacctcgcaggcagtcctgcaggccttcggggcggatccgacgcgggtctattccttcggcctgatcgagaagccgccagcgcagccttacgcggtctggcagacggtgtccggaatccccgagaactacctggcccagcggccggatgtggacgcgctgaccacgcagatcgacgtctatgcgaaggacgaggcatcgctgaaccaggctgccaaagccctacgcgatgccttcgaaccccgcgggtacatcacacgctggggcggccagatgctcgacgccgaaacgaagctgctgcgcctgtcgttcgatgtggactggctggtcccccggtaa

SEQ ID NO: 517533 - DNA, 162 bp, Stenotrophomonas maltophilia
ttgaacctgggcggccggctggacgcagcagcagggatgttcgccgcgctgttcgccaactcgaaccgcaagccaggcagcgctcagttcaaggccaccgacttcatgccctacgtggatgccgagcccatcagcctcgaggaggcgatgcagcagtggtag

SEQ ID NO: 517534 - DNA, 2490 bp, Stenotrophomonas maltophilia
atgtcccggtcccttggtacgctgaccatcgacgttatcgccgaggtgggcggcttcgcgtccggcttggacaagtccgagcgccgggcggagaagtggcgcaagaaggtcgaggccgaggcgaagctggccggcattgctctgggcaccgccatcgccgccgcggtggtaatgatcgggcgcaacaccatcgcggcagagcgcgaggttgcccagctggatgccatcatccgctccaccggtggcgcggccggttatacccggcagcagctgctggacatggccgacaccctgtcgagcaagtcaacgttcagcggcggcgagatcgtcgaggcccagacccgcctgctttcgtactcgggcatcctggcgtccaacatcccgcgtgccatgcaggccgtcattgaccagtcggcccgcctcggcatcagtgtcagccagtcggcggagaccatcggccgtgcgctggaatctcccagcaaggcagccgccgcgctcgcccagcagggcttcggcgctgccttcacgaaggaggtgcgcggcacgatcgacgaactggtcaaggccggcaaggaaggcgaagcccaggtgatgatcctggagatccttgaagagtcgtacgccggcgctgcgcaggcggcgcgtgacaccttcggcggcgcgctgcaggcccttggcaacaccctcaacgacatcaccaccgcgaaggacgggagcctgaagggggccaccgacgcggtcaatacgctgattgagacgctgaacgacccggccacgagagagggtttcaacaacctgatctcgggtgcggttgaagccatcggaacgatggccaagttcgcatccaccgcggccaacgtgaccaagttcgtggccgagagcctggccgcccgcgtcaacggtcctgacatggccgacgtggtgcgcgtggaagaccgcatcgagcgcctgcagaagaccctggcggctgtgcagaactcgaagggcacgctgggcttctccatgctcaacgccagcgagctgattccgtccgatctgatttccggcccggacaaggtaatgcagcgcctgcgtggcgagatcgccaacgagcagcggaagctggaagagggccggcgcatgctggagctggcggccaaggcggccagtgcagcgaaggtcgagccgacaggagtcaccggcgatgctgctgcccgcgacgccgcggccgcagccgcagctgatgccgagaatgccaagaagcgcttggccgggcagcagcagctgcagcgtgcctatgagtcctcctcactgcagctgcaacgccagatcgcgctgttcgacaccagttcggatcgttcgggccgggctacggagttgcagcggctgaactttgaaatggcgtacggtagcctgcaggggctgaacgctgcgcaccaggagcgactgcgcgcgctggccgccgagattgatcgattggctggggtgaagtcggccaacgaagaggctgccaaggccaccgaagctttcgtcaagctgaaggacgagctcaacaagaaggactcgctgggcgtcgacctggcacgtgatcgtttgaaggtgctgcaggccgccgcggctgtgggcgcagccaatgatgctgactacgttgccaccgctggaaaagtgatcgaccaggtcggcggcaatggatcatccgagtacaaggggcctgacgctcttttcggtgggtcccgaggcgaattctccaagatcgatgaagcggaagaggccgagaagaagaagctgcagtcccagcttgaagcgctggaggagcagaggcaggctcgcctcgatctggaaacggactggaacgccaaggaactgaagctccgcgaggaacatcaggcgaacctcgaccggcttgaccgggctcgctggcaggtggctgcgacggaggctcagtccgcattgggcagcatcaccgacgtgatgcgcaccagcttcggcgagcagtccgccctctacaaggcggcatttgtagtgcagaaggccgccgcgatcgcacagtcggtcattgccattcagcagggcatggcgatggctgcggcaaacccgtggccgaccaaccttgccgccattgcatcggtagcggcggcgactgcaggcatcgtttcgaacattgccgcggtcggcatggcccacgacggcatcgacagcgttcccgaaacaggaacttggttgctgcagaagggggagcgggtcaccacggcggccaccagcgcaaagctggatgcaaccctggaccgcgtctcccgcgataccgacggtggaggcaggggcgacaccaacgagttcaacttcaacgtcaacggatccatcagcgagcgagagcggttgatgctgcaagagacggtcacccgcgccgtggcgctggcgcgccaagaccgggttgcagacaccacctccggcaccggcccgcaatctcgcgcaatgcggtcgaactggaatgtcagaaggaaggtcgggtaa

SEQ ID NO: 517535 - DNA, 822 bp, Stenotrophomonas maltophilia
atgggcactgatagaccggcgatcccagagaacatcaagcgaattgtcaggcagagatgcttttttggatgcgtgatgtgtggcgcaccaatctatcaatacgatcacatgatcgaatatgcgcatacccagagccacgaggcggataatctaaccctcctctgcggaacgcaccacgacctcaagacacgcaagctccttagcgtcgaccaagtcagggcggccaatgagaatccattcaatgcaagcagggaaagctctgctcccctacccataccgaggtcgagcgagttcaccgtagtctgcggaacgaatcaagcaatgctatttgggcaaacacccgctgccgattgcattgcctttcttgtaaacgaaaccccttttataaccatccatcgcgacgaaggtggagagaccatatccgctctcttcactgatgccatgggaattccgatagctgtgattactagaggcgaactcacgtttagccgctacgtgtgggatcacacatcctccgcaaatcgatttacctccagatccggcccgggcgccatagttcttgatttcgaaattgccccagggcgcctagacgtacggaaaggatggctgatcgatagttccagtcaggatggattcgtcatcaacaccgatcaggcaatcacccaactgggaggggttcctcgaggagcatcgtacagaggatgcttcgcacaaggttccattggatttgctctatggaacccagacgcatgccgtcgcactgagcggccaaacggtgtcgccttcatgatctccgccggaagcatacccagacaacgctag

SEQ ID NO: 517536 - DNA, 507 bp, Stenotrophomonas maltophilia
atgatcccgtcctccagctaccagggtttccgcgttgcgcctatcccatcggggtgggtgcagtcgggcgagcgctggtcgctctggtacaacggccgagagacggcaagcgtcgcgcctgatggccggccggggcttcgcctgtggatgcaaggccagaagatgtggcaggtgaaggaggcgagggtggccagcgtgcgccagggaaagcgcttcgctgagcgctggtgcgcggtccggctctacccgggtctgccgctgcgcgaggcagtggaccgcctgaccgatagcacacccatcgcgccgacagcgccgctgccagccttgcctccgacccgcgagcaacagcagcaggcccagcggctggacgaggccgctgctgccgcgtccgcccgggtgatggcggcactggagccgatccggccgccggcggagaccaagcccagggcgacggatccgaggaaggggcggttgagcgcgagcgggcggcagcaccctcgcatttga

SEQ ID NO: 517537 - DNA, 663 bp, Stenotrophomonas maltophilia
atggatgtcaatagcgcgggtcagtttggggatgcgggtgactacgaccgagcccgcaaaagcctttacgacgtctccaacctcctttttgcatttcctccgcagcgggagaacgagaggcacttcctgcttgcggctgtcaggcgaaccctttctttggagagggcgttcctgcaggccgttgatgaccacaacggccagatggctatgacaatggtccgtttgaatctcgatactgttgctcgttcgtatgccctgtattgggcggaaaagacgccgggcatgactgccgagtcgttcgcacgcagggttgctgcgggtgagagcatcaaggatttcaaatttctgggcgggaaggaaaaggccactgacaagtggctgattgagcagataaccccgcttgagtcttggataaaagacgtctatcgcacgacctctggcgccatccatttttccgacttccatataaagcagctgttgcagcagcacgatggtagttctccacggagtgacggtgcagtggttgtcagtctagttctgggccctactgattttgagtcctcgcccaccagatatgatgaagtccgcgctgcatttcttcatacaacgctcttgcttctgaacttgatttttcatcgtgctaagagggccggtgttgcctag

SEQ ID NO: 517538 - DNA, 486 bp, Stenotrophomonas maltophilia
atgtctaatccgatgttccatcctgccctctacgttctgctgctggcgtcgttgtccggcgaccgcgctcctgcgcaggcgctggccgactgggagctgcagggtcgtgccgacggcctggcgcgaccagacaccccctgccaggatttcctgcaggcaatggggcggaagccggcagggctggaatatgtgggctgcacccaggacgacgtgtcctacatcaagccgatgcaagcccactaccgcgttgccggcgcccgcgccgagcaggtcgaagcgtatctgcatgcaacgttcggcatgcccgtgctgcgctacacctgctgcggctggagcaatggcgggccctacacctggcgtgaaggtgcagacacgctgaggtaccagatcgggatgggcgtggagtcgctgccgcatgatcgggccgagtggcggcgcatcgaagcattcaacgttacggtggaggtgtttcggcagagcccgtag

SEQ ID NO: 517539 - DNA, 657 bp, Stenotrophomonas maltophilia
atgcaacttccagttatggaatcggttggccaggttatattaagcaagatgccgggaaatatggatgggcaggtgcctgacggtggagcaataatattgaatggtagaggtgggtacatgaagtgctttgcgatgctttttctgcttgccatttctagcgtggcgttggcagaagggcgttgcccgccagggcagtacccaattggagggcagggtgtgggcggctgtgcgcccatacctggtggacaagccagtgctgagagcggcagcccagtgccaacgggtagatgggaaacccggtggggtgcgctagcccaggatgtgggtcgtcgaacaagtgaggttttggcgattggtgtggcggaggccagaaaatcaaagcgagaagcgaagtctctagcgctctctgagtgtcggcggatgggtgggcaagagtgtgaaattattctcgaatatcacaatcagtgcgtcgcactagccggaccggtgattggttctgttcccctaatgaacgtgaagactgtggcatatcgctcgccgaatgagcgcgatgcgaaggcagaatcagtgcggctctgtgaggccgaaggtaaagggcgcagttgtgccgttatctactctgcgtgcagtatgtctgagtttaagtctttccgctga

SEQ ID NO: 517540 - DNA, 357 bp, Stenotrophomonas maltophilia
atgggctccgaatgggttgcatttgcccgctcgccgaacggcacactcctcgcatggagcgttcgccaacacaaacagaaggctgccgagaaagaggcattgaagacctgtaacaagcgcagcggaacacagtgcgagatcattgcctcgttcactgaaagatgtgcctacgcattgcagcactacgacactggccagtttgaagtggtcttccgcagcgacaacgaattggcactcggcaccgaggtcgcacgccaggcctgccccaacggctgccgaccggttcatttcacttgcggccggccagtcaacctgtatggccgtggtcccgaccccggacccaactggtctccttga

SEQ ID NO: 517541 - DNA, 1794 bp, Stenotrophomonas maltophilia
atgacgtctgtccgataccgcgtgaaggccgcagcggcgaagatcggggaaccacccgtccatcggaacccgaccgtgtcccgacgccttgcccgttccctgctcgccgccgccgtgctggctgccgtgcccgcgctgtcctttgccgccgaccgcattaccggccacaccttcgccacccgttcggaggtgatcgccccccatgcgatggccgccacctcgcagccgctggccacccagatcgcgctggacgtgatgaagggcggtggctcggcggtggatgccgccatcgcggccaacgcagcgctgggcctgatggagcccaccggcaacggcatcggcggcgacctgttcgccatcgtctgggacccgaagacgcagaagctctatggctacaacggctcggggcgctcgccgaaatcgctcaccctggcagagttccagcgccgtggcctgaaggacatcccggccaccggcccgctgccggtgtcagtacctggcgcggtcgacggctggttcgcactgcacgaacgcttcggtcgcaagccgatggccgacaacctggcgccggccatccgctacgcgcgcgagggtcacccggtggccgaggtgatcgcctactactgggaccgctcggtgcccaagctgtcgcagtacccgggcttcaaggagcagttcacgatcaacggccacgccccgcgcaagggcgagatgtggaagaacccgaatctggccagcacgctgcagaagatcgccgatggcggacgcgacgccttctacaagggtgacatcgcccgcaccatcggcgactatttcaaggccaacggtggctacctgagctatcaggacatggctgaccatcatggcgaatgggtcgaaccggtcagcagcaactaccgtggctacgacgtgtgggaactgccgccgaacagccagggcatagccgcgctgcagatcctcaacgtgctggaaggctacgacttctcgaagatcccgtttggttcaccggagcatgtgcacctgttcgttgaagcgaagaagctggccttcgccgaccgtgcacgcttctacgccgacatggcgttccagccggcaccggtgcagaagctgatttccaaggaatacgccgcgcagcgccgcgcgctgatctcgatggacaaggcgttgaaggaagtgcagccgggcacgccgaagcagctggaggagggcgacacgatctacatgaccgtggccgacgccgacggcatgatggtctcgctgatccagtccaactaccgtggcatgggcagcggcatggcaccgcccggtctgggtttcatcctgcaggaccgcggcgagatgttcgtgctgcagaagaaccatcccaacggctacgcgccgggcaagcgccccttccagaccatcattccggcgttcatcaccaagggcggcaagccgtatgccagcttcggcgtgatgggcggcgcgatgcagccgcagggccacgcgcagatcgtgatgaacctggtggacttcggcatgaacctgcaggaagccggtgatgcgccgcgcatccagcacgaaggctcgactgaaccgacgggtcaggccacggcgatgaccgacggtggtgaagtgaatctggaaaccggcttcccgtacgagacggtgcgcgcgctgatgcgcaaggggcatcgcatcgtgttcgccgatggcccgtatggcgggtaccaggcgatcatgcgtgatcccgagaccggggtttactacggtgcttcggagagccgcaaggatgggcaggcggcggggtattga

SEQ ID NO: 517542 - DNA, 615 bp, Stenotrophomonas maltophilia
atgtatccctcggggttggatctggcgtccaactcccgggggtcacttcaccatgggggctcgatggcgccatccatggcgccaacggtcctgcaaacccacgccgcccggcctttgacagtttcctgcgcgcgtccaaccacggaaaagaaaaagaaaagcagaagcgggtcgctcgctgcgctcgctctgtgtcgaccacggtcgacacctacccaacagccgcaattgccagtagatccacgccatgcgtggatgattcattcgatgtctgacagatgtgccgaccaacggtcggcacccaccaacagccgcgtgaacctgtcgaaggcggggtactgtgggtttgcggggtgtgagccgcatggatgcggcgaccaagcctacaaggacgtacttgcggcggccccgcaaacccacagtaccccgccatcccacggaatgcccgctgttgctgttgctgttgctgttgaggttagcggccagcggccggcactaccgcgggtgcagggctgcaagccctgcaggacaccccttaccccgccatcaccgcttcgatctcgtcggcgctgcgcgccaggccttcggtcagcacgcgatggccatcgtcggtga

SEQ ID NO: 517543 - DNA, 558 bp, Stenotrophomonas maltophilia
gtgaacgctcttcagcgcatcgccgccgcagtcggcttcgccctactcgtttcgtccggctcctcagttttcgccgccaacgccgtcatcgtgggcggggcagagatgtaccccaccaggaccatcgtcgagaacgccgtcaattccaaggatcacaccaccctcgttgcagcggtcaaagcagccggcctggtcgacaccctcaacggcgccgggcccttcactgttttcgcgcccaccaatgcggccttcgaaaaattgcctgcaggcactgtcgatacgctggtgaagccggaaaacaaggcacagctgacccggatcctgacctaccacgtcgtcccgggcagctacagttcggcgcagcttctggccgatgcccgcaagcacggcggcaaggccaccctcaagaccgtgcagggtgagcctctcaccgtggcgctccacgatggcaagctctggatcatcgacgcaaagggtggcaaggcaggcatcagcactgcagatgtcagccagtccaacggcgtcatccacgtggtcgacaccgtgctgatgccctag

SEQ ID NO: 517544 - DNA, 3129 bp, Stenotrophomonas maltophilia
atgagccgcgcattggcgaagttccggtcccgggccatgttcaccttcgtgggtggcgccctggtcatcaatcctgcctttgcgcaggacgcagcaccggcgaccgggcagcagccgcagagccagtcgcagcccacccagctcgatgcagtgcaggtcacgggcatacgcaacagcctgagccaggccatggacatcaagcgcgactcggcgggcgtggtcgacgcgatcagcgccgaggacatcggcaagttccccgataccaatcttgccgaatcgttgcagcgcatcaccggcatctccatcgagcgccgtgacggcgagggtgcgcaggtgaccgcgcgtggcttcggcccccagttcaacatggtcacgctcaacggtcggcagatgccgggtgccgatgcattcggtgcctctggacaggtcgccatcggcggtgtcgacggcggcacccgcgccttcaatttcgcgcagctggccgccgaggccatcaatggcatcgaggtctacaagaccagccaggcacaggtgcccagcggtggcatcggtgcgacgatcaacatcctgacctcgcgcccgcttgatcacgccggcatcgtggccaacgccggggcgaagctggtctccgaccagagtcagccgttcgacaatgacctgacaccggagctgtcgggcatcttcagctacagcaatccggaaaagacctttggcgtcagcctcagcgcgagccagcagaagcgcaagggtggctcggtgcaggccacggagaactactggaacgtgcagccgtggacagggtcgatgccgggcaatccgaccgtggtcaatgccccggccgtcggccagctttacgcgcggcccaacgacctgcgctacgcgttctccgaattcgaacgcgaacgcgtcaacggccaggccgtgctgcagttcgcaccgacggacagcctgaccctgaccgtggattacacctactcgaccaacgaaatcaccgagaatcgtggcgagcagggcatgtggctgcagaacagcaactacaccaacgtcgagttcgacaccagtggcgccgtcgcgacgccggtctacatccgtgaaatcgccggcaccaaggatttcggcctggaacagcagcgcagcatgcaggagtacaagctgggctcgctgggcttcaacgccgtctggaatgtcagcgaccgcttcaagctcagcttcgatgcgcacaactcgaagaacgagagccgcccgaatgatccgctgaccggcggtggttcgatcttcatgagcatcgccggcaccaacaactgcacccgtggcccgcattgtggcggctcctgggtgcaggaattgaacttcaacaatggcctgccggttggcacccaggtctggtatcccagcaccgccgatgcggtcgccgggaccaatggcgtggtcaatccgggcttccaggaaggcgaggttggcacgcaggtgctgcgcgtcaacgcgcagacccagatcagcgagatcaagcaggcgcgcgtcgatggcgaatggaacttcgaccacggccgcttccagttcggcgtggacaccaacaagtccaccacccaccgcatccaggccgccgaggcctactcgaccctgggcgactggggcgtggccaacgtggaccgggataccgccgcaggcctgatggacctgctgcagccggtcagcatcgtcggcctgttcgacgactacagtgccaacagctggccggcctggcgcggcaatgccggacagctcgcgcaatgggcatcgggcgagtacggcgtcggcctgggtgtgaacccgcaacgcgcggccgacaacttcgtggaagagaagaccaaggcggcgtacttccaggtggaactggacggggagctgggcggcatgcgcaccaacacccgcttgggcgtgcgctatgaaaccaccgacgtggtgtcgacctcggtcattgccgttcccgaatccatcgagtggcaggccaacaacgatttccgcatcgtgctgtccgatgagcagcagcccttcacggagaaggcgcggtacagctacatcctgcccaaccttgatttcagcatcgacctcaccgaggagctgaagggacgcgtttcgttcggcaagagcatcgcccgcgcgccgtacggcaatctctatgcgggacccggggcccagcagccgttcggctcggtgctgatcgatccctcgtcgcgcgccagcggcaactcgcagaacccgagcctgaagccgctggaatcggacaacctcgacctggggctggagtggtacttcgccgatgccagctatgtgtcattgacctactggaacaagtcggtcagcaacttcatcggcaacaccgtcgtccaggaaagcctgtacggcctcaccgaccccacctccgggccggatgcacgggcggcgttggacttcctgaccagcggtgcctgcgtcgcccaggtcgggccggccaacgcggccgcctgctcggccaacgacacctcgctgttcaccgcactggcgttgctgcgcaacaatcctgctggcctgggcgcctacaacggaaccgatgcgcaggttctggctaccgaagcggcctacgatctgtatgggcaggccaacgatccgctgtaccagttcaacgtcaatcgcccgatcaaccagaacaagtccaagctgcacggctgggagctgggcgggcagtacttcttcggtgacaccgggttcggcgtactggccaactacacggtggtgaaaggtgatgtcggctacaacaacggcggcgatccgggtatcgaccagttctcgctcaccggcctgagcgacaccgccaacgccatgctgatgtacgagaagtacgggtggtcggtgcgactggcatggaactggcgcgaccagtacctgatcctggccaaccagggctccagccgcaatccgtactatgtggagccgtacgagcagtgggatctcagcgtcaactacgcgctcgatgaccactggtccttcagcctggaggcgatcaacctgaccggtgaggatgtgcggtggcgctcgcgcacgtcgcagatgatcgtcaagctggcagaccagagcccgcgctacatgctgggcgtccgctacaagttctga

SEQ ID NO: 517545 - DNA, 543 bp, Stenotrophomonas maltophilia
atggcgacgccagcacgcaagagcatgaagaaggaaagtgagaccgccagtgaatcgctcaatggctggaccaggaagcgccgaaccatgcttcggttcattcgaccaggcgacgtgttctgctttactcgaaacgatgggctctactacttcggacagatcatttccgaaaactccatgggtcattttgcgcatatccttgatatccgccggagagaggcgtcgctcactccagtcgagctgcagaaagctaaacccgttatgaagcccactgtgctggatagctactcactctttgacagaaaaagcgatcaagatggcgattggcgaatcatcggtcgacatgaacccgtccatgcgactgacctggagcactacttcttcgtctacggcacccctgggaactggtgcaaagtgaacgcaaccaactccgttcactgcgctgcaaccgaagtagaggcgatggttctacccccctattttcccttgaacaacttcaagatgtggagggagatcgacaccctctcccatcggtgggcgtaa

SEQ ID NO: 517546 - DNA, 1197 bp, Stenotrophomonas maltophilia
atgggcgaggaacaccgcgaactcgtccgcacccagccggccgacccagtcaccatcacgcaccgccgccaccagatagtcggcgaaactgcgcagcatctggtcaccggcggcatggccgaagctgtcgttgaccagcttgaaatggtccaggttgatatagcacagcgcgtgcgtgccgccttcgctgcgcacctgcaacagcgcgcgttccagcagccgttcgatctcgcggcggttgatcaggccggtcagcgggtcatggctggcgtggtgctcgatctcgcgcgccagtgcatggttctggctgacgtcctcgatgatcgcgaacaccgacaggccaccggcggcgctgcgcacaccggtgccgctccagcggccccagaccaggctgccatcgcgacggcggaagcgcagttcgctcggccgcagctgccggtcccagtcgatacggcccaccccatcgatgacaagctcgccgtccatcagcagatcgcccaacgacatctgcagcagcacgtcgcgccggtagtcgaggatatcggccatcgcctggttggcttcgatcaccttgccttcggtgtcgagcttgagcatgccgacattggcctgatagaaggcggcgcggaagcggctttcatgttcggtcaggtccttgccgacgcggcgcgcgagggccaccgccatcaggctgatcgcaagcaccgacagcccaccaaccacgagcgtggcgatccgcaccatcgtggccatgcgcagcaacgctcgggaaaacgactgcgcctgcacctgcagccgccggtccagatcgcgcagctgttgcaggtaacggtcgcggtcggccactggcagcgtgccttcggcgtgcgccgactgcagctcggcgaccagccgctgcaccgccaacaggtcatcgtcggtctgccgccacaacgcggttgcttcgcggaaggcgccgatgtcgcgtgcatagcggaacgagaacaccagacgcgggatatcggcatgcgcgttgccaccctgcaggaagccctgccgggccttctcctcgtccggtaccgcctgttccagcgccagccgggcctgcagatctcccaacggaatccgcagggcctggcgcgcgtcctccaggtcctgggcatggccgcgcgccaggtagcggctcagcgcagcagtggcatcctgctgcccgcgtga

SEQ ID NO: 517547 - DNA, 834 bp, Stenotrophomonas maltophilia
atggccctttacaacatcgcggaacgtttaagcacggctaaagaactaatcagcaggggcgatgacgcgtcattcatctacgccgcgctggaactacgattctgcttggaatctgtggcttatcagaacttggctgcatacggtgaagacgtttccaccgagcttgctcgcgaatggcgaccggaccagatcatcaaaatgctggccacgttcgaccccaactctgatcaaacagccagcttttccatctcggtcacgccgctgcccgaagacctcgatttcgcctcaactgacttgaaggccgctttcaaggacaaggattttttgccgataggcgaggccaaacgcattccttggggcaagtttcgcagttactacaactcgttggggagctttctccatttgcgcaaagatctgacgaacgcacggccgaagatcgaaaggctccgtgttctcatcggtgagctggaagaggttgcgagctcgacgctgatcgctgccggcaaggatctcgcgacgggcaaatgcgtcgactgcggccatgtgctgattctcggcccggcagagcaagcgggggacaagcccgttttctgcccgaataccaagtgcaactcgagctatttggccatcaagggggacccggagcgacgggtgcagaaggtcgaagccctggggctgcgctgcgaatgcggggccatcgttcctatcttgccagagaggctcctcaagcctgcggtttgcccggaatgtgggttgaccgtttgcgcagtcattgctgcaaaggcaagagtgctaggggtgccgcccactcgcgagggagatctgagcggctag

SEQ ID NO: 517548 - DNA, 1533 bp, Stenotrophomonas maltophilia
ttgcccaaacctctgctgatttcgcgctcagccggtctgtatgcgcgcttctttgttcctaccgatctccgagccctgattggctcgcgttacctcgtgcgctcgttgggtaatcggcgtggcgaccatgccaggctggtcgccgcaatgatggggatggcgctatgctcggccttcgatgccatgcggaaagggatgaccgtggatctcgacgaactgctggagaaggttcgcagtggggcgatcaaggaactgacgttgagcgacgtgacgttgccggacggcacgcgcatcgcccaggctcagttggacacgccggcggatgcggcaatgttcgcagacctgatggatcgctcccggcaagtggagccgagtgaggttacgtctgcgcgggtggccaagcggcgcgaccagatgcgtagcgccagccaaagcatcagcagtcatgcccccaacgctttgatgctgtcgaaggcgatggctgatcacttgagcgacctgaccggggcacgcctgcatcagaagaccgtgctcgaaagccgtcataccctgcgtctgttcgctgggatcatcggtgaagacgtgccggtggcctcgctgacccaggatcacgtccgggcattctttgagggcgtgcgttactggccgtcgaatgcgaccaagcggccggcctaccgagacttgtcggtgcctgaggtcatcaaactggcgaagaggaacgacgaaccagagccggctgcgtggacgatggccaagcaccggcaacggctgagcgtcttcctggtgtcgctggtcgagggcaagcatttggcggtgaaccccttggcaggcatccgggcgatttccacgcctgactcggaagacactggctcacccttcaccgatgccgagctgaaggcgatctttgacccggtggagttcccgaaatgggcgttgaaatacccccatcggtggttcgggccgatcctcgggctttactccggggcgagggtcaacgagatcgcgcagcttcggctggaggacatcgaaaccattgatggagtgcccggcttcttcgttcgcaaggttgggaagaagcagagcgtcaagaacaagcacagcagacggttcatcccgttggctcagccggtgatcgactgcgggttcctggactacgtgaaagaggcgcgggaggctgggctggagcgtctgttccccgacctgcccaactcgacggggttgggctacgggcggcagctgagtcgccagttttccgtctacatcaaacggcaaggcgtgtcagagaagggtcagggcttccacgggttccgtcacaccatcgcttcaaagctcgacgaggcaggggtgtcggcttcagcgattggagcgcttacgggccatggcactggtcagacagtgctggaaaagttctacatcgacaggcgaagcttgcccgaccgcgtcgccacgttggcaaagttgacggaccttcctttgctcccagtctacgaacggactcaattcaaaaacaacctcaaccataaaaccgtctaa

SEQ ID NO: 517549 - DNA, 774 bp, Stenotrophomonas maltophilia
atgaagaagaaccagacaaggatggccaccgccctggtggccacgctgctgttgagtgcacatgtcgtttccgcccaggaagcccgccagtccaacccggagtcaggaaagccgggctttttccgccagcttgggaccagcctgaagaatgcgggccaagaaatgattggggtgaagcccgccggggccaccacccaagcctctggcaaccagccgatctacgccccggtcagcggtgcagggaagctgcccgggctcttcaaatccgataaccaccagcttgcccagcaaggccgactggactggccccgggtcgccctgacattccaggagtggggaacgtccctgccctgctggaccgtcgaggcccgcatctggacaagcccctccgcgtcgaccacagaggtcttccagacctgcgccaatgcagccctgacggagaccgacgacctgggcgacacggccgagctcaacaccgccgccctgtggaaaggcagggatgccctcactggtgttcgggtgccgccaggcaggccccacacaggctcaaaccggtcaaccggccccaaccctcccagccagccgttcgtcctcaacgtgagccgcccaggggtgtccgaccgggccgtcgacgtagcccttcgcgtggcctgggtcagcggcttcatccaaacatcggatctgcacccgggagccagcggtctactgacgcccttcaaagattcgcggatgtggctcgctgggttcaagccggaaggcaaccgagaccggtaa

SEQ ID NO: 517550 - DNA, 159 bp, Stenotrophomonas maltophilia
atggcacttatccagtccatcatcgaactctttgaacgcatggcctcccagacggacccggtctttgctgcggcattgctcctcgtcgtaatggccctctctctggtggggatgtccctctacgtggtcttgaccgcgatcaggaggcgtaaagaatga

SEQ ID NO: 517551 - DNA, 1047 bp, Stenotrophomonas maltophilia
atgttcatctatgtagatgagtctggcagctttgttcctgctgcgaaaagcgacagttggtgcgtcgttgcggggtatgtcgtgccagaggttgccaggaagcgcgtagagcagtccctaggcctgctcaaacggggcttggggcgcggatttcaggatgaggtcaaactgaaagacttgtcggaagcgcagctgaagcgttttctaggcgagcttggcaagtttcaagcaacgctcttcatctctgcgattgaccttggccatcaagatccaaaagtagttttggcccatcaaaagaagcaggtcgagagtgttcgagccaaccgacccaaaatgctctacgaagaagggcgtgcttccatagatgatctgtcgggcaggttggagcgtctgtctccacagctatacacccaaatggtggcgcagatagacctgttggaccaggtctaccggatgactacgctctactacgtccaacggctaccggctacattgagcagcttcaagtggcgcatggatgagaagaactcagcccgtccgctgtttgagcaaacgctgacccatatggcccctggacttatccaggccaagtcgctgcgcgcccctgggatctttgtggagggtttcgattactctcacttcgagaagcgatttagaaccgcacctgatgacattccaacctaccttcaagaagcggttggccacaccatcaagtcagcggtcaacttgggcgcagtcctgcgggattcgaggtttgtccgctcgcatgatgttcctggcgttcaagtggcggacctattggcgtctgcgtggcgcaggctcttgaggggagagttcgatgacaacgacgggatcgcgcatctcttaggccgactgacggttcagcggcagaagccgaacccgcccatccatttgttgttgctgggcgaagagcggctagcagaagggtcagcctatcgtgcggcttcgattgctaaacaaagcgccaggccgatggtctccaagagtgcggccacgggtcatgctcgccacaaagcgaagccttga

SEQ ID NO: 517552 - DNA, 168 bp, Stenotrophomonas maltophilia
atggctggtggtaagtattggtctgggcaggagtgcccgaagactgcgacctatgggcaatacaacgatgcaacgggaacgtatgcgggcagctcgagcgatcgccgcgtcgaaaagggcgaacgtttcccgcccagtcagaacaaccatcacttcgaagagaagtga

SEQ ID NO: 517553 - DNA, 189 bp, Stenotrophomonas maltophilia
gtggctggggagcagatgaccatctttcgggtatacgacatcatttgggacgtggatggcgcgtcggtgatgcttccgtccgaagtcgagatcgcctgtgttgatagggcttccctgccgggcgctctatcagacgcctacgggtggctggtcacagacttcaaagtagtttcggcagcagaggcctag

SEQ ID NO: 517554 - DNA, 2073 bp, Stenotrophomonas maltophilia
atggctaaacgtagagtttctcttacacatagaaaacagaggcctatcctaacggacatgctcccgttcgaggtgccccctacgttctccaataggggatactatcgttttctaagaaaacactgcgtcgagatcgaaaatcgcgaggtccgctggaactgcgagtcagattccattgatcaaacaatgagactgctattcggcatagcacagaacatccctatagaatctgaaattatttgcgagtggggcaaaaagaagactagacgcaaagtcccgcttgggaaatgcgccatgtcgaccatgccattcaatttccgcgtcgctcacaatttggacggaagaatacttagcgtaatccatccaagaaaccaagttgcagtcgcagacttctatgtgacgcacagcgcactcattacacatcacacttcggcaagcgagttttcaatccgccgtccagtgtcagtttccagatacgcgtactacaaggacaagctgcacgaagaaagactggacgccagccgcggggccgaggaggaaggaagggaatacgaacaactcggatcctactttgtctacaggaagtataggaacatccataaattttttgagtctgcagagtaccaccagagcgaaaaagaatatgatgcgatggtgcagctggacgtaagcaaatgctttgatagcatttatacgcactctcttccgtgggcaattctaggaaaagatcaaaccaagttcagcctagccgattccaagcaaacatttggcggcaagtttgacgatttaatgcagaagatgaatcatggcgagaccaacgggatagtaatcggcccggaattttcgcgaatatttgccgagataatacttcaggcggtagatacagagcttcggagaagactgaccgccggcaacctcattcataaaaaggactacagaatatttcgatatgttgacgatttctttgttttctacaacaaagaatcatcgcagcagagaatattcgaaacactgcaggaaatcctgaagctaaagaagctcagcatcaataccgcgaagatcaagacctacaaaaagccgatcattacggaaataacgctcgcaaaggaacgaatttccacattactaaattcagaaatagacccgcactgcaaagaatcagaatcggccggcgatgcgacgacccccaagaagaattccctggtctgcgtcatcgggaccaatcgccttattgtccggcacaagtccattattaaggagacctcagtcgcttacggcgacctcctcaactacacctttgccgtgattgagaacaagatagaaaagctattcaagtgttacgttagctgcgacaaatctgatcaagatcagaagcgcctggtgtcagcgctgttttcggttagtgaattctcgttctttgcgtattcagcgagccccaaggtcaatcacaccattagactttgccgaataatatccacctcggtcagcttcctgaattctcagcgaatagcctatgaactcaaacatctccttttcaagtacatccatgagaatgtacttaagcaattggagaagaacacgatggataatagtagagaaattgagagcctgtatctactgtcatccttgtcgcagatcggacgggagtattggctgccaacatcggcattgcttaggcacttccttattgaggtggatgagatcacgggcgaatactctcggcccgcaggcttcatgacacacttctcgattaccaccctgctttcttacataaagaataaggtcagatactccaagataaagtcttttattgagaaccatgccgttgctaaactagagaatatgaaggcactctgcccgaatgactcagaggcgctaattctgctgttagatctattgacctacccccaactctcacccggaacaagaacggcgatcggagcagtgtttgatctagatgctgaaggtcttgcttccgttcagtcatcaaatgatcattggttcaccgcgtggggaaacaaatttgatttggccaaagagctggacgcgaagcgcagccgcgaggtatattag

SEQ ID NO: 517555 - DNA, 1353 bp, Stenotrophomonas maltophilia
atgatgtttgatcaaatgttcaccgcagacaatttcaggagagtatttgactctgagaaccgaaaggggatcgacgtggcaacgcgattcttccctgagctcgagccagcaactaataatgtgagggaaaaagtcaaagagattagagagctcagaaaatcgaaaaactctatggagccaagcgtatttgaagagaagctgaccgaactacggaagagcctagctcaactgaaggaaatcaaatcgcaatcagtctccctcataatggaaaacctcagcaagaaggttggcgcatccgatttcaagatcgcgatatcccaaaaaatcggacccaaaggaaagcctgtattttgcactgactcaaaccctgaaacttttttcgcgatgaaacagcttcagcgcaacatctcaaatatatatgatgtaaagcaggcaaatcgccacgacttggcctgccaagtccgcgacataattggcagcaaatttccattcgagatggtgcgcacagacatatcgtctttctatgagaacattgatcgaaaagtacttattgagaagctggatcacgatcaactgctaagcgcatcgtccaaaaagtacatcaagcaaattctagatgcctatggcctactttccggttcagccaaaggcataccgcgagggattggcattagcgcgtacttggcagaactttacctcaaacctgttgataacctcataagggaaattccaggaatcgtcgtttattgtcgtttcgtcgacgacatcgttgccgccttcgcccgaccctccacgggaagtatcctcgggtcgtttaaggccaagatcatagaaatactcggtcaatttggcctcacccacaatccgcacaaaacaatagaattattctcgggacgtccgtcgagcactaaagttgagtacttagggtacaggtatcgcgtgaatagcgatggaaagcttcagataagccccggcgcagccaaaataagcaagtataagcagcgaatcagagcttccttccgtgagtactggaagacgaagccgataaatccacgactggccttcagacagctctccggaagaattaggttcctgacagggaacacgcgactatcgaacaacaaatcatgcgcggtgactggaatatatttcaacaattccctggccacagatatgtccggcttagccttgttagacaagcaactgtcgcgccaaatcaagaaattaaacagcacaaggcttcagaacaaactgaagaaaatgaaatttctttcaggctttgaacagaagcggtacaacccattcagcaccaagcagctgcagatgattgtcggagcatggaagcatggctaa

SEQ ID NO: 517556 - DNA, 531 bp, Stenotrophomonas maltophilia
atgccgaacgtgatcgattcagcgcaggagggcaagggaactagcgtagcgaggtttcttgcaaatagaggtgcaatagtcgtaaaggagactcgccctgtcggccgcctgaaaggcgaacacggcgatactgtgtccgcagacactgtggttctgaatgtgataaagggcgtaaagaaggatacgagctacggtgttcgactggagcgaatcgacgccgatggtgatttcgattctgctgtatttctagactacgatgaactgagtgaactgcttggcgcaattgagttcatatcgaataccgcgtcgactcttcagaaccaagcacgggactatactgaagtaacttattcaacaagggataacgcgcaggttggcttctaccacagcaacgaggggcagcttgcttttcttaaactatcggatcaccgtggaaacacctttcttccagtgcatcgactgagtgttctaaagcaaattgtcgagggggcgaaggaacatctgaccaagtgtggggcgactgaggaatag

SEQ ID NO: 517557 - DNA, 1212 bp, Stenotrophomonas maltophilia
atggccttgatcggccttctcgtaagtgtccgtgaaaacgggggtgaaccctacgaagacgccttccccgcgagcaactaccctgcgaatgcaatcaaggtcactcggatcggtgggtcggattcggacagctaccgcatcccctactacgcactgggtcgccttggcctgcagcgcctgttgctgcctagcgataagactcaacggccagccctgacctttgccttggatcacctcaaccaagtgaaatggttcccaggagccggtggcgcgggcctagcggcggacacgcaggcgtcgctgttcgatgactgcagaagtgatcgtgtctctgaggcccaaggcatcatcagcagcttgcgggcgggcgcagtcccattggccacatcatggcctccgatgctagcactcggtcctttgattgcggatagccacgccattgccccagcaaggggctcgttcgaacgcaatgcgtggaactacggcaacatctcgccactcattacacgcattgcccgtttcactgacgacgacatgttcaaagacgtcgtcagcgtggctggcgggccgggctgtggtggcccgcttagctggcgcaacgaatctaaagccgtggtcgagcggctgtttggtggcgatgagatcgactggcgggttcacattgtcgatctgcgtcgtgtctcgcacgacttaacgccattcattctcggagccgtcttagaactctacgcgtttgagctctttaaccgtggtcaggagaacaagcgagagacattgctggtgcttgaggaggcccatcactacctacgtcagatgggagccggcgacgaagccgtgaacaatgccttggcatacgagcgtttagccaaagaagggcgaaagttcggcttggcgctgtggctcagcacgcaacgcccatcggagatatccccgacggtgctttcccagtgcaatacgtgggtgtcgttccggttgtcttcggagaaagacctttccgccatccagtctgcgagcgaatgggccgacaagagggaggtccggcgcattgctggtctggcccgtcaaaacgctttggcctttggtggcagcttgcaaatggccaccctcatcaaggcagcaactgcgagtccgttacctaggtcggaggatgggaagttcaatcaatgggcggatggagagggcgtcacggttgtcggaggcgagctctcctag

SEQ ID NO: 517558 - DNA, 444 bp, Stenotrophomonas maltophilia
atgactggttttgagattttatcagtttcaatctccggctttgcggttctggtaagcttgggatctatgtttgtcgcgggtcgggcaagtagttccaacgtgaagatgcttaagcgtgcaggtgtgatcgagttgcatgcggcttggcagggagtctcctccgtgagtcgaaccgcgccggttacagttgatgcggtcaaagcagccaacgctattgccttgactgcgtccctgtggaaccacgatgtcattgaaaaagctgtgctttatcagatgtattgggagccctacagggacatctatgattctctatactccatcgttgaggtgttgcctggtcacactaagactggcaaggcaatgataacgaccgatatgactaaggcctatcgcgacatggatgcgtttggtaaccagtctgtaatcactacagtggtgaagtga

SEQ ID NO: 517559 - DNA, 1461 bp, Stenotrophomonas maltophilia
atggaaaaggaagaaaaggcggcagcccgtttggccaaggccgaataccttcaggatcgacaggcggaggccgacgacctcaacgccgagctaaaagaccggctggaggagctggagggattgctccttcacaccctctcggtgaatgacaccatcagcttcgacagcctgcggcacacggatcctcaccccaccttcaagacacccaaggagttgatgccaggcgtggccccagccccggttgacgtgctcgcccccaccggccttgcacggttctggccgggcgctggaaagcggcacttggcggctcaaacggcagcacgagatgcccatcaacaggctctggagcagtttcagagtgcggaagcgcaaaaaagaaaacgcctgaccgacctacgaaccgaacatgaggcggctcgcgccctctacgatgccgatgtggctcgtcggaacgcggaggttgatgcctttcagcaggcttacaacgcgcacgagccagacgccgtcgtcgcctacaacgacatggtgctgacacgctcggaataccccgccgagggcttcccgcagtccttcaagctggcctacgcagaggaatccaaggaactggtcatagagtatgacctcccagaggtgtccgtcattcctgccgaatcggactaccgctacgtcaagacccgggatgctatcgacgccaaggcgcgtaaggcaagcgacatcaaagcgctctaccaggacatcatcgcctccatcaccttgcgcacgctgcacgaggtgtttgaagccgaccaagcggatgccttagcgttggtgaccttcaatggcgtggtcgatgcacacgaccccaccactgggcaagaggtccgcgtccctgtggtctcggtccgcgcgaccaaggccgccttcctgcaactacggctggaccgagtggaaaaaatcccatgcctccgaaacttgggcgctcaggtatccagccggccggatgagctacaagccatcaagccgattgttgagttcaacatggtcgataagcgcttcattgcccagacagacgtgctctcgggcctagagtcgcggcccaatctgctggagctgacccctggtgagttcgaagcgctggtatcgaatctctttagtcaaatggggttggatacgaagctgacacgcagctcccgcgacggcggcgtggatgcggtggccttcgacacccggccggtgctgggtggaaaggtcgtcattcaagccaagcgctataaggacacagtgggcgtcagcgcggttcgggacctctacggaaccatgctcaacgaaggtgccagcaaaggcatcctagtttgcaccagcggctacggcactgcggcgttcgagttcgcaaaggataagcccatcgagttgatcgatggaggcggcctgctctacctcttgagggagcatgcaggccttgatgcacgtatcgcagcgtaa

SEQ ID NO: 517560 - DNA, 423 bp, Stenotrophomonas maltophilia
atgaagaaccagaagggcttcacccttatcgaactgatgatcgtcgtcgcgatcatcgccatcttggccgccatcgctctgccgatgtaccaggattacgtggccaagtcgcaggcaactgccggcctcgccgaaatcaccccaggcaagacccaggccgaagttctactgaatgaaggcaagaactacgccgacgctgctggtatcggtctgaccgcgtcgactgagcgctgcgcaatctccggtaccggcgatgccgaggacggtaccgcttcgattgcttgcgtgctgaagggcaattccaaggttgctaccaagaatgtcaccctgaaccgcagtgcagccggtgcttggacttgcaccactgatttggaaagcaagtatcgtccggctggttgtggcgaagctgcagcaaagccgtaa

SEQ ID NO: 517561 - DNA, 414 bp, Stenotrophomonas maltophilia
atgaagcatccaaacgaagcggggttcaccctcgtcgaactgatgatcgtcatcgcgatcattgcaatcctctctgccatcgctgtgcctctttaccaaatctacattgccaaggcgcaagtaggtgccgcgttggccgatatccgaccagggaaaaccacgatggagtacgtggcccaggacgcaaaagatgccagtgttgtaacggcagcctacattggcctgatgccgactcagcgttgcccgacgattgaagcggagctggacagcgtcgggatcggcagcattcgctgcacgctgcaaggcggtagcgcggtgcagggcaaagatatcatcctccgccgtgcggcgaatggcgtctggagctgcgatggcagtgcctttgaagcgcggtatcgtccggcaggctgttga

SEQ ID NO: 517562 - DNA, 747 bp, Stenotrophomonas maltophilia
atggatgcgcacctgttgctggatgacggcgtgctgcggttggacccgctgaacttcggcgtcgccggcggcgacatccgcagcacgatccgcatggacgcgcgccgtccgcagatcagcaccgcgctgaaggccagcgtgcgcggcgtgcagctgggccagttgttccctgacgccaagctggctgaacaggccaagggtggcatcggcggcgaggtggacctgagcggccacggcaactcggtcgccgcaatgctcggcagcagcagtggcaaggtcggcctggcgatgggccgcggccatgtcggcaacctggtaatggaactggcggggctggacatcaccgaatcgctgaaattcctggtgaccggcgacaagcagatccccctgcgctgcgccttcgccgacttcggcgtgcgcgacggcctgatgaccagccaagcgatggcggtggacaccaccgacacgatcctcatcggcgaaggcacggtgagcctgcgcgacgagaccctggacctgctgctgaagccacgcccgaaggacaggagcattctggtactgcgttctccgctgcacatcagtggcaccttcaaggacccgtcattccggcccgacttcaaggcgttgggtattcgtggcgccgtagccctggcgctgggcagcatcgcgccgccggcggcgttgctggcgacgatcgaactggggccggggaaggatgccgactgcggcgggcagtatgcgaagtag

SEQ ID NO: 517563 - DNA, 288 bp, Stenotrophomonas maltophilia
atgacctacaactggaaccggcaggagctggcgcgttcaccatggcgcagtgaggtagtgcctcgcattccgtctatcctgatccaacgggccaagatcgggcggcttatcacctacggggagctcgccgccgagctagagcgcctccatggtctggcgccaaaggcccgcaaaaccttgtatggcccggccgtaggagccgtgggcttcgccctccgggagttgggtgagcagtggggcgagaagatcccgccactaaacctttttggagataatgcagaagattag

SEQ ID NO: 517564 - DNA, 864 bp, Stenotrophomonas maltophilia
gtgctggaacagctcgtccagaagcgggtgcttaggccagcgcagcgatcgcagctttccgcgctatcgccgagagtaaaactttcgattgccaagatcactgccaagaaggcgggggtcgagatcgattatgcaaccctgctccacaagaccgccgattggcatgagaacaaggatggtcgcgcagtttacggtcatttgtccgcgctcagtagatggttcatcacgacgaactacgacgaatggctggatcgcttgtttcccggcactgacccaaacgaagaagagcaggtcgaatcggcggaacggcgggagcagttgaggcgaaacaagctgtacaggccggaagacttcagagcggacgagtttcggaagcccgacactgtgctgcatctgcatggagcgctcgaggatccagacgggatgatcctttcgaccagggactacatcgagcgctacgccaatgacaggcaccacgtcggcggcgacggcgagaaccttgtgcttagctttcttgagttcctgtttcaacacagaacgatactttttgttggttatgggctcgaggatttggaagttctggagtacgtaatcatgaaggcgcaggacaggagtgggcgcaggaaccgggaggcgcggcactacatgcttcagggattcttcacgttcgaagaagattcctgcgacgcactgcaggggtacttccttcagcaatgcggcgtcgagctaattcctttcagccgagacgaagaggactggagacaactgatccacgtgctcgaggactttgtcggaaagcttccgaagaacgatccgttgacggtccaggatttcagggaaatggagggcttggtcaatggttga

SEQ ID NO: 517565 - DNA, 267 bp, Stenotrophomonas maltophilia
atggttgagttgactgcgtctcagaaggccctgattggctacatgggcaggagcgacaagcatgcgattcacggattctcgttgatcctgaaaagcgaggatccaaagagtttctttccggaactgcggaccgcaggaatgttcgaaccggctacgaatccgggtccccaaaaggtggaagggaaggaaggattcttccggattcccatctggccggcactcgaatacctggttcgggttctaccccgatatcacggacggttctaa

SEQ ID NO: 517566 - DNA, 963 bp, Stenotrophomonas maltophilia
atgtcagatcgtttggccgtcggcatcgatgccgactcaaagagccttgtggtggcacgccatggcaccaagggcagcactcgaatccccaattcagcgtcagccatcggtaagtggctgtccggcctgccgaccaggtctcgcattggggtggaggcgaccaatcgctaccacgagcgcgtagttcaagccgctcagatggctggccatgtggtctttgtgctcaatccgcgcgacatcaagcactacgccaagggcgtggcctgccgtggcaagaccgactctggcgacgcacaggtcattgcgcgttacatcgccaaggaggccgacaatctgcacgagcatgtcgcccgttcgcctgcacaggagcggttgcatgtgctgctccagcaacgtgacagcttggtcaggagcaagacgaagctcaatctctcgctgggctcgggagcgtcagaatccgcactcttcggagggattttcagtagcctgaaagaggccatcgccctgctggatcaagagatccaacggttgtgccgcactggtgaacaacacgatctgtatcggcgaatcatgaccattccggggatcggaccgacggtggcggccttcgttacccatcacatcacgcgctggcccttggccagcttggacgcctggattgcctgcaccggcctagatccgcgacccaacgaatccggcgcacggatcggtcggcgtcgcctgtccaaacgcggcagcgccggtttgcgtcagatcctctacatggcagccatgggcctgacccgctcaaagggtggcaagcctctctacaacgccatccgcgaacgcggccatagcagtactgcaagctttaacatcctggccaggaagctggccaagatcgcctggggcgtcttcaagagcggtcgggactttgacccagccatgctgaaagtgggtcaagcctgcttccagcaggcttga

SEQ ID NO: 517567 - DNA, 963 bp, Stenotrophomonas maltophilia
atgtcagatcatttggccgtcggcatcgatgccgactcaaagagccttgtggtggcacgccatggcaccaagggcagcactcgaatccccaattcagcgtcagccatcggtaagtggctgtccactctgccggtcgggtctcgcattggagtggaagcaaccaatcgctaccacgagcttgtggttcaagctgcccagaaggccggccacgtcgtctttgtgctcaatccgcgcgacatcaaacattacgccaagggcgtggcctgccgcggcaaaaccgactcaggtgacgcgcaggtcattgcgcgttacatcgccaaggaggccgacaatctgcatgagcatgtcgcccgatcgcctgcgcaggagcagctgcatgtgctgctccagcaacgtgacagcctggtccggagcaaggcgaagttgaatctctcgctaggcgcgggggcgtcggagtcggccatctttgggcgcatcttcgatggtctgaaagaggccattgccctgctcgaccaacagattcagcagctgtgccgcagtggcgaacagcgcgacctgtatcggcggatcatgaccattccgggggttgggccgacggtagcggccttcgtcacccatcacatcacacgatggcccttgaccagctcggacgcctggatcgcctgtaccggcctggatccgcgccccaacgaatccggcgcccggatcggtaggcggcgcctgtccaagcgcggcaacgccagcctgcgccagatcctctacatggcggccatgggactgacccgctccaaaaatggcaaagccctttacaacgccatccgcgaacgcggccacagcagtactgccagtttcaacatcctggccagaaagctggccaggatcgcttggggcgtcttcaagagcggccgggactttgacccggccatgctgaaagtgggtcaagcctgcttccagcaggcttga

SEQ ID NO: 517568 - DNA, 1002 bp, Stenotrophomonas maltophilia
gtgcctacaattgaggtgaagtattacgaaagaatttttgctaccgatagccatccggagagtctggatttcctagggcaagaaagcttagatggggtgagcgaaacgcttattccatatgtcaacagcgaacgcaaagttttcggcgtgaaaaaatttgataagcgtgaagattatcgctggttcgtggaaagtgttacctgcaatgtggctaattcggtcgcgatttacgagatagttctacagaaggtctcggaagatgtccctaccatttatttaaaccaaacgataaaaaagtcaaacaccagcccatttaaattattgcgccagggtagcttggtagagattgagtatgggttcgtccaagcgatcggaaaaaacgatggcaccattaaaaccaacaagcgttattgtgacaccattcaacatggggaaatgcacaagcgccgactggcagtggtagtcaaagtctcgtcctcccagaccgtgcaggttgctccggtaacttctgtccagccatctgacactgataggacatgcttcgagcttagcgttgatacgcttcgcaagttaaggtattacgggaattctggaaaaagatcttgggtgatatgcggtatgattgaaactgtttcaattcgccgaattctccctcctattagctattacaccaaagatcgagcatatcgcgtcatccgcgcagagtcttatccgacaagcattaattccactgaactgaaacaacttcgtgacgctctttgccactcaatcggcatcaaagattatagcgaagccaagacagctttgtttgaggctaagaaaagagctactgagtatgaaaatttggctgaggagcttggtagtgtgaaggccaatcttgcgaatactcaaccagatcttgctagactagcagtctatgagaagctgctggggagctggtgtaaggacatgggcgtctcattagaagatgagatcgcacgctacaccgctgatcaagagtga

SEQ ID NO: 517569 - DNA, 411 bp, Stenotrophomonas maltophilia
atgaacaaacctacccttgattcaatcgcttcggccaaagccaagttggccgaagaactgcgcaagcttgaagagcaggaagcgaagctcattgaagacgaagcctctgacgcgttcttgcagatttcggatctactgagccgttacgggcagcatctgacgtctaagcagaaggccgacatcgccaaccaagttggcagttcttccaatgggccaggtcgtccgaagaagtccgctggcactggcacgcgtaaggaagtagcgccgaaatattggttgccgcatacgcaagagacgtggactggccgtggccggactccgcgcgctttcgcagcctgggaaggatcggccgcttacaaggagtggaaggccaagcatccggatgaaaagttcccaaaatatccgggataa

SEQ ID NO: 517570 - DNA, 1335 bp, Stenotrophomonas maltophilia
atgcctgatcaaaaatccgaaccgtctgtccatcgctgcataataaggaacctccccgttgaaaacggtgttgtgggagagatcattgtggaaggtgagaacgcagcgcaatgctgcgataaaattcttcgcctattgaagcgcaagtcacgcgccaagaagtccgacgccagcgcttctcccacacaaagcaccgtagatcttctggatgacgtcattgaacgctacatatcagatttaatacgacgcaatctgggcctgacctacatccaactcaataggcagacacttggaattatgcttgccgctatcggaaacaagccattagcatcaatcactggcgatgatattcgaaggaccttggacagcttcaagttctggccgaacaatgcaagacgaaaaccatccatgaaagacctaagctttgccgagatcctggacataggaagaagaagcacgccccgtcctatcaattccgagacttataataatcatatcagacgcatcaacgctttctttaatacgcaacaggaagaggacagatctttcaaatcgcccgcatcagggattgcaaaagaaatcgacacatcgacagcagcgaagaaccgccgccccttcactacgggcgaacttgaaaagatctttgagccggaagcctattcggagtggaccaaagataagccccataggtggtggggccctctcctggcgctttacacgggagcacggattagcgaaatcgcacagcttcgaacgactgatattcacactgtcgatggggtcacatgcatctgcatccaggttacggcgaaggggcaacaccttaaaaacccatcttccattcgcgccattcccatcgcgcaaccgttgctagatgccaacttcttggcctatgtcaatgaagttcgagccactggacaagatcgactcttcccacacctccccctcaccgtcgcggtcaatgatggcaaggcctacatcaagggatacgggggcacactagttcagcaatttggccgatacatcaaaaagcatggcttcaagaagggcatcgggtcacacgtcttccgccatacattcgccacaaatttaaccaaggaaaaagttggtgcggtgcagattgccgcactcactggacatacagtcgtgggagccccatcagaaagcgtctcggtcccgggattgctgagctatattgatcgaggactgtgcccgcctgagcttcgagcttgcgctgagacattgtccaagttctacccagggattgaaattccagtctatatccctggacaattcgccaaagctctctccaacaaatcagaatttcaccaataa

SEQ ID NO: 517571 - DNA, 714 bp, Stenotrophomonas maltophilia
atgagcaattcgctgcccctctatcagttcatggaggctgcccaagactgtgcagaagctgctcgggagagcaacgctcttgcgttgagccgctgtgcagagctggactcatttatcgctcgcgcaacctctgatcgtttgaatagtccagttcctagtgtccttagactgagtgcaaggggcatgttctgcgcagcagtgaacgtggcactcaccggctatcacgctgctattttcccgttgcttcgagcaagcttagaggcggtttgttatgcccaagagatagcgatgaacccggaacttcgagacgtatgggttcttagggatcgtagtgagcaggatcggaaggagtgtcgcggagcgttcactggcgctgtgagtaatacatgtaagcgcttttctgagttcctacccgataacgctggtatggttctgaaagcctacaaccttatgattgattcgggtgcgcatccaaatccacgatcaatttttccctcactcagagtcagagagacggacacgcaccacgaggttgcgattggcttcgttgtgcctagccaagtggaatttgcgctcttctgctgctatgagtttgggctcgttacctcctggctaatcggggagttcaatctaaacagccgagacttttgggaggaggcaacgctgctcaatgcaatcaagaatgactgggaacgggagctttggggatcgtaa

SEQ ID NO: 517572 - DNA, 309 bp, Stenotrophomonas maltophilia
atgaccatgaagcgcttcgcgactgtcgctgccctggctattgtgctgaccgcatgttcgagcggcccttcgcagaacaaggctgaggacgccatgcttgcctatgtcaaggagaatgggtcagaggacgcccgtctgatggagttcgagcttggcaagtgcaccaaggtcgacagtggatacaactgcccggtgaagtcacgagtcctggcaatgggtggcaagttcgaccaacagttcaatggtgtcttcacctttgctgacgttgggggctcttacaaagtcatcgctcgggtcagcatcgactag

SEQ ID NO: 517573 - DNA, 285 bp, Stenotrophomonas maltophilia
atgagttcgcaggggaatgctgttggaagtggggccgccacaggcgagctggtgaaccgaggacggcgaattgcctacatcggctgggtggctcccattctcccggtgatcgggttcattgggctgatcgtcctgtccatcgtcgccatcctccatggggtcttggcagcaacgaagggcgacacctccgcaggactgcgtctgatcttggctgcttggctcggatcgaccgtagtcggtctcttgtggatgggcgtctatgccctcctcgcttctatcttttaa

SEQ ID NO: 517574 - DNA, 240 bp, Stenotrophomonas maltophilia
atgggattgcccgaagatgttgcaggcgttcggatcaatcgatacgagcgggctgtgcacgactgcgacacggagacggctcagaagatggccaaggccctgggcgtgtcgttggcctatctgtatgcagagacagatcagctggctgaactgatccaggagttcggacgaatgacttccaaggagcagaaagaactgctggcaaaggtcagggagcagaccagaaagtcggaacgttaa

SEQ ID NO: 517575 - DNA, 1251 bp, Stenotrophomonas maltophilia
atggaaacgttccacaatccagatcggtttatgtccgatctacggcaggtgctttcccaaggccgaaaacgagtcggtctccttgtaggtgcgggggcaccgcttgctcttctcgtcaatgcaaagaatgagattgatgccgccgggaagccgctgatccccggagtagaggcgttgaccaaacaggccacctctggattaacccccgaacagacggcagcggtcgacgcgatcaaggtaagcctaagcaaaaacgcgaacatcgaaaccgtattgtctcgaattcgactattggagaccgccctcggcacaactaaggttgagggtttagattcggaaggttataaaaatctcggcagagaaatatgtaagaagatcggcgaaatagtaggtgtagatttgcccaagggcgataacccgtattctgaattggtctcctggatcactggaacagttcgatcaaattctgtcgaaatctttaccaccaattatgatttactttttgaagaagcgttcgaaagggtgagaagtccatactttgacggcttctcgggtggtagcaagccattttttgacccagtgtctgtcgcaggagacgacttgcctgcccggtgggctaagttgtggaagatgcatggttccctcggctgggcactggaagacggtgccgtcgttcgtggccgtgggaaagaggctaccgagctggtctatccagatcatctgaaatatgatctaacgcagaaacaaccttactctgcgcttttcgaaagacttaaaagattcttgctcaccccagactctcttctgttggcggtagggttctcgtttagggatgcgcatatttgcgcggtcttggacgaaagcttggccatgaatgctaataccgctgttttggctttccagtatcaaacgctggataaagaggagcctgcggttaagttggcgaaagataggccaaatttgagcgtgtatgcttcggacggtgccgtaatcggtggcgtccccggaaaatggcgtccaggagaacttccgaagaattggggcagcatccgggacacgttctgggccgcaagatggccgaagactcctcctgtcttcttgctgggtgactttgctgccttctcacgcttttgcgccttggcgcaagccaacgaactgatcacacagtctttaaagagagacgaaccggctccggaagaagctgagactgatgaggacagtcaggcccaaatcgagggtgaatcgaaatga

SEQ ID NO: 517576 - DNA, 1833 bp, Stenotrophomonas maltophilia
atgagtgggagcgatccgacttacttgggtgtggtcagtgccgtctccggtgcaacattgaccataaggctcgcccagtcgttagactcaggatttgctgtcatcaaggggcatacctatcgtgtggggcaggttggtagcttcgtaaggatccctcagggctatcaagacttatttggtatcgtctccgaggtcggagcaactgccgcaccagcgcaggcagatatttcaaatgctgattcaggcagatggatgactgtgcaactggcgggagaaactgtcggggggcaatttgagcgtgggttgagtcaacatccaaatattaatgactcagtccatttggtgactgagtcggacctccgacgaatctacggctcaattggtgatgatcaagttgtcattggtcatctagcaagtgccgaaaacatcgatgtccgtctttctctggatgcgcttgtgactcgccattccgcaatccttggatcaacgggtgctgggaaatccaccacggtagcaagccttctgcgatcaatcataaggaaggatgagaacgtgggatcgcctggggcgcggattctgatgttggacatccatggcgaatacacgaaagccttgacggatgtggctacaatttttagcgctacacctagtcaggggcaagagccgcttttcgtcccttactgggcactcgaagcgggcgaactcttagatttcgtcgctggtgggttgtcggaagctcatgaaattgctttcacagataaaatagctgagcttaaagaaaaaggtcttttgtctcatccacgagctggtgttgatgcaaggacgttgacagtcgatagccctgttccatttagtctgaaaaagctatggtatgaactggttgattttgaaactaccacgtatgaaggccctaatcgcgatgagcctgccttagaggctgatggagatgctgaaaccctgacgcctccgaaatataagccgcatgcaatgggggccaaggggccattcaccaatactgccgccaaaggtatcaggcggccattgaacttactcaggtcacgattgcttgatcggcggtatgattttttgcttcatccaggagactgggagcccgacttaacgggatcggtaacaaatgatctggatgagcttctccggcgttggcttggacacgacaagcagatcaccatcttggatctctcaggtgttccaagcaccgtgctcacacggctgattggttctattttgcgaatagtatatgaagcgctcttttggagcagggagaaatctgagggtggtgttgaacggccgctccttgttgtaatggaagaagctcaccgatacttggggcctgatgcgggcactgttgcatctgaggtcgtgaagagaattgccaaggaagggcgtaagtatggcgttggtgcaatggttgtttctcaaaggcctgctgaggtagacgaaacagtgctatctcagtgcggcacaattattgctcttcgcctttcaaatcccgttgatcgcacgcgagtaaagggaacgctacccgataacttggctgggctgatggacctgctccccgtgttgcgaaccggggaagcaattattactggcgaagctgcacgtcttcctgttagatgccgtatagcattgccgagtcaagagcacttgcccagaagcaacgatccgaaggtgacggaggcgtggtccagccgacgctctgcggagggctatgatcgtgtggtggcttcctggcgaagtcagcaaacgactgccgtaatagaaaagctaaacatcacacgttcacccattaacgatgacatagagggaggctag

SEQ ID NO: 517577 - DNA, 210 bp, Stenotrophomonas maltophilia
atggatcgcaatgccgtatcttcgtcaaatatcgtatccgccggctacgatgcaggcagcgaaaccttggagctcgaatttaaagacggcactgtctaccagtattacaacgtaggctcccacctatatgagcaattcttggcggcaccgtccaaggggcagttcttccatatttatataaagaacgctgtccctttttctcgcgtttaa

SEQ ID NO: 517578 - DNA, 819 bp, Stenotrophomonas maltophilia
atggactggattagttttttgacccgcgatgttgcgattggatctatcctcgggatctcggcagcggcactcataatatgctggcgtgttggttcgttccacccagtcaatgttcgccttctgcgcttttttatcgcgaaggatgaggttgaagatcccatcatcaaaaagagtttggcagatcaaacggcattggtcagtttcaggatgacccatggcgtgaaagcgcgaaccctgcgggacgcgcaaaacctgtccgaattttccgatagaacgaacattccactagatttgataggaagggctggctgggcgtttaatttaaagagcttgaccctcaaccctaagcgggtgcctcacgcggcgtggttggcctttccgggaatttttctacttatcttgattctggcgacagcagccttctcagccgtagcagcaagcagcagtctacttgtttcactcaaagccactgacactttactttggctttcccaggaagatgctcggctctttcgtccgtttggtgaaaagtcaacaatcgataaaacatcttgcggtgcagaacatgcaggcgccgaattgccggatggctttcatcaaaatgatcgccagatcctgtgcggaatttggtcagaccctgctcttgcagatcatttttctaaaaaagttccagagcaacgcgctacatttttggtcgcggcagccatttttgcgtggtatgcattcatgagcttttcgcttcttcgtgaatggctagcacaaagagagctaagcgttcttatggacgaaatcaaaattgagtcggccaacgtagcttga

SEQ ID NO: 517579 - DNA, 1563 bp, Stenotrophomonas maltophilia
atggcgatttatcacgtcaatataaaatcatacagtagagggaagggtcactcatcggtggcagcggcagcttatcgtgcggggttcaatttgcgcgatacaaagaatggcacggtccataaatacaaaggtagagggggagtcgtctcccaagagatgctagcccccaaaggcgcgccggactggtgcctggatgtccgttcattttgggacgtcaacgagatgcacgagacaaggagtaacgctaggctcgccagggaggtggagatttctttgcccaagagcttggactcaaagcaacgacatcacctggcgattgacctaggccgcctgatggtggatcggtatcaggttgctgctcttgttgcggttcatgcacccagcaagaagggcgatcaacgcaatcatcatgttcatctcctactctcggcacgcaaggtagacgcaactggcttgggtgaacgcgcatgcgctgtttttgatgcaaggcagggtgcgggagccgcagagatgaagatcctgcggggcaagattgcgtcggtcatcaatgctcacctcatcatggcgagcgtcaatgcaagggtggaccatcggacgcttcgtgcccaagcggcggacaaggcgaggcagggtttgcatgaggaagcgcgtgccctgtcgagagacccgatacgccgtatcccaaaagacaccttttacgataagaagaaggcaaggcaagccgtctcggcggcgaagaatgctccttctgtggcaggactacgcttcgctcaagatttaaaagagcgtcgccaagtccaggaagccaagatcgtccatccggttccccaagggcacagccatgaagccgcattgcgcgatctaaacagcgagagtcgctctggtgggaaaagtgccaactcagctgagcagccgagcagcaccgctcgtgaccggatccatacgcactacaacccgctcacccggcaagtctctaaggtgtcgcgactgtcccgatccaagggggcaagtgccgaagtgctgaacaagcaggccgaattgatagagcaatggttggaggcgcagcgagaagttgcagagcaggcactggaaattttgaacagcattccagggatacagattgagacctgctttgaccaagcttacgcattgatccactcgcgccgggcagatcattacggtggtaaagggcttctctttgaagacaccgaagcgctcgggagggctatggtgcgctatgcgcgaatgctggtcagcccctaccgggcgcagtgtgactacttagcagccaaggccaagctcgcagagtttgactacgagccaccgtcaccggcagcagctagggcaaggcgtcggatgctgcggatgaagcatctggcctctgctggcgtgatgaagcgtagggagtggcgcataaggcaaacaagagctgcgatggctgaggcctcgacttgtcttggagttggagacgaaagatgtgtagagatccatgacgaaggcctgtctgaacagacggcctctgccaatcatcatcaccagctgagatttaggccgcgattttaa

SEQ ID NO: 517580 - DNA, 978 bp, Stenotrophomonas maltophilia
atggctcagctagcagagaattcaattgtaatcgctttccgggattggcagtggcgtaatttgaggccaaacagtcaatcgcctgatctcttcctttcattggagggtaacgctgaaagaaagaaaggagatgctgaagtagctttcgatgatagattttacattttcgaaataaaatccacggaaaaaacaattaaagacgagtggaccaagaaaaaaaatctcaatgggattagcaagcctaatccgaagtgggcctatcggaaagttcggcgccttcttcgagtaattggaaaacgcgaaccaaaatctccctacaataaaattgcaagatctttattgaacaaatcacttgcgtgccatcactttttgttctggcaaccttgcacgcttccaaacgacgcccgtggtgattttgccatcgtgccatatgccgttggacttctcaaattgggcggactatcggcacccaacccgctgcaaataggcaacaatcaggttgcaaccgcagtaagtcacctgaaaaaatacgacatcggactcgttaaaaaagagaccaagagttcaatttattacgaaagcatatcgacgttacatccggacttcctggcgacaaaaagcggtagactgataaccactggcagtgataaagattattggcagcattttggcttagagctcgatgaactccaagaatacgttgactatttatgcggcaatgtcgatgaggaaataaatgtaatcctcacctcaagaagtgggtccgtatttgctcacataactcgaactacagcgctgaaatcactggtagatgcttatttcttcgaaaatagaccagcaccttcgaacacccaaattcagaagtttgctgcgcggaagcctcccatgcttccgacccccaaacgcagatctgcaccaggaatagcgaacgaccaagaaaagccattgttgaggaaaccattgaagttcggcaggtga

SEQ ID NO: 517581 - DNA, 1905 bp, Stenotrophomonas maltophilia
atgatgtcaaacaaagctgatcaagtctctcccgaagacaacgaaccagcagcctccgaagacgccacggccgttgaagcatctggaattattaaacaccgaattccagaggaagcgttagagggattcgattgggagggtgagcttcgcgatcatgactggacagtgcatcgctacgcggcagtcttagcggttcgggagagagcgaaagccttcgaagaccaaggcgacttggctaaggcaggcctacttcaactcttagctgccgtcatttccatgcacctgacgggaacgacatcgaagccgttcaccgcgctcatccaaaatggaaacaactgcaccgcaatgccggaacaccttgatcaacaggatgtccagttcctgcacaaaatggccgagaactgttcaaactcgtggctccgagcacgcattgcagatgtcgcttgtgttgctggacccgacctcggtattcccggatggaggattgggcaggtcgcagcacaagcctacctggaagaggccaagaagttcattgacggaactgtgccggtccgagctatggatgcggtcaaatatctgcaaagagcgctgcaattgggctgggtctactcgaagaaggatgtggtctttcaagctgacctttggacaacaattcagtcagctttcgacgtagcaattgagaagcgctttttgggaattctcttcccattggcagaggagatcatccaaagacggccagacttagcatcttcaaacgcaaaaaaactggaagacctagccgagctctggtgtagcgatcccgatccaagcgcaatggattttgcttcgagggcattcaaccatgccgcacgtctttggaacacggccaaaaacgatgctcgatctaaggcctgttatttcaaatcgggtgaggcgctgatcaccaaatcgcggcaacccggtcaagcgatggtgcgagccgaatggatgagcgaaggcattgcgatcttgcgccgccatggtggagatcgagatgctatcaagcaattacaaattgagcttgcagatgtccgccaagccattcacgaagagatgcatgtaattagccaccctattgacgtcaaagaccttgtggaagacattgacaagagagtcgatgcggacacatttccagccgcgctcctgcaagttgccttcgctttctcccaatttagctcagcagaggcaattcggcaggaggtaatagaatcgaacgaaaaatatctcttccagcatcttttcgcccgtgttacttacaatcgcgacggcgttccagtcgttcgatcagcgccccttgacatcaacgacgaagagagcatggaaaggcatatggtgcagagcctgtgcgagttccatcatccgctcctggctgatgttgccattattcatgccatcaacattgttcgccatcgcttcgagccttctttaaacgaagtgatggcaatcgtcagcgaatcgccttgtgtgccagaaggacaccgctggaccttgtctcgtggacttttggcagggctagatcacaactggcacgaggccgcagttttccttatcccccaagcagagcccttcattcgtgccgctttcaaacgctgcaatgtaagcactgtttcagtggaggagcacggggaggaagagaagtctctgaataagctgctggatcacccggacgtgtcgaaggtgctcttcccggacttagttttggagctcaaagcaattcttacccacaaggcgggtcacaatcttcgaaatcgctacggacatgggctgatcaatgatgatgaacttgcatctacggcgacgatcatactgtggtggacgattctcagactcgtcttgtggccctaccgtaatagcctgctggaagaccccgccatctatcaacagtag

SEQ ID NO: 517582 - DNA, 1467 bp, Stenotrophomonas maltophilia
atgcgaattccccaccatctcatccgctcccccgctggccgttggtccttccggcagcgagtcccgtccgacctccaagctcggcttggccggacagtcatcaagcgaagtctgcgaaccacggatctgcgccaagcccagctgcaagccatcatcctggcgtcgcgctatgctcagatcttcgatgcagttaggggactgccgatggaccgaatgactaccaaggatgtggatacgctcatcgagcgcctaaccaaggaaacgggtcgacaagatctgacgctccatcgcacccaagcgccagacggaaccgtcagtgaacgctggcagatcgacaatgacgaagacgtccggctctttcggaaagctcaggtctggaacagcgcttcggaagtagctggtattggcgctcttcccccagatcttgttcgccagcccgaagcgcaagcgaaagttgccgaagtcatctccctgcgaaaagcccgagacggctggcttgtttcattgaaggcaacgacgcttccgaaaacctatgtcatcaagaagtctgctatcgactttttcgtcaaatatattggtgaaagggccaaggtccacaccatcaagcgccccgatcttgctcggtggtatcagcacatgcgagaaggtggtgcttcgacccctacgctgaccaataagcaaagttacattggcggtaagggtgggttcttcgagtggtgcatggcatcgggttactacccgcagggcgacaacccggcaagtggccacatcacgtattctgtccgcgaaaaacgtattcgacgcaagctgggcttcaaggcatatgacttgcaccaaatccaggcgctctttgaccccagtaattttgaaaagctttcacccagcgcgaggtgggccgccttgatcgggctttataccggagccagagcttcggaagtcggccagcttctgctttctgacgtcttcaaagacggcgacattgtttgcatccgcatcaatgacgagggtgagttccagaaggtcaaaaccgaatcgagtcttcgcactgtgccgatccatcctgatctcttgaagcttggtttctgggagtggaccgaagaacttcgatccaacgggcatgatcggcttttcccacaagccaaagccaatgcgaccaatggtgctggcaactggatcagcaaggcgttcagtcgtcatgttgcggaggtggggaagaactggcccaaggcaaggcgaggtttccactctttgcgtaaaacactgattcaagagatgcagggcgcaggtgtggcttcggaactgagggctcagatcgttgggcatgagctcgacgatgagcatcatgcgacttacagccgagagttcaccaatgcggaaaaactccttggacttggctctcaggctggcggactaaacgctgtgaattatggattgaagatcaaccgcctttcgaattttaaaaagtaa

SEQ ID NO: 517583 - DNA, 747 bp, Stenotrophomonas maltophilia
atgaaggactatcttgcgaatgtaagtgacttcgagaaattggttgcgccgcggcttacggctagggacgggctgttgcccttcaacgaggttcaggtatcgcggagcaacgacttctacgttctgtcattggcggcggaccccaggatcagagtgttcccggtggaagaagcttcagctgtcattgaccagcttgttgatatgccgcatctgtggcacggcgcgtcattccgggctgtttgcctccctgcgatctcgggcgctaaacatgtgttcggtcctagcttcagcagggcggtggagattgctctgactgagggcctcgtcaaagcgaagtactatttgccacaggaggacatggccggacatccccattccttgctgactcacatccgtccagtggcaagcatcgatcaggggcgacttgtgcagcttgaagcatgggagtacacgcctggcaaggacaacccgaacacggctctgtatctgcactgcatgtcccctgactttgaaggaggcgtagtgcatttggatggtgcttcaatctcctacagtggtgtggatctagacacgctactttggagatcagagaaagtactgggtgacgtctacaagaagcactttcgactcgatggcgatatctccattgatgaaatgcatctgattgcttcggcgttcttcactagcgatacgctttacgctgaatctatgcagatcgagcgctttcatcccagcggagcggactag

SEQ ID NO: 517584 - DNA, 753 bp, Stenotrophomonas maltophilia
atgagcgacaaccagagcatcaacaccaccaccgccgacctggctattcaatcctgcgaagggagcgaggctgcgccggtatcggagaacaggcagcgactgaacgagctggcgcagcagctggccagcgcggtgcggcgcaagcgcgccttggtgggtaaggtcgatacgatgcagcgcgccaagcaggctgcacagggcgatgccgctgctgcccgccagcagtggggtgccaagctgcgtgagagcgatggcacgctgacccgtgatattcagaagcttcgcgcgaatgagcgctcggcgctctcgttggctgaggaatatgaggcaatggagggtgagatttcggccgagctaccgcgcctggagctggaattggccgaggtggcggaccgttgtctaagcacggcgaacggtgtcatcagcgaggctgccagtcaggcctatgagcagttgctcgtgaaccttggcgacagcctggcggtggccttcgcgctgttctcgaaggcggaaaacgcgggcgtgaactggcggcagtcggcgaatgctgacgaactggccagcaagttcttcggtcgccttggcaatgcggcgcgccagcgtcttgacgatgccacggtgactgagcaggttgcggagcgcttggcatttccggcgatggatatgagcgaggtggatatgcagctggcgggcagtgttgccgcccgtatccggcggcgcgccgaactcaatgtagaggcgcggcgtgactga

SEQ ID NO: 517585 - DNA, 441 bp, Stenotrophomonas maltophilia
atgtttgacgaattcgaccttatccattcctacacccgcgcccaggcgatcgagggcggcgtcttggtggacgtgtccgatgtggccaaggaagccggcttcaagttgcccgtggccatcacccgtgctgcgtggacgcgctacgtcgaagtgccagcgggactggaggtgcgtgggcagtcggtggacggccggctctgggacgtgcttttcatgctccacgtggccatcaagcggcaacagggcaacggttcggagatccactgccagctccacgtggctctgcccgatgccggcgactggttgtcgaacgaagcccacccggaggccgggtctggcctgacgcggacgacccatcgccttgtcaccttgaaagcactgtgtgggcccggggacgccctggagccggtggtcaccatcatgctgcccaacgaggattga

SEQ ID NO: 517586 - DNA, 402 bp, Stenotrophomonas maltophilia
atgaagacagtgacctcaaaagcttcagcggcaatcgatgccatcaatgctgctaagcggcagtatatgaagatcggtgatcggcaactggtggtcgatttcgcccgagcatgtatatccaggcagcacctcgatccaatgatgaacgagcagctgcagcgttttgatcgcctcgagtggcctggcaaatattacgaagctgctgagttgatgatgttgtgggtgccccagttggacgatcggttggttcctagtgtcatggatgatgtgagatttaaggtcgaacaagaaatggagatgcagcggaaggtgtttgatgccgtgatcgggcatttcaaggcgacaggtgagacgctttccggcgtaggagttcacgctttaggcggcaggtggaatccatga

SEQ ID NO: 517587 - DNA, 582 bp, Stenotrophomonas maltophilia
atgtccgtgcccatcccaacccgccctcataccgtccctctcagcctgatgctgaaggaacacacccgcagcattcacggccgcctcgatcagcatttgctggaacagcgcatcttcgcctcgcgcgagcgctatctggccttcctgcgcgtgcagtggcagttccatgcaagccttgcgccgctttaccagaaccccgacgggggcgcagccagattatcgctgatcgaggcggacctgcgggacctgggggcgtgcgcaccaaccctgcacacgtggcacccgcagttgcaggtggcctctccagccaccgctctgggctggcgctacgtggcagaaggctccacccttggggcggcggtgctgttgaaggcggcggcggcattgcggctgcacgccgggcatggtgcccaccacctgcgcccttccgagctgggggttgccgagtactggcgacgtcagcgcgaagccatcgatgctgcggcactgaacaaggacgagcaagcgcatgcttgtcgcggtgcgatggatggcttccagttcgtccgtcgctgcgtagatgaagaattcaggtttgaatga

SEQ ID NO: 517588 - DNA, 486 bp, Stenotrophomonas maltophilia
atgaagcgtggcacacagattttcgggtttctgggctggttggccattactttcgctgcggccgcgctgggcgcgtgggcgtcttcgtcggcggccgccttctatgcctcgcttgacctgcccgcgtgggcaccgccggcaggtgtcttcggtccggtgtggacgctgctctatgccttgatggcggtggcggcctggcgggtatggcgcgagcgcggctggcgcggcgctcaaccggcgcttctgctctatctgctgcaactggccgccaacgcactatggagctggctgttcttcggctggaaacttggcgccgtcgcgttcgctgacattcttctactgattgcactggtgtgcgccacggtcgtcacgtttgcgcgcgtcaatcgcgttgcggcgatattgctgctgccctatctggcttggatctcgtttgcctgcgcgctgaactactcagtctggcaggccaaccccgcgctgctgtga

SEQ ID NO: 517589 - DNA, 267 bp, Stenotrophomonas maltophilia
atgatccgtaccagtcacacgcatccacttgagatcgctgaactgcatgtcggcctgcatggcggagcgatcggcgtcacattcgctcccggaaagcaccaagatgctgcgatgaccggcaactgggcgcgagacatggacgccgatttgaacgcaatccgcacttggggcggtacgcgcctgatctcgctgattgagccgtgggaattcgaggagctgaagatcccgcagctgccgaccgtcgcacccacctatggacttacatga

SEQ ID NO: 517590 - DNA, 1338 bp, Stenotrophomonas maltophilia
atgcccctacccagccgcgctgatcgagatttgcttgcccggtgtttggtctgcagaatgcaggctcctggcgagcagatggaacttatgaaatccacggacgttttcactccacagcagattccgacggtgacgcttgtaacggatcacttgagcgaaatgagcaagacgtacaagagagcaattccgcaaggaaagctgatcagagtcgtaggtccttccaagtccggaaagaccgttttcattcagagtgctgcgggtgacgggaacataatctcaatcactggtgctggtgtcactagccctgacattctatggacccgtgtacttcatgcgattggcagcgatgttgcagtcgccaccgagagaagtgaatcaaagggcggcggatacaaggtaggaacaaaggtcgaagggagcgtatttgtcgcaaaggcggatgcatcaggcgaactatctagagatcgaggaagttcggcggctgtgactcaggacaaggccgttgatctttaccagctagtggtccaggagctcgcgggtagcggcctcaccatcttcgtagatgacttccactacgttccgagtgaggtccaggtctcactggccagacagattaagcaggccgttcaagctggtgttcaaatcgcggctgcggccgtgccattccggtctgaggatgttcttcgtgctaatgacgatcttcaggggcggatcgaagactttgacttcaaatactggtcaagcacggaactggtgcggatagcaaagctcggattcgtagagctaaacatcaactgttcggaagcgtacgcattgcggctggcaagtgaagccgcaggctcacctcaactgatgcagtcactctgcttggaaacctgctttgcattagatgtcgatgaaaagagcgatcagtccaaagacattcccgataacgaagatttcttcactttggtgtgtagccgcgttgctgcgggagtggacttcagtacaaccatctcggttatgaaggacggcccgctgacacgcggtagtgcacgaaaagcatacgttctccatgacggaactgccgccgacgtataccagattctggtcagagcaattgcgctggatccgccttccctgcacttcagctatgcggagatgcaatctcgagttgcgagtgtctgtaatggcgctgccccgcactttgcggatccctgctctcacatggcaaggctcgttaatgaccgttttgaggcagacaagatcgactgggatgccgagctgcacatgcttagcatccgggatccatatctcctcttcggggttcgttgggggcgcggcgcaccgccgcgatga

SEQ ID NO: 517591 - DNA, 1626 bp, Stenotrophomonas maltophilia
atgaaaatgagccttcctccacgtagactgatcccgcggtggcgccggatgtcggcgacgcttgagcaaagggaagctggcggcaaatcgggaagggctgcaacgccctttaccttggatgaagagcgattttctgcaacagtcgataattggtcagtcaataaaacaagcgggtctcttggagatctactgacctttgttgctgatccagaacttaagccgaaggtgatagacatagtccgcaaggccatccgtgacggctttgaacttggccaggtacagcagtcgttctttgctcgaatggcggagcatgaagataaatcttcaccaagtggaacgcttagcaatcagcagcgtgtcgctgacctgaggagcattctccgcgccaatccagagaatccattggccctgttggatcttgcgcagcaccaagtctccacgggaaacggcctgcgagcggagcgcacggtaaagaccgcgctctcactttcgccgaacagccgtttggtgctcagaacgctggctaggcttaatgtccacctggacaaaagcgataagaagaccgagaaggtctccgatgcgttacgcctaatcggcaagcatgagcgcacgccgttcgacccctggctcatggcgactgagatagctctttccgaggttgccggcgttgactccaagttcgccagcaaaggagtgaagttccttaaggacggaaaggctagtgcggcagacctatcagagctcgcctgcgcaatcggcagccttgagctcaagtcgggaaatctcaagcgagcgcgtgagtttttccggctcgcattgctccagcccaacgacaatgttcttgctcaggccgtgaccgagcaaagacaattgggtattgagatcgcctcaagctccacgcagcgcaatgctgtcattgtagcgcaggaagcccagacccttttggcctggaattccctacgagttgaggatgcccaggagcacgcaagcctctggcatgacgaggagccattttcaagtcgcccacttcactttctaaccactttgtatgccgtgcaatgtgactatgcaaaggcggagaagtttgcacgacaggggctcgttgccgatccaaatgacgcaggacttcttaccaatcttagttatgcgctagccaattccggccactatgaagaggccagggcaactctgaggcgcctgctcagaattgcgcctgcaaagtacgagcctatcgcgctggcaacttatggcctcatagccatgaagcagggagactttgaagcgggcgaccgcttctatacaacagccatgagcgacttccgttgccgcagagattccagtcttgaagcaatttgctttgcgtactatgcgagggcggccaaggatactagccaccccaatcgtgtcggcatcgaaaattccgcgaaagatatgtatcgctcacaccctacagcagatagcgccctcgtactaaggaggctgggctctgaagtatcgcctcctgacattgatgtcggcatgagaaaacttacaagctggatatttgatgaagagacaaacagcctgattcccaagcatggggtgggcggagccggtgcgccacttctaaccgttcggaaaaaatag

SEQ ID NO: 517592 - DNA, 1074 bp, Stenotrophomonas maltophilia
atggatgctacgacgtcaccggccgagaggctggagggcctcacgctgaagagtgggtggttcattgagaaacttctcgtcaaaccaaaaggtgcaacaggggggaactttggcgttagctactcagcttcaaaggacggcaatcccgccttcgtcaaggcaatcgattttagaagggcctttggggaaacgaacttcatcgaagtacttaatgcactgacgtcagccgtgctttgggagcgcgatctgatgaagttttgtaaggacgaggcaatgtctcgagttgtgactctgctcgattacgaagatcttgtgctcactgaagatcagggcgaccattcgaaaaaggtatgctgctttgtatttgagatcggcaaaggtgatctccgcgcgaactttgactttggtcaatcacccaagcattcctggcgcctgatggtgctgcgtgacgtcgcgctcggcctggatcagttgcaccgaagaggcatcgcgcacctggatgtaaagccttctaacgtaatcgccttggctgattcactatcgcgcgcacatgtcatgaagcttggtgacttaggtcggtccgttaggaagggcttcaatggtccattcgatggactttgctggcccggcgacagggggtacgccccgcccgagaagtggtacggatacacatcttctcagtggcaggatgagcgtgaggccgcagatctttatcagcttggtgggttgctggtctttctctataccggcgtaccgctcaatagcctaatcagagccgaacttcccgaacaattcacgccaggcatataccgaggcggctttacgccggaacttgttgatgtcctgaaacagtcaattggaaaagtccttgcacttcatgtttttccgagcctgcctcctcaagttagtgaagagttgcgggcgatgcttgtggacatgacccagccagacccgagtcagcgcggtgatagagcggctcgtaagcagggagtagttggcatcgacagatttcatcagaagctatatcggctagctaaacgcatggaaattgaagaaagaagggtcgcggcatga

SEQ ID NO: 517593 - DNA, 705 bp, Stenotrophomonas maltophilia
atgactacgcctgatgacattgtccgggaccttggcgatacattccctcatcacaaggtatgcctttcacccaaggatgtacctcgagatgttgcgctgcccagaagctgggagaacttcggactcaggcccgacgtcgccccggtctttcctgctggctggagctcattctccaatgagttcccatcgacaattgcgctgttcaacgactgcctgctgggcacagcattgctactaggtgatgaaattgaattggtgtacatctttcacgacggaaacagcctctactactacatagggggaagacccgtcgaagatggaaccacagagaccttccagttcaagcatctgcccagcagactgcaggacttctatcgcgaagtgcacgacggctacaccttctatcctgcacgctccatgggtccgcagcgccttgctgaccagtcacgggtctccgaactggtcgatgaggcggacgattcttttgcggcaggttggatcaccgtattctcgaacggcagcggagactatgtcgcagtgaacgccgacagccatgatgattcggatgctctgatttggtggcatgagaatcctgcagctccagaactcgacatcaatgtcttcagagtcatggatgcatggatgaaaatttttctggaggacacccagcctcgcgagccaaaggtcaagtctggtgcgcgatga

SEQ ID NO: 517594 - DNA, 1158 bp, Stenotrophomonas maltophilia
atgagaatgctgtccaaggctgttgccagcaggcttgagaactttgtggcaccgaagcgtggcgagggatttgaggatctctgcctggatgtctttgagcacgtgttgatcaagcaaaagttgccaatcatcggagggccgtacacgcggattgttgcccatggtgtcagtggtgactcgcaaggcggtgtggatatttacgatccagcaacccgtgctgcagctcaatgcaagaatcagaaaaagatccacgtctctcatcttgaggaggaagttcggaacctccagagatttggcaagcccgttgcccactactttttcctgttggctcgcgacgctgtacccaagactttgcaggagtgggtggataagaccaatcagcacagcgcatcagcccttgctgatgacacggatactgaaagagtggctggcgcagctgttcctatgctccacatcatggggtggagcgaactcaagggtcacttgttcgcgcgtaatttcttgatgtggaagtggggcgtggcgcaccccgtcatccatcagtatccctacctaccaacgttagacgtgagcttcctggctgaaacaatggacgcgctcagaaaaaagctgaattcgctgcctgaccgacgggattccaaagatgctgtgggcggactcttgcgttctgttaatccagacgggctgatcaacttagtctcagactcaaaggtggagcgagaagtattcgatgggttacaagaattcatcgatgagttctggcacgtttatcgggttgctaagacgtactcgttagcggtgagcgatgtggatagccgagaccccatcatcatggagcaagggtttgcattgatgaatgatctggcacggtacctgccccgtatatctgttctccgatacctgttgccagtttgcagggcgagcgagaagttgctgcagcttttcagggatgaggatagctatgtttggggacaagtgattttcgaacagggaggcatagagttcgaggacgatggcgacaccacgttggagtttaacttcgaccccgagcgccaggattgggacaggccttactatgtggatcctgagcgcgtagatggtttgatcaagagcatcgttgagggagttgagcgagcaaggcaggaagccgcagagtga

SEQ ID NO: 517595 - DNA, 291 bp, Stenotrophomonas maltophilia
atgaaacgttgtcttgcccgctttcgccacgccgtgctgctcggcgctctgttcagcccggccatggccgttgcccaaggccgtctgccgaccatggaagacccgtcccgcggtgcgggcaacggcatcatccagacgatccagaactatggctacgacatggtgctgctgatcgccctgctggtggtggccgggatgttcattggcgtgtgctaccacgcctacacgcgctattccgagatccatattcgtttgccgagcagggactcatgtgatgttcaaggccagtag

SEQ ID NO: 517596 - DNA, 234 bp, Stenotrophomonas maltophilia
atgaccgccgcccagcaagccgccttccaggcccacagcgggttcacccctgcacagatggctgttctggtcctgtccctagtgttcgccgtgacattgctctggggcgcttgggccattcgcaccgcctataccggctgggctgagcaacgcctcagcaaccggcaatttgtcggtgtcgtgatccgcttcgtcgcgctgtacctggtgctgacgttctttctcctgtcctga

SEQ ID NO: 517597 - DNA, 300 bp, Stenotrophomonas maltophilia
gtgctggggctctgcctagccttggcccagcctttccctgcgcgggctgattacgaaatagaacgcgcccagctggccgctgtacttcgccagttggatgccctggaacggcacgccgacagcagcgctaccctctcccactccatcgccgcccggtaccacttcgactacctgcgcctgcgcgaggatatccagcgcatccgctccggcgtccagagctacctgacgccccagcgcgcccagccccgtgaccctgcccccatgctcggcgagtacatcggcgaggccgatgcgccatga

SEQ ID NO: 517598 - DNA, 2646 bp, Stenotrophomonas maltophilia
atggcgtctgcagcacatgattatcagcgtttcatgcaatggcttcatcatcccgaagggcacgtctcggatgatgctcgtcgtttcggaaggctcgttctagaaaacttcgaaagcgtcagcgcgacttcccgcaatcgcagtcagcgctcagtgcatcttgtcgatctcgcacggcgtcagtttgcagccctggacgccgctccacctgtcctggacgccctggcgggagggccaggttggcggtggcagaagttgacccagctgacgctgggcccattccgtggtttccgacatgcagaggcattcgatcttacaaagcgaatcgtgttgttctacggccccaatggcagcggcaaaacaagcctatgcgaggcgcttgagtttgccttgctcggtgccgtggacgagggggcgcagaagcggattgatgcggcccagtacctgcgcaacgtccatgaaaacagatttgtcccgccacagttggctgctttggatccccaagggcaggctgtcgctgtacaggctgatgccgatgcctacaggttctgcttcattgagaagaacaggattgactcattctccagaattgcggccaaacctgccggacagaagactgagctgatagccgccctgtttgggatggatgacttcaatgagttcgtcggtcagttcaacgagtcgctggatgcccagctgaatttggtcgccgtaaagggcgcccagcttgaagctaagcgacaggccattgcccatgacgtgcagttgatcgccaacgaacccgcaactgttgcagcttttgcacaagctgaaggcaattacgccgcggcatttcgaccaggtctgacttatgcgcagttgcaacaggaggtgggaacgctagaggcgccgggccgcctgcaagcattggacgacattctcaaccaaccggcaccagcgctgtatggcatccgtcatcaggacctgctggccgcttaccgtgctgcggatgaagcccatgatttagtgctggatctgaccaaccagctggctgagcagcgcgacgaagcgacgtaccaagaactgtatgttgcggtacaaggactgcagggggcgtcgccagaccagtgtcctgcgtgtgggaccccgctcgaaggtcaagtgcatgttcacgagaacccctataccaaggctgctcagggattagagaggctgcaggcgcttacagagcttaagcagcgctaccaggctgctatcggacagcggcgcatagcctccgatgcgttgcgtgcatacttcgccaactttgcgcagcgcgtcgctgccacaatcaatagtgagtatgaggtttgccggtacatcgcaaaccctggcgtgcagctggataccgcttggtggaaggtcggctatacgcctgttgcggatggtgtctccctctcacagcaagcggtgaactacgcgttgcagctggagcagctggatgtcgcaattcagcagaaccttgaccagcgcgctcaattgatcgaagagcgggaccgactcaatcaagctcgtgtggcaatcgcagagcatgcagcccgacggcaccaagccggaattgcggttggcgatgccaagcagcgcgttgcggcgtttgaggccgaaaacgctgagttgatcagggaggctaccgccgagggcgagcgtatcgcggccgaagtgagggtgcagcgcgcttacacggaatttctaatgctgcttcgccagtaccgtgctgggctgccaggtgccttgatggccggcttgaacaacatggcgatggatctgtacaacgagtttaacgtccgtgatgccgagcaggacaaactttgcggcctgcatcttccggtcacaggcgagggaaggatcgagctgaatttccgtggcgctcctgaccggcgtgttgatgcgcttcaggtcttgagcgaggggcatgtgcgctgcctgggcctggcgattctgttagccaaggcgtcgagcatccaggcaccgacgatcattttcgacgatgcaatcaatgccatcgaccacgaacaccgacagggtattcgagaggcgttgttcgagagcgagcggtttgccaatacccagatcatcgtgacgtgtcacagcaacgaatttatcaaggatgtgcagaaccacgttgaccgcaaccagtggcattcctacaccttcctgcatcacctagggaaccaccaccctcgcgtgctgagggatgtgccgccgcaggcataccttgtcaatgcaagggctgctcttgaaagaggcgaccatcggggggcgctgcagccctccaggcaggcgctggagatgctggctaacaagatctggcggtggctgggcaagtgcgagcttgggatgatcagcgtaaaggtggcaggcgttggcgatcagccctcacttcgcaacctgtgtgatgggctacgagcgaggcttcatggcgcccacactttcaaccacgacgacaagcagccattgcttgatgcgttcggtcagctactgggtatcggcgagcagacgttcatgtggcaatacctcaacaaggggacgcacgaggaacaggaccgagaggacttcgatggtggcgaggtcgagcgactggtcgcacttatggaagggatgaatgcgttgaggctgcgcaatcgttag

SEQ ID NO: 517599 - DNA, 498 bp, Stenotrophomonas maltophilia
atgaccccagaagaaaaggcaaagtccattcgcaatctcactcgcatggcactaccaagcgatgacggctatttgttccgacttggggtagccctctactccttcgcctccctcagcagcttcatgacggagattgccagccacctggacccaaatatcgaccgcaccgaactgcaggcaaagaccggaggtgaaattctaaatgcattccgtagctgcctgaaaaatgccaagaaggacatcccggcgattgcttcgcctggccaagcagcggccgacctcttccaaaccttgaacagtgaacgctcagatattgttcacgcctaccccatcacaaacggctccggcgctcaaatcctccatcgccggctcgactcgaaggggaagtacttcgaagttaccaatgattttctggacagcttcatttcgcgacttcacaacgtcagcagcgatctgtatgcgatccggaaaattgtaaaacccgaacttggcgactga

SEQ ID NO: 517600 - DNA, 456 bp, Stenotrophomonas maltophilia
gtgttcgtgcaatcaggactgatcgaatgggcagaagacgcggcccggcaggcacgtggggagcgcctgccggccgagccggattttcgctattacctgaggcaagcctatcgctcgctggaaagctacctgctggccagcgcctacaccgtactggtgttcctggtacgcctgctggtgctgtgcctgagcctgccgctgttcgccatggcagctttcgtcgggctggtggatgggctggtgcggcgggacatccgccgcttcgaggcgggccgtgaatcgggcttcatctaccaccgggccaaagcctgcctggtgccgttggccgtgctgccgtgggttgtttacctggcgctgccgatcagcgtcccccctgccctgatcctgttgccggcagccgccttgctggcagtggtcgtggatatcgcagcggcgagtttcaagaaacacctatga

SEQ ID NO: 517601 - DNA, 867 bp, Stenotrophomonas maltophilia
atgattgttggaatcgacctgggcacgacgcactcgctcatcggtgtgcattcgtcggatggaccgcgcctgttccccaatgcccatggcgagctgttgaccccgtcggtagtcagtctcgacggcgacatcgtgctggtgggtgctcccgctcgcgatcgcctgatcagccatcctgatcagagcgtggcccatttcaaacgctggatgggcagcaaccgtgaaacccggctgggcgatcgcgtattccgtcccgaggagctttcggcgctggtgctgcgttcattgctggccgatgcggaagccgtgctcgggcagaaagtggaagaagcggtcatcagcgtgcctgcgtatttttccgacgcccagcgcaaggccacccgcgccgccggcgaactggctggcatccgggtcgagcgcctgatcaacgaacccaccgccgccgcgctgtcctatggcctgcagcagcgcgaggaggatgctcgggtgctggtactggaccttggcggtggcaccttcgatgtctccatcctggagctgttcgaaggtgtggtggaagtccatgccagcgccggcgacaacttccttggcggagaagacttcctgcgggtgctcgagcaggcgttgctggccgaacagggcctgcgggcggccatgatcgccccgggcgaacgtgcacagctgctgcgccggctggaactgttcaagcgcgaactgagccaacagggcagcggccacctgcagttcaacctggaaggccgcgaattggactggcagctggatgaggcacgctacgcgcagttgtgcgccccctgctacagcgcatgcgtgcgcccatcgaacgggccatccgtgatgcccgcctga

SEQ ID NO: 517602 - DNA, 366 bp, Stenotrophomonas maltophilia
gtggcagatattgagaagcagaaactaaaactggcgaggatgttggaagccgcggcgaaggagcaagcaaaactcttggtcgccgagaagcaggagaaagagcggcacgcccgccaagccgcgcgagacaaggccaaggagcgcgccaagctgttccgctcggccgacgcgcaccgcaagattggcttgggcggcctggtcatcgcagcaagcgccgatggctgggatgaggccgaaatcgttggcgtgctgctggtcatgggcgagcgcatgagcgcgaccgaaggcttgcgcgaaaagctacgcgagcgcggcattgcgcacatggaagcgcgggcggctgcacgagaggcggcccggtcatga

SEQ ID NO: 517603 - DNA, 801 bp, Stenotrophomonas maltophilia
atgagtaggcgtcaaggggccgacgcgcgccgatgtgcttttctggaactggaaaagcccgggcctgcccttcttccccttaaagcttcgctaagctcccctgctttgcccttcatcttggggtcgcctccggctcccccgacgatgaagggcaaagtctcccctaggacctccgcgcgaagcggtcggggtgacttggcccccgttggttaccgccccaaaagggacggcccgacagtcgggcgcggtgatagaaggactacaccgctacgacggattcacgcggtccaaccgcgccggctcagggttccgtcaccactatgtggcgtctctcctgtgggcttgcccgttccccagccgtcgctggaaaatatcatcctagctgccatccatgggccacaaaccgctgatagtcggaccgcgacagggcacacgagtggggccagattgagcactccccacgcctctgcgacgcttgaactacctggttggcgcaggttgcaggccatacagcgcccggtccccctgcttcaaagcctgcgcaccctggtggggtcaacccaagcccttgcgggctcccagttctccttgtgcgcagccggtctttccaccgacaacgagttacggctaccaacggccttcgggctgggcagacagggaggagagaaaagagggggcttgcgggtctgtccaggcttgttagagtggcctcaaggggcaccgcctgggcatgtcgtagctgattcctacatttgctcgcctccgagtcggtcaaactcgggggccgtgaactcaaagtaa

SEQ ID NO: 517604 - DNA, 471 bp, Stenotrophomonas maltophilia
gtgctgtacccggtgcatctgaacccgaacgtgcagggcccggtgaacgcccacctcggccatctcgacaacgtgcacctggtgccgccgcaggactacctgcgcttcgtgcggctgatgcagcgcgccgacgtcatcctcaccgactccggtggcgtgcaggaagaggcaccggcgctggccaaaccggtactggtcatgcgcgacgtcaccgaacgcccggaggcggtcgaggccggtgtggtgacgctggtcggcaccgcgccctcgcgcattgtcgaagctgtcaatgcggcactggcacaaccaccgcacccgacccgcttcgatccccacgccagcccctacggcgatggccgtgccagcgcgcgcatcgtcgccgccctgcgtggcacgccgcttcccgaattctcgcccggcctccgcagcagcggcgccgtccacccccacccacgcgaagtgacgccatga

SEQ ID NO: 517605 - DNA, 177 bp, Stenotrophomonas maltophilia
atgcctcactgctgcattgcctggctggtcatgccgtcggacatgctttccttgaggatgaattcctgcaccagcgctgtggtccagaaagtggccgccacacgtaccaccatgtccagtgcgatggaaaccatcgctgcaagtacggccatggagaacatcgtgccaatgccgtag

SEQ ID NO: 517606 - DNA, 702 bp, Stenotrophomonas maltophilia
atggtcgtccgccgggcatgtcggctccgccgccggcggctccggagtcgtcttctggctcaaactcccatggtcagcagtcggcgatggggaagatgtttgatggaccggaggcccgggttcagcggttcccggtcagcgtggtgcggcaaatccgagtcatggaaactagagattcagttgatgaacgtaagcgcctctctaaagcatctgtgcttgtccctgatcctactgggctctgtgcacgtcagttcggcgttcgctgaagggcgctgccctccgggtcagtacccgattggcgaccaaggcgttggtggctgcgcacccatacccggcgcggctcagagcgccccgcaggagaatcccgggtactgggtcaagacatggggtgctgtcgccagctcgcctggaggagatgcaggttcggccactgggcatcaggccaaggcttcggcagagcgccaagcggtcgagcgatgccggcagggcggagctaccgactgcacagtcgtttttacctactacaaccagtgctatgcggttgtccgggctgcacgaccggacaatggcatgagattcaacaccggcgcgacgaaagaacaggcgcaggagcgggcaatcaaggactgcaaggatttgggaagtcaggcttgctccgttttccattctgactgtaccaagccgttcttccagcaagactga

SEQ ID NO: 517607 - DNA, 873 bp, Stenotrophomonas maltophilia
atggccccatgcacccttcacgccattgcactggccgaacacgtgatgcagcaacacgtaggcgctgcccggtgtgtatggactggcatagttgccgacgatgccatcgaagccgaacagcgccttgatcggctcgctctcgaaccagcggtccaggtattccgccgccgacagagtgaacaggtccagcagctcctgccgcagcggtgcatccagcgccgccagttcgcggccgagcttccccatctgccaaagtgcgggcaggccgcgccagccgccggcgacgccgatgtccggtggcgcgcggagagcccacgcgcgcagtacatcggcgaagatctccaggcgtgcttcgtacgctggcaggcgctgtgcatcccgagcggagaatccagcgacttcggcctgggtgcggccaggtgccgacaacaggtagcggtcgtcgggcaatggcaggaagttgttggccgggcgcgtgacaatgcgcagcccatgcgcatgcagttgcaggtcttcgatcaccttcggttgcaacagcgacaccgtgtacgacgccaccgagttgcggaagccgggatggaactcctcggtgaccgccgctccgccgagcacgccgcgccgttcaaggaccagcaccttctttccggccttcgccagataggccgcacagaccaggccgttgtggccacccccgatgatgattgcatcccaggacatcagcacctcaaaaaaaggggacggaggggatcaagtcgcaattcgcacaaggtcggcagtggtggggagaaacgacttaatcccctccgtccccttcttttattgccgcttcgatggtggcgatgtcgatcttcttcatcggcatcatcgcgttga

SEQ ID NO: 517608 - DNA, 354 bp, Stenotrophomonas maltophilia
atgaagtctctgaggtacgccaatgtgtacgtggcagcgcttatgggtgctgcgctcgccaacctctatctgcccaaaggggagttggagctaaagacctacaccaaggtctctgccgctgagttcgcagcaatgcgcgaggaagctttgcgcctagtcgctgaagatgcagcgccgggtgccggacgctttgagaatagctactttgaacttagctgtcgtggcgagcctaccctcctggtggataactcgttggagcagcttgtgattgtgctgtatgcgggtggggagattgatgccccctgcgatgttccgatgacgtcgcatcggagtgggcggattgtgccgaagtag

SEQ ID NO: 517609 - DNA, 840 bp, Stenotrophomonas maltophilia
atggcactccccaaaggcagcaagagtgaagaggaagcatactcggactacgactgggtgattgttacactctatcggaaactgaccaaaaattactctaagagcaccatcccctcacagatagacttttcattggatgatgtcagaacggctgtccgtgaatccgttgcggcggggagaataccaaaaataataaagaacgtcgcagatatcaagtatacctacgacgctcgacgtgatttcccagcggagatgacacaggcgttcccaattacttggctttcgcacaaaaagggccagtactacttcagaagaacaaagcggaagaacattattgaccttagctcaatatgtaaaaaaattcctcgccttgagtacgtcgttgatcagacccccgtttttaactcaaaactaatgggaaatgacgaacaagcggtattcgccagagtaagatacgccggcatattcaatcagcttcttggcttccaagccaaccctgtccagggacatcaccgaacaagcgtgcactacggccaagtagaggtggatgaggttcaggctggcctcgatggacaggtaggagtgattgttccaatttcaggaaagggggggcaggacaagttgtcatggtcgcaagctctaaacttgaatacctatggcacagcttgcctcaagcgttacggcgtcatatcgccgccattgacaggcacaaaggtacgcagcctttgtctttggatggacaagaagagttctgaaatttggatcgttgagttctcagagcaagatgatgacatagacaagatcgaggctgtgatgacacgccgattcaagtttgtctag

SEQ ID NO: 517610 - DNA, 1047 bp, Stenotrophomonas maltophilia
atgcagcacgcaacaataatgcgcatttattcggagagggcggatataaataatagtcctgactaccagcgtggtggaggagtttggacgcctgagaagaagaggcttctaattgattcaatactgaacgggtacgacataccaaagatatatttgcacaagcttacccgcgagcaacgagagattgctgggtacacgtacgcgattattgatggcaagcagcgccttgagaccatctggcagtttatggatgggcaatggacgctgtcagatgagtttgattatcaggatgacccgtctgtaaacctatctgggttgagctacagtgaccttgctcacagcaatccgaaaatacgaattcgtttcgatagctttgtcttgccgataacctgcgtagaaacggacgatctggagctaatcgaggacatgttctccaggctaaatgaagctgttcctctgaatgcggcggagaagcgcaatgcgattggcggtgatatggtcgctgcgattcgctctgttggaagccatgaattcttcaagcgattcgtttcctttggagataaacgcttccagcatcgtgagtcggcagctaggctgctacttattgagcaggggttgctaactcaggggaaaattgccgataccaagaaagaatacatcgatgcgatggccaggaattacaagcaaggccaccagctcgcagttgcagatatgaaggtgtctgttgagagcggactattagaaatgtgtcgcgtattctcggacaaggatgaactccttagatcgcaaggcaacgttgtgctgtattatttggtatttaaaagtgcgatggctgctaataggaacatctcgaggagagagtttcttgatttcaggcaaaaagtgcgaggtaatcgagatttggcggagcacaattttgaacaggcggattatgagttgcttgaatatgatcgcttgtctcaacaaggcaccaatgacgcttcgaacatccgcgctcggctggcgactttttgctcttatttgaatatacagcctgttaaaatttaa

SEQ ID NO: 517611 - DNA, 744 bp, Stenotrophomonas maltophilia
gtggtggttcgagaaatatctagcgtgtcagatcttctgaaggcactggctgctgatgtggatggatacggagggagtgtttggtttcgggggcaagccgcatttgattggacccttacaccgggctactacaggctgaacgctccaccgccggaaacaacgcttctgaagaggtttcggcagtcagccgcgatgcttctttcgaaggatccagctgcaagcttcgactggcaatttctaatgcagcactatggaattcccactcgattgcttgactggacggagagtccgctaatcgctttgtactttgtggtttctgaaatgcaagaaggtcttgacggcgcattgtgggttctcaagccgtcggagctaaataagatcgcgaagattaacgacgctgaagaagagttcttcatcccatcatttgaggatggggagctcatcaactataccgttgactcattaagtagcggtccaaggcgaactcaactatcacccatcgcggcaatagccaccagaaacaatgcaagaattcaggcgcagcttggcgtattcactatccaccatttagatcagactccgcttgagaagttgggcgatggcaatcatttctttaagtatcgggtaatgggaaattccgttgccgcactgaagaaagaaatttcattgcttggattcaataagttctccatatttccagagcttgcgagtattggcgataatattagggggtctattaagtga

SEQ ID NO: 517612 - DNA, 3456 bp, Stenotrophomonas maltophilia
atgatcgagtttaccggtgagcgctttgttccgaccgaacaaggcgtgattaggcaggaacacctgcatcgctatgcctggtgcctgccgctggtgaaaggcaaggatgtgctggatgtggccagtggcgagggctacgggagtgccatgctggctgccaatgcacgctcggtacgtggcgtggatatttcccatgacgcggtggcccatgcggccgagcgctacgcggcgctgcccaatctcgcctacgtgcagggatctgcagcagccattccgctggccgacgacagtgtcgatgtcgtggtctccttcgaaaccatcgagcacctgatggaacaggaggagatgatggccgagatccgtcgcgtgctgcgccccgatggcatagtggtcatgtcctcgccgaacaaggaggtctattccgatcgcgccgggtatcacaacgacttccatgtaaaggagctttaccaggcggaattcgaggcgcttgtcgggcgctatttccctgcctcgcgcctgtgcgggcaccgcatggccgtgtgctcgacgatcactccgctgtcggaagtgcagcatgccgagagttaccaggcgctgaccgacactggttccggtgtcgaggcgcgtgtggccaatgtcccggatgcggtctacttcgtgattgtggcggcggccgatgtgtccctgctgcctgatacatctgcctcgatcctctacgccgagggtgaggatctgtatgcacagcagcatgatattgctcgctgggcacagggcttggacaacgagcgtgaaaatgccattggctgggcgcgttcgctggaagcggagcttgagaaatcccgcgccgattaccaccgcctggaaggcgagttcgatgatcgcacgcgttgggcgctggagctgaatcagatcgtccaggccagaggcgaccacactgtcactgccgaaatgcgcgcacgcaacgatgcgctgcaggcgcagctggaacaggcgcaggcgcagctggaacaggcgcaggccggactggaacaggcgcagagcgagaaggcggacatcgaagccgaactgcgacgtcaccaggaagcatcgcagtacgaagcggccgagctgcgccgactgctgcagacggcccatgagaccgttgccagtcgttcggaagtcagccgcgaactgcagcggcgctctggtctcgccttccggtccgctccggaagacacctccgagctggaagtacagcgcgtcatccgcgactacgacgaacagttggagagcctgaacgaggccttcgcaaaggtgctcgcctccaagtcttggcgcattacccgtccgatgcgtttcgcttcgcgcctgctgcgtggggatgtgccggccatcattgcgtcgctccgtgccagcggtctggcccgcaaccgattgctggcgccgctggcacgcccggtgcgtaactggctcctgcgccatgacaatgcccgcgttgaaccgctatcgggtctggcgttgcagtcggtggtggaagatccagacgaagtactgaagaccctgtccttcccggtgcatgaatcgccggaagtcagcatcgtcattcccacctacggcaacctgcaacacaccctggcctgcctgcgctccattgccgaccatccgccggcggtgagctatgaagtactggtgctggaagatgcctctggggatgcggagatcgaaaagctggtcccggttccgggtctgcgcttccaccacaacccgaagaatctcggcttcctgctgtcctgcaatcaggcgctggagcttgcacgtggtcgctacacctacttcctgaacaatgacacggaagtgcgtccgggctggatggaccagatgctggatgtattccagcggatgcccgattgcggcatggtcggttccaagctggtctaccctgacgggcgcctgcaggaagccggtggcatcatctggcgcgacggctcggcctggaactacggacgcctgagcaacccggccgacagccagtacaactacctgcgcccggtggactactgcagcggtgccagcctgctcattcccaccgcgctgctgcgtgaactgggcggcttcgatccggaattcgtgccggcctactgcgaggattcggatctggcgttccgcgtgcgcaaggcaggctatcagctctactactgcccgacctcggaggtcgtgcattacgaaggcatttcacacggcaccgataccggcagcggcatcaaggcctaccaggttgccaaccagaagaagctgcgcgagcgctggcaggacgaactggcatggcacgagcccaacggcgagcacgtggtgctggcccgcgatcgtgcctggcagaaggaaacggtgctgatcgtcgaccactacgtgccgcagcctgatcgggatgccggctcgcggaccatgattgcgttcatcgacgcgctgttggcacgtggctgcgtggtcaaattctgggccgacaacctgtacttcgatccgatctataccccgccgctgcaggcccgtggcgtggaagtgatgtacggcggccagtgggtgggcggctttgcgcgctatctgcaggaaaacccgcacgtgcgcatggtgatgctgtcgcgcccgcatatcgccggtcattacatcgatgccctgcgcaagcagccaggcgtgcgcaccgtttactacggccacgacctgcacttccgtcgcatggacatggaagccaagcggaacggtggcagcgatgtcgaggcacgttcgatggaactgctggagcggcagatgtggaaggccgtcgactgtgtcctctacccatcggccgaagaggcgcaggatgtgcacgcgctggagccctctgtcgatgtgcgcgcgatcctgccgtatgcctttgaccacttcaacgatgacgccgtgccagcccaacgtgccggcatcctgttcgtggccggcttcgcccatggccccaatgtcgacgctgcacagtggctggtcgaatcagtgatgccgcatgtttgggcgcgccatcccggcgtgaagctgtcgctggttgggtccaacccgaccgacgccgtacgtgccctggctggcgagcatgtcgaggtgacagggttcgtgagcgacgatgaactgaccgagcgctacggtgccgcgcgtgtggccgtcgtgccgctgcggtttggtgccggcgtcaagggaaaggtggtggaggccatgcagcagggcttgccgctggtgaccaccggtgttggcgcccaaggcctggtgggcctggacgctgtggctacggtgaccgatggcgacgaaggccttgccgccgggctggtgtcgttgctggaagatgacgcgctgtggctgcagcgttcgcgcgcggcagcccgctactgccgtggccagttctcgcgcgatgcattgggccgtgcgctggaatcggcattcgcaatggagaagaaggcatga

SEQ ID NO: 517613 - DNA, 1362 bp, Stenotrophomonas maltophilia
atgtgctctgatcgtgtcgattcggaagtggtgatcgacgtccgtggggtcggcaagagctaccacatgtacgagcgcccctcgcaccgcctgtggcaggcactggccggcaagcgcaaggcgtactacaaggacttctgggcgctgcgtgatgtcagcttcagcgtgcgccgcgggcagaccgtcggcatcgtcggtcgaaacggctcgggcaagtccacgctgctgcagatgatcgcaggcacgctcaatcccaccgagggttcaatatcggtgaacgggcgcgtcgcggcgttgttggagctgggcagtggcttcaatcccgaattcaccggccgcgagaacgtattcctcaacgcggcgatcctcggtctttcccgcacgcagatcgagcagcggctggagaagatccttgcctttgccgatattggcgagttcattgatcagccggtacgcagctattccagcggcatgtcagtgcgtcttgcttttgcagtgattgcacacgtggatgcggacatcctcatcattgatgaggcgttggcggtcggggatgcgttcttctcgcagaagtgcatgcgcttcctgcgtgagttccagaagcacggaacgctgctgttcgtcagtcatgacgcggcggcggtcaccaacctgtgtgaaaacgcggtctggttgcagaacggccgcatgcgcctgtccggcacctcgcaggaggtgatcgaggcgtacatgaccgagcagcacgtggtggggcgacgcgaggtgggctcggaagagatcgtggtggcgcacaagaaaccacgcaagatgctcgacgatgcggccgatttccgccaggacgcccttcgcgaggccggcgtgcacaaccgcatgaccctgttcgagttcgatccggacaatgtgggccaggagttcggtgcgcagggggcgcggatcgtcgacgtccgcctcaccgatgcagatggcaaccgtgtgctggtgttcgaaggcggggaacttgtccggctcgagctgcaggtttccctgcagcaggcactggacaatctcatcgttggcttctacgtcaaggatcgccttggccagcgtctgtttggcgacaacagctacttcgcgtgcaaggacaagccggtctccggtgaagcgggcgagacggtggtgggtacgtttcttttccggatgccggtaatgccctccggctcctacatgatcgacgcagcggttgcctccggcgaccagcatgatcatacccagcaacactggatccacgacgcgctggagttccgcgcgatggacgagacgatgcgcttcgggctgctcggtctgccgatgctggccatcgaagtttccaaggagtcgagatga

SEQ ID NO: 517614 - DNA, 237 bp, Stenotrophomonas maltophilia
atgtttgcacatgccgtcgagtaccgcagagaacgcgtgaccattatagccagcacgcaggatctggataggccgttcgtcggcaacagtccgtgccaattcagatatgagaagacgcgttttgcacgatcttcaggcgccgccgtcgatggcgcggtccaggcgccggttcaggtcggccagcgtctgctgcagcgccaccgcctggcgggcgttctcgtcgcgcagcagctgtag

SEQ ID NO: 517615 - DNA, 696 bp, Stenotrophomonas maltophilia
atgtggagtagctatggagcattctgcgactggaaagagcctgctggaactggagcggatctccatctttttggttcgcagcttgagcgactaactgccggtcattgggtggggacgttggagttggatctcagggatccatcaggtcgatacattgcaagatacatattcaacttcgatttccaggtcactgactacgacgcgatttcgatctacttcccgaccttcgacaccgtcgcgccgctggtcaatctcgacctgcgctacgaccccatccagaaggtcgtgggtggcaggaagcaactggacatgtgcctgtacgacggcctgggttcgcagagcgagtacctcgacgtcacggttcgcgacagcggtccacgcccacctgcgggatcggacttctcgctctggcaccgcgatggcggcagcgatgccagccagcgcctggactaccgcgtccacctggactacggcggccaccgcctggcgatgaagcacaacgtcaagcagcagctgcgcggcatcgacagcgcacagctgcggctggtgatgctgccgggcatcagccagccggtgtactgcgtgcccacgccgctgaccctggaaacaccgcccacccctatcgccagccagcgccccggcctgtacgagggcgagctgaccgtggtgctggatgtccccactgccaaaccctga

SEQ ID NO: 517616 - DNA, 723 bp, Stenotrophomonas maltophilia
atgcccgcctcgatcggcggagcgggcatcggaacgggaggtgccttgcatttctccgggggaagcggggccatgtccaccgtcatctgggtcgcggtggtcttgaaggggctgcttcgcatcggacgattgattctgcgcactcggtttggcaggcaaggtctgctgaggcgaaacctaatcacggttttttttactgtcaacaacccccgcgaaaaattttcacatccgcgccatccgcggtgttgcctgcacggtcgcgacgctccgccctcgacgaccaacaatgcaccacgcacgcgcgttgcctgcagcaacaacaacgcaagcgttgaacaaaaaccacttgaaataggcactctgcgcagatgcacgcatgttggcggccactgcatgcacgcaacgccggcaccggccggcgccggcaccagcgccagcacaacggcgccgcaacggggggcgaaaagttttcacatccggacgcgtcggcgcggggcggaaacgcggatttgcgcaaaactgcgcacgcccctcggtaccgttcgcgggtctgctgatgccgcgtcgagggcgcgcagcaaaccctgcgtcatgagcccgacgtgctcgccaaaacaaaaacggccacccgaaggtggccgttgcagaacccggaaacgacgactcagtggtcgtcgttctccagggcttcggcgtacgcgtccgggtccagcagctcgttga

SEQ ID NO: 517617 - DNA, 183 bp, Stenotrophomonas maltophilia
atgctcggctgctgtacgcgaagcctctcagccgagcatggctcggctctacagaagatcattccgatcattctttcgttcatccacgcatggcgtggacctaccgtgtcgaccaaggtcgacacctaccaacagcagcggaagtctgtcgaaggcggggtgggtccggttgcgggggcgtga

SEQ ID NO: 517618 - DNA, 423 bp, Stenotrophomonas maltophilia
atgatcccttcaataattcaggttcaaggccttggcgaactgcacatcgtcggcgactccgatacaggttggttcgcccaaggacgcttgcctgcaaaggacggcacattcttctcgatccagacgtccgaagacggtcaactgatcccagaggtgggcttcgtgatggggcagctctcgaagctgccagccctgcagcaacaagccttggaacatctcgccgttcacttcccggccgaagcttcttcgggggaaggcccgctggcatccgagccagaacttacgttctgggaacagaaaaggtggtcgattctctttgcagagggacgactgacaatctgccacccctacggggttctggtcgacttcaatgggacgactcctgtgggctatcaggatctctccgacgctgacgaattgtga

SEQ ID NO: 517619 - DNA, 711 bp, Stenotrophomonas maltophilia
ttgaacagcgaccgacgtgcgcgccagacctatcgccagatcgccgaacagttgccggtggcgccgagcacgattgcccgcctgctgcggcgcgctggtttgcaccggctggccgagttggagcccgcaccgccgaccaaccgctacgaatacgcccggcccggccagttgctgcatttggatatcaagaaactggggcgcttccgccagcccggccatcgcgttaccggcaatcgtcagatcaactctcgcggcggcggttgggagtatgtccatctggccatcgacgaccactcgcgcgtggcctttgcctccatcgagccagatgagcgagcccgcagtgccggccgggccctgttgctggccgtgcgttactaccgtgggctgggcgtgcgcttcgagcgcgtgctgaccgacaacggcgcctgttacagatcacgcagcttccgccgtctcgtgcgccggctcggtatgcaccacctgcgcacccggccctacacgccgcgcaccaacggcaaagccgagcgcctggtgcagaccagtctgcgcgagtgggcctacgcacgcgcctatgacagctccgaacagcgcgcccatgcgctcgggccgtggctgcatcactacaactggcaccggccccatgccagcctcggctacaaaccacctatttcccgaattccactgaacaacgtgttgggtttacacaactag

SEQ ID NO: 517620 - DNA, 1587 bp, Stenotrophomonas maltophilia
gtgaccaccatcgaacgaattaccaccccgcgcatccgcatcttcgacaccaccctgcgtgacggcgagcagtcccccggctgcagcatgagcccgccgcagaagctggtgatggcgcgtgcgctggacgaactgggtgtggacatcatcgaaaccggcttcccggccagctcgcagtccgaccgcgaggcgatggcactgatcggccgcgaactgcgccgaccgagcctgagcctggcggtgctgtcgcgctgcctgcaggccgatatcgagacctcggcacgtgcactggaagccgcggccaacccgcgcctgcacgtgttcctgtcgaccagcccgctgcaccgcgaacacaagctgcggatgacccgcgagcaggtactggaatcggtacgcaagcatgtatcgctggcacgctcgtacatcgacgatgtcgaattctcggccgaggatgccacccgcaccgagctggactacctgatcgaagtctcgcgcgtggccattgccgccggcgccactaccatcaacctgcccgacaccgtcggcttcaccacgccggaagaaatccgcgcgatgttccagcaggtcatcgccggcgtggccgacgttccgaacgccgccaatgtgatcttcagcgcgcactgccacaacgacctgggcctggccgtggccaactcgctggccgccatcgaaggtggcgcgcgccaggtcgagtgcaccatcaacggcatcggcgagcgcgccggcaactgctcgctggaagagatcgcgatggtgctgaaggtgcgccaggccttctacgagcaggacagttcgatcaacaccccgcgcatcgtcggcacctcgcagctgctgcagcgcctggtcggcatgccggtacagcgcaacaaggccatcgtcggtgccaatgcctttgcccacgaatcgggcatccaccagcacggcatgctgcgccatcgcggcacctacgaaatcatgcgtccggaagacgtgggctgggaggattcgcggatggtgctgggccgccacagcggtcgcgccgccgtcgaagcgcgcctgcgcgcgctgggtttctggctggacgaagacgaactgaagctggtattcgagcagttcaagggcctgtgcgagcagcagcgcgtggtcaccgatgccgacctgcagacgctgatgcagggcggctccaatgcacagggctaccgcttggcctcgatgaccatcagcgatgtgggcagccgcgccaacgcgctggtcgaactgtccgacccggacggcaaccgcgtggccgaaaccgcacagggcgacggcccggtcgatgcgctgttcggcgcgctgtcggccgccaccggcgtgcagctgatgctggacagctaccacgtgcacagcgtcggcatcggcgcggatgcgcgtggcgaagccaacctgagcgtgcgccacgagggcgtggagtacgacggcaccggcaccagcaaggacatcatcgaagcctccgcgctggcctggctggatgttgccaatcgtctgctgcgccagcgccaggccgccgcccacagcagcaccgacgttcccacccccgccaccgcctga

SEQ ID NO: 517621 - DNA, 318 bp, Stenotrophomonas maltophilia
atgatcttcatcgagacctgcccaaccaataacctcgagttcaaacaagaatgcgctccgcaccacccgttcctatcatcgaatccgaacgaattattatcggcattcgcgcaactgttgcctctaattgaagagccccaccccgcaaggtggaaccccgacccgttcatgccgcaatctctgaagatccatctccatcagttcgcgcgtagtctccggcggatcaagacgcaaaccttcctcgaggatttgcatcgcgcgcttacagtctcccccgccttgctcaagggagagaaacagtgccaatcgctgcattga

SEQ ID NO: 517622 - DNA, 747 bp, Stenotrophomonas maltophilia; identical to SEQ ID NO: 517562

SEQ ID NO: 517623 - DNA, 813 bp, Stenotrophomonas maltophilia
gtggaagcaaccaatcgctaccacgagcttgtggttcaagctgcccagaaggccggccacgtcgtctttgtgctcaatccgcgcgacatcaaacattacgccaagggcgtggcctgccgcggcaaaaccgactcaggtgacgcgcaggtcattgcgcgttacatcgccaaggaggccgacaatctgcatgagcatgtcgcccgatcgcctgcgcaggagcagctgcatgtgctgctccagcaacgtgacagcctggtccggagcaaggcgaagttgaatctctcgctaggcgcgggggcgtcggagtcggccatctttgggcgcatcttcgatggtctgaaagaggccattgccctgctcgaccaacagattcagcagctgtgccgcagtggcgaacagcgcgacctgtatcggcggatcatgaccattccgggggttgggccgacggtagcggccttcgtcacccatcacatcacacgatggcccttgaccagctcggacgcctggatcgcctgtaccggcctggatccgcgccccaacgaatccggcgcccggatcggtaggcggcgcctgtccaagcgcggcaacgccagcctgcgccagatcctctacatggcggccatgggactgacccgctccaaaaatggcaaagccctttacaacgccatccgcgaacgcggccacagcagtactgccagtttcaacatcctggccagaaagctggccaggatcgcttggggcgtcttcaagagcggccgggactttgacccggccatgctgaaagtgggtcaagcctgcttccagcaggcttga

SEQ ID NO: 517624 - DNA, 489 bp, Stenotrophomonas maltophilia
atgagcaaaacagcgttggaaaacctgcgtcgagactggcccaaacgccatgcgttgaccccggaggaagtggcggttgttctcggtcgcaactccaactctcggggcgtgttgcagaagatccgcgagggcatgaagagtggccgttatcccggtgcccggaagattgacggacactggcagctgccgcttgaggacctagcagaaatactcgaccccacgcccgaaacggtgatggtgccggttgtggccaaggctggtcgtcgccgctcccaggttggcccacgcatccgctttgtgatcaatgctcgatttttcgctcaggtatgcgactccattggatacgcgcagggtgcccaagcgctccggaatgatgcttggaccgtgcgtgaggaactccgtcaagaagactacgcccgccgtgccgaacgctcaaagatgagtttggttgaggcgctcgcagggctgggacacaccaaggatgattaa

SEQ ID NO: 517625 - DNA, 138 bp, Stenotrophomonas maltophilia
atgagcgaactgaacatcacgccatacgccgaccaacaccagcccattcatattaagaatcgagacaaactgtacagcgcccgagtacagcagcacgaactgatgagtcacattggaggtggcgatggcgaaggttga

SEQ ID NO: 517626 - DNA, 492 bp, Stenotrophomonas maltophilia
atggcgaaggttgacgaacagcagcgccaagcgttagcccaagcgcctggggatctccatctcaccgcagcgcaagccgctgtgttgatgcaagtcagcaccaagacattgcagcgtctgcgcaaccaagggatgccaccaccgcccattggggagcgtccagcacgcaccgaagagcgttggtccaccacccctgtgcgctacagaaagagcgatgtggacgcatggctccaacatcctgtgatgcccagcgtgcaattgcatgcgttccaaatggctaacggcatcatcattgcccacgccaaggatcttgatgacaacacggttgttgacggtatttttgacttgctcaccgagctgcagtggagcagcacagatctgatgatcgaagcacagcagatgttgttcgatgagcaacaacaacagcgcgccaaagtgcaagagcgtattgctttgcacgaaagaaacgtcctcgcgcaagcactgagatag

SEQ ID NO: 517627 - DNA, 681 bp, Stenotrophomonas maltophilia
atggagaactacaacaagcgcgccaagtcggtcctgggactggctgtcgtgaaggggaaattggatctgcttgaaaagaggttgaagctcggcgttgacccgaattcaacctactacaaagaaggtgattgtcgcagtcttgtggagctggctttcaagtgcaagaaaatggagtcgttggatattttggttcgatacggggcgaacacaaacattgtattttcttgtggctacacaatggttcactactgcacccgcatttatcagtggcagcttgaggatgttctcaaaatgggggtggatccaaatacgtgcgcgtcgttgagtgacatggatttcccaggtcacgccgctttgcacatggcagtgaggcagcgggatatcaagacaatgaagttgctgatttcgtacggagctgatgtcaacttgcattgcgactattgcggttacaccccgttgcatgctgcgttcttgtttcctgagagcgagacaatcaattttcttttggacaatggcgcggatttctatgcgctggatgactgcggcttcattccggagcagattgctgactcgtattacacaaatgaggcacaaaaaatcatgagcgagcgaatggcgcggaaaatcatggagcaggttgaagctggtgatgacgcaagctttggtaaacgccggatgtaa

SEQ ID NO: 517628 - DNA, 225 bp, Stenotrophomonas maltophilia
atgggtgaggtgctgcaatttaaacttatcaaaaagcgcaagccataccgccgccgcgcgcggccacaaaaaatcaaccgcacgttccgctttgatcaagagaaattggcgcggttggaagaggtggcgcagcgcagtggtatgaccgtttccgaatacatccgggaactcacggatttggccgttggcaacaactggttgttcaacgaagcaaaaaacgcataa

SEQ ID NO: 517629 - DNA, 321 bp, Stenotrophomonas maltophilia
atggacaccaacaaagacattgaagaggcgttttgcgcggcgttcagccacatcattgttgatggtgatgaactgttggaaaaagcacagtgggtagcgcgtgggttctgtcacctgtccaatcacgcgccggacggcaacgtcacctgggatgctcttatcttgcagcgttatgactgcaagattggacacgggaagaccacccccgaattggacgtgcaattgcttgaatgtgttttcaagacagcccgccaaggctacgccctcaaccttttgcgcagggtgaacaaccacgctgtgcccagaggactcaatcaatga

SEQ ID NO: 517630 - DNA, 213 bp, Stenotrophomonas maltophilia
atggaaaattatgaagaagactggtgggatgaccttattgcagcggagcgctttgcaatctacaaagtggatggcggcgtgcaaatggtcctgcatcacgactttgatgactccacagttgagcttaacaccatcgatgacgttttgtatcaccttcggaaagcccttgaacggggtttaacagtatcgatcaatgtggagaaacaatcatga

SEQ ID NO: 517631 - DNA, 1092 bp, Stenotrophomonas maltophilia
atgagcgcagccagcgaactcaagcaagatattgctgaaaaattttacgaccaacttgccgaacgccgatctgtgttggatcacggctttcgggagactgaaacaccattgtcgatgattggtggctggcctattggccccagtggctatccattcaaagacttcaacgcactgcaattgatgaccgtttcactggatcgcggcttcaccagtcccatctatatgaagtccgagcagatcaagaagaacggctactacatcgccaaaggtgagtccaaagccacaaagattgaaagcacgtacaagcaagaggatggtgattttaagtcggtgatggcggtgtgcttcaacggggatcaaatcaaaaatctcccccaaaacaaacacacatacgcgtggcagggactggcggacaatcgcgatgcattcttggatgacatggttgccaagacgggagcgaaattctcatttgatccattgaacgcgccgtactacgaacggtccaccgacacgttgtacatgcgtcctcagacggagtacgccaccaaacacgccgatggcaagagcgcgtactacaacgatgtgatgttcttgcttgctgattgggccacccaccccagccgctatcacggcgtgcaacctggggagcagggcagtgagcaggacagccaataccgtttgggacgccaattggcgttgttgcagattgccagccgcttgggaatgacctacgaacccgatgacagcggttgggccaataactacatcaacagccgtcccaactggcaggaattggaacgcgccgcgaaagctgcagacaccattttgaagaccattggcgtgcccgaggttcaacaagaacccgtgcgctccaaggtgtggaaacaagaagcctcgcaagcgttccgacccaccgtgcagcccgcagatcaccaacaagcacagcagcaggtggatcccgtgcaagcgtttgtggaagacaaaattcaagttgtccacgtggccgacaagcccagcaaacaggtgggtaaggcagtcaagaaggccgcagcccaaaaactcaacggtgcaaaacaaacactgacattgtga

SEQ ID NO: 517632 - DNA, 612 bp, Stenotrophomonas maltophilia
atgtggtatgcaagcgcgaaagaaacgcagcgacttcttgaaagcgagattgtccgtctgtccgccgtctacgacaaggatggcaatgccccgtcgttggaaggaatggttgaccaaattaaagagctggtgggcctgaacctgcgtctaaaattgtttgagtcgaaagtagagcgtcatcgcgaggcattcgacaacatatcgggcgactacagtgatgttgaaatcggccgtcaggtcatggctaacaccggcatcgctggtccacagtcccgcgcagtattgccccaaaatatgcgcgacatgattgacacaagcattcctttgttgaacccgcagttgtgtgatgtctttcttggacgggtccgggagcgtttcaatcttcccagagactcacaactctttgttcgtgggagttgggagagccacgccgtgcggatgcaatcatggacagacgatttggtgacgtttgtgcacaacgaaacagggaccactcacagtgtggcggcaaacaaagtttatttaaggagcgcagatcgtagtgtttccttgtccagtgcaatgcgtcagatgtgtcctgggcgacacgccaatcaccacccacaaatgtga

SEQ ID NO: 517633 - DNA, 621 bp, Stenotrophomonas maltophilia
atggacaaaccaacactcgcagaggaaatggcgctgatatacagcgtaaaagctaaggcctcagactacgcacaaaaacgcaacgaggaagcgttgaaagtcatggttgatgaagtgtgtgtgcttacgggcgttagatttagaagtcgtctccttgagcagcctacttcgcgatgtgtttcggaaatcaaggcactgtgcgaaaacataacggatctagaaattggaaaccagattatttcgcgaaccggggtagggtctgtagagtgtcgcagtacattcccgcagcagtttggtgatttgttggatatgagtattcctcccatcatgcccgtcttaagcagcattttcatgggacgtctctcggagcggttcggtttgggcgaagatgtggtggcgtcagtccaacgcgcacgtgttgagcgtcaacctgtagagatatcatctatccgcgatgattacgttgagtttaacgtcaagggtgacgatgagaaccgatggtttgtcccgcttaaagacgttcttttggaaggcaacggtagagctatttcaatggacagcgcacttgcacagatgtccgcacgaatacagcctgtcgtacaacagcagttgaatttctag

SEQ ID NO: 517634 - DNA, 402 bp, Stenotrophomonas maltophilia
atggaaaatttgacgcttcaagatgttcgtattcttgtgacggtatcaccggaccgattgttggagggggtggatgcccacggtcgaacctcacttcattgggcggtgatcaacaaacgctttgatgtggccgacgcgttggttgcgttcggagccaacccattgaagccggacaagtccggtaagacgcccatggattacgccaaccgcagcattcccaaagaacgggaatggcgattgcgcaccagtgtgattgcccaatattggaaacgcaacgcgcccattgaacaatcggccatttcggattttcgcgtcaaagttgctttgcggtcacgtgcgcttgaatactcccaatcaacaaatgttcgcatgaagcttgacaacgcttcaagatctgcttga

SEQ ID NO: 517635 - DNA, 498 bp, Stenotrophomonas maltophilia
atgaagatccaatgcattgcaattgcaacagcagttttgctttcagcaactccggcgtgggccgactccgacacatccagccgcaattacagccgcgatcaggcgttgaccgcgcgcaatattcaagaaggggtggtggtgatggttcgtgatgtcaagattgccaaccgttccaaagccaacaccggaaccgtcctgggggcggccattggattgggagcggcccaacaggtgaaaaaccgtgacgcacgcaatgcagcacggattgttggagctgcagcgggtggggtggccggtggtgccattcaacgcgcagccagcgaccgcgacggtttggaaatatttattcgcaccgagcagcggggacgcagcaacgtcatttccatcattcaggacgccgatatcagcgttcaacctgggcagagtgttcttatcagtggcagtggtcgtgatgtgcgggttatccccgtcccgttgcatccatacacaacacagtaa

SEQ ID NO: 517636 - DNA, 141 bp, Stenotrophomonas maltophilia
atgaaaaaattattggccaaatacatcgtttttgtgggtcttccgttgttcgtcttgcatttcgcgggggaggcttttgaaaagattgacacgattgaagccggtttggctgccttccacgcgcgagcttcggggcactga

SEQ ID NO: 517637 - DNA, 240 bp, Stenotrophomonas maltophilia
atgtcaagcatcatatttgacaaaagcgttgaatgttatgaattcaaccgttgcatgaattcaacaatggtgaaccccgcccccacacaaaacaccagcgcgccaaaaatgagagatggcaccgccaaatggcgaatgggcaaaagttgtgcgcacgtgatcaaagcaccacaggataaccagaatgccaacttcatcaccgccaatgtgatccacaccccagtgaaatccgcgcagtag

SEQ ID NO: 517638 - DNA, 201 bp, Stenotrophomonas maltophilia
atgagaaaaaaatattacgaatggacacatgtgacgggcgagacgtattggcaacccaagggcgttcatgattatttgcaaaaaggtgatctcaaccgccattacatgaagatgattgcatggacgggcaaggcaaaactgatgacaaaacaagaacatatcgaaaccaaattaaggagggtgcatgagatcgaaaattaa

SEQ ID NO: 517639 - DNA, 369 bp, Stenotrophomonas maltophilia
atgagatcgaaaattaagccaaaggatgccattggatatccaatgttttatgaaacaaagaaggttgttcagttgttggacaagagagcagaggctgctgaaaaatcacgcgcgcagacaattcgcgagtttgtttgggattttattgagtccccgaacttcagccgtgtccatttcgccaacttagggtgcgagtgccaacgtcccaaacccaccaaccccaaacatctggatcctggtcgtcgttcaggaattggttttattccggacgctcaacccattgtcaaacgtgtcaatgctttggccgcttcatatggggttagcaccaccgatttggtccgttacatactccgaaagaacgttatgtag

SEQ ID NO: 517640 - DNA, 852 bp, Stenotrophomonas maltophilia
atgtttaaaaaatacgacacattacaaacgcggcgctttttggatggaatagcaaacatccagccggaggtcgttgaaaacgcgttgagcctgggagctgagccgacaccgttgtttcgcagaacattggctgtttggacggcgcaactgcgtgtccccgccgatgaagtgcagcctcacggtgattgcgaactgctggacaaagaggcaggcatgctcattgacactctgccattgcacgacatggcggcggtcaaatggttgggtcgtgcggggtctgttccgattgccagtgccgatggaaattccgtgcgcatggggtctcaagaattcaccaacgccaccatttcctcgatctttaatatgttcgcttccatcgttgccaataaccccgacgacttcactgacgcgcagaacgacatgctcagccaagcgcgagaaatcatccacatttgtcttgactacaaatgcaatttggctggcaccgatgagcgggggatgtcgattttgcactggtgcagtgcgctgtacgacgataaagagttgattgaacgtttggtggagttcggtgagaaccccaatttgaaagacaacgaagggtttacaccccaacaggttgccgcgttctatggacatgtggatgcgttcgcgggctttggatgcacgtccgaaccccaaaacgatattccacccgccgtcgaaccaacgccaacagaccgttcagaaaatgattggtcacaactggaaccgtgcaacgccgttcaatacgcgtcgttcacaccacacagccgctttaaacaatttttcaacatcctgttgggacgtacaagcccactggatcatgaaaactaa

SEQ ID NO: 517641 - DNA, 354 bp, Stenotrophomonas maltophilia
atgaaaaacgttttattcgccgcaaccgctgttcccttgttcgccatgggcgcgcaatccactcccatgggggcgtacctcaccgtcgaacaaacctgcgcgtatgtcagcggcagcgccgccgaattccttcaatgcgatgagcgtgcgcccgttgatgaggactgccagggcgtgttttgtgaagcagtgactttgcccgtcaaaatctctgtggagcgcaacacccaagccttcgaccccgatgaaatgcccatgtggtgcgaccgggcgcaatgctgggctaacacggggccgtatgtgatcaccatggattacagcggattgcgcgcccaggcgggtcaggttcaataa

SEQ ID NO: 517642 - DNA, 624 bp, Stenotrophomonas maltophilia
atggttaaaggttttatattgatgttgtcgttggttatggttccgttggtgtcaattgcgggctctgttgggccggtatttaaagtcaataccgcaggggaaaaaagtggggttttaactatttcaaataatggtcctgatcgttcttatcaaatcacagtggatgaactaactgttgaaaacggtgcttcacgccgaagcgcatcatcaaagatccggtttgctccttcgattgttacagtaaaaaaaggcgctacacagtccatccgctacatcaaagccgaacaaagcggaagtgaagagttcttccgagtcagtgtggccgaactgcccgcacctggagaggtggggcttatcaagttggtcaagcaggacttggcgtggatctggcgttcgcctaccgcccaacccaacttgtccgggcgctgggtgggtgaacactttgaagttacaaacactggtactgcgtctgcacgattggtgtctccgtcgtctggctccgcaacccgcagtggcttgctgggttatgtccttcccggtgaaacacgcaagtttgcacttgaaaatttcccgcacggtgtggtgtctgttgaagtcaacggtcagcgccgggatatcaaatga

SEQ ID NO: 517643 - DNA, 2181 bp, Stenotrophomonas maltophilia
atgaagaaatcagtcatcgcattggcgatggctgtctgctttgcacatccatcttgggcctcagacgtaaccattgccgccgtatccatcaatggatcgcataaaagcgacgttgaagaactgcgcgttcgtgaggatgggcagttgttgatatcaattgatcggtggacccagtggggtgtgcaggtgcccgcatcgcttgccgaccgtgatgccgtgtctccatccgatttgaacgcggatgttcagttcgatccggccactcaaagttacagcatcaatgtaccggcaaagtacctgcctgcgcgcaattacaaccaagcatcacgcttgcgtacgaacgttggaccttcgcctaaaggggtgatgctgggttacgactaccgcgcgcaagacagcgagtcgtatggcttcacgcagtcgttgtcctacgacgttcggaccaatgtcctgggaggggcattgttcggtgcaggtcaaatcaataaagacagcactggcttaatccacgagcgctcattgacgacgtggagtagggatctgtatgcatcgcagactcgcgtgcagatcggtgatgtcatcaacgccacacccaacggtgcgttgcttggctcgcgcaacttgctgggtgttcgcgtgggcacagaccgatcgttgagtgatgacgccttttatccggtgcccacgttcaatggtgttgccgacacgcgttcgacggcggaggtgttcgtcaacagtgtgcgggcgtctcagcagcagttccagcctgggccatatcagtttgccaacctcaattcaccgattggtctaagtaccgtctccatggttgtgcgcgatgagttgggccgcgaatactggacaacccgtcagttctacagcacacccaaagcgcttgccaaaggccgcagcgagtgggaagtgtctgggggcttgatgcgcaacggtggactgggcaacaactacgcagacttggccgccaacgcagtgtacgcacgcggtatgtccgaccgctggaccaccaccgctgcgtttcaggccacggccaaaggccggactgccatgtggggcaacttgtggacctttgggcgctggggcgctgccacctttgacatcgcgaccagtggtgatggcatggccgccaccattggatacgaacggcgcaccaatggcgtttcgtggtccgcttcgcacacccatgtcacagacgactactggaacctcaaccgcgaacgttcacgctttgctcttgagtctcaaaccacgttgggtgttgcgtaccgccagaatagtttcagtgcggcgcttaactacagcgatgttcgctattccaatcgctcgactcaattacttacagcccaatcgcgttggcagttgaactctcggtcagaactgtctgtattcgctcagcacgacttatcgctacgcgacacaacgttaaatctcgggttccgctaccagtttggatcctcagcatccacgagcgtcaacctcaatgatggtgagtggtttggacaggccaacggttcaaccacactgaaaaatcgccgcctgagctggaacgcaagcgcaagcgccaacaaccattatgtatcagggcgttgggatcttccgatgtccacattgctgctgcaaaacagcacaaccaataccgtcttcggagccaacggcggggtgtggatcggggagggcggggtactgccaacgtcccgtccttttggatcgtacgcgctcatccgcgttcccaatttgcccaatacacacgttcaactcactggcaaaagtgtcaccaccaacgccctgggcgtggccgtggtccccaatgtctcagcactgttcgaccaaaccgtaacggtggacgcgctgagtcttccgttcggtgtgcaacttgacagcctgagcaaaaaaatcgttgccccacgtgggggcgggacaaagctgcagttcgacgttgtgagcaacaccacacgtgagtacgtggttgtgcagaacggtgtgcccatcgacatggccaatgtgaagggcaaggaaaccgttattggagtgcgtggggcgttggtgctggaagcacccatccctggtgacgtactcaccgttgaaaaggacggttccacatgcgccatcaccatcccgcagtcgggcgagttggacaaaccaatcttggaatgcaaggaggtcttatga

SEQ ID NO: 517644 - DNA, 378 bp, Stenotrophomonas maltophilia
atgaaagttcttgtcatcgcgttgcttttgttctcaggcaaagcctgcgcggactgttcaattacccccaaccaagactttgcggttttggatcaggacggtggagtgaacgttcagtacctcatcgaatgcgaccaacccacaaccgccactttgcagattgaccaggagcaactgatcttgcgttctgagagcaacagagaaatcccattgtctgccgtcctggacggatcagcattggtagacgaagtgcccattgaaatcggtgaaacgccgctgctggtcacaattgaattccgaagcgcgttgtcagcttcggttcggtacaaagctgcggggttgtacagcagttctgtgcggctgaatttaaattattag

SEQ ID NO: 517645 - DNA, 678 bp, Stenotrophomonas maltophilia
atgcgcggcaatgaaaatatttacgatcaagcggttgatggtgggaagttgctggaagttgtggcgttcaatcctgctatgtcatttgatgaagaggaagaggatcaactgataatttcgcaactgagtgttgtatgcaaggttgagtacattgatgaagatggagatgggtgcgttgcatggattgatgcgatccttaatgatcgcgggttgcacttcgatggtccagaatctcttatgagcgatgatgtttcaaacgactggttgtatgagtgcgtcacgagtgcgtttgaggatgtcatcgacaccacggtgtacgacctgggtgatcaagtggaccacacgcgcatccctgttaccctgcgtgatgccgagatgacatttgaaatgattgacgatacatatgctcacgtcattggtgatagtcactatgtgtgcacgaaagagtaccttgattacgaccctcaaaagtttttcggtgaaagtgagcaagcgccattttatgtcgttgagcgcaacactgactatgtagtacccattcatacgtccgcagactatgtgtcagtggtgaataatttggacgatgagttccaacgtttgcgattgcagcagcacgtcagcgccgctgagcagacacccactgaggtgcagcgggcacagcacgtgcggcggatgtag

SEQ ID NO: 517646 - DNA, 774 bp, Stenotrophomonas maltophilia
atgccgcattccccggacatggacacccaggttaagttgttcttgctgcggtcgcgcgcgcgaaccgccgacatccagcgccgttcaatgatgaaccaaacgctggacttggagcaggatcttcttcatcaacaaggtgcgcagatgtggcggcgctgcttgctgcgcgaggggccgcgtcatgccgaagaagtcatccagctttggtgtgttttccaggcgaagaagacggccttcggtgaactttcaggggatcagacggttgttgaattgaaaactcaatccatgcgtgcggacgacaaattgatctgcgaaattgatgagtggattgttggagcagcatttcacgacatgctccgctctacacactttactaccgccagtggccgatacccgcctctcatgctccaaactagtgagcagttgaatcaaggcaagcagcgtgtaaccaacatcttgaacaacgagttgtcgtttgaaggggtgcgtgactacatgaatgtgaactacaagcttgaggggcaagccacgcgaaatcgagaaacgcttgtggcctacgccaaagctctgtggttcgaccaagccgtgtacacccgcgccatcaaggccgtggccgatggggatacggatctgctgttgaggtacgaccaagctgtctacgccgcgtacgagcaggcggtatcccagccctcgctgagcgacatcatggtcaaagtgtttgccgcactgtgtgcgcaaactccctacagtgcgcatctgtttgacacagagtga

SEQ ID NO: 517647 - DNA, 534 bp, Stenotrophomonas maltophilia
gtgcacactgttcaccgtacatggatgatgctttttctgttgatttcggcgttcgtgcagacagccatggcgtccgacgctccgcccgaagactctgagaattgggcggtgaactcggcgtgggtgaaggaattgcctgcgcttgatcagcaaatcgtcctagtgtcgctgggccttggcatgtcaacacatgtggatacgaggttgatccccgccgttaaaagcaaaagcgacatgcaatgggtgttgaaagtggctggcacgtccaatgtcatgttggcggggctggcaacgcgcagtgaggaaatgcgtgcgatatttgatgagcggtccaaggtctatcttgaagtcatcaatgggcggatgggtgcggacgagtttgaacgcaaaatggctcagatcagtttgaaaattgaaaaggccaccgccgacatcacgccacagcaaatcgcccaggtccgcagccagtaccgcagcagattgtatgacacggagacagcactgatcgcgtttgcgaagctaagagcgaggtag

SEQ ID NO: 517648 - DNA, 339 bp, Stenotrophomonas maltophilia
atggctaagaagaaagtgctgcccaaaaagttccatgacattgacgaacgtttcatgcattccatggcgcggatcgcaaaagatcatgaggacggtgcaagcctcacgaatatcgccatgacttgcaacagcaaggcgaaaggcattgacattgatgaggcgttcttggaaaaggtgctggcgttgcgtgagtgcaatcgcacccacaccatgtacacaattcgcgaccaaaagaacacgcaacgcatcatcaaggaagtgaagtcggaaccggcagaggaactgccgatctactcggaagacgaactggactgcatcacagtaatctttgatgagtga

SEQ ID NO: 517649 - DNA, 297 bp, Stenotrophomonas maltophilia
ttgctggcggcctacacccgtgacgccgctgctgccgacaggcactacatgggtcaacggctgcgggtcactggcgtggttgccgaggagcccgcgctgtaccggcgctcgccgcttctgagctttgaaggcacggggatccacgaccggcccgtggctgtgctggacccggcgcgcaaggatgagttggccggtttgcgcagtgggcagtcggtgacgctcgattgcctaggcaacggacacgtctccggcacgccaatgttgaaaaattgcgtcagggtgaagaaacacccctaa

SEQ ID NO: 517650 - DNA, 1581 bp, Stenotrophomonas maltophilia
ttgaccgccatacatttgacacgcgaacagatgttcgccctggctgagcaaatatcgatccgtgcagcagcaggaaagatcaccgcccggtttatggatcaactcggcgcgctgatcgacgcggcaggggtaacccaagacctcgaactgtctctgcgttgcattgaggtgattggcaagttcggggaactggatgacaagcggtatgggtgcatgctgcattacttccatgccaacgctttgggatggttgtacatacatcgtcataccgatgacaacgcattgtcgtggatccagccggacaacactgcacagatctatgaattgcggtcagccattgcacatgctggctttcccctgcatcccgctgaattccgcgcgcaggtccattccaacctaggcaatgcattcaacaagacggggcgaattcatgacgcactggaacactggcgaaaagcgttagctctggacccgatgcttgcgatggcccaaggcaatatggcgggtgcactgttcttttacgcgcgcaatctgtacgacgtaggtcatcgggagtggatcaacattgaagggcgtgagcaactgcgcaaagcggttgccattggcgttcatggagccacatttgttgaagctgctgatcgctttaggcgcatgctgggtgccgtagagctaggcttggatcagtacggtattgagcgcaaaccggattgtacctggatggacaatttctcactggggaagagcgcccaggagaagcggtatcgacgttggtgtctggacaacaggcttttcctcaaccccatgaatgatgcgtacatccagccagttgccgccacagattcgctttcgctgccaacacatcgagccgatggggtggggatctcgtatcttgctgcgttcaaccaactcaaacaggaatacatctatgccagatggtgcttgttcgttgggctggatgaccagaagacgcatatggccgaccgtgaagtattgttgtcatccaacgccgacagtgcgcgctacagcatcgccattgagcaggtaaaaaccgcttaccgtgcggcctactcgctgttggataaggttgcgtactttgtgcgcgaccgctgggagattggtgctaagcgaaaatcggctgacttcgcacgactgtggcggacagaaccaaaaaagggcacggagacaaccattcgcccggagtttgaaagcagtcagaatatttggctgcacgctctgtacagcctgtccgaagacatcttcaatgaggacacaaggcaatacgcatcgccggacgctcaagaacttcacgtcgtgcgtaatgctttggagcatcggttcttcaaaattgtttggtccaggtccgagtgcgacgaaacatcgatgcaccacgaccgactgtcggaacagatgacatttgacgagttccaaagcaaagccctgcgcgttttgacgatggcacgttctgcaatcatgtacctatgccttgcaatgcatcgagccgaagtgcagcgtgccgaagaagataaagctcagtctatgtcgttcggggtgaaccacattccggaccggcttaaagggtaa

SEQ ID NO: 517651 - DNA, 801 bp, Stenotrophomonas maltophilia
gtgacgttcaagattgttgatattgaagaactgattgctcaagccaaggcatctggtgtgagcaagatcagtgttgaagtgcctttgcttgcgtcgtacacccaagaggcgtgcgtctcgcagactcaatggatgatgttgccgcaccaccacaagcactacgcttggctgcacgtggacgcagagggcgtgccgttctacgccggttacggtcgtggcccctacgcgtggcagaagaacggtggcattgcctgggaatggttcgttcgcgagcgattgggcggcgaataccgtgttgtcgtcctagcagtgggcctgtcagaagcacacatccacagcatttttgagcagatgcttgagatgtacaacacgagattgctcaatcaatcgagcttctacagaggcatggactacaaggcactcaaagaagagaacgacaagaaaagagcaatccgacccttttatgcatttgttggtagcaagaagccagcgtcagaaatatttcaggcggcgctgaccgctcaacaattgcagtacgagcttgatccctatcgtggcgagactggccgttttggtgaagttctcaaggcaatggatgcatcacagccggtcaatgattacttcattactacgattgtcgagtggtatatggggcagggggacttggatgccgcaaagcacgcgttcgccgagttcaagaaaagagccccacgattggcggcaagtaagagggtgacaaggctggataagttgttggagcgcggacgcttctaccgacgccctggctggttggatcaataa

SEQ ID NO: 517652 - DNA, 810 bp, Stenotrophomonas maltophilia
atgaaatggcttgctcttattgtcttaggtgtcggcagcgcacacgctgcaccgcttcccctatcacagcggtgcaatttgatcgttggatcaactgttggagcacatccaacccgtgagcttgtagaactgctcgctcacacgcccctcaaggatgaattcacatccacggagcggcacgactcacagctacgcgagttcatcggctcgcttgatgttccaggtaaagatgggcagttgtgcgtctcctccaaaggcgatggtgcgctctttgactacgacgcagactcgcaaacgctgtgggccaatgtggaagcagcctccggcacccgcattttccgtacggctcatgggcggatcactgtgagggatgttgtctccgatgaatgggacagcgtgatttccgaccgagtgatgaccaatgctttgggtgtcagcgtggatgggttacatgccactggaaaagcagcatccgttggcttcaccagcgagcagatggacgcatttcaccgaaagcttccttaccaccgcttcaaaagcgcgtatgggtcaaaggcaatgtccgtactcatggatccgaaccaggcgcgagacgtaaagccacacgcaatgttggtgttccagtacaggctgcgaagcccatatctggctcaaggaaccgatgttcatgccgctatgatggacagccctgggagctttgccattgagaaatcggtggtgctgggtgacctgattgccgtcggcattgtggatggccggacgggtgaagttctcgccgtgacgcggaatgaggcagatccagcactttaa

SEQ ID NO: 517653 - DNA, 999 bp, Stenotrophomonas maltophilia
atgactgacatgagaatacatgaattgctcaaaaccagtgagtgggacgcggcgttggatcgcgaggaaattaaagagtattttcaaactcatgatgtgaatgagacgttctatgtgagtggtggtgcgagtcaaactctactgactccacttgcttatgttgcatcaaagagtatcaacaattttgatcgtgataacgttcttgatgtgatgagggatttgattgaattgggtgccgatgtgaacgcgccagttcgtaagtctgattactacggtgacgggtttttaaagggtgacggcaaggaattggtagatcttgctaacggcacagatcgcattgaactgttggtcaaaagtggagccagcgcaaaagagtcgcatatcctctctttattccaagaaggagcggatggggcttttatcgcagaaaaatatctcgacttgataaagcccaggcacttcttccacttaatgagcaacaatgaaagtgctgcaataattgatgagctggctcttgcgggttacgactttaatgttcaggatgagaacggtgacacgccactaagttatgtgcgtgacattcacaatgtgaagcggcttgttgattcgggagcttcggttcgtattccgaacaacgacggtgaaacgttcttggatcaatgccgtgcggaatttattgcaaaaaattcctcggccaatggcgctcaaatcatgagagatctcggtgttaacctgagcgcgccagatcactttggagataccgcgctgcacaagatgatgtacgaaggtaacaatttggagcgtattagaaatctgttggacgctggggccgatcccactgttcgggacgcagatgacaagcttccttaccaagtggattccaggggtgaagatcggcatgaagctaaacttttgttggaaagcgcagccacaaaacgaaaacttgtggaagaactgggtgaatcacaacaacaatttgctatgcgacgaaaaatgtaa

SEQ ID NO: 517654 - DNA, 627 bp, Stenotrophomonas maltophilia
atggacaacagtgaaactgaattaaatatgtttgaacacaaacttgatttagctctccggaatgatgatgtggagtatgttcagaaaatgattggggatggccttgagctaaattggctcaactcagatggcgagtctttattgtcagctgcggtgtatcatgaggctcacaacgtcatccacgaactcattgcgtccggggcggatgtcaatatcaaggacaaagattggcatggcgacggatgtgatacgccactgaacgcagccgcgcgtatcaatgatattgaggtggtccgtttattgatcgacgctggtgcgaatgtcaatcatcaaggcgagtttggttcaacgccattgcataacacggactgtggggagtgtcagaagttgctggtcgaaaatggtgcagacccgtcaataaaaaataatgatggttggactgccgatgacttgaatgcttgccgcgttcaggatcgcatgttcagtggtcaggattacagccaagctgttgggagcatgaacctggatttgggagcagaacaacgggcgttggagcagcgaagtgttttacagcaggccattgaagacgaaccccgaaaccgccaatcggtaacgcgccgcatgtaa

SEQ ID NO: 517655 - DNA, 1452 bp, Stenotrophomonas maltophilia
atgcgaacacaaatttcggcacgcgagatggctgaattcatcgaaacggcgacagtcgatgaattggtggagcactttaaacatcataatgttaatgacagggacgctgttgttgcagatgtgggttcagggctaaccttcgagggcggcgcgcttcaatacgcgatattctcggataaggttgacagcgccaagcttcaagcaattatcgacagcggggcagagcttgacagctttgagttccaattgttcaaagagttggaagagtatgatgaatatcctgatgcaatcacgttccatgcgtttgaggatgccagcgcagagaagcaagaggtgctgcgcaacgcagtggaagcgcacgcacactggatcaatcgcaaatacagtgatgcagaaatctatgatttgctgacaaccggcaacgtcgagcggtatttttccgaactcaagcacgatcccaacgatgaaatcacctgggaataccctgagaaaaatatacgctacaccggacccatctgtggtttagccgcgtttgaggacaaggtgagcggctggacattcgaaaaattgttgcaggcgggcggggatcccaatgcgcaatgtcgtgtggaaagccttgatgacacagacaactacgacgaactgtccgtgatcgaattgtgccattcggttgataaaatcaaccgtgcattagacaggggtggaattcccacggaacaccttttgggggacgttctgtatggcatcaaagatgaaggcgtcaaagcgtatcacgtttatttccatagtccaccggagcaacaagaagaagcgtggcagaggcatcacatagcgtccgagaacgtcaaacagcttgcgccgcttgaattgaggctggtcactgagcatcccgacatctttgaagcccatcacatgcatgcaatgacaaacccccaagcggtcaccgaaatgcttttgatgggccacgatccccgcgcactcaatgacgaggggcaaagcttggtgttggcttcgcttttgaacggaaaatttgagacgtttgaggtcttgcggagcttcggggcggttgacgaaggtgaaggacaacggcccatggatgaggttgtgaagcactttgatggagtgaagaatcttcttgtatatggatctaaaaaaagagcgttagactatttgattgaacattcagagaatccaactgctgacttggcgtcttatatgaagatggagatccccgacgctgatcggattgttgcgctgattgatcgtggcgctgtgatgagtgacgaagcacaacggcaatacatgtcacttggaaaaggttccggtatggaagacgtgtacaagtccagaaaagatgcagtccaagatgccttaaaccgtcaacagcgtgacgtaatcctggcggaagtgggtgaggaagcgcccgtgcaaaaaatgcgacgtaaaatgtaa

SEQ ID NO: 517656 - DNA, 825 bp, Stenotrophomonas maltophilia
atggatgcaattactatatggtgtttggcaattgttattggttgcgccgcgagtgccgtcttttatatttcgatacgccgttggatgaaatctgtagaacatcccgcaaccgagcccgaaattgtcatccgtcccaagttgaaagaggatcccgatggcaaccgcctgtctcgctccatctttcaggatgatgtgaatgcatttaagtcgcttgtgacggataacccaactttggctcagcactacaatttttacagagtgggaaaaagtggcatagaaacatgctcaacactcaaccgcattgttgagtgcgccgccccacacatgattgaaaaaaacaaggaaatgttgtcgttcgcacttgaatgtggggcggatatcaaagcgcgttcgcctgacgacggtcggaccccattggaagaagctatctatcgtgataaattttttttgatcccttttctcatccggaatggtgcgcgtcaagtcgaaggaccacgggcggatgcgttgactaatgttccaatagttctgtggacattctatcagtacagcggtgggggattaagatgcaccgatatggaattggtggatcttgttgatgcctttgcttcaatcggattggaaaagaaagaattacaattgcccggcagtgaaaccttggacgcccaagatataaagatcatcgcatatgattgtcggcaatcgttcttgaacctggtcgcgcaggttgacgctgccaaagcaaaaaaagagaagcatatcttgttgcgtgaacttgctgtcgcaactgaggatgtcgaagttcgaccaaaacggcgcatgtaa

SEQ ID NO: 517657 - DNA, 1371 bp, Stenotrophomonas maltophilia
atgctccacgaaggggagtgggaacttgctcaatacgtggtgcgatattcaagcgatgttcgtcttgtgcgcgcggcgttgaacactggtgtggaccccaacattggcattccggcgttttacacggtgcgcagcgatgatgccgccgctttgcttgctccctacacaacaatgctcgatgtgcatgggctgctgatgagagtgtacgtgtcccccgacgcgttgcagatccatgaagacttaatctattccaatgaggatggcccagccagtatccttaaactttgtgggaacagtctggcggtccaccaaattttaaataatgcaccatcaatcaacaccaagcatcttctactcagtgtgtgcgccaacagtgtggatcatgctcggggcttgattgagtgtggtgccgatccattcgctacagacgatgggaacaccgctttgcacaacgttggtcaccctggggttgttgagtacctactgtcattgggattgaaccacaacgccagaaatcggcacggttcgactccattgcatctagtggacgatgccgcatgtgtccaggcgttgattgagggcggggcggatgccaaggcgaaagggagcaagggccaaacccctttgcatacggtgttgaacgtaccgtgcgcgaaagcgctgttggacgctggcgcagaaattgacgcgcaaaacattgacggctcaacacctttgcatgtaccaaatgctccggaaatcactaaatacttgctcagtcggggagcagacccaaatgttagggacaatcttcgccgtacaccactgttcaatattcttttctactttggtcataaaacaaaagctcgcgatttggtttgcgcatttttggacgctggagcggatatcaacgcaaaagatcatgtaggaggtggggtactctcctacacgggtgtaaatgaggctgtcctcaatgaattactggatgcgggctacaatcccttagataaggatctgggtcactgtggacaaacactgctccatgatatggcaatagagcaagtgtcttgcagtacgatccacagaattattgccctgggtgtggacgtggacgctcgggacagtcgtggatttacagcgttgcattatgttgcattgaacaacgcaacgcgccgattaaactggttgctgcaacgcaaggccgatccaaccgtgaaatgttgcaacggatttcaaccttcccattacgcgcaatcacctaaagccaaagagctgctgattgagcatgaacatcgctggatccaggggcccatcaaacgtcagcgccgattgctgagcaaagccaccggactgagtacagaacagcactccgttcaacgtcgaaagatgtga

SEQ ID NO: 517658 - DNA, 750 bp, Stenotrophomonas maltophilia
atgagtggttttaattactacaattatgcaacgaacgggggcgtggaggaaatgatcgatgatgatattcgtcacgcttgcaaacttggcggcattgctttggatttttttattgccgatcggtctgaatatttccaggcgcatcatgttttggagtgcgtcaattcgggtaatataaacaaggttgtcttgggtgggatcaacatcaatatgcaagatgacgcgggtgatacagcgcttcacttggctttgaatattcatgcgattgagcaacttcttgagaatggggcggatccgacaattttgaataaagccggttatagcttcaatgaatccgttgattcaagttttatagcatccaatgtatcccatggaagtgttgagcgcatgatcacgtatggttttgacttgaacgcccgagatgcaaacggtagggctgcgcttcatcttttggtggatggcctgtattttcacggtcccagtaaaggaaaggccgtaacgcgcattgaaaaaatggaggcgttgttgatggctggtgttgattgcaaccctttggacaacgagggtcaaacacctatcgattacctgctggctgaagaaaagagaatgaaggaaatggggtgggattcagaaattgacgcggtggtggagcgacgacttttgattgaggcttttttgttaaagtcgaaactcactcaatctgtcgtggaagagaacgaggttcgtagcgttgccaaacggcggatgtag

SEQ ID NO: 517659 - DNA, 561 bp, Stenotrophomonas maltophilia
atgctcaaaagagacgaattaaaacccggaataattgtgtacgcctgcgttgatgcgcttcaccgcaacaacgtggacaccaagcttcgcgttatccacccactgctgtgcctgggagtcaacgacagtgaaggagtgtgggcggtggtcaccagtatggaaacacggctgtcactgaaaacccgttggaagacaggaccggccacgtggatcaacaagcgctcgtttattgaccccaaccgccccgccattcgcatccccaacaccgttttgcttgaagctgcagaggctggggaagcagggtactaccacgatggcttcgaccgcccaggtgtcaaacccaacgccctacagtccatcgttgaggctcttgggatcggtgacgaactgcccacagtcgcattggtgaacatcaacgaactgtccattgccgagttggagcaggtgatccacaaaaagcgcgaagagcaacgcaaggcggacttggtgctggtcctcaccgggattgcaaaggactcaggctatgacctgaccaacgtggtgctgtcaccgctcacgtga

SEQ ID NO: 517660 - DNA, 522 bp, Stenotrophomonas maltophilia
atggacttgctcagaactttaggacgtatctaccaagatgccgatcaatccaccagtgacttgatcaacaacaacatccagtttgcccaggggcaacaagaggaccgaagcattcggcaggatcggattgaggaacggcggaagcatcggcgtttaaacttagagctggacgccatccagcgggccaatgacctggcgcgtgaagtggaagaacttcaaaggaaagtgcggagtttggagcatcgctgtgaagtcacacgcgatcttgcaacggatgtcattttggaccgctcaagcatcatgagtgcgatgaaagcagtgattgcaaactggaatgaccccgcacgcgcggaacagttccttgcaagcttcgacaccgagcgccaagatgaaaaggcgcgtattgaacaggacaacgaacgccagaatgccgcttaccatcgcgtcgatgaggttgttaacagttggtctctgccaaactcaacacggcgcagacgcccacctgggcttaagaagaaatga

SEQ ID NO: 517661 - DNA, 441 bp, Stenotrophomonas maltophilia
atgaacgagaagacctttacctggaaagaagctgatgagctggaaaagaagctcgccaaagacctcgcggcactggaagaaaagcaggctgcggatcgtcagcgcatccaggacgcgcgccgcgcctctgctggcgacgctcttgaagaagtgttgaacaccctgtccaacatctccgcttatctcaccgatagtcaaaaggcccaggtgagcaatttctttggcccggtgaagaagggtggcaagtcggctggttccaagccgcgcaacaccgtccccaaggaactgcgtgcccacaaccgcttcctgcacgacggcaagaagacctcgttctactacggcggcaagggtccgaagcccgaaaccctcaagcactttgaagccagcgaagcaggtatgaagctgatcaaggacaacaagcccacctacggcgatctgtaa

SEQ ID NO: 517662 - DNA, 321 bp, Stenotrophomonas maltophilia
atggacaacttttacatcaaccacacaaaccttatttgcaacgaggacaatgcttccgtccgctttgaatggtgtcagacgctagcgggttaccacgtctttgatgcattcgtatggaacggtgagggatgggctgatcaaccttacaagatcatggcggatgaatgcagccgggttgcagccattgaagcctgggaacagcttgaagaacgcttgctgtctacggaaatggaggaagcagcgttttacgaaaatccaagcatctacgaactgtacgcgctgagccgcgatcactggtcctcggagtcaatcaaatggtaa

SEQ ID NO: 517663 - DNA, 393 bp, Stenotrophomonas maltophilia
atggtaactccgtcgtacgatgcattcgggtgtaccgacttgcacaacgccatcatccgccatgatcacaacgccattaaaaatcttgtggcgaatggttgggatgtcaacgtttgcaatctgcggggcgaaacaccacttcacttcgctttgtggtgcagcacgtcgttgaagaccaacccatcggccacaaaagacataatccgcttgctgttggaattgggggccaatacacgtctgcgcacccattatggaatgtcgtgccaggacatcgcgctgcacaccgctcggcccgatttgatcgagttgatcgacggtgaggtccaacggttgcgcatactcagcgcagtttgcgatcaaccaccagaaaagcaacgcaccagaaagatgtaa

SEQ ID NO: 517664 - DNA, 237 bp, Stenotrophomonas maltophilia
ttgacagacagcgcgcaactgtggactcgcgaaggagtggtgcgcgaagccatcattcgcgccaaatccaacagtgactcagatttcttacgcggatgggaaggggatctgtccgccgagtattacctgacattccattgggtggacgcatcggaagtcgcaacccatgacttggctgacattcttgaaaccgccaaaagactcaacgctatgcccgaaatgacggaggctacatga

SEQ ID NO: 517665 - DNA, 195 bp, Stenotrophomonas maltophilia
atgaagaaaatactcatctatctcatgggcgtggcatgtgttgccctggcaatgtctatcattttattgattgtcaacttgtgtataccttacgcacccatctccatggaaatttttttaccggtgctttcatcatttggcgtctgtattccaattctcttaatggaatttgagtcagaagtggtgtttcattga

SEQ ID NO: 517666 - DNA, 174 bp, Stenotrophomonas maltophilia
atggaacaaatcatcaacgccaccaccttaaaattcacagccgttgcaatcggtgtcgtccttgtcggttggttggtctgcactttgattggcgggttgttcaactcggtgtcgtcatcgagcagcatgtacgacaaagccgacgccgctattgccgcaagcaaggcccgctaa

SEQ ID NO: 517667 - DNA, 444 bp, Stenotrophomonas maltophilia
atgaacttatcaacccaacttttccacgccgtcgaaaccgccaacttaaaagccgttcgttctatcgtcttaaccaacttccgcgaaaaagatggacgcgtggacgccgcacaattgaccgcgctgaccaacagcagagccaccacctgcgacgccactcccatccacttggcctgctgcttgtaccgcaaagctctgctgacaaacgacgatcaactggctggtgtgtacaacacaattattgaagtgctggtgcgcgacgggtatgcatccgtcaccacactgatgaaccgcagcatcaaccgccgcaccggccaacgcgatgactacactggaacaacgatcttccaattgttcaaaggttgtcttccaccctatgttcaggagtatgtcaaatccatcgacatgaccacgtacgacaagtacaccgcttctatcaactga

SEQ ID NO: 517668 - DNA, 180 bp, Stenotrophomonas maltophilia
atgaaattacgctatgaaaacaaatacggacaaagcgcattaacctactacactttgcgcgcagcgttgtacgcagccatcgctttcaacatctacggagtcttctatgtcttctgtgttgaagaaaacgatcccatgacctatgaaacgcccgtatccattcaggagcaagcaaaatga

SEQ ID NO: 517669 - DNA, 816 bp, Stenotrophomonas maltophilia
atggacaactggatcccctcgtgcataccgtgcatccaaaaatttgggaactccgattgcctgtcggcgttgacaatcaacaccacaacgatggatcccacgtggaagaataagttggagcgtatacgtgataaggggttgcttagaagccgcaaccatctcactcatttatccccaagaaccgacatggagcatgttcaaaaagccattgcggcgcgatggacccaggagcgctgcacggtgtttgttacggtgttgccaacgcatgtcgtgttggcgttgaccgcacgcagtggctcaccccaacgtgtgggtgagatgtcatcgcttcttctgtttggatttaaggctcaacggtcggatgtcacaggtccctacgccgctacggccaccaaagctgggttgaacctgtttgttgtcccccgctcgcggctcatcgatgtcaccatggcgttgacggaggaaaactgctggttaagagaggtccgtgtttccattacccccaaccatgaagaccggtcagtgtggcgttcgttttggtttcgctcgtacgtgacactcaaatcaaactggacgcgtcgtgtgtacggagaagtgcaagcgccctggtacgtgcgcaattcgttgtcgatgacgcccggtgcggtacgcaggcggcggcactacctgaaaaagaaagccagtgtgttggaaggattgcaatacgattcacacgtgagagatttgcgcgtggccgcaggacaaccggtggagaactgggatgatcgggtgaaacgtttggaacacgaactgaatttgcaaatcaaactgtcgtaa

SEQ ID NO: 517670 - DNA, 453 bp, Stenotrophomonas maltophilia
atgaaaaaaattagcaagcacatcaaaattacagagcggcagaacgaacgtattgaacgtcaaatggccggttgcggtatgacatttgtcgattggatccgcaatgccatcgaagtaaagctcagtcaagtggaaacagtggacgccattgagcaagcaaaacaggatttactgcgcacccaaaacgacctgcgcaaagaattggcaaatctccggctcaacctattggccgatcaaaaatcctttattgagaaagccgagcaggtcgctgacgccatgtccgagcgtcacatcaagatcgcacagcaacacatttcaggaatgacaaccgttctcaatagggggcttgagtcgggcgcactgcatatcggctcaccgtcatcgtcaagcagcagaagcagtcattcatcgggtggatcgcaagtgtcattccccagcggtgacaaatcgtaa

SEQ ID NO: 517671 - DNA, 645 bp, Stenotrophomonas maltophilia
atgaaaaacattgtattggcagcagcggtggcagtggcgttggcaacaggcggaatgactgcacacgcacaaacccagcaagaggaccagggtcgtacagagaaggccggaaagatcggctgtgttgtcggcggattgttgggcggtgtggtgggcgcgaaggtcttcaaagacgatcaagcggttggagcggtgggcggtggagcattgggttgcgcgggcggaaacttctttggcaagaagtggagcaaagcaaaacaactcaaagagttccaagaggcacaagcccaggcgcaagccgcaggcttgaccgcaaccgtcgatgcgcgggacggtgtggatgagcgcggcaaacccaccaaagagttgggcgcaatggtgattgcatacaaccccagcgacttgtccccgatgtcggcgaaaacatcggcggtgttcgacaaggtggccgcaatcagcgtgcgctccaaaaaccaactgacctttgagttcagcggacgccaaggctgtgagttgccgttggccgagttgggcaagcgtggcgcattcaacggcgcgggtgttcaacacgcggtgaaggtcagttgcggacaaggggacagcaagttcgtcatcaccccgttgccggaattggcgcgtcagtaa

SEQ ID NO: 517672 - DNA, 1245 bp, Stenotrophomonas maltophilia
atgtcagacgataaaaataaaaaaattgatccgcgcgcattagagatgcagttggttgacgacgaggatcttgttgacgacagcaacagcaaggatttggatcgggcggttgataagacagttgaggccgcgcagaaggtcaaagatggtgcaaaaaaaatcggaagtggtttgtggggtggattgaaaagtggcgcgacagcagccgccaagaaagcttccgaagtcaaagaaaaacaacaacagaaaaaacacgatgaggccagcgcgccgaacatcgttgaagagcctgttgtcgcacaagcagaaattgttgcagataaaagggtgggttacgaccttacacactcagccccagcaaatgtgtccattgcaattgcccgtgcgcccgaaatggatgagtcattctttagagatgatcgggttgaacaacctgagctgcagcaagacggtgaaaagaaacacccttcacgcaaacccattgtgttggtcggcgcggcattgttgatcgttgctggtgtggttggaggctatctgtattggcccagcgacgacaccacaacagttgcggtcgaagaggttcaagaagaaaagcccatcgtggaattcaaaaccaaacgcggtgcgatcttggatgaccgcgtgacggcgatctttggaaagacctgggtcgatggtgagaagtctcttgtgatttccaaaaagggtgaggtggtgtttatcaaccctgtgggtgatgtccgcgaggaatacaacattgagccatcgggtgagtacgaacccaatcagaccaatccgcgcatattgattgatgccgggaatggatttgtcagggcaacggtcaattatggaaacgcaagcaacacggttcccaaaagcatcgtctttgatgaagtggctggcgtgtcgattgtgttccgcgataagtcggttgttgatgccgaacgtgcgcaacaaaaggttcaagagccagccgtcgttgaagaaccgaaagttgaacaacaaccaattgctgttgaaccaaaagatgtgagtgttgaacctcaagcaacaccaaaggttgaagcgaaggtcgagccgaaaattgaaacgcccaaaccggttgcgtctgttgcacaacccgcgccacgtccacgacctgcccaaacaaaacctgcgcccaaagttgagccacgcaatgcgcgctctcagaactggcaggacaaagccagcgatgatttggacgaatgggcaaaacaattttaa

SEQ ID NO: 517673 - DNA, 336 bp, Stenotrophomonas maltophilia
atgctcaacagaatatacgatcaatacaaaacaaagttcggcctgtcgctgggcagtaagatttacaatttctacgggcggcgtcttattcgcacaccgttgcacaagtatcccaagatgaacccacacttagagcgggaatattattacaacgtgggtgatcgaggcagtacagcggatatttctgagtcggaaagcaattggcgggataacagtttgcttttagctcagatccgcgacgaagaggctccgcgtgtgtcgcgaggcgtgtttatgacatcactttccattatttgtttgttggggttggtgttttggttcatcattaaagtataa

SEQ ID NO: 517674 - DNA, 3039 bp, Stenotrophomonas maltophilia
atgggtttaagtatttttacaattccggattttatcgaaaagctgtgtggtcggttaaaaggccaaggctctattccaacgagtgagcagaaaacaatcagtaacgccaacaagcgttttcatcgtttgatcagtcgcggtgaccgccatgtgctcaatggtgaactgccaaacgttcagctgaaggactacgagaaagttcaaaagatgggcgcgaagatgcgtgaggacggatcgttgtatgtgcccgagggcgtcaatcgcgagccatttcgcatgtactcgccgatggtcgcagaagacctggatgacgaacattcgacgtacaaagtcacaagcgacggcttgccctgggaaaactttgtcaccccaaccgacaccacgcaggggggcgactcaacagcaacatcaattgtctacggaatggttcccgtattggctgcattgaccatagtgttgctggcgctgccaggaccctgggcgttgctcgcgtgtctgcccgccgccttggtgataccgcacctcattgcgttgtaccaaggtgagtcaatcaccgaggccgtcaagagcggatttgttggcttcatcctcccggttctcctgtcgttgaacgtggtgtccactgtgaaaacagggaaagccgtggctgcacttgaccaagcgcagttggtgtcaaccactcaaggatttaagttggcggatgtggtagcgggactaaccaactttgccaccggccaatggggtttggtgggcaacatctccatggccttgggtctgtttattgtgggaagtggttttgtgatgctacttggctcattggtgaatgctgggaacgactcaaaagttggcggggctgttcaaggcggtaaagcctgggtgtgggcgtacgccaagttatgtttggccttggggttggtgttgtcacttccacccgttatggctccatgggtgatcttattgttcgcatcagcgtacgcaatgcgctacaccgaacagaatttccaagcgcgcggctgggtgttggatcagcaaaacaaacggattggcggtgtgatgcaggatcactcgtatcaacgtgatatggaagaccgtcagttccaacggatgaatgttgagaacgacaaatctccggacatcgtgattgctatttccacagggtatttggcgcgcaagggctacaactttagtcccgaccaaaacaagttcatggtgatgtcgatcaacgacatgtgtacccacatgttgaacttggggcgaactggtattggtaaaaccaccaactttgcccgtttgatcgccttgcaaatagctctggcggccatgaacggataccgcgttggtttgttcgttttgtgcggaaagggaacgttgcccggagaagtccgaaacgcgttggattggaacatcaagcctggtatggcggtgggtttaatagagggactgaaggcaatggatttggccgacgccatcaactcaatggtcgccagttcgtccgacaaagacaagatgtggagccaaggggcggacaattttgtggtgaacacctgtctgatttttgaggcgttgtgtgagcatgaaaaaacggtctacaaaaaagctgtttcggaattaaccaagatcgacgcaatgcttcccaatttggaattcattgtgaaacagttgaattccaatcccgacaccaagaaaactgagcagcatcacaaagctgttcgtgagttgcaagacacacgcaaccgccgtgaattctatgccaaagaagtgagccgtccgcgcgaatggcagtggagctacgaccatttcgtgaagaccaaaacaatgttgaacgacatcgttgttcccaaaggcggtgaaaagggcgagattggtccggaaatcaaacgctggttcaacttcttgggcgtgaatgttcaaggcgagagccgcagccccatagccatccaccccaaaattcaagtggaaggttccgcgttgcaaaaagctgtgggctacattgccgaaatctgggccccgtacgcccacgaacaacgccaatcgttccttttgaacgttgatcaacgcatcaatcctttgtaccagtccgaacagttggtggacgaaaatggaaccccctggacggcattgacaagcggtgtggatattacgggcgttatgcgtggagaacgcattgggatcgaccttccggaagcgttgtacaaaagtgcaggtacagctgtgcaaatccttttgaagcagcgggtgtatgcaaagcttagaagtcgggtggaagccaccgattggcacaaagaaatgcccgatgaaacggtgttcatccagttgatggacgaatgtcaactgttggtcagcaagcaggaaaaagatttgctgccaattatacgttcgcttggaatgggggctgtgtatttgacccaaaacgtcgaaggcttgatgcagtgctttcaaacacgtgaagagcttgatgcgttcctggattgtttccaatccgtcacctgttccatggcctccaaagcaagctatgagtgggttgcaggtaaggtggggcatgggtcgattgttcaatacgaacccacgggtcgtggatttgattacaaggccagcaccaatgccttcaaacgttcaacactcaatgtggacgatcacccgcagcgtgcgttcttgcggaaattgaaacgcttcggcatggggaaagttgtatctcaagacatgctggtcagcgattacggccaccgttgggatcaaaagatgcaggcgttgcaggggaccaatgtaggtgaatcagcgggatccaagatgcgatctgcaatcattgtgggtggagcaggatcagcaaaagacggcgagattgtgtcagcggtggaattggaacgcgaactcaacacaagtggtggtacacgtgcgttggtgtacctcaaccgaggaaacgtgcggcgggttgattttgctaaaaccattcctgtcacacccggcaaagtggacaagtacatggaacggttcaaagcggaatgcttggaacccgagaacttccagaacgaattggcataa

SEQ ID NO: 517675 - DNA, 885 bp, Stenotrophomonas maltophilia
atgaacaaacacattgaagaccagaaagcctacaacgacgcaatgttcagcaccaagttggaagatatcttccaagcaccggacgacatattccgcgcggaaaagcagcaggcagcggaaagcggagacccccaggcgcaagcctgggtggaccacgacgccaccgttgatgggcttgagcgccgcattggacagtacgaccatgaaattgaacgccgccaagatccaacccatgtgttgaagttggaagagcactaccaaagcattttgcacgcgcgcaccgtgtttttggagaacaaccctaaacccttggcgtttggtaaagacgagtggcagaagaagttcagtgagtacgaacaacaaattgaagacagcaagcagcagatgcacgagtgggaagagaaatcctcccccgaagttttggcggaattgaccaagcgccgcaatcagaaatttgaagagttgttggaggccacgggcgaacgtcagaaattgggtgaactgccatcggagcaattgatgcacgcccaagcgtcagcggatgcatacgatcttttccaaggccgtgactccttttccttagccgagcgcatccagaaacgccgcgagacttctgacggtgacagcgggcagtccgaacaaggagagcgtcaaggtgggatggcgtgggcggcagaaacgttgacaaaaccaaccgaggaagaaaagttgttggccgacttgcagcacaagttcgtgttggagaacaaccgctggcccaaggaaaaggaaattgatgcgcttttgtccaaacatcagcgcacgcaaagcgggcacgtggatgtcgaaagcgaagaacaaacacatgtgcaaacccagcggcgaagtcaaacttacacccagtaa

SEQ ID NO: 517676 - DNA, 783 bp, Stenotrophomonas maltophilia
atgaaaacaaaaattattctaatttatcttgcgctcatatttgcaattccgtgtgtcgcgcacactacaagcgcatacaacgaaaggcccatgattagtgaaaatccgatcaagaacgccaacgaaacgcagtggtggaatttcttcaagaagaaaaagcacgagcggatttggaagggtgttcaccccgatatgcgcaccaagttggaagcggtgtacagcgcgatggcccaacgcggatttgacatccgccccatggaagggttgcgcagtgaagcacgtcaagcgtcgttgcttgccagtggcagtggggtaacaaccgtgggcgctggcatgagttgccacaaccacggatacgccatcgacagtgtgatgtatgtggatggtaaacccacctgggacatggacaaccaacacgtgcgcgacggctaccttctgtttggcgaaatggtgcaggccgtggggcttgagtggggtggtgcgtggacaaccatcaaagactatccccatgtcgaaatgcaaagcgaatgccgtgttgccattcgcgtaaaacgtagcggtcaaaagccacccgtgatggtggcagacccaatgcaattaccgcccgacatcctgttggcgtcgttcgttcaacccagtcccaatggaaccatatgcacattcgacagtccgtgcgaacagcagatctttttcgccgcaatgatgtgcccaacgcctctacacacgccagaaccattgccgtggtccgtgatgagcgggtattacgcgtacagttggacttga

SEQ ID NO: 517677 - DNA, 1875 bp, Stenotrophomonas maltophilia
atgagcaagatatacgatgcgtttgggccggtggggaaacatgttgccccccacactttggttcgccgttgggataccgcactcgcttttgctttgggggtgtttgttctcacctacgccgctttgatttggcttgtgcgtttaatgggtgatcccacgcaggttccctacatgctgcatctcatcgtgggcgcaagcagcacgctccagtatttgacgttgggaatgttttcgtccgacataagaagttcggaaattcttgcgctgaccaatgcgaaaattgcaacccatgtgagttttgtcgtggctgtgctgtgtgggggaattgccttgcgcttcggtttggtgccgcgccgcaatatgtacgttctcgatggccctcaacttcgccaaggcaaagacgccgaaaaactggcgcggcagatcacaaagaaggaggttggcaatgccacaaatacactcgcactgcatccactgttgcgtttggcgcagacgactttaaaccgccacatccttatatatggatccgttggctcaggaaagacggaattcttgaagcgtttgctgcaacaaatcatgcggatgcgcaagaaactctttttgtacgacgtaaaaggcgacttcacaagtttcggagactttggcgcatccgacagcgaaccacaaacccgctgggcaaagcgcttcaaaaaagctgtggtcaacacggtggttccccgtcccatcattctcagtccgtatgacaagcgggggtatgtgtgggatgttgcctgcgacatccacacaagcatgcaggtggaggaattcgcccgcagcatgattgcagacaaccccggtgaaaccaatccttttttcaccaacgccgcacgcatgattttcgtaggctctgtgcgcacactgattgccaacaagcccaggcagtggaattttacagatcttaatgagcaactgaataaaaccgcagcgcagatgcaacccgacattttggcgaactacgccaaagctttttcgctgatcgaaaacgctgagtcacagacgacatcgaacgtcatgtcaacggtgatgtccaatatgcaagcggttgagtatttagcgcaggcgtggccggtggtcacaaagcggcggttttccataacagagtgggcgtccgacagttaccgtgggcgaaaagcagtcattgtccaaggtggcggaatggaattgctcaccagcgcgtatatctcatcgttgatcaacactttggtgggtgaggtgatttcgccaaaaatgaccgagaacaaagaccggggaatttacattgtgctcgatgagctgacatccgctggacgtttgaacatcatgccgctgatcgacaaagggcgttccaagggtgtgacgtttattgccgccattcaagagcttgggcagttggcaaaggtctattcacaggaggacgccaagatcctgcccaccattgttggcacgcacgtgatttgtcagctgcagatgtctgaaacacgcaagcacgtagccgagatgtttggaaccaacgtgacagcatcgctggcgcacgatccgcaggcgaacgtgcatcaagatggccgacaggtggtgtttgagcatcaactgaccaacgagttaggcccgcgcagtttgaagaaaggctttgaagtccgagccattgttgccgtggcgggctacgacccaatgctgttggcctttcctgggttcccattggaggtcaaacgtcctgggcaggttccagccaaatggatgacggaagccgctgcggtcaagaaagacgatgctcctttggaaccccgcgaggaagcgcccagtggagggagaacccattccgttatgactcaagaggaaatatacgatttgttccgttag

SEQ ID NO: 517678 - DNA, 1455 bp, Stenotrophomonas maltophilia
atggatgcacgtgagagatatgagaatttcaaaaagagcaagcgctcatccagtgtcaatttggatgattatgaaatatcatcttctgattacgcaaatttccttttgggggagctgacattagatgagcgcttgcaaaatcttgatgttgtagaagatgtgctggcgaaggtggggtatccttttattgagtattggggtggatcccagtttgatacggccagtcgcgagcttgctgagttatacttgcaatatgggaacgttggtggtgacacattaacgatcaactcatacggtgggtccggcgtggactttgatgcagaatttaaaaacgccgcgctgtcgcacaatataccggtgatgcgattgttttacagccgtgggtgcagcgttgacggcagtggcgacctcaacgactcaccgttgcacacagtggcacgtttgggcgatcatgaattgtcggagttattgatcaacgattttggttgcaatccatttttgaagaacgccgaagggcgcacgccatatgatatcgctatggacagggagttgtgccaagctgctgcacttggtgatcttgaaacggtcaacacactcattgatgaagggtatccatctcaaggcgcgatcaatgaatatcgcggagaggggtattactacggaagcgttgaacatggtgttccagagcgcccgctgtatcgtgaacgtatcttggaggacgttgaacccgcgtggaaaattgctttggacaatgggcacgtcgatgtgtttgcggcgttgattgatcgtgttggccccagcgactactttttaaccgactcgcacgaacataagtcggcgctgtggtgtgccattgacactcaatacaacagtgtcgccattgagcttttggagcagggcgcaaatatgcattcgctttctcaggaattccatttggccgcatccctggcagacaccactttgagcgagaaaatgcttaatttgggggcggatgttcatcgaagattgaatgtcctcattgacgatcctaaaaatcagtatttcatgacccctgtggctgaggggcttactccactccattgcgcaggatccgccgaacaagtccgattgctgatccagcatggggcggatgtcaattccgatgccatgggtgcccaaatgatgcgcagggaaaacgaagagttaatgcatttccaccccaaaggcattactccattgcatacagcaaattcgccggaaattgcgttagaactgctcaatgcgggcgcggacagcaacagggcgctcattgatattcatcaaggtgcaacacctgcaattcatcacagagcagatggtcgtggcgatatcgcggacgctattgacagttttgttcaaaaacaaacactcttggctcaactcaccaacaccgcagaactcacagacgaacaaccacggatgcgcaggcgcatgtaa

SEQ ID NO: 517679 - DNA, 852 bp, Stenotrophomonas maltophilia
ttgtcatatttcaatcagaggtacaaaagcgccatcattgacaacaacgtcaatgaactgaaattgtgcgttgcccagtacggtgcaaacgcccacgatgaaagcgggatcacccccttgcattacgccgtcctgggagagcgaaccgaagccacagccattttattggacaacggggccaatgttgacgcggaagatatacatggtgtacgggcgtttgatttgcgcaagcccatggttaacaaccgtgagcagcaccgcttaaccgcacaccaagctgcagcgctgggggatatcgaacaaatccgcgcctacattgccttgggtggcgatgtgaacaccaccgaccacagcaagctttcgatcttgcagcacgcctgtatgcaggggcacgcggatatcgttgacgagcttgtgtgcgccggagccgactgccgcaacgtccacccttcaaccacccctcctttgcatctggccgcgctcagcggatcaccggagacactgaaaaagataatggacacgggggccgacccctgccagttggatccactcaagcgaaccgcaatgcatctggccgcacgcagcggcagcgttgcgtgcctggaattgctggcgtcgcacagcgtcaacgacttggacatgctcaagcaaacaccgttggatacagcccgccaatttggccgtgagcaagcgtcccaatggttggaagatcacggtgcgcaatccgcgccctcaaccacccacaccatcaacgaaaacgacgccctggcgtataagcaacgcttgctgggatccgcgcgcatccaatacgaggtgggacggggtgataaacccccacgcatgtgcttgtga

SEQ ID NO: 517680 - DNA, 2964 bp, Stenotrophomonas maltophilia
atgatccaaaagaaaccactgaaacataaatcgcaacgacccaagggcgatgatgtcattgactatttactgtcggttcccgacattgaattgaaggctccatcccacattcaagagtcggggcaggtcactgactattatttggacggcacaccgaatgtcggtgaactctattcaacctcacaatggggtgggaaccttgccgcagaactggggttgattggcaagcccgtcaacaaagacgacatgatggcgttgttcgacggcttctcaccagcaggaacagcgctgtgccaaaacgcgggcgcgcgaccaacagcggaagtgaaaattgatcccaagacaaataagccacgtctcaacgatgatggaacggttatgaccgtggacgttggtgggcggcgcgcaggctacgacttaacccattcgccccccaaatccgtctcactgttgatgactttgggcgacgacgacaccaaacgcattgtcatggacgcgcaaaagttggctgtggaaacatcgatgaaatttatgtttgaaaaattcactcaatgccgtcgcggcaagggtggtaaagatgtcatcgatgtcgatggattggcgtactccatgcacatgcaatttggtagccgcgaattggagccgcacttgcacacgcacgttttggtctacaacgtgtgcaaaggcaaggacggggaatacagcacctttgacgcgtcggaaatcttccgttactgccacgccgccgacatggtgtaccaaaacaccttggcaacgcagttgtcccaagcgggcttcaagatccaccaagaagagaaattggatgcgcgcggagaacgaactggggagcgcaattgggaaatcgcggggttgcatgaccgggatttgattgacgaattctccacccggcatattgacatcatgaacgagcgcgccaagggcacgtccgatgccgaggcgtgggcgaagacccgcaagcacaaagatgagccatcgtatccggagttgatggaccacttttcaaaattgatcgacaacgtgcgccaacgccgccacattccgtccattgaggaattgaagagtcaatccgatgtgcggtgtgaaccgcgcagccgtgaggaattgttggagttgctgcacgaacacgacgctgcttttagctaccccacattgttgaagcaacttggaatggagaacttaggctttgtcaccgcagccgagctgtttgacctggctgaaaaggccatcaccaatatggacgatctgatggatatcaaccccgaagaactgcacgaagacgacagggggaaaacactggcgcgcaagcacaccgaagcacgctacgcagcccgttggatggtggactgcgaaatcgatctggtcaccatgtccaatgcacgccagaaagaagagtggtggaagattgaccaaaaggttgccaacaccatcatcgctgaaatggagaaattgaagggctttaaactgtcacaggagcagcgtgttgcggtaaatcacattgtgtgccagaccgcaggtgtttgcatcgcttctggttttgcgggaaccggtaagacaacggtttccgatttttactctgcggtgttccgtgcgcagggcaagcagatgttgggctgcgccatctccaatcaagccgcaaaaaagctggaggaagaaagccgcatggaatgccgttcggtcaccaaaatgctggtggatttgtcgcgcaaccgtctaacgctcaccgaaaacgatgtggtggtgttggatgaatctggaatgatcgatgtcccgcaaattcgggcactgtcggcgcactgcaagaaggcgggcgcgaaattgatcttgcaaggcgacgaagaacagttgaagccggtgggcgcggggcagggcatggcgttgatgagtgacgtgttgggcgaaagcaccatcaccgaaatccgccgccaaaaggatgtcgttatgcgcgatatcatcaagatgttttaccaatacgatgataacggactgcccaagaagtcccgttcgccaaaatcgcgcaacgaggtgttggaacaatccaaagaaatttggaacgcactgattgcggcgggatgtatcgatgaatacaacacccaaaagcaagcgctcatggcgttggtgagcgactattttgcgtccaatgcgacggtggatgagcggttggtgttggcccactccaacgccgatcttaaaacactcaatcaagccatccgcaaaggcttccaggacaagggtgaggtttcgaccgacgaggttgtcattcgcgcgatgggcaaaaggtattttgaaaacatcgccatttcagttggggatcgcattcgcttcacaacggcggacagtgtgatgaaagtggtcaacggaaccgaggcaaaaatcacagcggtggttcccaaccacaaacgcggcggatacaacgtatcggtggacatagaagaaaagggtggcgtgcgaaaactcacctttaacactgaggaatggaacgccatccagcacaactacgcgcgcaccgttcatggcgcacagggtcaaggaaaaacagatgtcttcttgctgggcaacgcgggtatgaccgacagcagcagcctgatggttgccatctcacgcgtcaccaaaggcaagttcacgctgtacgccacggcagacaacgtggaaacaatccgccaacgcgccgctttggatcaccgcaaggagaacacattgcacgcaggtatccgtggaacggaaggccaggacatcaccaaactgttcgacagcctcaaagtcaaacccaacgtttctcccatcaagatcgacatgaaatcggccaacacgcgcgcaaagaaagctcgcgtgtccatcgaagacaaagagatgtctgactgggttcaaaagcatgtggacgccatcaaaaccacccaagatgccatagcccaacaacgtgcgagcaaaaacacccgaacgatctaa

SEQ ID NO: 517681 - DNA, 672 bp, Stenotrophomonas maltophilia
atggccgctcagtatttccacgtcccttatgcaaataaagacacggcgcgtgatttgggcgcacgctttgacggcgagaccaagcaatggtacgccgatacacaagactccatcgaacaaatgcaacagcatttcgatgccatcaacgaccccaacccacttgtagaactggtcggcgaggaccgcacgtttggcgggaaccatttgcacatcacaatggtgccaatgagttgctggatgcgatccgtgaagcaagcggtggatccgtccgactggaaacgtctgtccatgggcctgcgtcagcgctgcaaccacacatgcgaactgtgtggtgccgtggaggacgccaaacgcaatgagtatttggatgtcctggcccgctgggagtattgcgacgacagcaaaacgcaaacgctcaagcgcttggtgagtgcgtgccaaaattgtgtgaaagcgacgaattacggctactcaaaactcatcggtgaagaagagcttgttcggcaccacttcaaaagcgtaactaaatgtgatgatgatttcttggatcaacacatctgtgatgcattcgggctgtggacgcaacggtccgccaacaatcaaaaatggagcatggatgtatcgctgttgaccaacaacggcatccacttagctcgtaaagggggcgtttga

SEQ ID NO: 517682 - DNA, 417 bp, Stenotrophomonas maltophilia
atgaaagcattattgattgcagcaatcgcatggattgctttaacagcccaacccgctcatgcggcatatgttttggcgtcggatatcaacggaattgtggtggacgccaatggcaaacccatggcgggtgaagtggtccggatccaccaccacgaaaccaaccgggtgattgaacgtcgcaccaacagtaaggggcgctaccacttttccaatgtgcgctcggatggtcattacaccgtctcgcacaatgcaacgtcgtacacaggccgcgtccgcctggggcaaacccaccgacagaattttatcggtgagcctattcgttatgactcacctgcccatctcttctcgtggatctggtctggtcctcaacaaaaaatctctgacattaaagtggcaaacgccgcacaggaggactaa

SEQ ID NO: 517683 - DNA, 1617 bp, Stenotrophomonas maltophilia
atgaaacgctacaaatattcagcaatactattagccctatccattggcacggctttaagcggacatgctgcagctcaatcaacgcccatgcaaaactatggtgacgcaagccgtcagcagtattggaatggaatagggaactcagcaacacatgcggatccagcctgggagcgcaatttgatcaatctttactttaatggggtgagcaacagactgaacatcaccaacccaatgacccataatgttagcaatgttgtattcaacggaacgaacaaccaaagcgacaccggttttgcaaccgttaccggctttgacaacatccttcgttcgaattgggtctacgcaaatgacccggcaatttcgccaagcaccggacaggtctatgttacaggtgccagcaatgagttgaatggccgaaatctcaatatccaaggaagcttcaatcgcgtaaacggtgaattcaccagttcacttggtgacaacaacgaactcggatcaaatgtacggaaccttggaagcggcaatgccgttgcggacggcggaacaagcatcgggtttgggaaccgcgtgacctatgcaagcaatgctggaagtcctggcggcatcgcccttgggaactacaccgttgttgaagccgcgtgtgtatctattgggtatggatcggcttgcaatgaggacgggaccgtctccttcggtcagacaggtaccaacttgctgtcccgcttgaccggtgtatctgctgggcaatcgtttgacgacgcggtgaacctcggacagttgtcggccgttagccaatcattaggcggaacggcaggcttcaccaacggcgtttacaacggatggagcgtcagtcttggcggatcgagctacacgaacgtacacgacgctctcgtgtcgctcgacggacgcctcaccaccgtggagaacaacccaggcggtggctcgtcaattcccggccccgcaggtcctccaggtcaggacggaaaagatggaattggaactgacggacgggatggtgttgacgggttgaatggcttggatggccgcagtgcttatgaagtggcggttgccgatggctttcagggatcacagcaagagtggcttgagtcattacacggtcgtgatggcgtggacggaaaggacggtattgacggtgctacagacccgttggccgttaagtacgacgacgaaagcaaatccacagccaccttgcaaagcgcctcgggtggttcgacacgcgtgagtggtgttgcgcctggacgtatcgcgcagggttcaactgacgccgtgaacggcgggcagttgtgggacatggagagccgttggaacgaccgttgggaagacaccaaccggcgtatttcccagcaggacaagcgaatcaacgggttgggtgctcaagctatggcaatggggcaactgtcgatggcaagtcagtatttgccggtcggaaaagttgccatccacgccgctgttggtgcgtacggacctgaaaccgctgtggcgttcggtggaagcgcccaggtcagcccgcgtattcgtgtcacgggtggattgacgtttggttccggtggcgcgaaacccggtggtgctgttggcttctcgtacgttctggattga

SEQ ID NO: 517684 - DNA, 126 bp, Stenotrophomonas maltophilia
atgaacggtggcaacggcgagatcgaaatcagcgaaggtgcacgctccagcgtggaaatggcactcatcggtgaatccggtgccagcggcagcttcacctacctgggtgaggtgctgccatggtga

SEQ ID NO: 517685 - DNA, 1230 bp, Stenotrophomonas maltophilia; identical to SEQ ID NO: 509197

SEQ ID NO: 517686 - DNA, 186 bp, Stenotrophomonas maltophilia
atggctcaggcatggttcgagatcccgtatcccacattcaagcggctggcattgtttgcggccagccaggacaattgcatcgagcaggagcagtgggtcgattggctgctactggatgaggggcggtggctgtggtcgcagtgcaccgcacgcgaagtgctgaggcttcttgttctccaggggtga

SEQ ID NO: 517687 - DNA, 639 bp, Stenotrophomonas maltophilia
atgccgccaggcgcacgctcgtggaccgtttcgtatctgagtgtcgaagtccactacacaagcttgttcgtgacgggagagcttccatcctttgggccgaacagcagaggtagaaaggcctttgagagccaaggcgcggcttggtatcgaggctatctgggtgagtatcccgatggcatggtcttcgaacaggcggccgacgaaggtgacttctatcgcggtcccgatggcacagacctagcggacgtgggtcttctgcggggcggcgagtgggagtacgactattcgtacacaacacctgagcgaccagaatcgatccacgtgccctgccaggacttcgtcaaacacctcggcttagcgtgggacagacaacgcggctggatcgacgggaatggcgaacttgtcgcgttcgaaacgcgcgctgcacgacggagcgggctattcgtccggcgtgactcgttgaaccgttacctggcagacactgagcgcacgcttgtcctacgccgcttcgccaatcgagggttgttctcgcaaggacgaagcgagagcccccagattgacctcttcacttggctgatctatcggtcatctggcttgcctcggctactgagcgaaactaagtgcccgtttaactgttga

SEQ ID NO: 517688 - DNA, 762 bp, Stenotrophomonas maltophilia
atgaagacgaccacgctgttcccctggccgggcgggaagacccgcctgctgccccacctgctgcccctggtggccgagaccccccatcgcacctacgtcgaggccttcgccggcggtgccgctcttctgttcgccagagagccggccaaggccgaggtgttgaatgactgtcacggtgagctggtgcgcctgtaccgggtggtagccaaccaccttgaggagttcgttcggcagttcaagtgggcgctgacgagccgggaaatgttccgctggtgccagctccagcaccccgacacccttacggatatccagagagctgcgcgcttctactacctgcagcgactggcttggggtggcaaggcgactggccagaccccaggcttcggccggggcggtaagggcctcaatctgctgcgcatcgaagaggatctgagcgctgcgcaccttcggctccacaaggtcaccgtcgaacacctggcctggcagcagtgcatgaccaagtacgatgccgccgacaccctgttcttcctggatccaccgtactgggagaccgaggggtatggcgctccctttgggatggagcagtaccaggagctggcgcgtcagatggctgggctgcgtggatctgccatcctgacgatcaacgaccacccggccatgcgggaggtgttcggccagttcagggaccgggtggtgccaatccgatacaccatcgggcggcaggcggtgcagcggcgggagctgatctacacgacctggtag

SEQ ID NO: 517689 - DNA, 384 bp, Stenotrophomonas maltophilia; identical to SEQ ID NO: 356808

SEQ ID NO: 517690 - DNA, 321 bp, Stenotrophomonas maltophilia
atgcgatgcgtcctcgtcctgtgtgctgtgctgctggccgcgtgcagcgagcagccggccgaccaccttgccgatgccctggccgccgatcccgtgcggctcaaggcattgcgcgcgcaatgcgcggccgaccggcaggccacgggcgaggacgcttgtcgcgccgccgccgaagccttccgacggcgcttcttttccggcgaggccgggccagatgagtaccagacgctggccgacctgccgtcgatcccaccgagcttcgatgagccagccgatggcgtagcgccggcaccgccgaccgaaccggagggcacgccatga

SEQ ID NO: 517691 - DNA, 351 bp, Stenotrophomonas maltophilia
atgaacaacgcactcatcaccgacgagcagcgcatcgtgttgctggccaacggccgcgaatccttggagaacccggacttcgatccggcccccgtggtcaagctgttcacgccggacgccggcgcgacctggctgctgaccgagattgatcccgatgaccacgaccacgcctttgggctgtgcgatttgggcctggggatgccggaaatcggctgggtcagcctgcaggagctggcggccgtgcgcgggcggctcgggttgccggtcgaacgcgatctgcacttccgtgccgagaagcgcctgagtgcctatgcgcgcgatgcgcggctggccgggcggatcatcgaatga

SEQ ID NO: 517692 - DNA, 288 bp, Stenotrophomonas maltophilia
atggaaatgcgtgatcgtgatgaagcagttttcggtgaactcctggcacttaaaacgatggtggccgtagcgctttccgttgccagtcgtgacaaggaagacgctcgttctgctctggccgaagtattgcaggcctgcaaggaacagattcaggaaggtatcgctgcttcaaaagctcagttgcaggccgatgagctcgacacctcaatagtgtccgatgctgcgttgggggcagttgatttcgtcgccggggctgccgacagcctgcttggttccatggggcattaa

SEQ ID NO: 517693 - DNA, 1167 bp, Stenotrophomonas maltophilia
atggcgctctacctcgttaccggccagcccggccacggcaaaacggcctatgccctggacaaggcgttcaagttccaaaaagagggaagggcgatctacgcgcacggcgtcaaggatcttgattacagcaaggcgggctggacgtacctcgatgatccaaagcaatgggagacgcttcccgatggcgctgtgatcctgctcgatgagtgctacaccgtcttcccgaaccgcaaccccggtgcggcggtgccgccgcacattcaagcgatggcaacccatcgtcatcgcggcttcgatttcatcatggtggcccagcaagggttgcagctggatccatttctgcgcggcctctacgaagaacatgtgcacgtccggcagacctcggtcatcaggtcaaagaccaagctcaagcgctggaatcagtaccagtccaacgtgcaggcagcgtgcaatgacgaactcgattgggtccggcctaaatacgtgtttgactactacaccagcaccacgctggtcacgacaaagcggcagatcccaatgtggattcgctgggtcgcgctgggcgtagtcgttctgcttgttctgctgctcactatccgctggtacttctcatcgaagattgcgaggtacgaggccgaacgtcctgccgcagcgtctccattggatggcagcggccccgtgtccgctcccagcgcagcgggggcgggcgcgggggcagcggtgacatacgccaccactgccgaatacgctaaagcgcacctgccgcgcatcggcacaatgccctggactgcaccgatctatgaccagcgaggtgtaaccaccgatccgcagctgtactgcatatcgagccttgaagggctggatggcgaaggcaagcacacagaagcgtcctgcacgtgcttgaccgagcagggcacccgctacgatctgagtcagcccgagtgccgcacgctggcgcgcaatggctcgccttacaacccgtataagtcgcagcaggttgcgcccatgccggcacccgtgattcagccggtcgctgcgatgcctgcgcctgcggttgccggcaacgtgatcagccgcggcgaacgtgcgatcggcacattccccgagtcaccaaagttcgcgacggatacgttcctcacgtcgccaacccagcccagcaggctgtga

SEQ ID NO: 517694 - DNA, 291 bp, Stenotrophomonas maltophilia
atgcctcaaataattgcagcgcttgtcgcgttcctgctgggtgctttgcgccagtacctgcccggcatcattggtcgcgtgttgctggccttcggaatcggtcttgtcacccatgaggtggctatgcctgcattgcgcgccttcgttgaatcgaagttcggtgcgttgcctgcggtcatgaaggcgtactggggtgcaactggctttggtgtggccgtcacgatcatcctcagcgcgtggattgctggccgtgcgcagaaggccatactttccaagatcgggagcaagtaa

SEQ ID NO: 517695 - DNA, 1293 bp, Stenotrophomonas maltophilia
atgcagaactgccgcaacagcgtgtcgtgggatgccttgaattcggcaaggaaatgcgtagaccttggcaagatctttgacggctcttgtgcggtcggtcttgctgccaaaggtagcgccggctacctcgctttcttcagctatccatgcgacaagaagtgcgagagtcgcaaggactacaacggcccctatccaaacggtcagttcaagcccacaagcggctctctgtcatgtgacctgggctgcgaagtcatgtggacccacaaccccgatggcactgtaaacggctcggcagtgctcaataagccgtgcactggcgaggactacgacagcgacgataagtgcaacgccgccgtccccggtggtggttaccactacaacgcgcaagtgggcgtctgcgagccatctgagccgaaatgcccaggcggaacgccgcccaactcgctgggtcagtgcgcaccggagccttgccccaacggcatgcttatgcaggccgatggcacgtgcaagaagaaacagaacgaatgcccggctggccttgttcgatctcctgatggtcgctgccttccgggcgagggtcagtgcggtcagggcgaagcgcgcggcgcagacggcacttgcaagcgcgacaaagacggcgacggcaagcctgatggtgagggcgaagacggcgagggcggtgaaggtggagaaggcggcgagggtggcaccggtaagaacgacttcttcgctggtggggacacctgtaacgcgccgccatcctgtagcgggtcaccgatcctctgtgggcaggcccgcattcaatggcggatcgactgcaacacgcgcaagaaccgaaacattgccggtggagcgtgcaccacgccgcctatctgcaccggtgacaagtgtgatgcgttggagtattcgcagctactgatgcagtggcgtgccgcttgctccctagagaagctggccgggaagtcgtcgggtgaagggaatggggcgcaaccggagtggacaaaggttggcggcatgtctaccgatcccggtgctggggcatcccccgacgacacgaaagttctgaccacaaagcagatcggcgtcggcgatctggatcaatccggcatcggcggcggcgggtcctgcatgggcttcgtatcgggcagttcttcaggggcagcctcgggctttctggacgtgatggcgtctccgcctgcctatttctgcaactacatcgctgcaatcaaggcgctgatcattctcaccgcgtccgtggttgcttgcttcattcttagtagagggggtgcgtaa

SEQ ID NO: 517696 - DNA, 210 bp, Stenotrophomonas maltophilia
atgaacatcaagaacgttcgcaacaaactggccgccgtttccgccatcggcatgaccgctctggcatcggctccggcattcgctggtgaactcgcaagcgccgccacggaaggcatggacaaggccgagttgatcctcatcggtgtcgcagtgctgtcgctttgcggtgtcatcgccctgatccgcgctggtcgtcgcgcctcaagctga

SEQ ID NO: 517697 - DNA, 207 bp, Stenotrophomonas maltophilia
atggaagaaacagttctcacgctgtactgcaagcaggctgattttgatgcctcgaccggccagtgtgcgcaccccttctatggccctgcaccgatgcttcttccgcccatcgacgcagcggacggccttgcaatctcggtggctatcgccgggatgtggggtgtgggctacatgatccggcaagcgcgccgggtctcaggcggctaa

SEQ ID NO: 517698 - DNA, 300 bp, Stenotrophomonas maltophilia
atgagcatcaaggtcaccgtcctcaagagcgatgttgaagagcgcaagggcagcttcaagaatgatgcaggtgaaatggttgaattcaccacgcgcaagcagaaggccaagctggaagctggcggtttcgcgtacccgctcgatgtgcgcctggacaacggccagaccggctacccggagggggagtacgagctcgacgtcgattcgatgattcaggtcaacaagggcgtcatcaacctgagcaagttcaccgtgctgcgtgcgattcctaaggccccgccccgcgctctgaccccgtaa

SEQ ID NO: 517699 - DNA, 315 bp, Stenotrophomonas maltophilia
atggatctcgtcttcggtcggatgaacgcctgtatcgctgtctcaattcctcgcctgatcgaactgtgtgagatggcagggatggacgtgcgctacgctacgagaaaggagctggggcaggctaaggccgacggcgctggtccgatcatttatcagggcaagggattgatgttctcactcgcagacgaggaaatgatgctgctggatggggtgatcttccgcgccttgtttcatggccaacagcctcagtcggtcttgcgacagtatttggagaatagcgcactgacgacctcgggcctgaagggagagtgttag

SEQ ID NO: 517700 - DNA, 192 bp, Stenotrophomonas maltophilia
atgcaggagcgcgatcatctggcctctattcggaagagcaagctggaccttgacctgtcctctcttgcccgttcgtacaccgttgaccctataggcgagcttcacaggatcaacaccgtgctttctcgctatgacgggagtttcctcaaaaagcacatcaaccgggtttttctcatccaaacccttgtctga

SEQ ID NO: 517701 - DNA, 246 bp, Stenotrophomonas maltophilia
atgagcgttagcatttcttcacgggacctgatccagttgctatctggcaacttgtcacaagaagacttctgcaaagcgtgtgggttcgatgccaaacacgttaatccctttgcgcttgccctctctcaggggcgcttgatccagcgtgcctcattgagcaagtcggatggagatgatgatctggtgaccttcgaatttggtgagattgatccggccatagcaccgttctctatgccaacggattag

SEQ ID NO: 517702 - DNA, 555 bp, Stenotrophomonas maltophilia
atgccagggccgaagatcccgagcgccagcaaggtgagcgaggccagcatgatgaccagcgcgtggtcgatgttcggttcggcgggatggacttggaactgcgagaacaggcccgagccgatgccgacgatcacggccagcaccaggaccttgataccggcggccacgacattgcccagcaccttctcggcgagaaagctggtcttgttccacagcgcgaacggcaccagcacgaacccggcgagcgtggtcagcttgaactcgatcagcgtgatgaaaagctggatcgccagcacgaagaagcacagcaccacgaccagccacgcgaggaacatcaccacgatggggtcgaggttcacgaacacctcggggaagccggccatctcgccgatctgctccagaatcggcgccccggcgtcgatgccggtcttcgcgagccggcccggctgcaagaagttctccatcgtgatggacgagccggtggcggtgatgcccagcccagcgaacgagcggaacacgatgctggccagccagttgaagttgttgaggatgtag

SEQ ID NO: 517703 - DNA, 321 bp, Stenotrophomonas maltophilia
atgcgatgcgtcctcgtccttggtgccgtgctgctggccgcttgcggcgagcagccggccgacaacctcgccgatgccctggctgccgaccccgcgcggctcaaggcgttgcgcgcgcaatgcgcggccgaccgggaggccacgggcgaggacgcttgccgcgccgccgccgaagccttccggcggcgcttcttttccggcgaggccgggccggatgaataccggacgctggccgacatgccgccgatcccgcccagcttcgaggaaccggccgatggcaccgcgccggccttgcccgccgccccggagggcacgccatga

SEQ ID NO: 517704 - DNA, 726 bp, Stenotrophomonas maltophilia
atgaagaagcgccttgtcgccgctgccatcgcggccatgctttgcaccgccactgcccatgcgcaatgggtcgtgatcgaccccaccaacctcgtgcagaacacgatgaccgcgatccgcacgctggagcagatcaacaaccagattcgccagctccagaacgaagcgcaaatgctgatgaaccaggcgcgcaacctcgccagcctgccgtccagcgtggtcggccagttgcgcgccaacctggcgacgaccgagcggctgatcgcccaggcccgaggcttggcctacgacgtgacgaatctggatcgggagtttgcccgcctgtacccggagcagtacgccgccaccgtcagcggcgaccagatgtaccgcgatgcccaggagcggtggaagaacacgctcaacggcttgcagaccaccatgcagatgcaggcgcaggtgtcgcagaacctgggcgaagacgaaagcgtgctggccgatctggttggcaagagccagtcggcgcaaggcgcgttgcaggcgatgcaggccacgaaccagttgctcgccttgcaggccaagcagtcgatccagtcgcagcggctccagatcacgcaagaccgggccgcctcgctggaactggcgcggcaggcggcggcgaccgagcgcgcccgcgaagtgcggcggcgcttcctcggggaaggcacgccgtacacgccgcagtccgtcaacttctaccgcgactga

SEQ ID NO: 517705 - DNA, 2472 bp, Stenotrophomonas maltophilia
atggccagtaacgttcaaacgacaacgatcacgatcggcggcgaggtgtccaagtcactgaaggacgccttctcctttgccaacgatggtatcaagcgcctcggcaccgaggtgaccctgctggatcgcaggctcgcgcgcatgagtacgaccagcaaggagtacgcccgcatgcgtacccaggtcgatgctctgcgtgcctcgcaggtggcgctggagagcatcgaagcaaagcgcgacgccaacctggagaagcgcgggaagctcggctcggcatttggcgaggcacgcggcacactcggcaccgccgtcaccgcactggccaagccggtcgagaacgcctccggcttcgcccgccagaaccagcagatcggcgtggcagccaacctcagccgcgcccaggtcagcgcactggggcaggccatcctggaacagtcgcgtgcaaccaaccagggcgccgacgcgctgcaacgctcgatcaggctgatgatcgacgccggcatggatgcgcagtcggcccaggccagcctcggtgctgtcgggcggaccaccaccgtcaccggtgccagcatcgatgatgtggcccaggccgcggccgccctgcagcagtcgttcgatatcgatccctcgcgcatgcagaacgcgctggacgtgctggtagtgaacagccagcagggcggcctgggcctgaaggacatggcccaggtgctgccggtgctgggttcctcgttcgaggcgatgaagctgcagggtacatcggcggcggctacgctgggtgcggcactggaagccacgctggactcggcaggtggcgccgacaaggccgccagcaacatgaagagcttcatgtccgaggtgctctcgccggacattcaggagaaggccaagaagagcctgaacctggatctgcgcaagatcatcggcgatgcacagaccagcggcggcaatcccttcgatgctgcgatgcaggggatcatccaggccaccgcgggcgaccagaagaagatcggcgcactgttcggcgatgcgcaggcgaagaacttcgtccagccgatgatcgagaactgggacacctacgttcgagtccgcgacaaggcgctgaatggatcggcgggcaccaccgatgcagcctatgccgatgcgatgcagaccgacccgcagaagatcgagggcgccaagatcgccgtggacaacctgtccaaggccttcggtgccgcgctgctaccggcggtgggcgaagcggcggtcaagctgaccgaactgctgaacggggtcacctcgttcgtgcaggagaacccgaagctgatcgccaacaccacgcagatcgtggtcggcatgctgggcatgcgcaccgcggtgctcggcgcacgctacgcctggaccttcctgcagggcccgatcctggctgcgcagaaggccttcgagctgttccgtggcggcagcctgctggcgcagatgggacgcttcgggccgatggcgatgcgcctggcgtcgggcttccgcatcgtcgcaactgccgtggccgccatcggtggcgggccgatcacgatcgccatcgcagcgatcaccgcaggcgccatcctggtgcgcaaatactgggagccgatcaaggcattcctcggaggactctggcagggggtgagcgactccgccggtgccgcgatgggcgagatcatggccgctgtcgagccactgcgcccggtatgggaggcaatgggcgaagtgttcaaccgggtatggaactggatcagccagctgatcgcaccggtcgaatacagcggcgacgcgctctcgcgtgttggcgaagtgggccgcttcgtcggcaccatgctgtttgaaagtttccgcatggcaatcgctgccgtcggcaacatcatccagaccatcgtattcctcaatgatgcagcgatgtccctgggcgaaaccattggtaccgcgctgatcggcagatgggattcgatgaaggagactgcccgcgccgcgatcaacgtggtgatggatgcactgaagcccctgctggagctgatcgatggtccactgggtgatctgggagggcttgtcggcaagggtctggacgttgcatcaggcttcctggggcagctcaaggaaggcgcagtcgatggcatgaagagcatcggcaacggtgtggttggatacagcaacatgcgcgcccagggccgaggcggcctgaacgatgcgttgtataccggtgttgcggtggcaatgggtgacaggcccgccgtccgagagcaggaggatagcctgcgccgcgcaatgcagggccgtccggcacccgacatgcccgcgcccactccacgcggcgtcaccaccgtgcaacaacaacagaccaacaacatcaccatccaccagcaaccaggtgaatccagcgaatccgtagcacgtcgcaccgccgacgaactgcagcgtcgcaacgcggttgccgcccgtggtggccttgcagacaggaattga

SEQ ID NO: 517706 - DNA, 2625 bp, Stenotrophomonas maltophilia
atgcttgaccccgacctccgccactgggggaccacgcgcgagttgaccattaccgctaagcagcggaacgtccgcgatggcgaaaagcggctgggagtagcatcattggatgcctgctcttgcgccagtgacggcctgacaacgccgcgccgcgaccctagcgcccgcccacacagggcgggccttgctattccagcccgatcaaccatgcccatcaaaaaatccgacctctactcctccctctgggccagctgcgacgaattgcgcggcggcatggagccgtccgagtacaaggactacgtcctgttcatgctgttcatcaagtacgtcagcgacaagtacgctggcgacgatctggcaccgctggtgatcccggccggggccagctttgcagacatggtggccttcaagggcaagccggacatcggcgagcgcatcaacaccggggtcatccaggcgctggtggacgccaacagcagcagcctgtcactcagtgacttccccgacttcgacgaccccaagaagctgggcgaaggcaaggagcgccaggacaagctgaccaacctgatcgctatattcgaagacccggcgctggatttttccgacaaccgcgccgagcacgacgacatccttggcgatgcctacgaatatctgatgcgccacttcgcccaggattcgggcaagagcaagggccagttctacaccccggccgaagtcagccgcaccatcgcccagctgatcggcatcggcccgcacaacaccaaccgtcagaccaccgcgtatgaccctacttgcgggtcagggtcactgctgctgaaggtagccgccgaagcgggcaagcccatcactttgtacgggcaggaaatctcgtccaccaccgccggcctggcacgcatgaacatgatcctgcacaacttcccggatgcgtccgtgcagtcaggcaacacccttgccgatcccaagttcaaggagggcgagcggctcaggaccttcgactacgtggttgccaatccgcccttctcggacaaggcctggagcagcggcctcaccacggatgccgaccctttccagcgcttcgcctggggcgtgccgccggccaagcagggcgactacgcctacctgctgcacattctccgcagcctcaaggccagcggcaagggcgcctgcatcctgccgcacggcgtgctgttccgcggcaatgccgaagccgcgatacgtcgccagctggtcgatagcggctatctgaccggtatcgtcggtctgccggccaacctgttctacggcaccggcatccccgcctgcatcctcctgctggacaaggacaacgccaacgcccgtcgcggcatcttcatgatcgatgccagtaaggggttcctgaaggacggccctaaaaaccgcctgcgcgagcaggacatccaccgcatcgtcgacaccttcaacaaggcgcaggacgtgcccggctatgcgcgcatggtcggcgtcgacgagatccgcgacgccaggaactactacaacctcaacctgccgcgctatatcgacagcagcgccgctgaggacctgcaggacattgaaggccacctgctcggcggtatcccacagcgcgacgtggacgcattggctgcgtactgggccagtatgcccgccctgcgcgcggccctgttcgaggacgccggccgtcccggctacctgcaactgaccttgccgcaggccgaggtgaaatccgccatcctcggccacgcccaattccaggccttccaggcgacggcggccgagctgcaaacccgttgggagcagcacatccgcccgacattggccggttttgctgagggcgcctcccccaagcagttcatccatgcggtttccgaaagcctgctggccgcctatgccaaggcgccgctgctcgatgcatactccatctaccagcacctgatggactactgggcacagacgatgcaggacgatgcttacctgctgtctgccgatggctggaaggccgagcccgcacgcattatcgagaccaacaaaaaaggtcagcgcaaggacaagggctggacctgcgacctggtgcccaagccgctggtcgtggcgcgttacttcgctgccgaacagcaagcgcttgatgccgccagcatcgccctggacagggccagtagcgcactggaagtactggaagaagaacacagcggcgaggacatggccttcgccggattcgaccggatcaccgccgcacaggtgagagaccgcatccgcgaaatcggcgaggacagcgaagccgccgaagagctggctgtgctgaagcaatggctggcactgaccgacgaagtggccgcgctgaaaaagcagctcaaggcgctggacgccgaactcgacgccaaggcgctggccaagtacccgcagctgtcagtggccgacatccaggccctggtggtggatgacaaatggctggccacgctgtccgccgccgtgcagagcgaggtggagcgcgtatcgcaggtgctgacccggcgggtgaaggaactggccgaacgctacggcgtgcgtttgccacaactggcagcgcaggtgaaagaactggaaagcaaggtagccgggcatctggcaaagatggggtttgcgtggaactga

SEQ ID NO: 517707 - DNA, 570 bp, Stenotrophomonas maltophilia
atggacgacgatcagacaggcacagggaccgaacctgccgcgcgcccgccggtggcggccgacgatttgctgttcatccgcactcctgaagagttcacctccgcctttttggccggttggatcgtggacgctcgcagtgggggcttggtccgtggacggctccacgaggaaggccatatctccatgattcagcacgctgagccactgggcacttttgaattcatgggggtgatggaagggggggagtacatccttagcaccgacgcgaccgctgcgcattttgatcgtttgatggagatcaacagcgacaagacgccttgtgacactcctctgcccgaagctcccccaggtcgggtgatcgatgtgtcagccgagccccacgacaagatgctcatgattgatcggcaattcatcatcaatcgcgtctccacccggaggcacctagccgaactggtcgcgctgaatgatccgcatagctactaccgcggccagttctttgatgacaacgtggtcgcctatctgaacgaccatcctgagctaggcgacggtccgccgaccagtggcggctga

SEQ ID NO: 517708 - DNA, 246 bp, Stenotrophomonas maltophilia
atgaggattcgtaaagggccatgggacggcgctcaacccaggacacatgtgttaaatgtgttgagaacgcacggggttgaggtgattgcgcaaggaaacgactggtacgaactggtcgatgctgatggcgatcctgaggtgctgctgatcacgaacccggtgtttccagacatggtggtgaagatctgggagcgctacggttccattcacgagtttgagatcacggatctagtgcgaaggcattga

SEQ ID NO: 517709 - DNA, 732 bp, Stenotrophomonas maltophilia
atgcgtgaggaccgcaacgacctcaatactggcttaatcgccaacaacgcgcacctatgggcgctctcccctccccgcgcggagatcgaacttggagaaatcgtagggttctgccccagagaacgctcgaacgtttgcagctgtttccatgcaataggcagagaaaacttcgacgtactccttgagacttcttacctgctccatcgagcctgcaaacacccttatctctgcagggaagtgattagtgcgagtgtgcgtcttcacctgcgaaagcaacgtcttgcagtttgcgctcaatgtgcggctgtacccaatcaacactgcgagatcattcccaatgttctctggcaagtagtgaagtctatcttccgatttctcggtaccaggcagaagcgattgctcccccaaccggaatgtgcgctccaagaaaccgacctcctcttcggttgttggagcacctcgattcagagccctgatgcagtgctgatgcaggatatacagctgcgtcggcaattccgagacctcgtgtaccagcactcgagcgacgatccgagcgttgccgtccctcgccccaacgatttccaggtgctgctgcttggcgattcttgtcgcctcggcagcaatcgacgtcgctttgcgagacgtccgataggcaaggactgcaacgactgttgtggccaacaccgcaaagacaccaacccaaaccgatgcccaggccgcgaccatggatag

SEQ ID NO: 517710 - DNA, 345 bp, Stenotrophomonas maltophilia
atgggaatactcgactttcttggcagtgcggcgggcgttgtgacaatgcagacgggcgcggatgtgttcatccatcgtcatacacgcgtggttaccttcaaccttccatcccattggcgtgaccacgccaacaagctcgtcaaagaacgctttcaacagcagctcgttcagtccgaatttgatgcggcactgctgaaactcgcagtgttctggacctgcgctatgcaaagtgaccgagtccgcgccgagcacttcgccgacgccatgtttgacctacgcaccgcggcaggcggccagatcacgcccggtctgtccctcgaagtgatgcggctgaccaaccactaa

SEQ ID NO: 517711 - DNA, 291 bp, Stenotrophomonas maltophilia
atggacacgcgaagccttgccaatcctcaggatggggagctcaacgggcatcaggctctcgttgggcgggtcgtcttggccgactgggtggactcccaccgggccgatgggtggcatcacggcgacgtggatgcctcgccgctggcctgccggtcggcaggtctgctggtcgctgcatcggccgaggcggtggtggtggctggtagctggtccagggaaaaggaacctcagcgctgcggcgctatgacgattccgaccaaggccctcattgcgctgagggccttggaatga

SEQ ID NO: 517712 - DNA, 141 bp, Stenotrophomonas maltophilia
atggcaaagaacgaacagaccggcaagaaggtcgcaaccactgcgtccaagctgttgagcaatccgagctcatcgaaggcagtgaagtcggtcgcggcatccgcgctgacccaggccccgaacaagccgaagaagaagtaa

SEQ ID NO: 517713 - DNA, 354 bp, Stenotrophomonas maltophilia
atggaagcgagcactcgcttggacaccctcgagagggccgttatcgcgctgcagacccagaactcgcagatcgttgcttctttgacggacgtcaccgaagccatcaacatcgcgttcaaggacctgtacctgagcgagcagaagaaggacggcatgtgggctgcccagcgcgccatcatcgagtccctcctggcgcacgccgacgcagccacgcgtcaatatgcgcaagcaaagctgcaagtcgcatacgaggtgtgggacgcgaagaaccgggatcccgaattccttgaagagtttgcggcggccgcgcgttcagtatttcctgacattcggctagagcccgccgctgagtaa

SEQ ID NO: 517714 - DNA, 432 bp, Stenotrophomonas maltophilia
gtgacgggacagttttttgacttgagcgggaacattgtgacggccgaagaggcgcttcgagccgctgcgagcttcatcgaaacagatctcgattcgaaggctggaatcaccaagggtcgtgtggcctgggaatacgttctgaggctgaatgctggtggcggggcgcagtttgatctgcgcgtgaaaatctggccctcaaagatctctacaaataggtaccgcatggctcgtagcgtccatgccaaggcacctaacatgcagcatccataccctggtaatgacggagcgaacacgatccttgatgcgctgctcgcagctgtccatgacacgatgtacccaatcaatcagggcaaagaagaaggattcacgttcgacgccagctggctctatcaacagccttcgtacgcctacacgccggacttcggagactga

SEQ ID NO: 517715 - DNA, 597 bp, Stenotrophomonas maltophilia
atgcgcttgtgcaacttctcactcaagggtggtgtcggccgcacgacgctggccctgaatcttgccgggtgctatgcccgtgaccccagcctgcgtgtgttggtcaacgaccgggacccccaaggcggagcctgtgcgtttgcctcactgtcggacgaaacaccgttcagtgttgggcgctcgcgctcccctggcttcgatgtggagatcaccgacactccaccacgcctgccggacaacgaagtgatccccgaggccgatctctacctggtgcccacgttgctcgatggggccagctttctcatctttctgcgaaccgtggatgttcttgaaaagaagggaaagcgctacctgcccatcgccaaccgggccaacgagaagcgggcagcccatcgacgccgcctggagcaccccaagatgtcgggtgccatcctggtgcgggatcgtgcgttgtttgcggactgctacgaggagggaaaaaccgtgttcgacgccaacggccgctgggcccgggtggcgcaggaggagatccacgccctggctgtccgggtgcgcgataccttggccgctggtgcaggccggagggctgcggcatga

SEQ ID NO: 517716 - DNA, 1146 bp, Stenotrophomonas maltophilia
atgcttcccgattcacttctggaggagcttcggagcgccggggagggttcgaccctggactacaaggccgagcgctacaagtttgcgaaagcttcggaggacgaaaagtccgagatgttgaaagacatcctggcgatggccaacgctcaacgtggcggagaggcttacatcttgctggggttcaaggagaatccaccttatccagcagaagtggtggggttgcccgccaatggcgcgatcgacgattcacgggtccagcagttcgtcaacgagaagctggagagcaagctcagctttcagtatggggagcaactcttcgacggcaagcacatcgcggtcatcaccatccccaagcagtcacggccgttctacgtcaccaagacctacggcaaggtagaagccaacacggtctacctgcgtcgcggcagctcgaccggaattgccaccccgcgcgagatctaccggatgggggttgccgatcaatcgaaaggcgaggcgctgttcgacctgctggtgcttgaccaggacaaccgcccactgggcgatcactttgaacgggcgttcctgaccttcgacgaactgccggattaccggcgggagcaaccttcggcgttcatggcggctcccaacttcaaccgggaaaatcgccactactggagggaaggagcggactaccttcaatcgaagaactgcctcatccgcattcgactggccctgaccaatcgctccactttcgccctgaccgacgccaaactcgaagtcacctggaccaacgacggggggcagccgttcaagatgttgaccgccgacgacttgccggatctgccggccgaggaatggaacatccggccctcgttctctggcgacaaccgaaccgaagtggacgaggaaggacccgagccgctctatctgtcactgctgggaactgtccgcccgggtgagacgcggcgtgtgggggaagacctggcattccttccgatgaagcccggtgcatacaccatgaaggtcagggtgttggcgaacgaaatttcccagcccggcacgagcgaacgtgtgctgacggttgatggcgaatgccagcatctgagcattgaggagttgttggagcgcctggatgacgacgaagagcagagcgacggcgactag

SEQ ID NO: 517717 - DNA, 1068 bp, Stenotrophomonas maltophilia
atgagcattgacgaattcggttcattcgcttcccgcgttttggcgaagcaccgcgcccgtgccgctgataccccccggtgggcgctcgacctgctgcggcgacaagacaacccgacttgtgcgttctgctgctcgcccatcgacctgagccggcggcagtcgtgggtgctttcacccctcgttccgttcaaccagggcggccccgtcgaaccgtcaaacctgcggatggcctgcaaggcgtgtgcggtcgaacgtggcgctcgtgacctgctggcctgggaagagctggcagggcgggtgcccgcgacacaagtcgacgcactgaaggaagaacgcctcaaggtgctcaaacgctcggacaaccacctgacctccgcaggccactacgctaagccttcaaccgtcctcgcccaccttcaggagcgctggaagcacccccggttcctcgcttacgtagaacgccatgggggcggatggttcgtgggctggccgctggcccaacgcgatcaaccctcacgcaacggtgctgccgttctgctgcgccaggtccaccgggcccggtggctggaacacaaagaggtggttgggttcgacgtgtcggaggaagtttttcagactgccgtctggcagctcatcgaccataatgggttggtcgtagacctggccgaaggcagcgccgccgacggcgatcgaacatggcaggacagctggcgggtgcgctaccccagcttccatcaagtgcgccgccggcggactttcccgcatgagaaaccttggccctcccatcgggaaggcagccccttggcattcagcaccaaggccagcgcggttcggatgcgagccaagcgccaggccgcccgggaggaggaaacgaaacagcggtggctggacgcccgccgtcggttggcaaggcgagacgaggacgtggacgctggccggttgcggccttacttgccaggggagcgcgacgctcttcaggcggacgtggacgagctggcagggcgttgggtggcggcgcggaagccctttacctccttgggcgccgaagggccgcccatacaggcctga

SEQ ID NO: 517718 - DNA, 489 bp, Stenotrophomonas maltophilia
atggctgaggcaatcgaccaccgcgaggtcggccgggagctggccagcatgtccgggatcgagctcgactcgatcgccccccaggacgctcgtctgtgggaggcccgcggccacgcgcttcaggcgctcgctgccggcgacatggacgccgcactgcgaaccatgggcatggcgtcctcgcggatcatggaccgagacgaagcatgggagatcgcatcgaacgcggtagccgtccggatcgccgccggctggacgcgcgacatgctggtgagcagcaccgaggccggccgcgcgccgtgtggtcgcggctactacctgttctgctccggggccatcgcggtctgctacttcccgatggtctgcatcaccggcatgaacggccgcggctatcacttccatatcgcccaggacctgctcaacgagcgagatcccagcccctacgccattcgtcgtccgaccgtgccgcagcaactggagatgttccgatga

SEQ ID NO: 517719 - DNA, 471 bp, Stenotrophomonas maltophilia
atgcgcggcgaagaccgggctcatcaagcagaggccgagcgtcgtcgtgcggttgcgctcgcgctcacctttgaccacgagttctactcgcttggcggcttgctcaaggcgatcgttgatgagctcgatccgcaggagttcacgcagcagccgcaagaggcacttaaatggttggtttcccagatgcccaccgaccctgtcccgcttctgactaggtttgcgggcgacctggatgcctttgggccaaaagatgcaggcgcgctgctcggggtgctgaacggttggcatgcaatggagctctccttggacgatgaggagattcgctcgtatgaaaagctccagctgcacagactcctccatgcaatgcgtgagggactgctgactctcttggaccaactccgcgacgctcgtgaggtcaccattcgctggatggctgaggtgagaagtgatccgcccgccactgattggtag

SEQ ID NO: 517720 - DNA, 234 bp, Stenotrophomonas maltophilia
atgcggactgatctttgggatcaattcggcgaactggtcagcagcagtcctcgactgctggcgaccgtcaccgcacacaacagtgatggcaccagcacgctgacgacgtatgacggcgtacagatgcgggcgttcggccagctgcagctagcattgccgtacaacgtgtgggtgcgcggaggcaggctgatcgaggccgctcctaatcttcccgtgcttgaactgtcgatctag

SEQ ID NO: 517721 - DNA, 876 bp, Stenotrophomonas maltophilia
atgaacgagacaatagttgaaaggcagaaccgccgtcgagaaaggcagaagctcaaaatatcgagactcatcaccgcagcggcagccattaccttgctattctgggcacgcaaacaatggaggcgcggagtactgcaaacatcccaaaataacgactccacagccacgacaacaaaatcgcacatcgaaaatgattcattcaaaccagaccccttagttccgccattgcgtgagctcaaggaccctttacttgacttcctgtacacctcgctggtttcatacctttccgttgggctcgcctcgggccttctgctacttaccgaagcctatgcccgggcggacatagcgaaagtggcaactcaagcattgtctggactctcctcagttccgctgatggctgcgtcggtagtgctcatttcggtcagctccctggtgctcattgccatagtatccgcccccttctccccaaacatcgaacggctcgccagtctccacaagccattcaacggaataatagctttctctacgcagcttcccttcgcaatagcaggcgtagatttggccacgagctttaaaatggccatagcatttagtggccccgccccaatgtactatcacacatggctggccgggatttgcctcggaattgcgattatggagagcatcctcgcgtacttggtcaggcgggcatcacgccccactcaaaggctcaagcagtgggcgagcgcggtatttttcgtgtggggagcgctaattctcctactgacagtcgcggtggacgtgattgactggagaaacgtcacagatccagagaagatttgccgggcggaggccgacgacccgactagatcgacagttcaagcacgggaagattag

SEQ ID NO: 517722 - DNA, 1779 bp, Stenotrophomonas maltophilia
atgttcatttctagtgtgcgggtgactaatttcaggtcgctcgtcgacttgcatgtcgattttacagtttacaccgcgttggttggcctcaacgatgcgggcaaaagcaacgttcttcgtgctctcaatctgtttttcaatcaggaaactgatattgatgagccgctggcgttcgagagggatttttctcagaaagcgcgagttggtaagaaaaaggcgcgcgagatagtcattgagctagagcttcaacctccggcgcactatcgcgattccgaggcgataatttggcgaaaggtctaccgaggaggtccgcaggatccgttcccggatgagattaggcggaaggatggacaacctttttcgcccaactcaagagtcaactattgggcgcgtagccttgcttttgagtacgttccagcagttcgcgggaggccttttttcaacatccttaagcggcgccttcatgctgcactggcagcgacggttgctggaaagcttaaggatgcatcaggcatgtttctagagggtctccgcgcagaggtcgcaaagatcgagcaagattccctgcgcttgctggatctgagaacagagttctccctgccggaagatttaggtgatctatttgaggccttggagttcagctcctcggacgtcggcgttctgactgcgcttcacaacagaggtgatggcgttcaaggacgccacgtccctctcattctgaaatttctggcggaacagcgaaagaagaattccgctaaaggaaaacccgcgcctgagactatctggggcttcgaggagccagagaacaatcttgagcttgcaaagcaagttgaggttgctcgtgaatttggcgaatatacaaaggacgttcaaataattgtaagtacccactctccggccttctataaggttgcaaaagatagtgagtcggggtctatccagtttgctgctcgcatcgatggccgaacccaattccgcgacgagccgttgcctgaagcggttgacgggagcctggggctgatgccattcgtggagccatacttggatcgcgcggaggctgagcggcagaaagtacttcaggctctgacgcaacttcgcgaagaaggcgtgctctacaagggcaatgcactcttcatagagggttcgtccgatcagattattctgctcggcgcgttacaagttatggatatacagctcgatgctaaaattgaggtcgtagagggcttgggggggggcgcaaattgggtagcggaccgatgtatcgcccgggttgcattggcggatatagccggaaaaaccgtggcgctattggatgatgatgatgcgggtcggcgcgcagctgagcgaattcgaacggtgggtgaggccttgggtcgagcggggaaggtgaggtgtatcttcgccggaagagacaatggcgacgaccatgtcagggtaattaagcaaagcggcatgggtatctcttgggcacttgacgaaatgtgcgacctggacgattggcgcgttgccgaagaggcggggtggcttgagccgcgaacggatgagttactcaagctcaattttcagaagctcggaggggatatgactcttgagcaattgatcgaacgccgcgtggtttctccggatcacagaagaattgtcgccaattcagtaaagccagaacggaagatggccttcgctagagcggctgccgaatcgatggcaatgcttggatatgtcccgccgtccctggagcgactggtcaaacagttgcatgaggtgttctcgccggcgaggtag

SEQ ID NO: 517723 - DNA, 978 bp, Stenotrophomonas maltophilia
atggaaatcgcagagaggaatttcattgttccctttgtgtcgccttggaaggtaaggcgcgaaggccgggctgccatcgaccttcagcgtgatcagatgttggcattggctcaagccgagaaggaggttgagaagatccgatctggcgaactggtatggtccccagatacacagcgcttggagtctccgcgttcgattgatgtttcccctcagcctgcgcgcacatccactagtgggtccgctgctgttccctttaccactgctgcgcttcgtatgctgcggagagaggtcaacgttgcaaaagcgatggtgagggcaggagacattttgttgaacgaagaccacgctgttccagataaagaaccggatccggattggctcgaccgttggcgggagagtgcggctgcggtgtctgctgaaaagatgcaggagttatgggctcaggtgctagctagggaagtcaggtccccaggtagcctgtcgcttcgtgcactagatttgcttcggaacttggacagtggcgatgcacagctgatcgagcgcttggcgagtgttgctttgcacaagtctttcgtctatcacccgcctcagcagcaaggcgatgcgtcgccgggcatgtcctatcgcgatgcattagatctacaggagctgggttttctgggaggagttgaagcccaaggtcttaccgtcacgtgggattctgcagcgacgacggagttcttgcttggggtaacgtgcggggatcacgggctagctatcagaggcccgaatgcggaagctaaaattactctaccgggctacaaagtgactgcagtaggaagacagatcttgcagctggttgaggccgtggaggtagacgctccgtacttagaggcggttgcagcgcacatcaaagcccaaggattcgaagttgaaatcggcaaggtaaagtctcgtgatgcaggcggcgttgagttcgtcaatctgaggccagtatga

SEQ ID NO: 517724 - DNA, 606 bp, Stenotrophomonas maltophilia
atgaagagaaaggcaagcaggatgctgaaagaccatatcaacacaccattgctgctgcgatcgcctgacgctacggagtatccgtatctggaggatcctgatgcgttcaagaagaagccactgtgggtcgtgtggccctatcagggcctatctcatggagggctcaagttctgcattgaacgctacttcgcctacctttccgacgacggcaagtcatgggacgcggcgatggtccggaaccaagccaggagcagcgcccaccacgacccgtggctgggtgaggacagtggtgacccacagcgacacgacatctgggagttctggaacaaaatcccggatgagaaccgggcgtggctggaagtcgtgggactggtgcccttcgacgacatagtggagattgacgatctcggcgatgagtttgtacaagcccctcatgtctatgttcctttcacatccggaaggcatgcccccttcagaggattcgtcgtcgagattgagacaatcggccagtggagccaacgaaccttctatcccgaaaatagaacagaagggcggatcaagtacttccccacagagatgcgcgaacgcgatgacggcggagattga

SEQ ID NO: 517725 - DNA, 267 bp, Stenotrophomonas maltophilia
atgagacgggcaggactaagctgggtagatggtcagccgtcgctccccgcgttggaaagtcccacctcccaaggtcaggcgaagccagaatcgcagcggtgcatccgttgctacgccatccagggtaaggcgtacatcttccatccaggctattcggggcgcagcacgctcgtcctgatcaacttggagcgcgaagtccgctacgcaacccgcagcgacgccacccacggctggtactgcagcgatgatgtgcccctcggcacctag

SEQ ID NO: 517726 - DNA, 591 bp, Stenotrophomonas maltophilia
atggcggagttcaggaaaaaattcacggtcgagatgaggcgggatctcataagcaagagcattgcgcggattgagttcggcggagggatgacccagcacaagcacttcgtactggataccgaggcctctttcacgatgggatgcgacgtcaagctggacgccgattcaatcatgaatatgacgggctcgcttcgggatcaacagatcgtcaaggcctggaggtatcgccgaaatgagtcagtcaatctggccgtcaggatgggattcatcaagtccgagcagtacgtgacggagatagagggagcacgtggcgtcgtcagtcgctatgtggcgacgaagcgtggaaagaagtttcgactgcagcccaagttcattcaatggacgtggatcgcggttcccttggcttaccagcgcgtcgtcaagatggccacacgctttaagattgtcttgacggttgtcggcctcggctcaaccatgttcaggatttggcagtccggcgcggtgagtgttgcctgggttgcagccagcgctgcagtcgcggtcgtcattgcatccattgcgtgccttttgggcggacaaggtggggattga

SEQ ID NO: 517727 - DNA, 447 bp, Stenotrophomonas maltophilia
atgcgaagtgtcttctgcgtttcgagctacgaggatctggacaagccggaccggctcatccccatcgacatgagccgactgttcgaggcgatcaagacccagcagagtgagatcgaatttgcggtggatgttcatgatgtccagaagatctaccgctggagcaacttttatctgcacgcaggcgcacgtgactacccctcgatagttgggtttgtgcacccctatcttcatccgctgttcgttggatcgccgtccatgctggttggcatacgaatgaagtgggaaacctggcacgtcgtacgggcggggtttctccctgagccgaaggcgttgagcttcagtcaacggcttgccgcggcgtggcaagcgctatggtcccagcgcaagaaagcgcttcagcttccgaacgcggaggagcgccatgcacagtgcgtcttcctagattag

SEQ ID NO: 517728 - DNA, 324 bp, Stenotrophomonas maltophilia
atgaccgtttccgtgatcgtgatcgaacccatcaaaaatgacgaaaaattggcaggcttcgagctggagctgggcaatgtttctcacttccactgcttcgctgaaaatgtctacttcgctacccataacggcagctcgcgcgacctttttgatcacttgcgcagtgcagtgcccgaggtgacgactgagctcgtggtcatcgaagcgaaggacgtgcaggacaacagttggcgcgtgaacgggctcaccttcgattggctcaatgaagcactccccgactatcctgtcccagcaccagaatttcagaaagaagtgaagtggtaa

SEQ ID NO: 517729 - DNA, 363 bp, Stenotrophomonas maltophilia
atggctgacaagacgaccgccggcgctctgccggatgccgagctgcagatccttcgccacgcactgggtgttggcgagggcggcttggagcgcagctaccgcagtcacttcgtcaccggcccaggcggcaccgactacaagcactgcatggtgttggtcgagcgtggattcatggtccggcgcgcgggcaatgcgatcaccggcggcagcgacgtgttcaacgtcacgcaggccggccgtgccgcggtgcaggagcacaccccgcctccgccaaaactgaccaggtcgcagcagcgctaccagcagttcctgcgctacgacggtggcgtgaccttcggcgagtatctgcggggctggcgatga

SEQ ID NO: 517730 - DNA, 876 bp, Stenotrophomonas maltophilia
atgagcaacgacaagacaaccctggcggacgtgcagcccggtgggagggtgaggctgggaacgcccggcgctcgctgggcagccataggtgagccggacccgcatggaacgcgctatgactgcgagcgcgctgcgctggtcatgggcgaccttacggacgacgagctggcgaatgcggtgttcatgcacggcaacgagcggcagaccatggccgagctcatcggcggcgccaccccggcaatagcctacctgaccgccgccaaggaccgcatccgctggctgtcgcgtgcccttgcggcagctgaatccctctccgcccagccctccccgggtggtcaggagtacgcgtggaacatcgccgaactggtgagggtcgaccttgatcgccagtcgtgcccggacgcctacatgcggatcgcgatggaatcggtggtcaagcacctcgccgcccgccagccggtgggggagcctgcctacaactcggcgggaatttcgctgaccgcgtgccagctgcacgaagcgttgctgatggcgggtgaccccgaactggatgttccgttcgaggatagaagccttgtccggattttctggacggagacgggccacagcggccccggtctctactgcgaatgcgtggacgccgaggaagagggatgcatccggctggacgggaccgcgcctgctatcggccagtccgcgcaggccgtgggctcggggcagttccgtgcccaggttgccgacctgctgcgcagcgagttcgacctggaaatcgcggccccggaagaccaccgacatgacgatggttcgggggaagcagatcggatcgctggaaagatcattgccctcctcgacagccaggcggtgggcaatggctga

SEQ ID NO: 517731 - DNA, 432 bp, Stenotrophomonas maltophilia
atgaccgcgaccgtgcagaccatcgtcctgccctgcggcgacgacgcgaagaaccacgatccggacaacgctcggcagttcactgggtttgtgatcggcacgctgttctgccaccacgcgatcagcgacgacgagtcgctgctattggctgaccacggccaggctgagtacggcgactggggcatcacgcaccttccgagcggagcatccatccagcgcgcgatcccgagccactatcgggctatctggcttacccgccagctcctcgcgataccaggaatggacggcacatccgcagctgaagtacgcgcggcggttgcagatcgaatgggcgagatcaatgcccttcgcttcgacgcgatgaatggtgactgccaaggccagtgcgcgatgcacttcgacctgaccgccgcccaggtgtgcgcgccatga

SEQ ID NO: 517732 - DNA, 261 bp, Stenotrophomonas maltophilia
atggagtgggcttttacgggggtaacgctcttcttgggcgtgctgggactggtcctgaccgtgctgtggatcttcgtccccttcgcgatcttcgggatcaagccgctgctgcaggaaatcctgagggagctgcgcaaggccaatgccgttgcggaggcgaacacgccgccagtaagccctgcggcggcgacagagggcgaggagccacggggcgcattggcgacgattcgcgccgcagtccgacaagctgaccgttcctaa

SEQ ID NO: 517733 - DNA, 489 bp, Stenotrophomonas maltophilia
atggacttactcacctacatctcggacatgccccgccgcgtagctctcgcagaggcttgcggcactagcccagagtacctgtggcaaatcgctacccgttggcgaggcaagcggcccagccctgaactggcggccctgattgaacgggagtccggccggctgggcccggagagggttgccaaggagccgatgatcttcggcgcgtcggcgtcgcctgttcgcgccgaaaccgccgaaatccgcgagctgatcgacagccgcatgagcaagcgcgcgctgcgggagaagctgcacctgtcgaacgacaagcacctggcgaaggtgctgggcctgccggtggagcaggtgagcggctggtcggatgaggacatggtcccggcgctgccgcaggtgatgaagctgcttgggcacgccgagcagcaggagccggtcaagccggcgaacgaggatcccgatgccgaccgcatcggccctatcgaggttgcctga

SEQ ID NO: 517734 - DNA, 231 bp, Stenotrophomonas maltophilia
atggaagactcggaagcgactgctgcattgatggcaattgcggcactcagcagctgcctgatcgaagctggagcgctggatcaccgcgacctgaccagcgccctgcggctgggtgtgaccaaccttcgggacgacgggaaaccagtcgcagccgaagcgctggaagactttgtcgagggcgcctcgctggcttggcgagtagcgagcgcggctggccaagcgccaaactga

SEQ ID NO: 517735 - DNA, 312 bp, Stenotrophomonas maltophilia
atgaaccatcccgctcgctccaccgaccccagcaccagtcacgaggccgcacgtcacgtggtcgacagtggactccaggccgaccagcaagccgtcgcgctcgcggcggtgaagctcgcatcaggcctgaccagcaatgaattggcccagcggacgaacctcgaccgctacatgctcgcgcggcgcttgccggagctggcggaagaggggctcgtgtggcgtggccccaagaagccctgcgcagtcagccgccgcagcgcatgcacctggtgggccgttgccccgggccaaacatatccgatggcggtctga

SEQ ID NO: 517736 - DNA, 714 bp, Stenotrophomonas maltophilia
atgcaagccatcacgtcggttctgccggccgcaccgatcagctccaccagcagttcctcgccggtcgaaggggccaaggcggtggtggcgggcttggcggcgatgccggggaggtcatcgacggagatttcagcgtcgttcgctgaacctctcagcgaggaggctggcgactacctgttcacgttctggaagcagatgggctcgatgttccctggcacctgggagcgccagaacggagtggcaccggtgaacaaggccggtgttctgaccatcgcgggcaacacttggtttcaggtgctcaaagggcgaagccgcgcgctgcatgcacggggcatggcctgttgcctgagcgagggcagggagtggcctccgaatccgggccggttcttggcgatgtgcctggacattccggtcatgacagcggtggagcgggagatggcgccggggcggccgcagagcggcttcacggtgctggtgcggtcgctgctggacctgcacgtgtacgcctcggtcgaccacggatcacagcagcgccggatgctggaggaagcctacacgcgcgctgtccagcacgtggtcgacggcaagccgttgccgcagccggtgctggcgatcgagcaggagaagcacggcgtgcggccggtgcgtgaccgggagtcggcgcgcgctgcgatggagcgggcagcggcggagctgaacttcgatggtgactga

SEQ ID NO: 517737 - DNA, 477 bp, Stenotrophomonas maltophilia
atgagccgtatcgccgttgtggttgtcggactcggcctgtggtctgccgcaatgtttggcgccggctggacttggcgaggcgaccgggcggaggcgagtgaagccaatcagcgcggcacctcggccttggccgtggccgaacaggtgaatcaggcccgagccgtcgaacaccgccaggccgacagcctcgcaaccatcggagcaaagcatgaagaagaccgcgctgcggccgagaccgtccctgctgctgttgtggctgacctgcgctctggtcgtctccagttgcgcgacgacctcgccacctgcagtaccgctcgcctgtccgaagccgtcgccggcgccgtcgaacgtgatgcgcacgcccaattacgagcagaggtcgcgggagatcttgttcagatcgggcgcgatgccgacgaccaagtccgagcctgccaggcagtgattgacgccgaccgcatgcaggtcggcccgtga

SEQ ID NO: 517738 - DNA, 267 bp, Stenotrophomonas maltophilia
atgagtaagctcacgaagccgtttcgcggtgtgcgcgacggcgagatttacccgactgatttcgccgtcggggatgaatgcccgcccgaattggaagcaggtgcccgggccttgggtgcgctgtcggagggcaagtcttcggctgaatcggaatcggatgagaagccggtgctgattgccaagctcgaggccgccggcatcccgttcgacaagcgctggggggcggagaagctggccgcggctctggctgaagggaagaaggactga

SEQ ID NO: 517739 - DNA, 717 bp, Stenotrophomonas maltophilia
atggggcgcaatctttcgattcgccgcatggtcaacgatatcgaggatttgattaaacagcactctctgggtggctttgctcagcctcagttgatccctgtgccggacgagcttgacgctgaaattccccgcgtggtgttcacctctcaaggcggccacacccaagtcgtggtttcacaggttagtgttacgttcaatgccaactactcaccagactgggcggaagattctgatcggtgtcgggagtatttgctttccaaggtcgatctgctttttagcattgcctccgccggttggcgtaattcctcgcctcacttcgcaggggtgactacagttttccgtatccccgccgatagtagaagggactcggtagctctattggccccagtttttgctgacagggaacttcttacgacgcaagctaacgagctctcgtgcaggtggtctttggatgagcaggatcggttttttaacaacgtagccctgcagaccttcatcacgctgaacgagcagtctctgaattccaccgacggcattcccaggatcaatgaagataccatcggtgcatgtggggtcgagatagtaagcgactacaacgatcgcttggctttcaatgttcgtccgcagtacagtacgaacgcgacaacggtcaaggaaatgcttgctgccggctatgaagccgccaggaacgcagtagagaccttacggcaggggtaa

SEQ ID NO: 517740 - DNA, 603 bp, Stenotrophomonas maltophilia
atgccgtggacgagagaggagctgcaggtctttctgagtgagaatttgcttagggagaatctagatgcggtcgtgcaagagctgcaagaaatgcaggccggccgcggtatgatcgctgccaatcacgacgacagtcctttgcagggcgatgtatatgccggcgttccttgcgttagccggaccgaggctggcgttcaaatcgtgccccgccgtgtgcttttggtatcgaactcttgtgacgccagccccgacaatccccggcctgttccgttggatcttacggtggctcctctgcttaagctggccagctacgagcagatgctaagggatggtggagtggctcccttggctcttaacgatacgattcgggccatcaggcgtcaggagaagagcaatctcattttcatccccagaggtgcgaatgttgaggaagacatggttgcacttttggacaaggtgcagtcactttcgtttgacgactttcaacgaaacagcccggatcgacttgcagtgcttacccagcgtggtttttgggtgcttttagtcaaattgtctatgcactttctacgaccgcatgaaggtgttgcgcggcacgcagcttga

SEQ ID NO: 517741 - DNA, 1461 bp, Stenotrophomonas maltophilia
atgtatcagaaatccaatgacatgcccacccccatcgttgggggtggctccaagcagagcctggagactctggacagtctcgccgacaccggagacatcaacgagactccctttaacgtttttatcggtcacaacctcggccatcgagttttcacgatgtccgtgcccttccgtaaatttgcggacatctctggagttgcaaacgaccgcgaagcaggacccgtagcccaacgccagcttgacgaaggtcacgccaagaagctcgcggtctacatggtaaagggactggtgtcggctgcaaaaatgcgtcggattgtcatggacaagcccgtgccggtcatcttcgacgagattctgcgacgcctgggcgaacagccgtacttctcgctccaacctctagtctgcaacatccgcaacgtaccgcctggtggcactggtgctggtggaatccggggcttccgactggaaacggctgctggcgagaccgcctcgttcaagatttttctttctgagcgccacatcctgtgggttgtcgatggtcagcatcgacgccacgccgccgacttggcaatgactttcctagaagccgtgcgcaaagatggaaagtatccagggaagggcgcggtgctctttgccgacaagggaaaatccgtcagcgaggatgaaatgctggtgtggaacgaggcttacgatgcggctcggtcttacgcgactctgacggttgaagtccacctaggtttggacattgaccaagagcgtcagctcttccatgaccttaatcgcttgggaaagaaggtcgatccctctcttgcgtttcaattcgatggttctaacccggtcacccatttcatcaagcacaagctatcgggagagctcggcattgcgttgactgacaatgagccgaaagactggtctcaagactcaggcgcggtgcttctcaaggacatggttgcaatcaacgccattgccttcctcaataaaggcaatgttacaggtgcaactcccgctgtaatcgagcccagggagtccaccatcttggagttgtgggcacgaatcaatgaaatcgaagggttcggaagtcaccgagccaaggagaacactgtagcggctcagtctgtagttcttaaagctctggctaagattgcttacgacttgaacttcagcaatcgacgcccggaaggcgcggatgagctttatcggaacttcttggagcggttgccttcggttgatttctcgcacaacaacaagatgtggaacttctacaacttgtccgaggaagaaaggatcgaggccggactgagcgggcttgagacgtaccttccagaagacgccgcaggggttaatcgtgatgttggctctatgcaaggtgagtacatgcgttttggagctaagcacaacgatatttacccgattctcgccgatatgattcgctgggctaccggtcttccctcgcgcagataa

SEQ ID NO: 517742 - DNA, 225 bp, Stenotrophomonas maltophilia
atgcctttcgacgacgcgatctgggcactggaagcgcgactggagacattcgtcgtcgaagcgcgcgacgagttggccgctgccagggtttcaggcgacccgaaagccattgcccaggctcaagaaaaggaaaggctcatgtcctttgcgaagtcccgcaatatcggcatggctcgcctcgacgatctttgggagtacttcgatggcagtcagatgggtgtctaa

SEQ ID NO: 517743 - DNA, 297 bp, Stenotrophomonas maltophilia
atgctcaaagactacccggaccatatcgaacaactacagcaggctctcaactctgtaaaagacagaaggataaagtctatcccgccttttgaggccgcagtctgggctttggaagacaagcttgatgggttcatccgcgaagctcgcattgagcttgccgatgccgaagcatccaacgatccacaggccgttgcccgggctaagggaaaggagcaactgatgttcacatcctccttcaagcgccaatggctgggagatgaatcgcttcacgcgttttttgaggccgctgataaatga

SEQ ID NO: 517744 - DNA, 603 bp, Stenotrophomonas maltophilia
atgccaatagagattctgattgcgcccgcggcgccagcggcagagtcggcgggcgatttctggaagtacggcttcccgattcttacgctgattcttggctttgggatgaaggccggcttcgactatttcatggaacggcgccgagtcggcaaccagaacaggcatagatgggagcaacgatatgacgctctacgactgcgaaggttggaagccgagcgcgagaatctgctggctcttcagccgctgatggttcgcttcgtccgtgccgcaacgatcgtcatgcaccagcggcagacaatgttcgccgccgggagcaactgggggcaggcgatggcgtctgaccaggcaaaagaagagctcagggtcagcgccgctgagctagtgcctttccacgcgagaatccacacggagcaagtagttgccgcgctgaacgcggtgatcaaggtagtgatggatgccatggacgccacgtttgaagggagcgcggcgaaaagctggcaacaggtggatgttcaaaacaaaatgttccacaaggtgctaggcgattcgatcaaggcactcgaagatgagaaccagcttctcggcgccccgccggcaggctaa

SEQ ID NO: 517745 - DNA, 924 bp, Stenotrophomonas maltophilia
atgcccaggctgtcggtccatgtgatgcaagacggcgagcgagttccgatgctccacgacgagtcgggccttccgctgttctatcccacgttgtacgcgacctcgcagctgcgaaatgctgggctcgccgtgaacaccattcgcaacaagcttgccgatctcatggtgttgttgcgctgggaggctatggttcgtcgggatctggtttcggagttccgggacgggcgctttctgacaatcgccgacgtagtttcgctacgggatttcgccaagcttgatatgcggaactgggagctcgatgagccggacatgggaaggccaagcgttcgagtcttggaatttctggaagcaaggcttgcttcgagccaagctcgacccgcaattggaccgcaacagcatttcaatcgtctaaccacgtttgccgactatctggaattcacggccagcatcgttacccagcccacggcctcccctcagatagcgcaagaagttacgaggatggcttccgccatccgaatgcaccggccgcgtggtctcgcgaggcatcgtgaggaagagccggaacgtcgctcgccacctaccgatctcgtgaatcggtttatggaagtggggtctgagcatgatccaagaaatccgttcaagcatccagaaatcaggctgcgcaatgcaattatcttcggcctactgagacatgccggtatgcggcgcggagagctgttaagcctacgtctcgaccaaattgacctgggacacgagcctcttgtttggatcaggcgcaatcaagatgacaagcatgatactcgacgtcatcagcccgtcgccaagagcaaggagcgaccacttccgctgccggatgagctcgccgagcagcttggccgatacatgctgcaggtacgtgcgcccattattccttcaaggcggtga

SEQ ID NO: 517746 - DNA, 1161 bp, Stenotrophomonas maltophilia
gtggccctgagaaagggggcaggtcagaactccgttgcattggggcgtggtgcatttgtcgacgaatctgcgcgcggcggcatcgccattagtaacggggccaacgtctacgcggcagcaggcgtggcactaggtaactacacgcagatcgataagggtgcagatggggccgtcgcgttgggagcatattcagttgcggccgaatctgatgttgtttcaattggaaacgcgactctgaagcgccgcatcgtaaacgtagccaacggccgcaacgcccaggacgccaccaccgtcgcccaactcaacgccaccctcgccaccctcggcggcggcgctcacatcgacggcaacggcaacatcatcggcccgcacttcactgttcagggccagcaacagtccaccctcaacgatgcactgcagtcgcttgatggcgctgtcaccacccagggctcgcgcgtggacaaggtggaaacccagctccgctccgtcttccaggacaccaccacccgcagcgatggcctgaaccagctcaccctggccggtgcacagggcatggtcatctccaacgtggccaacggccgggtggctgccggtagccgcgatgcagtcaacggcggccagctgcacgacgtgcagcagcagctcaacggccgcatggacgggctggagcagcgcatcgacggccagccgcaggcacgcgttgccgccaacgccgccggtgcccccgaggcccccacgccgccagccgaaacgccgaccgtggccgatgccggcaaggcccccaacgccacgccggaaaccccgaaggagcccaccccgcaggtcgacaccgccgatctggaaaagatgctcgcccgcgccaacgagtacagcgatggcatctcgcgcgaggtggatcgtcgcctggacaagatggacaagcgcttcaaccgcatggcggcgatgagcagcgcgcagagtgcgatggccatgaacaccgccggcctgaacacctacaaccgcctgggggcgggcgtgggctacagcgatggcgaatcggccatggcggtgggctaccagcgcgtgctcaacgaaaagggctcagccaccttcagcctcaatggcgcgttcaccaacagtggcgaacgtaccgtgggcgtgggtgtgggcatcggctggtaa

SEQ ID NO: 517747 - DNA, 1164 bp, Stenotrophomonas maltophilia
atgaccgccttcaccaagctcaccaggtcggcgcagcgcgcgctcaagcccggccagtccatcagcgaacacgggatcacctacacccgcaccgcgaacggtgacgggcgctggtcggtcaacgtgatggtggcaaggcgacggcatcaccaggtggtggggctggaatcggagggctatacccgcacgcaggcggaggacgtggtggcctcgctgaaggcgtccaagcgcactgcagcgcatggggtgcaggggagcaagggcaacgcctcgcagacggtcgcgcaggccgctgacgactacctggactatctgcgtcggcatgacggcaaggacattgacaccaaggagcggcggttccgcgatcacatcaagccgcacctcgggcgccggccggtggccaggctgactgacgatgactggctcgcctacgtggccacccggaagggcgagggcgccagcccgggcacgatcaaccgtgagcgctctgcgctgctgcacatgctcaacacaatgcggcgccggaagatcctcgctgcagcgccgctgctggcccgtcagcgcgagccgcagggcaagctggtctacctgaccccggaagagtctcagcggctgctgctggccgctcaggaggacgtgtcgccattggcgcatcggtttgtgatggtgacgctctacaccggcctgcggcacagcgctgcgctcaacctgcgcgttggcgacgtggacgtgcagcgcaggattctgtggatcggcaaggacaaggctggccggcgcgagcagcccatgccgcaagtgctggcgcagtaccttggcaaggtcatcaaaggaatggaggctgaggcttacctattcccatcgcagcgcgcaggcagtggccgggcctatcagatgaacgccgtattcggccggtgcgtgcagcgcgcgggcatcgccaagcatgtgaccccgcacacgatgcggcacaccgccgcgaccaacgctgcgcatgctgggctcgatgccgccaccatccaggcaatgggcggctggaagacaagagccatggccgaaaggtacactcacgcggcttcgatgcaggacgctatggcggccctacagaaacagctttccggcgacgcgattacaccgaaattacaacggcgaccgcgaaaaactgcctga

SEQ ID NO: 517748 - DNA, 471 bp, Stenotrophomonas maltophilia
atgacagatacgagcaagcgcaagccggggcgaccgtccaactcagacgcacagagaactggcaatttcagtgtccgtatgccgattgaactgcggacgcgtctggaggaggccgcggcggcagcgggcaggtctcttaatgcagacatcgtttggcggcttgagaagtccttcgacaccaggctcacctatcaactccttgatcagcggtttgaagaactcgaaggcgtgattgatgagctgggcaggctggaggctcacatcaactacctgcgctacagcctcgagcaactacgtgctactgaaggcgatgctgctgacacctctacactggcaaggcaagtgatgcagatcgcagagcagatgcggatgaccagtaggcaggggaagcgcattcaggacgagatcgaagcactgaccactgacctggcggacagggcccggaggatccctgagctgccctcagaatga

SEQ ID NO: 517749 - DNA, 222 bp, Stenotrophomonas maltophilia
atgcaaacagacgcgcacgcggcgccaagccgcctcaactcagccgaagcggcactgcacctagggctgagcaaaagcacgctggacaagatgcgaatggaggggcgcggcccgcgatacctgcgggtagggaagcgctgcttctaccgccaagccgacctggacgcgtatctggaggccgcagttgtggagacggcggacagccgtgcgctgccccgctga

SEQ ID NO: 517750 - DNA, 372 bp, Stenotrophomonas maltophilia
atggacaccactgtacagcaaacgatccccgaaaccatcggggaacccctcggcacgcattcagaaaactctgacacgaccgaacactggtcggaccaagagtggagcgagaaccccctgccggtgggagtcacccgccgaatggccgaagtagaccgcgcgctgcaggccatgggggtgctgggcggcatgctgcaccgggactggcggggtatcaccgcctgcgaggagcagggcatcccctatgccggcctgtcgcaagtcgaccgtgaggggctgatgctcgcattgggagccctgcaggtcgtcgcactggacgcctgcgccatgatccgcaccaacaccttcaacatttgcggggcgcgcccatga

SEQ ID NO: 517751 - DNA, 282 bp, Stenotrophomonas maltophilia
atgagtcgctcactgcgcttcgacgtgctgcccgtggcctgtgactgctgcgggaccccattgcaacccgtgttcggctcctaccaccgctcagagcgggaatacggttgggcctccctgccctacgtcctgtgcagcggatgcgccttgcagtaccgaggcaaccacaacgaggccagggtgcagggctggattcagacccgcgccgcgcgcgctggggctgactgggcgcactgcgtcggtcaactgctggccgaggtgaaccgaaaggatcaagcgtga

SEQ ID NO: 517752 - DNA, 744 bp, Stenotrophomonas maltophilia
atgaagatcaccctcctggcgctggcggagcatgcaaccgcagacggcgcacgttgctaccccagcatcggcacgttggccgtgatgaccggccagtgcgagaagacgtgtcgggaatggttgaagaaagcggacggtcagtggttcagccgatcagcagtgaagctcaaggggcgggagtggcgggggtacaactacgccctccagatacccgaaggtgcggtaacagataccggaccacgtaggcaagttgcggtatctgataccgcacctgatgacacgaggtgcggtaactcaggaaatgaggtgcggtatctgacgccacgaggtgcggtaggagataccgatgaactaggaagagcaactaggaaaagcaacaagggagagaagcacgctgctgacgcagctcctcgcgcggggcgcaagctcacgcttaggcaatggctggacaccttccctgctgacgctgaaaccgtgctggacgggcatccggtgcttgactacctggatgacattggactgccagaagacttcggtgtattggcctgggagcagttcatccgcaggtacaccaacggtgctgacgcactgaaaaccagtgccgactggcctggcctgttctaccgttcggtacaggagaattgggcaggcctctggcggatcaacagcgatggcgggtacgtgctgacgaccagcggccagcaggctatgcgagccatggacgcagaggatcgccgccgatga

SEQ ID NO: 517753 - DNA, 219 bp, Stenotrophomonas maltophilia
atggttcctcctttggggtcgtccggccaactgtggatgcgcgaagaaaggggggcgcacgtgtcgcagcgagaggggcggaaacttttccctcccccggccgtcgtggtgaatctggtgcatggggtgcagcgggcgcaggtggtgcacgacgtgcacgtggtgcaggaggtggcgctccgccaccccctgaaagccttgccagaagccttcccgtaa

SEQ ID NO: 517754 - DNA, 639 bp, Stenotrophomonas maltophilia
atgtccgccgctgatccgcgcgtacgcgcggtcctgaaactggcaccggtgattccggtgtacacccccgaagacgtgaatgacgcggtcgaagtggcccaggccctgttccgcggcggcctgccggtgatcgaagtgaccctgcgcacgccgcaggcgctggacgcgatcacggccatggtcgaggtcgtaccggacgcggtgatcggtgccggcaccgtgcttaccccggcgcagatgcaggcggcgaagcaggccggagcgcgtttcgcggtgtcccccggcgccacgccggcactgtacgcggccgcgcgcgatgccgacctgccgtacctgcccggtgccgccaccgcctcggacctcatcctgggcctggagcacggccacgacaccttcaagttcttcccggcggtgcaggccggtggcgccgcactgctggcggcctggcacggcccgttcgccgatgtacgcttctgcccgaccggtggcatcagcgcgcagaccgcgccgcagttcctgcacctgcccaacgtgctgtgcgtgggcggctcgtggctgaccacgccggcactgctgcagacccgtgactgggacgccatcgagcgcctcgcccgcgaggcgtcggtgctggccagctga

SEQ ID NO: 517755 - DNA, 660 bp, Stenotrophomonas maltophilia
atgcaacccaaaaccaatgttgtgccgttcaagactgccaaccgccccaaccgcctcgcagcggctaaacccacccggctcacctccgtttgctacaaggcaagcgacaaggcccacacgagcgtcgattggtataccccgcatgccatcgtcagggcgctggggggaaggcgcggctttgacctcgatccttgcacgcccgaagacccgtcgcggctgccggcgcccacggcccgccgaatgatcccgccgagccaggacggcttggcaacgccgtggcccatgcaggcattcgtgtggatgaacccgccttacggaaaagggatggagaagtggctgagcaagctggccaaccaccccggcggcggtatggctctcgtgccggtcaacatggagacgggatggatgcacgactgcgtgctttcccaccccaacgcgacggcgattctgttcacccgcgggcggctgaagtttgtgcgtcccgacgggaccaccggcacggcagcgccgtcgggatcggtggtggtcgcttacggcaggcgcgcagccggtcaccttcagcaagcgcaagcaagtggtgtgctgcgcgggaagttctttgccatcgagcgggtagtgcaggtggccagtgcgaaccaggggagtgcgaacgaagaatga

SEQ ID NO: 517756 - DNA, 1287 bp, Stenotrophomonas maltophilia
atgagccaggacgacactcccgacctcgccacgccgcaagcgggcaaggtcgcgcccgaggcggtggcactgcgcgcccagccgcgtgctgtgacccggttgaaccggcgcacgctggccgtcctcgtcggcggcctgtcggtcgccgtgctcggggccacgatctggtcgctgcaaccgcagcggcgtggtgccaacgagcagaccgagctttacaacgtcgatcgcgtctcgaagtctgaagggctggatggcctgccggccgactactcgaagctgccgccgaaggcgcccgagttggggccgccgctgccgggcgacctcggcccggccatcgtgaactcgcagcagccagccgtggccgcttacgcggcccccggccacgatccgaacgatgccttgcgcaaggaggccgaagccgcagcggcttcgtcggtgttcttccgctcgggcggtcagggccaggccgtcgccaccgccaccgccacgatggcgcagacggcgccgggtgtgcctagtgctgccaatgcgctcgcggccttcgacccgctcgctgccgggccggcctcggtggcggcccaggttgccgccccagccgctgcgcggagtcggcaagaccagaacgaagcattcctgcaaagcggttctacggaaacccgcaattccggcaatctggcgctgcccgcgtcgccttatcaggtcatggccggaacggtgatcgcgggcgcgctggtgacgggcatcaagtccgatcttccgggcgacgtgatcgccacggtgacggagccagtctatgactcggccacaggcaagttcctgctgattccgcagggatcgcggatcctcgggcgctacaacagccgagtcagccacgggcagagccgcgtgcaggtggtttggaatcgggtcatcctgcccgacacgtcctcgctgacgctcgacaacctcatcggcaccgacccggccggttactccggcctggaggatgacgtggactggcactgggatcgcatcgttgcaggcgcggtgctgacgacactgctaggggtcggtgccgagctggcctcgccggagaatcgccaggacggcaaccgcatcatcatcgccgggcgcgatggtgcccaggacagcatcaaccaagtcggccaggagattacccggcgcaacatggacatccagccgacgctgaccatcaggccgggcctgccggttcgcgtcatcgtgaaccgggatctggtgctgcggccgtaccagccgctgttcttcaaccggggggcttcgcaatga

SEQ ID NO: 517757 - DNA, 366 bp, Stenotrophomonas maltophilia
atgctggccttgcagcgccaggcgcaggcggccagcgccgccgcgccggtcgatagcggcctgtcgctggagaacctgcgcttccgctacgcgatcagcggcagcaatccgccgtggaagccgctgcgcgccttcgacgacgggcagaaggtctatatccagtttcccgcaggcatcgcgcagggcgatcttccgccgctgttcgtgatcggggccgaaggcgacggccaactggtgaactaccgcttccgctcgccgtactacatcgtggatcgcctgtttggcgcggccgagctgcgcctgggcggcgacaagagcgacgtggtgcggatcgagcgcacggacggcgtggcacggaggaactga

SEQ ID NO: 517758 - DNA, 2787 bp, Stenotrophomonas maltophilia
atggcaggaccaggcacgctgcagtgggggctgctccgccccctgctgtgcctggcgctgctggtcgccgcgccgcctgccgccatcgcaggcgattccgctgcggcccatgactaccgtatcgacgccggcccgttgccttcagcattgcagcaatgggcacggcaaagcggcatcgccctggtgttcgatgcccgggaactggcggggctccgtgccaacggcacccacggcctggccgatccagcatcggccctgaaacggctggtcgccggcatgccggtgaccatccttcgaacaccgtccggaggcttcgtggtccgccgcatccgcgtcgcgcccgcggccgccccgccggttccggcagcagtcgcgccgcgcccacgcacgcccccgccatcgccgcgccaggtggacctggcgccgatccatgtcaccggcagccggttgccgcgcacctccgtgcagaccaccctgccggtgactacgatcgatcgcgcagatatcctgcgcagcggctacggcagcctgttcgacctgctgcgacacctgcccggcatgaacggactgcccgcgatgagcagcgcacgcagtggcgattcgcagtacctgcctgtcggtgctgccgccaccaccagcctggatggcatgggaccacgcgccacgctgttcctggtcaatggccggcgcctgccccgctacccgatggtgtcgctggagcagggcgggctcaccgatctgggcggcattccactcagctttgtcgaacgcatcgaactggttcgcggcggtgcttcagccatctacggcgccgatgccatgtccggcgtggtcaacatcatcctgcgcgaccaggccgacggcccggaggcgacgctgcagaccggcctgagcagccgtggcgacgctggccagtaccgcgtgcaggccgccaccggaggcctgcgcgggaacggggaccgctggttcgcaggcatcgacctgcatcgcgtcgatcacctggcgggggaccagcgtgactggcacgcagagacgtcgcagtacctgatcggcgccttccgcgatggcgactactggcccgctacgcgctgcgacgggccattgaaacgacgcaatggcgcctgctggttcgacagttcgcgccctcgttcacttcaaccggcctccgataccgcctcggcctatctgcgctaccggcatgagcgtggccaggggcgctacgtctatgccgaagcccgcgccagccacaaccggcagcgcttcgatctgggcccgaccgccgtcgccctcggcctgtacggctacaccttcaacagcgtcctgcgggaagccggcaatgtgcgtccccaggtacgtgccaccgacgccgatctcaccctgggcatcggccgggaccagggcagccacagttgggacgccggcatcagcgcgcagcgcagcgacgtcaccctgtccacgccgggcaccgtgcgcgccgaacccttcatcgaggctgcgcagtcactcaggttcctgccaggcttcaatgcattgcccgcggatgaagcaacatcgctgttcccgtcgatccgcaaccgtggacttaccgagcagtggcagggctggtggggcgtacagcggatgctggtgccgatgcagggcggcaatgcgcagctggctaccggcatcgacctgcgccatgaacgctggacgtcccacccggacaccctgctgagccagggcgatctggcactggggctgccgcagcagcagcggcgcctgtcgcggcagagtggcggcgcgtatgcggaactgggcctgccgctcacatcggagctgcgcatggacgtggccgcgcgctgggactacgacggcgactacacggcattctcgccccgtgccggcctgcgctggacacccacaccgcactggtcgttcctgctggccagcggccgcggctatcgcgcgcccagcctgttcgaacagcgccggccgccaggacagttcggcaccctcaccctgcccgcctcaagcgcactgccgccctgtgcacagagcgagcccgacggccgctgcgtggtcactgtggacgtggaagagaacaccacgctcaaggccgagagctcacgcagccattcgctggcggcgacctggtcacccagcgatgcgttctcgctgtcgctgacccacaacatcgtcgagctgcgcaatgagatccttgcgctgcagccggccgatgccgtgtggaaccgtgacacctggcagctggatgagaatggcaacctgagcagcctgcggctgtcgttcgacaatatcggccgtaccacctcacgcaactgggtactgcgtggcgaataccggatcgacaccggcagcaacggccagtggatgttctcgctggacgcgctgaagcagcaggagctgcgccgtcgtcgcgaccacgaaccggcgatcgacctgcgcgggcatgtcacccccgagatggcggcggtcctgaacgtgcaatggcagaacagcaactgggacatcgccctgcgcggcaaccaggtgggccgcacccgtgcatggctgcccggcgccgagtgcccgcagcggcagatcgaacagaaccactgcatgaatccgcgccagctgcgctggaacctgcacctggcgcgccgcctgggcccgcgtgtcatcgcggcgctggacgtgcacaacgtgcttgatgcgcagccggtgaactacctggacggcaatggcgggcagatgccgggactggacgatccactgggccgttactacctgcttaccctgcagttccgctga

SEQ ID NO: 517759 - DNA, 1281 bp, Stenotrophomonas maltophilia
atgacccaaaggaagctgttttcggtacgcgggccgaacaacgtaacctattcatcacaattccagaccgagaagaatttcgcacagcgctgggcagataagctcgaaagctggcgcaatgcggacctcatcgtccattgcctgtgtcggcctctgcaaccggtgcagctggtgctgcgcaagtatgagagcggcaagatcgtactggcccgtcatccggataccggcccgaagcacgacggtgcctgccagtattttggtccttccgtcaaaggcgccatcgcgcgtgcctatgagagcggcgtcgtcatcgaaaacgacggcgtgtataaggtccgactggccgccggccgaaggatggccgatccgctaccagcggatgagaccgtcgagccacgacctaagcacggccccggcgtaccccgacaacgggcgatgacgaccttgggcctgctgaaactgctctgggagattgccgctctgcacgagtaccggccggtctggaaagaggcgcgggccaagcccggcgccgtgtcctggcggctgcacgtcgcggcgagccaagtccaatggggatcggccaagctgagcaacagccttcaggtcggtccggttcccgccgacgatcgtcttgccaaacgcaatcttgccgtcgccaaggccgccaccgatcggcgcacccgcgtggtggtcatcagtcgtctgcagtcctacgactgcgcgcaaacgccggccatcgacctggccccagacctcctagttccgctggcgggatcggcctgcatccgcccgtacttgagtaaagagcacgcccaagggctgcagcgctcattcgcgcgtgaactagccgcatggcgggcaggtgaacccacgtatgctgttctgatcgtccagccaaagagcgagggtaagtacttcgagctggtccgcatcgcactcatgcgcgtcagcccccaggcgatcccgctggattcgggctacgaggccaccgtcgaagacgccctcgtcaagcaacgccgggcgttcgacaagccgatgcgccatatcgacggcgacgacaccctgcccgacttccgccttctggatatgggccactggccgatgccgatggaggtcttcgggctcaccgatccggcgtaccaggcgcgcataagggagaaggaaaccatctacgcacaaggacccaacccaccgggctggtggcgctgggatgcgttcgcaaatgttccgatgccggatcttcccgagcgccccatcccaaacgggctaaccgagtcctaa

SEQ ID NO: 517760 - DNA, 981 bp, Stenotrophomonas maltophilia
gtggacgcggcagccctgtctgaggtcgataaccgcgcggtgaagtacgacaagaacccggacggcagcacgaactacgagagcgtggcgctgaacccgggcggcaatgcgacgcgcctaggcaacgtcgccgccggcaatgtggctgccggcagcaccgaggcggtcaacggctcgcagctgtaccagaccaaccagaacgtcacccgactcggtgacagcctgaccaccattccgggcgacacctcgcaggcgaacaccgatgccaacggcatgggcatccgctacgtgcgcaccaacgaggccggcctgacccaggccgatgcctctgcgccgggccaggggagcgcggcggtgggctacaacgcgacggccaccgcagagagcgcgttggcgctcggccgcgaggcccgcgcaacgcatgctgggagcgtggccttgggcgccaacgtcgtggccgatggcagcaccctgggaacggccgcctacaatccgggtactggtgcgctcgctggcctgatgccggtgggcgaggtcggaatcggatctgccggcaacgaacgccgtatcacccatttggccgccggtgccgaggatgccgacgcggtcaacgtgagccagctcaagtcggtagcgcagacattgtccgaggtggacagcgcggcggtgaagtacgacaagaactcggacggcagcacgaactacgagcgcgtgacgctgaaccccggcggcaatgcgacccgcctgggcaacgtggctgcgggcgatgtctctgccggcagcaccgaggccatcaacggctcgcagctgtaccagaccaaccagaacgtcacccagctgggggacagcctgaccaccatcggcgacacctcgcaggccaatacggatgccaacggcatgttcgaccgggatcctgcaggcgggggccagcggcatcggttcctccgccgatcggagttcgcagcctggccgtcgcactga

SEQ ID NO: 517761 - DNA, 273 bp, Stenotrophomonas maltophilia
atgaggaagactggcaacctgctcctcgcctccgtcctgatagcgtgcggtcagcccgggggcacttcggtcaacagggctgaagcgcagagcatttccaccgtggacgaactggttgcggaccctgtccgattgaagaaggtggacgacacctgcagatcgaagagtcctcgcgtggccgacgttctctgccttcgagtcggcgccgcgagcacccagatcctcctgcgagaaggcaagatgccgccaccgaaaggtccgccgacgctctga

SEQ ID NO: 517762 - DNA, 666 bp, Stenotrophomonas maltophilia
atgtcgacgaagaccaaaaacccgttcgcacgccccaacatggccgagcgcgcggcagagcaaatggccaagcacttcccgaattacatccgtgagccactgtgggaccgcaataagaaccgcggcttctcgaccattccgcgcacgctgcccatcgccatgcaggcgatcgacgcgcagtcgaagggcaattccgccgggcacaccctgttctgcctctgggcgcgcgcaccggatcaccctctcatcgtcattgagtcgccggccatgtttgccgcggaagccggcttcaccggtgagcgcgccagcgacacctggcgccggcgcatgaagctcttgcgcgacctgggtttcatccggaacaagaggggaaccagcggtgagttccactatgtgctgctgctcaaccccaacgtggtccttgcccagctggacgagcagaacaagcttcaggggaatctggcagatcgcttcgaagaccggctgaccgagattggcgctaagcgcgacattcatgagtacaagcagcttctggcggaactggacgagcaagagggcaagtcgcctgacacgccggtcgctcaggacaagcagggaaagcgcgccaagggcaagaccccaaccaagggcaagtcagcggagaaggacgatgtccaacccgaatga

SEQ ID NO: 517763 - DNA, 225 bp, Stenotrophomonas maltophilia
atgtccaacccgaatgaacctccgccgccacgcaaaagccagggacgctcgtcgcgttccagcgacgcgccctactgtgccttcaaggacgaccgggcacgcctgcacgccttgatctcgcgcgacattcgcttcgtcctgatcgcggcggtattcgccatatccagctatctcggcgcaacccgactacccgtaggcgcctggttggcggagctattggcctga

SEQ ID NO: 517764 - DNA, 627 bp, Stenotrophomonas maltophilia
atgcccgtgctgttcgggcacctgtgcgtcacgccgatcctagtcgagctggtgcggcagcacgcctcattgtcgctggacctgcagttcagcgatcgccccgtggatctgcgtgaggagaacgtggatctcgccatccgcgtcgggacactgcccgacagtcgcgatctgatcgcgcgtcctctgggcgagcatcgcatggccttgtgcgcctcaccggcgtatctggggcgacaacgtctgccggaaagcctcgaggcattaatggcgttggatgctgtcgcctacagccggcatgggaaggcgatggagtggaggcttgtggtcgacggccaggagcatttgctcaagcccagggcgcgcgtactactggacgacatgcagggcgtgctggtcgccgctgccgcggggatgggcgtggcgtggttgccctactggctggtgcgcgatgcgctgatggaaggacggctgcaggaagtgtttccggccgcgtcgagcccggtttatccgattcatgcagtctggccgaaaatgccgcacatgccgttgaagacacgcgtggccgtggatgccttgctgcaagagcagcctggacgtttgcaggaagtggaagggcggaggacttag

SEQ ID NO: 517765 - DNA, 771 bp, Stenotrophomonas maltophilia
atggacttttccactaagccgacgagtttaatttttggtgatacggaagcgcttcccttgggtggagagcttcgtgcatcacttgagttcctggagcgcaacttcaagttcctgctttctcaacttgcactggttgctcatcaggatgatgagcgattctgcacattcgccccatttcttgtgaggtcgatgctcgaagtgtcactcaccgggctagtgggccgcattgatccttttcgagtgttgtcaattcaacggattcagaccggcccgaactacgataggaccaagccatggcgagcggcgatgcgctggcagggtgacgtgatggcagaagatccacccaatgcccaagcatggacagaaaaaatggatccacaaggcatggtgagggcgctgctcggaatgtactacgatgaacttctctggaggccggcattgaagcgcctttatgactttgatcattcgccgtacgttgggaactggatatctgaacttaagggaaggcccatcaactccttctgtggtggaaaacggggtggactgggggctgtctattcagagctatctaaggctgttcactatgaatcagtgcttgatttggttgctccggatcggctgacaattagcgagctggttgaaagggcaatacgggatattgctgagctcggatttgttacttgtttcatggagcaccctgtgggtcgactcgattatgggagtgcctgtgaaaaaataacctggttcgagcaagtggaggtaattgtatga

SEQ ID NO: 517766 - DNA, 1506 bp, Stenotrophomonas maltophilia
atgaacatcgtagctggccatctttacgatgcgggactggtgcttgctgccgaggattgtgagcctcaggtatttgacgaaatccacaaatttccgtcaaagaacgatcagcgcgtaattcgaactttgttggctcatggccctgtcctgctgaggggcgggcgaggctctggcaaaagcgcttttatgattgccgcgtctaagcagcttgcggcaaataatgagaatgctcccgcagttggcatttatatgagcctccggcacgcccctctgctgaagagcagtggtgagacgtacgggcgtattctttgcgagatcataataagatctgtccgtgacgcattgggagatcgtgctgatgatttctctccagaaccggacgctggctcgcttcaatatgaactttcgaagctcgccagtcggatagggcgacgattagttctattcttcgacgatgcggcacaccttggtcgtgaggcgtccctggaagatttctttgatatttatcgaacgctctccggcagtgcggtctcttgcaaggccgcgatctatccgggagttacaaagttcgggattaggtttgatgtctacaacgactctactattgtggatttgttgcgtagtgaagagttgccagacttcaatgagacgtttttagaggtcatggatgcgaggtatcctgactacttcgacaataaatttagttctggtcttgaacgtggcgcggtggcagggttcctggctcagtcggttctgggtaacatgcgggggttcgtttttgcctgcaataagttgaaggagcgaagcgcggccggcgagaaaattggtttgcccgagctatcggagacgctgattgacttggctgccaactactattggcctctgctgcaggaaattaagccaaagcttggcatgtacgagcccatggtaggtgtcgcgacggacgtggctcagttgatctttgaagaagccggtggtaagtcaaataacccccgggacgttattgttcatagggatgtggatgaaaggctggcaaagcccctgcagattcttgagtacgcagggtttatgaccaagcgagaggcatccagggcaatgaaatctggtggaaggggcgcgcgttacgctctcaacctctgttcattgctggagcagtcatctgggtcgcgcctaacacgtgacttgtttgatcgatggtttcaaaaggcgcgagaggaagctgtgcagtttggaagatcaagcacactcagtgcgctgagggtgccagaaacacctgcaacagaggatctagctatcatgctgcagccgttggatgttcttgttaaatccaagctctatccatatggcctaagtactggtcgaatagatgcgttaaaggctgctgggttctctactgtgggagatctcgcctccgcaacagatgagcagctggattcggttcactatgtcggcgatgttgtcatcagtcgaattagaaacgttctcgggcaggcaatctggatgtaa

SEQ ID NO: 517767 - DNA, 1416 bp, Stenotrophomonas maltophilia
atgaaggacatatttccaggatattacagtccttgtgcgatcaagcatcaggaactttggcggactggactggtagtccttgatacaaatgttcttctggatctctatcgtgtcccgtcgtcgacgcgtgagcagatgcttctgcttctcgagcatttgaggcgccgtctatggattccgcatcacgttgcgctagagtatcagcgcaataggattcaggttatgcatgcttcccgcagaaaatctcagagcgccttgcagagaatcgatgatggcttcggtacgcttctcaagcaaatatccgacctccagttagaaaagaggggtgttggggagctggttgatcgctcggtgtctaatctgaagtctgcattcaatgacttgcaaagctcggcggaggttgtgcttgctgagcatctgaatccggagggtgacgacccgatcaggcgtcggttggatgtaatacttgaaggtcgaataggtgctgagccaagcgggcagttgagcctgaatgaggtattcaaaaaaggggccaccagattttctgctcggatgggcccgggatacatggatgagtcaaagggaaaggagcaacctactttcatggccggcggcttgctctatgagaggaagttcggggattaccttctgtggagtcagttacttgatttttcctcaaaggaaggtgtggcgagtgtgatatttgtaacttcagatataaagccggactggtgggagattttggatggaaatcgccttggtccgctgcctgagctgagttctgagatcgctagggcaggtgtgaagaactttgccatgtacactctggctgagtttctggacggcgcgagtgagtatctaggctttgcgcttgaggccgctgtcagacgagacgtcgaagaaattgatcggcagtcaaagctggatcttgtggagagggatgtctcaattggacgccccactcctgaattcaatgttgctggtgggcctttgcgcttaatcgcagtcgcacttgacgggagctccgggcaggccagtacggattttggatctgcatcatttgtcgacgtggaaggcaatgcgggaacttggtatcgcctcttggttgtccctgttgccgcaatttttgcccctcataagagtgggcttcgtgttttcgttgagaaatgccaagagacgcttgacggaaaatgtactgtgggggtggttgtatacgctgggcggaagaactttgagagtgaagatgagctctcagatttttccctagagatcgcaagctgtgcacagcttagctttgaccgagagtttcctttgtacgtggcagctcgggttgctggtgcattggtgttgtgcgaggcgccgtggcgcagaagctgggaggccgtgccaggggttaagcagtacctcggaatgtga

SEQ ID NO: 517768 - DNA, 378 bp, Stenotrophomonas maltophilia; identical to SEQ ID NO: 513476

SEQ ID NO: 517769 - DNA, 1506 bp, Stenotrophomonas maltophilia
gtgagcgaatcgcgcatcctggtgctggacaacgacgccgtgcgcgcagagcgcaccgttgccctgctggaattcatggacttcaacccgcgctgggtctccgacgcggccgacttcgatctgggccggcagcgccagaacgactggatggcggtgatcgtcggcagcctggacgacagcgccgccagcaccgcactctacaactggctgggcggcagcagcctgccaccgccggtgctgctggccgatggtgatgcctctgcgttcgcgcagcagcacggcctgcacgaagccaatatctggccgcttgaaacgccgctgcgccacgcgcagatggaagcccttctgcgccgcgccagcctcaagcgcctggatgccgagcatcaggccggtgccgtgcaggatcaggggccgaccggcaacggtccggcggtgaccgcactgcgcaccatgatcgaacaggtggccgcgttcgataccaccgtgctggtgctgggtgaatcgggtaccggcaaggaagtggtgtcgcgcgcgatccaccagcgctcgccgcgccgcgatggcccgttcgtggcgatcaactgcggcgccattccggcggacctgctggaaagcgaactgttcggccacgagaagggcgccttcaccggtgcgctgaccgcgcgcaagggtcgtttcgaaatggccgagggcggcaccctgctgctggatgaaatcggcgacatgagcctgccgatgcaggtgaagctgctgcgcgtgctgcaggagcgcagtttcgagcgcgtgggcggcaaccagaccatccgctgcaacgtgcgcgtggtggcggcgacccatcgcgacctggaaacccgtattgccgagggcaagttccgcgaggatctgttctaccgcctgaacgtgttcccgattgaagtgcccgcgctgcgcgaacgtcgcgaggacctgccggcactggtggaaaccatcgccgcacagctggcccgcaccggccgtggcgaggtgcgcttcaccccggaagccttgcaggcactggccggctacgaatggccgggcaacgtgcgcgagctgaccaacctggtcgaacgactggccgtgctgcatccgggtggttcggtgcgcgtgcaggacctgccggcccgctatcgtggcgatgcggcactggccgccgtcgctacgccggcaccggcaccgcccgccgccagcgaagagcggctggacctgcgcagcttctcgttccacacacccggcagtggcaaccagccggcgctggagcacggcattgccgtcaatcgcccggcggctccggccgcactgcccgacgaaggcatggacctgcgcaaccacatggccagcatcgaactgggcctgatccacgaagcactggaacgcacccagggcgtggtcgcccacgccgcccagctgctcggcctgcgccgcaccaccctggtggaaaagctgcgcaagtacggcatcgagcgcgagcaggccgagctggccggctga

SEQ ID NO: 517770 - DNA, 963 bp, Stenotrophomonas maltophilia
atgaacctacgtgatctgaagtacctggtagccctggccgaccacaagcatttcggccgggctgccgcctcctgcttcgtcagccagccgacgctgtccacgcagatccgcaagctggaagaagaactgggcctgccactggtggaacgcgcaccgcgcaaggtgatgctgaccccggccgggcaggaagcggcggcacgggcacgggtgatcgtgtccgaagtggaacaactcaaggaagcggcgcgacgcagccgcgatccggaagccggtacggtgcgcctggggatcttcccgaccctgggcccctacctgttgccgcatgtgatcccgcgcatccgcgatcgcttcccggagctggaactgctgctggtcgaggaaaagagcgatgtgctgctcgaccgcctgcgcgaaggcaaactcgatgctgcgctgctggcgctgccggtgatcgacgaccagctgcacgccgagttcctgttcgaggaaccgttcctgctggccgtgtccgggcgccacccgctggcccgccgcgagcacctggacgtgcaggaactggccacacagaagctgctgctgctggaggacgggcactgcctgcgcgaccaggcgctggaagtctgccgcctgttcggcgccaacgagaagtccgagttccgcgccaccagcctggagacgctgcggcagatggttgccgccgacgtcggtatcaccctgctgcccagcctgtcggtgcagccgccagtgccgcgctcgaacaacatccgcctgctcgacttcaccggcgagggccgtcccagccgccgcatcgccatgatctggcgccgcagctcggccatgaacgacttcctgatggagctggccgaccagttcaagcgcctgccgcaggcgctgttcaccctggaagcggtcaacgccgccggcgacactgccgccctgcccggccccgcgctgaacggctga

SEQ ID NO: 517771 - DNA, 768 bp, Stenotrophomonas maltophilia
atgaatgccaacgatatctatctcaatgactttgccacccgctccttccgtgacatcgccgaccaggactacatcatggcgcgggccgcataccggacgacgctgtatccgcagttcctgtggtcggggctgcaggcgatcgaaaagtacctcaaggccatcttgctctacaaccgcatcccgcagccgaagggcaaggagtcgctgagacacgatctggcccgggcgctggagttgaccaaacaagcccggttcgagatgtccttgtccgcgacgtcaatgcagatcatcgagcacttagatacttatggccgcttccgctatctggaaagctcataccatctggacggccaggaactgctcatgctcgaccgagcggtatgggaggtccggctttactgccgtgtcctcgaccatacgatcacgaccggcgcgggcgaggtcatcgacatgctacccaagtacctgagaacgatcgaacttgaactgcacaagccagcgcgccggtttctcattccgggcggcgtcctagagaagatattggcgaagcgggaccaccccgctcgcccgtccctggtctggaagaatctgctcttcaaccagcaccatcgtaaatccctgcaatggcgccaccgtcgacatgtggtcaactcgccactggccctacggccagagctgctcgatgaggtgaataagtacgtgtggcttccgggcgaggccatcaaggcgtaccgtgaggagatcgaagcgcgtaggtcagaccgataa

SEQ ID NO: 517772 - DNA, 483 bp, Stenotrophomonas maltophilia
atgtgcgtcaagctggtgcgggagctctttgccctgcagacgccgtatctcgcgatccactgcataggcgacaccctctgtaacaaagctataggcaatctccatctcgtccgtgactaccgtcccgtcagatcgtattccgcgagcgacaacggcgagccgttcaacctcgatgatggccgagtcagcaggctgaatacgccgcggcgggtcgaattccagtcgtccaatgattgtgccaaaggcaattttcttctggccgcgaagctcctgcatgcaacgaaggatgccgatcaaccggccgcgattgggctcgtccaatgcttcaaggccgaggaaatggccactttgattcgtgccggaagcagcataacggaggaggatgagatgggacagcagatagagctggcccgctgtcgttccgatgctgtgcaggtagtgcacatattcatgcgcatgcgtggagatcgcacgaggtcctga

SEQ ID NO: 517773 - DNA, 294 bp, Stenotrophomonas maltophilia; identical to SEQ ID NO: 508637

SEQ ID NO: 517774 - DNA, 705 bp, Stenotrophomonas maltophilia
atgcgattcaagaaaccgcaggtgcgctacgccgacacgccgcagcctgccacgccgtaccaagctgccggccaggtgtgggacgaccgtatcggctcgccgcgcgtgcaggcgaagaactggcgcctcatggccttcggctgcctgacgctcgcgttgctgatggctggcggcctggtgtggcgctcggcgcagtccatcgtcacgccctacgtcgtggaggtggacaacgcgggccaggtgcgcgcagtgggtgaagccgccacgccgtaccggccgggcgatgcgcagacggcgcaccacatcgcgcgcttcgtgacgctggtgcgctcgctgtccatcgaccccatcgtcgtccgccagaactggctggacgcctacgactacacgaccgacaagggcgcggccgtgctcaacgactacgcgcgggtcaacgacccgttcgcgcgcatcggcaaggagtcggtgacggtacagatcaccagcgtcgtgcgcgccagcgacacgtctttcaacgtgcgctggacggaacgccgctacgtcaacggcgccgcggcgggcttagagcggtggacggccgtggtgtccatcgtgctccagccgccgcgcaccgaagaacgcctgcgcaagaaccccctgggcatctacgtcaacggcctgtcgtggagccgcgaactggattcttccgaaggagccaagccatga

SEQ ID NO: 517775 - DNA, 153 bp, Stenotrophomonas maltophilia
atgggcttcaccagcacgttgacgcgcaagtcggcaccgctgccgctggatgtgtcgcccacgatccagcgcaccgtatcgccggcggccaccgtcaccagttcctcgcccggctggagcgaaaccacggtcacgcggcccacggccgcatag

SEQ ID NO: 517776 - DNA, 189 bp, Stenotrophomonas maltophilia
atgagcaggccaaccgtaatcagctgccgtgttttccgcgggaagaaccccaagacaggcgaaccggtcggctcgcgccaccgctgggacggcggtgcctggggaaagggagcgtgcgagttctgcgggcgcacgttgagcgaagtcaggcagcagcggccgcgggccgcaaagccgggcgcccaatga

SEQ ID NO: 517777 - DNA, 240 bp, Stenotrophomonas maltophilia
atggctcgtcgacacctcagcaatcctcgcgaaggggagggccaaggccacgggcgtgagatccgtgagctgcgcgcgctgcgcaacaaggtcagggacctgcagcgccaggtcgatgacctcagcgcttggcgcgtccagcagcacgaagattccatgcgtaccgagacacaggtgccgccggcggcagccggcttctgggcgcgcgtcgcggcgctgtttccccggggggcgcaatga

SEQ ID NO: 517778 - DNA, 681 bp, Stenotrophomonas maltophilia
atggggtgttgggcgttggagattgattggccagtaattacggcagggttcggtgcagttgcccaaggagcaggaacgctcgtgctggcttgggccgggtgggccggcctgtcgacttggcggaaccaactgaaaggaacacgtaggcaatctttggccgaagagacgctgagtttggtgtaccgagttcgagatgcggtcgaacacattcggcagccttgggctttcactggagaaatgaacaaggtcgagcgcgtagcggatgaacctgactgggcctttgagggtcggaagcaatatggcgttgtcgagatccgatatcaggcgcacgcggactcggttgctcagctcgaagcaattcgctacagggtcagcgcagtcttcggaaatgagcctgcggaagcggtcgaaggggttctagctgtactacgtcgagtgcgcaacgaggcaatcaatgctgttgggcacaagcggattctccagcaacaatccttcgtcggtaatccataccccccggggcagagtcccccagcctatgagaacgcgcttgcattcttgaggggagcagagtcttggatctgggctggtgaagagggcagtgatcctgctgcaaaggcgcttgcaacagccgtcgcgcgtgctgaggccgaactgaaggacttcgccagtatgaagctctag

SEQ ID NO: 517779 - DNA, 744 bp, Stenotrophomonas maltophilia
atggccagtcccgtcgaacagtcgaagcccctgacccctccctacgggtccttcaagacgcttgtgaacttcgcgaatgatgtgagggagggggggcatgtcccgcttcagatcgaccgttctgttatgccgaaattgtctggttcggcccagttcgagaccatcgccgcgctgcgctttctcggtctggtagccggagacaagaccgttaagccgactacgctgttcgaagctttcgtcatggcggcagatgaggatcggcctcagatcatgcgtgacttacttctgaagtcgtatgacttcctgctaggcgtcccggggctcgacatcgagcgcgcgagtggccagcaggtcaatgacatcttcagggagcaaggattgggagggagcacgatcgggcgcgcgatcagtttctttctggccgctgcgaaggaggctggtatcaaggtctctcacaatgtgaagccggtgaaaacagcgtcgagcagtggcaaatcaaagcgggaaaaaaaggctgaggtgcccagtcctggtgattcggagaaatcggcgccgagcgacatcactgagcacccgccagccgggacgcatcgatttgagattccgattccaggcaaacctagcgtaacggtctgggtgccggaaacgttggatgccgatgactgggagatgctgaccagcatgtttgggctctacgtcgcccgttggaagcgctacccgatggcaaaacctgagggcacctga

SEQ ID NO: 517780 - DNA, 2775 bp, Stenotrophomonas maltophilia
gtgcacgccattgctgccgagggtctgcccgaactcctgctccagcaagtgattcacgctgtgcaggatgaagtccaccacttccaccggggtgtagacgatacccaggcgctcggtcatcttcgggaaggcgttgcggaaaaacttgtcgtacagctcgaccacgatcttctgcttgccggcggcgctgttgatgccttcggcgcgcagcttcacgctgtcgtagaacgcctgcagggtgtcggcttccttctccaggtgcagttcgtcgagtacgtcgagcacggcctgcatcgccttggacatcgggttgtggctggcgaagctgtagtcggcgaacagcgcgtcgaacaccggcttggtgatcaggtgctgggccagcatctcgatgatctcggcgtccgagaccttgtcgttgaggtcgtcgcgcagttcgttggcgaaggcgctgaaggcttcgcgggccttggcctgactggggtcttccagcagcgccttgatacggtcgatgtgggtctgcgcgattttggcgatgtcgttggcccagtcctcccaatggtggcggttgccgcacttctcgaccactttggcgtagagcgcgcgctcgacttcgccgatctcgaactcgaattcgctttgcacttcggcttcgtagccgggctgggcttcaccgatactgtgcctgctcttggctttggccgccttgcgggcattgccgtccagcagccgcgcggtcttgcgctgcaccgtgtcggcgacggcgacgacttccatccggctgcggtccgggccgacgaggtcgagcttgttgaccatcgcgtcgaagcggtcgtcatggctgcgcaacgcctgcagcacctgccagaccactgcataggtgcggttatcgttcagcgcttcgtgcggctcgatgccggcagggatcaccaccggcagcaccacgtagccgcgctgcttgcccggggcattgcgcatcacccggccgaccgactgcaccacgtccacctgcgagttgcgcggagtgaggaacagcaccgcgtccagcgccggcacgtccacgccttcggaaaggcagcgcacgttgctcagcacgcgacaggtgtccggtggcgtgggtgccttgagccagtcaagcttcgcttccttctcgccggcgttcatgctgccgtcgacgtgcttggcctcgcaggtcatgcgcgcggcgtcttcgatgtcctcggcgtcctggtaggcgtccacgaccgccttgaacatgtcggcgatttccttcgagctgaccttgtgggtcttgccaccccggctgggctcgatgacctggcagaacgcgaccgcgcgcttcatcggttctgcgctttcgccggcaccctcgtggatgccgagcttggccagcgccttccagcagccgacgatcttggcggcatcgtccacgcgcaggctgttgttctcgtccttcagcagagtctggaggcggcgattgatgtggctttcctcgactgccagcacgatgaccttgtagtcgaccagcaggccgcgcttgacggcttccgagaaggtgatgacgaacagctgtttgccgtaccaggcctcgttgtccatcgagtacagcgccacgttgtcgcgctcggccacggccttggcctcgttgccgtagattcgcggggtggcggtcatgtacaggcgcttgccggcgcggatgtaggcggcgtcgtgcacgcgcacgaaggcggattcgtcgtcgccttcgaaggtggcgccggtggtgcggtgggcctcgtcgcagacgatcaggtcaaaatcggccagcccctgctgctgggcgtcgtggatgacctcgatggagtggtaggtgctaaacaccacggtcatgtgcgcgttgtcgctgcgcgcggcgacacctttggccagtgcgcgggcgtcggtggtggccgggtagcgcagttcgtgggcgagggtctgggcggcgtcgtcctccttgcggcccttcttcttgccgacgtcgctgtcggaacacaccgcgaaactgtgcaggggaatcgcgctttcctgggtccactcggtcagcgtctgctgcagcagcgacaggctgggcaccaggaacagcacgcggccgcccttgccagccatgctttccgcgatcttgagactggtgaaggtcttgccggtgccgcaggccatgatcagcttgccgcggtctgcgtcctgcagcccggcggtgaccgccttgagcgcggattgctggtgcgggcgcagggatttcttcgccttcagcgcgaccggggcgttgggctggaagcgcgaccagtcgatctggctggcttcgagatcgtgcagggtgatcttgctgaccggcggctgctggtcgatcagcgcgttttcggcattgtcggaccagtggtcggtgctggaaacgatgacccggtgcgcgaatggcttgcggcccgaggcggtgaagaagctgtcgatgtccttcttctgcagccggtagtccgggtcgtaaaacttgcactggatggcgtggatcgcgccggttccggcttcctcggcgaccaggtcaatgccgtcatccttcgcgctgaagccgtgggcgggcgcccagtcggaccaggtccagaccttggcatacaggtcgcggtaggtggcctcgttgcgcaggtaggccaggatcaattcttcgaagtaggtgcccttctcgcgctcggtcatcgaggactggcgcagggtgtcgagcagagtctcaagtacggtcacagattccggatcctggcaaaacggtga

SEQ ID NO: 517781 - DNA, 1098 bp, Stenotrophomonas maltophilia
gtgctgcaccagctgctcgcagcgcattgccggtgccagcggtgccagctcgcgcagggcgcggtcctcgtcgcgcgagggcccgccggcagcgctgtcgatgcgcagctggcgcaggccgaaccagcgatgcagggtggtttcgcgcagcgtccaggcctggatgcggcgacgcgcgacactgctgcgggtgcggctgagcaggccggccgagacggtcaggcggcggtcctgctcgctgagggtgaagccgtgatagcgcagcagggtcagcaccaccgacagcgcacgcagcgccagccagcccagcagcaaggctgcggccagcagcaggaaggcgccggccacgccgggatgcaggtggcttgcgtagccgaaggcttcccggccgccacgctggatggccgcgtccatcaccggccgcggcacggtctggaacagcacgccgaaggcggcgatcgccaatgcccagccgcggttggacagcaggcccatgcgcaccacgtcccagctcgacaggcgcagcagcacctgttcggtgtcggcgtcggtgatcgagtgggcggccacgacgtcggcggcctgcggtgcctgcccacgctggcgcaccagtcgttccagcgccagcgcctggtccagcttcagcacgcgcatttcggcttccggacgcacgccaccggccgattccaggcgcagctcggccacgccgaacaggcggtgcagcgggttctgccgcacttccacgttgtggatgcgggcgaacgggatctcgcggcggttgcgcgccagcagtccgctgcgcacggtgatcgcgtcgctgccgatgcggtagcggtagctgaggtactgcagcaccgagaccagcaccagcgcggcaatcgccgacagcggaatcagctgcgcccacatcgggtcgcggtcaccgcgctggccgaacaccagcagcgccaccagcggcaggaagtagtggcgcagctgcatcagcagcacgaacagccacgaccacgggtgcaggcgatggtcctcgccaccggcaggcagcgatgcgggcagggacggcggcaggctcacagggcgtcggcgtcctggtcgagctga

SEQ ID NO: 517782 - DNA, 606 bp, Stenotrophomonas maltophilia
  misc_feature (324)..(333): n is a, c, g, or t
atgggccctgcccgccccgacgaggctcggcttccggcgaggagatcacagcgctcgcggctgcctttcaaggaggcgccggcgaactccgaacgccgggcggaggcccttgcgtgcgaagtaaagggggaggtgacggccaacggccggcgccggaggacattcgtacgcaagggcctccgcccggcgccacgcagaatgaacccgccgcacgcatgtctttgtcccgattccccgcgaactgacgggccccgccgagacaggcaggggcctgggcaaatgtcccccggcgccggccgttggccgcccctcctcctttacttnnnnnnnnnncaaccccctgcccgccccgacgaggctcggcttgcggtgggtaaggctgcgaacaatctgccttcaatgaggcgccgacgaactccgaacgcagggcagattgaacccgccgcacgcgatgcaggaacggctcagcgcccgcgaccaccgtgccagtgctggtgccacgcctggaacatcaacacgttccacaggtgcgtgtgccacttgcgctcgccccgcaggaacgcctcccagacaccacgcacgcgcgccacatcgaagcagccctga

SEQ ID NO: 517783 - DNA, 339 bp, Stenotrophomonas maltophilia
atgatgacgttcggcatcgccgcaacgctgtcggtgctgttcaacccgatgccgctgccggtcgcgctggtcggctgggccgtgaccggcttcggcatgggcatgatctacgccagcctgtcggtgctgaccctgtcgctgtcagcaccgcatgagcagggtgccaatacctcggcgctgcagctgagcgaggcgttgtcggtgaccaccgcgctggcggtgtccggcgcgttgttcgccatgttcgtggaaagcgcgccgcataccggctacctgctgtgcctggccatcaccttcggtctggcggtgctggccgcagtgatcgcgcggcgggtgtag

SEQ ID NO: 517784 - DNA, 300 bp, Stenotrophomonas maltophilia
gtgctgggcctgtcggtcggcgccgagtacagcttcaatccgcgctgggtgggcgtgatggaagtggccgccagccgcgagaccggccagcgcctgaggggtttcgcgcgcaacgccagcggtggtttcgaacgcatcgacgagcatcgcccggccagccgcagcgtcaccctggcgccagccgtggagtaccacttcagcccgtcactgggcctgatcgccggcgtcgagttcagcgtggccggccgcaacaccggccgcatcatcagcccccaggtcgccctgggcatgttcttctga

SEQ ID NO: 517785 - DNA, 1218 bp, Stenotrophomonas maltophilia
atggcacaggtaatcaacaccaatacgatgtcgctcaacgctcagcgcaacctgagcaccagcggcagctcgctcgccaccaccatccagcgcctctcgtccggcctgcgcatcaacagcgcgaaggacgacgcggccggcctggccatcagcgagcgcttcaccacccagatccgcggtctggacgtggccatccgcaatgccaacgacggcatctcgctggcccaggtcgccgagggttcgctgaacgaagtcggcaacaacctgcagcgcatccgcgaactgggtgtgcaggcctccaatgccaccaactcggccagcgaccgcaaggccctgcaggctgaagtgacccagctggtcagcgagatcgaccgcgtcgccaagcaggccgacttcaacggcaccaagctgctggacggcagcttcaccagccagctgttccaggtgggtgccaacgccggacaggccatcgccatcaacagcgtggtcaacgccaaggccgattcgctgggcgcggccaccttcgccaacggttataccggcaccgcactggcggtggacaaggcgacggccgacaccacctactccggcctgcaggtctcggtcaccccgccgggcggcaccgccaccacggtcaccatcagcgacttcacggtgaaggccggcgaatcgatcacctcggccaccgccgcggcgatcaacaacaagctgggcgaaaccggcgtggttgcctcggtcaatgccggcgtcgtcagcctggcctcggtcaaggatggccagaccttcgcgctgggtgtcagcgcggcgactccgccggccggcgccaccgccgcgaccctcgccggcctgggcctgaccgagaccagcaccaacggcggcaccctgaccggtgcagcggccagcttcgtcaaggacctgaacgtcactaccgccgaaggcgcacagaaggcgatgtcgatcgtcgacaaggccctggaatcggtcaacagcgtccgcgccgacctcggcgcgatccagaaccgcttcacctcggtggtggccaacctgcagacctcctcggagaacctgtccgcatcgcgcagccgcatccgcgataccgacttcgccaaggaaaccgccgaactgacccgcacccagatcctgcagcaggccggtacggccatgctggcccaggccaaccaggtaccgcagaacgtgctcagcctgttgcagcgctga

SEQ ID NO: 517786 - DNA, 1203 bp, Stenotrophomonas maltophilia
atgagcagccgcatctccaccagcatgatgttcaaccagtcggtgtcgctgatgatggccaagcaggccaagctcagccacctggagcagcagatcgccaccggcagcaagatcgtcagcgccaaggacgatccggttgccgccggcaccgcggtcggccttgaccgcagcctggctgcactggaccgcatgaagctcaatgccggcaacgtgcagaaccgcctgggcgtgcaggaaaacaccctggcacaggtcaacgacctgatggcacgcgtcaacgatctgaccatccaggccagcaatccggcgctgagcgcggcggacaagaagacgctgatcaccgaggtcaaccagatccgcgacggcctgctgtcgctggccaacgccgatgatggcaccggccgctacgtgttcggtggcaccaacgacggcgacccgccgtttgccaagatcaacggcaaagtggtctaccgtggcgaccagacccagcgccaggtcgaagtcggtccggatacctacgtgaaggacgcgctgcccggcagcgagatcttcatgcgcattcccaccggcgatggcttcgtcgacggcagcgccgcggccggcaacaccggcaacggcgtgctgaccaacatcacccgcgacggcagcgacagctggaacggccagggcttcagcgtgcgcttcaccactggcaaccaatacgaggtggtggacggtgcgggcaacgtgaccggaaccggcacctacaaggccggcgacgatctggaagtgaacggtgtgcgcctgcgcatcaccggcgcaccggcagcgggcgacagcttcagcgtacaggccgcgagcagccgcgacatcttctccaccatggacaacctggtggcggcgctgggtgccgacaccggtaccaccgcgcagatgactgcgcagcagaaccagctgcagagcgcactgcgcgacgtggcgcgcgcttccgagcggatgatcgattcgcgtgccgcaggcggtgcgcagttgaaggcgctggacaatgccgccgacatgcgcgaggccaatggcgtgaccctgaagaccacgctgtcgcagatgcgcgacctggattacgccgatgcgctgagccagtaccagctgcagagcaccgcgctgcaggcggcgcagacgatcttctcgcagatgcagtcgatgtcgctgttcaacaagctgcgctga

SEQ ID NO: 517787 - DNA, 1881 bp, Stenotrophomonas maltophilia
atgtccagcgtactttccaccggtaccggtgccctgctcgccttccagcgtgcgttggcgaccaccagccacaacgtggccaacctcaatacgcccggctacagccggcagaaggtcaacttcgctaccgccgacccgcagaactacggctatggcacggtcggcaacggcacccggatcactgacatccgccgcactgccgaccagctggcgatctcgcgcctgctcgacagcagcggtgaactggcgcgcctgaaacagctttcgggcatggccgaccgggtcaacgcgctgttctccgatgcggccaccaatgtggccggcgtctggtcgaacttcttcgattcggtcagtggcctgtcgtccaacgcggccggcaccgccgaccgccagaacatgctcgacggcggcaaggcgttggccaaccgcttcgtgcagctcaacacgcacttgaacaacctcaacagcgaggtcaacaacggcctgctggccggtgccaccgaggtcaaccgcctggcgcaggaaatcgcgcagatcaacggcgccatcggcaccaacgtcgccaccgcggcgcccgatctgctcgaccgccgcgaccagctgatcacccagctgatcggctacaccggtggcacggcggtgatccaggacggcggcatcatgaatgtctacaccgccggcggcaacgcgctggtggtgggtaccacggcgaccaaggtcaccaccgtggccgacccgtaccagcccgagcgcctgcagttggcgctggagacccagggcaacaccatccgcctcgacccgaaggcggtcggcggccagatcggtggcctgctggaattccgcgacaccgtgctgacccctgcccaggctgaactgggcaagctggcggtgggcctggccgagagcttcaaccaggcgcaccaccagggcgtggacctgtatggccagctgggcggggacttcttcaccatcggcaacccgcgcgtcaccggcaacaacagcaataccggcaccgccagcctcagcgcaacctacggcgacctgggcaagctggacgcgcagaacgtggtgctgcagttcgatggcaccaactggaaggccagccgcgccgacaccggcgccagcatcccgctgaccggcaccggcaccgccgccgatccgctggtaatcaacggcgtcaagctggtcgtcggcggtacgccggctgcaaatgaccgcttcctgctgcagccgaccgcgggcgtggccggcagcatggaagtggcaatcaccgatccgtcgcgcatcgccgccgctgcagcggtgaagggcgcggccgccaccgccaacaccggtaccggcaagctgagcggtgtcaccgtcaccgattcgaccaacgccaacctgcgcaatccgtcggcgatcgtgttcacctcggccaccacctacaccatcgacggtgggccgccgcagacctacacgcccggccagaccatcagcgccaacggctggagcttcgtgctggacggtgcaccgaaggtgggcgataccttcaacatcaccccgaccccggccggttcgtcggacaacagcaacgcgtcgaagatggccaaggtggaaagcgcgaaggcgttcaacgccggaacggtgacactgaacggcgcgctgggtggcctgaccacccaggtcggcgccgccgcccgctcggccgagtactcgctcgacgcgcagctggtgatcaatgacaaggcgcaggaagcccgcgacgaagtctccggcgtgaacctggacgaggaagcggcggacatgctgcgcctgcagcaggcctaccaggccgcctcgcagctgatctcgaccgccgacagcatgttccagaccatcctgggagccgtccgccgatga

SEQ ID NO: 517788 - DNA, 1131 bp, Stenotrophomonas maltophilia
atgaaactcctcccctcttcttcctggcagcgccgcgtggcgtcgttcgtcgcgctgatgctgctggtcgtggcagccccggccagcgccgagcgcatcaaggacctggcccaggtcggcggcgtgcgtggtaacgccctggtgggctacggcctggtggtcggcctggatggcagcggcgaccgcaccagccaggcgcccttcaccgtgcagagcctgaagaacctgctcggcgagctgggcgtgaacgtaccggccaacgtcaatccgcagctgaagaatgttgcggccgtcgcgatccatgccgagctgccgccgttcgccaagccgggccagccgatcgacatcaccgtgtcgtcgatcggcaacgccgtctcgctgcgcggcggctcgctgctgatggccccgctgcgcggcgccgacggccagatctatgcgatcgcgcagggcaacctgatcgtcggcggctttggtgcgcagggcaaggatggttcgcgggtttcggtgaacgtaccgagcgtgggccgcattcccaatggcgccacggtcgagcgtgccctgcccgacccgctggccaatggcggcgacatcacgctgaacctgcacaacaacgatttcaccaccgtttcgcgcatggtcgccgcactcaacaacgcgttcggcgaaggcgccgcgcgtgcggtcgacggcgtgaccgtggccgtgactgcgccgaccgatccgggcgcacgcatcggcctgctggcccgcatcgagaatctggagctgaccccgggcagcgccccggccaaggtcgtggtcaattcccgcaccggcaccgtggtcatcggccagcaggtgcgggtcggccctgccgcgatctcgcatggttcgctgacggtgacgatccaggagaacaccaacgtcagccaacccaatgccctgtccggtggccgtaccgtggccagcccacagtcgaccatcaccgccaccaacgacggcagccgcatgttcaagttcagcggcggcaccaccctggacgagatcgtgcacgcggtgaacgccgtgggcgcggcgccgggcgacctgatcgcgatcctggaagccctgaagcaggccggcgcattgagtgccgagctcgaggtgatctga

SEQ ID NO: 517789 - DNA, 693 bp, Stenotrophomonas maltophilia
atgtcgcccatttccagattcacccgcactgccctcgcctgcgccgtggtcgccctgctcggtggctgcgtgatcgccggcgacgtgcgcccctacgcggcgatggcaccgatccagccgatcatgccgccgcaggccgcgccgaccgccggtgcgatctacgctgccggcccgaccctgcagctgtactcggaccgccgcgcacgcgatgtcggcgacctgctgaccatcaccctgctggaaaacaccaccgcgcagaccagcgccaacacggccaccaacaaggaatccaacctgagcctgggcacgccgtccatcctcggtgcgccggtcaccctgggcggcaaggacatcctcagtgcgacggccaagggcgcgcgtgacttcaccggcaagggcaacagcgcgcagagcaaccgcctgcagggcagtgtcaccgtcacggtgatccagcgcctgcccaatggcaacctggtggtacaggggcagaagaacctgcgactgaaccagggtgatgaactggtacaggtgcagggcatcgtgcgcccgggcgacatcagccaggacaacaccattccttccagccgcgtggccgaagcccgcatcgtctacggcggccgcggcccggtcgcgcagtccaacgcgatgggctggctgagccgcttcttcaattccggcctgacgccgttctga

SEQ ID NO: 517790 - DNA, 786 bp, Stenotrophomonas maltophilia
atgaaccaggcattgtggatcgcgaaaaccggactggatgcgcagcagatgcgcatgtcggtggtttccaacaacctcgccaacaccaacaccaccggcttcaagcaggaccgtgccagcttcgaggacctgctgtaccagcaggtacgccagcccggcggctcttcgtcggcgcagacccagctgccgaccggcctgcagctgggtaccggtgtacgcgtggtcgccaccgccaagaatttcgagcagggtggccagcagcagaccggccgtgcgctggacgtgatggtcaacggccgcggcttcttcgaagtgcagatgcccgacggcagctcggcctacacccgtgatggctcgttcaagatcaaccaggacagcgagctggtcaccaacagcggctacccggtgcagccgggcatccagattcccgagggcgcgcagtcggtgaccatcggtaccgacggcaccatcagcgtgaagatggccgacggcgcggcgtcagtggaagtgggtgcgctgaccctgaccgacttcgtcaatccggccggcctgcaggcacgcggcgagaacctgttcctggaaaccaccgcttccggtccggcacagaacggcaatcccgggctcaacggcctcggcaccgtggtgcagggcgcgctggaaggcagcaacgtcaatgtggtcgaagagctggtgtcgatgatcgaaacccagcgcgcctacgaaatgaacgccaaggcaatctccaccaccgattcgatgctcggatatctcaacaacaagctctga

SEQ ID NO: 517791 - DNA, 750 bp, Stenotrophomonas maltophilia
atggataaagctctttacgtggcgatgaccggtgcccgcgcctccctgcaggcgcagggaacgctcagccacaacctcgccaactcggacacccctggcttcaaggaagcgctggccaacaccgaagccttcccgatcaagggcccgggctttgcctcgcgggtggatgcgctgcacgtcgacgccggcttcaaccgtacgcccggctcgcagcacatcaccggcaagccgctggatctgtccctgcagaccggcacctggctggccgtgcagtccagcgacggcagtgaggcgtacacgcgcggcgctgcattgtcggtcaccccgaacggccagctggtgacctccagcggccgtccggtactggatgacaacaacaacccgatcgccattccgccctaccaggcgatggaaatcggtgccgacggcacgctctcgatcatcccgcagggcgaaggcccgcagaccatggcgcagatcggccggatcaaggtggtacaggcgccggacgagcgcctcgagcgtggcctggatggcctgttccgcaacaccgacccactgcagccgttcgcaccggcacagggcaccgccgtgcacagcggccagctggaaggcagcaacgtcgatgccgccggtgcactggtgcagatgatccagctgcagcgccagtacgaaatgcaggtgcaggtgatcaagcacggcgacgacaacgcgcgcagtgccaacaacctgctgcgcctgggcagctga

SEQ ID NO: 517792 - DNA, 1224 bp, Stenotrophomonas maltophilia
atgggcttcaatgtctcgctgtccggcatcaacgccgccaacaccgacctgagcgtcaccgccaacaacgtcgccaacgtcaacactaccggcttcaagcagtcgcgcgcggagttcgccgacctgttcgcttcgaccagctacggcctgtcgaagaaccagaccggctcgggcgtgcgcgtttccaacgtcgcccagcagttcatccagggcaacaacgagcagaccgggcgcagcctggacatggccatttccggtgaaggcttcttcaccatgaacatgaatggttcgcgcgtgtactcgcgtgccggcaacttccagaccgattcggccggctacgtggtcaacccgcagggtgcgcgcctgcaggtgttcgcgccgaatgccgatggcaccaactttgatgccggccgcctggtcgacctgcagctgctgaccaccgacagcccgccgaagcagaccagcgaagtgaaggttggcttcaccctgccggccaacgccaagcagccgacggtggcgaccttcgacccggccgattcgaacagctacaaccactccagcggtggcatcaccgtgtacgactcgctgggcgtgagccacatccaggtctcgtacttcgtcaagggcgccaaccccaacgaatggaccgtgcgcaattacgtcgatggccagccggccggcgcaccgaccccggtcaccttcgacaacagcggcaagctggtcgcacctgccaacggcaaggtcagcctcggcaccttcaccccgaccaccggtgccggccagttgaacatgacgctggacatcagcggctccacccagtacggcgagaagttcgccctgcgcaatacccagcaggacggctatgccgccggcaagctcaacgaagtgaccgtgtccgaatccggcgtggtctacgcccgctattccaacggcgacgacaagccactgggccaggtcgccctgaccaccttcaacaacacgcagggcctggaatcgaagggcaacaacctgtgggtggagaccttcgaatcgggcacgccgcgcaccggcatgccggacacctccaacctcggcaagatccaggccggctcgctggaagcgtccaccgtcgatctcaccgagcaactggtcaacatgatcaccgcgcagcgcaacttccaggccaacgcgcagatgatcaccacgcaggaccagatcacccagaccgtcatcaacatccgttga

SEQ ID NO: 517793 - DNA, 684 bp, Stenotrophomonas maltophilia; identical to SEQ ID NO: 495334

SEQ ID NO: 517794 - DNA, 408 bp, Stenotrophomonas maltophilia
atgagcaacctgccgatcttcgacatcgccggctccgcgctgcaggcacagtcggtgcgcatgagcaccatcgcctccaacctctccaatgccgacaccgtcgccggttccgccgacgccgtgtacaagccgctggaaccgatcttccaggccgtcaccagcaagaacgatcccaacatcacctcggtgaaggtgaaggagatcacccagagcgaggccgcgccgatcaagcgctacgagccaggccacccgctggccgacgccgatggctacatctaccagcccgatgtcgatccggtggcgcagatggtcaacctgatctcgacctcgcgcaattaccaggccggcgtggagatgttgaccaccgccaaggaactggccctggccaccctgaccatgggccgctga

SEQ ID NO: 517795 - DNA, 396 bp, Stenotrophomonas maltophilia; identical to SEQ ID NO: 495336

SEQ ID NO: 517796 - DNA, 945 bp, Stenotrophomonas maltophilia
atgtcccatgacctgctcaaccggatcgaccagcggacccgactggccggccacaaccgcctggcgctgctgctgttccgcctcggcggacgtcagctttttggcgtcaatgtcttcaaggtgcaggaagtcctgcgccgcccggagctgttccaggtgcccggcctgcccagccagttctccggcgtggccgacgtgcgcggccgctcggtgccggtactggacctgggcctggcgatcggccaccccgagcgcgaaccggacgcggacacctcgcccggctacctggtcgtcaccgaattcaaccgctcgatccagggcttcctggtcagtggcgtcgaacgcatcgtcaacatcgcggtggaagacatccacccgccaccggagctgggcgccgagtcgagctacctgaccgcggtgacccgcttccagggcgagctgatccaggtgatcgacgttgagagcgtgctggccgatatcgcccaggtgcgcggagaagcggtactcgacccggcaatggccatgcccgccgacggcccgcagctgcaggtgctggtggtggacgactcgcgcgtggcccgccagcagatccgcagcgtgctggaccagctgggcgtgggtgccaccctgctttccgacggcaagcaggcgctggaccacctgctgcaggtccacgcctcgggggaaaacccgaccgagcgctatgccatggtcatctcggacatcgagatgccggccatggatggctacacgctgacgacggaaatccggcgccacccgggcctggccggcctgtacgtgctgctgcacacctcgctgtcgggcgtcttcaacaacgccatggtcgagcgcgtcggcgccaatgcgttcgtcgccaagtactcgccgcacgagctggccgacttcgtgctggaccgcctgcgcaaggtggcgctggcggcgtaa

SEQ ID NO: 517797 - DNA, 657 bp, Stenotrophomonas maltophilia
atgcgccggatcacatccctactggcccttgcactggccgctgctgcgccgtgggcggcggctgccgactggcaaccggtggccagcatccgcgcggccgcattgtcgacactgccggccggcagcgaaggcgaggcgcaggtggccgatgcgctgcgcctgccgaaatgtggcagcgcgttgcaggtgcagcccaccgccaacaccacggtggaggtgagctgtcccgatgcgggcggctggcgcctgttcgtgccggtgaaggtgcggcgcaaccagaccgtgctggtgctcaaccgcggaatcggcactggagaaaccctcacggccgccgatatcaccactgcccagcgtgacgctgcccggattgccggcgcggtgctgtccgatcccaatgcagcgatcggccgcatcgcccgccgtccgttgcaggccggagccctgctgtcgaacaacgatctggtggtccagcgtctcatcaagcgaggagacaatgtagccctggtgtcgcgtcgcggctcggtcgaggtgcgcattgccggccgtgcgatgggtgatgccggtgagaacgagcgggtctcggtcgagaacctgtcctcgcggcggatcgtgcagggcacggtcgacgccgcaggtgacgtaatcgtggcgcgttga

SEQ ID NO: 517798 - DNA, 306 bp, Stenotrophomonas maltophilia
atgagccagaaaatcgacggcaacctgcaggtcccccaggcactgcgcagcgtgacgaccccggccagcaagcccggcgtcagcaccgatgcggcggcgcgcccggtcgaggcggccgacagcctgcgcctgaccggcgaggccaccaatctgcaggccatcgagcgtgagctgaccaccgccccggcgatcgacgcccagcgcgtggcggccgtgcgcgagtcactgcagaacggcacctacaagatcaatccggacgcgatcgcatcgcgcatgctcgatctggaccagcagctgcacggatga

SEQ ID NO: 517799 - DNA, 339 bp, Stenotrophomonas maltophilia
atgactgcggcgatgagcgagccgctgcagcgcctcgcccaggccctggacgttgagcgccaggccctggtcgagcacgacgtgcacgccctgatccgggccaccggcgccaagctggaagcgctgcgtgcgctggaaggcgcgccgccggtgggcgagggcgaacagctgcaggaactggccgagcgcaaccgcgccaacggcgtgctgctgtcgcgccgtcgccgcgaggtgaactgggcgctgcgccagctcggccgtaccgaagatgcctcggcctacgatgccaagggccagtcgcacacggtcagcatcggccggccactcgccgtcgcctga

SEQ ID NO: 517800 - DNA, 1221 bp, Stenotrophomonas maltophilia
gtgtccgctgccaacgccctggttaccgccccccttccgccgcagccggtgctgcaggccctgcttgagcgcctgcgcgaaggcctgctgctgttcactgaagacgggcaggtggccctggccaacccggccgcgcagaacctgctggccagtggctcggacggcggattgccgccgccgcagcggctgcgcgagctgctcccccctgatgcactggagcaggcccgccagcatggccactggaatggcagcctgccgctgggcgagggcgtggtcatcgcccacctgtaccaccatggtccggtcggcgaagggcatttccttgcgttgttccgccacatcgaagggcaggaagactacgagcgcgaactgcagcagcgccacgccgagctgcgccaggcctacctgcgcctcaatggcacccaggaaaagctgctgcagtcggagaagatggcctcgatcggccagctcgccgccggcgtcgcgcacgagatcaacaacccgatcggttacgtgcactccaacctgggcagcctgcaggagtacctgcgcagcctgttcaccgtgatcgaagcctacgagcgcgccctgcgcgcgccggacccgaaggcactgattccggaaatcgatgacatccgtgaccgcctggacatcgacttcatcagccgcgacctgccgcagctgatggcggaatcgcgcgaaggcatcgagcgcgttacccgcatcgtgcgcgacctgaaggacttctcgtattccggtcgcgacgaatcgtggaagctggtcgacctgcacgcgggcctggaatcgaccatcaacatcatctggaacgaactcaagtacaaggtcaccctggtacgcgaattcggccagttgccgctggtggagtgcctgccgtcggagttgaaccaggtctacatgaacctgctgctcaacgctggccatgccatcgccgagcgcggcacgatcaccgtgcgcaccggcgttgatggcgatcacgtgtgggttgaattcgaagacaccggcggcggcatctcgccggaactgcgccagcgcattttcgatccgttcttcaccaccaagccggtcggcagtggcaccggtctgggcctgtcgatctcttacagcatcatcaacaagcatcacggccgcatcgacctggacagcaccccgggcgtgggctcgcgcttccgcgtggtgctgccggtgaagcagccgcgctga

SEQ ID NO: 517801 - DNA, 1773 bp, Stenotrophomonas maltophilia
atgtggaatcccaacctgcccccggtcagcatcgatgatgcccccgaccgccttggcgccggcaaccccgagctgcaggcgatggttgccgaggcggcctccggcggcattgcgctgatgctgatgcacgtggacatcgaccacttcgcatcggtcaacgagaacatgagtgccgaagtgggcgatcaggcgctggtactggtggcgcagcgcctgcagtcctacctgcgcgggcgtggcaagctgtggcggcatggcagcgacgagttcctgatcgcggtgccccgcaccgcggacctgccgctgccggaggacttcgctgaagagatccgccagcagatggaactgccgctgtcggtgcttccatacacgctgttcatgaccggcaagctgggcgtgagcctgtgcccggaacatgccagcagcgcctcgcgcctgctcgaccatgccgaagatgcgctgtaccaggccgcccgcgaaggcggcaatgccgtgcgcatccatgccgtggataccccgccgagcgcgcacagcgagagcatcatcgcgcgccagatcgtcgatgccattcccaatggcgagctgaagctgcgttaccagccgctggtgagcgcccgcgacggccacgtggtcggcatggaagcgctgctgcgctggcagtcgccgaccctgggcatgctggtgccggagcgcttcatgcgcaccgccgagcgcctgggcatcatcgtgcagatcggcacctgggtgctggaaggcgcattgaagcaggcgcggttgtggcgcgaccagggctttgatgacttcaccatcgcggtgaacgtgtccaccctgcagctgctgcggccgaacttcttcgccgaggtgatgtccctgctgcaggccgcgggcgtgccggcgcacatgctgacgctggagatcaacgagagcgcgctgaccaacaacgtcaatttcgtccatgaaacgctggccaacctgcgcaacgaaggcatcagcctgagcctggacaacttcggcaccggcgattccagcctcagcgcgctggtgcgctacccggtggacaagctgaagatcgaccgcagcttcatcaagagcgcaccggctggcaatcgcgaagcagccattgcccgcgcgatcattgccatgggccaccagctgggcatgaccgtgattgccaacggcgtggaatcgcaggcccaactgggcttcctgcgccgcaacgactgcgatgtgttccagggctacctgttcggcgagccgatgtcggccgatgccgccggcatgaccctgcgccggcgctacctgcgcccggaagccttcgccgaaacgcgcccggaccgcacgttgctgctgctggatgacgaggagaacgtgctgcgctcgctggtgcgcctgttccgccgcgacggctaccgcatcctggccgctggcaacgtgcgtgacgcctttgatctgctggcgatcaacgacgtgcaggtgatcctgtccgaccagcgcatgagcgacatgagcggcaccgagttcctgggccgggtgaagatgctgtacccggatacgatccgcctggtgctgtcgggctacaccgatctgaacacggtgaccgatgcgatcaaccgcggcgcgatctatcgcttcctgaccaagccgtggaacgacgacgagctgcgcaagcacatccaccaggcattccgcacgtacgaagaacagcgccgtagcaatgccggcccggcaccggtggaaaccggggatggtggcgaggatcggccgctgcggtga

SEQ ID NO: 517802 - DNA, 2103 bp, Stenotrophomonas maltophilia
atgcccgcagaaccgaccggcaacgccccagttcccgacccgcggatggcgcaggcgctgagccgtgaccggcgccgggtggtgctgagctacctggtgatggcgctggcctggatgatctccaccgacagcgtggtgcaggcgctggtgcccgatccgcagcaggcggccctgtggcagggcctgaagggctcgttcttcgcgctggccagcgcgggcctgctctatctgctgctgcgcccgctggccgaacacgtgctgcatacccatgcgcgccagcaggcctccgagctgcgcctgcggcagatgttcgagggcaaccccgggccgatcctcgtctacgacctggacacgctggcgatcctcgatgccaaccccgccgcctgcagcgccttcggctgggaccgcgacgagctgctggaacagaccatcgacgccttgtggccgccgggccaggaccaggccctgcagaccaagctggaggcgatccgcgaggcgcccgaggagctgtgcatcctgcgcgctcagctgcagctgcgcgatggcgcgctgcggcagatggagctgcgctccaacgccatcagctacgacggccacaacgcccgcctgctgatcgccatcgaccgcaccgccgaggatctggcccagctgcgccgcgaccaggcattggcccgggtggaggaagcccatgagctggcccgcatcggcgcctgggaactggacccgtccaccgggctgggccgctattccaaccaggtctatcgcctgctcggccgccgcccgcccgaggcccggcgctggcaccgcttcgatgagctgctggtgccggccgacccggccaccgccacccagaccgaacagctgctggccgaactgtgctccggcgagccggtacaggtggacgtgctgctgccgctgctgtcgatggacggccgtgcattgatggtgcacctgcgggcggccagcggtatcgacgaagccggccgcagccgcgtgctgggcacgctgcaggacgtgaccgagcgcgagcagtcgcggcgcctgctgcgcgagcgcgaggaacagttccgcgagctggtgcgggtgctgcccgacggcgtggtgatcctctccgacgagcacgtgctgtacgccaacgcctgggccgccggactgttcggctacggcagccacaccctgctgggcgagccgctgtcggcactggtcgctgccgccgacctgccacgggtgcgcagccagctgcgcgccggccagccacacctggggccgggccacagcagcgtggtggccatgcagcgtgccgacggccgcagcttccatgccggcctggcggtgggcgaagtgcgctacggcggtcgtgactgcaagctgctgatcgtacgcgacctgagcgattccgaacgcacccgcagggcgctggaaaccagcaatcgcgagctgcaggcgatggccgggcggctgttctcgctgcaggaggacgagcgtcgcgcgatctcgcgcgacctgcacgatgacatcggccaggccattaccgcgatcaagctgtcggcgcatgcggcgcaggatgaggacgatccgaagcgtcgtggcgaggacctggcgcagatcgtcagcctggccgacaccaccgtggccaagctgcgcgacatctccaccctgctgcgcccgccgcagctggatgcactgggcctggaggcggcgctgagctggcaggcgcgggtgctgttccgctcttcgccggtggagctgctggccgagatcgagccgctgccgcaccgccccgacaacagcatcgaacaggcctgcttccgcatcgcacaggaaagcctgaccaatgcgctgcgccatgcgcgcgccagccaggtcctgctgcagctgcgcgacgtcagccagcgtggcctgcacctgcagatccgcgatgatggtgaaggcttcgatccggacggcccgcgcggcctcggcctgatcgtgatgcgcgagcgcgcgcagagcgtcggtggccacgtgcggatcgaatccgcgcatggcgcgggcaccctgatcgacgtccacctcccctaccaggcgaccagcatggccgccgtcgattcgccggaatactga

SEQ ID NO: 517803 - DNA, 507 bp, Stenotrophomonas maltophilia
atggccatcgccctcatcgcagtgctcctgttcgaagccgtccttctgatggcctgggtggccggctatttcagctggggcatcaccctgttcaacgaacgcatcgcggcgtcaccggccatgcaggcccggctctcgctgggcagcctggaacgtgacctgccgcaggacagatggctgcaactggccttccatgcgctgcccgatggcagcatggcgttccgcgagagcttcgcaccgagcttcggcctgcgctacttcccggtgatgcgtggacgcatcgttctcaacgcgcgacggcacgaggtgcgggtgatcggcctgtgcagctggttcgtggcaatcctgtcgctgctgctgttgccactggtggcgatgcgcccgatggtggcaccgatgctgctggtgctgccgctgttcctggccagctatctagtccagaagcggcgctatgcggccatcgtcgaggccctgcgcatgcagttgaaggcggagtttcccaggtag

SEQ ID NO: 517804 - DNA, 4269 bp, Stenotrophomonas maltophilia; identical to SEQ ID NO: 510995

SEQ ID NO: 517805 - DNA, 222 bp, Stenotrophomonas maltophilia
atgaccctgatccgcgccctgccctccctcaccgataccgagcgcccgcgcaacgcgagcgtgcgtgagcagctgcagcggctggaagacgtggcccgcgaggaactgctcgaactgcagcagctggccgatgcgcgccccgccccgtcacgggcggacgaggcgctgctgggactggcgtgggacctcgggctggatggcgaggcgttgaaacatccttga

SEQ ID NO: 517806 - DNA, 1191 bp, Stenotrophomonas maltophilia
atgtactcacgcattttcatccgtctggccgcccccttggctctgaccctgctgctccccttcgccatcggtttcgaatggccggccgccctgcgctgggcgatcctgaccacgatgacgctgagctggctcggctttgcgtggtggaccacccgcgcccaggcacatcgttcccccgagcacgcccgtgtcctgcgcgaacaggaccagctgctgaccgagctgcgcaacttcgtcggcaacgagatcgacggttcgcgtggcgaagtggaacgcgcccgtgacctgatccgccaggccgtctccagcctgggcggcagcttcgatgccatgaaccgcaagtcgcgccagcagagccaggccctgtcgcgcatcgtcgaccgcgccggtgatgaaggcaatgccggcctcgacgttgcccgtttcgcccagcacgccagccaccgcatggaacagctggtggaagcgctggagcaggtgagcggccagagcagcaccaccgtgcagcacatcgaccagatggcgcagcacctggatggcatcttcgcgctgctggaagacgtcaagtcgatcgccgaccagaccaacctgctggcgctgaatgcggccatcgaagcggcgcgtgccggtgaagccggtcgtggcttcgccgtggtcgccgacgaagtgcgcaacctgtccgagcgctcgaccaccttcaacgagcagatccgcaagctggcgcacagctccaaggacgccatcgccaaggtgcgcgagacggtttcgcacatggcctcgcgcgatatggaccgctcccgcgaagcccgccaggaagcagcagcgatgctcgacaacgtcgcgcagatcaacgcctcgctgggcgacggcatgcgcgaagtgtccgagtgcgcccgtgcgatcgatggcagcgtggccgaagccgtgcgtgccctgcagttcgaagacatcgccacccaggcgctgggcggtgtgcacacccacctggaccgcctgaccgcgatcaaccgcgaagcggtggccctgcaggaactgctgcaccgcaatggcggcgtgttcgacgaagagatcgccaccgccctgcagcgcaccggcaaccgcctgcgcgaactgcgcagcgaatgggaacgcccgccgcacaagccggtcgcccagcagagcatgggcgccggcaccgtcgagctgttctga

SEQ ID NO: 517807 - DNA, 615 bp, Stenotrophomonas maltophilia
atgagtttcactgtcgacgaccgcgtcctggccttggccggcattgcccaggccctgcagcaggtgcgccgcatcgccgataccggccattccgacgccgccgccgtgcgcaccgccgtggacagcgtgttccgcgtcgatgcgtcctcgccgcaggcggtgttcggtgaccgtcatgcactgaagtccggcctgcgcctgctgcacaactacttccgcagccagggccaggacccgatcctgcccaagctggccctgtcggtgctgcagctggagcgccgcttcgtgcaggatggggcgaccgtgaacaaggtcgcctcgggcatcgagcgcgcccagcgccaggccaccgaactgggcgacagtggccacccggacgtactggccaacctcggcggcctgtatgccgacaccatcagccacctgaaaccgcgggtgatggtgcagggcaacccgcactacctgggccaggccggcgtggtggcggagatccgtgccctgctgctggccgcggtgcgttcggcggtgttgtggcgccagctgggcggcagctactgggacttcctgttcagccgcaaggcgatgatcgaggccgtggaccgcctgctggcctga

SEQ ID NO: 517808 - DNA, 1143 bp, Stenotrophomonas maltophilia
atgagcactccgcgtgtgatggtgggcgtctccggcggcgtcgattcctcggtcgccgcctggcgcctggtacagcagggcgaggccgtggccggcctgttcatgcagaactgggccgacgatggcagcggtgattgccgtgccgaggatgaccgtcgcgacgcggtggccgtgtgcggcctgctgggcatcccgttccacttccgcgacttctccagcgagtactggcagggcgtgttcgagcacttcctggccgagtacgcggccggccgcaccccgaacccggacgtgctgtgcaaccgtgaagtgaagttcaagcatttcctggacgccgcccgcgagctgggcgccgagcgcatcgccaccggccattacgcacgggtgacccagcgcggccaccagtggctgctgctgcgcggcgccgatcgatccaaggaccagagctacttcctgcatcaactgggccaggaacagctggcagccaccctgttcccgatcggcgacctggaaaagagcgacctgcgccggatcgcgcgcgacgtcggcctgccgacccacgccaagaaggactccaccggcatctgtttcatcggcgagcgcgacttccgcgaattcctcggccgctacctgccggccaagcccggccagatcctcgacccggccgacggcagcgtgattgccgaacacccgggcgtgttctatttcaccctgggccagcgcgagggcctgaacatcggcggcgtgcgtggccgcccggccgcgccgtggtacgtggttggcaaggatgtggccagcaacgtgctgtacgtggaccaggaccgcgacagcaagtggatgctgtccgaccgcctgcgttcggaaaccgcgcactggatcgccggctcaccgccggcacggcgcttcgaatgcaccgcccagacccgctaccgccagcccgacgagccgtgtacggtccaggtgctggacgatggcagcgtgctggtcacctttgcgcgcccgcagcgtgccgttacccccggtcaatcgctggtgctgtatgacggtgatgtgtgcctgggcggcgcggtgatcgccgccaccgatgcgccgctggaacaacgcctgcgcaccaccccctccccttttgaggtaatcgctgcatga

SEQ ID NO: 517809 - DNA, 462 bp, Stenotrophomonas maltophilia
ttgaacgccacgccggacccgcgctgggcaccgcacgccaccgttgccaccgtggtgatagacggcggccgcgtgctgctggtcgaggagaccattgacggccgccaggtgctgaaccagccggccggccacctcgagccgggcgaaagcctggccgaggccgccctgcgcgagacccgcgaggaaaccggctggacggtgcagctgacccacttcattggctgctaccagtggactgccggcgacggcacggccttcctgcgcttctgctacgcggcgcgcccggtttcgcacgacccggcgcagccgctggacaccggcatcgaccgcgcgctgtggctgaccccggccgagctgcaggccgccggcgagcgccagcgcagcccgctggtgtggcaggtggtggcggattacctgggtggccagcgccacccgctttcgctggtccgggaggtcgcatga

SEQ ID NO: 517810 - DNA, 474 bp, Stenotrophomonas maltophilia
atgaaaaggacccttctctccgccctgctgatcaccctggctgctgccggttctgccgccgccgcgaccagcgccgacaagtccgtggcccgccacctggacaagctgggctatacctacgaagtcgacgaggatggcgactaccgcatggtcttcgacgtcgagggcgaccgcacccagatggtctacgtgcgctcggcggtggaagacttcggcagccacaacatccgcgagatctggtcaccggcctacagcgccaagaccaagcagttcccggcggccgtggccaaccgcctgctggaagattcgcaggacgccaagatgggcggctgggtaaagcaggacaccaccgccatgtttgtggtgaagatcgacgccgatgccaccgccgaccagctcagcgacgccatcgatgcggccatccgcaccgccgacgcgatggagctggaactgaccaagaaggacgagttctga

SEQ ID NO: 517811 - DNA, 327 bp, Stenotrophomonas maltophilia
atgccccatgagtcctcccccgattcccagcacgagcacggcgttgccgtggagcccgcgcgcccggaagtggcgccgccgccgttctatcaggtgatgctgctcaacgacgactacaccccgatggatttcgtggtggatgtgctgcagcagttcttcagcatggacctggacaaggccacgcaggtgatgctgcacgtccatacccgcggccgcggcgtgtgcggggtgttcacccgcgaagtggccgagaccaaggttgcccaggtcaacgagtattcgcggatgaaccagcacccgctgctgtgcacgatggaaaaggcctga

SEQ ID NO: 517812 - DNA, 372 bp, Stenotrophomonas maltophilia
ttgcgggaagaacacgagatccggccgctgcacggcgacctgcaccacgacaacgtgctggatttcggcacgcgtggctggctggcgatcgacccgaagcggctgctgggcgaccgcgcgttcgactacacgacgatgttcagcaacccggacctctgtggcccgggcatccatgtggccacccggcccgagcggtttgccgcccggctggaacaggtcagcgcgctggctgggctggaacgggcgcgcctgctgcgctggatcgccgccagcgcggcactgtcggccgtgtggttccgggacgacggcgaccccgccgacatcgacgaggcggtggcgcggatggcgctggaggcgttggcggaggcgtga

SEQ ID NO: 517813 - DNA, 282 bp, Stenotrophomonas maltophilia; identical to SEQ ID NO: 510994

SEQ ID NO: 517814 - DNA, 2286 bp, Stenotrophomonas maltophilia
atgttcagcaaagacctcgaacacaccatcggccagtgctacaagcgcgcccgtgaggcccggcatgaattcatgacggtcgaacacctgctgttggcactgctcgacaacccgtccgcccaggccgtactgaaggcctgtggtgccgacgccgaacgcctgcgccaggagctggagcaggccatcgaggcttccgtgtcccgcctggccgaagatgacggccgtgatacccagccgaccctgggcttccagcgcgtgctgcagcgggccgtgtaccacgtgcagtcctcgggcaagaaggaggtcaccggcgccaacgtgctggtcgccatcttcggcgaaaaggactcccatgccgtctattacctcaaccagcaggacgtgacccgtctggacgtggtcaattacctgtcccatggcatcgccaagctgggcgaggaaggcgagcagccgtcctcctcctccgatggcgaaggccgcatcgaaggcggggagggcgagccgaagggtgatgccctgaccgagttcgccagcaacctcaacgaacaggcgcggtccggccgcatcgatccgctggtcggccgtgccgacgagatcgagcgcaccatccaggtcctgtgccgccgccgcaagaacaacccgctgtacgtgggcgaggccggcgtgggcaagaccgcgattgccgagggcctggcccgccgcatcgtcgagggctcggtgcccgacgtgctggccgacgcggtgatctactcgctcgacctgggcgcgctggtggctggcaccaagtaccgcggcgacttcgagaagcgcctgaagagcgtgctgaccgcactgaagaaggtccccaatgcggtgctcttcatcgacgagatccataccatcatcggtgccggttcggcctcgggtggcaccatggatgcgtccaacctgatcaagccggcgctggcctccggcgagctgcgctgcatcggctcgaccaccttccaggagtaccgcggcatcttcgagaaggaccgggcgctggcccgccgcttccagaagatcgacatcgtcgagccgaccgtgggcgagacctacgagatcctgcagggcctgaagtccaagtacgagctgcaccacggcgtgacctattcggacgaagcgctgcaggcggcggtggatctgtcggtgaagcacatcggcgaccgcctgcttccggacaaggccatcgacgtgatcgacgaggccggtgcccgccagcggctgctgccggaaggccagcgcaaggagctgatcgacgtcgaggaagtggaggcgatcgtggccaagatggcgcgcatcccgaccaagcaggtcagtgccaccgacaaggatgtgctgcagcacctggagcgcaacctgaagatggtgatcttcggccaggacccggccatcgagacgctgtcctcggcgatcaagctggcccgctcgggcctgggcaatccggaaaagccgatcggcaacttcctgttcgccggcccgaccggtgtcggcaagaccgaggtgaccaagcagctggcgctgcagctgggcatcgagctggtccgcttcgacatgtccgagtacatggagccgcattcgatcagccgcctgatcggtgcccctccgggctatgtcggcttcgaccagggcggcctgctgaccgaaaagatcgtcaagacgccgcactgcgtgctactgctggacgaaatcgaaaaggcgcacccggacatcttcaacatcctgttgcaggtgatggaccgcggcgtgctgaccgataccaacgggcgtgaggccaacttcaagaacgtggtgctggtgatgaccaccaatgccggcgcggcgcaggcctcgcggcgctcgatcggcttcaccaagcaggaccatgccaccgacgcgatggagaccatccgccgcagcttcaccccggaattccgcaaccgacttgatgcggtggtgcagttccaggcgttgggcttcgagcacatcctgcgcgtggtcgacaagttcctgatcgagctggagatgctgctgcaggacaagcacgtcagcctgtcggccacgccgaccgcgcgcgactggctggcccaccacggcttcgacccgctgatgggtgcgcgcccgatggcccgcgtgatccaggacaagatcaagcgtcctctggccgacgagctgctgttcggcaaactggtcaacggcggcaaggtgaacatcgatgtccgcgacgacgagctggtcgtcgagacccaggccgagccggagcgcctgctgccggtcacggtggagtga

SEQ ID NO: 517815 - DNA, 381 bp, Stenotrophomonas maltophilia; identical to SEQ ID NO: 495355

SEQ ID NO: 517816 - DNA, 219 bp, Stenotrophomonas maltophilia; identical to SEQ ID NO: 495356

SEQ ID NO: 517817 - DNA, 741 bp, Stenotrophomonas maltophilia
atgacccgccagctgccctggcgcctggccgacgcgccggacgcccccttcccgccggccgagaccgccctgcgccagcccgacggcctgctcgccgtgggcggcgacctgcacccggcgcgcctgctcaacgcgtatgcgggcggcatctttccatggttcagcgagggcgagccgatcctgtggtggtcgcccgacccgcgcatggtgttccgtaccgatggcgtgcatctgtccagccgcttccggcgccagttgcgcggcagcacatgggaggtcaccgccgacaccgccttcagccgggtgatgcgcgcctgtgcggcggcaccgcggcccggccaggacggcacctggatcagccccgacatggtcgaggcctacagccagctgcatgacctcggctttgcccactccttcgaggtctgggaccggcagacgctggtcggcggcatctacggggtggccatcgggacgatgttcttcggcgagagcatgttcagtggcgccagcggcggctccaagatcgccctggccgcgctggcatccacgcttcacggctggggctgggcgctgatcgatgcccaggtggagaatccgcacctgctgcggatgggcgccgagcacctgccgcgcgcggcgttcctgcagcacgtccgccacgcggtgcgccatgacggccgtgaaggcccctggacgcaggcggtcggacgcctgccggcacagcgtttggccgggggttaa

SEQ ID NO: 517818 - DNA, 1125 bp, Stenotrophomonas maltophilia
atgccctccccccgcttcctcgactccctgcagtccattcccgccaccgactgggatgccctgcacgacggccagaatccgttcgtcagccacgccttcctctcaggcctggaacagcacggctgcctgcgcgaggactggggctggcagccccggcacttcacgctgtgggagggcgagcgcctgatcggcgcaattccgggctacctgaagaccaactcccacggcgaattcgtgtttgaccatgcctgggcgaacgcctacgcccgccatggccgcgactactacccgaagtggctgggcgcggtgccgtactcgccggtcaccgggccgcgcctgctggcccgtcacgattcagagcgcaccacgctgctgtcggcgttgcgcgatgcactgccggcactggccgtgtcatcggcccatatcaacttccacgccgcagcggacgaggcgctgttcggcgatgactggctgctgcgcgaggacgtgcagttccagtggcagaacccgggtgactgggcgacattcgaccagctcctcggcgcgatgaaccacaagcaccgcaagaacatccgccaggaacgggccaaggtcacccgccagggcatcagcttccgcgtggtgcacggcgacgaggccagtcgcgccgacctgcaggcgatgtaccgcttctacctgcagaccttcctggaatacggcaatgccccggcgctgaccgagcccttcttgcgccatctggccatttcattgggacgcgggctggtacttttcctggccgagcaggaaggccagccgattgccggcgcgctctgcctgcgcggcggtgacacgctgtacggccgctactggggcggcgccaccctgcccggcctgcacttcgaagcctgttactaccagggcatcgagtactgcctgcgcgaaggcctgagccgtttcgaacccggcgcacagggcgagcacaagctggcgcgcggcttcctgcctacactggtgcgcagccggcactgggtggctgatgcggatttcgccgaggcgttgcaggagtggtgccggcaggagcgacgggatgtgcggcgctaccagcaggagctgcaggggcacagcccatttcgcgcggacgggtga

SEQ ID NO: 517819 - DNA, 1563 bp, Stenotrophomonas maltophilia
atgaaccagaaatttcgccttggatccctttctgtcctgctgtctcttctgggtggcggactgttgataagccccgcgcaggccgttgacgctcctcctgcggtggagcaggacactgggctcgacatcctcttgacccagaaggcgcgcgacattctggagcgcgttcgtctcgtggatggccaggcacgtagtcgccgggttgaggtatcggcagatatcgccaacggtgtagtgaccgtggcgctggatcgtgacttcgttcctgccgattacggaccgtcgttcgaggatcagcgaagcgagatcagttttggactactgcattgggccgagcaggtggcgccgttcagtcgtgtcgtttttctgtatgacgggaaagagatcgaatactactttcctgagataaaggctgcggacgatgcggcgcggaaagcgggggatgcgctgaggcggatgcgtggaacgcctgggtccgggatggcatttgtcgcagccggccatgggtatttctacagctacaaggacaaccggtgggtgacctcaagggatgaatggaatggcgtctccgaggggttgttgactccgtcgtacgctgcggagctgaaggcgatgatcgagcaaaggagccaaatgcctgtcgtccgtccgcgcgttcagatcacgggaacgactcatcctccgagtggtgaggagtggtggaccatagctgcgcgctacgcgattgccgagcagtatccggccgagacaaagatatggagcacgtacgcaggcagtacgctttgggatcgggaggagcgtgaagacatcaacagtcggccgcttctcgcaaaccaccacggagctgaggtagcgattcatctgcacagcaatggagaaccctcgggggccgcgcgcggtactcgtgtgatcgtgcaacctggtaggccgatggatgctgctcttgcagagagtgtcctgtgctcgatgaaggagctgattcactcgctacctgagtatgcggcattcaccgtggctcccgctccgcacgcgctgaacaagggggagaaccgagaggcgcacatgccatcgatcatcgtagagacggcgtttcacacgaatccggatgatgccaaggcgctgcaggaccccgtcttccgctcggcgtcgatgaaaggggtggagaagggctatcgcctgtgggcaacaggaaagacgtgtgagccgctgtccgggcagccgatcgcagatgtcgacgttccatccggcgactcgcgcgaggtggacgtggcgtttgcgggccatccgcaattcccgatcagcctgatcacccgcaatacgctgtgcccatcagggtggaactgcagcggacggacggtggtcatcgattcgcctgaccagcccagcaggatgcaactcagctgcggtcgcgacagcgtggggacgctcggctgggagacgcatgtgttggatgcggatggggtcaagtcgcagcccgtgcctcacaccgttcgttgtgttcccgatgcggccggccctgatcgaaatggcttgcctgagaatacggctgccgcagggatgtaa

SEQ ID NO: 517820 - DNA, 972 bp, Stenotrophomonas maltophilia
atgagcaccagcctgccctcccgccaccagcgcctcgtcatcctcggttccggaccggccggctggaccgccgccgtctacgccgcccgtgccaatctgaagccggtcgtcatcaccggcctgcagcagggcggccagctgatgaccaccaccgaggtggacaactggccgggtgacgcccacggcctgatgggcccggacctgatggcgcgcatgcaggcccacgccgagcgcttcgagaccgaggtcatcttcgaccacatccacaccgccgacctgtcgcagcgcccgttcaagctgatcggcgacagccacgagtacacctgcgacgcgctgatcatcgccaccggcgccaccgccaagtacctgggcatcccgaccgaagacgagttcaagggccgcggcgtgtccgcctgtgccacctgtgacggcttcttctaccgcgaccaggacgtggtcgtggtcggcggcggcaacaccgccgtggaagaggccctgtacctgtccaacatcgcccgcaaggtctacctggtccaccgccgcgacaccctgaaggcggagaagatcatgcaggacaagctgttcaggaaggtggccgaaggcaagatcgagaccgtctggcaccaccaggtggaggaagtgctgggcaacgacgccggcgtgaccggcgtgcgcgtgaagtccaccctggacggcggcacccgcgacatcgatgcccacggcttcttcgtggccatcggccaccacccgaacaccaccctgttcgacggccagctggcgatgaacaacggctacctggaaatccgttcgggcctgggcggcaacgctacccagacctcggtggaaggcgtgttcgccgccggcgacgtggccgaccagcactaccgccaggcgatcacctcggccggcttcggctgcatggccgctctggacgccgagcgctatctggacgcgcagggcaaggccagctga

SEQ ID NO: 517821 - DNA, 2361 bp, Stenotrophomonas maltophilia
gtggcgaagcaggtccctgaacgctccaagtcggacgacagcaaggcgtcacgtcgcacggccgcggcggcgacgaccgacaatccacgccgccagcgcctctggcgcgacctgggcctgatcgcgatcgcgccggccctgctctatctggcggcgagtcttttcacctattcagcgacggatccgggctggtcgcataccggcagcgtggtcgcgccggtgcacaacctcggtggtcgcgcgggcgcctggatcgccgacgtgctgctgcagttgttcggctacatcgccttcctgctgccggtggtgctcggtgcgctgtcgtggattgccatgttcggcctcaagcgcgagagcaagggcgagaacgacctggacccggcgctgcgcctggtcggcctggtcggattcctgatcgcaggcaccggcttcctgcatgtacgcctgttcagcggcgatgtctccagcgccggcggcatcctcggcaagctggttggcaattcgctcacggtgggcttcggcgcgctgggcgcgaacctgttcgtgctggtgctgctgctggcctcgatcaccctggccaccgggctgtcctggttcacggtgatggaaaagatcggccgtggcgtgatgtcgctggcaccgttgctggcgcgcaagaaggaagaagtcaccgagtggcagcagacccgggtgatgcgcgaggagcgccaggaggtgcgcaaggccgatgccgaggtgcgcgccaagcgcgagccggtgaagatcgagccgcgtccggaaccggtgatcgagaagagtgaccgggccaagcgcgacacgcagattccgatgttccgtggcgtcaacggcgacgggtcggacctgccgccgctggccctgctggacgaccccaagccgcagccggtgggctacgacaaggaaaccctggacgcgctgtcacggcagatcgagttcaagctgaaggatttccgcatcgacgcccaggtggtcggcgccaaccccgggccggtcatcacccgcttcgagatcgagcccgcgccgggcatcaaggtcagccagatcagttcgctggacaaggacatcgcgcgcggcctgtcggtgaagtcggtgcgcgtggtcgacgtgattccgggcaagtcggtgatcggcctggaaatccccaacgtcacccgcgagatgatctacctgtccgagctgttgcgctcgaaggaatacgacaagtcggccagcgtgctgaccctggcgctgggcaaggacattgccgggcgctcgaccgtggccgatctggcgcgcatgccgcacctgctggtggccggtaccaccggttcgggcaagtcggtggcggtcaacgcgatggtgctgagcctgctgttcaaggcctcgccgaaagacctgcggatgctgatgatcgacccgaagatgctcgaactgagcgtctaccagggcattccgcacctgctggcaccggtggtcaccgacatgaaggaggccgccaacggcctgcgctggtgcgtggccgagatggagcgccgctacaagctgatgagcgcggtgggcgtgcgcaacctggccggcttcaacaagaaggtgaaggaagcgcaggatgccggccagccgctgatggacccgctgttcaagccgaacccggagctgggcgaggcgccgcgtccattggagacgctgccgttcatcgtcatcttcatcgacgaattcgccgacatgatgatgatcgtcggcaagaaagtggaagagctgatcgcgcgcctggcacagaaagcgcgtgcggcgggcatccacctgatcctggccacgcagcgcccgtcggtggacgtgatcaccggcctgatcaaggccaacatcccgacccgtatcgcgttccaggtcagctccaagatcgactcgcgcaccatcctcgaccagtccggcgcggagaccctgctgggccacggcgacatgctgtacctgccgccgggcaccgcgctgcccgagcgcgtgcatggtgcgttcgtgtccgatgacgaagtgcaccgcgtggtcgagcacctcaaggcgatgggcccggccgactatatcgacggggtgctggacgaggtgcagacgatgggcgacggcgtggtcgtcggtgccaccggcctgcccgagaccagtgcggccggcgacgagtccgacccgctgtatgacgaagcgctgcgggtggtcaccgagacccgccgcgcctcgatttccggcgtgcagcgccggctcaagatcggctacaaccgtgcagcgcgactgatcgaggccatggaagcggccggcgtggtcagcccgcccgagcacaacggcgaccgcacggtgctggcaccgccgccgccgaagtaa

SEQ ID NO: 517822 - DNA, 1944 bp, Stenotrophomonas maltophilia
atgcttcaccccgtaccaagcgcgctggcgctggcgctggcagccttcctggctgccggcccggcactggcagaatccgccacctccgcgcccgccacggcgccgccttccaccagcggcgataccgaagccagcaataatttcagcattgtccgttaccgcgccgactaccaggtgcggccggatgcgggcaatgtgcagaccgaaacctacgaagtcctgctcaagaccaaggcctcggtcgagcagttcagccaggtgcggctgagctacagcgagaagatggaaaccctggaggtgcttggcgcctacaccatcaccgccgacggccagcggcgcgacgtgccggccgatcgcatctacacccaggagagctactccagcgcctcggcggcgatgtatgccgaccgcaaggtgcgggtgatcgtgttcccgaacctggccccgggcacgcgcctgtactaccaggtgcgccgcacccaggccacgccgtacttcccgggctatttcggcctgtgggagaccttcaacgtcttcaccgagtacgaagacgccgaggtcaccctgactgcgccggccagcctgccgatgttcatcgacagccgcggcgtgcagggcagcgatcgcccgacggtgaagaacggccaggcgcagtggcgctggcgctaccagcggcgcgaagccatgccggcacagaactggtcggcggcgggctgggagttcggcccgaacatcatggccagcacgtatcgtgactggtcgcagatgggacgcgcctaccagctcaaggccggcccggcggccgacgtgaccccggcgctgcaggcgctggctgatgaaatcaccgctggcatcagcgaccggcgcgagcaggccgatgcgctgtaccgctgggtggcgcagaacatccgctatgtggcggtgtacctgggcaatggcggcctggagccgaacagcgcgcagagcatcctcgacaaccactacggtgactgcaaggaccatgtgacgatcctggaggcgctgctggcggccaagggcatcgccagctcgccggtgctgatcggtgccggcggcggccccacgctgccgaagattccggtgctgggccgcttcaaccacgccatcacctacatccccgagttcgatctgtatctggattcgaccaccgcgtgggcgcgcttcgggcagctgccggaaggcgacctcggcgcaccggtgatgcgtacccgcgacgcctcgttggcgcgcaccccggccaacacgccgcagcgcaacgccacctcgatggaggtgcgtttcaccttcgacgccaacggcaacctgcgcggcgagaccattccgaagctgggcgagaacgccgagatcggcatgcgcgcccagttctcccagctcaacgcgcagaaccgtgcgcgcgccgaggagcagatcatggccgcgtccggtttcgacgggagagggcagctgcagatccagggcgtgccggtcgacctgacccggccgtttggctatcgcatggcgttccaggccgaggactacgccgacttcagcgtggccggcggcatggccgtgccggatccgccgggtggcgaatcggtgcgcggcctgtacgccaccgcctcggcgccggccaacgagacgccgttctactgcaatgccagcctgcgcgaagagacctatcgcctgcagttcccggccaatgcaccgatcatcgccatcccggccagccagcgtttcagcaacgccgccggtgagtatcgggtggactggagtcgcgagggccaggacgtgatcgtgcaccaccgcttgcagcagaacgcggtgcgtgggccggaggcgctgtgccagccgcaggactacaccgcattccgcgcgttgtatcgcgaagtgcggcgtggcttccgtggccaggtgctgtacggcaagctgccgggctcgggcggctga

SEQ ID NO: 517823 - DNA, 639 bp, Stenotrophomonas maltophilia
atgaacttccgcttccgtcgtttccttgccaccaccaccctggccgtggcctgcgccgccgccggcagcgcctgggcaggcgcccgcgatgacctgaagaccttcaccagtggcctgaagggcctggatggccagttcagccagcaggtgttcgacagccgcggcaaggtgaaggaatcgaccagtggccgcgtggccctgtcggcgccgcgcctgttccgctgggaatacgtgcgcccgcacgagcagttgatcgtggccgacggcaagaaggtctggatgtacgaaccggacctggagcaggccaccgtgcgtgagcagggcaaggaagagcagaacagcccgctgaccgcgctgatcaacccggcactgctggaacagcagtacgacgtcagtgaagaggctgcgcagcgcgacggcctgcagtggctgtcgctgtcgccgaagcgcgagaccgaagccagcttccagtacgccgcgctgggcttcaatgcccagggcctggccaagatggaaatcaccgatgcggttggccagcgcaccgtgatcagcttcagcggctggaagcgcaacccgggctttgccgccggtaccttcagcttcactccgccgaagggcaccgacgtcatcggtaattga

SEQ ID NO: 517824 - DNA, 1278 bp, Stenotrophomonas maltophilia
atgcgtccgcgcactctcgacgaaatggttgggcagaagcgcctgctggcgccggacagcgcgctgcgtcgcgcggtcgaatccggtcgcgtgcattcaatgatcctgtgggggccgccaggctgtggcaagaccacgctggcgctgttgctggccgaatactccgacgcagaattccgtgccatctccgccgtcctctccggcctgccggaggtgcgccaggtgttggccgaggccgcgcagcgtttcgccgaaggccggcgcaccgtgctgttcgtggatgaggtgcatcgcttcaacaaggcgcagcaggacgccttcctgccgcacatcgagcgcggcacgattctgttcgtcggtgccaccaccgagaatccgtcgttcgagttgaattccgcattgctgtcgcgttgccgcgtgcatgtgctggaaggcgtttcgcccaccgacatcgtcgaggcgctggaacgtgcgctgggtgatcgcgagcgcggcctgggcgaagagggtatcgaggtcgctcccgagctgctgctggaaattgcgaccgccgccgatggcgacgtgcgccgtgcgctgaccctgttggaaatcgccgccgaactggcgggcggcgagggcggtcgcatcacgccgcagaccctggcccaggtgctggccgatcgcacccgtcgcttcgacaagggcggcgagcagttctacgaccagatctcggcgctgcacaagtcggtacgcagctccaatccggatgccgcgctgtactggctgacccgcatgctcgatggtggctgcgacccgtcctacctggcgcgccggctgacccgcatggccatcgaggatatcggcctggccgatccgcgcgcgcagagcatggcgctggaagcctgggacatctacgagcggctgggcagcccggaaggcgagctggcgttcgcccagctggtgctctacctggccagcaccgccaagtcgaacgccggctatgccgccttcaaccaggccaaggccgacgtgcgcgagagtggtaccgaagaagtgccgctgcacctgcgcaatgcaccgaccaagctgatgaaggagctcggctacggcgccgagtaccagtacgaccatgacgccgagggtggcatcgcgctggaccagacgggtttcccggatgcgatgggcgaacgggtgtactacaacccggtgccgcgtggcctggaaatcaagctgaaggaaaagctggaccggctgcgtgccgagcgcgaagcggcgagggcggcaaagggtcgctga

SEQ ID NO: 517825 - DNA, 363 bp, Stenotrophomonas maltophilia
atgattctgccgttgaagcgctacgcccagttcgaggggcgtgccaaccgtcgtgagtactggatgttccagctgttcatgctgatcgtctccgccgtcctgatggtgccgctcgttgccgggctggtgatgcagtccgacgtcctgggcatcgcgtcgatcatcctgtttgtcgtgttctggctggccacgttcgtgccggtcatcgccgtcaccgtgcgccgcctgcacgactgcaaccagtcgggctggatgtacctgctggccttcgttccgttcggcggcctggtgatcttcgtattcgcgctgctgccgggcacgccgcaggaaaatgcttatggtccggtgccttcggggccgtga

SEQ ID NO: 517826 - DNA, 375 bp, Stenotrophomonas maltophilia
ttgaagcacaccaccctgatcgccctctccctcggcctgcttgcgccgctggccgcccatgccgcacaggacctgccaacgctctaccaggcctttgaagaagccggcaattcgtcactgggcatggaccaactcaaccagacggtgacattcactgccgtagccctgagcgtttccagcaacctggcgggcgagccgctgatcgaggccggcgacgaccagggcaatgtcctggcccggctgaccagcgacgacgaacagcaggcggccaagctgggcgcactggaagaaggcgcgacgttcaccgccagctgcacgctgcagttcagttccggcacggactacctgtccttcggcgactgcaccatcaagtaa

SEQ ID NO: 517827 - DNA, 1029 bp, Stenotrophomonas maltophilia
atgaagcactttgttccgccttcgcgccgtggtccgctggcccgcggcttggccgccttgatgatgggtctgctcctggccaccccatatgcccatgcacagcagcgcaacccgctgcagaaaatcggccacaccgtactcgacgagccggcggccagctatcgcttcgagcatttcgtggtggacagtcccgaccagcaacgccgctggcgggtgaacctggcgattccggccaaggccggcaagacgccatccccggtgctctacgcgctggacggcaacgccgtcgccatggtcctggatcagccgttgctggccgagctggccgcgcgcaaggcgccaccggtgctggtgctgatcggctacgacaacgacctgcgcatcgattccaaggcgcgcacccgcgactacaccgcatggatcgaccgtgccgacgatgagagcggtacgacccaggcggtcggcggtggtgctgcggccttcctggatgtgatcgaacgccgcatcaagccggaagtcgagcgtcgcgcacgcatcgatacgcagcagcaagcgctgtggggccactcgctgggtggattgttcgtgctcaatgcgctgtacacgcgtccggccgccttccagtcctatctggccgccagcccgtcgctgtggtggagccagggtgcggcgctgggggatccggaacaacagttcgtgcagaacgtgcacggccaaccggcaaggctctggctgatgctgggcggtgccgagcgtgtcggtgatcgcggcaagcgcgacatgaacaatccgcgcgtggtcgcgcacctgcgccgcatcggtggcgccaccccggatgcggcgatgcagctgtccgagcgcttgggcaaggtgccgggcctgagcgtgcagtaccgcgagttccccggccttggccacggcccgatgctgccggcgtccttccatgcggcgctgcatgagctgtacggcgtgaccgatcgcagcgccggcgatggcgcgcccaatggcggtgacaacgccgccgaatga

SEQ ID NO: 517828 - DNA, 1377 bp, Stenotrophomonas maltophilia
atgtcgttccgtccgtctctccgtcttacctctctcgctgccggcctgctgctggcagtgaccgccaccgcgcagccggtgttcgaccagccggccaacgccaccttcaagggtgaggtcgtctcacgcggtgagaacgtggttcccggcagcaccgccgacgtggtcggccgtggtttcgtgccgggccagaaggtcagcctgctgcgtggcgacagcgtgctcaacgcacagccggtggtggtcgatgccgatggcaacttcaagacccagctgagcattccggccgacgcggtgccgggcacccacccggtggtggtgcgcgccagccagccggctgcggccacggtgctgaagctgcgcgtgtcgccgcagttgccgctgtccggccaggcgcagttcgccacccggtccagcaagctggtgccgggcctgtaccagtccgcctacagcgccgccagcaacgcagtgttcgtgacctcggcggtgggtcgcccgccggtgacccagtcgcagctgctgaagctggacccgacgtcgctgaaggtgaccagggcgatcaccccggcgcaggtgccgggcagcaccaatggtgcggtgtacgcggtctacggcgtgggcgtggatgacaccaacggcaatgtctgggtgaccaacacccgccagaactcgatcgcggtctaccggcagaaggacctgtcgctggtccaccagttcccggccgacactgtgccgcacgcgcgcgacgtggtggtcgatggcacccgcggcaaggtgttcgcctcggccacgggcgaggaccacctgtcggtgttcgacgccaggaccttcaaggagctgccggcagtgacgctggaatccggcgtggacgacggcacgttcaccccgatgagcctggtgctggacgagaagggcggcaagctgttcaccgtcagcatcggcaccccggaagcggcggtgatcgatgtggccagcggcaaggtcgagaaggtcatcgatctgggtaattcgatcagtgcctcgggcgtggccttcgatgcggcacgcaaccgcctgtacgtcgcctcgcagggcaccgacaacctgctgatcgtcgacgtggctgccggcaaggtgctgcatgacgtgccggtcggcgccggtgcgctgaacgtcgccttcgatgatgcctccggcctggcctatgtcagcaaccgtggcgctggcacggtcaccgtggtgaatggtgacggcaaggtggtcgccaatcttgatggcggcacgctgccgaaccacgtccgcgccgatggcaagggcaacgtgttcgcggtgaacaagtcgcgcggcgctgaggacccgaagggtgaccgcatcacccgcatcaccccgaagcagtaa

SEQ ID NO: 517829 - DNA, 1047 bp, Stenotrophomonas maltophilia
atgaacatcgcgtcccgtctgcgcctgtgtgcgcttccgttggctgtttcgctggtactggccgcctgtggcggcgcgtcgacaccgcctgatggccagaaggccgccgagccgcccgccgcaccggccgctgccgaaaccgcgttgccggcaggctggcagcgcgtggccggtgccgagctgccggccgtgcatgaccagaaggcgatgctgccggccaaggtgcattccgatgacggcgccgatatcgaggtgaccgataccagccggatcattgccggtggcgacgacgtcatcgcggtgatcgaagcactggggctgggcacgcaggtattcgccgcgccgaccaacaccaccacccaggccggcctggccgcgccgcaccagttcctgttcaaccgcaacaccggcgtggagggcgtgctgagcctgcagggctcgctgttcctcggcaacagcctgcgccgccacaccgagctggccaaaaagctgcgcgaagtcggtgagccggcggtggtcatcgatgatctgcagccggccccggacaaggtgcgcaaggtcgccgccgcactagggctggccgaagcggggcaaacattggccacgcaggtgcagcgccagctcgacgaggctgcagcgattggcaagggcctgggccatgcgccacgactgatccacgtatcggccaccggcgctggcggctcgcccactgttgccggtgccgacagcgcgtcagcgcagctgatcgcgctggccggcggcatcaacatcggcaccgaggccggggtgaagaactactcgcagctgagcaacgagggggtggtcgccgcggcaccggaggtgatcctggtgaccgagcatgacctgcggctgttcggcggtgccgaaggcctgtggaaggcgtacccgacgctgaagcagacgccggccgggcagtccaatcgggtctgggtgatgccggatgtgcagctgaagtacaccagcgtgggttctggtgcgggcgcgctggcgctggccaaggccctggcagccttgccgaaggcatga

SEQ ID NO: 517830 - DNA, 999 bp, Stenotrophomonas maltophilia
atggtggcgttgctggcgctgctgggggcagtgctggcgtcgttcgccgtgggtccgttgcggttgccgccgctggaggtgatgcaggcgcttgcggtgaagctgggcctgcttgacccaggggcagtcagcagccgtgatctggccgtggtctggcagctgcgcattccgcgcgccctgttgggcgcgatggtcggtgcgtcgctggcgatggccggtgccagcctgcagggcctgtttggcaatccgctggccgaccccggcatcgtcggtgtcagccagggtgctgcgctgggtgcggtggctgccattgttctcggcgctgccggtgcggccggctggctggtgccggtggcagccttcgtcggcggcgcgctggcgatcggcctgacctatgcgctggcccggcccggcaaaggcagtgggaatgccacgctgctgctggtcggcatcgcgatggccgcgttctgctcggcgctgattggtttccttacttacatcgccagcgaaagcgagctgcagtcgctggtgttctggcagatgggctcgctggcgcgcgccaactgggccgacgtggccgcggtggtgccgctgtttgcgctcggcgtgtttgcgctgcagcgactggccacgccgctggacatgctggcgctgggtgagcgccaggcgcagcacctggggctggacgtgacccgtacgcggcgtcgcctggtcgcgttcagtgcgctgctggtgggcgcagcggtggcgttcgcgggctcgatcagcttcgtcggcctggtggtgccgcacgtggcgcgactgctggtcggcccgggtcatcgctggctgctgccgttgtccgggctgctcggtgcgctgctgatcgtggtggccgacaccgccgcacgcacgctcgatccacctgcggagattccgctgggcctgttctcggccgcgctgggtgctccgttcttcctctggctggtgctgcagcagcgccgcaaggcggcgccatga

SEQ ID NO: 517831 - DNA, 762 bp, Stenotrophomonas maltophilia
atgagcgtgctgctgaaactgcaccaggtggtggtgcgccgccagcagcgcgagatcctgcatggcatctcgctggcgttcgaaccgggcacggtgaccgcgctggttggcccgaacggcgcgggcaagtctacgttgctggcggtggcggccggtgacctgcgcgccgatgcgggcgaggtgagcctgttggacaaaccgctggccagctacaaggccgggccgctggcacgcgagcgctcggtgatgccgcaggaacatggcgtgcgcttcgccttcagcgtggaagaagtggtggcgatgggacggttgccgcatccgccggatccgcgtgtggacgatgcacgggtggaagctgccatcgatgccgccgaactgcaggcgctacgcctgcgcgaagtgcagcagctgtccggtggcgagtccgcccggaccacgttcgcgcgcgtgctggcgcaggacacgccgctgctgttgcttgatgaaccgaccgcggcgctggatctgcgccaccaggagcgtacgttgcgcagtgtgcgtgcctgtgccgaagccggcgcgtgcgtgatcgtggtgctgcacgatctgaacctggccgccggctatgccgaccgcatcgtgttgctggaacagggcagggtggccgccgatggcacgccgctgcaggtgctcaccgaagacaacctgcagcgggtctatcagcaggatgtggtggtgctggagcatccgcggcgcggggtgccgttggtggtggtgacgtag

SEQ ID NO: 517832 - DNA, 750 bp, Stenotrophomonas maltophilia
atgatctgtagcatttcgcgcggcacgctgctggccgtgttggttggcttcgcaggcgctgcgactgcggcttccacctctccggtttcgctgaccgatgcggcggagaatgcctcgctgatcgagatacggcattccgctggcgcgggttctcctgttgcgtccatccggacgcagtacttcgccagcgaggaaatgtccgtgagttgggatgaccagcaggtgctggtgctttgcaaggaggcggcatacctgcagattccccctgccaagctcaaggccggtgcgttgagcaccgagcagcggcagatgatcgtctaccaggcgctgatgtccggcctgggtgctgtcgcgggcgtggtcgggccggcgggcgagatggtggctgtggcggatgacggaagcgagacccgcagcattggcgaaagccattgggcgtacggtatcgagcgctacgacgtcaccacccagcgcatgccgggcggcgcgctgcgtgtgcattcccgcaagaccgagaccgtgaacacgacgcccccggcgagcccggacgacacgttcagcaccgaggatgaccaggcggcacgcctgtccgaactggcgccggtggggagctggaccgaggtgctgatccatggtggcccgcggctgccgcacattgacccggcgacgtcgctgaaggggtggatttcgatgggggatgaccaggcggcgaccgtggccgaggcgcgcacgctgcacggctgcaagtaa

SEQ ID NO: 517833 - DNA, 2037 bp, Stenotrophomonas maltophilia
atgaacacccagaccctttcccgtcgtcgcaaccttggcatcattgcccacatcgacgccggcaagaccacgctgaccgaacgcctgctgtggaaaagcggcgagatccaccgcgtcggtgaagtgcacgacggcaacgcgaccaccgatttctcggcgatcgaacgcgaacgcggcatcaccatcggcgctgccgccgtgcaggcgcagtgggcgccgcgcgacctgccgccgcatcggctgaccctgatcgacacccctggccacatcgacttcgccatcgaggtcgagcgttcactgcgcgtgctcgacggcgccgtggccgtgttctcggccgtggatggcgtgcagccgcagtccgaaaccgtgtggcgccaggcgcgtcgccaccgcgtgccgctgatcgctttcgtcaacaagatggaccgcgtcggcgcttcgttcgagcgcgtactggagcagctgcgggacaagctgcgtgcgcggccgtgggcgctgggcgtgccgttgggcagcgaaagtggcttcaacggctgggtcgatctggtcgatgagcgcgtgctgcagtggcaggatggtgccgcaaccacggtgaccccgtgggagcaagcgacgcgggcccagtggcaagcccagcgcgatgcgctggtcgaggccgtggccgatcacgatgagcaactggccgatgcctggctggaaggtcgcgtgatcgatgccgggcagctgcgcgcggcgatccgccgggcgacgctggcgggtgcgggcgtgcccgtgctggccggtgctgcgttcaaggacaagggtatcgagacgctgctggacgccgtggtccattacctgccgtcgccgctggatcgccctgccgtcagcgccgaaagcgatgagggcgaggtcgtgctgccgccggacccggacggtccgctggccggcctgctgttcaagatcacccaccagcagcacggcgcgttgagcttcgtgcggctttactcgggcaccttgaaggtgggcgatgcggtggccagttcgcagcatccgcaggggcggcgtgtcagtcgcctggtgcgggtgcaggccgaccagacccacgacatcgaacaggccgtggccggtgacatcgttgcagtgctgggctggaaggatgcggtcagtggtgaaacgctgagcggtcgtgcgcagccgttgcgcctggagaacatccaggcacaggcaccggtgctggcgtggcggttagagccggcgcgtgcggccgacctgatccggatggcacagggtttggccagcctggcccaggaagatccctcgttccgcgtcgaaaccgatcgcgacacggcggagaccctggtctggggcatgggcgaactgcacctggaggtgatggtcgagcgcctgcgcagcgaatggaaggtcgacgtaggcgtaggtgcgccgcgcgtggcctaccaggagacgccgatgcgtgcgatgaccggcgtcgtcgggcggctggtcaagcagaccggcggccagggccagttcgcgcacgtggtgctggatgtatcgccgcgcgaggacgaccaggtcgtattcaacgaccgcatcgtcggtggcgtggtgccgcgcagcttcatcgcggcggtggagaaaggtgtgcgtgctgcgctgtcggaaggcccccagggccatccggtggtcggcatcgaggtcagtcttgtcgatggccagacccatgccaaggactcctcggagatggcgttccatcgcgcaggcgccgaggcgatcaaggcggcgctggccgaaggcggcacgcagctgctggagccggtgatggcggtgacggtgcattcgccgtcagcgtcggtgggtgatgtggtcggcgacctcaaccgccgccatggtcgcattgcccgcatcgacgatcaggatggtcgcgccgaggtcagtggcttcgcaccgctggcgcagctggtgggctataccacctcgctgcgttcgctcagccaggggcgggccagcagcgaggcgcacctgcatggctacgagccggtgcgcgctgcatga

SEQ ID NO: 517834 - DNA, 273 bp, Stenotrophomonas maltophilia
atgcgtgatgacaaagaccccggaaccctggagctgaccctgccgcgcaagcgcggtcgtccgcccaagttcgggtatgcgatgagcgatgcgcagcgggccgcacgctatcgtgcgcgccgggcagggcaggccaaccacgccgatgtgcgctcctgcagcgacatggtgctgctggacaagatccgtgcagcggtgagcgcgcgcgacaccgaactggccgggttcctggtccacgtgctctggcagcgctaccccctgcagctgaagtag

SEQ ID NO: 517835 - DNA, 756 bp, Stenotrophomonas maltophilia
atgaccaccaccagcgacaccaccaccgaagcggcgccgagcggcgctcccctgttctatacccgtccggtgccgctgcaggccgatgtgcacgccgatctgcgcatcctgccgggcaagctcgagttcgccgccggcaacaacgccattccgctggtgctgggcgagttctcgctggcgctgcatcatttcccgatcctgttcgccggccccggtgcggttccgatggctgccgtcggcgtgtccgaccagaacctgttcatcaaggacggcctgtgggaagacgaggcctatattccggcctacctgcgccgccaccccttcatcttcatcgacaccggcgcggagaatgacttcctgctgggcatcgacgaagaaagcccgcgcgtggtcaagggcggcgaggaaggccagccgctgttcgttgacggcaaggccaccgaaatggtgcagcaggcgctggagttctgcggccagtacacccgcgagcacgaacagaccttggccttctccaaggccctgaccgacaacggcctgctggtcgagcgcaacgccaccgtgcgtaccccggatggccgcgagttcaacctcaatggcttcctggtggtggacgtcgagaagttcgttgcgctgccggaagccaccgtggtcgagtggcaccgcagcggctggctggcactgatccaccagcacctgatgtcgctgggtcgcttcagtgacctgacccgtcgccaggtcgagcgcctggccgcctga

SEQ ID NO: 517836 - DNA, 2328 bp, Stenotrophomonas maltophilia
gtgaggcgccagccgccgttgcgccgccgcttcctgtccacggggctgctggcgctccttctcctgccggctgcctcggccgaagatatccgctcgccacgctggctgccgggcagcactgtacgggtcgccacgactccctccctgcgccccctgcccgcggccctggccgatccgtcatcaccgccaacgctcgcccatggctatgccaacctggtggcgcggcacgcccaattccgtttcctggaacacccctacccgacaaccgccgcatcaatcctcgctgcatgccatcacgaggctgacctggtcatggtgtttggcggcgcaaggcaccaggcgctgccctgccccggccttgccgcgtccaccccgttccgtggcggcgccaccctgttggccggacgcgccggcgagtggctgccacgggagatgcgcgaactcgacggccgggtcatcgccgtcgttgaaggcggaccctacgccagctggctgcacgcgcatcacccgcaggtccggctgcggcagctgccagaccggcatgcagcactggcggcagtcgaaaccggcctggcggacgtggcgattggcctggagctcacgctgcgccccctggttcgacgccatttcaatggcagcctgcgcctgcagccgttcgatagcggcttctccaccgacctttacctgctggttcgccgggaagaccagcaactgcttgggcgcatcgaacaggcattgcgggagatcactctggaagagcacgcaggcctgctccacttgtgggcaggccagaccctgcctgccgcggccgggaatgcactggactggatgcaggcgtcgcccccgcgcgggtggctgctgctggccccactgctgattgccctgccgctgctgtggctcgcaatgcgccacctgcgggcgcgcggtgaccgaagcagcgcgcatgccatcggcgtgatcagccacgagatgcgcaactcggcgcaggccgtgctgacctcgatcgagctgctggggcaatcgacattgcccaagggcgagcgtgacctgctcgccgctgccagcagcgccagccaatccctgcgcagcctgttgaatcgcgcactggatttttcgcgccttgcgagcggcgctttcaagccgcatgcgcaaccctgcgatgcaacccagctgtgccggcaggctctggaggcgatccggccacaggcccagcggaaaggcctgcagctgcatctcgatgcccagggcgcatccccgtcgaacatcctggtggacgccgatgcgctacgccagattgccagcaatctattggcgaacgcagtgaagttcagcgattccggccgcatcgagctgcgcctgcaactgatgccggcggcgcgtcctcgggcgctgctgctggaggtgatcgacagcggcatcggcatcgcgccggcgcaggtagccaccctgttccagcctttccagcaaggcagcagcggacagcggcgtggcggaagtgggctggggctttccatcgcgcgcgagctggcccgcgcaatgggcggcgacctcaccgtgcacagcgtgctgggccgtggcagtcgcttcatcctgcgcctgccggtgtgcccggctggcaccggcgtggatgcccaggacatgcccgtgggcgatacgccactggccggactgcacctgctgctggtcgaggaccacgagctcaatcgccacgtgatcgccgaacagctgcggcgctggggcgcagaggtgtgcgccgtgaaagatgcggccagtgccctggccgaacaggcacgacagccccgctccgttgctctgatcgacattgggttgcctggcgccgatggtcacgtgctggcgcgcgagctacgcgggtctgccgggcgcaccgttcgcctgatcgcattgtctgcccgcaccggacggcgtcatcgcgcacgctgccaccgctcgggcttcgacgcggtgctggccaagccgctgcgcgccgcccagctgctgcctgcgctcgacattgcgcgaccagagggcctgggcgcagccgcgcagacgattgacatggacgcggcctacatcgccgacatccacgatgagctcggcaacatggagcgggttattgatcgagcggatgcatcggcactgggccatcacgcgcaccgattgcagggcacgctgcagatgctgggccaatgcgagcatgcggccatcgcggcggagctggtcgacctggcgcatgacgccgcgccggactgggccgatgcgcggcgcctgctggacgtgctgaaggccggacagggctcccgcccagcgggaaccctgccaatgccttga

SEQ ID NO: 517837 - DNA, 651 bp, Stenotrophomonas maltophilia
atgggcgccgaccacctcccgcgcatgaatggatttcctgcaccgcgtcggcttcgcctggcgctcctggacgatcacgaagtcgtccgtcgcggcaccgccctacacctgtcaggcgatctccgcttcgacatcgtcgccagccacggttgcagcaacgaactgctctgcagcctgcaacgcacaccggtagatgtggccatcatcgatctcacgcttgcccgtgacgacctgggtagcctcgagctggttgcgctgctgcgccgggaatttccgcgcacgcaattgctggccttcgccacgctctgccccaccaccaacctcaacagcctgatcgatgccggactccacggattcgtcagcaaggccgaaccgcttgctgcattgtccgacgccatcgtacgtgtttcccagggcctgacccgggttccaccggacgtcaggctggccggcgatcgcggcgagctcagccgcaacgagcgcgaagtactcggcctgctgttggaaggcttgacggtctccgagatcgcattgcggcggcaccgcagcatcaagactgtcagcacgcagaaggtggctgtgctgcgcaagctgggattgcgcagcgacgtggaaatctacgcactgcgcgaacgactggagacaccgtga

SEQ ID NO: 517838 - DNA, 3474 bp, Stenotrophomonas maltophilia
ttgaaggaagaacgacgcaacacgttgcaggccagtcatcgcgcgatcctcagcttctggcacagggttgagttcttcataccctacgatctgcagggccaggtccttgagtcgaaggacgcggactggagcgtacggcagctgtccagggatcagctcgagcgattggacccgaaggatctgtggtccccacccctgccattcggtcgcaggctgagcggattcgatgtctacctcggcatattcgacaaagcccagctggccgatatcacccagcgggtactggctgagacgccaagcggagacgagtcgctggaacaggacgaacgggccgaactggaaggcctgacctgcgcggccagcctgcgggcaagcgccgagggcgtgctgcagctgggtgaaatctcggtatcgaccgttccgtgggcactgggcacgatctccaggcgtggcttgcagggcctggacttcgacgccttccaggcaagccttgaagcactcaagcgcgacgtagcaacgttccgcagcgccgctgccacccccgccggacagggtgagggcccaacgccctgcagccccgacgacctgttgcgcctgctcgacatcctgtgcaactggtcgggtcatgacccttccgcgggcgacgcgtccgctccgctgctggtcatccgggcgaaaagcgttgaagacaagccgaagccggaacgggcagcaaaagccacacccccagggccggacaacgagccaacggcggaagcggacgacgccgaggacgacgaggcccagcccgaagaggacgcggagatcagcatcctcaacagtttcttcgtcgaggatatcgcgcgggccatcggcgcactcgaccagggcaaggccagtgcgccgctacgcgcctatctgagcccattgcctgaaagccgacgcgaagacctttacaccccagaaggccatgcgctgattgccgaccggctgcgcccgcgccacatcaatcggggccactggcccggcgatcctgcacacacgatgagcctgatgcagcagttcgctgtgaacagcatcttcgagcaggtgcgcgattcaggcatcttctcggtcaatggcccgcccggaaccgggaagaccacgttgttgcgtgaggtcttcgctgagaacatcgtgcggcgtgcacgtgcattgtcacagtacgcgacgccagccgctgcgctcggcccagcccgcgaagtgaacttcgaaggtgagaagccgtgcagggtctcgccactgaaggccgacctgaccggcttcgagatggtggtcgcatcgtcgaacaatgccgccgtggagaatatttcgcgtgacctgccgaagagccggtcactgggcaagcccggagggtcgcgctggcgcaacagcacaggggacgtgaccttcgactacctgcggccactggcccgcaacctgctcgaatggaacggcaggggcgcctatgaacgaccggcggcagacagcgatgcctgggggttgatcagctgcgcgctgggcaggaaggccaaccgcgaggcacttgtgcgggccatcagcaggagcgccccaaaagatggcaaaaccccgaagggctacgaccgcgcccgccaccagtcgctctgggagtggcgggacaacccagcagccatgagcttccagcaggccaggcaggcgttcggcaaggccgatgcgatcgtcaatggcctggtcgaaaagctggatcggcttgcctcgctcagccgtgaaatcagcggcaacgatgaggagagcttctgccggcaaacgacttcccagcttcgcgatgcacagcgcgcgcatgaggaagctgcacagcagtgccgtgcactcgagggccagcgcagcagatccgatgaacagctcgccctgctcaaggcgcaacgcaccctgctcagggaagagaagcctggctggtgggcccgcatctttgaccggcagcgcgcgcacagccatgcggccgcaatggtgcagaacgcagatcatcagcaccgatggacccagcgcgggctcgaactcgggacgcaatgtgatacggcgcaacagcacctgggccaaaccgcgagcaccctggccgaggcatcggccgccgcgcaggcacgggcgcagcaatgggctggaatgacgcaacagctcgaacaactgaaagccaaattcggcaccgcgtcccatcccgccgacgcggccgaactggaagatcaggactggcagatcaagggagtctggaacagcgagcagctcaacgagcagcgcgccaatctcttcgtggcggcactgcagcttcaccaggcctggctgcacgaagtggtgcagaagggcggcggcttcgcccagaacgtcattgcactgtgccacctgctgagtggcaagcggctgcaggagccacgcgatgcgctggccatctggcagagcctgttcatgatcgtgccggttgtctccagcacgttcgcctcggtcgcacgccagttccgacatctggggccggactcgatcggctggctgttcatcgatgaagctggccaggccgtgccgcaggcggcagtcggtgcactgctgcgctccaggcgcgcggtcgtggtgggtgatccgctgcagatcgagccggtgttcaccgtgccggtcaagctgctgcaggcgctgggccgaaccagcgcactgcccgcaggcgtgaacgtctcgcccgacaagacctccgtacaggtactggccgacgaggccaacccgctcggtgcccgcatggagtccggcggctcgccgctctggatcggcagtccgctgcgcgtgcatcgtcgctgcgtcgaaccgatgttctccattgccaacacgattgcctacgaggggaagatgatcttctccaacccctgggaacccagtgcggcgcggccacccgccgacagcctggacatcggcagcagcgcctgggtacacgcccccggccgcaccagcgacaagcaggtcgtgccgtgccagatcgacctggtgcagcaggcgttggccgcgctctaccacagcaccggaagccttcccccggtctacatcatttcgcccttcaagcgcatcaagaatgccctgctcgagcgactgcggagccaggacgcctggcttggcccggatgccccacccggcacgcaggcgccacgcaccaccgaactgcgcacgtggtgcagggagcgcgtcggcaccgtgcacaccttccagggcaaggaggaaagcattgtctggatggtcctgggctgcgacacggacacggtgggcgcggcgcactgggcctccagcaagcccaatctgctcaacgtcgccgtcacccgtgcccagcaccgctgcttcctgatcggagacaccgcactctggggcggcctgcgccacttctcagacgcccatgccaaacagttgccccgcatcaccccggcgcagttcctgggtcgcatgtcgatcccccgcgtgcagactcgatag

SEQ ID NO: 517839 - DNA, 420 bp, Stenotrophomonas maltophilia
atgggcgactggtatgtgatcgcccacatcccctcatggccggagcgcgaagctttcgacgcggtggagagctacgcattgaagcccgacgggcgcatccagaccacgttcacctatcgcaagggcagcttcgacgccccccagaagtcgatgcaccctgtgggacgggtcgagaaggacggcaacggcgccatctggggcatgcagttcatctggccgatccaggccgagtatgtgattgcctggctgcgcgatgactacggccagaccatcgtcgcgcgcagcaagcgcgactacgtgtggtacatggcacgcacgccacaggtgtccgagagcgactaccagcaggccgtgcagcgcatcgcggccatgggttacgacaccgcaaagctgaggcgcgtgccgcagtcggtgcgctga

SEQ ID NO: 517840 - DNA, 837 bp, Stenotrophomonas maltophilia
gtgaagaaggcgctggacctgccggtctacgccgaactgatcgaacgcgaactggcctggggccgccagcaggccggcgaccgcgaagccgtggtgcacgccgtggccgaccgcctgaccatcggcgtcggcgcgctgttgagcacgctggtgccgggccgcgtgtccaccgaagtggacgccgaccaggcccacgacaccgccgccaccgtggccaaggcccgccagctcatccagatgtacgccgatgccggggtgccgcgcgagaagatcctgatcaagatcgccgcgacctgggaaggcgtggaagccgcgcgcatcctgcaggccgaaggcatcgactgcaacctgaccctgatcttcaacccgacccaggcgctggcctgcagcgaggccggcgcgttcctgatctccccgttcgtcggccgcatcctggactggtacgtggccaacggccagaccccggccagcatcgacgaagacccgggcgtgaagttcgtgcgcggcgtctatgccgaattcaagcgccgcggttcgaagacggtggtgatgggcgcctcgttccgttcgaccgcacagatcgaagcgctggccggctgcgaccgcctgaccatttcgccggacctgctggagaagctggacgccgaccacggcgcgctgccgcgcaagctggtggccggtgccgctgatggcgcggcggtgcccccgatcgatgcggcgacgttcgcagcagacctggcggccgatccgatggccaccgagaagctggcgaccggtatcgatgcgtttgccaaggatctggaagcgctgcgcgagcggatccgcgcggcactgtga

SEQ ID NO: 517841 - DNA, 918 bp, Stenotrophomonas maltophilia
ttgccgctgccaaacaggctgaaatgtttgccagaatacggggggcacatgaataaggacatcaatccccagcgctggtggatccggccacccatgccggatgagtccttgcgatcagtactaagcagagcggcggcgttctacgaaagcacgtcgatacagctgtgggcctctctcaactcggaagatccgaggccgtccggggacgttgaatcgccatcctgtctagccctgtgcagaatggcgatcgccataggcgtacccgccgccgagcttttggcccacacgcagccagacactccgtggctactggcccctcacgccaggaacgtcttttgccccatgtgctgggacgaagaccgagcccgggacgacccctgctcgatccgccgaagctggaatcgcctattccgcactgtctgcccgcaacatcgctgtcctcttcgtattgcaccggagcagtgggctagcttcactctctctcaatcattgcccgttcctcagctctccgggcaggagcaacggattctcgatctcatcgagtccttcggtcaaactttggaacagagcctgtatttcggggagccttggcccgacgactggcgaggcaaccctcaacttgcccgccagttgcttctggcaaccagtttcaacgtaagtgacgtcagagattttccgttgattaactacgttcaggtaagcagcaacttggctggtctagtccgaggcaaccgacaccagtgtgagcccaccccaaaacttcgatgggagtcctaccgcgaaattgccgatcccgcgctccgccgagcgggtctatgggtgacggcgtggacgctactgcccgagctgccagaagagctttccccaggctggctcaagttgccggcacacgtcgcggcacgaatccgctgtccgtga

SEQ ID NO: 517842 - DNA, 918 bp, Stenotrophomonas maltophilia
atgggcgagttctgtcacctgaatcccgacacgaaaaatctgctaaatctctcggccagtgaacgcgccggccgcatgctggtcgagcggttcattgcccatgagcgtctggttccgatcctcaaccacgtcgaattcctgatccgcatgccaccccagacacgagcgaatgggctggttgtctccggcaagccaggatcaggcaaaactatgcttgccctggcaatcaagaggcggtacccacccactcccgcagaagacggcaaggcctctggtcagcccgtcctgaccatcagcatgactaatgcccgggaagccaagatcctttacaacaggatccttggcggattcggggtgccggaacctagtcggtactccggtgctgatcgcgaacgcatggtgcttaagctttgccgcgcggcgaatctcaagttgttggtcgtcgacgagatacaagacatcctgacgaccactgcgcggcaacaacgggtcgctttagacacaatcaagttccttatgaatgagctatcacttccgattctgactctgggcacgtcgcaggcgccttcggcgatgcaggttgacgagcatttgaacgctcgattcaagtaccgcgagcttcctatatggaagcgagatgagtacctgacgaacttcctcgacaccctggagaaagctcttccactccgcaaccgttcctgcttgtcctcacccgtactgtcgacggagctcatcaagctgtccaatggcattcttcaaacaatcgttcaattggtgacccacgctgcggcccacgccgtagaaactggggaggaacagattacggcgaagttgcttcagcgcgcattgttcgagccgccgcttgccgctgccaaacaggctgaaatgtttgccagaatacggggggcacatgaataa

SEQ ID NO: 517843 - DNA, 1773 bp, Stenotrophomonas maltophilia
atgcgcctgcttctgaaccctggaaccgtatgcgtcgccaatggaagggtgatccaaatcgacggagcgagttcgatctcacacgtcgatgcgcgcgacatgggaacggggaagatagtatccgttcccatttcccaaatcgaagaactaccttcgagcaacggttgtcaggaggcggcggccattcatgaaaccgaatggaagcggtgtgttgcgctggccaaggatctcacccccctcaaggagcgcgcccgtgtcgatcgcgcagaactggagaaacttgccaagcgccacggcgtaagcgtcaggcaactgcagcgtgtattagctctctacaggaaagatccacgaaccagcgcgctagcacggcggcccggaggccgcccaaagggcctaagccgcttgtctccaaacgtcgatgcactgatccgccatgccatagccaaacactacatgcgtcgtgagaagccaccgaaggaatacgtcgtcctgcgggctcagtccatggccagacgcctggggctaccaccaccatctcgaaaagccgtcctgctgcgcctcaacgaagaacttggctgggcgtcagacctggcacgcgaaggcagccggaccgccaggcagaaatgggatgtccgcacgggcgggttgtccgccgtcaagcccttggatctggttcagatcgaccatactcgggccgatgtcatggtcgtgagcgatgaccgacttagcgtgctgggtcgtccttggatcacgcttgcgatcgacgtggcgacccgctgtgtccttggcatgtatatctcgatggacgccccgtcctctgtgtctgtctccctatgcatcgagcatgctgtcctgcctaagccggagaacgccaaggaccctggcatctggcccatgtatggaaaaccgagcagattcttggtcgacaacggcaaggatttccgagcctttgccttgcagcgaggctgcgatgagcatgcgatcagcctgtcatggaggccagtgaggacaccgcactacggcgcccatatcgagcgcctaaatggcacgctcatgagaatcgcgcatctcctcccaggcaccaccttcagcaacatacgggaacgcgggaactacgatagcgcggcccaggcatgcctgactttggacgaattccgggactggatgacccataaggtctgcaggttctaccaccagcgcaagcatcgagcacttggcatcgcgccaacacttgcatgggagcgggggttcacggatgaggccggaaagttctcttgcccaccgttgatcgcgcgccctttggatttccggatggacttccttccatacgagatccgcatcgtccgacgcactggcatcgaacttaaggcctcgcgctactggcacgaggacttggccccgatgctaaatgccgatgctggtgcgatggtccgttatgacccacgggatccaagcgcagtatggattcggcgtcccgatggcgtattggtcaccgcacgagcgatcggcggaagggctgccgccccgcctctccatagccgccccattgacccggctatgcaggaacagatggatgccgcgatggatgcgggcttcgatgcaaccgacagcatagaagcaaacgcacagcgggccacagggcgggctagacggggcaacgccggcgggcggcagccttcgtcgacttcgatgtcggattcggcgtcagcggctcagattccgccatcatcaccgcctagccgatcaaccatccaattggaagaatggatctga

SEQ ID NO: 517844 - DNA, 1032 bp, Stenotrophomonas maltophilia
atgaaattctacggaggcgaacgtctaaggcggctagttttgcatgctgatgcaggacgacccaaagcagcgcgcaaggcaatcgatgtgttacgagtgggcctctggttcgaagagcttcgtgcgcggatgggttgcacgaccgcctacagccttggccagctggttcaaccgcttacctacaagaaggggttccatcacaataatctctgggccaagtacgctggcggaaggcacatcccaaacgccgtaacaaggcgcgcgtgcgagcaaagcgttcccggctcggatgagctgctgactagtccggcttgggatgctcttgatgtcacccagccgctgcagaaacatggagaggccctgctgaggtgcttccgccccagtatccagagcgccatgtttgataagcgctatttggtgaaaggactttacgtgcgccgaggcgcaatcgtcgcctctttgcggacactggaagcacaggccgatctgcaatccttggcagccatggtggtgttgttacgtgacgctgatgcgcgaggtgatagagccaatgccttcatgattggccaatcgctgcaccggaccctcctcatggcgacaattggtagcccgttgaggttcatttcggtcgagctgttcgaatacttcatcaggatcatctttccgatggccgctgagaaggaattcatgatggatgtcgatcaggatatgctgtgcactcaagtcaaatggcttacgcagacggcggcgcaacttcattctgatggccgcccaggattcacattgaatggcagtactgggcaattacgccgattgtttcagccagatttcggatttgatcttatgttcggcttagggccgcgcctgaaattgattgtgccggcagaagaggccggggctcacgcatgcaaccgcgtcaagggcaacaacgcattatgcgaatggggaaggtcggtgcttggcgctggcaagtgtgaacgcatactgcccgaacatatttctctaaggatcaagcagccttccatattctga

SEQ ID NO: 517845 - DNA, 270 bp, Stenotrophomonas maltophilia
atgcgttacctggtgatactcgatccactgtccacatccagcaagtgctacaccggaaagggagtggacggaacgtggtatgggcaggcttgccttgcgtgtgtcgaactggatgcctcgcatcccaactatctgctcgctgtgagggcattcgaatacggaggcagggaacttcggcagcgcctgcatctcccgcatgaagcggttgcctttgtcgtggaatgcgaagacgaggtgtcgacgcaggttggcttccggaggctgacatag

SEQ ID NO: 517846 - DNA, 2268 bp, Stenotrophomonas maltophilia
atgatggtggcctgcggcattggcttcagcatggcggtcatggcggtgttagcgctgatcgcgttcacccatatcaatcagttccaggcacagcggatctcggagttccgccgcgcgcacaatgccgtgcagatggagctgtcccgtctggaggccggctacgcgcgcctggccagcatggccgaatatgcctgggagcatccgcctcagccgcacaacggccggcgggaagagctgcgccagcgctatctggaaggtgggcagcgcgtgatgatcgtcggcgatgccgacggccggccgcagatggcgctcggcctgcacactgatcgttgggaccctgcgcgccttgaccgctacctgcagctcagccagacgatgtcgcacgcgcgggtggcgccgggtccggccgaacacacgccgatgggctcttcctacttctttgatccaaccgccaactacctctcgctctgccatgggttgagcgaggcacagctgaaacactcgctgggtgtctctacccgtcagcaactgtttgacacgctgcgcgcatcggccgggctgatctccgccgcctccagcaacgacagccttcccatgctggccggtgtagggcgcaaatcgcatgcacgctggtcgatggaccgccatccactgaccggcgaatcttccctggtcgcctcgttctatgcccatcagaacgagacgcccgtcgcggccttcgtatcctacgagccgatccccaccatggttgccctgatgcgcgcgaacagcggtggccgtatcgccctggtgaacgacggcggcgcgccggtcgcagcgacctacaccgttaccgacagtcaggaacgcgatctggagaaactggcgggtacctggctgctgctgggtgatgcggtacgtgcccgtccgcacgacggtggcttcaccctggtcctgccgatcgagagtacatcctggttcctggtggagcacttcacctggcaggacgttctgggtggaatcatcgcgcccatgcgtgcggcgctggccattgctgcagcactgcttcttgcgttgtggacattgctgttgcgcctgcagcgacgcacctgcgtgccagcgcagaaggccgccgacgaactctgccagcgccaacagctgcagcaggtgctgatggaccggctgccacagggtgtggtgctgctggagcccgccaccggcagcatcaccttcagcaatcgctcgatgcgcaggatgtccgagcacaccagtccatccctgctctcgcgcctgcaggacgggtccatcaggcagtgtgccctcgatgccggggacgcaggtacggcagccatccctttgaatgacaacgggcgccagcggttccagttgcgtgcgtttcatctgcacacggtccccggctccccgatccttgccgttgtcgaggatgtgctgccgtggaccgagcagattgatacgtgtcggcatgcgctgaatgcggccgtcgaccggatcgaggccaagtctgcattcgtggcctccatcagccatgagatccgcacacccatgcacggcatcatggggcacttggaactactggcccgcagcacgctggagcgtgagcagcagcagcgggtggcacggctgcggcaggccaccgactcgctcatgcgggtgatcggcacagcgctggacttttcccaggccgagtacggtcagctggtggcgccgtcggtcaacttctctccggctgcgctgcttgagagggtgaccctgctgttcgcgccgctggccctcgccaaggacctcgatctggatcacgccgtcgatccccgggtcccggcagtgtgcctggccaccgaagatcacatcgagcgcatcctgcgcaatctggtcggcaacgccatcaagttcaccacctcgggccgtgtccagctcaccctcagtcatcagcgcgtggccgaccaggacgcgctgaagttcgagatcgtcgattccggcatcggcatgagcgccgaggagcgggcgcagctgttccagccattcgtacaggccaacgcgggcatctccaagcgcttcggcggctctggcctgggcttggcactgtgccgccagctctgtgaggggcagggcgcctggatagacattgaaagcacccctgcggtcggcagccggttcatcgtcacggtgccggtggacgtggtccaggggccgcgccccagtccttggccgcttgatccggccatggcgcccaaaccgagctggagcgcagacctggagagcatgctttga

SEQ ID NO: 517847 - DNA, 3444 bp, Stenotrophomonas maltophilia
atgtcttctgtgagtctgcagccgagccagaaccccaaggccttcacggcgcgcctggatggcctgcgccgcttgcgccgccgcctcatcttcggcggtggcggtctactgaccgtactggtactgcttaccgcggtggtgagcgcgctgggcagcgtcgaggacttccatgcccgtgagcggcagtcgttcctggaagcacgttcggccatcgactacttcctgtttcaacgtgaccgtgcctatgccagttcgatcaatggcaacgacctgatatgggccgaacagcggcccctgctggaagcgactggtgcaccactggccgaacggttccgcgcccagggcgatcagttgatcgttcgcgccgaggggcgcacggccgtaccgtggctggttctgggcctgccggaaaatccgctggcctcgcccgagctgcgcgcctatctcggcatgctggaagcctattcggcctacagtgcggccaccatcagctcgcttgaaaccaccggcccgggggtgatgtatgcctacgagccgcagggacggctgttggcgatcagcaacatgcacgatgaagcgcagttgctgcagacactaggggtggccactcgcaggcaggccttcgcactgctgatgcgcgaggaagaaaccgtaagggcgctgccggtgcaggccggcccgatcagcagtgcgttccgttcggggcgcctggcctcccggtacggcatcaatccgctcagcgggcaaccatcgctgatcggcatcctcacgctggccgacggaaccaccccatatttccgccgggtggtgtttgaatcggtggagaatatcaaggcgcggttggccgccagcgaacggggccggttcatcaccgtttcccgcgacggcaagttgatcttcaccagtggcggcctgtcgccgatggaggcctccgcactggcgccgtgggctaccgatacgtcctccaaggagccgctgcgccgctacgaggcaggccagttcatcgtcaccggcaacctgctcagtaccgattgggcgctgctgcacgcttatggctggggcgaaatctgggccgagcagagtgacaagctgctggtgactgcggccgcagcgctgtcgatcatcctgctgttgtgggcgttgctgctgaggatggatcgccgcgtattcgcgcccgcactggcagacgcgtcacgggtctacgaaagcgagttgctcagcaatgcgatcatcggcaccgcaccgatcgggttggcgctgattgcccgtgacagtggcgcgcccctgctggaaaacgatgccgcgcagcgcctggtcttggcatgggggcagggcgacacaggagggactgcggtgcctacgctgtacgcggagttgtccgcccatggccgcgcgcgcagcagcaacagtgcaggcgaattccagtggccgggagaaagcaacagccgggccgatcgcatgcagctgcagataggcatggcgccggcgtcgtatcgcgagcagccggtctgggtctgtgccatgcgcgatatcaccgaccaggtggaactggaggacaacctgcggcgggcgcgcgaggactccgaacgcgcgcgtgaatcggccgaagcggccacccgggccaaatcggcctttgtggccaccatgagccatgagatccgcaccccgctcaatggcgtgctggggcacctggagctgctggcccgctcgccgctggagcccagccagctcgaacgtctggcgcgtatccgcttttctgccgactcactgatgagcatcatcagcgacgtactggatttctcgaagatcgaggccggccagcttgacatcgagtctgcgccgttcccggtacgtgtgttgctggaagagaccgcgatcctgttcgcgccggcggcacagcgcaagggcgtgcgtctgtacatcgtgcaggagttcagcatcgaccaggccgtggtgggcgacgtccatcgcatccgccagatcctcaacaacctggtgggcaatgcggtcaagttcaccgaatcgggcagggtgatgctgcgcgccgccctgcacgccacagacgagggctcgtcgctactgtgcctggacgtcatcgactcgggcatcggcatgtcgccacagcagctcgcgcaggtgttcgagcctttccagcaggccgatgccagcgtgtcgcggcgctacggcggcagtggcctgggcctggcgctgtgccagcagttggccacggcactgggcggcagcatcgaggcggagagctcgcagggcatcggcagccgtttcagcctgtgcctgccggtggaccgcctgccggtaccggtacgggcatcgccactggccgggcaagctgttgcgctgctgtcgggcagcccggaatggcgcgccgagtacgtacgggtgctggaacactggggcgcatcggtcaacgcgatggacgtgccgcaggaggctaccccaggccacgcgggcagcccgttgctgatcgtcggcgagcagcgcgcctggaccgatgcggaagaggcgttggccaaggcttcgcatgcacgggtgatccgtgccgaaccgaacggcccgctgcacccggagcgacgcagcgacggcgtgaccgtggtcagcgctttcgccagcgacgcgctgctggcggctctgtgcccggatcagtccggcgctgccccgcaattgtccgccgtggcccccgaagccccgcctgcacagcacgggaaacagcggcagcgggtgctgctggtcgaggacaacgaggtcaaccgcgagctgttgcagcagcagttggaggaactgagccttgacgtggacgccgtggagaacggccagcaggccctggacgccttcaatccgtcaatccatgccgccgtgctgaccgacatcaacatgccggtcatggacggctacgctctggccaccgagctgcgcaacgccggtcaccggctgcctgtcatcgccatcaccgccaccgccctggccagcgagcgcgagcgctgccttgccgcgggcatagatgagctcctgctcaagccactgaatctggagcgcctgcaggtggccatgtcggcgctgatggaacgcagcaaggtgcagggatctcagcccaaacccgagccaccgaccgctgctgcgccgacacccaggcgcgaattgtcgtcacgcatcaagcgggttttcgtggacagtgggcgcaacgatctggccaacatccagcaggctctttcggctggcgattccgcccagctgctcgaccgagtgcatggcctgaaaggcgcactgatgatgatcggcgaacgtgccttgggggagcggtgtggcacggctgaagagcagttacgtaacggccggatgccccccagcgatgaactggatatgctgatgaccgatctgcaggcctgcattgacgcctatgcgagcgaacttgcgcaggaagggccatga

SEQ ID NO: 517848 - DNA, 657 bp, Stenotrophomonas maltophilia
atgacccagctgagcattcgtgttgtcattgctgatgaccatccggtgatccggctgggcctgcagaacgcactggaagacgagcccgttcttcgatgcgtgggcgtggccggcaacgccggtgagctgcgcgacctgctggccacccagccctgtgatgtactggtgacggactatgcgatgcccgacgccgaccaccacgacggccaggagatgcttgccgacctgcgcgccagctacccggacatgcgcatcgtggtggtgaccggtctggaccagctcgctctgctcgaggctctgcgcgtggtgggcatccaggcggtcgtcagcaaggctgatgaccttcgccacgtaactgcggcggtgattgctgtttatgcaggccgtccttatgcatcgccagccattgttgcgttgcaggagcagcggcgcccccccgcgcgcaagcgggccctgtcggcccgcgaggacgaggtgatccagctgtatctgcaagggctcaccatcgccgagattggcgcgcgcctggggctgaagaaacagacggtcagtacgcagaaagtcaacgcactgcgtaaactgggcgtggccaacgatgccgagctgttcacctacgccagtgaactggggctgcagcgggacactgcggcggactga

SEQ ID NO: 517849 - DNA, 678 bp, Stenotrophomonas maltophilia
atgacgattcgcattgcaattgctgatgaccatccggtcatcctcgccggcgtcatggaggtactcatggcagagtccaccatcgaaatcgtagggtcggcccgcgattctaccgcgctgctcgccctactggggacaaccgcagtggacgtcgtggttaccgactatgccatgcccggcgggcgctatggcgatggagcgaccctgatcagcctattgcaacgacgcttcccgcagctaccggtggtggtgctgaccgcaatggaggcgcccgaggtcctggccagcatcgccaaggccggggcgcgctgcattgttggcaagatcgatcccccagaggcgctcgtacaggcgattcaatcggcaaaggaagggcaggtgttccattccagcttcatccgtgggcggctgggggcgctgccacccgccatggactcgaatctcacccggcgcgagtctgaggtgttgcggatgtttgcagaaggtatgaagctcactgagatcgccacacggctgcagcgcagccggcagaccgtaagtgctcagaagcgttcggccatgcgcaaactcggcctgcatatcagtcgagatatctaccactacgccttggcccacggctggcttaccgcatcgcaggcggcgcgggcgggtgcccagagcaaggacgacggggtctga

SEQ ID NO: 517850 - DNA, 564 bp, Stenotrophomonas maltophilia
gtgcgctgcacggggatcgcaggcagccccggcgaactgttgcaagcgctggagttggttccctgcgacgtggtcgtaaccgattacgcaatgcccaatgcagagcatgcagacgggctggagatggtggcgcagctgcgcgaacggtttccatcgctgcctgtggtggtggtcaccagcctggcacagcttgcattgctgcgggccctgacaacagcaggaatccagcacatggtcagcaaggcagacgatctgtgccacatcgccgctgccgtacgcgcagcccgtgccggccgcagctatgtttcgccctcgattgcggcattgcagtaccgcagccaggaacccggcagctcccgccggctctcgccgcgggagcgcgaagtgatagaactctatctggaaggagtgtgcatcgcgcagattgccgcccagctgggacggaagaagcagacgatcagcacccagaaggtcaatgcgatgcagaagctgggggtggccaacgatgctgagctattcactttttcccagcaagtcggcctgcgcgaaggcctgtcaccctga

SEQ ID NO: 517851 - DNA, 891 bp, Stenotrophomonas maltophilia
atggatcgcaccttggcattacaccgtcttcgacagcccttcgggatgacccttgccactgcggcgcggcttccgcagcgtgccgccctctccgttcttgcggcgatgacggcacgcttcccagatcggcatctgcttgccatgaccttgctgatcgcccggagcgcgcggcgctccttgctggctgcgggacgacacagactgccttgccatctgcaccgcgatgatgcgttgcgcttgatgcacaggcgcggcagcgtacggctgttccgtgaacttcgacgtaggcattacgcgtcgagcagtgcgctccgttggtacgcccgtgttcgcagcacggaatggatcgacccctgtgcacacctgagcaacctgcaggcatcgacgcggatgattgcgctgctgcagaccggcgaatacctgcttgccctggcctgcatgatctgccgctctcgctcgcctggacgatttcacctctttctgcccgggccaccgtcacctgcgctgaagacgctgatgcacgcattgatgcagctgggccactggattcaactgggcgattcaagtgcgcccgatgcacagttgacgatggtcaggcggatgcgggctggggtgaccgtaatcgcattcatcgacgacgctggcggccaggtgcacctccaggggcctgaagatgctccgcttgcacccacgcatccttcgctgcatgccgcctatctcgctggttcttccgtgatactggtggcgcaccgcatcgatgatggcgaaactgcgggcgtgcatgtgctgtgccataccccgccggtttgcccgactaccatgtgccgtcgattgaccttccatgccaatcgcttcatttccgctgatccggccaactgggtgcaccactag

SEQ ID NO: 517852 - DNA, 741 bp, Stenotrophomonas maltophilia
atgcgacacactcttatggctctggcgctgatgtctcttgccgccaccggtcaggccgctgcacccaagatcaatgtcggcccgatgttcgactacatgccggccagcagcagtcatttcctcaagcgtgtgcgcaatagtggcgacgccaccgcgtacgtaagagtcgaaatcacgcggattgacttcgacccgacaggcaaggtcatcgaaactccggtggatgcggctgctctggcacgcagcgagccgggagctaatggtctgatcgccagtcccagccgcatgatcattccgggcaacaacggcatgcaggccacgcgactgatccatcgcggcaatcgtgacagcgaacagtactttcgagtgcgctatgttcccgtggtgcctgagtcgggagaattctcgatgaatgagcagcaatctgatcattacaagcagaccatgaatgctggtgtcagcgtatttaccggcttcggaacggtagtgttcgttccgccaagcaatgctcgatatgacacccgggtagagggggggcaggtgagcaaccgtggcaacgccactatcgttctcgataacgtaaagctctgccaggtgtcgaagcccgaccaatgcagcaagggcaaaaagatacatctgcgccctggccagagccacgcactggttggcgacgccaatgaatacagccgtttcgatctgattgaaggtggcgcaaggcgcagtctgaattcacagcactga

SEQ ID NO: 517853 - DNA, 507 bp, Stenotrophomonas maltophilia
atgaatatcaagaagaccctgctggcagctaccgcagccctgatcatcgctccggccgtcagcttcgctgccgattcggccatcaacgtcagcgtcaaggccatcgttcccgacgcacgaggcatgtccattactaccgaaggtggctgggatgccgcgcagcaggtcctgcgttgggatgccgacgctgatggtggtgatggtgcgttcgaggccttctacggcaacattaatgtcaagagtcctgcagcgattgacgcctacctgctcgagaccccgaccatgcgcgatggtgataagttcatcggcctttcggtgaagctcggcggtacggccctgaatgtgggcgccgccagcaaggtcaacatcgccacggaggcccaggccgagatcggcaaggtggttgctgccgagatcaatgccgtcaagccggctaccggtttcgagcatggcacctatcagggcaacgtcaccatgatgtttgaaagcgcgattagctcgcgataa

SEQ ID NO: 517854 - DNA, 2505 bp, Stenotrophomonas maltophilia
atgcgtaccgtctatcgattaaatctgcttgccgttgccacgctcagtgcgctggcggcgatgccgcaagtgaaggcgtcggtcgatgctggcgtgagcaaagtaagcctggtgcagcagcgcgagcgaatgccgcaggaattccgcgagcacttgttcggcgccccactgacggtacgagtcgagttggatggcaagtacctcggcaacgccgaggtggtactgggtgagaacaacagcgtgcaactgatcggctttgtagaaagcaatgacagtgaactgccggaggccgagcgcgagcgctggtcgggcttgctggccgagccgacgtcgcttggcatgcacgacagcagcagccaaggtatggcagctgtgcactacaatcttgaaaattccctgctctcgctcatcagcagcgagggccatcgcgctactgtggatgggcgctatcttctgcaacctgaagggggtagcaccggccttgtggtgcgcaacagtctcaacttcagtggcggccagcggcaggacagcgcgttgcggtacaacgctgacctgcagggaagtgtggggcagtggacgacgctgggcggctaccagtactaccattccgctatcaacagcaacacgtccgggcattacctgagtgccctgtatgcgcagcgcgagtttcgcgatacgttcctgcgggtgggctatttcctgcccaccttcgaagggatcacccgccagccgcgtgcgccgggtaccgccaactacaccagcctgggcatcatgcttggctcctccgatgcactgctggccgacaatggcagcgtcagcgtgttccccgtctatgtcactgccagccgggaaggtgtagtggaggtttaccgtgatggcaagctgatcaacgtgcagtctgtcaagccgggtatgcagcagctggatacgcgtaaactgcccggaggcatctacgacgtcgagttacgtgtgatggcagacggggagatgcaatccagcgagtcggctgccatccacaagcccaacaactggagtgacccagcgcgccgctggcgctacagcgtgtttgccagccagcaggccggattgatggacagcggcgacgatccacaggcgggaaagctcgctgcgggagcagtagtcaactatctgctgcatccccgcgcagtcgtcggcgcaaccctgcaacgcatcggcgagcggcgcagcgccggcgtgtcgttggattggcaggcgaacgatcgcttcaacctgtacaccaatatctatgactccacctatgcaggccgcggtatggatgcgcagggcatgttccgttttggcagcggctcgatcatggcctcccatgccagaacctgggtggagcagcgaaatcgactgatgcctggtgtggatcggccctcgcgatgggaggcccgaagtggatggcaggacagcaccagcgtgtccctgtcgcagcggatcggtcatcgtgacgatctcacgctgcgcgtgggccacagcacgggcttcaatgccggcacaacctgggacgcgtcatggagtcggcggcagcagttattcgggcaagatgccagctggcgcatgtcggtctatgagcgcccgggtaacgtatttacctccaatcgtcgcgaccgcggcattgatttttccctcagcctgtcactggatagcaagaagcggaactactacggaaacctgggtagccgtagcggcactcgaggcaaccgcgatctgtatgcaagccttggtatgcagcagcaggttgaaagcgcctggctgaaaagcgtcaacgctaatgcaggattggaccgctacggcgtaagcgttgcaggcggcgcatacatcgacaggcagcagttgcagggtaacgttcagctgcagcgctccccaatcggcggacgagtcagtggcagcgcgaatctcgatagcaccttggcgttcggaggagggaaaatcgctctattgggaacttcgcaggccgtcggcaacggcgcgggcatgatcgtcgacgtacgctcggattatcccggcttgcgattgcgcgccgacgatagccacggcggcgggatggaactcaagccaggccgcaattttgtaccggttgctgcctatcgcccgggcctgctgcggttcgacttcaatggcgcttccgcaccggcaggggccattttccccgccacggtcagctatcacctcaataagggcggtgtgacgcatgccgaggtggatgtcgtgcgcacatttacggtgctggggcaggtgttggacgctgaaggcaatggcgtctcgggcgtgcatgtcatcaaccatgccggacgcagcgtaagccaggaagagggcttcttcagccttgagctgagtggtcgcgagccggtggtagagctgcgctaccttgaccagagcagctgcaaactccgcctggatgaggcccgctacccgcgcgaaggcgacatgctcatggtaggcggcctgcggtgcccggcgcaggtagcgggcaactga

SEQ ID NO: 517855 - DNA, 1227 bp, Stenotrophomonas maltophilia
atgaaaattggcgacatactcttgcggagaattgcggtgccagcgcttgcactggcgcttgcaaccaccgctccggcgtcgatggcggccgtggttgagttgaccgccaagtacgaacccaccccgggctcggatagccttgaatttgtcaataccacgcccatcacaggtaactgcagcaacgggtctcatagacccaattgcgaagcggcgcaggtatggggaatggccgttcctggcctgagggggacgaagacggtctacaccagcaatacgcgaaaccgcttctatatcaagatgccctggagttctgtccaggtcccagtgacgagcgctgatggacgaacctttaacgtcaaacttcatattgaagcagcggggtatcgccttggcgacggatccgggaacgtaattattggcagtggtcaacatcggatggctaactcctgtaccgcaatcgttaccggcaccggggctggaagcacttcaatgaagtcgctcttcattctggcaaggagatcgagcacgtcgtcaacctgctggaacacggggtttgcaaattcctttattctgccactttttgatttcgagttcgcgtatcggctcgaggtcccggcagcgggctctctacctaatggacagtatgagggtgagcatacattcacagtaggtggcgaagggagtgatttcgactttggcaacgccgtggacctcaatgacaacagcttgaccgtaaaattcaagttgaacgttgcgcaccagtaccgcattgattatcccaacactactgttgccgcatatctttcgccgatcggtgggtgggaccgttggctgaacggtggcgcggcgccgacaaggatggaaggtgaagtgttgttcggcctgacaactagcagcgagctcagtatcaagcttcaatgccagcattcaattggcgagcgttgcggcatcaagaatgttgccgaatctgcgattgttccggtggacgtggatgttacgattcccggaatgagcgaggtcggccccggaggaagggcagctaaccatttcccactggtagtggagggtacaggcactgcgccgcggttcaagccgagtggctttatggaaaatgttcgatccaagcttcgattcgtagccaatgcacctgcgatcagtgaaatggtggagactcctggatcgcaatggcaggggaatgtagtggtcgtcttcgatgcgaatccgtga

SEQ ID NO: 517856 - DNA, 522 bp, Stenotrophomonas maltophilia
atgacgatttcttcgctgaccaaaaaagccgcactgagcttggcgctggctaccgctgccatgtcttcggcccatgcctcccagcacgacatccagctctgggccaacgtcgatccgaccctggatttgcgcaaggcggatggcacgcctctgtgggataccgtgcggctgacctattcccctggcgtcggcctggaccgctggagccagaatgtccgcattcacaccaatgatcctgataacgatgtggaagtgcggctgggattcaatccgaccctgacgctgagaggtgatgcttccacgagtgtgccgctgaccgtaaagctcaacgacgagaacctcagcaccgaccccacccgctttacggccgacatgttgttcccgggtggtctcgacagcggcacctcgatcagcatgccgctgtccatcagccagaccactacgggcgaactggcttcggcaggcaactaccagggcgccgtcagcatcgtcatggtccagcgggatccgatcgttccctga

SEQ ID NO: 517857 - DNA, 2601 bp, Stenotrophomonas maltophilia
atgggccagagcgaacagatcgccgtgcgcatgttcgggcgttcggcgggactctggcccgttcacatcagccttgacagcgtgcgcgtcgaacaaccgaacgatgtcctgcgggcgctgggttttgatgccgacgcgcaggccgcgttgtcggcctcgctgggttcccgccttccgcgcaatagtcacctggcctgccgcaaggatgttgcagaggccggatgtggctatctcgcgccagtggacgatccacaccaggtccaggtgatcctggatgaggccgaaggtgtgctcgacatattcgtggatccacagtggctgcccgacatcgccagcggcgatcgtcgattccaccagatgcatccggacgcggagagtgtgttgctgcatcaacacatgctcaacgccagtggcggtagcgaagggcggaacctgacggtacagggcagcacggtgctgggcatgcccgggcgcagccacattgcagcggactggagccacagcagttacagcacgcgcaacgggcgcagccaatcgcgatttgacgttgacaacttttactaccgacacgactttggctctgccagctacatgcaagccgggcgcatggatcggcgaacactttccagcaccgacggcggcaccttcaatttcgcaatgctgcctctggaacgcgtgctgggcatgcgcgtgggtagcagccgcgcataccgggtagacgcaacggacgcggacagcaccccggttacggtgctgctggcgcgaccggcgcgggtcgacctgctggatggcgagcggctgctggaaacccagtatctgtctgcgggcgtcaatacgctcaatacgcgccagctgccgtctggcgcctatctgctgaccctgcgcatctacgaggacaatgttctcacccgtaccgagcacgccagtttcagcaagggcgcaggctggacgcagggagagcccgaatggttcatccaggccgggcgtctggatgcgcggcgcggggtgccctaccaacggaacgttggagtcggccaggtaggtgctcggctgccgctgggccgcatggccggcctgaccatgggcgccgcccaggtcaacaatgtcagtttcaatgaagcgcggctggacctgcgccaggcctggagcaggcatgccgtgcgcgccagcgtggccgaaatgcgcagcggccgtggcggtgtgcgcggcagtgaacaacaactggactatcgcaatctcgtcggcgtcaccctgctgcgccagcagcggcggggtgaggcctgtaacagcggcactgccaatcacctggagtcgcttggctgcaacgattccttcagtgcatcggcatctgtgccgtgggccggcggcgccttccagctgggctataccgaccgcaccacctaccgtccgtcgctcctgcgcgatcccgtcgccgggcaagcgtggttaccgccaaccggcggtgaggatggccatcgtcagcggacctggcaggccagcttcagccggggctggaatgcctcgggctattcgttcagcctgagtgggggaggctggcgtcagcgctcggcaggcgtcgactcggccgaccacggtgtctatgccacgctcagcatcgccagcctccgtcgtgacaatgcgggcagccgaagcagccgtctcagtgccggtatacgggcgtcgcggtccgatgtacgggaatccagcctggcactggcggaaacacggttgcaacagaccacgtacggcactcgtgagctgtcagcgagcgtgagccagcgcgatggcggtgaacgcggcgcgtctgcaggcgttcagctcaacagcgcctccagcaatctgagtggcacagtgtcgtggcagcagggtcgacatggcaaccgccatgcctatggcctgacgcagtcttccagtgtcggcgcatcgcggcacgggcttcattggggcggcgcaggggtggtggggggcaccggcgcagcgggtgtgctgctgaaagtggacaaggccgacggattgggcctgagcggaagcgcggcagatgtggacgtgtacggacaaagccgccagcgtctttcgttcggtgagcggcgattgctgccgctgatcggctatcgggagcaacgggtcgagctgagcgatgccagcaaaggaaacgccgccgtcctggtcaaggtcgccaatgctggtgccctgccacccttcttcctgccgccgggcaaggtgctgacggttccggtgcacctacaactgacctacacctatgtggggaatgctgtggacgtgcagggcaggagcctggagggcgcacaggtgctcaatgccgcgtccgcgccgctgagcaatgacggtggttttgcaattgagctacccacacgcgccgatgcgctgttcctgctgatggagcgccagctgctgcgctgcccgatgcaggttctggagcgtcgtagcgccgcactgttggtaggcgacgtgcaatgcgccgagctgcacaccaacgaactgccggctgacatcgaaaacctggtccatgtacagcgcctgctgcgtgaccggggcctccccacactggcgcaaagcgccgctaccgggccctcccaatga

SEQ ID NO: 517858 - DNA, 1002 bp, Stenotrophomonas maltophilia
atgcccgccccggacacccggctttggccggaggagctgttcgtgctcggcttcgacagcctgcgtccggagaggcaattcagtcggctgcatttcgtctgccgctccagcagcgatacccagcacggcgcctgcatgctcgaaggcgctcctggcgccaccgacagggagtcggaaattccagtgcgtttcactgaagagcgcagcggcagaacgatggatcttcgcataagcgggcatctccgacgtgtgggcagcagccgccactgtggatggctgggaaccaagcacggcctgcaatccaacgatccaggcacttgtgccttcatccaggtagacggaagtggcgtctccgccaggctgccaggcagtgagctggacaagctgatgccgggccactggcgtgcgtccttgatcctgaatctgcgcagcggtaccgcaagtacggtgctggcaacctacaccttcaacttcagcgtggacgttaccgacatcagcggggctgcggtctacttccccgatcgtcccgtggccataccccgtgtcgggttgaacctgcgccgctccacgaccaccccagccacgataagcggtgaggctacgctggacatgtgcctgtacgacggccgcggatcggtatcaccctatctggagctgcaggtccgcgacgagggccgcgacgcaccaggtcgagcgccgggcatgcactcggtatatcgccggggtggtggcgaggaagctggggatcgtatcgatttcgaagcattgctcaattacgaaggcagtgcgctgcctatgaacaacggcgatacggtcatgttgcacggcaccgatagcgcacgccttcgcccggtgcgcctgccgggcatgctcgatacggtctattgcttgcccacgccattgacgctgcgcacgccagcggtcagcgcggacagcaagagtgccggcttctacgagggccgcctgaccgtgcagatgacgatacctaccactaccccatag

SEQ ID NO: 517859 - DNA, 723 bp, Stenotrophomonas maltophilia
atgaacagtcattacatttttcgctggcgcatgctcgcgctgctgttgctggtcacaaacgccggcattgcccatgccaaccttggtgtctatccgatgcgggtgtccaccgagcccggcaggcatgcggaagtccgcgttacctcccaatcaccaaagccgcagtacgtgcaggtggtgatcaagcaggtgctggacgccggaactccggaagaacgtgagattggcgtggtgggcggagcacgggccgcgctgatgccgagtcccgcgaagtttgcacttcccggcggcggcagtcgcttggtgcggttgattccgctacaggacctggctgaagaaggcgtgttccgcgcctacgttgaaagtgtggacggtggcagcgcggaaagcgccgatgctgtcgaccttggtcaaggcgcaagtgctggcctgaacgtcaatctgatctggggcgtactggtacacctgctgcccaagaacggtctcatggacgtacgccttgaaggcaatgccctgcgcaataccggtaacgtgcgggtggggatcgcaggaattgccgagtgtgacggcaaggactgcctcgaatacccatggaagggcgcgctgtacccgggcaggcaggcggtgctgccgtttgaacggaccccaggacgcagcgtccagcttcgctatcgcctcagccaggacccctaccaggaacacacacgcaccttcgtgccctga

SEQ ID NO: 517860 - DNA, 5547 bp, Stenotrophomonas maltophilia
atgaacagaatttaccgaaaagtatggagcacggccaaacaatgcatgatcgttgcaagtgagctgagcgccgcgcgtggcaaggcagccagtaacacaatgagtggcgttgtgtgtgccgccggcctgctgttgaccctgccagcgagtgctgcgaactccagtgagcgcgaggaagacgaacttgactggtggagttcgccgacggcgggtctgtcccagccgccgaccatgcggcacggggctggtccttactacgcagtgatcccacaggccggtcttgggctgctccccagctacactggggcgtggcaggttgcgattaacactgactcagattttagggaatcaaccgtcagcggcaaccggaacatgattctcgggtcacgctccagcatcaacggccaggacagtgttgcttacgggaccggaagtcacatcattggatccaagcaggttggcatcggcaacagtgtccatacattcgggtcgcacagtgttgcagtaggcttcagcgcgattactacggatgttggtggggtagctcttggaaacgccgctctgtcggggcatttcaatgcaatcgccattggtagtggcgccggagccgagcattcggaatcgattgctcttggcgccaacgcgagaacaaccggcagcaaccagatttcggttggcaacgcttcccagaggcgcacaatcgtgaatgttgccgacggtatcgtcgctgcgggaagtactgatgccgtaaccggcaatcagttgcacgaaaccaacagcaaggtgacgacggccaccaggactgccaacgaggcaaagacaatcgccgacggtgtacggggtgccgccgatgctgcacagcgggccgccaatgatgctcacgcgcttgcaacacaggcagcgcgttcgttcgccaacggcacggcattgaccgaggccaccaaggccaaggccagcggcagcaatgcctttgcagctggcatgcgggcagaggcaaccggcggctcggcgacggccgtgggcgatgcggcgattgcgcgtgccacccaggccacagcgatgggtaatgacgccaaggccaccggcaaccagagcaccgcgttcggccgcggcgccaacgccggcggcgtgttctccacggccgcgggcaatatggccaaggcgagcgggcagagcgcgctggccttgggcgatcgcgcgaatgccagcggccgtgaggccattgccatggggcagggcgcccaagctaccgcctacgcgggccatgcgatcggcaccgaagcgaacgcagccgctgaaggcgccatcgccatgggctacaaggccaaggtgtcggatactgcaaggctgtcggtcgcgctgggtgagaaggcgaacgcagtgcatgccaatgccgttgcactgggtgccaattcggtgactgccagtgccaacagcatttcggtgggcagtgccagcaacaagcgcaggatccagtatgttgccgatggttccatcagcaacggcagcaccgacgcggtaaccggtaatcagctgcatgccaccaatacccaggtgacggcggcaatgacggccgcaaacacggcgaaggccaccgctgacggtgcgaaggccgtggcagatgccgctcagcgaactgccaatactgcagaggcaaatgcaacagcgacggcgcgttcgctggccaacggcacggcattgaccgaggccaccaaggccaaggccaacggcaccaatgcctttgcagcgggcgcgaaggcagaagcttccggcggctctgcaatggccatgggcgatgcggcgattgcacgtgccacccaggccacggcgatgggtaatgacgccaaggccaccggaaaccagagttcggcattgggccgaggcacccacgccagcggcatcttctccaccgcggtgggcaatatggccaaggcgagcggtgaaagcgcgctggccttgggcgatcgcgcgaatgctggcggacgtcaatccattgccatgggccagggggctcatgccagcgcttacgccggctacgcgatcggcaccgaagcgaacgcagcagctgaaggcgccatcgccgtaggttacaaggccaaggtgtcggacgctgcaaggctgtcgattgcgttgggtgaaaaggcgaacgcagcgcatgccaatgccgttgcactgggtgccaactcggtgactgccagtgccaacagcatttcggtgggcagtgccagcaacaagcgcaggatccagtatgttgccgatggttccattagcaacggcagcaccgacgcggtaaccggcaaccagctgcatgccaccaatacccaggtgatggcggcaacgacgaccgcagatacggcgaagaccaccgccgacggcgcgacgactgccgccgaggccgcccagcggacggccgacagtgccggtgcaactgcaatggcgacggcacgcgcgatggccagcggtgtggtattgacggaggacaacagggccaaggccagcggcgaaaatgcatttgcggcgggcgtcagcgccaatgccagcggcgcttcgggggtggcagtcggcaacggcgccacagccagcggtcgcgaaggcattgccatgggcctgggggccagggccaccgcctatgcgggccatgccatcggcactgaggcgaatgccgccgctgagggcgccatcgccataggttacaaggccaatgtatccgacgctgccaggctgtcggtcgcactgggtgaaaaggcgaccgcaacgcatgccaatgccgttgcgctgggtgccaactcggtaaccaccagtgccaacagtgtttcggtcggcaaggccgacaatctgcgccagatccagcatgttgccgatggttccatcagcagcggtagcaccgatgcagtgaccggcaaccagctgcatgcaacgaatgtggaagtgggctcggtgcgaaacaccgctatcagcgcacagacaactgcagggcttgcgaagacgacggcggaaagtgcgctggtcaaggccgatgtgctcggcggccttctcagccaggcatcgacaggcggaaatgtgcgcgtcggtggcgagaacaccggcacggtgctggacgtgcgcaacagatccaatgcggatcgaaaggtgagcggcgtagccgacgctgccctcgattcccgcagcaccgaggcggtgaacggcaagcagctgcatgaaaccaacgcccaggtggcggcggcaacgacgaccgcaaatacggcgaagaccaccgccgacggcgcgacgactgccgccgaggccgcccagcggacggccgacagtgccggtgcaactgcaatggcgacggcacgcgcgatggccagcggtgtggtattgacggaggacaacagggccaaggccagcggcgaaaatgcatttgcggcgggcgtcagcgccaatgccagcggcgcttcgggggtggcagtcggcaacggcgccacagccagcggtcgcgaaggcattgccatgggcctgggggccagggccaccgcctatgcgggccatgccatcggcactgaggcgaatgccgccgctgagggcgccatcgccataggttacaaggccaatgtatccgacgctgccaggctgtcggtcgcactgggtgagaaggcgaccgcgacgcatgccaatgccgttgcgctgggtgccaactcggtaaccaccagtgccaacagtgtttcggtcggcaaggccgacaatctgcgccagatccagcatgttgccgatggttccatcagcaccggtagcactgacgctgtgacaggcaatcagctgcacgccaccaatggtgcggttgccgctgcgcagaacgctgccgatgcggctgcccgggttgccgatgccgctagcgacgcggcattcgacgccgcagatgttgcggcaattgccagcgcggattcggcaacggctcttgaaactgcacgtcgcgtgtcgggcctgatcgacgaagccagtatcgacggcgcagtgcgactgggtcagagcaacgcaggcaacaagcttgatattcgcaacagcaggaatgaagcgcgcaccttggcgggtattgcagacggtgatatctcaacggccagcacagacgcgatcaatggcagccagctgcacgctacgaggtcgcagatcgaagtattggagaaacgaaacaagttcgtgcaggtcggcgccatcgacggcgaacccgctgcggtggcgggacgctactcggtagcgattggctcgggggccaatgccggatgtattgagatcggaatctgtgacaaagtggccgttggggctgatgcaacagccggggggatcagagccgtttcgatgggctcgggtgcttcagcaatgggctatcagtcgattgcactgggtcatcttgccgctgtggcacgcctcgccgaaggtggcttcgccttgggcgcagagaccagggtggatgccataaatgggcttgcattcggtcgcggcgcgagcgttgaagcggctgcaaccggcgcggtggccctcggcaatagctcttcggcaaccgctgccaatgaagtctcagtcggaaacgacgccatgaagcgagtgatcagcaacgtctcgagcggcagtgcaacgcatcatgctgcgaccatcgggcagctcgattcagtcgccagcgcgctcggaggtgaggccaagctcatcgacggcgtacttcgtaggccgagctatgctgttggcgaggacagccacgataacgtcggtgacgcaattgctgcattggattcggcgcgagcgcagtccagctccgacatcaggacgatcgagagccagatgaaccgcctgtttgtggagcaggtgccggaggttggcagcgcgcacttgctgttgggcggcgcaggcggcgcagcgatggtgctgggcaacgtggctgccggccgcattgccgccgatagccttgaagctatcaatggcagccagttgcatcaggtgcgcgaagagctcagcggccgtatggactcgctggagagcgcgagcggtcggacgggcgtgagcgcgatggcgagcatcgccagcgtggatccggtcgagccggctgccacgccagtgccggaatcagttgccgaagaagagaccgtttccgggtccaagggcaccgcgagcattgcttcggcggatcagccggcgccctcggcagcggaggcgccggctgcgcaggcacccgtcaaccaggtcgataccgcggcactggatgcggccatggcacgtgcgaatgactacaccgacaaggccgtcgccggtatggaacgtcgcctggacaagatggacaagcgcttcaaccggatggcggcgatgagcagtgcccaggctgcgatggcgatgaacactgctggcctgcgcacctacaaccgccttggcgcgggtgtcggccattccgaaggcgagtctgccttggccgtgggctaccagcgcgtgctcaacgagcgtggctccgctacgttcagcctgaatggcgctttcaccaacagcggtgagcgcagcatgggcatgggtgttggcatcggctggtaa

SEQ ID NO: 517861 - DNA, 714 bp, Stenotrophomonas maltophilia
atgcccgaaccacacaattgtccactgcgcatcctgatgctggaggaagacagcttcacccgcgaacgcgtgttgctgccgcgcctgctcgaacacggattcgccgtcgaagcacatgcttcgctggctgcattggaagagacgacgcagtacttccacccggatatcgtggtgctcagtaccgacttgtccaatggagatgccttcagcgtcgtccgccaactgcgccggcagcgcccggatgtcggtgtggtgctgttgatcgatcaccccggcagtgcagattgcgtacgggggctgatgcagggggccgatgcttgcctgtccacgccagtggacgtggcgttgctcgccgcccacatctacagcctgggcaggcgcctgcagcaggcacaactgcatcgagacaggacgccgccagcgccacggcaatgggagctggacgaacatgcgtggcgattgtccgccccttgcggcaacagcacatcgcttacccgaagtgagctgtgcctgctgcagaacctgcttcaggcaccgggtggcgtggtcagtcgcgagcgattgatccaggcgctgaccccggatgtcttccacttcgatccccatcgccttgactcgctgatccaccggctgcgacgcaaggtacacaagtactgtggtcggccattaccgctcaggaccgtacacggcgaaggctatctgctgacgccctga

SEQ ID NO: 517862 - DNA, 2259 bp, Stenotrophomonas maltophilia
atgtatgcgaaggagagcgccttctgcagctgtttggagagtgaacgcatgaacacgtttttccgcaacctctggcaccctgatcccttccatccatcagtggtttcagcaatagcccgtggccctcgcagtacgcagcggatgcgcgcttcgctgggcgggctgctgttgttgccgatggcgtcggcaatggccgcaggcgacgcagcaccaatgccctcgatgacctccagtggcaactacctggtagtggacggcgaggccgacggcagcgacgacgcccaggccaccggtgcaggtgcgatcgcactgggtgcatccagcctggccgagggcagcgaaacaacggcagttggaacctgggcgacggcaatcggtgacggcgccacggcgttcggcgcccagaccttggtgcttggcgatgacgccactgcgatcggtcgcgcagccagcgcattgggcgcgtctacctcggcatatggtgccggcgcctacgccgatgacaccctgagcaccgccatcggggctggcgcaaccgcgcgcacccgggaagctactgccattggtgcacgcgccgaggccggtggcgtcggtgcgctggccgtgggcgcgcgctcggaagcgctggggctacgctccaccgcactggggctggcctccaccgcgcgcggagatctttccttggcggtgggctattttgccgtggccgacgatgagcgcgcgctcgccattggtgccaccagcatggccagtatggccgacagcaccgcactgggcaccatggcttgggcaaccggcgagagcgcgctggcgttgggtgcgttttcttcggcaggcggtaccggcacgattgcactggggcgctcggcaaatgccctggggcgtgacagcgtcagcatcggcctcagggcgaatgcccgaggcgagcgtgccattgcgattggcggctgggccgacgcgctcggggagcgctccacagcggtcggcgatttcgcgtactcagcctacgacgcgtcaagcgcattcggcgcctccgccgctgccctcgccgaagactccgttgcactgggcgcagattcactgtccgagcgtgccagcagtgtgtcggtggggcgggcaggggcagagcggcagatcgtaaatgtggccgatggcagcgaagagaccgatgccatcaacaagcgccagctcgatgcggccattgccggcgttggtggcgatgtcagcgagcttgcccgcgtggccgtgcgctacaacgatgattccgccgaacgcatcagcctcggcggtgcacacggcaccaccattggaaatctcagggcgggcatcgccgagcatgaggcggtgaacgtggcgcagctggagggtagcgttcgagccttgggcggtggtgcggcgctgggcggcgatggcctggtgatcggcccaagctaccaggtacaggaccggcgctacggcagtgtggggggcgcgcttggcgcgctggacagcgccctggacagactcgatctgcgcgtggtccggctggaatcggcaggcgatggcggcggtggatggcccggcccggacgtgccggtgggcgagggcagtggcctggcgctgggtgaaggcagtgctgcgtccaggagcaacgacaccgccctgggcagcaacgcccgcgccggtaccgacgcgggcaacgccgttgcagtgggtgcagacagtgcggcaatggccaacggcgccgtggccctggggcagggcagccaggcgaccgccaacggcgcggtcgcgatcggccaaggatcgctggccagtgaatcgaacacggtgtcggttggcagtgagggcaatgagcgccggatcagcaacgtcgccgctggcatccatgacactgatgcggccaatgtggcgcagatgcgcgccggtgacgcccacgccctggatgcagcacgcagctacaccgacaaccgcgtgcagatgctggacgatcgcttcaacgaagtgatccgcgaaatcgaccaccgtctcggcaggcaggaccgccggatcgaccgccagggcgcgatgaatgccgcgatgacgaacatggctatcaacgctgccggcagccgcagtccgcgcggccgcattgcggccggcaccggctggcagaacggtcagcaggcgctttcgatcggctacggaaagctgatcggcgaacgcgccagtttcagcctgggcagcgcgttcagtggcgatgaccgttcaatcggcgcgggcttcggtatcgatctgtaa

SEQ ID NO: 517863 - DNA, 1815 bp, Stenotrophomonas maltophilia
atgatccagatccctccgcgcaaggctgtacgttgtgcctgcctgctggccgctgccatcgccgccgccctgcctgcggccgctgcagccgcgccggtagctggcgtccaccacgtgccaacgacagatggcggcagccagcgcttcatcgtcaagtaccgcccaggcatggctgcggccggcgacatccacctgggcaccggggtgatgcacagcgcactggcgcgaacgtccaccgctagcagcaccggcgcgctgccgaccgtgcggccgttgcgtcgcaccgggagtggggcgcaggtctatgcgacctcacgccgcttggacgctaccgaagcaaaccgcctgctggcccaactgcgccgggacccgcaggtggaatacgcgcagatcgatggcctgcgccattcactgaccacacccgcgccaaccgcgctgcaatgggacatgctggatgcccctggcggtgtgtatgcgccttcggcctgggcgcacaccgccggcgaaggcgtggtggtggccgtactcgacaccggcatcctgccgcacccggcgctggccgctaatgtggttcccggctacgacatgatttcgttctatggccagccggatagcgcaggtggctttgaggtcgatgtcgccggcgacggggatggccgcgacccggacccgaccgaccccggtgactggatggagccggaggtctgtggcgcagagggcgacagcagctggcatggcacccacgtggcgggtacggtttccggctacagcactacgccgccgcagctggccggcgtagcctggaaggccaaggtacagccggtacgcgtgctcggccattgtggtggctacgactcggatattgccgatggcatcctgtgggcggcgggggcgcaggtagacgggattcccgacaatgccactccggcggaggtgatcaatctcagcctgggcgggcgtgcatcatgcgacgaaacgccgatctacaaggaagccatcaccgcggctcgcagccgtggtgcgacggtggtagtggccgccggcaatgcatccatggatgtcagcggctatacaccagccagctgccctggcgtgattgccgtggctgctaccgaccagcgtgagcgtgccgcttcgtacaccaattttgggagtggcatcacgctcgccgcccctgggggcgacttgaccctcctcgatccggtcgcgcagggtctgatctggtcagccgctgacagcggcaccactgtcgccatcaacgacggcatcctggttggcatggtggggacctcgatggccgcaccgcatgtggccggcactgtcgcattgatgcaggccgcggccgtgtccgagaccggcggcgcactcagtccagaccgggtggaaacgatcctgcgtgaatcggcacggccgttcaatgagacgccgcgcgtcggcctgggtgcgggcctgctggacgcctcgcgggcggtgctgatggcgatgggccggccattgccaaccgagcggccgctggtcaatggcgttgcgctgcaagggcagcgcggtacagcgggaggttcgcagatctacacactgcaggtgcctacgggcattgccacattgcagctgcgcacgctgggtggcaccggtgacgtcagcctgtacgctgccccggacggagccccagaggtggagagtgcggcgtaccgttcgcagcgtgccggcaatgcggagacgatctcgatccgccgcccgcagcctggcacttggtacctgcgtgtggtgggcgaggccgcctacagtggcgtcagcgtgttgggcttggcacgctga

SEQ ID NO: 517864 - DNA, 441 bp, Stenotrophomonas maltophilia
atggccgataccattcggagtggtgagagcattccggtggagacggtgttcgccgtcgtgggaagcctccttgccgggacggcggctcctgcgcaggagagcccgctcgttccgatggaggcgctgcgccgacgtgtgttgggccaattgctgtcttgccaattggagcttgcccggttcgcggcgttgccgtgcgatgcctcacagttcgagacggtgcaagcgcggcgcaacgaccaggctgaggcaggttcgatctattgggctcggatggccaacctgcgctgcgcgttcagcgagctggtgtcgttgctgacctacgacgagcagccgcattggccgatcgacccggacggcggattcgaaatccagcactcgacaggctacgtcagtgtgcagctatttgggggtccacaggaaaaggattcctcgcggccgtga

SEQ ID NO: 517865 - DNA, 159 bp, Stenotrophomonas maltophilia
atgaatcactatccgcatgccctgctcagcgttgcattgatggcgtggtggtctgacgcggtgccgcgcttctccgccgaggcacgtcgggccaacatggccttggtggaggtggtgaaggcagtggccgcagtgaagggggcacgcctgcacaggtag

SEQ ID NO: 517866 - DNA, 180 bp, Stenotrophomonas maltophilia
atgcagacgcgcacgcgccttcgcactctggtgcctggcctcccctccacactgctctggattggggtttccctctacaccacgacggccatggccaacgagccactacagatcgattcgcaaggaagcttcctcgcgggtggcacggcaaagcaggaactggcacgttcgatccgttga

SEQ ID NO: 517867 - DNA, 306 bp, Stenotrophomonas maltophilia
atggcaacgatagaggtgtctatgagcaacaagcgctatgcggatgagttcaagtccgaagcagtcaagcaagtggtcgagcgcggcttcacggtggtggatgtagcggcgcgcattggcgtcccgaagcacactctgtacagctgggtgcaggcagcgaggatcaagggccaggctcctgctgttggcgcagatgcgggcaatcgcgactcggccgaggtcaggcgattgaaggccgagctcaagcgcgtgaccgaggagcgcgacattctaaaaaaagccgccgcgtactttgccagggggtaa

SEQ ID NO: 517868 - DNA, 816 bp, Stenotrophomonas maltophilia
atgtgcagggtactgggtgtccatcgcagcggctactacgcatggctgcgacagcaaagcagtactcgtgatcgcgaagatctacgccttcttggcctcatcaaacatcattggctttccagcggcgcggtatatggataccgcaagatcaccaccgatcttcgcgaaacaggcgaaaggtgcagccgtcatcgggtcctgcgcctgatgaaagccgagggcctgcgcgcgcaagttggctatggaagtaagccacgacaccgaggcggcccggttggcgctgtatcgaacgtactgaatcgcaacttctcaccaagtgcgccaaacaaggtttgggtcaccgacattacctacatccgtacttacgagggttggctgttcctggcagctgtagtcgacctgtactcgcggcaggttgtcgggtgggccaccgccgcaaccatgaccagcgacttggtgctgcaggccctgctggcggccgtgtggaagcgaaagccagcagcgggagtgctggtgcattcggatcagggtagccagttcactagcgacgattggcgctccttcctttcaagccaccacatggtgccgagcatgagccggcgcgggaactgccatgacaatgcggtagcagagagcttcttcagtgcactgaagaaggagcgaatcaagcggcgcatctacccaagccgggaagcggcacgatcagatgtctttgattacattgagatgttctacaacccaatacgtcggcatggttccgctggtgacttgtcacctgtagagttcgagcggcgctacgcgcaaaacggttcctga

SEQ ID NO: 517869 - DNA, 690 bp, Stenotrophomonas maltophilia
atgtcacgctccgatatcacgtcagctcctcgcacttggccgaagtcctttaaggggtggccggccctatggcttgagaacttcgataagctctcttccatgatcactttagttaggcatgcagagagcgttgccaacgtcggccagcgaacaagcgatccgagcggcatttgcctgacggatgcaggcatgcgccaggccgaggccctagcccaggcctgggacggcgcgccttccagggtgctgagctcgccatttcaacgagcaatcgacacggccattccgttggctgcgagatttgggctgcccgttgaggcagcacccgttcaggagtttacgtatctctcgccgagccgatgcgctggcacttcagctcgcgaacgccgcccctgggttgacaactactggcgaaacgccaaaccaagccatcgagatggagttggcgctgagacattccatgaattcgcaacacgcgtccaggcagcaatgcgggatatcgtcagggatggcgacgacggtgtggttgtcttctgccacggacagttcatccaaatggcgaagtggctcgtttcacgtcacggcgtagcgatcgattctgatgcaatgcgtgaatttagacggctagatcttgagcaaccaattgcgcattgccacgtgcatcacctggcttttcatctgagctcgcgctaa

SEQ ID NO: 517870 - DNA, 1275 bp, Stenotrophomonas maltophilia
gtgagatcgatctatgcaaacaggaattccaagggcgattttctgctgaacgagttggagcgatgggcagatcgcggtctctccgtctgcattgcttctgcatttttcacggatgctgaagttgtcgagaggttgttgtacaagggttgcagcgtctatatggtcgttcgactcggatttcctacaagtcctgatgcgatagagcgtgtgcgaaagcacccgaacatgaacttgcgagtctatacaagcagaacattccatccaaagctctacatcctaggggatgaggaggccttggtcggatctgcgaatctgactcgatctgctctgatgacgaaccaggaggttgtggtccacatcgatcagcatgacggctgccttcaggatcttgtatcgatatttgatgactattgggccggcgcttcggtgccgactgactcagagctgtcgacttacagaggcctctatcgacaattttccaagctcgaccatgaggttggagtgctggagcagaaggtccttggagagcttggtgagacgtcacctgcaaacatcgatcgcagtgaggccaggcaggataagcgctctgccttcgtcgatgggttcaggcgtagttatcaggaaaccacttcagccttcaatgtcatcaggcgggtctatgaggctagtgggtatagaaaagtctctgaggaggaaattcctctgcgcattgagatcgactcgttccttagctatgtgcgcgagactgtggcaagtggcgactcttgggcgagtgcgccgttacgttcagagactgagcagcggtcgatgcttgagccgctgattgaagcttggagccgaaccccttggccgcattttgaggggaggattgtcgtcgataactatcctcgcttgaggtctgtcttctcaaccgaagattcgattagtcaggccgacgactcggagttgttcgatgccttggcaacgctgcactcattccatgatcgattcaggttctttgagggagggctgccaacctggaagaagcagtttccagccctcaatgacccggccaagacgaggaagaccctcgcatacatcgtacatggccgaggagacatcgtggagaggatggcgaacgccatctactcgccgaagttcaagttgaatgagtttgggcgggcgaacgtacaagaactggttggctggaccaatcgcgaggagctgccaatcatcaatggtagaacgacaaaggtcttgcggtacttcggcgcgagagtaagtcaagtaggatga

SEQ ID NO: 517871 - DNA, 315 bp, Stenotrophomonas maltophilia
atggcaacaaccaaaactgcaccgcgccgcgttaaattccctaaagcagctgagcgctccgaggcaaaaccggtggtgctctgcaccagcgaacgcgtactcaagctctacaaccaagattccggaaaagaagccaagaggatttccaaggcagtcaggacttggttctctcaaaaggctgtggaggaaggctgggacggcgttgcgtttgtgcctgaagtgcagtcgcagcacggtgcaggctgcgtcctcggcaagaattttgacggacagaaggcaagcacgactctcaagaagctcaactccgaggagtaa

SEQ ID NO: 517872 - DNA, 4911 bp, Stenotrophomonas maltophilia
atgacaggatcaatcgctttgggtgagcagtctttggttgggactgttgagggacggtttggctcaccacctcagttgccaaaggactttgttccgcgggaccattatgttgagagtctcaaggatcttctttgcggcgatgacttgattattttccttgaggctgatcaaggcgctggaagaacggttctcctctctcatttctgccgaacgtatcccgcagttacattctcgctcttcgtcaaagctacaagcaaaatatcgtactcattggagtacctgagacaactcttgggtgagcagttttggaaatttgtttccgatcttcccgttcccgaaattccattcgatgaaggcacactgagacggctcgttctacaagttcgaaagaagggccgtggatcgcgattgttcgtagtggtggatgggctgcacgacgttcccgtagaggatgcgcgccagatactcacagagctgctcccggtcggtatagataatttttcattccttatcagtgcctccgaggaggctttagccaaatttatcgggggagttcgcagaaaatctttccctctccctaagtttggcgactatgaggcagagacctatctctccggagttgaactaaccgctgctgaaaaggaccaggtaaagaagctgtgcaggggaaatattggaaatcttgcatctttcaaaagattgatcgcctccggtcgcactgccgaggagatactttcagccgatattgagcaatatccagacttcgtaaggctagagttcaatgccttgtccgggctggattccagcgataagttggtgctcgctgtgctaggtcaatcaaagcaagagcttacctggtgcgagctagaagagattgcaggtaattgcagccgcaatatatcgaaatccctgctccagcaactcccatttctggtagccgatccagttacaaacgtcgtcagcttcacgtcggagacgcataggtcaatcgctgtcgggctactggaggattaccgagagaatgctctaaacctgcttatcgattatctttctgagaatccagagagtctcatcgccttgcagttccttcccacctactacaggcttatcggtcaaaaaaaggaacttgtagggtgtatatctgctgatcactacgatagcttgcttagacacactcaatccatttcggcattgagaggaagagcatcgctcggcatgcgcgcggctgccgagcttaaggacgctgtcgatgtctatcgcttctcaatggagcgaagcatgtttggtgcgttgattgctaccgaggatcttcaagcggaggtgggggccctggccgctcttggtaaggatgataaggcgctaggcgtggcgattagcgcaccaaaccaggaggcgcgcatatctctgcttgccgagtattgccgtagggttcgcgagagagaggggacggttgattctcaaattaccgagtatatttctgaagtagccagggccgtgaacttcgaggaactcggtgacgcagccatttccattgcagagaatctgatctttgttatgccagatctcgcattgcagatacttgattcggggttgagcgggcgaaaggcgaaagacaaatcgaggaatgaggtcttggctcgaatgtcattcgcatcgaggatggggcagcgagacagttctggcgaagaggataaaatttcatctgagatcaccgacgaaaggttgcagaagcttctttcctccttgcgatcagtaattgaccagtcttcaactaggcaagttctatcgctagctagtggaatgaagattgggccacgaatgcaatttctgagatgggtgattcgcctatgtagcgatgaaaggaacgccgctgaggtcgtggcatatgctcttgatcagctcgtcgcaaactcagaatacgttcctaaagcgggtgatcttgccgattttgcagcgccgcttcgtcttataggtgacgaaaatcttcgtcaaggcttactcagaagaattgaggggcagatccccttaattgagcgatcttcgccatccaaagatctaacgctcttgcaaatgcgactggcgcatgcagagtttagcatcagtttggcgcgctgctcggcacgcatgaatgacgcctactttgagttggataatgttggaagcgctgaaacgaaggtcgattgcttagccatcatgttgtccactctggatgatattgatgatgagcgtcagcttgaggcgagcgacggttttagcgaagtctttcgaaaggatctgttggccaacattgacgctatactgaaagatagcgcaaaccaggggcgagttctaaagagagccattcactctttatcagcctacagtgttccacaggccattgctgtggttgacaagctaaattcctcgctttctcgtgatgatgcgagagtaaatgttattagtgcggcgtgtgaaagaccatggagcgccgcgctagagggtgagataaatggagttattgagtgcatcgaggattacacaaggcgagacttggcactccttgctgctgcacgctccattgttacttctaaggcaccttctcattggtgttcattcctgaggaagctgccgctacgcaccaaagatccgcattttgtctgcgctatagttatcgatgtgatggactacttcgtgactgaagcgccagaagacggcatcgaggatctcatggagctctttgagtcttcagttgagagtattgattcccatttcgccaaagtcgagtatcagtaccagctggtcccgatcttagctaagaaggattttgctttggcggaatctctatatgaaacggcgcttgttatgaatcggagcgagacgctcggaaagcgagccgtcgcggatgttgtggcgcactgcttggcgctcatgtcgcgtactctccgtcctctgatgaagcacggccgtgtcgcaaagtcagatctggagaggttatataggctctgcgacgctattccctgtccatcgactagggtgaacatctacacggatcttgccactaagttttggtgtgagcgacgcgtcgacgaatgcaaatcaattgttagagagaaaattcgcccgctcatcagtgcgagtgaatttggcaatgaagctgatcgtgcggctttgatatatctgtctgcgccagccttgtacgttgcccatgcggtcacagctcttaacgacttcggaaagctatcgcctcaacagaggacttctgcgttctaccgcgtcggaaaaatgatacttattcggaagagttctggggaacctaaccaggacctggatgaagcacgaattgtccccgatcatgaggaccttttggacgttcttgcgctgctggaaaacataaatgacgactgggttatttgggcgctcttgagggctgcatgtcgagccatttcatcaaaagaaaatagagcgcgtttgacaggacagcaaaagcgcgacttcgcgataaaggcgcaagagctatcgcagaggaaacttccggaccagaaaaatattaagcatgacgggtatctgattgtgtgtcttgcgcagactatgcgtatacttgaatcaaagaaacaggaatgggacgctttgattgatcgtgctcggacagtcgaaaacatggctgatcgagcgtatgttcttgtggaggtatccaagtgtcttcccgcaaaaatgctggaattgagaaagctgctgctgagcgaagctcgttcgaccatcgacaaactcccgtcctcctacgataagtacacccgtctggaagactatattcgcgccgttcgcgaagtgacgcctgcactggcaaagaacgcgctgagggatgcacttaagatttcactcgatagcggacatcgcgatgaggcttcgcgttggcgtcgtaatctggtggatttggctgacaccgtcagtgcggatctttcacagatggtgtccgaattgtcagatgaagatcccgccagactggagatgaagaaaggatttgatcgagacatcgcaattcacgacatacgtaagcgtctcggggatgatcttggaacgaacggcggacccagtagtgctgcggagctatccgatgcggctgagcgcaatctttgtgctttgatctctggaaggatgcagcccaaagatcccgacaagatcattggtgctctcattcaatccggcgaaatgtatctgccagaagcataccccgtgcttgcgtggtatgttgagaactcagcctcgaaatgcgttcgagacacagatatcgagtctagaatccttccattgctcgaggtcgttatgctctcgagcgaaatagccctaagcaccgcgaatcgcttgggtgttgcgaaaagcataactccagtccccgccattggattgacctctcaaagcgcgcttgtcgtaaggccgggacagcgacaagaagctcttgaatttattagattctggctaagagataatctggcggattcgatcgttctttgcgatgcctatttctctagcgcggattgcgaatttatgcaattggtgttggcggagtgccctgatgccaagctcacagtgctgacgagcatgaaaggagtgagtcacgaggaattcagtcaggacttattcctgagccgctggaagctcctatcagatgatgatccgccagacactgaaattattgccattgcaggatacgataacaagggtcagatcctcatccatgatcgttggctgattagcggggacgccgctcttaggctgggaacttcctttaacagtttgggaatgggaaagctcagcgagctttctcctgtggtggctgaggggtgccctgctgtgcttgaagagattgcaaagtacaaggcgaagaaccgtttagtgaacggtgtccgtgcgcagtacagttctttcaccctatga

SEQ ID NO: 517873 - DNA, 2019 bp, Stenotrophomonas maltophilia
atgtacctcaagcaaatcgaagccaagaatttcagactgctttacgacgtccggttacttctcgaaagccgaaccaccgtcatcgtcggacgcaataacagcggcaagacatcgctgactgaggtgatgaagcgccttttgtccgatgcgtctccctctttttctctagaggacttttcgttctgttgctacgaccagttctggcattcccatctccgaaaatccaatggcgaggacgaggccgagataaggaagatcttgcctgcgatagaagtccgacttcgcttttcgtacgaggaggatgagcatctcggtctgctcagcgagctggtcgtcgaccttgacccggaatgcacggaagccttggccattgtccgatacgcgctcaaggatgggaagctgcccgaactgttcggcgactttgcggagacggacgaagatgcgagaccggaatttttccgcctcctccgtgagcgaattccttcattttacgagactacctttgttgccgtcgatccgaatgatgaatctaacgagaaagacattgaaaggtcgacgctgaggaagctgtgcgtcggtggcttcatcagcgcacagcggggactagatgacgcgagtcagaaagagcgcgtggttatcggcaaggtactggagaacctgttctcgacagccaagagcaacaccgacgacgcgaacagccacgccatcgcccaggagctcgagatcgcggtcaagtccattcaggacaagatcggcgacgacttcaacgagaagctcgaccaattgcttccggctttgtcgctatttggctatccgggcctcaacgcccccaagctcctgaccgaaactactctcgacgttgccaagcttctaaccaaccacacgaaggtccggtataccggatccaatggcatccatcttcccgaagcctacaacggtttgggaacacgaaatatcatcctgattctcctgcagctccgggagttctttaagctctttcttgcgatggaacccagaccctcggtgcatctggttttcatagaggagcctgaagtccacctgcatccgcagatgcaggaagtcttcatccgaaagatcgcggacatcgcatcggcgttcaaccaggaaaccggcgaatcgtggcccgtgcaattcgtcgtttcgacgcactcctcccatgtcgccaatgaagcacacttcgagacgatccggtatttcctagcctcggcggacaagaatggcaccatcagcaccaaggttaaggatctcaggaaggggctggccgaaaaacctgaaccagatcgcagcttccttcatcagtacatgaccctcacccgatgcgatctgttcttcgcggacaaggcggtcctgatcgagggcacaacggagagactgctgcttccaagaatcatcaggatgttggacaaggatctagcggagggaaagaagctcggtagccaatatctctccgtcgtcgaggtcggcggcgcctacgcacacatcttcttcgacctcgtcaatttccttgaactccggaccttggtcatcactgacctcgatagcgtgaaggccaatggcgccggcaagcttgtggcctgccaggtgtcgcaaggggacaagaccagcaatgcctgcctgaagtcctggtacgaaaacagtggcatcaccccgacggaactgttggcggccgatgaagcagccaggaccaaaggtctgttgcggctcgcgtatcagtgtcctgaagccgagaccggtccttgtggtcgcagcttcgaggacgcgttcatgctggcaaaccctgagatcttcccattgccggggcccggcgcggaggagagggaaacccaggcttgggaagaagcgaaagaggtgaaaaaatccaggttcgcactcgagcttgccctatctgacggcgactggaacatcccacgctacatccggggcgggttgacatggctcgctgaaggggagccgccgcctgtgcccgcgccacccaacgatgcggaagtggttgcatga

SEQ ID NO: 517874 - DNA, 1755 bp, Stenotrophomonas maltophilia
atgaatgccatacccgaggccagccccgcactaatcgccgcgcaggaagcggaggcggctgtcgcacagtgcttgcaggaccaacggaacttcctgctcgaagcaggcgccggcgcaggcaagacttattcgctggtagaagcgctcaagcatctcatcgaatacgagggcctcaagctgcgaaggaaccaccagcgcattgcttgcatcacctataccaatgcggccacggctgttatcaacagccgcatcgacagcaacccgctggtcttcgtcggcaccattcatgcgttctgctggtcgttgatgaggaggttccagcacgcgctcaggtcactggtcgcggcgatgccagagtgggaagagaagttggccgaggccgacggaatcggtagccggattgtcgagtacgagctcggctaccgccgtgtcaccgcagagaccgtcaccctgcaccacgacgacgttctggcgctaatggtctctctgctcccgaacgtgaagttccagacacttcttgcgcagcagtatcccttcgtattgatagacgaataccaggatacggacatagcggtgatgactagcattagcgagcatctgttaggacgtgcgggcggcccgatgaccggtttgttcggcgaccactggcaaaccatctttgacaagacatgcggccacgtcgcccatggagcgctgacggaaatcggtaagaagtcgaacttccgctcatcgactaagatagtcgacgttctgaacaagatgaggccagagctcccacaagccgtgaaggacgagggtttcgttggctcggcgatcgcatttcataccaacgcctggcaaggcgcacgccgatccggcgcagggggcggacactggaaaggcgatctccctgccgaggcagcccatgcctatttagcgacgctaatcaagaagctggaatcggacggctggaacctagctcctcagcgaaccaaggttctcatgctcactcacaacgttctcgcttcggagcagggctacgattcgatcgccaagactttttcctacacggaccagttcataaagaaggaggatccgctcatagcgttcttttgcgacgcgctcgagcccgcatgcgcggcattccatcataagcgcttcggggatatgttctcattgctgggcggctcaacgtctgcggtttcttcgcatgcggacaaggtcgcgtggtcctcctcgatggagggcctcgccaagatccggctcgagggaaccattggccaagtgctggactacatgatcgagcatgcgcatccaccgctgccggacgccgtgctcggggtgcttggcgaggccgatgaatggcatggcgaggaaggggaggagccgccacgccggatccagcagacccggcagttgcgggacgttccctacaaggaagtcatcgctttggacaggtttatcgacggtcatactccgtttgctaccaagcacagcgtgaagggcgacgagtttgagaatgtcctggtcgttctcggacgcggctggaataaatacaactttgaccagttcttgcaatggtcgaccgaaggagtcccggccggcaagcaggatgcattcgagagaagccgcaacctgttctatgtgtgctgttcccgtccgacaacgcgcttggcgctgctcttcacccaggagctttccgacgtgtcactggcaacgctcaacaactggttcaacggggcgaccgaaccagctcccgcaccacaagaggactga

SEQ ID NO: 517875 - DNA, 750 bp, Stenotrophomonas maltophilia
atgcctcacttcctagatcctgatatcgagaagctccgaatgctcgaggcagagaaggctggtctgcaggtctttaggaactacagcaaagccttcgaacaacatcgatcgcaaaagttcgccgaggaggctgatcaggttgaattcccgctcgtggactttacggcgttatgtaagctgatagtgtcagaacaagagcggtttgttccggtgattgcatgcgcgtacggggacgatctgttgaaggccatgtatcaaagggagataccactgtccgttccaggtggacgtggtgagatgctctctggtcttggccctctctcggggttagctcaacggattcaggtcgcgtacgcgttctcttggcttagtgaggacgttctcgaggagctaaatcatcttaggaagcttcgcaacgatatctcacacaggtgggatgtcgcattcctgaaagaaaggctggatgcgctgatccatgagagacagcggccgatcgaagaaaccttggcagatggcgttcggcttccaaaggattttcaccaagcactagaccctgtacagagatttcgagtgcggattttgtgggtgatgggacggctaacgtatgaaacacgctggtgggttcctgcggtgaaagcgaagttggatccggtcaaagcattgtatggatcatccaagctctcccttctcgggaaagtcgctgatgtgtgcgttgaggcgaccaaggaagtgtgtgcgagtcagaagtag

SEQ ID NO: 517876 - DNA, 1317 bp, Stenotrophomonas maltophilia
atgccgtctatgattcctatcagcccataccaagtgcgcgctttggcggacggtacgtcgtttccgtactacattgtgccgttcgacaaggacggccgctgcgaagcaccgctgacgcgcaagcacctgctcgaacacctcgacggccacagcgacatcttcctgttctcgcatgggtggaacaacgactggaaggccgccacagaacgctacgaaagcttcatcacaggctatgctgcagtcgggctgccaccacaggtcgacggttatcggcctctgctggtcggcgtgttctggcccagccaagcgctggcctggttcgacagcgaaatcggacccggcttcgcgggcgcgggcgatgagagcatcgaagaaggtcgcgtactggccgcagacatcgcggcatcgcttacgggtgtgcagcgcgagcgcttcttcgaactcgcgcaggcgaaaagcctttcggccgtagaagccagcgagctcgctgcgatactcgtcggcctgctggcacccgaggatgagggtctgtcgcgcgacacgcccacggctggggacttgctggctgcggccgctgcgaatgcaccggtaccggacttcgacgaggtgagggccgtcgcgccgtcgggcgggcccgcaggcgaccctacggcagccggactgggagacctggtcgaaaagctcgatccgcgcaatatcatcaagccattcacggtctggcagatgaaggaccgcgccggcgtcgtcggcagtcgcggcgtctccgacctgctgcgcgagctgctccagcgttctaacgcgcgcatccacctgatcggacattcgttcggctgcaaggttttgatgtcggcgaccgcttcgctgcccgagccgacctcgcgcaaggtgcactctgcgttgctgctgcaggcggcgatctcgcagtacgccttcgcgccggcggtaccggagagcggcctgcagggaggctacttccggaatctggcacggatcgaacggccagtcatcgccaccttcagcagcaacgacgtcgcgttgagcaaatccttccatctcgcgctgcggcgcaagagcgatctcggcgaacaaccgagcatcgccggcgaaagcttgagcaagtatggtgcgctcggcggcttcggtccgcaaaagtcgaacgagactatcatccccatcaaggatccgggggacgcctacgacttcggcccaggcgggcggatcgtgggtatccgcggcacccgcacaatcggcggccatggcgacatcagcaatcgatcaacctggtggctggcctacagtgtggccaccggcgcctga

SEQ ID NO: 517877 - DNA, 1803 bp, Stenotrophomonas maltophilia
atggcagatttactcaagcgcgagaacgacatcgtcacgctcaaggtcgagctggcacccggcgatcgcgtgtcgtgcgtactgcagttcctcaatcgcggtcagctgcagagccacccgctgtgggaaggtcctatctctgcgttcgggatcgactgcgcgctcgcgaacaagcatccgagctggaacgcggtgaagtacgtggtgccgaagggcctgcgcgtccgccttaagtccggcgtcaggtatctgacacccttgtactcctggagcgacctaccgctatgggtgcatctggtgaagccttatggcgcgctgcgcttcataccatgggagcgcctgctgcccgtggtcctggatgtgccggtattgatgctaccagacttcatcttcccgccgccgcgtaagagtgcgtccaggcttgacatcgctctctgtgctagcgcaccgctcgactgcgacaatgactacgtcttcgatgccacgtggacggccatcgacgccatcctccagggcctggacgggcaagtcccgcgactgcacgtgttcgccggccgcgagatggcgcagcgcctgcagcgcgaactcttcctgccggacaacgtgctgatccatgatcaggcgcaggcagagccctttttcgccgcagacccttcatcgcgtcgaatcgaccggaccggcagccttcgttcgccctggttgctatggatgcgcgagacgctgcgtccgtacagtaccgatgtcgtgcattttgtctgccatggccacttgtccgctcagtcgggcgcgatgcttttcgcgcaatcgccactggaacgcacggacaactacctcgcaggtccagtcggggctgcggaactgggcagcttcctgacccaagttggcgcatggtcgacggtcttctctcccccccgggataatcacgatccggccggcctacgcgcccttgcggacgagctcgcacaatccttgccggggccgatgatgctgtacgacggtcgctacggacagccgaccgagctagagcagggctatcgtttcgtccacgcggaggggccgcaggacccgccgcgctcgcgcgcactgtacttgtactgccagccatacctgatggccgagggccgcggcaggcccgatgccgaagacgatgccggagcgtcgatccgcacgcacatcgatcactatgctcggaacgcttcgcagcgtgactccgcactgcgcgcgattcccgaaccggtccctgtaccgacccccgcaccgaccccgacaccgatcccgcgacacatcatgcatccttcacccgccgcgccagtcggcaagagcatttcagcggtgaccgcggcgaccgaacggttcgctgagaatgtccaactgcagtaccagcaactgatgcgtgacgacgttgttccggatgcgatcgcgcgccgcgacatggacacgtcgatggagactgtcgatatgatccgccaggccgtcaaccgagtcgaacaacagcgattggcgaacgacatcgacacacgactggaccgcgtcgaacttgccgttgaacccgcgccggacgatggtaatgcgcacttggaaaaaccgactgaaccgcagatgctcaacggtgatctgctcaagcagatcgagaacgcctggctgcagcttcatgcactacgggtggaagctaatcgcggcacgctcctaccagctgagatcgataccactccattggaagtgcgcacgctgcggatcagggatgatctcgaagtgcggcatctgcgcgagctgctccaagatggagaggggaccgagccttga

SEQ ID NO: 517878 - DNA, 1392 bp, Stenotrophomonas maltophilia
ttgaaaacgcgcacgatctttggcatcgaagcgatgggcgacaagctgttcgcgaaagtcgtacgctcaccattcgaaattctggcccaaggcatgcagcccctgccactgcatcccgaccagttgcctgggctggacaccaatggggccgtgctagaacgcggcaagatggtgcgcgatgccttgcgccagcatcagggcatttccggggtgctcgacgatctcggcaggaccctgtcgccacagatcagtccgctgttcgtgcagataagcccgtctttcgctgagctgatcaactgggaaatgttgtgcgatgagcaggaagcctttatcgcgctcgatcagcgatggccaatcgctcggatcatcgatccggtcaatgctccgcagcgcccgccctgtgaactaaccacgccgatccggcttctggcaatcatctccgccctgggcatccgcgaccagcgcaaggagtgggagcacctgcgtgatacggtgctgcaggcgcgccaagacggtatgcacatcctcgtgaaggtaatggtcggcgccccggagctgttcgatgcagtgaagcaggagatccagtccggactggtcggtgtcgaagtcgcagcgatcgaacagacctcgtcacgtatgacgcgtacgatccgcgaatgggcgcccaacatcctgcacgtgttctgccatggccatgccgatgcactcggacaggcgttggaactagcgaccgcaacagaccatcttgcccatgccgcgggtgaacctgccgcctcaggatcggtgcggatcacctcgcaggacttggccggcctcgctacctcgctacgcaacggctggctgctggtactgaactgctgcgccagcggcaaggccggcgtcggcctgcattcgatggccggtaaggcggtctccagcggcttcccgtcagtggtcgcgatgctcgaaccggtcgacgccagcgacgcctacgaattcacccgcgcgttttatcccgaagcgttcgttgcgttgcgcgatgctcgggacgccttgcgcaaccagtcatccacatcggtggaatgggcgccggtcctgtttcacgcacgcacagccatcgcccaattgggcaaccgccatgcgcagagcgcaccggagtggtcgctgcctgcgctgtacgtccgcggccttgacgcacagaccttcataagtccgctagacaagtcccgtggactgagccaggccgaattggacaaattcaggctgcaggcggagatgactgcgcagtggttgcgcaccgccggccagcagatgagcgaagcagaccgcactggcgtcatggagggcgtgctggcgaccgtgccgaaggaattctggccgaccctggatggacgcttcgacattgacaactga

SEQ ID NO: 517879 - DNA, 1428 bp, Stenotrophomonas maltophilia
ttgacaactgacgtgtacaagatcgaagcgggtggcgcccacgaaccgaccgtactgcgagcgaatgcttggtgtggggacggcgaggccagtggtgaatattccgagcacgcagcagcgtgggcgacgacccgcctcacgcaccgtccccaggcgatgctcgggccagccgcgccagatctggatctcgccaattggcaagatcggcttgtcggctggggcgtggtgctgccggaccgtgacggtctcagcgatgcggacaaggcagcgggcgccgatgctccgcccgccatccgccgcctcctcaccgcgcgtgcgccggccccggtgtttcgctaccgggaggacattgcaagggatgggcgcctgcttcgccattacccgcatcgagcgccaactcagctgcgtgccagcggcacgcgcggcacgcacgacgatttcgccgtgccgcgctacctgctcatcgtcggctcgccggaagatatcccctggcgcttccagtatcgcctgcaggccgatgcattcgtcggcaggcttgacctcgacgacgacgcgctggagcgctacgtcgatgccttgctgggcggctgggccggcagcgaacgtcacgtcgacaagccgctgctgtggtcggtcgaccacggccatcccgatatcactcacctgatgcgcaagacaattgccgagaagatgcacgaggctttcgcgcatcaggcagggttcaacccgctgctgctgactgacggccaagcgacgaccgcggccttgcacgatgcattgcagacccgcaagcccgcgttcgtcctcagcaccagtcatggagcgacttttccgctcgattcccccgcgaagctgcgcgcgcagctcggattgcttgtcgaccacgaccatgcgctgctcgatccaagcccgctgctgcagcaatggagccctgctggcgcgatctggtacgcgcatgcctgctgttcggccggcgctgacaagccatcgacgttccatggcctcgtcgaccgccaatccagcctcggccgcatgctcgttgcagttgccggcatcggcccttgtactgcaccgctgccacgcgcgttgctcggcgccgcccaaccacttggtgcgttcatcggccatgtcgaacccaccttcgactggaccttgcgtgatcccgacaacggccagcgcatgaccgactcgctgataattgacacccttttcacccatctgcattcgaagtcgaggacgcccgtcggcatggcactggacggttactacaacgccgtagccgggctgctgatcgaccactccaatgccgtcgaagccgtgaataatcacgaagatggcgcccaagtacgtgcgatgaagaccaaactgttggcaatggatcgtctcgcgatggttctacttggagatccaaccgtatcactgccatag

SEQ ID NO: 517880 - DNA, 708 bp, Stenotrophomonas maltophilia
atgggtgtgccgcaactgccgctggccctgcattacccgcgggaccagcgcctggagaccttcatcggcgcgccggatggcgcgctggcgcagctgcgcgcgatcgcggtgggtgccagccacgattgggtctacctggaaggtgcggcgggcacgggcaagacccaccaggcgctggcgatgtgttccagcgccgagcaggcagggcgcctgccgacctatgtgccgctggccagtgcggccggccgcgtgcgtgcggcgctggatgggctggaggcgcgtgagctggtggcgctggacggcctggacgaggttgccggcaaccgcgacgacgagatcgcgctgttcgatttccacaaccgcgcgcgcgctgcaggcgtgaccgtgctgtacacggcgcagaaggcgccggaagcgctgggcctggtgctgccggacctgcgttcacggctgggccagtgcgtgcgcgtgctgctgcagccgctggatgaggaggggcgggcagcggtgctgcgcgaacgcgcgctgcgacgcggcctggcgatcgacgaggcatccatcgagtggctgctgtcgcacaccgggcgcgagctgggtgggttgatcacgctgctggactggctggaccgcgagtcgctggcggcgaagcggcggatcaccgtgccgttcctgcgccaggtgctggaagaaggccggccccgctactga

SEQ ID NO: 517881 - DNA, 567 bp, Stenotrophomonas maltophilia
gtgccaagttgtgatgaaggaatgaagttgacgcgtcgccaggtgatcgccggcggcgtcacgaccgtggcaatgtccgccgcaccgggggcgtcatcgctcgccgccgaactggcgacgccaccgccgcccaggccgccggtcatcaacacggtggccttcaccatcaacggcaagcggcgggagcttgaactcgacacccggaccacgctgctcgatgccctgcgcgaacttctgaagctgaccgggaccaagaagggctgcgatcacggtcaatgcggtgcctgtaccgtgctggtcaacggtgagcgcatcaatgcctgcctcagcctggcggtgcagcaccagggcgatgccatcaccaccatcgaaggcctcggcacccccgatgacctgcatccgatgcaggccgccttcatcaagcatgacggctaccagtgcgggtactgcacgccggggcagatctgctcggcggtggcggtactggacgagatcaagcggggtgtccccagccatgtacaggcagactggaccggccagcctttcgtagacatccggttgccataa

SEQ ID NO: 517882 - DNA, 732 bp, Stenotrophomonas maltophilia
atggacatgcaggcagggggcggattcgatccgccggcaaagaccgattcgcaggaactgacattccactggctctaccagcgggtgcagggactggttgagcacagcatctaccccaaggcgggcagggtggagacgtgggcgtttcgcatcggcgtgggtgcggcgatcttcggcattctcatgggtcagcttccggatcgatggctgcctcttggcgtagtgctccaggtggttgttgcctgcctggcaatcgaaatcggagggttcattgtcggtggcgtactggccgcccgcagaggcattcgccagttcagccagcctcggctctcgcacgcccgggagatggatgaaggcttcgctcactggcaatcggtggtgaccgagcttcgcggattcccgcgcgtccagcgcgagcggcgactcaagttcgtcagcaccttgcgcacaaacatgattgagcgcatgggcatgatgtatggcgggctgcagcggctgggaccattcccgctgttgattgccctttacctgcagttccgcggatggaaatggggcgactggacgggcgctttcgatgttggcctgctgggtgcactactgatcttcgccatggtgctgctgtacctgctgggctggatgctgatcggccttcgcaccaggctcgatacctacgctgccttgttggagggctccatccacgagcccgagccctcccagccaacgcgtttgtag

SEQ ID NO: 517883 - DNA, 1236 bp, Stenotrophomonas maltophilia
atgctatctacaccctttcagggcgtgagggctcaggcatcaatgatcgggaccattgctgtggcgcgatcacgcatttcatcattcgagacatgtatggcagtcaagaaaaatcccgagtcccccggtaagcagaaagatagcttgccgacctattgcgagattcaggcagatgctcgagatattcccctagagccagccacgatcgatgtggtcgtcacgtcccctccgtattggaagaaacgcgattacagcttcgccggccagattggccaagagccgacccctaaggcttttgcggccaccatcgttgactgcctgcgggagtggcgacgcctacttgccccccacggctctgtatttgtaaacctcggcgatacctaccacaacaaatctctggcaggcgtccccggccgcgttgaagcggctgctgctgatgatggctggatccttagaaaccgaatcatatgggcgaaggaaggcggcatgcccgagccagcaaagaatcggcttgcgaatcggcatgaatatatccttcacttcactaaggatgccgactactactacgatgccttcggctactcagaacagtttgggaacggaagcacacaaggcgacgtatggaacattgccctccagagaagcatgggaagtcatcttgcgcccttccctgaagagctggttgagcgcgccttgacgcttgcttgcccgctcatggtctgcaacgcgtgcggaaagccgagggagcgcatcatcgccagaactgccgagctcgatcctactcgaccgcaagcagcaagagcgatggagcttgctaaaaagcacagactgacggctgcccacatcgcagccattcaagccaccggcatctcggacgcagggaaggcgctcaaggtccaaacgggcacaggccgaaacgccgctagcgttcaaatcctggcggccgaggcgaaactcgcgttggggggctacttcagggagttcacctttgccaagaagcggaccacaggctggacagactgtggttgcaacgccgggttccgtccgggaatggttctggatccattcaagggaacagggaccaccctgcgtgtcgcagcgcgaatgcagagatcggcgatcggtgtagactttgctccattaacggaccgagccgtatggagcgccagtggcaccgacaatgaggctgaagagggaagcggttcgcgccgcttgggagcagctcgagggaagtaa

SEQ ID NO: 517884 - DNA, 558 bp, Stenotrophomonas maltophilia
atgaggctgaagagggaagcggttcgcgccgcttgggagcagctcgagggaagtaaagttcacacgcacttcctgggctacctggccatccgtgaaacagcgcagacggctggtcgaagtgaagacttaagggtgaacttcaagagctttttcgaccgattcctacgtgcgaatggcatgtcggaagaagtgccctacatcaaaccttttggaggtcccacgaataatagaaatgtggcggggtcctacgcgccaagctccctgaggggtgtagcccccctgatgaaggtagccagctacgacaatgaagtgacgccagtcacgttcagcctgcttcccaagcatgagtcattggcactccagcatcttttgaacggccggccgatttccctcgacgcgctcggcgtgtttctctacagggactacttggtggcccctgaaattgcgagctacgagggcatcaaagaccttacccagcgtgagtttggactctctgaagaagaggtgacgtccaactactccaccccatttttctacaaaggggctctgtttcgatga

SEQ ID NO: 517885 - DNA, 1002 bp, Stenotrophomonas maltophilia
atgaacgctccgcagccgatccaaatgaaacaatcggtcgaaccagataaacgctacagtagggaggaacttgggataccggcacaaggtgacccgaaggcctcgccagcggaccagccgccatcaaccgagtccgaaatcaccatagacgcaatttcggatgagcaccctctatggttgtcggtcagcgaggccaagatggacggctatggaggagtaatcctaagtggcccgcctgggaccggcaagagctggtatgcccaaaaaatcgcagcgcgtcttgcaggctcaccggatcgcatcaggtctgtccagttccataccggatatcaatacgaggacttcgtgcagggctgggagcccgatggcgccggcggctttgtgcgggctaacaggcatctgctcaccattgcgcaagcagccaaagaagaccaagaaaacagctatgtcctagtgattgacgagatcagccgcgccgatgttccccgggtgttgggggaagcattgacctaccttgaaatgtcgctgcgcgacaggccgttttatcttgcctccggggagatcaccgagattccggcgaatttgttcatcatcgctacaatgaacccttgggacatctccgtggatgaacttgacatcgcactggagcgccgatttgcgcacattgaggtgttgcccaatgcagaagaactcttaggcatcttggatagcaatggagcggacgtagagaccaaggaactttgcagagcgcttttcggcttactgcaaggctccagcaacagcatgattcatgttggtcacgcttacttttcaagagtgaaagacgaagcttcgctggaccgactctggaagttccaaatatggccccacatcaaacgggttactcgcttggatcctcctgaggccacccgaatcgagaccgcgtggaaggcccgtaaagccaaccggccggctgcgccaggacctgcggacgaagttgggtcaaataaagaatccgaatga

SEQ ID NO: 517886 - DNA, 1437 bp, Stenotrophomonas maltophilia
atgaacgcactccgcgaacaagagcccatgcgcgggcccttcaacctcgacgccgagacggcggtgctggccggtctgctgctgcacaactccgagctggccaatgtccaggactggctgggtgcagatgacttctactccccggacaatcgcgccatctatgccgccatcgtggagctgaccggcgcgaacaagcctgcagacggcgtaaccgtgggcgagtggttgctggctcagggcggcgaggatggcgaccaactcgccgcaatggcgatggaactggcatcgacggcttacaccgcgtcaaacgtcgtgtcctacgccgaggtgatcgtcgaacactcgcacatgcggcagttcatcgacacctgtcagaaggcgctcgcagcggcccaagggcgccgcggccattctgcggaacaactggccgcgcacctggccacgcggttgggcgcgatcgctcccgttcgggcgactggcctacggccgtaccgggaggtgatgaaccgattcgccacgcagatggctgagcggcaccagcatggccgtcgcgtgggcatgccgacgccatgggctgacgtgaacaaggccatcggtggactgctggacggccaggtgatcgtgctggccgcgcgttcgaacatcggcaagtcgctgctggcattccaacaggcgcgctttaccggcctgcgtggtgatccggttgcggtgttctccatggaaatggtcgacacggacgtggcagcacgcgacgtggctgcgctgggagaagtgccgctgcagtggatcatcggtcaggacgagggcgccactgcggaagacgccgacctctactggtcgcggagtaccgaggcgatccgcagcatgatgggggcctcgatcttcctggacgacgacccgcagctgtctgcgccgcagatcgtcgcgcgcgcgaaacgtgcccatgcacgcaagccgctccgcctggtcgtgatcgatcacctgcacgaaatgtcgctgccaggaaagcaggacgaggcgttggagcgcgggcaggcgctgcgagacatcaaaggcctggccaagttcctgaagtgcccggtgctggtgctggcgcagctcaatcgagcgggcgcgaagggcgaacgcccgaaggtgaccgacatccgtgggtcaggcggcatcgaagaagtggccgacgtgatcctgttcgtccaccgccccgacgtctacaacccaaccgaccggccgggattggtcgaggtgatcgtgggcaagggccggaacatccagaccggcaccgtcgtttcgctacgcaacgagtaccaattccagcgcgcagtcgattgggatgggcctgcgttcgagttcgagcagaccccgcccccggcaaagccgcagaggcagttggcgcagcgcctcggcagtcgccgccgcagccaaggagacgacgaatga

SEQ ID NO: 517887 - DNA, 984 bp, Stenotrophomonas maltophilia
atggctgaggcagacgttcgccaagccaagggccggtatcgcaaggtcgaggtgcgcacgtggggcgacgagaagttccgccgcctgacacccatcccgccttgcggccaaggcctgtggctgttcctgatcaccggcccgcacaccgggccgatccccgggctgttccgtgctggtcgtgcggcgatggccgaggaactggattgggaagtggaagacttcgataaagcctttggggaagccttccgcgaaggcatggttaaagccgacttcaaagcccgcgtggtgtgggtgccgaaggctatcaaccacaaccggcccgagtcgcccaacgtggtgttgagctgggccgcagagttcgatctgatccccgaatgcgccctgaaatgggaagcgctcgaagtgctgagagcctttgtttacgggcttggagagtctttcgcaaaggcattcgatagggctttcggtaagccttccccgaaggctttgccgaagactatgcctaatcaggaacaggaacaggaacaggaacaggaacaggaacaggaagaagatgaagccactgacgtggctttgccggcagcaggcggcgatgccgctgctgacgccgatggcgaagagggcggcgacgcaggggagggcgaggacctgctgggcaaggtgccgaagaaggtcggcacgccgccatgcccgcacctgaagatcatcgacctgtaccacgacatcctcccggaactgaccgaggtccgtgtgtgggagggcgagcgcgagcgaaagctggcggcccgctggaagggcgacaaggagcggcagaacctggactggtggcgcagcttcttcgagtcggtgcggggcatgccgttcctgatgggcgaacgcactggccgtgacggccgggccttcacctgcacgctggaatggctggtcagcccgaagaacttcgccaaggtcatcgaaggcaactacgtggacgtgcgccgatga

SEQ ID NO: 517888 - DNA, 252 bp, Stenotrophomonas maltophilia
atgtcccaagagcttgttcggcaggacgcgctggtcgcggcagagctgaagatggcgggtgactccgcaagaccggaaatcgcgaatcgcctgaagaaagcccaggccatgtggacagcatttcgggcccaggactgcgaaacgaaacaggcagcggtcacaggatccggcgccacctctcagtaccttgaatgcatgatccaccatgcagtgctccgcaagatccagttggggaactactggtccttgtga

SEQ ID NO: 517889 - DNA, 216 bp, Stenotrophomonas maltophilia
atggacgtcgccctgtacccctgccatgccaagagcctgcgccgtgccggccaggcccgcgcgcagctgttcgcccacgtcatcgagggcaagcgctacaccaccgcgcaggtggccgagatcctggacatatcccacagcgccgcatacgagcggatcaagcggcgccctcacccgctcacctgggccgacctgcagatggtgcgcctgccatga

SEQ ID NO: 517890 - DNA, 3750 bp, Stenotrophomonas maltophilia; identical to SEQ ID NO: 504198

SEQ ID NO: 517891 - DNA, 2919 bp, Stenotrophomonas maltophilia
atgcacttcggcgttcccaacagcaagcaaccgctggccgaagcgctggacctggcgctggccgcgaccagccaggcccagcgcgatgcactggcacaacgctggctgcccctgccgcagtggtcggcatcggcgcagctggcgctcagccaggccgagaagcgggttctgcaacagccgttgaagatcggcttcgcgccaaacgccgccccactgtcgttcgccgacgaggatggcaggcccagcggcctggccagcgagtacctggcgcggctgatgcaggccggtgccaacctgcaggcgcagaacagccatgactggtacgaggtgcgcgagaaggcgcgccgcggcgagctgcaggcggtgatgggcattccggtcgattcgcactatctgggcccggactgggtgtacagccaacccttcatcagcgtgccgaacgtgatcgtcagccgccacgacagcccggcgctgctgggcctgtccgacctccaggacaagcgcgtactgctgtcggatccggagcgcgtacgcggttacgtgctgcagcaggcgccgcaggccaggatcgtcgccgcgcgcagcgccgaacaggccatgcaacgcctgatcgatggcgaggccgacgcctacgtgggcaatctggccctggtcgaccacctgctgcgcacgcgtttcccggggcgcctgcaggttgccgcgcccgcgggcttcaacgaccagctggcactggccgtggagcgccggcatgcggcgctcgccacgaccttcgatcgcttgctgctgcagatgacgccacgcgagcgcgaagcgctgcgcggcgactggctggcggtgaagtaccacaacggcatcgactggcgaagcacgctgcgctggggtgtaccgctgctgctggtgctgctgaccgcgctgctggtgcatggcatcggctactggcgcctgcgccgcgaggtggccgggcgccgccagctggagcagcgcctggccgaagtgaccgacaacctgcctgccgtggtctaccaggcccgtcgcgaggttgatggcacgctccgcttcccgttcattgccggtgacctccaggcgctgttcgggatcacccgacagcaggctgagcaggacgccacgatgttgctggagcgcgtcgaagaggacgatcgcgcgcgcatcctgcaggcggtcgaacaggccgcgcaccagttcgcaccgctcatgctggaattccgcctgcggggcaatggagcaggcccgcgttgggtgcgcacccaggcgcaaccctatgccgccgaagccggtgtggtgacctggagtggctactgggtggatgccagcgaggctcgtgcacaagcggatgccctgaccgcagccaaggccgaggccgagcaggcggccgaggcgaaatcccgcttcctggccaccatgagccatgagatccgcacgccgatgagtggcgtgctggggatgctggaagtgctggcgcactcaccgctggatgcagaacagaaacgcatccttggcgtgatcgaggattcggcgcagatgctccggcagatccttgacgacatccttgactactcgcggctggaggccaacgcattgcggctggagccggtaccgcagccgctgcggccgttgctggaaagcgtgtgccggttgttgtcggcgcaggccagtgcacgtgggctggacctgcacgtgcagattgatccgcagctggcagccgcgcacgaagtggatggcgtgcgcctgcgccagatcgtgttcaacctgctcagcaacgccatcaagttcaccgtgcgcggcgaagtgcggctgcagctggaagtgctggggccgaccgccgaagacggcagccagccgctgtgcctgagcgtcaccgataccggcatcggcatcgcaccggaacagctgcagcacctgtttgcgccgtttacccaggccggtgcgtacatccagcgcgaccatggtggaaccggcctgggcctgagcatctgccagcgcttggtgcagatgatggacggcgagctggaactgcacagcacgctgggcgagggcacccgcgccgaggtgcggctgtcgctggtggaagccggcagcagtgatgttgaagcgctggtcgccgagcaggaacaggcggcgctgctgccgccggcgctgcgccaggcacgcgtgctggtgatcgaagatcatccgaccaaccaggcgatgatggcctggcggctgcagcagctgggtgtaccgcatgtgctggtcggcgatggccagcaggggctggatcgcctggcatcggagcactttgatctggtcattaccgattgccggatgccggtactggatggtttcgccttcacccgcctgctgcgcgaacgcgaaggccgcaacggccagccgcggctgaccgtactggcgctgaccgccagcgtgctggacgacgatgcacgtcgttgccgtgaagccgggatggatgaggtgctggccaagccattgtcattggcgacactgcgcgcggcactgctgcgctggttgccgcaggcgcaggggcaacggttcgaggagccgctggccgagtccgctgccgtcgatgacaggacgctgcccgatctggacagcctgcagcggcgcttcggctcacgcgcggtcgccgagcagttgcgcgacagcctgctgcaggccagtgcaggtgacctggccgctgtgcagcgcgcgctggaggccggcgaccgtgaggctgccgcgctgcacctgcatcgccaggccggtggcttgggcgcggtgggagcgacggtgctggctgcgcaggccaatgccctggtcgagcgcctgcaggatgcggccgagaccgatccggtgccgttgttcaccgcggtggcggcattcgtggcgcggctgcaacagcagttgcagcgcctggctcactga

SEQ ID NO: 517892 - DNA, 180 bp, Stenotrophomonas maltophilia
gtgactatcttccgggtttacgacatcgtgtgggacgtggatggggcgtcggcggcgcttccgtccgaagtcgagatcgcctgcgctgacagagagtccctgccggacgctctatccgacgcctacgggtggctggtcaaggactttaaagtgggccggcaaactagggcagaagactaa

SEQ ID NO: 517893 - DNA, 942 bp, Stenotrophomonas maltophilia
atgacctctcccattccctgcggtcgtttcgcgccctcgccgaccggcctgctccatcccggatccctgctcgccgccttcggcagctggctgctcgcgcgacataacggcggcttgtggcggctgcgcatcgaagacgtcgatccaccacgcaccgtgcccggcgccgccgagtcacagctgcgggcgctggcagcgttcggcctggtccacgatggcccgatcctctggcagagcacccgcggcgaggcctaccaggccgcgctggacgtgctgctggccagcgaccaggcctttgtctgccactgcagccgcagcgacctggccgccaacggcggcatccaccatcgttgcgtcgcccggcaacctcgaccggaccctgccgtccgcttccgcgtgccaccgggcagcatcgtgcacttcgacgatggcctgcgtggaccgcagcagcaggacgtgcatgccgaggtcggcgacttcgtgctgcgccgcgccgatggctgctgggcctaccagttggcggtggtggtcgatgacgccgtacaaggagtgaccgaagtggtgcgcggcgccgacctgctcgactccaccgcgcggcagatcctgctgcagcaggcattggggctggcggtgccgcgctactggcacctgccgctgctgctggatgcgccgggccacaaactgtccaagtcgctggcggcgctgccggtggacagttcgcacccgctgcccgtgctgcgccagctctggaagctgctcggccaggcacccggggcgctggaacctgggcacgacctggatacgctgctggccaccgctcggcaggccttcgacccggcacgactgccgcggaccgacatcctgttgccagccggcgcactttccgcgccgatgttgcagaatcccccttcccccacccgacacccggacaacactccatga

SEQ ID NO: 517894 - DNA, 282 bp, Stenotrophomonas maltophilia
ttgaaagagcgcgcatgcagcggccgtcctctctcacattcggcacagttagggatcatcacgcgggtagcactcgagaaattctctgatagcgtcgccccggagaacccggagaacccggagaacccggagaacccggagaacccggagaacccggagaacccggagaacccggagaacccggagaacccggagacggccacccaaaggtcgccagcaatcagaagtggtgcagtgccgttgcggcaaccctactttttccggcagcaattgaattggtag

SEQ ID NO: 517895 - DNA, 522 bp, Stenotrophomonas maltophilia
atgaacagatatgacgcacgtttcaaactgcaggtcgccaaagaggcctgcaagacctccacatcggtcaaagccattgcccgtcgccacggccttgagttctccacggtcaggcgctgggtggcgacctatcggctgcatggttggcgcggatttcatcgccaggcccggttctatgacctcccgttcaagctggctgtcctggaaaaaatgagccaggacggcatgtctgggcgggaggccaccacctacttccagattggtgatgccggcgcggtggggcgatggcggcggctgtatgctcaaggcggtgcccaagcgttggcaccgcctccgccgctgccccgaaagccgatgaaaaagacccgttcgtccaagccgcctgaggaaatgagccgcgatgagctgctcaaggaagtcgcctatctgcgtgcggagaccgactacctaaaaaaactcgatgccttgatccgggaagagcaggcggcgcaagacgcaaagcgcaagccatccaaggattga

SEQ ID NO: 517896 - DNA, 1149 bp, Stenotrophomonas maltophilia
atgacacccgaagaactcatcaaacaacgcaagcagcgcgagctgctcgccaaagcagcacaagccaagaccaccgcccccacggacgcggagaagctcgtcagcgatgcgacaaaagaaaacttgaaaaccgcaggccggctggctgcaagttttggcaaagccttggcagacaaaaccaagcaagcggcctcggtcgccgctgagaaggggcgagaggcgcaagaagcgttggcccggcgtgcggaagaggccaaggcgcgcaaggaagccgaagccgcagagaacgcgcgcctggaagtcgagcgcgcccaggcgttggccgagcaagaagcgactgcccagcccgagccgcgggtggttgagcccgagcccgttcaaaccgattccgctcccgaagcgcccgagccggttgttgaggaggtggttcccgagccgacagcagaaccagaagcaggccccgcgcctgtcatcaaagagccggtcagcgctcctgcgcctgccgtcagtgaagccgtggacgcaacgcctgccgctccagtgccggccgagctggtggccccgtctgttccgaaccccgaaccgagcaagtcagctcaagccccggcaccggcccccaaggcgacgtcgacccgggccccggtgaaaccggaagccctcaaggccaatccggccggtgaggcgtcggcgaaggccagcaacaagaagggctggcaacttctggctgggtcgggcgtggccgtccttgtgctgggtggggcgttggcgtggtggaccactcaccgctccagcgaaaccgttccgctccaagacaaaccggctgcagcagtgactgccccggcccccgtcgccgtgccagttgctccggttgtatccgcgccgccccaggtcgaggagcccaagcccgtgactgccccggtggaagagaaggccgcggtcgctgccccggttgtggaagccccggtgctggcagagccacctaaggcccagaccccggcaactgccccggcgtcaaagccggtgccggtttcgaaaccagctgcaaagcccaagccggcccccaagcctgttgctaaacccgagccgaaaaacgattggcaggaccaagccaacagcgatatcgacgcgtgggcagaaaagatcaggtga

SEQ ID NO: 517897 - DNA, 447 bp, Stenotrophomonas maltophilia; identical to SEQ ID NO: 508235

SEQ ID NO: 517898 - DNA, 672 bp, Stenotrophomonas maltophilia
atgagggtactcaaagctttggcctatatcctgacagccagtatcggtgggggtctcgtctggttgtcggtttggctgtacatgaaccgtgttttcgcagatccgacagcattgccgcctaaggacggtctagcggtccaggccgcctgggcgcaagccattctgtcggtcttcgctgtcctggccgcagtctgggtggcgcgtgggcaagccaagcagagtcaaaagctaatgagtgatgagttggctcgcgtacgagagaaagaagggcaagaatcagctgagaggcagagcttggcatgcacggcgcttcagggtgtcttcgatgacctcacgcgtgtcatcgcgctactctgcaaagatgacttccaagaatggcatgaagcactgatattgctgcagttcagttctcgtcaagcgatcaaggattttcagcgagttgctccggtgctcaacagtacaccgagtggcgcccttcactgcttcaaaatcgagcagtcgcttcagaggttcgaaaacgctatggcagagtacttccagcctttggtgacgcgggaggaattcggtggtctcgtattcggggaaatcaccgatcctgacgtggcaaaggaagtggccgcaagaattcagcgcgatgaagtggcacttttggaacaaattgcaaggttgtag

SEQ ID NO: 517899 - DNA, 363 bp, Stenotrophomonas maltophilia
atgggtaatgaacgtcaaacgggtactgcctgcgacactgaggataccctcggccttgaagcggcagccaggataatgcgacttggcttggaggcaatgaaagaacttgtcgacaaaggcgaagttccggctgtgcgcttgaatcagaagcacacggtcatgctgcgcgaggacctgatcgacttcctgcgctcagaaggacgcaggcaggccgccgagcgaaagaaatcggcgatcggcaacagacctgcagccaactcatccgcgccaggcccgacgaaacgtgcaaacaagtcgcgccgcacgaaactgccggatcttcgcgcatacgagcaggccgatcagcagcgatcgcaaggttaa

SEQ ID NO: 517900 - DNA, 855 bp, Stenotrophomonas maltophilia
atgattggagaagctctccaattccaagatctgcaggagcttcgccagccagggaagcgcctacgccttgcctcggacgcgtcgatgaggggtcctatggacagtaacgaactccaacattcgttacgagggctcgatcaaatggtcacgacttggggggttatgcattcgaaagttctctctttcctctgccgcacggttcatcgattcgatgacaccgtctttaaccgcctctgccaagtcctcgaattcagatttggtccacgtgcaaagcgaccgtctgagttccgccagctccttcgccaagccggagtagtaggccccatcttcacccatcacaaaaagctgcgacggccttgtcttctcaatagttgcagtggaacgctcgaacgcgcgcagaagacttatgcattttgcaagacgcctctccaaatcctcgctgatgttgtgcacgtgtggaatcagagcggtaacaccatctgcggaaacttgaatgagcagcctcttaacttccttatgcttccagtgatcgagcatgttgcccgacttcttaatgacaccagcagaaacaagaagcctctgctcgagaagctccaattcactgacagatattctggctaccatcctggcaagccgcgtacgctgcgcacgatctcgaatcacaggcgcgacaccaactccgagagcgaccaggactgcaagcaaggtcgtgaccggcccccaatcgacaacacaggtggagctcagtggtccgcactcaacccatcctatccagctattcattcgccacccccgcttttgaacaatcgacattctgacatggagaattgctctgctgaggccgacaatgggtaa

SEQ ID NO: 517901 - DNA, 219 bp, Stenotrophomonas maltophilia
atgaagccagagatccagagtgattcgttgaggaccagctactacggccaagacatctacgttgaggcttcgcagcccgcaggcgggaaggcatttgtgcacctcgtacaagccggtgagttccctgagatcaacaaccccgactgcggcgagcacgacacgctcgaacaagccatgcacgccggtctgcggttcgcgacgtacttgatcgacaactag

SEQ ID NO: 517902 - DNA, 294 bp, Stenotrophomonas maltophilia
atgagcacgaaggatccgcagcaggaacagatccggaatcagcgcaatgaggcgcggaagaagatgtatgaggttcagggcagcctgagctacttcctggaggtgtttggggatggccttgctgctcgccaaggttggaagaacgatctcgatggcatcgatgctgtgcactacttcttgatccagaagcacaactggacaccagcgcaggtgcggtcgatgacgcacgaagacttgcgatttgcgctgagcgaagagatgcaaggctggactgtgccgaaaggcacgccttga

SEQ ID NO: 517903 - DNA, 1281 bp, Stenotrophomonas maltophilia
atgaatacttgcatgaccgtcacttgtgagacttgcggcctagacacggattgtagaattggctattcaaaccgacgaactcagccgctccagttcgcatgcccgcattgcagttctaggatgcagatcacgcttgatatctcaaacgcgccggcatcgggtttcgcatttgaaggatgttctaagtctgtgcgggaaacgggaatgccgtttgaaggtgaaaatccgtttgtggatttgcacttggattttccagtgcaaaagggtaagtatgtccccggtaacacgccatggtttcagtccatgaatcaaatgagggatgccgggctatcatctgatcaggtgatggcagcgcaatcatttcattcttggcgcttgaatctgcttaattcgatctatccgcttgctgaaaaatttcgggcggtaataaatttatatttctcgaaaaataaacagctatttcagcagcgggctgctgagcttctgcaggcggaagttaacccttctgtcttgcagaaagatcttaatgcatctgtgtactcggtaattggtcggatgttcctcccgttcatcatatacgaagagtctctgcaaatctccaaagagcttccaaagttgttgtccaccttcgactctgatgcgctcaataggttcgttgatgaaattttttcggatcggtacttgcttgaccttcaagaggattgcctaaagctgtacccgcgaattctttccgctgagatagccttgaggcccgctctctttttggatttttttgatgatgcggccgcggctcaggtgatttctgggcgtgtttcatcgcaggaattcgttcagtttaaggatctttacaaagatattgtggagatcatgtccaggcagctcgtgatgattgcgggtatcaataacttgtaccatcgcggggatgcgaacagcttcaagacggtaagtggcaatgcattgagtggtttggcgaagctgtccgaaaaaactctgtcagatagatttaagtacctagacgattgttggtacactatatcggatggttctttcaatcttggcttgagaaatgctatagcgcacaataacgtgaggtatgatgatctcgcccaagttgtgacgtatattcctgatggtggcgggcttgcgcctgggcaggctgttgagatgcatttcctggaattcatgagaaacttgctgagtgcattccgagagatgcataacatgggtcacgttctcaagagcatttatttttataagattatcgttcgtgacgggttgtag

SEQ ID NO: 517904 - DNA, 477 bp, Stenotrophomonas maltophilia
atgctcatcgccatgcttccttcgatcggctaccaaggcttccggactacccccatccccgttggctgggtgcagatgggcgagcgctgggcactatggtggaacggcagggaggtggccagcctcacccctgatcgtgcgggcggcctgcgcatgacgcttaatgcgctgaagatgtggcagaccaagagcgcgagagtcgccagtctgcggcaaggaaagcgcttcgccgagcgctggtgcgcggccaggatcattcctgatttgccgctgcgggaggcggttgtccgccttaccgacagcacgcccatcaagccggcgcaaccgctgccgggcctaccgccgacgcgagagcagcagttgcaggcccagcgcttggacgaggctgctgctaccgcagccgcccgggtgagggcggcactggagccgccgcggccgaccgcgcggaggcgagcccgcggccaagtgctgcgttga

SEQ ID NO: 517905 - DNA, 1161 bp, Stenotrophomonas maltophilia
atgaattacgtgtctgaggtcctaaagatccttgatggcgctctcaggcatagttctgagcaggcggagcggtacggcgggctgcttgctgcgaagctggaggccgatggggacggcggttccgcgaggcttatcagggagcgattggcaaaagttgcgaagccgggtattggaactcagctgaacaaacgtctgccgcaagaccaggagacgaaggggtttttgctagatgaggaacgtccgcgtgacgtcacagctgtattcagtgatgccgttcaaaagacgttagatgaattcactgaatctgtcgccagatttgacgagctgcgcacggctggagtggaactttcttctcgtcttctgatgtatggccctcctggctgtgggaaatcgcttgcggcccgggcaattgcggcgcagcttgaactgcctcttcttacggtccgttgcgacgctttagtatcttcgctcttaggccagacaggccgcaatttgcgagaggtatttgactatgtgcgcaatcagcaatgcatattgtttctcgatgaatttgacgctctggctaagtcgcgatcgcacacgggagaggtgggcgagcttcagcgtgtggttatcgcattgcttcaaaatttagatgcgatgagcgatgagagtattatcatcgcggcgacgaatcatcatgatctacttgaccctgctgtgtggcggcgttttagcgttttgctgccaatggagtatcccgccttttatcaaagacgtcagatgtgggaaattcaccttcatcgggcaaatttgcagtcagccgatttggacgtcctggctgagctttcggagggtatgagtggcgccgggataaagacagccgcacacgacgtggtgcgtgactgcgtacttcgtcgccaaagcagtgtatcgttgcctcgggcacttgtccggctcgcacgcatcaagtggctgtcggaggggcaagttcctaagcagctggaggcggaaattcgcgctctccgcgaatgggcgccaaaggtttttacatggaaggctattgaatccacctttgagattagtagccgtagagtgaagcacctgttaggggatcaggatgatagaccaaggaatgccagtacttcgcgtaccctacgtgcgctcggacaacctgaataa

SEQ ID NO: 517906 - DNA, 2244 bp, Stenotrophomonas maltophilia
atgatagaccaaggaatgccagtacttcgcgtaccctacgtgcgctcggacaacctgaataagccgggaggcggcggaccaaggaggccgctagttgaggtcactccggcgcttcgtcagacgctggatcagggactacagagcgcgctcgatgccctgcccgaggttgttcgcactgaagggcggccaggtgccctgatagtgaagctgagggaaaaggcttgggctaaatcgaaccggcctaacgctttctttcagacattgggtctccaagtcggcgcagttgaaagagttggtgagttgattgttcctgttagagctgcccaagttcaagatataagagaacgaattcgcgcaggccatagtcaagctgatatattctctatatcagcgattgaggagtttagggcttggtctgaggactatgttttctccgacccggattggcatcctgctcttactgacggtgtgccacacgggcgtcgggtacgaattgaactattcccatgggcgcagcttccacctgagcttggcaggttcggtgtcatcgaagcatcagctcacaacctggcgaaccgagttttctacttggagcccgacggtcttgaagatattgaggcattagttgatcttccggaagtccggcacgttcagctggctccacagtacttatctcctttggatgtagtgcctcaagggttctcccccctcgcagatgatttgccggatgatatgactgatgttccggcctccggtgctcttgtcggaatcattgacacgggcattagtccaggtgtgcttaccccgcatatcgtggctaccacgcattacgagttgccgcccgacacggactgggtgcatggaaccttcgtgggcggtctcgccatggggtcttattttttaagtggcggtgatgcgcgtttccccaaggaaacatgcagactcgttgacgtggcggcgctctcgaggtcatctgttgaggaaaatttgctactcactcggattgaagatgcgctggccagacatcccgatgtccgcgtctggaactgttcattcgcagcgactacccccaacaatcccgcccagtttggcccatttgctgccgcgctagacaagctcagtgacgagcggaatgtgctttttgtgatcgcggctggaaattactcatccaaccctgcgagaggttggccggctggtccaaatcactatccaaacgatggtttggcgatgcctggcgaggcggttcgagcgctaacggttggggcggttgcgccatacagttgccatgtgcaggcagaagagccggctccgttctctcgccgaggtcctggccccgtgtttcatgtgaagccagacgtcgttcactatggcggagggaccaacctcaacggcgacctgcatggcggagttaagtcagttctgccgggtgatgtctatgctgaaggagttggcacgagtttctctacccccattgtgtcgtccatcgctgcaaatgcttgggctgcagtcgaagcggcaggagtcgatgcaaatgcctcgttgataaaggcgatggtcattcatgcggcagctctgaacagcggggaacgcactttggaagagcgccactactacgggcacggacttccggcaagtagtctgtccgcgctgttctgcagtcccgatacattcactctcgtctttgaggcggagctgcagcaaggcgtcgattgggcaaaagatgagttccccattcctcaatgccttcgtaattctgaggggaaattcagaggggaaattgtagtcactatgtgctacccatcaccctgtgattttcatttcggcgaagagtatgtgcagcacgaggtcgaactctcctttggaacatatgatattgaagaaggatccgacccgccgaagcgaaagcagcaaggtaaagtgccgcccgatcgaccggctggaatgggtgcttgggagaaggctcgccttgaggagggtctcaagtactcaaccaccaaagtgttcagaaaaaaattctctcggggttgtgagggtgagcagtggaggctgaagctatcgctcacacgtcgacttgaggtcgcggagagcctgttgcagaaggtctacgtagttgtctcgcttcgggcattggagcccgatttgcccgtctatacgcagggtattgcagccattccacagagctggcgtgtgggcaatcttgttgccccgattcgcactccgacgcgtgttcgcacaagaacctga

SEQ ID NO: 517907 - DNA, 1962 bp, Stenotrophomonas maltophilia
atgaccttctcagcatttgatccgctagagcatcgcagtaccaccaccagtgaggctgcctttagtgctctccgacgagagatctcgaacattcttagctcgtacgtcggatggtatgacccattctgcgagcttattcagaatgctctcgatgcggtcgaggctcgggctcgatatgagtcggcaaacgatgggggaagtgcattccagccagccatttccgtactcgtggatgtcgatggcaactctctaacggttagtgataacggaatcggcctggataaggagcagttccagcagttcctcgcacccagcttttccttcaaatccggaaagacgcgtgggcacaaaggcgttggcgctacctacgtggcatacggcttcaactacatgcgcgtgagtacaaaggcgcccggcttccaggcatctggacagatcagaaatgcgcgcaagtggctgagcgaggacacgactggtgtcaatccgaaggtggagcctgattcaaccgaacatccagatcccgatttcgaggccgttgatcgcggcgtttcagtcaccgtgaggttcgactctgaaacccatcccaagcagctttcttggctgcaggccgcagacgctgatacatggcaaaagatcctgtacataaagacgggtctaggatccgtggcgcctgacgagactgttaaggtctccattaaagttaagaataaaggcgtaatcacggaggcgcacagcgtcggcacttcctaccagtggcttcactcaagtgcgtcaaaggtgatggagtactccacgctgatttccgcccagaacgcgcactttgataagtatcggaatttgaaacttccggacaagtacaagaacctagattttgtctatgcgtcgtgggatgcggaaaagctgcggatcgagttgggctcggagttggatgcggacgcactggagctgattgcaaggcactctccgagcgtcagctttgagtttgcttacaccgctaaaatgtggacgcagttcaatgagagcttgggtgtcaggtccaaggtgctttcacctggcatccagcttgccgctaacaatatgccgcaaggtgagaccattttggttccgctcactcgcaacataggtcggcagcagcaagtccatttcttgattcatttcgacaactacacgcctgaccttggtcgcaagggctttcaccgggagctgactgagttcgcgaaggatgtcgcgaaggcaatcgtcgacaacgtgttcccgaagatccgtggatcgctaaaaatgaacacgggggcttctccggatttgatgagaaacattgcgcttaatgagtggaaggctcagataacagagcacgagaaaaatcagcctctcacgcttaagagtaagcacttttttcgacccgttgatcgcgtgtcgataacgtcggccccgactcgggagcaagacgtgatcgcacttttcaatcaactcatcgccggtggcgtgattagagggttgaacatgatgtcgaccaatgagcggttcacgtatgacggcctattccgagtggcttttgatcttgatcagtccgtgtacgtgttcgacgccgagtcgaacccgcttggtgtcagtgcagatgccgccaaggctctttcaggaaaggtgactgaaccccaaattcttgagtacaagttctcgttggacggtctggttgaggacttcgacacccaagacaagaacatcaaggatgtggacctctgtgtcgcgtgggagacgggcacgtcctacaaaggtaagtatgggatcgtctccctcttgattccggaaaacgctgatcagcgtgagtatcatggggtcacgcaccgcttggtggacccagatagcggttctcggctctgcgacgtaataattcttggtgagctcgtcgcgcatctcaacgatccagttgcgtccgcagatctacagagggcgaagtacgagtaa

SEQ ID NO: 517908 - DNA, 207 bp, Stenotrophomonas maltophilia
atgacgggacatcctcagcagttcgtgatctacaaggacaaggccggtgagttccgctggcagctctacgcccagaacagcaaactcattgccgacagcggcgagggttataagaaccgaaacgattgcattcacggggccaggctagtgagctcgatcgcagcgggcgcgttgatgtgggacaagtcaactcaacaatggatttag

SEQ ID NO: 517909 - DNA, 897 bp, Stenotrophomonas maltophilia
atgtcacttctccgagatatccaacaggccgcagtcgactcttcgattccactctcagacttgctacgaaagtgcactcttttggcagcgcggctgcagaatgacgaattgagatcgtgggttgcaagggaactcaacggctacgaatccgccgacgaactccccccctatcgaatagcaacagtaatctcaaagggccatttctccggatcttttcaatcggggctgagaaacgcaaacatccccttgtcctgcttgccagacgagttccaagagatgctcagccacacccacattcagaacggaatcgcggcgctcgagagtctcgtcaagaactcagatggagggactctacgtgagccctggaatccagacctagtggcacacttcggtaagaatatctataaaggaatgaactgcatggaggcgtggaaggtcatccctgtctcaggaattgtcggcgttctagacacagtccgcacgaaggttctaaatttcgctatagacatagaggcggcggccccagaagcgggggaagcgccgcccgacgttgaacccatcgcacaggacagacttcagcagatcttccatacgaacatctacggaactgtacagaacgtcgcaaacggtagcccaggaacaacccagacagcgacttcggtacacaatgagtccgccctgttcacagatcttgtgaaagcaatttcgacctctgcggccgatcaagacaccatccggcgtcttactgaggcagttgaggaaatgcgcttggctgggaacaagaagagcttccacgaggcatacgttaggtttgtctcgaccgtatcagatcacatgcagatcataggaaccgcggttgccccctttctgccgcagctcgctgcacttgcaagctag

SEQ ID NO: 517910 - DNA, 723 bp, Stenotrophomonas maltophilia
atgatggctgattctagtgggatctgttgggccgtggagcgcctcgaccacatgcttggctttggagtcctgcatcggatggtgatgcaccgtaacgcgcaacttccggcatccgtgaaagaaactaagcagtccagatggcgtgcgcgggcaacgggccgcccctcatgcgccacgtttcgccagtgcactaggctcaccccacccgtccgccgtctggcccccactgcacaggccggaacatacgagatgcgcgacctggtgaaacaagcccgcggcattcggtcagaaacagcctatgcactagatgctcggggcgcgcgctgcggtcaaagccgtggagcggtagcaagcggctaccacaacctgctgctggctccagcggaacggaggacaagtgagcggtcagcaatcacgcactgcccacggcagcagtcttccgacttcgatcacagacctgcgcgagcgtttgaaagtgacaggccactacgtgacgatcgatggccgggtaaccgaacagacagcggcaacgcggatcccctgccctgtcagccgactacaaaggtgacgactggaaggcggggcctcgctacttccagcccccaaaacgtcttggaattaccttggcgacgtactagcgtggatcgaatccggcgacagttttcgctgagagcgctaatcagctgcgcacccaacatgcgtgaggacccacctctgctctag

SEQ ID NO: 517911 - DNA, 708 bp, Stenotrophomonas maltophilia
atgacgattgccaccagcaggttacgacttcgtgcggattatgcttatcagttggctgtcgctaccagagacctcctaggagagctggagatcgaagcaaatgagcgatccgccgtggtgattcctctagtgctagcttctttggacacagttggggcgatgtactccctgctttccaataggccggagcaatattgggtgcctgccgtcgccatgcgccgcacacaaatggaatacgtgatgcgggctgccttctttgcaaaagccgccaccgaacgcgaattggcaagattccgtgaaaagggagagatgcccaagagggcgcaagtcgccgggaggtgtcgagcctgccaacagagaacgaggtcgatctctcttgcggaggtggcgcgggaggccagccaacaactagggtgggatggcgatcagctcgtttcaaagctcacaacccactaccgggatctgtcgggcctcatccacggcggcaaggaagtcttgggcatctacacaatgcatgctggatggggtgacgttacgattgagtggaatgatctgttaggtgaactggaggacgccatggtgtttgcccagttggcattgggggtggccatgtcgctgtcgctattgaaggcagaggctttgagcgaggtcgtgcgtcccatctatgagagggcgcacgcctacttcgatcgcgccgggcacgattga

SEQ ID NO: 517912 - DNA, 669 bp, Stenotrophomonas maltophilia
atgacccgtattcacgtaatttgcgaaggccaaacggaagagaccttcgtcaacgatatcctgcagccgcatctttcggccagcggcattcatctttatcctgcacttatcggacgccctggtcacaagggcggaaacatcagttttgatcgagcgctgcgcgacatcaggaaccggctctgtggtgacacggaagcgtattgcaccaccttctttgactactacggtatccaccccgatttcccgggacgcgccggtgctaacccagcttggtcaccgcgcgagaagttcgaacatttccgcatggagtttggtaaagagattgtctacaagctaggagagattcctgcgagtcgattcattccttatgtccagatgtacgagttcgaaggccttctcttctcctgccctcatcgattttcgatcggaataggcgaacgagcgaccgagcagcggctgcgagagattcgcgacgcgttcgcaacgccagagcacatcaatgacagcgtcaacaccgccccttccaagcgcgttggcagaatttcccatggataccagaagccactacacggcatcattgcagccttggaaattggattaagtgatatccggcaagagtgcccactcttcgatgaatggctgtcatctctcgaagcacttcacgactag

SEQ ID NO: 517913 - DNA, 1128 bp, Stenotrophomonas maltophilia
atgagtcgcaagaacccgatctcggaactcacgatcagaggattcaagtcgatccgctcacttgatcgctttgagctgactagtcttaacgtgctgctgggagccaatggtgccggcaagagcagcttcgtgtcgtactttcaaatgctcgctgcaatgatggatggacaactcaaggcttggacctcgaagcagggctctgcggatcgggttctaagctttggcgtcaaagaaactacagagatcagctcctttatcaaatttggtctcaacggttacaagttccgtctccacccgaccaacgaagagaccttcgtgttcgataaggagagcctctacttcaatgggccgctttacggagtctcgtggatcccgctgggtgatggctactccgaagctaggctttcccaagccgccgcgcgtagggcattggatgctggctaccgacgcgatgccgccgagttctgtttcgattcaatttccaactggaaggtttatcacttccatgacaccagcgagactgctctggtaaagcgctcaagctcggtcgagaatggtgacgaactggcatcagatgctggcaatctggccgcattcctatatcgcctccagacagaagaacgcgaagtctatgagaacattctcaggacgatccgacttgccgttccgtattttgatgacttccggttgcgccctcgcctgggcaaatctgaggatgaaacggtacgtttgtactggcgtcaactgggaagcagctacaatttttcgcctagccagctctcggatggttccattcgcttcatttgcctggtaacagcgctgcttcagccaaatccgccttctacaattatcattgatgaaccagagctggggctgcacccatacgcgattaccctactcggctcgcttctgaagtctgcatcaaatcgtatgcaggtcatcgtatcgacacaatctgtcgcactggtcaatgaattttcgccagaagacctcgtaattgtcgagcgcgagcagggcgataccattttcaagcggttggatgaagattcgctagaaagctggctcgaagactattcgctgggcgagctttgggcaaagaacgttcttggtgggcgcccacgctcatga

SEQ ID NO: 517914 - DNA, 723 bp, Stenotrophomonas maltophilia
atggctcagataaatgcagagtacgagaggataggccgcgtaaatctgcgcgccagcactcagttgaagcttgcccacacgattaggaattacgggtatgactggtcgcattcaagtgcagaatggtacagaaaatcaattgtaaagcggcttcgtaaacagcaaaaagacaggtgctgctattgccggcgcgtaatcctatacaacaaaggcgcctacgaggtggatcacataatcgacaaaggctcccacaagaagaagtacggccgcttctgtttcgagctgcagaacttggccctggcatgcaaggactgcaataacaacaagggcatcaaatcggtacttttcaatgcacttcccgcaaacgccgcgtacccaaccaatcaggctgcattcaactgggttcacccacaccttcacgattactctgcgcacattacaattcacacgggctggatctacgaggcccgcgcaggaagccaactcgggcttaaggtaatctcgaattgcaagctcgacgaccttcaggagaaagaggttaaaaatcgacgcgcccacgtcatggctgcgtcttcatacaatgaggcgctacatcgcgtggcgggctttgcaacagaggccggcctagaggctctgtgcaaagaatttggcgcaaggctgtcccgcaaatggaatacgggaaacgcaatgatcgaggacgctatcagggctctcgtgaattag

SEQ ID NO: 517915 - DNA, 168 bp, Stenotrophomonas maltophilia
atggatgcgaccctaaagctatttgccaagggcaatcgaaaaaatcccgccctagtaaagaaggtgcaggcactagaggcaatagcccccaacctgccggaggatgacgcagtgcgcgaaatgatttatacaatggccgcacttgttcagcgcgacacggaggactga

SEQ ID NO: 517916 - DNA, 219 bp, Stenotrophomonas maltophilia
gtgctcgcccttggtgttgattacgttgcaatctcctatgcgaagtacgcctatttggagaagaagatgcaaaacgtcggcgttggaatagccaatatcaaccactttcgaattatcgagatcgagccgaatttgcgcgcgttttcgccgctggagaaagcgcgcgcatcgctgaaggagatcgccatgcagggcatcaccatgcacatgggcccttga

SEQ ID NO: 517917 - DNA, 633 bp, Stenotrophomonas maltophilia
atgtggatgtcaccgcgctgggcgcgctggtggtcgaaacgcgcgctgctgggcgggttgcaggctatccgcgcgctggccgatgacaaccagggcgtgagcggtgcgcgtatccgcctagcaaccttcccctccatcatctggaccttgctgccggcactgctgcgtgatttcccgcgccgtcaccccggcatcgaggtggtggtggtgggcacggaggaggtcgagaagtggctggacgcgggtgccgtcgacgtgggcgtggtgatgaacccggcgcccgcacggtcgcccctggccctgggcagcgatgtgtgggtggcggtgcttgcacagacccatccgctggggcgtcgtgcaaccgagcgcgggatcgcaccggatgagcttgccgctgagccctttcatccttgcgacaggcgggtgcacgctcaatggccggcggctgatggaagacgctggcctgcaactgagcgacgggtggatcacggtgcgcaactgggccagcgcctgcgtgctggtgcgcgagggcctgggcgtttcgctggtgcccgaatcgaccctaccgttggaccgtcaggggctgcgggtggttgcccgtcgccccggtcatccgtcgcgtgttcggcctaa

SEQ ID NO: 517918 - DNA, 2115 bp, Stenotrophomonas maltophilia
atgacggtccccgaatacaccggccacgacaactcgtatgccaacggcgttacgaaggtcttcccctactcgttccgcgtgctggacgaagctcacgtcctggtcctggtggacggacaggagcaggtgctgggctctcagtacacagtgactggggttggcaacgacaacggcggggacattgttttcaccgttgagccccgtcccggtgcactggtccatcgccggcgcaggatgccgatttctcgaaacaccaactacgtcaacctgggcgatctgttggcggttacgctgaatgctgaccaggatgcaccagtgatgatgctgcagcagctgctgtcggccatcaattactcgattcgtcttcccgaagacaccttcccggtaccggatctgtcattccccaagccggaatcgagcaagctgatcggatggaatgttgccgctgatgccttgcggaacaccgacccgactggccccggcgatctgctgctgcgatcggatctggctgaccccaccggcggtggccggctggtagcgttcaagcgatcgacgaccggcagcaccgcccgggccactcaggcaaagctggacgaagccccagcagccatcaccgattttggcgcgtcgaccgcgaccaccgacaactatgcggccctgaacacggcgttccagaacctggggcgcggtgaagtcatgaccatcccggctggtcgcttcaacgtgtcttcggtacccgccaacaccaagggcgttcggctgaaggggcctggccagttggtggccccgtggccggtgtcgcagatcaacacctaccgctatgaccacccggtggccatcaacaaggaatacctgtggcgcgtgtatcaggtgctcaacaatgtggctcggcccattcgttgctacacctacggcgattcaactgtggagggcggcttcaactacatcgattgggagttcttcctgcagaacctcctgccggacatggcttcggcgcgcggctgccggaactatttcaaggtgacgaatcgcggtgttggtgggtccagcctcagcacctggaacccaacgcccgatatcggggtgaacaccacggagccggctgacctggtgatcctgaagtgcgggatcaacgatgcctatccagaagcaacgcgactggaagttttcgagcagcgcctgcgtgcaggtctgtctgcgatccgagccacgtctggcggcgacgtaggaagcactgccatcttgctggtcggcccgaatgcggtttgggacatggacggcgatgctcgcaatacgcggtggttcgaacagctccgcccggtgtttgaagcagccgcgcgtgatttcaaatgcgcgtacttcgacgcgtacgcctacctgcaggatgcaagttttgcggcaggccggtggctcgatatgccggcatctggtccggcgactggcctgcaccccacgaacgtcggtcattcgtggatttggggcgcggtcatggacttcatcttcggtgactccgagttgcttcggtacaaggcgaaccagttccacaaccgcagccagttccgcgggtaccccacagccaagaatccgcccacgtactaccccagcaactatccgccagggttcacgatggaggtggcgttggccgctgatggcttccccatcgacggcatactgaccactgaagtgcacgtggatggattcttgctgcaaacgttgcgcgtgaccgattccagcggaacgatgctgacccgcacggccaattcatctaccaacgtgtggggagcctggcacggcgagtcctaccgcttcgggccgagttcggcatttctgaacaactggtcggacttcggcggatcctatggagggggccgctcaattgtcagttcccagggttacgtcatgctggatggcatgattaagccgggcaccaccaccgccggcacgtccatgttcggcctgcccgtgcacatgcggccaagcaatcagcgcgtattgcacgcggtgtccgatgcgggcctgtgcacgctggaagtcctggccagcggtgtggtgcagctgcgcagtggaacggtcaaccagtggctgtcgctgtcgggggtgggcttccgccggtga

SEQ ID NO: 517919 - DNA, 249 bp, Stenotrophomonas maltophilia
atgaaagagcagatcacccaagacctggccgtggccgcggcgaagattgccccggtcgccggcgtcacggtcggcacgtacaaccctgggtacacgctcagcgacgtggcagtgatctgcacgatcctgttcacgctattgcagacgttcaatcttctggtgaagaactggggcgcatggaccgactgggggcgagctcgctggctggccctacgccgattgatcgcgaaggtggcccgccgtggctga

SEQ ID NO: 517920 - DNA, 2208 bp, Stenotrophomonas maltophilia
atgcgcctgacgcccgctcaaaccaacttcaccgccggcgagatcagccccaagctcttcggtcgcagcgatatcgagcgctaccgcaatgcggcggagatcctcgagaacgtcatcatcatggtgcagggcggcgttgcgcgtcggcctggccttcgcttcggcgcacgcgccaagttctcggacaagcatgcggaactgatcccctacgtgttcagccgcgaccaggcctacatgctggagtttggcgccggatacatccgggtctacctggagaatggcgcccaggtcgtggttgagtcatcgccgggcaacttcgtgcctttcgagatcgccaccgattacgctgaggctgatctgccggccatcgactacgtgcaaagcggtgacacgatgttcctgttccacccggactacgtgacccgccgcctgcgccgcttcggccaggcttcgtggattcttgaggccgtgccgtgggttaccgagcccttcggtgaagtcggcttcctgccccctgtatccatgacgctggacagcttggcgctcggtcctggccgcactgtgaccacgagcgggccggtgtttctcgcgtcggacgttgggcgggaaatcgaaggcgctggcggcctagcagtcattaccgcagtgacgagcgcaaccactgtgactgtcgacacacagacgcctttcccatcgctgacaactgccgccggccaatgggtgctgacgggcagccccatggccgttcttacgcccacatatcctggcggcagcgggaccgtcctgccgccggtcggcgcttcggtgacgctgaccctcgatgcagctggatggcgttccacagacgttggccagtgggtcgagctgaatgccggcctggtgcagatcgacagcgtttcgtcaccgacagtagcgatcgccactgtgcaccgcgccatgagcgcgctggtggcggtgccggcgctcgcctggatgctgaagggcacggtatggggggggcgcaacggctacccgggggctgggacgttctacgagcaacgcctctggctggcgggctcgcgcgcgttcccgcagaccgtgtggggttcacgcatcggtgaatacctcaacttcgagctgggcaccaatgacgacgatgccgtgtcgttcgacctggccagcgatcgacagaacctgatccggcacctgacgcaggtgaatgcactggttgcgctgaccaacggcggcgagttcacgctgcagggcagcctggacaagccaatcacgccgacgaacgtgcagatccgaaatcaatccagcttcgggtgcggtgacgtgtcccccgagcgcgtgggccgggaactggtgttcacccagcgcacgaacaggaaacttcgggcactgtcggccgatcgcattgataccgcacagtacggcgcgccggaactgacggtgttggccgaccacatgaccgccggcggcatcaccggcagcgcatacgaatccgagcccgactcgctgctgcattgcgttcgtactgatgggcagctggcatcctgcgccattgaccgcgatcaggaagtcgtagggtggtcgcggcaggtgacggacggccgattcatcgccgtggccacgctgccgcgtgccgacagcgaccaggtgtgggcaatcgtcagccgcacagtcaacggcgcggagcagcgctatatcgaacgcttcgaccgcgaggtgatgaccgactcgtgcgtgacagccaccagcgttgctggggataccacctggttgggcctggaccacctcgagggccgaaccgtgaaggtcaaggccgacggtgtagagctgaacgatcgagtcgtgcaaggcggtcagatcaccatcgaacgaccagccaagcagatcgaaatcggcctgctgtacgtgccgcgcgtgaagctgctgcgcccggaaatgtactccgattccggttccgcacagaccagcaacatcagcatttcggagatcactctgcgcttcctcgcctccactggcgccgtggtgaacggacaagaaatgttcgccaggcaaaccggcctcggcgtacttgaccgaccgccaccgctgctgacgggcgaccagagggtggaatcgctgggctgggatatcggcaacttcaacctggagataacccagccgcaaccgtacgcattccacctgcaggcagtgattacaaccatgacggtgaacaaatga

SEQ ID NO: 517921 - DNA, 591 bp, Stenotrophomonas maltophilia
atgaccaaccccatcaagatctgctccaacgccctgatgattctcggggcgaagccgatcgccagcttcagcgagtcggaagggccgggggcgaatctcgaccgagccaagctctgcgaatcgctctacccgggactgcggctggccatcctgcgtggccactactggaacacctgcgcccgtcgggtgctgctgtcgcccgatgtgaccccgccggcgttcggctatgcctaccgctacatgctgcccggtgactggctgcggacgtgggggatcggcgatccaactacccgggggcggttggactaccgaaccgaggggcggttcatcctgtgcaacgagccggtgctgccgatgctctacggggccgatgttctggaagaccagtgggacagcctgctggtggacgtgatgaccctggccatggccgcgcgccttgcgtacccgatcaccaagagcacatcggtggaagaggccaagcagattgaactgaggaacctgctcaaacaggcgcgagccgccgatgggcaggacgatccgccggagacgttcggcgatttcccattgctgcaaagccggatgaggggttaa

SEQ ID NO: 517922 - DNA, 519 bp, Stenotrophomonas maltophilia
atggcagtcgtgaacaagctctccgccgcactcgcccagcgcgatggcgtgccctcccagctcaacagcaacgccgcgccgaccaagctggccaccggccgcgtcaaggaatcgatcggcgtgatcgccgtggccaacggtgacagcacggccagcgtgttgcgcctgttctcggtgcattccagctggcgcgtcagcgcgctcctcctgtcgtccaccgcgatcaccggcgcggcggccgatatcggcctgtacgatctgccgacccgcaacgcaggtgctgtcgtcaatgccggcctgttcggcaccgcggtcgacctggccgccgcgcagaacggtaccaacgtcctgatcgagtcgggcaccgtcaccccggacaagctggaatggccgctgtggcgcgtgctgggtctggccgctgacccgggcgtctactacgacgtggccgcaaccctgaccgccggcgcgactgcggccggcagcatcgccctgaagggccacttcatcgacggcaactga

SEQ ID NO: 517923 - DNA, 510 bp, Stenotrophomonas maltophilia
atgcccgcgcccgaactgaccgtgaaagtccccggcgaaaccgccgacacccgcgccgcagccgccggcaccaccaccgcgccgccggacgagcgcctggccgccgtcctgaccctgtccaagcagaccgttgcggtcatcaccgaggcgctgcccggcttggtggccggcgacctgatcgccctgcgcgacctcgaggtggcaggcagcaaccgtaagggtgtgctggaagccatcgaggccgaggacgcacgccgcgctgcgatcggtcaaaccaccgacgaccagcccgaatcgttggaggcagaggtcgcccgcctgcgcgcggagaacgaagagctacgcgaccgcgtgcagcagatggaagccgaatgggctacccagcagagcagcatggccgtccagctcggtggccagcgccaggccaacaccgcggccccggtgaccaatggccaggccgtgctgacccccgacggctgggtcgtccccgagccgcagccgaaggcctga

SEQ ID NO: 517924 - DNA, 237 bp, Stenotrophomonas maltophilia
atgcggcggctggcgacagaccctgatcgcgtcgactggttccaggtcctcatcgacctgggcaagcggggtgtgccggtgatggtcgtttcgtcagccatcggcgtgccgcagtcgaccatcctggggtggaagcagggcgcggaaccgaagttcaccgacggggagaagctggtggcgctgtgggccggcatcaccgatcggcccgtcgagcaactgccgcgcgttgggaaatag

SEQ ID NO: 517925 - DNA, 294 bp, Stenotrophomonas maltophilia
atgaggacgaagaacgccaaggcgatcaccgccgcggagcgcgcgcacatggagctggtgaagctctgcccctgcagtgtctgcggccgcgcggctccgtcggaagcccaccacatcaaccagggtgaccacttcaccaccgtggcgctgtgccaggactgtcacaccggcagcgagaacggcctgcacggccgccgcaccatgtggcgcatctacaagatcgacgaagtaggcgccctgaacgaaaccattcgcaacgtactgctgctactcagcacaagggggattcgatga

SEQ ID NO: 517926 - DNA, 1452 bp, Stenotrophomonas maltophilia
gtgaacgcgctgccggactactaccgcgaggaagggctgcgcacgctaccgcaggccatcgaggccgagcaggcggtgctgggagggctgatgctgcggccgcaggcctggatggacgtgcaggacgtgctgaccgcgcagcagttctaccgccgcgatcaccagctgatctggcaggcgatcgaggacgtgctgaagaagggccgcgaggccgaccccgtcaccatcggcgaatggttcgaatcgcgcggcaagctggaactggtcggcgacggcgcctacctgatcgagctgtcggccaccacgccgtcgacggccaacatccgtggctatgccgagatcgtggccgagacggccaagcgccgcgccctgatcgacgccgggcaggagctgatcgacgccgcttacagtcccgagggccgcagtgccctggacctgatcggctccgcgcagacccgcatcggtggcctgctggacagcgagccatgcgacctcgagccggtggcaccagtcatggccagggtgtacgaccagctttcgtcggcctcgaacacgggcggcagcatcactggcctgtcgacgggcattgctgacctggatgaccttctcgacggcatgcaaccaggccgcctttacgtgctggctgcccggccgaagatgggcaagaccacgcttgcgcagaacatcgctgaacaggtggcgctgatcgcgcggctgccggtggcgttcttcagcttcgaaatgaccccggaagagctgggcaagcggatgctggccaacaaggcaggcatcaccggcagcaagctgcgcgccggcaaccttgacgagatcgactggcagaacgtcacccactggaccaagaagattggggacgcaccgctgcgcatcagccggccgcgtatcgccaaggtgcagcacgtgtgcgcgcaggtccgccgcatgaaggcccgggacccggacctggcgctggtggtgatcgattacctgcagctgatgcatgtcgacggcgacaaccgggcatccggcatcggcgatatcacccgagccctgaagctgctggccagcgagttgaagatccgggtgctgctgctgagccagctcaaccgcgacgtggagaagcgcaacggcgacaagcggccgatcgtggccgacctgcgcgactcgggatcgatcgagcaggacgcggacgcggtgatcttcatctaccgcgatgagatctaccacaaggacagccgctgggaaggaacggcagagctgatcgtggccatccaacgcgatggcgcccccggtatggcccgcgctgcatacgcccccggcctgttccgtttctcgaccctgcccgagtggtgggaacccaaacagacaagcgccagcgcgcctgccgccggcactgcacccaggcagaggcgcggcttcgccggcgttgcagctgcccgccaacaggaggactga

SEQ ID NO: 517927 - DNA, 285 bp, Stenotrophomonas maltophilia
atggcaggcatccgcacgatcttgatgttcatcacttgggcgatcgcgttctgctggggcttcggctgggtcacctggccctggcttgccgcctgcttcctgatgggctgggcgcgaggggtgctgttcgccggcgagcgcatcccccagggtgacttccagcagcagtcagatcccgaattccgactgtcctcccggctggtctggatgagcaccctgctcacaatccttcccatcgccatatggggcgccattggcaagggcctgtccctgctgatccactga

SEQ ID NO: 517928 - DNA, 753 bp, Stenotrophomonas maltophilia
atgaaccagatcaccaccatcgaagccagcgacggccagcaagccaccggccttgccgcggtgctgcagcaggcgctgatgatgcccgaacagggtgtagagcgcctggaacgcatgtggatcatgcacaaggaaatgcaggaccgtgacgcggcccgcgcctacgcggacgccatgaaggcctgccagaaggaaatgccggcgatccagaagcgcggcaagaacaagcagaccaacagccgctatgcgctgctcgaggatatcaaccggctgatcaccccgatctacacccgccacggcttctccctgtcgtttggaaccgaccgctcggaactggccgaccacgtggggatcgtctgcgacgtgatgcacgacggcgggtactcgaagacctacacctacgacgccccgatcgacaacgtcggtatcaagggcgagaagaacaagaccaccacgcacgggcgcggctcggccatcagctacggccggcgctacctggtgatgatgatcttcaacctgacgatcggcgacgacgacgacggcaacgccgccggcgagaacgagcagcagcgcatcgcgcgcgagattgcccaggaatgggtgcaggtggcggacggcctgaagacccaccaggactacacgaagcgaaaggccgaggtgctgcaggcctacggcggcaagccggccaacctgccgccggaagtgcgcgaggcattcaaccgcgccgccgcagcgaccaagccgaaggactga

SEQ ID NO: 517929 - DNA, 618 bp, Stenotrophomonas maltophilia
atggcgcagatcctgaccttcgaacagcgatcgccggaatggtacgccgcccgccgcggcgtgccgaccgccagcgagttcggcagcatcatcacccccaagaagggcgagtatgcggctgccgctgacacctacatcaaccagctgatcgacgaggttgtgcgcccggacgctggccagtccttcaccggcaaccggcacaccgagcgcggcgaattcctcgaggacgacgcgcgcgagctgtacgccttcgagcgcgaggtggtgccgcagcaggtcggattcatcctcaacgatgccggcacgctcggctgcagcccggacagcttgatccagctggacggcggcctggaaatcaaatgcccggacggccctacccacgtgaagtggctgcgcgccggcggcgtgccggacgaacacaagccccaggtgcacggcagcctgatcatcaccgagcgcgagtggtgggatttcatgtcctactgccccggctacgacgccctgatcgtgcgcgtgtaccgcgacggcttcaccgagaagctgcagggccacctcgaccgcttcctgcgcgagtaccacgcagcgcgccaggtgttcggcctgaaggtggcggcatga

SEQ ID NO: 517930 - DNA, 378 bp, Stenotrophomonas maltophilia
atgagcgctgttcgacgtccctgcccagtctgcaactgcgaggccaagctggtcaccggccgcgaggtctacccgcaccggccggacctttacggaaagaagttttgggcatgcctgccgcatggcgcgtgggttgggtgccacccaggcagcgagcgacgcatggggcgccttgcgaccgcggagaccaggcgcctgaagatggctgcacatgccgcgttcgaccccctctggaagaccgggcgcatgaagcgcaccaaggcgtatgcctggctgcgggaacagaccggcctgtccgagcgggattgccacatgggttggatgagcgacgacaacctgcgccgcgtgatcgaaatctgtgaaggagccacggcatga

SEQ ID NO: 517931 - DNA, 882 bp, Stenotrophomonas maltophilia
atgaacgatatcgaccagaccgcgccggaaatcgcgcgagcattcatcccggtggacgtggttggccagcagcgcgccaaactgcaagtggccatcatcgaggccatcaagaagcacgcgaacccgaagaccctggcggacgtgcagcccggtgggagggtgaggctggaggatcagaccgagcgggcgcggtttgaggaatgggtgagtgggaagggtatcggcactgaccgctggaaaaacggtgcatacatgagccgctacgtgcaggaaaagtgggagatctggcaagccgccctgtccgcccagccctccccgggtggtcaggatgcgcttccgccgatccgcgaggaccagccgctgcgcggggatgaacccatcggcgaacagcacgatgcgcgcctgttcaaccgtggctggaacgcttgccgcgaggctgctgccgcactcgccgcccgccagccggtgggggagccggtggcactcggggaaaccgaccccatcccatgcgcatggtcagatgacgatgcgtcaagccttgtgacactgcgcgatgcgctgcgcaggattatcgcgggcaccacaaccaaggatgcggcccacttcctgaagcagccgggccaacgccgtatgaccatcaaggacgcgcaggaggttgccgccgcgcatctgccctacgtggaatcgctggtgcaccgcagtcagggatatgccgccccgcccgcgcaggccgtggacctggacgaactgcgccgagccgcctgcgtggtcaacgtagtcggccagatcgacgggcacgatgttgtgcgccgggactcggtgctggatgtgatcgacacccggagacagcggctggccgacagccaggcggtgggcaaatga

SEQ ID NO: 517932 - DNA, 201 bp, Stenotrophomonas maltophilia
atgagccgccagcgctggaagcgtcatgcgggccgtggcattccggacgacgctcacggccctgtagatgtcgagttccgggacggagacattgcgagctaccccgatggcgagtcattgggcgggtgggaccacgagggcgtcgagtatgacgttctcctttaccgggcccggccggatcggagtgtggcccatggctga

SEQ ID NO: 517933 - DNA, 543 bp, Stenotrophomonas maltophilia
atgatcacaactccccaacgccgtgagcttctgcgggcgctctattccaccgaaaggctctacattgagttctcgtcctcatcgattttccagaaacagccagcgcgcaattttctggattcattgtggaatttggttgcgacaggcgagatgccttcacaaggtctcatcagcgaaaccgatctctacgtcgagaatgctgtcccactcgacgagtacggtctttcagccgctgacaataaaggtgaggcgttcattctggccttgggttccctagtgcttttcttgggagaggagcctgcagaatcgcttgatttcatccctgaggagttcgaaagacacgtcgtcgaggaagtggtggtcgatgagatgatcgatccgttgggtccggcacaacaatcgctactagtcacgaaggaggtcagagcagagattgacaaccatccgttgatcagggcgttcgtcagccaagttcagctggacgaatggaagtccaggagcatcgatctgaatcctgaagatatcgagaaatcgaaggggtga

SEQ ID NO: 517934 - DNA, 270 bp, Stenotrophomonas maltophilia; identical to SEQ ID NO: 494088

SEQ ID NO: 517935 - DNA, 252 bp, Stenotrophomonas maltophilia
atgctcgaatcggccgacccggacgccgatgagcgcccgtgggggccggcggtacggcgttgggcgccgttgccgccgtcgaccgggcagagcgacccggccgcgctcgacaatttcgtggcacggctggccgccgacggcctgtggatctacgaggcgatgtacgaggggcagctggatgaaagcgtgcgcgcccaggtggccgaacggatcgccgggctgctggcgaagcccgatggaacgtccagttga

SEQ ID NO: 517936 - DNA, 642 bp, Stenotrophomonas maltophilia
atgctcggctgcgctatgcgcgatgatgggatgagtcgagcatggctcgactctacagaagcacccacgcatgacgtgcatctacagcagcggatcgttgccctggtaggtgccaaccttggttggcactgcagcatgcatccacgcatggcgtggactgatctgctcgcgggatctgctttctgtagagccgagccatgctcggctgctcttcgctcttcgcgcgatgatgggatgagtcgagcatggctcgactctacagaagcacccacgcatgacgtgcatctacagcagcggatcgttgccctggtaggtgccaaccttggttggcactgcagcatgcatccacgcatggcgtggactgatctgctcgcgggatctgctttctgtagagccgagccatgctcggctgctcttcgctcttcgcgcgatgatgggatgagtcgagcatggctcgactctacagaagcacccacgcatggcgtggatctactgcagctgcaggccgatccgcagcactggcagcagccactcgacgaacacctgcacgcgcagtgcacggtgttgccgatgcggttgcagcagggtcaccggcagcggctgcgccgcgtactgcggcatcacctccaccaatgcgcctga

SEQ ID NO: 517937 - DNA, 1200 bp, Stenotrophomonas maltophilia
atgttgctcgaagccaccccgcatgcccaagagtggctccagcagtttcacgtcgtcgatcgacaggtcgcacgccagctgctgcgccggctgacattggtttcccagtcagatttcgaccagcatatccaagctctagtggaagacatcttggcgaagaacccaagcgagaacttcgccgtgctcattgtctccgagccactcccaggtaagttcgaagcggacaaggaacgacgtgttcccggaagtagtgccgatcgcatcaagcacatcatcgagaatctcagtcgagttcatggaaaccgggtcagagctaatccaacggtagatagtatgagagcggaccggattcgaaacgttttactcgtcgaggatttcattggatcgggggaccgaatcacgggctattggcgcgagcgggcgccaaaatccatcaagagctggatctcctacggttggacaaggctttgggtggctgcctatgcagtgatggacgagggtctttatgccatgcgaagggggctgccgatcgacgatgcgcgcgttgccacagtgatcccgaagaagcacaagaagctcggattaatcggcccgatggcacttgttgcccagaagtatggcgagcgcctcgtcggtcgaaattggcgggggtacggcagtggcggcggcctgacggtgttccagcatggatgccccaataacacgcccgcaatcctgtggtgcagcaagggcagattcaaggcgctgtttccagatcgcggcatcccaccggaactacagaaatcgtttggccaactcaatgttccagccgcagcggaagatctctggacattcaaacagtaccaactggccctctcgctgctcgatcgacggccaagcggcgtcatgccgccggatcacatccagttggcgatcgctctgggattggccagcgcgtatggtcggtggagtgacgagcgccttcaagcgcaaatgacaattccgattggcgacataagggagctacgtttcgacgcgtaccggttgaacctgatagacaaatccaatcaccgcttgacgaccttcggtcgagcgctcctagaccacatgcgtaaaccgcccactgcccatcgtcgtgcaaagcctactcgcacaaagaggcttccgcaattgtcggacctgtactacccttccagctgtggaggggtgtcccgggattag

SEQ ID NO: 517938 - DNA, 837 bp, Stenotrophomonas maltophilia
atggtcaagcttgatatcaaggactttttcgagtctatctcggaacggcaggtctactacgtttttcgcaagctggcctatccggccttgctgagcttcgagctcgcacgactgtgcacgaggcgggtcccaccgcgtaaggacggccatccacgtgtgcgcgaccagttagctagatgggttaactgggacccagagcgcaagggaggaccctatgcattcgagacgcaggtgggtcatctccctcagggggcgccgacaagcgcgatgctcgccaaccttgtcgcgagcgacctcgacgcaaaaatcgcgcctgttgcggcctgctatggtgcagcctacacgcgttatgccgacgacatcgtgctgaccttcttggatggctccaaagagacatgcgcggtagtgttccgaaagattgcgcaactaatccaacgggaagggttccgagtcaatcgcagcaagtctcgtgtagtcggcccagggggacgaaaggtcgtgaccggactggtcataaatgacgtgaggccgcgtttgcctcgatcgttcaagagcgatatcgagctcgcgatctatcacatcggcaagcatgggctcatgagccatatgaaacgccgtgaatccaggcggccgctcggatatctcaaccatctagtgggaaagatcctttactgccattcggtcgaaccggccttcgccggtgttgcgatgactaagctgcggcaagcgctcgcgcctcaacgcgagctactggaggttgcgatggcattcgagtctccggaagcttcgccggcaaagtttcactcgctctatcggataatcttcgccccctcctag

SEQ ID NO: 517939 - DNA, 855 bp, Stenotrophomonas maltophilia
atgcgtcagacgcgccgtgccaaccagcgtgtcgaccaaggtcgacacctacccaggcgggaatacctcggtgttgctctggtaggtgccaaccttggttggcacgaacgcgtcagccgcccctgccaacagcgtgtcgaccaaggtcgacacctacccaggcgggaatacctcggtgttgctctggtaggtgccaaccttggttggcacgaacgcgtcagccgcccctgccaacagcgtgtcgaccaaggtcgacacctacccaggcgggaatacctcggtgttgctctggtaggtgccaaccttggttggcacgaacgcgtcagccgcccctgccaacagcgtgtcgaccaaggtcgacacctacccaggcgggaatacctcggtgttgctctggtaggtgccaaccttggttggcacgaacgcgtcagccgcccctgccaacagcgtgtcgaccaaggtcgacacctacccaggcgggaatacctcggtgttgctctggtaggtgccaaccttggttggcacgaacgcgtcagccgcccctgccaaccagcgtgtcgaccaaggtcgacacctacccaggcgggaatacctcggtgttgctctggtaggtgccaaccttggttggcacgaacgcgtcagccgcccctgccaacagcgtgtcgaccaaggtcgacacctacccaggcgggaatacctcggtgttgctctggtaggtgccaaccttggttggcacggatgtgtcagccgcccgtgccaacagcgtgtcgaccaaggtcgacacccaccaacgcgggcgggttacacgtgcggaaccgctgtatcgaagcggttgttgcccggcgtgccgggtag

SEQ ID NO: 517940 - DNA, 585 bp, Stenotrophomonas maltophilia
atgaccgcaccactgcccgtttccccggccaccgttgtcgaggccaccaaggcatcgtcgcccgtcgccgccgtcgtctctgccatgcgacgcatcgaacctgccggcggtcccttagccgccgaccaggtccgcgcatgggccgacaccctgatgactgcgctctacacagcacaaccggtgcgctgggagtaccgccgcaaggacgatcacagcccgggctgctggatgcaggccgacgccggccacgtctacggcgggcaccagcgcggcctcgttgtccgcgccctgttcgacagcccgcgcgtgatccagccagagaaggtccacgacttccaacggcgcgtgtgcgtccgctgcggtgagagcgaggactgggccggcccggactgcttcccgcccgacaagaaggtcgacccgcgcaccctgctcccgttcgacccgcagtggctggtcgagccgctggaatggctcagggatgcccgtccgaacctcaacccgtacgaacgccgcaggagggccgagcaagccgccttcctgctggaaaagctggtcgcccacatcgaggagtgcaagaagccatga

SEQ ID NO: 517941 - DNA, 1662 bp, Stenotrophomonas maltophilia
atggctgacggcgccctcgctttcaacttccccatgccgcagcgctcccgcctgcgccccggcgagatcgttgtggatctgttcgccggcggtggcggcgccagcgagggcctcaagcaggccctcggcatcgatcccgccctggcctacaaccacgacgagctggccatcggcatgcacgccgccaaccacccgctgacccagcaccaccgcgaggatatctggcacgccgacccgcgcgtggacgtggccggccgctccatcggctggttccatgcgtcgccggactgcacgcacttcagccaggccaagggcggccagccgcgcagccgcaagacgcgcgcattgtcgtgggtggtgctgaagtgggtcggtcagctgctgcgcgctgatcggctgcacgggaccaacaccgcgccgcgcatcatctccatggagaacgtctggcagatcctgacctggggcccgctggtagcgaagcgctgcaagaccaccggccgcgtcatcaagatggacggcaccgttgcagcgcgcggcgagcgcgtcccggtggagaaccagcagctggtgccggacaagcgccacagcggtcgcacctggcgccagttcgtggctgcattgcgcgccaagggatatcaggtcgaatggcggcgcctcgacgccagccatcatgcaaccggaaccgaccgggtgcgcctggtgctgatcgcccgccgcgacggcatgcccatcgcgtggcctaagcccactcacggccctggcacgggaacgcccgccatttccgcagcggagagcatcgactgggatctgcatggaacctcgattttctcccgcgctcgtcctctcaagcccaacaccataaggcggctgctgtcgggtgctatcagaggcaactggccgcagccgtaccttgacgcgctgactgcgctgcgagacggccgggaaccagtcctaacggtaagccccgaacaggccgaggaaattgccgtgcggttcggccatcgcgcaggcatggttatggcaactggaagcggcggggccgcgcgtgatgccatgtgtaggccgatccccaccgtaacgacctgtgccagtccgcacttcgtgcgtccgatcatcgtgcatcgccacaattccgccggcggccgcggcgcgcgcccggttgatgagccggtgccgacaatcctgactggcggtggtgggaatctggccgagccgatcatcgccccgtactacggcagtggaagcggcacaaccggacagccctgcagcaggccccttccgaccgtcaccaccaagtgccgtttcggtatcgctgagccagtagtggtcagcacctgtaatgggagcgctcctggtgttcgcctggtcagtgatccactgcgcaccatcaccactgccaagggcggcgatatggccttgggcgagccagtgctggtccagtaccgaatcgacattctctatcgcatgctggttcgtcgcgaactgttcaatgcgcagggcttcccgcgtcactacatcatcgatcggacgcaggacggccgaccggtaaacatcactgcctcgattcgcatggtgggcaacagcgtgcctccacttctgctcaaggcaatcgtcgaggccaatatcgattggctcccagccgacatggcggtggcggcatga

SEQ ID NO: 517942 - DNA, 153 bp, Stenotrophomonas maltophilia
atggtcggcgccgcctgggccggtgacgaagtgatttcggtagctgcgctcccaaccgcagtcgccgacgcccagggcatggcgaaggatctgcagttctgcatcgggcagagcgccggcgatcgcttggtcagccacagcgcacctccgtag

SEQ ID NO: 517943 - DNA, 780 bp, Stenotrophomonas maltophilia
atgtcggcagtagccgcgcccgcggcgggcctgacgccgtgcggcaactgcggcagcgacgaagtgcgcatgcgcgcgcggggcagcgccagcagccggcgcaccgcgcaggtcgtgtgcgcgcgctgcagcgcccagagtgagctgtgcgtcggcgcagatgcggaagctcaggcggtcaaggtgtggggacacaaaccccatgtgtctccggcgccgccggctgtgggtctggtgcgcggcagaatgccgatgccggaatccaccctgcagcgcgatccgctcgagctgatcgcccgcatgctggtcggcggaagtttccgcgagccatcgaacggccggtcgtccatacagccattgacgtccgccgacattgcaggtgccgtcgggctgatgcgggatccagttgccaagcaggctgctatagcggttgcgctgcgggggcagggcgtgtccttagcctcgctcggacaggcgctggccaggcgtgtgatgcgacagatccaatgggatcggcggcacggctcagggtccgtgcttcgaatggatgacccggcagaccgatggcggatgcgtctggttctgcaggacgccgtgaatgatctggtgtggccggaaatgaaggtctcggcgcaagttgcggctaaggcggccaagatgcggaagggcgcgtatctacgggtctacgccatagccactacatcaatgcggcaggcccttgaggagggacggcgagagttcagctctaggctcttcttcgaagggaatcgaggcggttga

SEQ ID NO: 517944 - DNA, 906 bp, Stenotrophomonas maltophilia
atgagcagagcgtggattgggcgtgctgtagggcgggtaaaaggcctgccgtgggtggggatcgtaataagtgtcgtttgtctggcgttaattgtgctgaggaacttataccccagtgttttccagatggacgcaatttcgattgggttgttgattgtcgcagttgcgccctggataagatcggctatcaagtcgattgaggtggctggggtaggtaaaattgaacttaatgatgtcgagaaggcggcaaagaaggttgaggaatcaaacctgcctgggcctgatgacgctggcgttgagttctcggccgaagcgtcagttttagaactgccaacggccaccgcacctcatgaaggaaatgaacctgcaaaggcggaattccctagcgcatctcagcatgctgtaacgccgattaccgatgcctacatggtgcatccgtctagctccccatgggagtcaacgaaacaagtcatagggagcagtaagggattgcgtccgctagtcgagctagcagcgctagagtcgagaaccgctttgttgtctagcgacgccaggacccaagtgcaacttgtatctttgcgcgaaatgctgcttaactgcctgcgttacttgtgccaactgagagaaattccttcaatggggctcccaactaccggcatgattgaccgcctaaaagcgaagtcagttctgacgcgcagccaaggagatggggttctcgcggccgtggaaatggtgaatgaagtggtgcacacacctgcgaccccggaagccgctcagaggacccttgatgtggcgaaggatgttgtccgatcactggactacatcattcgaaggaccgagatcgaacggctcatcgcggatagggtcggttttggcacaagccgtatggacgattcgcacaaataa

SEQ ID NO: 517945 - DNA, 423 bp, Stenotrophomonas maltophilia
gtggtcgacgatgatgtgattaccccgccgacccgaacggtcgccttccgtggcgagaagttgattgtagggccgctgcgcctgcagcaaatcggcccgttcatcacggctagccgcaccatcattgcccgagtggcgatgatggccggcgcggtcgatggttcggagcgcgcagccgttggcgccatcctgcttgacctgctcgagcaggatggtgcggagatcgcctccgcgctggcggtcgcaactgaccgagacgccgattggatcgcggcggcaacactggacgaggtcgcggatctgctcgatgcggtggtcggactcaaccgggattttttcgcccatcgcctgcggcagcttctgctgcaggcaaggctaccgtcggcagagagtacggacttgcagacctcgttcagtacctga

SEQ ID NO: 517946 - DNA, 2760 bp, Stenotrophomonas maltophilia
atggctgaaccatcagcaaatctgcgcgtccgcatcagcgcggacctggccgacatccgtcagggattgggcgtgctcacccgccagctgcgcgaggtgcgcacggaggccgccagaccactgccgaccaagaacaacatcacagagttgggcgtctcggcggggcagactgcgcaggcgatgcgccagttgccggcgcagttcaccgacatcttcaccagcctgcagggcggcatgccctttttcacggtgctggtgcagcagggtggccagatcaaggacagctttggcggtgtcgagcctgcgttgaagggcgtgtcttcggcgctgctgggaatggtcactccgtacaccgtcgcggcggcggctgtaggcgtgctggtgtacgcctggtacgacgccgagcagcaggctcaggcctatacgaaggccttggtgctgtcccgcaacgaggcggctgcaaccgccctgacgctcgtgacgttggggcagcgcaccagcgaggctctgcaggtatccgctagtgccggtcaagaggctgcgttggcgattggcgcgaacgggcgaatcgccgagaagaacctgctggccgtggccgaagcagcggtggccatgaaggaactcagcgggcaggcagtggaagacacggtcgccatgtacggcaagctggctgaggatccggtcaagaacgtccagaagctcaacgagcaggtcaactttatgaccgtggccctctacgagcaggtgaaggcattgcaggagcagggccgcaaccaggacgctgtgaccgtgatcacccgtgcggcggccgacgaaacggtgatggccctcgccagggttcgcgccagccagaacccggtgatccgcggtttcaaggatctttgggcagaggcaacgaaggcgtggtcggcgatgcaggcgaacgtgggcctcgggcctgcggcagcccagatgcagcaactcgtggcagagaaccagcgggagctggcgaagctgaacgaccttgccaatggcacccagcgaggcctgccgctggctcgaaatccgattgcactggcggcgttgcaagtgtccatcaagaaccggtcggagaagatcaaggcgctggccgccgacctgatcaaggaacgcaaggacgccgaggttaaggccgctcagaacgcaagcgcggagttcgtgcagcagcaggacgcgatcatcgacgctcaggcgaccaaggagcagaagaagaaagacgagatcgcgcggatcaacggccaagcggacgtagtgcgacgcaaggcatctgcggccggacttgtggatgaggttcgtgtaatcgaagaacgccgggctgcggcggttgcggccatcgaaaagaagtaccgcgagaagccagcggccggcacaggatcggcatctcgggcggctggattgcagggctacaaggatgatctgatcgcggagcaggcacagatcacatccggaacccagatcctccgcgcccagtactcagcacgtgagatcactgccggtgagtactacagccgtatgagggatttggtgcagcggggaaccgatgcccaggcaaggtcactggaacagcagattgcattcctgcagcggcaggctgtatcaggaaaagacgcaatcaacgtgaaccggcagattggtgatctggaggcgcgcctggcaaaggtccgcacggagggagcaggggcacttcaggttctaacaacggaagagaccgcagctgccaaggcaaggaccaatgtcatcgcggcatacgccaacgcgctcgatgcgagtaaccaggcgctgcagcggcagctttcgacacaggcccagcgcgtaggaatgggcgatcgggagtacgagattcagcagcggatcaacgacgcctacgctgatcaggcagacaagctgcgtgagctgcagctacagatgaacgctggtcagatcgaccaggaaacgttcgaagcggagaaggcggaactgctgtccaagacgcttgatcggctgcagatgatcaaggatgggtatgacgaactgcgccaggccgagggtagctggctggcaggcgcgagcgcggcgtgggcgaactatcagcagcaggccagcaacgcagcccagcagatgggcgctgtagttggaacggtcattggcggcttcgaggatgcctgggtgaaattcaccaccacgggcaagctgagcttctcagacctgaccaagtcggttcttgccgatctggcgaggatcgccgcgcgccaggcaatcatgggcatcgtcaacgcagtggccagcgcttggggcggcggcggcgtcaccgcggcgggcaaccaggcagtcacctctggcaccagcagcatcaacaaccagctgttccagaacatgcggctcggtggtgggtactccacgggtggctacaccggcgacggcggcgtgaacgagcctgcgggtgtggtgcacaagggcgaggtggtctggtcgcagcaggacgtggcgcgtgctggaggcgtcggcgtggtggaggccatgcggcggggactaaagggatacgacactggcggtccagttgggctttcgccaggcggcgcaagaggcgctggtgacctgacgatccaagccaacttgatcgtcaacgcacccgagcgagacagcgaccagccggaggttaccgacaagcaggttcgggacagcctggctggtgcgatgaacgattgggcgacgaagaacctgcgcccgggcggaattctctacgaagcggggtatagaggatga

SEQ ID NO: 517947 - DNA, 348 bp, Stenotrophomonas maltophilia
atgaaagagacatttgcctggcgcgtgtacagcaagccgccgagtgttgaataccaagccgtaacaaggtcagtggcgttcggggatggctacacgcaggaagcgccagacggcatcaacaacgagaagcaggtctgggacctcgagctttggggacaccgagaggtggacctcatgggcgacgccaaggcctttctgcggttgcgccggcagaggggcgagtcgttcctctggacaccgcccgatgaacccacagcactgttccgctgcacgaagctgtctgcagtggacgagctggaaggctatctgcggatcagctgcaccttcgaacagacgttccagccgtaa

SEQ ID NO: 517948 - DNA, 552 bp, Stenotrophomonas maltophilia
atggcgcttcaacctatcaatatcgataccgtccaaccgaacggcaagaagggcgatccagccaggatcgccttcgggaaggtcaacgataacgacgcgtacctcgatggccggatcagtaccgtcgccacagctgcggccaccgcggacacgaaggcgaccaatgcgggtgctgcagctgctgcggctgttccgaagtctggcggtgaaggcggcgccatgacggggacgctcgtcatgcgaggcggcggaacggcagttcgtcgcgcgaactttttccacaatgcgaatgctacgagcgatttcggagccaagctcaccctgtcctacaacgccagcaacagcgatctggccggtttgttcctggtccctacggggcccaacggattcgagtcccaatgccaagtctggttgaaggacggcgacttcttcaattcggcctatgtccaggtgcttacgatcacccgaacggctgtcaccttcaggggcagtgccttgtggcacgcgggcaacaccacggtggatgccaacaacttcatcaagagagcctga

SEQ ID NO: 517949 - DNA, 384 bp, Stenotrophomonas maltophilia
atggagcccacctgtactgcagcgttcaacatccggcctgatggcgggatcgtgctcgatggggaccatgctccaggcacaagcatcggttgctcgtttgatgctttgggcatcgcgtgcgctcgtgttgccattggtgtgtatcgggtagctggtccggggatcaaaccggctaccgggtggcgcgcgagcgtataccgtgacgagaacgacgaacagaccatccgcctggccatccagcaggaggcgggtgcggtgctctactcgtgtaccgatccggcgaccggagaggcaaaggacattgtctacttgctgacggtacgtgtcgtcgttgacgccccggaggtcgaacaaaccgaggatgcggaggccgatgagccatga

SEQ ID NO: 517950 - DNA, 741 bp, Stenotrophomonas maltophilia
atgcaacaaaccaccctgcaggccatccaggcgcatgccgtggccgagtacccgcgcgagtgctgcggattgattgtggctacggccggcggtgaggcctacgttgcctgccgcaatgtggcgacgactcccagcgagcacttcatcctgcctgccgaggactatgccgccgcggaggatgagggcgaggttctggccctcgtgcatagtcaccccgatgcttctgccagtccgtccgatgcagatcgggtcacctgtgaggtcagcggcctgccttggcacatcatcagcgtgggaaagtgcgctggctcggatcccgaatgcggcgacctgcagagcatcgtgccgtgcggctacgtcgcacccttggtgggtcgccagttcgcgcacggtatcctcgactgctacagcctggtccgtgacttccatgcgcgcgagcttggtatccagctcagcgagtacgagcgcgaggacgactggtgggacaagggccacgacctctacagcttggaacgcctgcgcaacgaaggcttcgagctgatcgacggtgagccacgccgcggcgatatgattctgatgcagatccgctcctcagtgccaaatcacgccggcatctacctgggcgacggccaaatgctccaccacctgcatggtcggctttcagaggcggtgccctatggcggcatgtggcttgagcgcacccgctatatcgttcgtcataaggaggcgcgtcatggctga

SEQ ID NO: 517951 - DNA, 585 bp, Stenotrophomonas maltophilia
atggctgagcgcatgcgtaccgttcggttgtacggccagctggggagccgcttcggccgctccttcaggctggcggtcaacagcccggccgaggccatccgcgcactgtgtgcgatgaggcccggcttccagcagtacctggcccaagcgaaggagaacggcatggccttcacggtcttcgtgggcaagcagaacctgacgaaggagcagctgcacgacccgccaggggctgatgacattcggatcgcaccggtgctgatgggctcaaagcgcggcggccttcttcagacgatcctcggagtcgtcctgatcgttattggcgccgtctcacagaactatcagctggtctactcgggcgcggtgatggtcattggcggcgttgcccagatgctggggcctcagccgaaggggctcgggtcgcaagacagtgtcgataacaggcccagctacagcatgaacggcaccgtcaacacacaggcgcaaggcaatcccgtaccggtcgcctatggcggacacgataccaagggcatgctggtgggatccgcggtgatcagtggcggcattcaggcggaggaccagcgatga

SEQ ID NO: 517952 - DNA, 645 bp, Stenotrophomonas maltophilia
atggatgtgaagactgtactgtccgaatgcggattggatgatcgccactttcgggtgctgggcatagctgtgccggaggcgtacgcggccctcaatcagttgtcgctcagtacgccaatgcttggagcgttcccgcagggggcacggggcctgagttacctgcgcgacattgcggttcagcatgccttagaggcgagagcggcagagtcgcggctcttcttcacatccacggcgaggaaccggagcgggaaccacatgttcctcaaactccaagtgggccaggtcgtgatcacgacgcactatgcgggggcacgtggagcacggagtgtcagaaaggcggtgagcaggggggagctggccaccagaacgcctgatctgttcttggcgcaggggacaatgcccgatcactgtcctatcattcgcagcgcttatgctcagcttgttcatgcgggcttggatcagccgaagtttgcgatgctgcagattccggaccgcgaccagaaggcagctaagctcactccctacgtgcttgaactccaaacgccatccaagggcgctgttgaagaagttcaagatagattgaatcaagccttcaaggtcaaggcgcccaacagtggtgccgggcaggatcgtgatgtcggttaa

SEQ ID NO: 517953 - DNA, 1137 bp, Stenotrophomonas maltophilia
atgtcggttaagtttgaacccaagcgccttcagcaggctagaagtctgcgtaggatgtcccttgctgatgtgggggagaaagttgatgtatctcggcaggcgctcagccagttcgagcggggcgaccgtacgccgtctcctgagacattggaaaagattgccagtgcactagctttcccgatcgagttcttctggaaaggcattggtgatattgagggacgagcgcgttcgatgatccattatcgctcgcttcggcgcacgcgggattccattttggataagcagcgtgcggctgcagctatggatctctcggcctcagtgatggatagtctccagcactatgtggactacgcgcccgctgccgttccgaaaatttccgagaacattgatccgctgcaactgaatggcgaagatgtcgaggagatcgcgaacggagtgagagtggcactcggcatcggcaaaggtcccatttcagacatgaccttgctggttgagaaccagtcgattcccgttgttcactatcctttcccggatggtcttgacggcttgtctgcgtactacggcgacaggccgttcatcatggtgtcgtctgacgcctcttatgcgcggtcgagattgaacgtcgcacatgagttcgggcacttggtgctccacgaggctatctcgtatgtagatgaaatcgacatggagaccttcaaaaaggtcgaggatcaagcgtggagattcgctggtgcgctgatgttgccagcagagtcattcctcaacgatgtctacagtacgacgctggatgccctggtgctgctcaagaagaagtggggcgtgtccattgcggccatcgtccggaggcttcgtgtgctcgacgtaatcactgcagagcagtcgaaatacctcaacatccagatccgccagcgcggctgggcaaagaaggagcctggtgacgatatgccgagagaggtgtctaggctatttggccgggctgcagagtacttggactcaagcggaagccttcgtctgcatgagctcgctatggcggcgaagttgccactgccgatcatggctcatgccctggaggtagagcaggctcaattgctgccgccacgcattgagaacgtagtggcttttcgccctaaagcttga

SEQ ID NO: 517954 - DNA, 642 bp, Stenotrophomonas maltophilia
atgctcactcggtccatggatgaagtgcgtagtgagtacatctcctcgatgggacaagagcttggggcgagtttctatgagctgcaccgaaagctcgtggaacttcacgttctttggcaacagtaccgtcagcttttcggcgatgaccctgacgcggtccacctgcttaaccggacctctggtctgttcttcaaaatcgttcaagacgagctgtgggacagtgttctattgggtgtctctcggatgacggacccgccaaccacgggcgagaagaagaatcttacgatccagtctctgcctccgctaatcgccgatacagagctgcagggcgaggtgcagagtctctgtgacaaagcactagttgcagcggagttcgcccgtgagcatcgcaacaagcgcatcgctcatcaagatcatgactacctcagcaatagtagttccgatccactgaccggaattagcaggaaattgatagaggagatgctcgctgcactaagagccgtcttgaaccgcttagatctgcattttcgaggcggcacggtcatgtatgaagatttcgtggacgagagtggagcaaggctcctggttaataaactgagagaactagagcgacttcaaggtgcggtcacaagagcgccctaa

SEQ ID NO: 517955 - DNA, 363 bp, Stenotrophomonas maltophilia
atggacgttaaagttatctcagtgcacagacagggcgactttgattcagagtacgtattgcttcaagtcaccgctgactgtgacgttggcaagtatcagctgtgtgacaccacatataccgatgatgacaaggtttcaaacaagctcagacatacatactggtttccggacaaggctgtaaagaagggagatctcgtttctttatggacaaagagtggaaagaacacgacggccaaaaacagttccggaaccacaatccaccgtttttattggggccttggaaaggcggtctggaacaatgatggtgattgcgccgtcttgcaacaattgacgacctggcagctcttcaaggccaacggctga

SEQ ID NO: 517956 - DNA, 1299 bp, Stenotrophomonas maltophilia
atgattcgtagtgtggccgagctgctcaaacctttcgtggatgaggagcgaaagaagctagatgcctatgccctgacgcatgggccgacaattggcgcaatgtatgaagggcttactaaagaacttctgcaaaaagccattccggaatcattcgggctgcaagtcgtatctggattcattcatcacggcgagacgactagcggtgagattgactgcatgctcgtgagtggggctggcgagcaagtcccgtacaccagtaagttcaagtggccgatacaagacgttattgccgtcctagaggtcaaaaagaccatctccgcagacgagctatcggacagctatgaccacttacgccaagtgtcgagaatgtacggggagtatatccaaagccctcatggagatggcggagaggtagacataagctgggtgtatcgagtattcagccaattgacaggaaggagagtctccgactactccgaagttgaaaagctgccctttgatcttgagatgatcttccatacgttggtcagtgaatttctggagccggtccgaatcgttgtcgggcatcatggttggaagagggaagagactctgcgagcgcatatttacaagttgcttgagagtaggaagggcaatccgcagggcatgggtgctggtagtttccctcagctgattattggtggtgagtattcgatcgttaaggcaaatggatttccgtacgcgccatgcctgcaggatggcaggtggccatttctcttgtcctctagtcacaatccagtgcgactcctgctcgaacttgtgtttaccaagttggacatcaagttcggcaccaaccttgctgaagatgactcactagaaagagaatccatgtctgtctgcctttgtaccagggcggtgcaaaaggacggaaaatctgggtgggagtatatgttttacgccctcggagaaaaggaactaagggagcgtgggtcgagctatgagtgggcgccagttgcaatttctgacgcccagcatgcagctttcatgaggctgtgtagggacggacatatcgcgttggatgatgccgacttcagggatttctttcatcgggaagacggtggtattgaccggttcattgagtctttggttaagactcagctcgttgccattcaagacaacaaactagtattgaccaccatctcctgtcaggtcgttgtcacgccagacggggcttttgctggtgaaaaccatgatggtcagctttcagtgtggataggtgagcaattgcaggctctcagtgcgaagaagaggggcggatga

SEQ ID NO: 517957 - DNA, 501 bp, Stenotrophomonas maltophilia
atgtctagccatctagagcccagcgttgaggaaatcaagaaagaatgccgacgacttgaagagtcatgcctctacacgtccacttccctcttcagctgggaaagggaagcgcgagcactgcgtatcgcttttatcgtggccccaatcatactagggggcgtcgccaccattcgaccgctcctgcgcgagccatcatgggattggcttattgcaatatgcgcgttgggtgcaggtctgttcccggccattttcaaagcgctcgactgggacgtcagcgtaaaacttgtaggtgacagcgcgaatcgattcaagaatttggaaagcaggttccggcagttggcctgcttctcagatggccaacaatatgattccgtgaaggcgtcgttcgatgaactctacgagagacttgaggacgcacgcgcgtcgaatcccaccccgcccgaaagacacttcaataaggctcgggccaagattaagaagggtcatttcaaacaggactga

SEQ ID NO: 517958 - DNA, 900 bp, Stenotrophomonas maltophilia
atgtcgcaatggatatatctggcacgtcggtttagctcatttctcgacgcaatcgagctcaccgcatttcaacgagcggatggtttcaccaaaattgctaatgtgacgaaatgcctcaaccaggagtactgggggtccgactcggtaatcgacaatagctttgcaattggaagttggggtaagggcacccaagtgcgcccccccagagatatagacctgtacttcgttcttcctagctcggtatattctcgatttgagcgctacgctggaaacaagcaaagcgccctcctacaagaagtcaaaggcaagctactcacgactttcagtcgaagcgacataaagggggacggcccggtagtggtggcggccttcacgactttcaacgtcgagattgtaccggccttcctattggatgcagcgtcgaattcctacattgtctctaatactaagaacggaggctcctatacgttgacgactccgtttgctgaagcatctgccatcgactcaattgacgcgaatcataacgggaacctgcgaccactaataaagatgatgaaaacatggcagtaccactgcaatgtccccatgaaatcattccatcttgaattgcttgcctccaacttcctacgcgactgggcgcacagccatcagtcactttttttctacgactggatgtgccgagacttcttcgcttggcttacaacaatgaccaacagcagtatttcccgcccaggcacattcgagctggttaacgtcggcgacgcatgggattcaaaagccagatctgcgttgggtgctgcagagaaggcttgcgattatgaacgagacaacttgaattatcttgcgggcgccgagtggcaaaacattttcggaactgatatcccatgtctagccatctag

SEQ ID NO: 517959 - DNA, 204 bp, Stenotrophomonas maltophilia
atgggctcggctctacagccggaaaagccgagcgtgggcccgcctctacaggaagcaaagcacaaaaaaacccgcgttcgcggggttttttgtttactgcatcaagcaggcgatcagtcgcccagggtcagcagcgaggcgttgccgccggcggctgtggtgttcaccgtcaccgtcttttcggtagcgaagcgcagcaggtag

SEQ ID NO: 517960 - DNA, 210 bp, Stenotrophomonas maltophilia
atgcaggcgaaggcgtgcggaccaacggtccgcacccaccaggagggtggtgacacctattggcagcgccaggccatggctggcgaaggcgtgcggaccaacggtccgctcccacctcaggagacgccggcgcccttggcctgcacgtcggcgtggtacgacgagcgcaccatcgggccggaggccacgtggctgaagcccagctcgtag

SEQ ID NO: 517961 - DNA, 267 bp, Stenotrophomonas maltophilia
atgccggccagcggccggcactacccccctcgccgcctgactgaaatgccggccagcggccggcactacccccctcgccgcctgactgaaatgccggccagcggccggcactacccccctcgccgcctgactgaaatgccggccagcggccggcactaccccccccgccgcctgactgaaatgccggccagcggccggcactacccccctcgccgcctgactgaaatgccggccagcggccggcactacccctcgccgcctgactga

SEQ ID NO: 517962 - DNA, 399 bp, Stenotrophomonas maltophilia
atgtgggccgagttcgacgcaggttggcgtcgcttcggcggttcgcttcttgtcgcaatctttatggtccttcagacgatcttcgtgatcatgctgctgagatacttaggagctgacttcctggagggtcgaagtaatccgccattctggatcatgcttgtctcggcgtttgcgctggcttggttcatctccggatcaggcgccaagaatggcgaatctctagctgtcgggcatgacggaaagtgggcaactattcttgcgatctaccttataccaggggtgggcttggcgctgactcttctctggaagcagtacataccatttgcagtcgtgcacgcggtgattatcggattcctctatttttcgtatgggaagtatgttgtacggcgactcggttga

SEQ ID NO: 517963 - DNA, 438 bp, Stenotrophomonas maltophilia
atgcactggcctgaaccagcaggcgagcaggttcaggcctatcaaacattgcacgcgttccattgccggttgctgcgaagtgatgcgctcggcttcgtggccgcgaaggcccaggacggttttgaactgcacacgcgctattccgaagcctcgtccttcgagatccgatgcaagggcgttcgggtgctagcggtggaaaacgcatcgccgcgcgtggtgatccgaatccctacggatgcactgcggcgtgcgcctaatatctcgtacctgcacgccaacttccgccgttggctgagccaggacccgagcagcgcgcggttgctggtggcgcctgacgaaccgtcgtggtttgagtcgaggttgcgtggcgtcctagggcgcgtgccccgcacgcagcggtgcgggcttgacgctaccgttgacccgcaccgctcgtaa

SEQ ID NO: 517964 - DNA, 312 bp, Stenotrophomonas maltophilia
atgaaagacaaccgaagcacggccaaaactctttctgcgctcaccatgctggtaatcggcagtgcggccgtcggtggggctgtcgcatcgccgatttctggcgcccagctggagccggcaattgaaagcgcaacgtcgttgaccgtcgtcaatgacctgtcgatggacgagttcgagaaggtcgccacggacaatcgtctggaggccttggttgccggggggcatcacgacgactccttcggctcgcaccaccaccatgaagcggccatcgagaaacagaccgcgatgtctgccgatcgcttcaacgtctga

SEQ ID NO: 517965 - DNA, 303 bp, Stenotrophomonas maltophilia
atgagcaatcgaatcgcagcaaaggccctctcgtctcttacgctgataattgcgggcaccgcagcagcgtcggcggcaccggctcactcgcaggtgacctctgcgggtgctgaactgaaggccctgacgtccatcgaggctgatctggacctgcttcgcaacagcgagttctccactgcccaggaacagatgctggcagacggccaccattcggactcgatcgggtcccaccaccatcacgaggccaccaagaaggaaatggcatccgtcgctgccatctccaactcgcgattcgacgtctga

SEQ ID NO: 517966 - DNA, 351 bp, Stenotrophomonas maltophilia
atggatatggaattcgacacgctctctgcccggatccgctttgcccggatcagcagcggtttgtcgcagaccgacttggccaaggcgctgagcgtcaaccgcgctaccgtcggacactgggaacgagaggagagtttctcccctacgatcgaccatctgcagggcatggcccgcatcatgaatgtgagcgtgtcctggcttgtagccggcgagcagatgaagcgcaccggtgagaccgttggcacacgctcgagccttgaggccaggatggtggagctttcaaaacaccttccgatgtctttcctgcttcacctcctggcgctgatggaaagcgcagagacgtatatctag

SEQ ID NO: 517967 - DNA, 306 bp, Stenotrophomonas maltophilia
atgcacaatcgaattgcaggaaaggcactttcctccctcacgctgatcatcgcgggcactgcggcgacgtcggccgctccagttcattcgcaggtgaacactgcagaagcagggttgaatgccctgacggcgattgacctggatgtacttcgcagcagcgaattctccgctcaccaggacggggttctggttgcccacaaccattcggactcgtttgacgtgtgtcatcctcaccacgatacgggcgttgacactcgcaatctgacggacgtcgcaatcccgtcggactctcgatttgacgtctga

SEQ ID NO: 517968 - DNA, 741 bp, Stenotrophomonas maltophilia
atgcttcacgagaacaacgcacttgggctgttcctgtatgcctggggctacaaagacgctgaggttggtcgggtcggcgcgcggttgcttgcaacagcacaatctttccttgaccacctcatcggtgatttgatcggtcagggagaggaaggtcgatggtttctgatggagttcaagcgtgaaaggcgcgggttcttcgaggaggcccataagaagccggctcgaaaaaatctgatggatgcactatgggccaatcatgatctcgccgagctgtctgcctatgcgcactttgcgtgctggttacaaggtgacgacattacaatccaacagtacgtggtggccactgacgatgctcgagtagacggttatccgccccacaggatgccctttgtcaggggctcactgggctttgtccgggcgtacgagtatctcaccgaagccgattcgactcctttcccgcacagatccgaagaccttttctcgcacggaacaggtgtaaccggcgagggcatgcggaagtatctggcggcggtgcttgccgcgcacgatcacaacgtggaccccggcgtagaagtcaacgcactgttgggctttactccgagctcgggtaagcccgtcgtcttggtgtccacaaactttggcggccttctagaggcttttgagcgtgccctgcggacttcagctgcggctacaggacatgagctttcgaagagtcaggcatccgagtcaagtgagggttag

SEQ ID NO: 517969 - DNA, 2238 bp, Stenotrophomonas maltophilia
atgccaagcgtcaatgtgatcgagtgcttctcgggctacagcttccgagccatctccccaaagatggagagcaccctacggtccgagcaatcgacactatccgacgcggatcttagaaagtttgagtgttacctccaaattactcggcgccgctttcacgagggtgattctcggtcgagtcaagtcgcggcgattcgaggattcatctatgcgctttttcacgaagagttttttccaaactcatcaccttgggcaatcgctcgccgcgcggttcagaccttcggtgttatttatcccgaggaagattggcctaagttcccatgcacagcttttaggaatcgttggccatcttcgttcaaagatcaggtgtcggcatttggagacacatcgttcgacaaggaactactggacttctggcggggttggtcatgcacgaataagcaagggcagaaggtgcatttgcgcctacaccagttctcggagcactttggcaactcccgggcacttgagcttctaggcgccgcagcaacttggctacgcggaaggagggctacaagagtaccactcgtccaagagtttgcagcttacgccgtccgaacctatccagaaactgatttcagccgtccattggacgtctcgcgcctaatcagcgggttctttgaagacttcttgagaggcgcagcgtcaaaggcgtacgacttaacaagcgctgtcagtcgctggaattcgttcagaagcattctcgtcgatcatctgctcgggctaagctgggcagtgccctccaaggccgtgccatacccgagcgctccccgccaagcacccgaatattcaaaggttgtcacgctcgaagacggcagtgaagttaagaattctctgcttacccccgtacctcttgacctttcgagtagccaagcaagcgagctcattttcaagtcaatcaagaacgacgtgcggttagtggagcagtgggccacggaagaaacacgacagtcttgggaacgtgcacggcaacgaaagatgcttgcgaagcagggaactccccatagcgcgggccagcttggcgtgacaactggaatgaaaaaacgccgtcaaaggcctcatccagagtatctcatgcacgccgctgcgacatttgaagacgagggcctatccgaccctgccctggcatacgtcaaatatcccacaccgggatggcttacggcttgggagctcggaatacccagtgacgtactgctctttgcccacgcttcgctacttattatcgatcaccctgaaattacgtcgtcgcccctttcccaaatagaactctacaacaaggacggtcaaatgacggggctcgtagaaatcgacggccgacactacttgaccctctacaagaaccgcaaaggtccggatcaagcggaacagcgaatcctcctcaccgcgcggtgtgttgaggtggtgcatcgccttatccaattgactactccactgagagatcatcttagaagaaccggcgacgtcaagtggaggcttctgtttctctacatcaagtcgatgggatcccggcctcggagttggactccagctggctcagccaactatcgcgctccgatccttgccaagagattgcagataatcacgggcatagacgaggaaaaatccaccaaccttggatggcgcttcaccctaactcgtttgcgcgcttcagtcggagtattggtactgattaatagcggttctgctgaggagatggcaaaggcgctggggcatgaagagtacaggccggagctgctgtcacgctacattccgttgccactacagcaatatctttccgaaagcctggttctcaggtttcaaaccagtatggtctgtcgcgccttacaagactcgccacatctccttgaagcatccggctttgcgtcgatggatgagctcgatcaattccttagcgaacatgcccttcagcaagttccggcacatctgcttcccctggagaacaggcatgacatccagacgccagacaaagtcgtattcggcgttagtttgggcgttcttcaagtgctctggagcctggtgatcgctgtatccaccgacgaagagagcgcatgtggacgagctatccggtgggcccacatcggccgccagctattcaaccatctcgagagtcagaaggaacagcccgagtaccggcgaattgcgggcgaggcgaaagcacgtgcgaaccctggcttagttcggagcattctcaatggctag

SEQ ID NO: 517970 - DNA, 2055 bp, Stenotrophomonas maltophilia
atggctaggtcgaaagcacgtcttgcagaagacgtagaggcgatcctcgcaccgttcacttcagatctgaagggcagatacaggaaggcatcatggctcacctcgcagtttgacgatgaagtgtggaccactactattttgggctcagtggtgatcgactggcgcgtacgccttaacgatggaagtctccttacttcgtccaacaataccgagcttctcgatatattcaagtcgttcgtcatacttcaaacacatccggatacgaacggtgggcgtctcgtatcttcccgcactcaaagccatcagctggccagagccatccattgcatcgactatttcttggtgcgatcagcagagttcgacttggctgcccaaggcctgcggggagttacgagcgacatgctgaagggcgttctgaaggaaatttgtagcgacaggaacgtcgcaatcggagtttacagatggccccgtcggctatcggagcttgtaaggtccaacatttccaacatcgacccaacgcaggctccgcccccagatgggagcgatgcgatcgccggcgatcgcttgaccgacctttccgactccgagattgcccgcgcaagacaatggctacaacgtgcgtctctgtacacctacaagcctggagtgtatcgacacacggtcaatcgaagggccatcgcgctgctgctctacgcggatacactggctgggcagcgaacccatcttccgctaccgcatgagctatgcatcgatggctccccgctcggtgactgcgaactccccagggcaaaggtcgtcagtggtagtaacggccgcatgagagctcgcctcgcccggcggtatgcaaacactcttggcggcttcggcttgctaagtgacgagggaatggcatgcccccctgtattcgctgacgagatgatctccgcgattgaagagttcgcgctgcagtcagacggccgattcaagaccccgccgttctcagtcatgatgatagcgctgcgcgaagccgtcgagttcgtggtcaaatttggcgaccccatcgtagacaccttcctcgaggcggcgctggaagctaaagctaagggacaaacgatcgccgcagttctagaagaaccagcctggatcgatcgcacgattggagccgaagattcgatctccttcaaaggctggcgcatcctccacggaagatatgcaaataagcgggattactatcgcgaacttcgctcgagccccggccttcttgaatgtctcagcctattgcatggcgcaacagaagtggttgtgggcgcactcagtgcacggcgagaaggtgagatccggagcgtaactcactgcaatccactcgaccgaacagaaacccggctagtattcaagcagggcaagacaggcagtggagactaccgaaccacagccactaggccgcttgcacctatcggggtcaggtgcataaagctaattagacgccttcagagtggcgtgtcccaaattttcccacaggtagagtcatcaggcctacctctctttgccaggctaagagaccgcgagccaattggcttcacccgcctaacatcgccaagctatcgcagagccattgatctgttcttcgattggattcaaatcccttgcgatgagacaggtgcccgatactacatccgtcagcaccagttccgcaggttctttgcgatgttgtttttctacggcgacggtttcagcagcattgacacgctcagatggtaccttggacatacggacgcaaagcatctctggcactacatcactgagtcagtcccggggtccgtgctgaggtccgtggctgccggattcgcaacgtaccaggtacgacatggtacgactgaggccgaagggctggctgagatcctaaagaaggaacttggtgttagtgagttctcggtgatcgacgacgagactctttccgcacacgtgaatcacctcatcgaagacgggctagtccaggtagagccacagttcttggacaatgggaacagatacaggattgcgatcattgttcgcggcacaccagggctgaaatcgtag

SEQ ID NO: 517971 - DNA, 1422 bp, Stenotrophomonas maltophilia
gtgcgcgcggtcatagatggtcagctacattctctcaccgaggagaactttagggttcctcacttcgtcgaccactacggagcgcttcatacccgcaatggggggaacattccgcttctatactggccggacggccactggtgccattacgggaacgctttcgtgcgccacctgatggagaaaggccagtcaagacggaacagaggagggacactttcggtcacggcgtccaacatctcgcatctaatcaggtactgctggaaggagcggattgaactaatcgagctcgatgacaatcacttcagggtgttcattgacggcctctgtcgagaaccgcacgcctcccgcaaagggcaactcgcccgaaactccagtaccgtgatcgcgattggtagaagctgcctgcagtttctttcctacattgcggacgctagaggagatgtggatttcatcggacagaacggcagaattcgagccacattgccaagtgcagagcacaaaaagcgcaacagcaacctggagcgacggagtaatcacgcggcatccgagagctctacatggacccatgcctcacttccccttcctactgccaagcgcaggcgcttgcccatcagcagccgaaacatcgagcttctccgtgacgctgcctctcgcatcagcaccacggcgcatcaacgcatgcgtcggcaggtgatgctcacgctactggagaccactctggggaggcgcagtgagatcaatgagataacgccaaagtcgataattgacgccctgcagatggatgtaccgatgattgaacttccgacactaaagcggcgcgggcaatttactcgtcaaattcctatgcccagaagcgatctggaattcatcgcgcagtacatcacgttctaccgcagtagggtcacgcggcgacgtcccagcaatactggcaagaacggcggcctcctgctgaatgatcgtacaggcgagcctatcaaggctgagacaataaccggcgagatccgtctgctgcgggaggcggcgggtataagtgagcaggcatgtgcccatatgtttaggcatcgtgggatcaccaaattcctcgtggcgcttatcgagcagtatgagcctaagagtgcagatgacttcaggcggctgctcgttgacatagaggcgctcaagctgaagacgatagagttcaccggtcacgccgacatctcaagcctcgatccatacatcaacttggcctttgatgaggtcaccaacttcaaaaagagctatgacctagtgagggcaagctgtgccatcgactcgttcaggaactctatcaaggtacagcttttggagcttgcgcatggcgcttcggctgaacggacagccgaggccatggagtcattggccagtgctttactcagggaccttggaccagcccagtccgaatag

SEQ ID NO: 517972 - DNA, 393 bp, Stenotrophomonas maltophilia
atgaaactggttcagttccgtaagcgtcgccagcgcctacgctttgcttggctggctttattggccttgctgttccagcaggtcgcgctggcggcctatacctgcccagcgctagacgcccttccactcccgcatgccgtgatggccggctgcgtaggtatggaaatgccggattctgacgcgccggcactatgcgaccagcactgtctgcgcgatcacgtcgcccatcccgatgtgaaggcgccacatgtgccgtcgctggcattaccccccgtccacttcgccctggccgaggccatgttgccgtcggtcgaggcgcagcgatacgtcgacgtgcccgtctgccgatccgacccgccccccgcgcagcgcttctgtagcctgcagatctag

SEQ ID NO: 517973 - DNA, 1320 bp, Stenotrophomonas maltophilia
atgtcctttttcccttcgctgtgccgcaggcgcagcttctgccgttgggcgttgctgacgctcatcctagtcttgatggccgcgcccgcatggtcgggcgccacgcccacctccatttccatttcgtacggtgacgccttgcgtctagcggtggagcgagcaccttcgctacaggcacggcgctcgcaaaccacagcggctcaggaagaggcagtccgcgcggcggcgctgccggatcccaagctgacgctcggtctggccaactatccagtcaccggtggaaatgcgttcgacctgcgcgccgatgacatgaccatgaagcagattggcgtgatgcaggaattcccggcccgcgccaaacgccaggcccgtcaggccgtggccgaccgcaccgtcgaacaggcgcaagcgctgtcgacggccgagcggcaggccgtgcggcaggccgtggcccaagcctggatcgtagcgtgggcggcgcagagggaggtggctgccttgcaggccttgcgtgagcccacggcggtagccgtccgctcggctaaggcccggctggcgggtggcacgggtacagcggtcgatgcgatggcgacgcagaacgcggcgctggagctggagaaccgcatcgatgcggccgaggcctcgcgggaaggagcccgtgccggcctggcgcgttggctgggcgaggatcccgccacgctagagatcgcgggtgcgccaccggagttgatgacgctgccggtcgatacggccgcgttgctgggctcgattgatcggttggcgccactgctgccctggcgctcgcgcgaagccgtcgctgaagccgaggtgtcctcggccattgccgagaagcggccggactggagccttggagtgacctacggtcagcgcgatcgctcgccggaaggcctgtcccgcagcgatatgctgatggtcgaaatcgccatcgacctaccagttttcacacgcaaccgccaggaccgcggcatcgcggcacgacgagccgaactggacgcagtggcggcccagcgcgaagacgcgcgacgcgccgaggccgaggccgtacgcaagaccctggccgaatgggaaggactcaagcgtcaggttgcgcgcaaggaggctgagtcgctcccgctggccaatgaccgcgcaagagtggcgctggccacttatgcagcgggcgctgacctacaaccgtggttggaagcgcgccgcgccgaaatcgaattgcacgttgaacacgcccgccacttgagcgaactcggtcggacctgggcggccctggcttacctgctgcccgaagaggagacctcgccgtga

SEQ ID NO: 517974 - DNA, 1473 bp, Stenotrophomonas maltophilia
gtgacaagtatgaaaaaccgagtggtgatggtcgccgtggccgtaggattgctggccttgggcctggcgggtggctactggtgggcgcagcgcggcggcgcccatgacatgggacttgcgatggcgccagctaccggcgccgaagaacgcaaggccttgtactggtacgacccgatggtgccggaccagcatttcgacaagcccggcaagtcgccttttatggacatgcaactggtgccgaagtacgccgacgaagtcgctggcggcggcatccgcatcgatcccgggctgcagcagagcgttggcattcgcacggcgctcgtcgaagtgggcaccttggcgacgcagttgcgcgtgccggcaacgctgacctgggatttgcgccgagaagccgtggtcagcacgcccgtcaatgcgatcgtctctcgcgtcatggtcaaggcaccctttgaatcggtgcgccaaggccagcccctggcgaccgtgctagcaccggaatggagcagcgcgatcgccgaagcacaggcggttggccaggggcaatcgaagttcgcacgcgagctgcaaggcgccgcgcaacaacgtctgcgtgtgcttggggtgcctgcgggcggtgttcgcaacggcggcgtgaccttggcctcgccgcagaccggcgtggtcagtgaagtgctggttcgcgaaggtcaggcggtgataccaggtacgccgctattccgggtcaacagcaccgatacgctgtggctggaagcggcgatcccgcaggccggtggcgcgggcatcggccccggcaccaaggtgcaggcaagcgtcagcgccgtacccggcgaaaccttcgatggcgaagtcgaaacattgctgccgcagatcgatcccaccagccgcacgcagcgcgcccgcatcgtgctgcgcaacgaaggcggccagctagttccgggcatgttcgccgagttgacgttgcaaggcagtgaaggcgcgcagatgccgctggtgccgatcgaagcattgattgccaccggcgcggatagccgggtgatcgtggtcggtgccgatggcagcttccagcccgtgcgcgtactcaccggacgccgcagcgacgggcgcgtggaaatcctcgccggtttgaaaggcggcgaacgcgtcgtgacctcggggcaattcctgatcgactcggaagcaagtttgtccggcgcattgcagcgactggaagcgccgtccgccccatcgccggaaccgcctgccgcgacgtcggatgcagggatggagccccgcaagaagatgccggaggccatgaagtccccggcaacgccgagcccgccgaggcagccgtcatcgggcgaacgcaaagtcctgtattggtacgacccgtcggtgcccgacaagcacttcgacaagcccggcaagtctcccttcatggacatgcaattggtgccgaagtacgcggatgaagcagataaggaggcacagccatga

SEQ ID NO: 517975 - DNA, 3162 bp, Stenotrophomonas maltophilia
atgatcgccacgatcatccgcacctgcattgccaaccgcgggctagtgctgatggctgcggtgctgcttgccgtgctgggcatctggtcggtatcgcgtacgccgctcgatgctttgcccgacctgtccgatacccaggtgatcatccgcacggagtggccggggcaaactccgcgcattgtcgaagatcaggtcacctatccgctggcgaccaccatgctgtcggtgccgggcgtgaaggccgtgcgcggctactcgttcttcggcgattcattcgtttacatcctgttcgacgacaacaccgacctgtactgggcgcgttcgcgtgtgctcgagtacctaagccaggtgcgtgatcgcttgcctcaaggcgtgacccccgcgctgggcccggacgccaccgggctgggctggatctacgagtacgccctggtcgatcgcaccggtcagcatgatctgggccagttgcgcgcattgcaggactggttcctgcgctacgagctcaagaccgtgcccaacgtggccgaagtggcgagcgtgggtggcatggtgccggcttggcagatcgtgccagatccgcaggcgttggcggcgcgtggcttcaccgtggcccagttgatccaagctgttgatgcggccaacggtgctaccggcggctcggtgatagaacagggcgaagccgaactgatggtgcgtagcgaaggctatctgcgcagcgcggaagccttcgagcaggtacctgtgaccaccgctgccgatggcgtgcctgtgttgctcggcgatgtcgccacgatccagcgcggcccggccttccgtcgtggcattgccgagctggatggtcaaggcgaggtggccggcggcgtggtcgtgctgcgtagtggcaaggacgcactggcgaccatcgaagaagtgaaagcgcgtctgaagaagctgcaggccagcctgcccaaaggcgtggagatcgtgccggtttacgatcgctccgaactgatccacgcagcggtgaccaatctcacccacaagctgggcgaggagtttctcgtagtggcgctggtgtgtgcgttgttcctgtggcatctgcgttcggccctcgttgcggtcatcgccttgccgctcggcgtactcgccgccttcatcgtgatgcgctaccagggcatcaccgccaacctactgtctctgggcggcatcgcgattgccatcggcgcgatggtcgatgccgcggtggtgatgatcgagaacgcgcacaagcatctggagcattaccgcgacaagcacggtcgcgacgccgagggtgacgtccgttggcaactaatgggtgacgccgcagcagaagtcggtccggcgttgttcgccagtttgctggtgatcacgctttcgttcgtgccggtgtttgcattgcaggcacaggaaggccggttgttctcgccgttggcgtacaccaagacctacgcgatggccgcggcggcggggctgtcggtcacgctgattccggtactgatgggatacctgattcgcggccgcatccgccccgaggccgcgaatccgctcaaccgcgtgttgatcgccggttaccggccgatactggactgggtgttgcgcttcccgcgcctgacgctggcactgagtggcgcgctgttgttgttgacggtgattccctacgcccgcatcggcagcgaattcatgccgccgctcgacgaaggcacgctgttgtacatgcccaccgcgttgcccggattatcatccggcaaggccggacagctgctccagcagagcgaccgcatgatcaagaccgtgcctgaagtcgcgcacgtgttcggcaaggcgggccgcgccgataccgccaccgatccggcgccgattgagatgttcgagaccaccgtgaccttcaagccgcgggaccagtggcggcccggcatgaccatggaaagattacgcacggaacttgacgccgcggtgaaggtgccgggcctcacgaacctgtgggtgccaccgatccgcaatcgcatcgacatgctggccaccggcatcaagagcccgatcggcgtgaaaatctccggtccggacacggcggtcattgaacaaatcagcgaccaggtcgagcgcgtggcaaagacggtcgaaggcgtgagttcggcattggctgaacgggttacaggcggtcgctacctcgacgtgcgcatacgcccagagctggccgcgcgctacggcctgagtcaggcagacctgcaacggttaattgctactgtcgttggcggcgaggccattggcgaaaccatcgaaggccgcgagcgcttcccgattgtgctgcgctatccgcggggacaacgcgattcgctccaagccctcgcgcagctgcctgtggtggccccagctggcgtgcagctgaccctgggccaagtggcggagctgtcacttagctcggggccaccaatgctcaagagcgagaacggacggctggttggctatgtcttcatcgatgtcgccgggcgggatctgggctcggtggtaggcgacctgcagcgggccatcagtcagcaggtggaactgccacctggatacggtatcgcctggtccggccaatacgagtatctggagcgcgcgctcgcccgcttggcttgggtggtgcccgccgccttggcgatcatcttcctgcttatttacctggtgttccgcagtccggcagaggccgccatcatcatgctaagcctgcccttggcgctggtcgggggcctgtggttgatttggattcttggccatgcggtgtcgatcgctaccatgatcgggttcatcgccttggccggcgtagctgcggagtttggcgtgatcatgctgctgtacctgcgtcacgcgtgggagcgacgcttggccgacggggaacccaataccatcgaaacgctagatgcagcgatccgggaaggcgcggtgcagcgcgtacgacccaaggcgatgaccgtggccgtgattctggcgggtttgttcccgctgtttgtcggcagcggcgcagggtcggaagtcatgcagcgcatcgccgcgccgatgatcggcggcatggtgaccgcaccactcctgtcaatgctattgattccggccgcgtaccgcctattgcgtggccgttcgttggatagcttggccaaggtacgtcctcatgctcacgatgcgtga

SEQ ID NO: 517976 - DNA, 348 bp, Stenotrophomonas maltophilia
atgagtgtggttgccagaatggtagttgctgtaatgagcgcatgggtactcagcagctgcggcacgctgccccagtccggggtatccggccatgtggtcgatgctgactctacgaagctaaagctgtgtttccaaagttcagcccctgggccaggaatgcaagtgcaaatcctccgtcgccagcgccttggtagtggcaagccacctgccagctactcgatgcggaaagtcggcatcgcacagatagacgcactgacccagggcgcttgcgcatctgccactctgactaaggggatggcgcgcacccgtgacgaagtgcgattgagcgtcggtcctgctgaccactga

SEQ ID NO: 517977 - DNA, 921 bp, Stenotrophomonas maltophilia
atgccagacacatggttgacgggcagtcggttcttgctctacctgagtctgatgctagcgttcggggttccaggcttcgtctggtgggccacacgtcgcctagcatttgatcttcccgttattggtcgaatccaagggttgaccggtggagcgatcgtagtcgccttggctgcgtcggtgcttgcgcttgccgccatggccagccagatgagcggaactgcagagcctagcgaagtctgggcgaccgcttggattgtgctgacccaaacgaccgtcggactgacctggtccattcgcatggtcgcgctcgtcgttgctcttggcgttgtagggatcacacgtcggaatagatctagcagcttggcagtggcttttttgtgtgccgctgctcttgcaacgttggcctggactggacacggagcaatgagtgacggcggcgcggggctcttgcacgtgggtgctgacatcctgcatctgattttcgcaggtgcgtggcttggagcaattgcggtgcttgccttagttgcagcgagtgcggcgcgcacaagtgaccgcggtgagctccgtctgcttgcagaagcctccagcggatttgcaaacatcggtgtgctgatcgtggctgtcctggttgtcacagggacgatcaattacgtgatgactgtcggacccaccctaactgggctggtgagcgagccatacggtcgcctgcttcttgcaaagctaggggcatttgctgcaatgctattgctcgcagcaagccaccgatttcggcttgttccacggcttgaacgcgcactggccgactgcaatgctttacatgcgacatcggcgctaaagcgcagcctgtggtgtgaagccttcttggccgttttcattctaggtctcgtttcatggcttggcatgctgaatccaactggctga

SEQ ID NO: 517978 - DNA, 387 bp, Stenotrophomonas maltophilia
atgaaatcgcttcgcgctctttcccttggttttctgacttttgtggcgtctttctccgccgcaacgactgcctttgcccatccagaacttgtttccactaaccccgccaacaaggcgagtgtgtcagcaccggctaacatcactctttcgttctccgaaactctgcttccgaaattgtcgggtgccgagctgacgatgaccaagatgcctggcatgacgatgccgccgatgaagattgctgtcatgccgatgtcggctcccaacgccaagtccattgtcatcatgccctccaagccgcttgggccgggcagctaccgggttgactggcatgtggtctcggccgatacgcactctgtgaagggttcgttcgagtttgaggtgaagtga

SEQ ID NO: 517979 - DNA, 477 bp, Stenotrophomonas maltophilia
atgcacgctcaaactcaccaaagccacggtgctcgaggcccctacggccgccttctgatgatggtgctgctctcgtttcttgcgatgtacgcgctgatgtattcgatggtcgatcgttgggacaacgtatacaacagcgtcaaccagttctacatggctggactgatggcctcaccgatgttgttgatagagttggcactcatggccggcatgtacccaaaccgtcgactgaacttggtcttgggtatcgttgcctttgtcttcatggggatctgctgggtcggcattcgagagcaggccgccgtcagcgataggcaattcatccgctcaatgatcccccaccacgccggtgcaatcttgatgtgcgagcagaatcgcctaacggatcctgaactgcgaaagctgtgcgatgacatcgtcagctcccagaaggctgaaatagcgcagatgaaggggctgctgaaggaacaacgttaa

SEQ ID NO: 517980 - DNA, 2064 bp, Stenotrophomonas maltophilia
atgccgagtctggaggaggataatcctgagctgcgcgatttttcgcgccgcttcatttggacgctgccgctgaccatcattgtcctgctgttagccatgtttggtcatcggctctccttccctccagttgcggtgcggacttggcttgaacttgtgctgagtgctccggttgtgttgtgggccggctggccatttttcgtgcgttgcgcacaatcgatccgtaaccgtagcccgaacatgtggacgttgatcgggataggcgtcggcgcagcctttggctatagcgtcgttgccacggttgcgccagacctgtttcctgtgtccttccaagaacatgggcgggttggagtctattttgaagctgccgcggtaattgtttctctgacattgttggggcaaatgctcgaactgcgcgcgcgttccaaaacgtctgcggctatcaaagcgctgctaggcctcgcgcccaagacagcgcggcgcctgcgggaagacggaagcgaagaggacatcccgttggaacatgtgcacgtgggggaccggctgcgcgtgcgcccgggtgaaaaagtgcccgttgacgggtcaattctggagggccgatcgagcatcgatgagtccatgttgaccggtgaatcgataccggtggagaaggcgtctgggggcaaggtgattggggccaccttgaacggtacaggcagcctcatcatccgtgcggagcaagtgggatccggtacggttttggctcagatcgttcaattggtcgcccaagcgcagcgttcccgcgcgccgatgcagcgcatggctgacggggtcgccttttggttcgtgctggtggttttggctacagccgcggtgactctgttcggctggggctttttcggcccggagccgtcgtggacctatgcggttctcaatgcggtctcggtgctgatcatcgcttgtccatgcgccttgggcctggctaccccgatgtcaatcatggttgctacgggacgtgctgcgcaggcaggcgtgctgttccgcgatgcccaggctattgagcagttgcgcaccatcaacactctcatcgtggataaaaccggcacgctaaccgagggccggccggcgtttcgcgacctggtggtggccgaaggatttgatgctggtgaactgctccgtctggccggcagtctggaacaaggcagcgaacacccattggcccaggcgatcttgaccgaagttggcaagcgcggtttaaagctgaccaagccagatgatttcgaatctgtcacgggacagggcgtgcgcggccagcttgacggacgcgaagtagtgttcggaaacgagacgctaatgaatgctgttggcgcggatcccgctccgatgtcgtcctctgcggaacgcttgcgcaaggagggtgggagcgtgatgttccttgcggttgacagtcaactggctggtgcgatcgcggttgccgaccccatcaagccgacgacactcgcggcactcgacgcgttgcgggcggacggccttcatattgtgatggcctccggcgacgcccaaatcacagcggaggccgttggcaggacattgggcatcgacgatgttcgtggcggcgttcggccgcaggagaagacggagctcgtgcagcagttgcgcaggcaggggcagcgcgtggcgatggcgggcgacggtatcaatgatgcgcccgccctcgcagcagccgatgtcgggatcgctatgggcaccggtaccgacgtagcaatgtccagcgcacaggtgactctcgtcaagggtgatctgcgccgcatcgtgcaggcacgggccatctcatcttccactgtcgccaatatgaaacagaacctcgcatttgcctttgtctacaacgccattggcgtgccgatcgccgctggcgtgctctaccctgcatttggcctacttttgagtccaatgattgcggcgttggcgatgagcctcagctcggtgtcggtggtcacgaatgcgttacgcctggcaagagtcaaagtgcccgaaccttcttctgccgcatatcccgacgggccgacgcgccgcgcatcaggggactaa

SEQ ID NO: 517981 - DNA, 399 bp, Stenotrophomonas maltophilia
gtgaagattggagaactagcccatagggcttgcgtcaatattgataccgtacgctactacgagcgtcacggcctgttgcccgccccccagcgaatggcttcgggctatcgcttctatggcccggaggatgtggagcggctgcggttcgtgcgtcgtgccaagacgctgggattcaccctttccgagatccgcgaattgttgtcgctatcgacacaccccgatgacgacatggcgggtataaaggctgtcgcgagcgagaagcttgtagagatcgaaagcaagctggcagaaatgactcggatccgggacgggctgaagtcgctggtggcgtcctgccccggccaaggcgctgtggggcgatgtcctatcctcaatgcgatcaccaaggtcgaggcctga

SEQ ID NO: 517982 - DNA, 495 bp, Stenotrophomonas maltophilia
atgaattttcgactggcgacctcctttatcctgacggcgctgctcgtggcgcccttcgtatccacagcccacgagggaaagcacccatcggccataagcggcgatgcgatcacgaaacaggctcaaccggcagttgaggttgtcgcgcagtttgctgctgcattgcaagcgggcgatctgcagcgcatcggctcgctactagccgatgacgttctgattctggagaacggtagtgctgagcgttcgcgtgaggagtacctaagcggccatgccacgcacgatgcggcctttctgaagaccgcccacacccaagtgatgcagcgcacggctcgagtcgaaggtgatctggcctgggtgggcaccgagagtgagttgcataccaccaaggaggggaagcctctcacgctcttgagcaccgagacgatggtgctcaaacggggcacgcaaggctggaggatcgttcacattcactggtcatcgcgtcccaagcgctag

SEQ ID NO: 517983 - DNA, 750 bp, Stenotrophomonas maltophilia
gtggccgccgatgacccgcacacccgtcccgtgtacgccatgctggaggcagctcgtgcgcgttctatcgccgctcgtgccgctcggctccaggtaccggacgatctcgccgatccagcgcgcattcgtcagggtgcgggcaactacgctgcaatgtgcaccggctgccatctctcacccggcgcagagccgacagaactgagcaaaggcctgtacccgtcaccgccggacctaacccgcgaggcagtgtcgcctgccgaggcgttctgggtcatcaagcatggaatcaaggcgagcggcatgccggcgtggggaaagagcatgcaggacgactacatctggaacatggccgccttcctgcagcagttgcccaagctcgatcaggttcagtatgacgcgctggttgccggtagtggcggacactctcacggcggtggcgagacaggcggacactcgcacacggatggccaggatcatcacggtgacgccggcgaagatcgccatagcgacggatccggcgcggatggcaccgataccatgctggaccacggctccggcagtgatggcgacctgagcagcagggccgatcaggcaggcgggaccggagccccccgcgctcaagatggcgacctcaacaagccatcctctgaggccaagtctgcctcgatcgagacggcggccactgagaagcacaggacacagccgagacgtacggacccggccggcgaaggccacagccatcaacactga

SEQ ID NO: 517984 - DNA, 1098 bp, Stenotrophomonas maltophilia
atgaacatgactcccttactcagatcgtgcctcctgagcccactggcggctacggtgagcttggccgtgctcggcattgcgacgccggtctcagcgcagacgatggaccatcgccagatgcagatgccgacgccggccgggaccccgccggaagccgcagtgccccccgccgagggcaaggccgggacaatagttcccgcctctgcattaccggtcgacgctcatccaaagcacgccggcactccagatcagacgccattagatgagtccgatccggtgatgaagcactcgtcgatggggaacgttatgcccatgcccgagaccgaatcgatgcagggcatggaccacgcctcaatggggcacggaatggtgccagcatcaactgtgccacgcacaccgattccggcggtcactgaggcggatcgcgcggcagcggtgccaccactgagcgaccatcctgtccatgacaacaccatccagcactatatgttgctcaaccggctcgaggcgtgggacgccgacccggggacaggaatgtcttgggaagcccaaggctgggtcggaaccgatctgaatcggctgtgggtgcgcagcgaaggcgaacgcagtgatggacgcacagaatccgcagatctggaactactctacggtcgtagcatctctacttggtgggacgtcgtcgctggtgttcgccaggatttcaaaccaggaagttcgcagagctttgctgctatcggtgtgcaggggttggcgccgatgaagttcgaggtcgcagccacggcctacataggagaggccgggcaaacggcggcccgtttcgaggccgagtacgaattgttgcttaccaaccggctgatcctgcagccgctggtggaggccaacttcttcggcaaaaacgatccgcggcgagggactggcgcggggttgagcacggccgaaatcggcctgcggctgcgttacgaattcactcgcaagttcgccccctacatcggcgttgtctaccagcgagcgttcgggaatacagcagacctgcgccgcgaagaacaggggcgtgtcgatgatacgcagcttgttgtcgggcttcgtacttggttctaa

SEQ ID NO: 517985 - DNA, 1707 bp, Stenotrophomonas maltophilia
atgaactttaccggccgcgtccgtccagcgatcacggtcaacggttcccttccggccccattgttgcgctggcgcgagggcaccacggtcaacttgcgcgtctccaatgcgttgccagcgggctcggttcatggtcaggacacctcaattcattggcacggcatcttgctgccagccaatatggatggtgtcccgggcctcagcttcgccggcatccgccgcggcgagacctaccactaccgcttcaccgtccagcagggcggaacctactggtatcacagtcattcagcgtttcaggagcaggcgggtctgtacgggcctctagtaatcgatccgattgagcccgagccgttcagttacgaccgcgactacgtagtcatgttgtcggactggacagacctcaatccggcgcaactgttctcacgactgaagaagatgccgggacacgacaacttctataagcgcaccgtcggagacttcgtccacgacgtgcaccgggatggattgaaggcgaccttggccgatcgcaagatgtgggggcagatgcggatgacgccgaccgacttgtcggacctcaatgcgcatacttacacctatctgatgaatggcacgaccgctctgggcaactggaccggcctgtttcgttccggcgaaaaggtgcgcctgcgtttcatcaatggttcggccatgacgtacttcgacgtgcgtattcccggcctgaagatgacggtggtcgcagccgacgggcagtacgtgcaccctgtgagcgtggacgagttccgcatcgcagtggcggagactttcgatgtgatcgtcgaaccatctggtcaggacgcatttaccattttcgcacaggactctgggcggaccggatacgtcagcggcacgctggcggtgcgcgatggcctgcgcgcaccggtgccaagcgtagacccgcgaccgattctgacgatggccgacatgggcatggaccacggcagcatgggtggcatgaacatggccggcggcaacgaaggcagcatgggcggaatggatatgtccggctccagtatgggcatggccggtatgccgcaagaccaggcgcaggctcaggctcagaccccatcaacagatccgcatgccggtcacgacatgagcggcatgcaggctggcgcaatgccgggcatggaccatggcgggggaatgcagccgcacccggccagtgaatccggcaatccactggttgacaaccaggcgatgactccgacctcacgcttggacgatccaggcaatggcctacgtgacaacggccgtgtcgtactcaactacgccatgctcaagagtgcatttgaggatccagacgggcgcgatccagggcgggagatcgaattgcacctgacgggacacatggagaaattcgcctggggcttcaatggccagaaattttctgaagtcgaaccacttcggctgaactacggtgagcgcctgcgcatcgtactggtcaacgatacgatgatgactcacccgattcatctccatggcatgtggagcgacgtggaggacgatcagggaaatttcctagtccgcaaacacaccgtcgacatgcctcccggcagcaagcgaagctaccgtgtgcgcgccgacgccctggggagctgggcatatcactgccatctgctctatcacatggaagccggaatgatgcggcaagtgagggtcgacgaatga

SEQ ID NO: 517986 - DNA, 279 bp, Stenotrophomonas maltophilia
atgaacgagatcgacttggaagaggtccgggcggcgatgttcaccgacccaggcgtgaagacggtagacgatctgcggctggtcccgggcaagccgcctggccgcgcgatcgcggccaccatcacagtggctgcccccgcggtcgaccttgacctggtgcacgctgtgattgcccaggtgttgtcagatcatttcaacattgatcaggtggtgctttcgttcaacgacccggggccggtgccgccgccgcccacggcggcgcccttgaagaaattgtga

SEQ ID NO: 517987 - DNA, 231 bp, Stenotrophomonas maltophilia
atgccgaccgatgcccgtcacagacagcacggcctgaggggctggcgcggcggggccgtagcacagcgccagctgttgcagacggtgcaaggcggcagctatgccgcgctcggtaggctgttctgccactactggaccgcgggcggctgccgcccggtgggtttggtcatgcaggtctccaacttgtcgcagaaccggctgtacgaccaagcccactgccaagtgcgctag

SEQ ID NO: 517988 - DNA, 405 bp, Stenotrophomonas maltophilia
ttgcccaacggtagtgacccggccggtcagctgcgcaaagccggccaactacgcggcgcctatgtcacgaagccggcgcccagctatcgctactcagactggcagttcggtgcagatggcgagcctatcgaccatttgacagagatattgtcagtactgcgcgagtttggtccgtttgagatcgagtcggacggactagctcgcagcaatggatggggtgaggctgagtggttcctctcaccgcacgcattgctcgacggcgtcgcccccgccgaagccctggccaccgatccggcacgcgtgttgcgggtggcccgtagcgagttcgagcatgggaactcctggctacgcgaccgattcatcctcgatgaaagcgctcaaatcaccgctttggggccggaataa

SEQ ID NO: 517989 - DNA, 486 bp, Stenotrophomonas maltophilia
atgaaaatgcgcctgatgcttgccggtggcctgttgctggccctgaccggctgcaccacctacgactatgtcggcggcggccgcagcggcagctactaccacggtgcgccgtcggtggaataccgctacccggccggctatccctacaactacggcccctactacggtggctatggcggctactacggcggctacggcaacccgtattactcgcgcccgatctaccgcccgccgcacaaccaccgcccgccgccgcgtccgggcaatggcggcgagcaccgtccgccgccgccgtcgcgtccgtcgtacaacgggggttcgccgtggcggaacatggactccatgcgccgcccgccgcaatcgaacgcccagccgtcagcgcccccgccgcaggcccgtccggcaccggcaccgagtgcgccgaggatgaacggttccccctggcgcaacatggatcgtgcgacgcagcgcacagttgagcgctga

SEQ ID NO: 517990 - DNA, 963 bp, Stenotrophomonas maltophilia
atgagcgattcactgttgccccgcgccgacgacgtcctgcttgctgccgcgaggatcgccccgcatgccagcgtgaccccggtgctgcgctcgcacacgctcgatgcgctcgccggggcacagctggccttcaaggccgagcacctgcagcgtggtggtgcgttcaagttccgcggtgcctgcaacgcggtgtggtcgctggaggctgattccgccagtgccggcgtggtcacccactcctccggcaatcacggcgccgccctggcgctggccgcacgtacccggggcattccctgtcacgtggtggtgccggaaggtgcggtggcggccaagctggccaatattgcgcgccatggcgccacgctctggcactgcccgccgaccattgccaaccgtgaggccacctgcgccaaggtgcaggccgacaccggcgcgaccctggtgcatccctatacgaatccggcggtgatggccgggcagggcaccgccgccctggaactgctgcacagcgacggcccgttcgacgtgctggtggtaccggtgggcggcggcggcctcgccagcggcactgcgctggcgctgcagcacgccagcccgcagacccgtctggtgctggccgagccggccggtgccgacgataccgcgcgctcgctggccgctggcgagcgccaggacgcgttcaccccggacacgatctgcgatggcctgcgtaccctgatcggcgcgcccaatttcgaactgctgcgcgcggccggtgccgaggtgatcgtggtcgatgacgcggcgacgatggccgcgatgcgcctgctgtgggaggtgctcaagcaggtggtcgagccgtcctcggccactgtgctggctgcggtgctggcgcagccgcaacgtttcgccggactgcgcgtgggcctggtgctgtccggtggcaacgtcgacctgccagcgctgcgctggggcgcgccgtga

SEQ ID NO: 517991 - DNA, 633 bp, Stenotrophomonas maltophilia
gtgagccgcgaccggcagcggcctcgcaccggcctgctgggctggctgtggcggctgtttgtcctgctggtgatctggctgctgggcgtgactgcctggatcgtctgggtcggcgagcgtgaccaggctgccaaggccgacgccatcatcgtgctgggtgcggccgcctatgacgccaaaccgtcaccggtgttcgaagagcgtatccggcatgggctggacctgtacgaggcccagtacgcgccgctgctgatcttcaccggcggctacggtggcaccggtgcgcgtttttccgaatcgcaggtggcgcggcgttatgcgctgaagcatggtgtgccggacgatgcgatcctgatcgaaaccgcctcgcgcaataccgtgcagaacctggttgaagccaagcggctgatggaccagcgcgacctgcaccgggtgatcatcgtcagcgatccactgcacatggcgcgcgcgctgcgcctgagcaaggcgctgggcatcgatgcgctggcctcgtccacgcccagcacgcgcttccgcagcttccacaccagctggcgcttcctggtgcaggaaatctatttcttccaccgcgacctggtgcgcccgccgctgagttcgccggccaatacctga

SEQ ID NO: 517992 - DNA, 885 bp, Stenotrophomonas maltophilia
atgccgtcccacttcgatgcccgccacgtccgccgcgcgttcgcccgtgccgccaacagctacgacgccgccgccgccctgcagcgcgaagtgcagtcgcggctgatcgaatcgctggactacctggaggcacgcaagcccgaggtggtgctggacatcggtgccggcaccggacatgccagcgcgttgatgaagaagcgctggccgaaggcgcaggtgatcgcgctggacgtggcgctgccgatgctggaccaggccaagcgccaggccggctggtggaagccgttccagcgcctgtgcggtgacgccgccgcgctgccgctggccgacaacagcgtggacgtgatcttcagcaacctgtgcctgcagtgggtggacgacctgccggcggtgttcgccgggttccgccgcgtgctcaagccaggtggcctgctggtgtgttccaccttcggcccggaaaccctgatcgaactcaacgaggcattcgccgccgccgatgaccgcccgcacgtgagccgcttcgcgcagatcgcccagttcggcgatgcgctgatgatggccggcttccgcgacccggtgctggaccgcgacctgttcaccctgacctacgacgacctgccctcgctgatgcgcgaactgcgtgcgatgggcgcgaccaatgcacgggtggaccgacgccacacgctgaccgggcgtggccgtttcgccgctgcggcagcggcgtatgaaccgatgcgtcgtgccgacggcaagctgcccagcagctgggaagtgatctatgcgcacgcctgggcaccggacccgggcgcaccgatccgcgaaggcgggcatgacgtggcctcggtgccggtgtcggcgattccgatccggcgcaagcagacctga

SEQ ID NO: 517993 - DNA, 780 bp, Stenotrophomonas maltophilia
atggatctgggtatcaatggccgctgggcactggtctgcggcgcaagcaaggggctgggcctgggctgcgcgcgtgcgctggtgcgtgaaggcgtcaacgtggtgatcgtggcccgcggtgaagccgccctgcaggccgccgctgaagagctgcgcgcgctggccggtgccgccgaggtgcgcgcggtcgccgccgacgtcaccaccgaagccggccgcgtcgcggcgctggccgcatgcccgcacgtggacatcctggtcaacaacgccggtggcccgccgcccggtgatttccgcaatttcgagcgtgacgactggattgccgcgctggacgccaacatgctggcgccgatcgcgctgatccgcgccaccgtcgacgcgatgatcgagcgcggcttcggccgtatcgtcaacatcacctcgtcggcggtgaaagccccgatcgatatcctggcgctgtccaacggcgcgcgcagtggcctgaccggtttcgtcgccggcctgtcgcgccgcaccgtggcccacaacgtcaccatcaacaacctgctgcccggccagttcgacaccgaccgcctgcgcgccaacttcgcccacagtgcgggcaaggacggcgacgccgacgaagtggccgaacgccgccgccagcagatccccgccggccgcttcggcacacccgacgaattcggcgccgcctgcgcgttcctgtgcagtgcacaagccggttacctcaccgggcagaacctgctgatcgacggcggcgcctaccccggtacgttctaa

SEQ ID NO: 517994 - DNA, 780 bp, Stenotrophomonas maltophilia
atgcatattgaagtcaccggccgcgggccggacctggttctgatccacggctgggccctgcagggcggcgtgttcgcaccgctggtgcagcgcttggcagaccagttcaccctgcacctggtcgaccttcccgggcatggccacagccgcgacgacaccacgccgctgcgcctgccgttcgtggtcaacgcaattgcggcggcgacgccaccggcggtgtggtgcggctggtcgctgggcggattgttcgcgctgcacgcggcagcgacgctgccgaaggtgcgtgggctggcgatgatcgccgccacaccgcgcttcgtacgtggcgaagattggccgcacgcggtggaaccggccgtgttcgagcagttcgggcgtgagctggccaccgatttcgccggcaccctggaacgcttcctcgccctggacgtgatgggctcggcgcacgcccgcgaggagctgcgcacgctgcgccagcgcctggtcgagcgcggtgcacccaccgaacgcgcgctgctggagggcctgcgcctgctggaaagcaccgatctgcgcggcgcactgccgacgctgggcaaacccagtctatggatcgccggccaacgcgaccggctggtctcaccggcggcaatgcaggccgccgcggcactggccccgggcgcgcaggtcctgaccatcgcccatggtggccacgcgcccttcctcggccatgccgacgaggtcgccgccgccctgcaacacttcgttgccggcctgtcaccggccgatggcggacaatga

SEQ ID NO: 517995 - DNA, 1224 bp, Stenotrophomonas maltophilia
atggcccgccccgacctgactgcccgcctccacgcccaacgcgccctgcgcgatgcccaaggccgtcgccgcccgcgacgcacggtcagccgtcgtgatggcgtgcgcctggaagtggacggccagtggctgaccggcttctgcagcaatgattacctgggcctggcccagcagttcagcgtggtcaacgcgttgcaggacgccgccgcacgcgaaggtgctggcgccggtgcctcgcacctggtctgcggccaccacgccctgcacgaggcacttgaacgcgaagtggccgagtggctgggctatccgcgtgcgctgctgttcggcagtggcttcgccgccaacctggcggttcagcaggcactgctgagcgaagagaacgacgtctgcgtgcaggacaagctcaaccacgccagcctgctcgatgcgacgcggttggccggtgcacgcctgcgccgctatccacatctggatgcggaaggcgcgatgcgtcagctcaagcacgcgcccgatggcgcggcgatgctggccaccgatggtgtcttcagcatggatggcgacatcgcaccgctgcgtgcattgtcgcttgtggcacgcctgcagcaggcgctgttctacgtcgatgacgcgcacggcgtgggcgtggtcggtgatggccgtggtgccgtggccgccgccgggctgggcgtggacgacgtaccgctgcaactggtcacgctgggcaaggcactgggcggttccggtgcactggtgctgggccgcgacgacctgatcgagcacctggccgagaccgcacgcccgtacatctacaccactgcggtgccgccagcgatggccgctgctgcactggaagcagtgcgcctggcgcgtcgcgaccactggcgccgcaccaagctgaccgacctgatcgcgctgttccgcagcgaagcccgtcgccatgggctggacctgatggcttcggaaacgccgatccagccgctgctgtgcggcgatgaccataccgccgttgcgatgtccacgacgctggaacaggccggctggctggtcggcgcgatccgcccaccgacggtgccggaaggcaaggcacgcctgcgcgtcaccctgtccgcgctgcatacgccggaacaggtgcgtggcctggtcgaggccatcgccagcgcgcgcgaccgcgtgaccctggccgtgcgtgaagccgcgccaccgccgctgcccgcttttgcctga

SEQ ID NO: 517996 - DNA, 1044 bp, Stenotrophomonas maltophilia
atggctgctgccatccgccacgactggcaacacgacgaactgcaggcgctgttcgatctgccgttccccgagctgctgttccgcgccgcagcggtccaccgcgagcatttcgacccctcgcaggtgcaggtctccacgttgctgtcggtgaagaccggcggctgcccggaagactgcgcgtactgcccgcaggcgcagcgctacagcaccggggtgaatgcgcagaagctgatggagaccgacgcggtgctggccaaggcacgccaggccaaggccgccggtgcctcgcgcttctgcatgggtgccgcgtggcgttcgccgaaggaccgcgacattccgaaggtggcggcaatgatcgccggggtgaaggcactgggcctggagacctgcgccacgctgggcatgctcagtggcgaacaggcacgtgcgctgaaggacgccggcctggactactacaaccacaacctcgacaccgcgccggactactacgattcgatcatccacacgcgccagtaccaggaccgcctggacacgctggagcacgtgcgcgatgccggcctgaagacctgttgcggcggcatcgtcggcatgggcgagacgcgcgcgcagcgcgtcggcctgctgctggcgctggctacgctgccggcgcatcccgattcggtgccgatcaacaagctggtgcaggtggcgggcacgccgctgcatggcagtgccgagctggatccgttcgagttcgtgcgcatgatcgcggtggcgcgcatcgccatgccgcgctcgatggtgcggttgtccgccgggcgcgaggcgatgagcgacgaactgcaggcgctgtgcttcctggccggtgccaattcgatcttctatggcgacaagctgctgaccacgggcaacccggaaagcgaacgcgacctggccttgttcgcacgcctgggcctgcaaccgatggcggtgcaggtagatgccgagggccacgaccacggcagcaccgtgcacgccgatatcagtgccgatacgcccgcctgtggctgcgctcacgcggcctga

SEQ ID NO: 517997 - DNA, 1407 bp, Stenotrophomonas maltophilia
atgaatgcctacgacccgctggatcacatcatccatcttcgtgatggcacgctgcaggaatcagaccttcgccggattgtcggtcgcgcgctgcaggccaggtcaccttccggaatcgtcatccatgtacatggcggccgcgtttcgcagaagcgtggacggcgcatcgcagaaaccctgcatgacccctatgtgcgggcacaggcctaccccttgttcttcgtctgggaaacgggtgacatcgaagctccgttgaacaacctgggcgagatcctgggtgcagtactcgccaaactgctcttcaggaaagtccaggacaagatcctagaaaagctcggcggtgaacaggcattcacgcccggcatgaagatcctcaacgccgcgccacccgacgaggaaagcctttcggcagatctcgcacaggagttcgctgaagatcccgaggtgaaccaggcccttgccgaggcccgggaggattacagggaggcgacgctgacgcccgtaaacaagatgctggcacatgaaccgccagccgaacacgcggccatcgtcaacgagcgcacggcaatggaactgtttggcactccgtcacccaacaaggccgtagcattgaactggatcgcgctggccatcaaggtggccagactggtgatacgcgtatggcaacgccagcacagtggccggggccggccaggtgccgtctccgccgtgatcgtggaagaagtactgcgagagttctatctcgatgacgtggggcgcatcggctggtggaatcccatgaagaaggatgcacaggattcattcgacggcccggcatcgggtggcgtcagattcctgcgcgagctgcacaggcagttgcagtccgaagcctctgttccccgcatcacgctcgtcggccacagcgccggcagcatcttcctgtgcgagctgttggaccaggcagcgcagatccttccggatctgacgttcgaccttattctcgaagcgcctgcggtgacgtgtcgtcggttcgcgcatgccatctcgaagcacgagaaccgcatcgggaggttccggcaattggcgatgagggatgccgacgaagccagcgagcgttcactgttctttcccggttcgctgctctacatcgtgtccaacatcttcgaagatgccgccgatgagcctctgctcggcatggaacgcttcttcacccgggagagcgtctatcgcaactctgcggcgtgggcagacatctcggcctgccaggcgttcttcgcccggaaaggagaaagcgcggtgagctggtggacccttgatgacctcaatgccgaccagcgcgaaggttggggccacggctacttcgatgacggtcccttcatcctcggcaaggtgaccgcgttgatcagcgaaacaccgcacacgccttga

SEQ ID NO: 517998 - DNA, 1326 bp, Stenotrophomonas maltophilia
atgaccgatctccatcgcctccgcggccgcatcaccgcgctggttctcagcgaggcctggcgccgccgcgccgcgctctggggcggcgccgtggccgtggcactggtggccatcctgttcgccaaggccagcgacgcggccttccacctgttccagcgcatcacctcgcactcgccgtggtgggcgctgctgctcacgccgggcatcttcgcgttgttggcgtggctgactgcgggcgtgctgaaacccacccgcggcagcggtattccgcaggtcatcgctgcgttggacaagcccgatgagccgttccggaagatcaatctttcgcctgcggtctcggcgggcaagctgctgctgacctcgttgtcgctgctcggtggcgcgtcggtcgggcgcgagggcccgacggtgcatgtgggtgccagcctgatgtacctgttcggccgctggttcggcttcaaggatccacgcgagctctcgcacttcctgctggcgggcggcgcggcgggcatcgctgcggcgttcaacacgccgctggccggtatcgtctttgccatcgaggagctcagcggccgtttcgagcatcggttctccggcaccctgctgaccgcggtgatcgtcggcggcgtggtgtcgctgggcctactgggcaactacacctatttcggccatgtaagcgcgcggcttccgctaggccagggttggttggcgatcctgttgtgcggtgtggtggcgggtctgctgggaggcttgttcgcgcgcgccgtgctggccagtgcggcgggccgcccgcgttggctcgggcaactgcgccagcggcatccggttctgttggccgcaggctgcggcctggtggtggtactgctcgccctggtcttcggtgaaggcgcgttcggcaccggctacgagcaggcgcgcagcctggtgcaggggcaggcgatggtgggccacgagttcgggttgatgaagctgctggcgaatctggcgtcctacgtggcgggcatccccggtggcctgttctcgccggcgctggcggtcggtgccggccttgggcacaacctcgcggtgctgatgccgggtgtggatccgcgtgcgttcgtgctgttgggcatgtgcgcctatctgaccggcgtcacccaggcgccgctgacttcggcggtgatctcgctggaactgaccgacagtggtgatctgctgctgccgatcctggccacggtgctgatcgcgcgcggcgtgtccgggctggtgtgccgggtgccgatctaccgcgggttggcggagttgttgatgatgccgcaagcagagccagttgataggcatcgctga

SEQ ID NO: 517999 - DNA, 1170 bp, Stenotrophomonas maltophilia
atgatcaactgccgtatccgcagcctggcggctgccgtcctggccctggccagttcccccgcgctggcgctggcaggaacgcctgtgctgcccagcgatcgcagcattggcatcatcgagccggtggcgcgtttcgagggcgccatgcccaccagcgtggcggtgtccgagaccgggaggatctttgtcaacttcccgcgctggggcgatgaggtgccttacagcgtggccgaatggcgcgacggccgcgccgtgccctatccggatgcgcacatcaaccgcaaggacggtcccgatccggcggcccacttcatcagcgtgcagagtgtagtggccgatggccagggtcggttgtgggtgctggacaccgccgcgcccgggttctctgcaccacaggccggcggcgccaagctggtggcgatcgatctggccaccaataccgtggccagaacgctggtgttcccggccaacgtcatcgacgcgcgcacctacgtcaacgatgtgcgcttcgatttccgtgtcggtcgcgagggcgtggcctacgtgaccgactcgtcgctgagcggcatcggcggcatcatcgtgatcgacctcgctaccggcgccgcgtccaagcgcctgatcggtcatgtgtccacatcggcggatccggcattcgtaccgatcgtggaaggacaacagatgcggctgcgcaacgcggatggttccacgcagccgttcaccgtcgctgccgatggcattgcgttgtcgccggatggcgcgacgctgttctataccccgttgtccagtcgccatctgtacagcgtgcccaccgccttgctgcgcgaccccaaggtaagtgaggcggcgctggctgcggccgtggtcgacctcggcgacaagggcgcgtccgatggtatggagatggacgccaacggccggctgtatgcgagcgactacgagcacaacgccatccatgcccgcgatgcccaggggcgctggacgactgtggtgcacgacccgcgcatcctgtggccggataccttgtcgatggggccggatggctacctgtacttcaccgccaaccagctgcatcggcaggccggattcaatggcggcgtggatcgccggcagacgccgtacatggtgtatcgcactcgggtggatgcgaagcctgcgccaacgcggtga

SEQ ID NO: 518000 - DNA, 702 bp, Stenotrophomonas maltophilia
atgctgaagtgcatgtctgcattcttcaaaccagtccgtcacgtgcaggctgcacttcgtgtgctgctaccgctccgctgcttggtctgccgcgacccgggccacgatggactcgatctctgcgatgcctgcttggccggactgccctgggctggccgtgcctgcctgcgctgcgcgctcccgttacccgggaacgccctgatcgtctgcggcagctgccgcgaggaagcgccaccgcaggccgctacccatgccagcctgttgtacctgccgccggtcgaccagctgctggtgcgctacaagttccatcaggatctcgccgccggtcgcctgctggcgcagttgatgcagcgcgcaccgccgccgtggtcatgcctaccgctggtgccggtaccgctgcaccggcgccgcctgcgccagcgcggctacaaccaggccgcagaactgtgccgcctgctgccgatgccggtctggcaggggctgtaccggcggcggcataccgcgccgcagtccgagcgtacggccgaacagcgcagggaaaacctgttcgatgcgttcgatgtacgtggtccggtgccaccgcgactgacagtggtggacgatgtgatgaccaccggcagcacggtgatggaggttgcggagacgctgcggtgggtgggagcggacgaggtgcgggtatgggtctgcgcgcgggcgccgtga

SEQ ID NO: 518001 - DNA, 552 bp, Stenotrophomonas maltophilia
atgaattcccccttgtctcccttgttgtcggcggttgggcgcagctggtggatcctcctgctgtatgggctggttgcgctgggctttggcatcgtcgccatcggctggccgctgtctgcagccatggcattggcatggacgctgggtgtgatggccatcgttgaaggtgtcatcagcctgttcgcactggtcagcggcggcagcggtgcttcgcgtggctggctggcgctgtatgccatcgcctcgctgggtttcggcatcctggcggtgatcaatccgctggccaccgccagcgtgctggtgctgttcctggcggcatggctgctggtggccggcgtctatcgcatcgtgttcgcgatccgcgtacgcaagcagatccagggcgagtggctgctgatcctcagtggcgtgctggcggtggtgctgggcctgctgttcgcggccaacccgtatgcgggcgttgcggtgaccacgctgtggatcggcatcggcagcctgctgtacgggctgttgcaggtgctggtggcgttcaagctgcggaagctgaagtga

SEQ ID NO: 518002 - DNA, 441 bp, Stenotrophomonas maltophilia
atggcgttgaccctgaccggatgcatgccgggcgctacgcccggtgcgttggcaggtaaggatcatgcgccacgccccggtgtggatgtgcgcctgagtgcggtcgatgcggcgggcaagggtacgccggcgcagtggcagggcgaaaccctggccctgcgcgagccgccgattgcgagcagcgcggacattgccgatgtgcgctacgtgctggatgaaggcaagcagccgggcctgcagatccgctatcggccggaggcgcatcagcgcatccacgatggcaccgcggcactggtgggccagcgtgcggcgatcagcgtggatggccgcgtgctgatggtggcgacggtgcaggggccgttcggcgaatcgatgatgctgagcgggttgtccagcgttgccgaggcgcgggagctggcgaagcacatcactggcgaatga

SEQ ID NO: 518003 - DNA, 1779 bp, Stenotrophomonas maltophilia
atgactgcaagcaccgctccgcgctggcccgtacgctacctgctcttcatcggcggcctcggtggcctgctgtacggcatcgacatcggcatcatcgccggcgccctgccctatcttgaagcgactgccagccacgcctggcagctcagcagccagcagctcggcttcgtcgtggcggcagtgctgctgggcagcgtgctgtcctcgctgttcgccggcatgattgccgacctgatcggccgccgcggtgcgatgctgctggccggcctgctgttcaccgcctcgatcccgatcatggcactggcctccggctacacgcccctgctgctcggccggctgctgcagggcatcagcggcggcctgatcggcgtggtgattccgctgtacctggccgaagtgctcagccccgaacgacgcgggcgcggcgcggcgatgttccagctgctgctgaccatcggcctggtgctggcggcactgatcggcctgtaccacgcccacgccgtggatgccgccgccgaagccgtgcgctcactgccggtcgcgcagcaggcgcaggagctgtttgcggtgaaggaccacgcctggcgcaccatcttctggacctgcctggcgccgggcctgctgttctgcgccggcatcttctggctgtccgaatcgccgcgctggctggtgcgccgcggtcgcatcgatgatgcgcgccgcagcctgcagcgcgtactgccggcttcggaggtggagcccacgcttgcacagatccaggcaccggaatcgagcggcagcagcggcaagcgcgacccgctgctcagtcgccgctacgtggtgccgttcctgctcgcctgcgtggtgctggcctgcacccaggccaccggcatcaactcggtgctggcctacgcggtgaacatcctcaaccaggccggcctgtccggcgcggtggccaacggcgccgacgtggcgatcaagctgctcaatgcggtgatgaccgtggtcgcgctgctgctggtcgaccgcaagggccgcaagttcctgctgatgctcggcagtggcggcatctgcgtggccctgctggccgcggccacgctgttcttccaggctgagcgcggtcgcaccgacgtgcagccgcagctgcaggcggcggtcagcggcgatggcctgcagctggtgctggatgacgcgcaatggcagcgtctcggcgctggcattgacagcgaaggccggccgctgcagctgaccgtgtcgtatgcctacggcgacttcaccaatgtgcgcgccctgcgcagcgacaacctgaccgaccgcgagctgcgcatcgagcgtgccggcaccgtgcagccggacagcgtgatcggcgcgttcttccgcaaactgcacctgaacccgttcgccgacccggccaaggccgcgcaggcaccgctgcgcatcgagcaggcacgcatcggcccggtgccgccaccggcacacggctgggcagtggccgcctgcatcctggtgttcgtcgcgttcttcgcggtcggtccaggcgtatgcgtgtggctggcactgtcggagctgatgccgaaccgcatccgctccaatggcatgagcatcgcgctgctgatcaaccagttcgtgtccaccactatcgccgcgatcttcctgcccacggtggggcactacggctacgccagcatgttcgtgttctgggcggcgtgcaccttcgtgttcttcctggtagccgcgttctggctgccggagaccaagggcaagtcgctggaagagatcgaggcccgcttcgcccggtag

SEQ ID NO: 518004 - DNA, 1128 bp, Stenotrophomonas maltophilia
atgaccgacacccgcgccctgcatggccgcatcctcaccccgctgggttggcggcgtggccacgtccacttcaattcacacgtacgccagctgctggtggacgaccacagcggcgctgacgacctgcagctgccggtgatcctgcccggcttcatcgacctgcatgtgcatggcgcggccggcgtggacctgatgcagggcggcgacgtggcgcgaaccatcgcccgcacccatctgcgcttcggcaccaccacgctgctggcgaccaccatgaccgccgggctcgacgagatcgagcacgcgctgcagggcgtggccgccaccatggcggcacccgatgcagacgccgccagcatcgtcggtgtgcatctggaaggaccgttcatcagcccgcagcgtctgggtgcgcagcccaaccgcacgatcgaggcgacgctggcactggtgcagcagctgcatgcgctggcaccgatccgggtgatgacgctggccccggaaattggtgagcacaccgcgctgattcccgcgctctcggcgatgggcatccgagtgcagctcggtcacagtgccggtacctacgaggaaggcgtggccgcgctgcaggccggcgcctccggcttcacccacctgttcaacggcatgaccggcgtcgatcactatcgcccgggcattgcagcggcggcgttggcacatgcgcagtacgccgagatcattcccgacctgcagcacatccaccccggcgtgatccggctggccgcgcgcgcgattccgcgcctgtacgcggtgaccgacgccactgccgccaccggcatgcccgacggcgagtacgcgttgggcgagcagcgcgtgcacaagtgtggcggctgcgtgcgcctcgctaccggttcgctggcgggcagcgcactgaccatggaccaggcactgcgcaatctggtgcgcgtcggcctggagctggccgatgcctcgcaacgtgtttccaccttcccggcggactacctgggcctggacgatcgcggccgcatcgcgcccgacgcccgcgccgacctggtggtgctggacgccgaactgcgcctgcagcaggtggtggtgggtgggcgcgtagttgatttgaacgccggaaatgcctga

SEQ ID NO: 518005 - DNA, 777 bp, Stenotrophomonas maltophilia
atgcgcaacacccgctcccgccggcaacagatcctgcagctgctgatcgagcatggctcggtgcaggtggccgatctggtcgagcgcttcggcgtgtcggcggtgaccatccgtgccgacctgacccacttcgagtcgcagggcctggccaaccgtacccatggcggcgccacgctcgttcgtacgccgccgcaggaacaggacatccacgagaaggacgcgctgaacctgccgctgaaggaatcgatcggtgcgcgcgctgcgcgcctggtgcagcccggcgacaacatcatcatcgactccggctcgaccacgatgaccctggcccgccacctgcgcgcgcatcgcgacgtgacggtgatgaccaacggcctgaatatcgcctgggaactggccaatgccgcgggcatcaccgtgctgctgaccggtggcctgctgcgccagcagtcgctgtcgctgcagggcagccaggccgaggccagcctcaattcgtacagcttcgacaccctgttcctaggtgtggacggcctggacctgcagttcggcctgaccacccacgatgaagccgaagcccgcctcaaccaccgcatggtcgagcgcgcacgccgtatcgtggtgctgaccgacgcctccaagttcggccgcgtcagcctgcaccgcatcgccctgctggatcagatccacgccatcatcaccgacgccggtattgacgacgcaacccgtgaggggctgcagcggctgggcatcgaagtgatcatcgccgagcccaccgcatga

SEQ ID NO: 518006 - DNA, 1335 bp, Stenotrophomonas maltophilia
atgtccccgttgcagaccctgcttgcctcccaccgcgccggtgccaacgtcggcctgtacagcgtctgctgcagcaacgagcaggtgctgcgcgcggccatgcacgtggcgctggcacacggcaccgtgctgctgatcgaggccacctccaaccaggtcgaccagttcggcggctacaccggcatgaccccgccgcagtaccgcgattacgtgggcacgctggccgatgaggaaggcttcccgcgcgaacggctgatcctcggcggtgaccacctcggcccgaatgcctggcagaagcgcccggctgccgaagcgatgacccacgcgcgcgtgctgatcgaggcctacgtcgccgccggcttccacaagatccacctggactgcagcatgtcctgtgccgatgacccggtgccgctacccgatgccatcgtcgccgcgcgttcggccgagctggccgagatcgccgaacgcaccgccgccgaacacggcctgccgccgccggtctacgtgatcggtaccgaagtgccgattcccggtggcgaagcctcgctggccgaaggcctgcaggtgaccacgccggccgccgccgcgcagaccctggccatccaccagcaggcgttcgacacgccgcagctgcgcgacgcgtggcagcgcgtgatcgcgatggtggtgcagccgggcgtggacttcgaccacagcagcgtgcacgagtacgatgccgcagccgccagcacgctggccggcttcctcgaacagcagccgcgcatcgtgttcgaagcgcattccactgactaccagcgcgaaagcggcctgcatgcactggtgcgcgatcacttcgccatcctgaaggtcggcccggcggccaccttcgcctaccgcgaagcactgttcgcgctggccgcgatcgaggccgagctgctgccggccgcgcagtgctcgcgcctgccgcaggtgctggacgaggtgatggtggcgcagccgaagtactggcagtcctactaccagggcgatgaggcggcgctgcgcctgctgcgcagctattccttcagcgaccgctgccgctactactggggcgagccggcgctggtgcaggcggtgcagaccctgttcgccaacctggaacagcacgcgccgccgctggtactgctcagccagtacctgccggagcagtaccgcgccgtgcgcgagggcagcctggccaacacccccaccgccctggtgcagcaccgtatcggcctgtgcctgggcgaatacgcccgcgcctgcagcgccaaccaggccggcccccgcacgcagaacgcgggctcggctgccggcgttcctgcgaacggctaa

SEQ ID NO: 518007 - DNA, 939 bp, Stenotrophomonas maltophilia
atggctgagctgatcgcccacgcctgctacggcatcgacatcggcggcaccaagatcgagctggtggcgtgcgatgcggcgatgcaggtcacctggcgccgccgcgtggccacgccgcagggcgactacgacggtttcctgcaggcggtggtgaccctggtcgccgaggccgacgccgcgctgggccgcagtgatgcggcgatcggcatcgccctgcccggcgtgcgcgaccgccgcagcggccgccagctcagcgcgaacgtgccggcgttgaccggccacagcgtggccgccgacctgcaggcacgcctgcaacgtccgctgcatttcggcaacgacctgcagtgttttgccctgtcggaagcacacggcggtgcggccgacggctatcccagcatgttcggcgccatcctcggcaccggcgcgggtggtggtttctgcctgcacggccgcctgctgtccggcttcaacgggctggccggcgaatggggccactggagcgtgcccggtcatctgctgcagcgccacggcctgccgctgatcgactgcgcctgtggcctgcagggctgcgtggagcgctatgtgtccggcagcggcgtggcgatgatcgaacgccacctcggtggcagcgccgcagatgccagcgcggtgattgcattggccgaagccggcgatgcccgcgcacgcaaggcgctggacatccatcgcgacctgctcggccacagcctggcggcgctggtgctggcgctggacccgcacgtgatcgtgctcggcggcggtctttcgcagtacgcgccgctgtacgcgcacctgcccgccgccatcgccgcccatctgttcaagggtgtgcaggtgccaccgatcgtgcccccacgcttcggcgatgccggtggcgcacgtggtgctgccctgctcgcctgccaaccctcgttttcctga

SEQ ID NO: 518008 - DNA, 1155 bp, Stenotrophomonas maltophilia
atggacgtcaccctgctttccgatgtgtccgcctggcagcgccttggcggagccgataccgctaccgaaatcgcccagcagcctgcgctgtgggaagccctcgcgcaggacctgtcgcgtgcccgcgaccgcctgcaggccttccttggcgacagcctcaacgatcccaaccagcgcgtgctgttcaccggcgccggcagctccggcttcatcgccgaaatggtggccgatgccatcaacgcgcaatggcaggccgatgtgcgcgtggtgcacaccaccagcctgctgacccacccggcgctgtacctgcagcgcgaccgcccgaccctgctggtctcgttcggccgcagcggctccagcccggagagcgtggcggcagtcgaccgcgtgcgcagcgacgtggacgacgcgcgcttcctcgacatcacctgcaatgccgatggcgaactggcccgacgtggcgccggccgtgccgatacctgcaccctgctgatgccctcggccagctgcgaccgtgccttcgccatgaccagcagcctgacctgcatgctgctggccgcactgaccgtgttcgatcgttcgccgtgggatgcgcgtgtggcgcgcctgaagcagatcgccgcgctggcccgcgaaggccaggcgcagtgggatgcaccggtcgcggcgctggcgcagcgcccgttcaatcgcgtgatctacctcggcagcggcccgctggaagcgctggcacgcgagtgcgcgctgaaggtgctggagctgaccgccggccgcgtgctggcgctggccaacaccccgctgggcttccgccatggcccgaaatcgacgctggacggcaacaccctggtggtggtgctgcgcagcgtgcagccgctggcgcgccgctacgaacaggacctgctggaagaactgcgccgcgacggcgtggccggccaggtactggcgatcggcccgcattcggacatcggtgcggacgacgagtacaccctcaccgtaccggcactggatgatccgtggctggcaccggtgtggctgggctttgcgcagctgttcgcgctgcagcgctcggccgcactcggcctgaccccggacaatccgttcccggatggcaccgtcaaccgcgtggtcaagggcgtcaccatccaccatggctga

SEQ ID NO: 518009 - DNA, 3360 bp, Stenotrophomonas maltophilia
gtggaaatctgcgttcgtcgctcgccgctgatgctggccctgttgccggcattgatgctggcgtccatgccggcccgggccgagcccgtcggcaacctgcgttcggtcagcgccagcgccagccgcgacggcgtgcagggctgggatctgcagaccgacaagggcgcgcgcatccgcatcgaactgccggccaccggcatcatccgcgtgcaggccggccgcaacggcacgctgaccggtgccggcgacaaggctgcaccgatcgtactgccgcagcccaaggcgaacgtgcaggcgcagctggaagaagacgcacaggaaatacgcgtgcgcaccgatgcactggtgctgcatgtacagcggcagccgctgcgcatgcgcctggaacgcatggacaacggacagcccaccgccctctggcacgagctgcagccgctggacctggatgctacgcagagcgtgcaggtgctgtcctcgcaggccgatgaaggctattacggtggcggccagcagaacggccgttaccagttcaagggccgcgagctggaagtgtcctattccggcggttgggaagagggcgaccgccccagcccggccccgatgctgctgagcagccgcggctggggcatgctgcgcaatacctggagcgatggcagctacgatctgcgcgagaccgaccaggccacgctgctgcaccgcgaagaccgcttcgatgcgtactacttcgtcggcgccgacctgccgaaactgatcgagcgctacacccagctgactggccgccccaacatggtcgcgcgctgggcgctgtcctacggcgatgccgattgctacaacgacggcgacaacagcaagaagcccggcaccgtgcccgaaggctggagcgacggcccgaccggcaccaccccggatgtgatcgacagcgtggccaagcagtaccgcgcccacgacatgcccggtggctggatcctgcccaatgatggttacggctgcggttacaagcagttgccggaaacggtgaagggcttggccacgtacggcttccgcaccggcctgtggaccgagaacggcgtcgacaagatcgcctgggaagtgggcaaggccggcagccgcgtgcagaagctggacgtggcctggaccggcaagggctaccagttcgcgatggacgccaaccgccaggccttcaacggcatcctcgacaattccgattcgcgcccgttcctgtggacggtgatgggctgggccggcatccagcgctatgcggtggcatggaccggcgaccagagcagcagctgggattacatccgctggcacgtaccgaccctggtcggttcgggcctgtccggcatggcctacgccagcggcgacgtcgatgcgatcttcggcggcagcgccgagaccttcacccgcgacctgcagtggaaggccttcaccccggtgctgatgggcatgagcggctggtcgtcgaatgcgcgcaagcacccgtggtggtacgacgagccctaccgcagcatcaaccgcgattacctgaagttgaagatgcgcctgaccccgtacatgtacgggctggtgcacgaggctgcgcagaccggcgcaccgccggtgcgtggcctgatgtgggacaacccgcgcgatccgcatgcgcaggatgaaacctacaagtaccagttcctgctcggccgcgacctgctggtggcgccggtgtaccgcagccaggcggccagccgtggctggcgccgcgacatccatctgccggccggcggctggatcgactactgggatggtcgccgcgtgcaggccgccgccgatggccgccagctcgaccgccaggtggacctggccacgctgccggtgttcgtgcgtgccggtgcgatcctgccgatgtacccgtcgatgctgttcgacggcgagaagcctctcgatgaagtgacgttcgacctgtacccgcagggcgattcgcagtacacgctgtacgaagacgatggcaatacgcgccgctaccagcagggcgaatcgagcacgcagcagatccgcgtgcaggcgccggcgcagggcagcggcccggtgcaggtgcagattgatgccgtgcagggccagtacaacggccagctggcgcagcgtcgttatggcctgcgcgtgctcagccgccaggcaccgcgtgcggtgcaggccggtggccgcgcgttgccggcgctggccgatgcggcggcgttcaacggtgcggctgaaggctggtacttcgatgccaaggagcgccgtggcacgctgcacgtgcgtaccgccacccaggacatccgccagccgctgcaactgcagctggacttcgcggtggccgctgcggccgccgacgatgcctatccggctgcgccggtgctgggccgcgaactgccggccgacagcctgctggtggtcaaccgcccggccgaagagcctggccatgcgctggaaaatgccttcgatgatgatccgggcacctggttccgcagcgtgcgcaaccaggccgtgcgcaccggtgcgcacgagtgggtgatcggcttcggcgagcgcaggatgatcgacggcatcgacatcgcgccgcgcaacgataagaactggaagcacggccaggtccgcgactacgaggtctacctgggtgacagcaatggcgagtggggcgagccgatcgcccgcggtcgcctgcagctgaaggaaggcgtgcagcgcatcgacttcccggcccacgccggccgcctgctgcgtttccgtgtgctgagcgtgcagaaccccgagggcgacggcgccagcagcaccgacccgatggtgaccgccgcacagggcagcgcccgcgccttcgatgcattgcagccgcgcgatgtcggcccgatcgccttgtccaccttccacattcttgaacaccaggaaccggagcgaccggcccggcagcgctatctctccgagctgccggtgccggccgcgctggccagccaggtgcgcaccgaccagtccttccgtggcgacgccggcatgcgcatgaacggcctgcagttccgccgtggcctgggcgtcggcgccaacagccgcatcgacctgcgcctgcagggcggctggcacctgctgcgtgccgacctcggcatcgacgacgcctgccgcaccgccggtggcctgcagttccaggtctggggtgacaaccgcctgttgtatgacagcggcctggtgaaggcacccggcgtggtcaagccggagctggacatccgaggcctttccatcctgagcctgcgcacgctgggtgcgcagggcagtcaacccgcccaggtctgcgccaactgggccaatgccgtactgatcggccaggagggcgactccgccagcatcgtcgccccatga

SEQ ID NO: 518010 - DNA, 2976 bp, Stenotrophomonas maltophilia
atgttgcccgcccgccaccaccgccccccctgtcgttcgatcgctccgctgtcgctggccatcgccggcgtgctgctgtcggtcgccgttcctgccttcgcccaggagagcaaggacaaggccaccgacctggcccgcatcgaggtcaccggctccaacatacgccgcaccgacgttgaaaccgcctcgccggtgcaggtgatcagcaagcaggacatccagaacatgggtgcgcgcacgctgctgcaggtgctcgacaacctgccggccgcacgcccggcgcagcaggatgcgcgctcgctgttcaccggttccgacggtgcctcgcaggccaacctgcgtggtctgggcgcacagggcacgctggtgctgctgaatggtcgtcgcctgtcgtactacggtgcaccggccggcttccagacccagttcgtcaacatcgatgcgatcccggctgcggccatcgagcgcatggaagtgctgaccgacggcgcctcggcggtgtacggcaccgatgcggtggccggtgtgatcaacgtgatcaccaagcgcaacttccagggtgccgaggtcagcttcaccaacgacacctcgtcgcgcatcgattcctacggcgagcgccaggccagcatcaccgccggcttcggtgacctgaccgagaaccgcttcaacatctacggcgcggtgaacatgtaccgccgcgacgcgattccgctcagcgatttctacgacaagcggcccgaccagtactacgtcaacaacccgaactacctcaacaacctgcgcctgggcgtgggcagcaagtcgggcgagttcaacccgggcagctacttcgcgttcgatccggtcaccggccgccgcgtgcaggaagctgcgccgggctgcaagaacgtgctgaccagtgaagcggctggtccgcgttgcgtctgggaaacctggatgaacaacgagatcgatgccggcgccaagtccgagcgcaacaccgcctacctcaacggcacgttcctggtgggtgacagcaccgagatcttcgccgaggcgacctacaccgacatcgacctgcgcgccaacggcggcacgccgcgcacctacggcaccaccaccggcaacccgaccagctggttctcgcgcaacaccggcaacaacgtcaaccagttcctgtacccgttcctgggcccgaacaacgagtacaaccacgccagcccgcagatgaaggcgatgatgggcggcgtggtcggcctgaattacctgctgcaggatgctggcccgaactacttcggccagcgcaacaccgacaagagctaccgcgtgctggccggcgcgcgtggcgacgtgggtgactggaactgggagaccgcgttcgccagcgcgggtacgcactccaccacgtaccagacgatcaacgtcaacatcaagggcttcgagaaggccttcggcccgtactcgatcgatccgaccacgggccgcgtgatcatctccgaccacccggcgtacaagttcggcgagatcagcgaagccaacgctgcgctgatccgcgaagcgttcccgaccttcgacatccagtcgtggacgcgcctgcacaccctggacggcaagatcgaaggcccgctgttccagctgccggccggcgagatgcgcgccgcgttcggcttcaacgccagccgcgaaaccttctacaccccgggcaacgccgatgcagccaatggcctgatttcccagcagggcggctcgtggttcgacggcaagcgcaatacctacgcgctgttcgccgagaccgtggcaccgatcaccgacaagctggaactggatgccgcggtgcgcgtggacaagtacccgaacttcagcgccaacgtggcaccgaagatcggcttcaagtaccaggcgttcgaccagctgatgctgcgcggtacgtactccaccggtttccgtgcaccgagcctggccgagtccggcaacggtggcgtgttcgctcagctcggcggcttccgtgacgagctgcgctgcaacgagaccaatgccatcgccaacctgttgctgaagtcgcagcggccgggcgatgtcgatctcggcaagaccctgctgaacgtcgactgcagccgcaccgtggcgcgcatgacccagccgaacaaggacctgaagccggagaaggcgaaaatcgccaccctcggcttcgtgtacgagccggcgagctggctgtcggtgtcggccgactactggttcatctaccgcaacaacgaaatcgtcgcgccggactatcgccgcatggaagacatcatctcgatgtcgcgctcgccgatcaccgacagcgaccgcgccaacctggcgcagctggcggccatgtgtgccgacccggccagtggcgtgagctgcccgtcggtgctgccgggctattcggccggcaacgtggccagcgtggtgggccagtacaagaaccggggcaagaccctgatcgacggcttcgacatcgatgcgcgcagccgcttctcgctgggtgactggggcaacctgaacatcggcctggccgccaccatcgccaaccgcaaccgcttctacatggatgcggagaacggctggtactacggcgacgtggtgggctactacaacaacccgcgcctgcgtgccacgctcaatgccgactggacctacaagcaggtgaccaccagcatgttcgtcaactacgtgggcggcaccaagtgggccaccgaccaggttgatgaggtgagcaacaacaaggaaacctgcaccggcggctacctggccctgcagaagagcaagtgtgacggcgcgccgtcgtggtggaccgccaacatgagcgtcacctggcgcccggatgatgcgtggaacctgagcttcaccgtcaagaacctgttcaaccgcctgccgttctacgatccgaacagcttcctgggtgactccagtgactacgcaaccatcttcggccgtggttacagtgtgaccatcggctaccggttcaagtaa

SEQ ID NO: 518011 - DNA, 1356 bp, Stenotrophomonas maltophilia
atgaagcgtagggaattcatcgcggccagtgccgctgtcgccgccagcagcctgctgccgcagaccccggtctgggcacgcgggcgcaaggtgcgcctggccatgatcggcaccggcatgcgtggcctggtgctgctgaaggagctggtgcgccgcgacgacgtcgaggttgtcgccgtctgcgatatcgagccgatcatgctcggccgcgccgtggacatggtggccaaggccggcaagccggcgccgaagacctacggccaggaccgcgacaccaatgcgtggaagcgcctgctggagcagaagggcatcgatggcgtgatcatcgccacgccgtgggaataccacgcgccgatggcgattgccgcgatgcaggccggcgtggccgtgggctgcgaagtggtggccggcatcaccctgcaggaccactgggacgtgctgaagacccagctgggcaccggcaccccgtacatgctgctggagaacgtctgctaccgccgcgatgtgatggcggcgttgcagatggtgcgtcagggcctgttcggtgagctggtgcacctgcaggccggctaccagcacgacctgcgcggcgtgaagttcaattccggcgacccgaaccagccctacgacagtggcgtggagttcggtcccaagggctggagcgaagcgcgctggcgcaccgagcattcggtggagcgcaatggcgagctgtatcccagccacggcatcggcccgtgcgcgatgtacaccggcatcaaccgtggcaaccgcttcacccacatcaacgcctttgcgaccaaggcgcgcggcctgcacgaatacaccgtggccaagagtggcggcaccacccatcccagcaccaaggtgaagttcaagctgggcgacatcgtgaccaccacgctggcctgcgagaacggcgagaccatcctgctgcagcacgacacctcgctgccgcgcccgtactcgatgggcttccgcgtgcagggcaccaagggcctgtggatggatgtgaaccattcgatccacatcgaaggccgcagcccgccgcaccagtgggaagagttcaagaagtaccaggacgagtacgagcacccgctgtggaagcagaatgccgagaccgctgccagcgccggtcatggtggcatggactggttcgtcatccacgcgtttgtcgaggcactgaaggccaaggcaccgatgccgatcgatatctatgacgcggtgacctggagtgcgatcacgccgttgagcgagcagtcgatcgccaacagcttccagacgctggagttcccggacttcactgcaggtgcgtggaagcagcgtaagccgatcttcgcgttcgacgggaagtattga

SEQ ID NO: 518012 - DNA, 708 bp, Stenotrophomonas maltophilia
atgccatggcagaagatcagcgaacttcctgaccagcgattcgtcggcctctacggcaccgaattctggcgaatccacgaaggccaggtcttccaccagggtcggttgctgcgcaaggccgacgcggccagtttcgagttcatccccgaacactatttcatcgcgcgcgattcgcacgccgtctaccacgcctggacccgcctgcctgcgattgaccgcgacagcttccgccagtgcggtgattactggctggacaagcgcaatgtctacttcgaatacgagacttcgctgaaagccttggccgaagccaattgcgccaccttccgcagtatgggcggcggctacggtgccgatgaccatggcggctggtactgcggccggcggatgaagcactgccggcgcggcgacctgctgcagacaatcccgcaggacccgctgtacgccgttgatgacagcaacgtctactgcgacgggaagccgctgcccgcggtggatcgtgcgcgctggcggctgctggatggacacttctcgagcgatggaagccgtatctactatctggaacggaagctgccgcgcgtggacgtggcgtcgtggcgtctgttgcaggggagctggtcgcgggaccatgaacacctgttccatatgttcatgatcgagaccgacccaacgctgcgtgcacagcatggtttcagggctgatgagggttga

SEQ ID NO: 518013 - DNA, 414 bp, Stenotrophomonas maltophilia
ttgaaggcgcagatcgatgagaatcttccgcccgcgctggcccgggccatcgacgccattgcaggaacggacgaacacgaagtcttccacgtaagggagttcgtgaagcccggcactactgacctggagctcttcgacgcggccacccagcgaggcatccgtgtacacgttacccaggatcatcatcatcgcaagcccgcagagcgcgaggcgatcgcacgcctcggcctgaccgtattcgttctggccaagggttggagcacgttcaaccactacgagcgcgcagcgcggcttctggagtggtggcccaagatgatgcagcaggccgacctcgtgcaacctggtgcaatgttccgcgtaccgcatgccagggcatccgggggaaggctgacgcagatcaaggtttcgcggtaa

SEQ ID NO: 518014 - DNA, 705 bp, Stenotrophomonas maltophilia
atgggtatcgccttgccagaacaggacagcctcggcgtcggtctctattcctacgccgatgccgcgcgcttcatcggcggcagctcgtcggaactgcgccggtggctgaagggctaccagggccggaagcacgggaatccggaagcccaccctcccctgtggaagtcgcaatgggccgattcagagatcgacggcattggctttcgcgatctgatcgagctgcgcttcgtccgcacattcgtcgcatgtggcgtgccactcaacctggtgcggcgaaccattgtcgagctgaacgagcggctcggtaaggagtaccccttcaccagcaccagcttcaagaccgatgggcgccgcattttcatggagctcgtgggcgacagcggcgatgccgcactggtggatgtggtgaagcgccaggacgtgatgcgcaaggtcatcgcaccttcactgcgcgacggcgtcgaactgggcatcgatgatcgtgccgaacgatggttcccactgaagggctcccgcgccgtggtatttgatccacagcgcagttttggtcagcccatcctttccgaatcgggcgttcctaccatcgccattgtcgaggcgctgcgcgccgaaggtggcgacgagcgtcgcgtggccaggctctatgacctgcctctgactgcagtgaagaaagcactgcagttcgagaatcgagccgcgccttga

SEQ ID NO: 518015 - DNA, 894 bp, Stenotrophomonas maltophilia
atggctgatacccccctcacttcgccgcagtcgccggcgacgccgcgttggcggcattactggagtctgatgcgcgctgatcgcccgatcggcacgctgctgctgctgtggcccacctggtgggcgctgtggctggccgccggcggcctgccgccgctttggaccctgttcgtgttcaccgccggcgtgtggctgacccgctcggccggttgcgtcatcaacgactatgccgaccgctggctcgacccgcatgtggagcgtaccaaggcgcgtccgctggccaccggcgcaatcagcggccgtgccgcgctggcactgttcgccgtgctgatgctggtggcgttcggcctggtgctgaccctgaacgggctgaccatcggcctgagcttcatcggcgtgttcctggccgccagctacccgtacctgaagcgctatacccatctgccgcaggtctacctgggcatgtcgttcggctggggcatcccgatggcgttcgccgccgtgcagggcgaggtgccgctgctgggctggctgctgtatgccggcaacatcctgtggtccaccgcctacgacacctggtacgccatggtcgaccgcgaggacgacctgaagatgggctcgcactccaccgcgatcctgtttggtgacctcgacctggtcatccagggcgtgttgtacgcgctgttcctggccaccatggcgctggtaggcgtacgcggcgggctgggtgggtactacctggccggcgtggttgtggccgctgtgctggtggtctacgaattctggatctgccgcaaccgcgagcgcggcccgtgtttcaaggcgttcctgcacaacaactgggtgggtgcggcgctgtttgctggcatcgccgtggatctggcgctgcgttga

SEQ ID NO: 518016 - DNA, 1428 bp, Stenotrophomonas maltophilia
atgatggcttcgacggcagcagtacaggacggctggatggcgcgcgcagcattgcgctcggccgcctgggcggaaaaatggttccccgatgcgtacgtgtttgcggtgctgggcgtggtcatcgtcgcgctggcggcgatgggcttcggctcgactccgcaggccaccgccagcgccttcggtgacggcttctggagcctgattcccttcaccatgcagatggccttcgtggtcatcggtggctacgccgtggccaccgcgccggtggtcgcacgtttcatcgatttcctcgcccgtgtaccgcgcaccggccgtggcgcggtggtgtacgtgggcctggtcagcatgctggcctcgctgctcagctggggcttctcgctggtgttcggcggcctgctggtgcgcgcgttggcgcgccgtaccgaactgcgcatggactaccgcgcggctggtgcttcggcctatctcggtctgggtgcggtgtgggcgatggggctgagttcctcggccgcgcagctgcaggccaatccggccagcatgccgccggggctggtcgagatcaccggcgttctgccgttcaccgaaaccatcttcctgtggcagtcgatcgcgctgacctcggtgctgatcctggtttcgctgctgatcgcctggctgaccgcaccggctgccggcagtgcgcgtaccgctgaggatttcccgggcgccgcgcaggccgagccggaaccactgcagcgccgcacgcgcccgggcgagtggctggaatacagcccgctgctgaccgtactgctctcgttgctggcgttcggctggctgttcaacgagttcgccaacaagccggtggtcaccgccatcgccaacctcaacacctacaacttcctgttcatttcgctgggcctgctgctgcactggcggccgcgcagcttcctcaacgcggtggccaaggcggtacccagcaccaccggcgtgttgatccagttcccgctgtacggtggcatcgcgatgattctcacccatgctgctggcggcgacgggcagacactggcgcaccgcctgtcgagcctgttcgtgcacgtggccagcaccgataccttcgcgctggtgatgggcgtctattcggcggtgctgggcttcttcgtgccctccggcggtggcaagtggatcatcgaggcgccgtacgtgatgcaggccgccaatgaactgaaggcacacctgggctgggcggtgcaggtctacaacgcggccgaagcgctgccgaacctgatcaacccgttctggatgctgccgctgctgggcgtgctgggcctgaaggcacgcgacatcgtcggcttcaccttcatccagctgctggtgcacattccgctggtgctgggcctgctgtggctgctgggcatgaccctggcgtatgtgccaccggtgatgccctga

SEQ ID NO: 518017 - DNA, 162 bp, Stenotrophomonas maltophilia
atggcacagcagaaccagaacccgaaccagaaaccgcagggccagcagaaccagcaggatcagcagcagggccgtggccgcgaccagcagcagcaacagcagcaggaacagcagaagcgcaaccagaaccagcagcagggcggacacgacgaagaagaatga

SEQ ID NO: 518018 - DNA, 627 bp, Stenotrophomonas maltophilia
atgcatcgcctcctgctcctgatcggcctgctgctgcccgccctgtggccggcggtggcgagggccgtcgatgtccacgaaggcgacctgctgttcgtcaccgccggccgcagcggtctcagtgcagccatcgacgatgccaccggcaagcagggcgcgcccagcttcgatcacgtcgccctggtcgcttccacgccgaagggctgggaggtattgcatgcggacgagaaaggatcgcgccggcaatcgctggtcgagttccgccaggaggcgcgcgacaagcagcggcggatcgtggtctatcgcctgcgcgcgccgcagcaggcggcgatcagggatgcgatcgccaccgcgcgcacgatgctgggcaagccgtacaacacgtcgtatgtgttgaacgaggacagctactactgctcggacttcatcgaacgcgccttccgtgcgcaccacgtgttcgcattgcagccgatgaacttccgcaacccgcagaccggggagatcgcccagcactggattgatctgtaccgcggcatgggcatggaggtgccgcaggatcagcccggcaccaatccgaacgacatgtcggcggcaccggtgttgcagcgcatcggcatgctggaataa

SEQ ID NO: 518019 - DNA, 513 bp, Stenotrophomonas maltophilia
atgtgtcgataccgttctgccgcagtgctgatgctcgcctgcgccgtggtgctggttgcctgcacgccagcgccgcaggcaccgcataccgcgaccgaagcctcacctaccgcagcggcgccggcgaccaccgtcgccgagcccacagctgtggctgcacgcggtgaatgcctctacccggacttcgatacgttcctgaagcatttcggcaacgagatcgcgctgcaggaaaagaccaccgccgatccgctgctggacagctacatcgatgcagaggccgagccggaaccgcgcaaggtggaaagccggctggcgcgggccgatgtcgagtggccggtgatgcctgatcccgccgcactggccgggcagggccgcgaaatgcaggtcagcctcctggccgatggacagcggcaggtgcagatccgcacgccggacagcagcgaccagcagacctataccttcacgcaggcgccgtgctggacgctggtcaagcgtgaggatgagtcgatctga

SEQ ID NO: 518020 - DNA, 1839 bp, Stenotrophomonas maltophilia
atgcaggctttcaggaagcgcaccaccaccgccgccattgccgccgtattggcgatagcccccttccgcggcgcgcaggcacagtcggtgcatgccgatgaccgcacctacttcgccagcgccgcggccgaacagaccgcgcgtgatgctctgggcaagcgcgtcgaggccctgcagcacgcttccaccctcgcaccggcggaacgattccagcaggccgaggcactggaggcgcagtgcctgcgtcatctcggctacctgcatctgcagtccgcccgcaacgcgcgcgatcttcgcccggcacaggcgatggagcaggcagcggggctgtgcagccgcatcgctcgcagcggtcgcgccgcactgcgcgaggcgcccgcagatgcggcgtgggcagcaccgtatggcttcctgcgcactcgggcgctgaaggaggctgccaccccggccaacgtcgcgctggatgaggccgtggaggcactggccgatccggcgctggacagcttcgcgcgcctgcgcgggcagatcctgcgcagcgccgagtatccgcagatcgagcacggcggtcgtcactgggacacgggccgcgacaagcagctgctggcccagcagcccgaccgcgccctgcgcgaggccggctggaagggctactggcaggggctgcactcgcgccgtgagccgatggcctcggtgctgctggggctggtgcaggtgaatgacgccgccgcacgcctgcagggtgacggctcggcgccggcatatggctaccagcgcatgggcctggatactgccgcagtggatgcaacgctggtggcgatcgaacagcacgccggggaccgccgtgcctaccaggacatgctgctgcgccacgctgcgcgatccggcatcgacgcgccgcagatctgggataccaccgtgcccgatgccggctatacgccaccagtgctgacgttggcgcagctgcgtgacaacgccgccgatgcaatgcagcacctgggaccggcgtacgtcgccgaactgcgcgcgctgctcgatccggccaaccagcgcatggatctggccaccgaacgtggtgaccgcagccaggacgcgttcccggtgagcgctcccggtgtgccggcaatgctgttcgttggcctgcgccgtggtgatctggaaagcgacgtcgagatcgcccatgaagccgctcatgccgtgcacggcgagtggatgcagcgcggtcatgcgtcgccgctgcagcgtaatggcagccagtggctgaccgaggcgttcgcgatctacaacgagctgcgcttccgcgaccagctgtaccagcaggcagaggatccgcgcgccaaagcctattacctgaaatcgctgctggacgacatggtgctgcagctgttcacctcttccgaggaagcgcagctggagcagtcgatctatcggggcgtggccgccggcacgctgggcaccgccgatgacctggacgcgctgaccgggcaggtgctggcgcgcttcggccagcaaccggagcgctacccgcagctgcgcaacacctggatcggcaagcgcctgatgtatgaagacccgaactatctggtgaactacctgtatgcggggctgctggccgtgcagttgtatgtgcaggaccagcgcgaccccgaagggttccgtgagcgctatcttgccgtgcttggcgagggcttcgaccgcgcgccgaacgagcaggtggcgcaactgctggggcacgcgcctgactgggcggccctggtggatgccgatctgcaggtgttcaaccagacggcggcgcagctgcaggcgctgcatgcgcagatcgaggcagggcagggtacgtga

SEQ ID NO: 518021 - DNA, 1413 bp, Stenotrophomonas maltophilia
gtgaacccggcgcgccccttgcagcaggcggccgccaccgtgtggatgctgttgctgctgtgcctgctgccgatggcggcgacggcggtcaccccgatacctgcgctggacgatccggtggtggatgccgccaacgcgttgtccgctgaaacccgcgccaccctgcgcaggcaggcactgcagctgcaggcacggaaaggtgcacagctgcaggtgctggtggtacccagcgtgggcagcgaaggcatcgaggcctatgcacagcgggtgttcgatcagtggcagctggggcgcgccggtgtcgacgatggtgtgctgctgttggtggcggtgcaggaccgccgcgtgcgcctccagactggctatggcctggaaggagcgctaccggacgcgtacgccgctcgcatcatcgacaacgcgatcgtgccgcgcttccgtgagggcgatgtcgaccagggcgcgctcgatggcacgaagatcatggtggcgctgatcgatggcgaggacctgccggcatgggaagaaccgtcggccagcaatgtgctgcctgcggactggcgacgcgcagactcggtggtggcgttgaccctgctggccggtttcctggccgggctgtggcgctcgccgccgcccctcccgccggcgaagaccgaggacgatttcagcggcagccgtcgggagcggcggcgcaaggcactggccgccaatgcatcggcaccaaaaccaacctggccgaccttgccggcctgggggcgcccgatgctggtgaccgctgttgtgggtgcgggcatgctctccgtggcgctgctgctgccacgccatgtgctgcccggcctgtgcttcgtgctggcgctgggtgtgccggtggctgccctgctgggctggtgctggcgccgcagtcgaggtgtgcgcatcgtgctgtgcgggatgctgatgctcagcgtgctcttccttgtgcaggcgctgctgcgtggccagctgccaccgagcctggcccggcacctgttgctgcaggtcgctgcgggcgttgtcaccttgatggtgttcctgctggtgcaggcctgtcgcacacgctggaagaagagccgcagcagcttcgtcgtgcgcatgacggtgctggtgctgttgaccctcggctatgctgcgggcgcgttgctggcgatccatcgtgccgaaggtgacgatccacggctgctggcaatgatcgtgtccggggtgtgcggcgtactgctgtacttcgtgtggttgttcaccatgctgccgggcgagcgcgcacgcggccgggcttcatcatcccgcgaacgcacgtcgtcccgttcgccgtcctcgtcgagttcgtcgtcgagcagttccagcagctggtctggaggcggcggccgcagcggcggaggcggcgcgtccggcagctggtag

SEQ ID NO: 518022 - DNA, 672 bp, Stenotrophomonas maltophilia
atgcgcctgcttcacctcaccctgccggtgtccgacgtcaccaccgtcgctgcatatttccacgatgtgctgcagcagcgcgtggtcggcaatcacgtgcacatcggctggagcacgatcgagctgaagccggcgggtgatcatccggtcggtggcgtgcacctggccttcaacgtaccggacaaccgcttcagcgaggcgatgacctggttgcgtgagcgcacgccgctgcaacgcaatccggcgggactggactacttcgcgctggagagcggctggcagtcgcagtcggtgtacttcactggccctgacggcctgatcctggaactgatcggccgccgccgtttgccggccagcgcgcgcgaaggtgcgttccacggcagcgaactgacctgcctgagcgaagtcggcctgcccagccacgatgtcgacgctgtgcgcgaacagtccagcctgcggttcggcctgcaaccgatcagcccgccttcgccgcagttcgcgccgatgggcgacgacgagggcctgctgatcgtggtcgctgcggatcgacgctggttccccgagcagaaggacctgccgaacgcgcgcggcttgcagctgcaggtcggcgacgtggccggcccgggtgttgtggaggacgcctcgctcggctggcgggtgcaggcgacctga

SEQ ID NO: 518023 - DNA, 816 bp, Stenotrophomonas maltophilia
atgagcgcggcaggcaaggcgttgtggtacatcgaaacccatgcggaccagccgttggcactggccgatattgccgccgcagcggggctgtcgccgttccatctgtcacgcctgttccaggcccgtaccggcacctcggtggtgcgttatctgcggggacggcgcctgaccgctgccgcgcagcggctggccaacggggcgggcgacatcctgcaggtggcactgggcgcgggctacaccacccatgccgcgttcacccgcgccttcagcgagcagttcgggcagaccccggagcgggtacgcgaacaaggcaccgatgggctggcgctggtgcaggcgatccgcgtggacgatgcgccgactgcctgcggtgaagcgccgcgcctgctcgatacccctgccttccaggtcgcgggtatcggcatgcggcatacccgcgacagcggcggtgcgatacccggacagtgggcgcagctcaaccgggaatggccgacgccggcaccgatcagcttcggcgtgtgctgcaacagtgatgacgatggcggcttcgactacatcgccgcactgccggccagcgcggtgccgagcgtacctgcgcactggcaacgcgtggacattccgccgcgtcgctacctggtggcctggcacggcgggcacatctcgaccatccgctcgacctggttctggctgctggatcactacctgcccggctccgggctcagcctggccgacgcccccgatctggaacgctacgacatgcgtttcgatgagcacagcggcaacggcggcgtggaaatctggctgccggtggagtga

SEQ ID NO: 518024 - DNA, 2358 bp, Stenotrophomonas maltophilia
atggccagcgcaggaggcgcgattgcagcggaggccgatgcggtcgatgccgcaggcagcagccgtacggcgcccacccagctcgatgcgatgctggtcaccggcacccgcgcctccaaccgcacccagttcgaaacgctggcgccggtggacgtgttcaccaaggaagacatcaagtccgttgaatccaccgacctgaaggacgtgctggcgcagctggtgccatcgttcgtggtgcagcgcctgccgatggcggacggccaggtgttcgtgcgcccggccacgctgcgtggcctgtcgccggatcagacgttggtgctggtcaacggtcgtcgcttccatcgcagcgcgctgctcggcaaccgtggtgcgcaggcggccgacctcgcacagattccgaccagtgcgatcaagcgcatcgaagtgctgcgcgatggtgcgtcggcgcagtacggctcggacgccatcgccggcgtcatcaacatcattctcgaagatggccccggtaccgagattactgccggctactcgcagtacgcacagggcgatggcgcctcgcgcgacttcagtgcacgcaccggctggtcgctgggtgactacggcagcctggtgctgttcgccgaatcctcgaactcggatgccacctcgcgcacccgccagcgccccgatgccatcgccttccaggctgcgcatccggagctggacgtacccaacccggtgcagcgctggggccaaccggaactggaaagccgccgcgtcggcttcaacgtgaaggccaatgccaacgacacgctggagctgtacgcgttcggcctgtacagccacagcgatggcgtcagcgatttcaactggcgcaatccggataccaccaccggtgcctaccgcaccacggcgatcttccccggctggaacctgcgttcgatctatccggtgggcttcagcccgcagtacggcaacgtccagaacgacctgcagctggtcggtggcctgcgtggcgagatcacgccgaagctgcgctgggatgtcagcgcctcgtatggccgcaacgccatcgactacagcctgaagaactccatcaacgcctcgctcggcccggccagcccgaccgcgttcgatctcggccgcctgacccagaccgagaagaacgccaacgccgacttcaactacgagtgggatgtggctgcgctgtccaagccgatcaacgtcgcctttggtggcgagttccgccaggagacctaccaggtgcgtgccggtgatccggcttcgtacgcagtgggcccgggcgctgccgctggcctggaagccaattccaacggcgcgccgggcttctcggccagccaggccgggcagtggagccagcgcagcaaggcggcctacgtggatatggaagtgccgttgggcgagcgctggagcatcggcgcggccagccgctacgaggacttctccagcttcggcagcacgctggacggcaaactgtcggcacgcttcgcgatcaccccggacgtggccctgcgcggcacggtgtccaccggcttccgcgcaccgacacccgcgcagctcaacaccaccagcaccacccagggcctggatacgcgcacgctgcagatcttcaccagtggccgcctgtcaccgaacgatccgctggcgcagctgctcggtgccaggccgctgaagccggaagaatcgcgtaccgcgtcgctgggcctgacctggcgcaccgacctgggcctgtccggctcggtggatgtctaccagatcaagctcaccgaccgcttcagccagtcggccagttttgccattccggcaggcacgccgaatccgctgggctatacctcggtgaactacttcaccaacgatttcgataccaccaccaccggcgtggacgtggtcggcaactacctgcgcgacctcggcgcgggtcgcatgacgctgaccctggcctacaactacaaccgcacccgcgtggacaacggcagcacctcggtggccaccaacgaaacccagcgcgtgctgttcgaagaccgcctgcccgagcacaagggcagcctgaccggcagctgggacattggtgcctggtcgttgatggcgcgcatgcgctactacggcgcctggaccgacgccagcggcaatgcggtgggcgacatctaccagcgcttcggcgcgatgagcttcctcgacctcgccgtgggctatcgcatcaacgagcaccaaagcctgcgcgtgggggccgacaacgtgctggaccgctatccggatgaggcggtgttccaggccagccgcggcctggtctactcgcgcaacgcgccgtacgacaccgatggtgccaacctgtacgcgcagtaccggttgagcttctga

SEQ ID NO: 518025 - DNA, 1302 bp, Stenotrophomonas maltophilia
atggaccgcacgcgccgctccctgctgcgtgccggcaccctgctgccggccgcagccgcactgtcttcactgcccgccatggctgccacgcgctacgctgcgcccatgcagattcccgcaacgaccgaggcgccggacgtgctggcccgcgatgaaggctattgggcctccgtggccagccacttcgacatcaccgacgaagtgaaccacctggagaacggctattggggcgcgatgggccgcgagacgctggccagctaccagcgccataccgctgaagtgaaccgtggcaacgcctggtacggccgtcgtgagttcccggcgcagtacctggcggtgcagcggcaggtagccgagctgctgggcgtgggcgttgatgaaatcgcactgacccgtggtgccaccgaggcgatgctggccctgattggcggctacaaccgcctgcagcccggcgaccaggtgctgtacgccgacatcgactacgacagcatgatcggcgcgatgcgctggttgcagcagcgtcgcggcgtgcaggtcgagcgtatcgcgctgccggcggtgccggaccacgcgcagatcctgcaggcgtatgaggacgcattcgcgctgttgccgcgtctgaagctggtgctgctgacccaggtcagccatcgtcatgggctggtgctgccggtggccgagatcgccgaacgtgcgcgtgcacgtggtatcgacgtgatcgtcgatgcggcccatgggttcggccagatcgactacgcggtgccgcagctcaaggctgatttcgtcggcatcaatctgcacaagtggatcggtgcgccggtgggcgtcggcgcgatgtacgtgcgcaggggccgcgttgcggacctcgacccctacatgggcgagaccgacgacggccgcgtgggcagccgcgtgcataccggtacggtcaacttcgccgcctacctggcgctgccggaagcgatttccctgcaccagcgcatcggcgtggccaacaagcaggcgcgcctgcgttacctgcgcgagcgctggacggtaccggcgcggcagatggcacatatcgaagtgctgtcctcaccggatccggcgttggcgagtgcattggccagctttcgcctgcgcgggcgcaccagcgtggctgacaacctcgcgctgcagaagcgcctgctggatgagcatcgcgtgttcaccacgcatcgtgacggtttggactccggcgcgtgcgtgcgggtgacaccgtcggtgttcacccggccggagcagatggacgcgctggtgcaggcgctctccgccctggcctga

SEQ ID NO: 518026 - DNA, 1515 bp, Stenotrophomonas maltophilia
atgacatcactgacgctggccggcgtggccgccgcagacaacaacggcggtcacctgtccgaaccgaccgatggttatggacaggctcccgccgttggaagcaacgatacgccccgacatgctccgtacatgccgcgaccggatgtcgcagcccgcgaatgggtgcaggacgtactcgcgcacagcgggccgatctacctgcgcatcgtcaactcgctggaacgcacggtgcgccgcggtggtctcgcaccgggacagcgcctgccttcgcaacgcgcgttggcgcagcagctcggtatcgacctgaccacggtcacccgcgccttcgatgaagcacgcaagcgtggcctgatcgaagcgcgtggaccacagggcagtttcatcgcaccgcccaaggccggcttcgaccaggtggtagacctgagcatgaacgtgccgccggtgcccgatgccgacgcgctggccgagacgctgcgccgcggtgccgccgccgtgcttgcgcgcagcaacgcgccgaacctgatgacgtatcacctgggcggcggcaacccgaccgaccgccacgcagcggcgcgctggctgcagccgatgctgggaaaggtggacgatgcctgcctgctgctgaccgaaggtgcacaggtggcgctcgcgtcgatcctggtcagccagggacgcgacgacgacgcgatcctctgcgatgcgctggtctatccgggcctgctgcaggccgctgccgcactgggccggcgcctgctgccggtggacagcgacgaacacggcatgtgccccgatgcactggcccggctggcacgcgaaagcggcgcgcggttggtctatctcaatcccacctgccagaacccgaccgcactgaccctgccgctgcatcggcgcgaagcgctggcgcgcgtgctggaaagcgaaggcctgctggcgatcgaagacgatccgtactggcatctggccgaagatgcgccgctaccgttggcaacactggcaccgcgtcatgtgttctacgtggcgacgctgtcgaaggtgatcagccccggcctgcgcaccgccttcgtgcgttgcccgagcgccgcgcatgccgaggcgatgacggccgcgctgcgagcaacgcggttgatgggccatccgctggtctcggcgttggccagccagctgctgctggatggttcggcacagtcactgctggcgcaggtgcgcaccgaggcgcgcgaacgcgtgcgactggcgcgatatctgcttgcgccttcgctgctgcagcgcgctgaaggcctgcatgcctggtgccggataccggcaccgtggaccgatgccaccctggtgcgtaccgcacagctgcaggggctggcgattgcaccgtcatcggcgttctgcccgccgggggtacagcatcagaacggggtgcggttgtcgctggggctggcggcggaccgtcggcagctggaaagtgcgctgcggcggattgatcggttgttgttgtcggatgcgttgccggcgatcgagcggtag

SEQ ID NO: 518027 - DNA, 600 bp, Stenotrophomonas maltophilia
atgggcgcagccgcgccgcgtcgccgctggctgctgccgacgatgatcgccctcgcctgcctgttcatggccggcgtggcagctgcgttgtggcagtacttcggctacagcgcgcaatccaccttcaccgaacaggccatcgtcttcgacgattcgcagctgcgcctgccggccgatctggccggtgataccggccgcatccgcgtggtgcatttctgggacccggcgtgcgcggtctgcaaccgcgagaccggtgcgcacctgagctacctgatcagcatgtaccgccgcgccggcatcgacttctatgccatccgccgtccgggtacgcagggcgagctgcccgagccactgcgcaacaaggtgatcaacctgccgaccatcgacggcatcgaacacattccggccagccccgccgtagccatctgggatcgccagggccacctcgcctacgtaggaccgtacagcatcggcatggtctgcaactcggccaacagcttcgtcgaaccgctgctggacagactggtgcgcggcgagaccgtgcgcccgaaaggactgcttgccgtgggctgctactgcccctggcaggccaagcgctga

SEQ ID NO: 518028 - DNA, 261 bp, Stenotrophomonas maltophilia
atgcgcgccgagagaatgaaattccacctggtgatggccgggtgcggtggctttgtggtgttgatgctggccgcgctggcctgggtctgcctgcagccgcagaccgtggatgtgcaggccgccgaacgccacgccatcgagcagtgcgtgcagcgcagcgaggatccgtcgcgtagcgagatccagcgccgcgcgcaggccgattcctgccgcgagatgcgcaagcagtacgtgcacaagttcggccgggaagattcctga

SEQ ID NO: 518029 - DNA, 1416 bp, Stenotrophomonas maltophilia
atgacgccacctgccgccggccgccgcctgaaacaccccaatcgcacctgggttcgccccttccgcgagggcgccggcccgctgtacctgcagattgcccagcaggtgcgcgaggcggtggatgacggcgtgctgcgcccgggcgaccgcctgccgccgcagcgcgacctggcccagcaggtgggcgtggacctgaccacggtcacccgtgccttcgccgagctgcgccaggccggcctgctcgatgcgcagggcgccggtggcaccttcatcgcgctgtcggccggcaaccgcagcacctcggtggacctgagcatgaacatcccgccgctgctgggcagcgcgccgttcgcacagggcatggaggccggcttccagcacgtgggccagcagctgggccagggcgaactgatgagctatcacgtcggcgccggcacccgcgaggaccgcgccgctgcggtgcagtggctggcgccgatgctgggcacggtcggtgccgaccaggtggtgatctgccccggcgcgcagaccgcgctgtgcgcgctgatcctggcccgcacccagccgggcgagctgattgccgccgagcagctgacctacccgggtctgctggctgccgcgcgggtgctgcagcggggcgtggtgccggtggcgatggacgccgagggcatgctgccggaggcgctggaggaggcctgccagctgcgtcgcccacgcctgctgtacctggtgccgaccatccagaacccgaccacggcaacgatgtcggcacagcgccggcaggcgctgctggcggtcgcgaagcgccacgatctgaccgtgatcgaagacgatccctactggttgctggccggagacgccgcgccaccgctggccgcacaccgcgatgccggctgcccggtctattacatctccaccctgtccaagtgcctggccccgggcctgcgcaccgcctacctggtggtgccggccggcgagccgatggaaccggtgctggatgcgctgcgcgcaatcgcgctgatgccgacccagtcgatggtggcggtggcctcgcagtggatccgcagcggccaggcccaggacatggtgcagcgcttccagcaggaactgcgcgagcgccaggccattgccgcccgttacctgccggcccgcgcccaggcgcatccggccggcctgcatgtgtggctgccgctgccgccgcggctcgaccagtaccggttgatccaggccgcacaggagcaggggctgggcattgccagctccgatgccttcagcgtggaagaaccgccaccgggcaatgcgatccgcctgtcgttgggcggcgcggtcgaccagggcgcgctggccggggcgctggccaagctgaacgagatcctgtccgaggcccccgaggcacgccacaacgccatcgtctga

SEQ ID NO: 518030 - DNA, 906 bp, Stenotrophomonas maltophilia
atgaatatctgctggaaccgcatccgcctggcgctggtcgccctggcctgcgtcggcctgtcgggctgtgactgggtgctgctggattcgaagggcatggtcgggctcgcccagcgcgacctgatcctgatctgcatcggcctgatgctgatcgtggtgataccggccatcgtgctgaccttcgtattcgcctggcgctaccgcgctggtaacaccaaagcgaaatacatgcctgactggtcgcactccaccaaggtggagatcgtggtctggggcgtgccgctgatcatcatcgcggtgctggcggtgatcgtgtggaagtcgacccacgagctggacccgtacaagccgctggacgtggccggtgagccgctgcacgtggacgtgatcgccaccgactggaaatgggtgttcgtgtatccggacctgggcatcgccacggtcaaccagctcaacttcccggtcgaccgcccgctggcgttcaacatcacctccaactcgacgatgaacaccttcttcatcccgcagctgggtgggcagatctacgcgatggccggcatgcgcacgcagctgcacctgatcgccaacgagcccggccagttccgtggcatgtccggcaactacagcgggcatggcttctcgaacatgaagttcatcgccaccgccagcagcaacgaagagttcgagcgctgggtggccgaggtgcgcagcgcgccggacgccctcagcttcacgcagttcaaggcgctggccgcgccgtcgaagaacgcaccggtgcagcacttctccagtgttgaaccactgctgttcaagaaggtaatcgaccagttcatcggcgttggtgagaacaccgctgctgctaccccggcgggcgctgccggtggtgcccaggtttcccaggagtaa

SEQ ID NO: 518031 - DNA, 1977 bp, Stenotrophomonas maltophilia
atgttgggtaaattgacgtgggaggccgtgccgctgcacgagccgatcgtcgtggtcacattggcggccatggtgctgggtggcctcgcgctgcttggcgcggtgacgtacttcaagctgtggggcccgctgtggcgtgactggttcaccaccgtggaccacaagaagatcggcatcatgtacgtggtggtagcgctggtcatgctggtgcgtggctttgccgatgcgctgatgatgcgcgcccagctggccgcggctggtccgggcagtgacggcttcctgccacctgagcactacgaccagatcttcaccgcgcacggcgtgatcatgatcttcttcgtggccacaccgttcgtggtcggcctgatgaacatcatcgtgccgctgcagatcggcgcgcgcgacatggcgttcccgttcctcaacgccttcagcttctggatcttcgtggtcggcgccgcgctgatgatgatctcgctgggcgttggcgaattcgccatgaccggctgggtcgcctatccgccgctgtcgggcatcgagttcagtccaggcgtgggcgtggactactacatctgggcgttgcaggcctcgggcatcggcacattgctgaccggcgtcaacctgttcatcactatcctgcgcatgcgtgcgccgggcatgaccctgatgaagatgccggtgttcacctggaccgtgctggtcaccagcgtgatcatcatcgccgccttcccgatcctgaccgtggcgctgggtgcgctcaccctggaccgctacctggacttcaacttctacaccaacacgttgggtggcaacccgatgatgtacgtgaacctggtgtgggcctggggccacccggaggtgtacatcctggtgctgccggcgttcggcatcttctctgaagtgaccgccacgttcgcgcgcaagaagctgttcggctacaagtcaatggtgggcgccaccctggcgatcggcatcctgtcgttcatcgtctggctgcaccacttcttcaccatgggctccggtgccagcgtcaatgccttcttcggcatcatgacgatgatcatcgccattcccaccggcgtgaagatcttcacctggctgttcaccatgtatggcggccgcgtcgagttcagcgtgccgatgctgtggaccatcgccttcctggtcaccttcaccatcggcggcatgaccggtgtgctgctggccatcccgggtgcggacttcctgctgcacaacagcctgttcctggtcgcgcacttccacaacaccatcatcggcggcgcgctgttcggctacctggccggcttcgcctactggttcccgaaggtgttcggcttcaccctcaacgagcgcctgggcaagtggtcgttcgcctgctgggtgatcggcttctacctggccttcatgccgctgtacatgctgggcttcatgggcatgacccgccgcatgaaccagtacgacaacccggcgtggacgccgtacctgatcgccgccttcatcggtgcgctgttcgtgttcgccggcatcatcctgatgctggtgcagatctacgtgagcgtgcgcgatcgcaagcgcaacctggacctgaccggcgacccgtggaatgcacgcacgctggaatgggccacgccgtcgccgccgccgttctacaacttcgccgtcgtgcccaaggccgatgagctggatgccttccacgaagcgaagaagcgtggtctgccgccgccgccgaagaagtacgcaccgatccacatgccgaagaacaccggcgtgccgctgatcctcaacatctggatcctggtgctgtgcttcgctctggtctggcacatctggtggatggccgcggccagcttcatcgcgatgatcgtcaccctgatcgtgcggtcctacgacgaggacgtggactactacgtcagttccgaagaggtggcgcgcaccgaagcggccaaccttgccaagctgaaggaggtacgcgcatga

SEQ ID NO: 518032 - DNA, 636 bp, Stenotrophomonas maltophilia
atgaacctgttgacccgccccgagctggccagcgacacgcaggcgcacgaggaccaccacgagcacgaccatggccacgaacagggcggcatgaaggtgttcggcatgtgggtctacctcatgtccgacctggtgctgttcggttcactgttcgcctcgtacgcggtgctcagcaccgcctacgccggcggccccaccggcaaggacctgttctcgctgccgttcgtgatggccgagaccttcctgctgctggtttccagcatcacctacggccaggccgtgctggcgatgcatcgtcacgacacctcggcagtgctgcgctggctgggcgtgaccttcgtgctcggtgcctcgttcatcggcatggagatctacgagttctcgcacctgatccacgaaggcgcgggccccagcaccagtgcctacctgtcggcgttcttcgccctggtcgccacccacggcctgcacgtggccagcggcctgatctggatggcggtggtcatgcaccaggtctacagccgcggcctgaccccgaccaacatcacccgcgtgtcgtgcctgagcctgttctggcacttcctggacctggtgtggatctgcgtcttcaccttcgtctacctgatcggagccttctga

SEQ ID NO: 518033 - DNA, 333 bp, Stenotrophomonas maltophilia
atggcccacgtcgaaacctcgcgcgccggcaatgcgcacggctccaccaagtcctacctgatcggcttcgtgctgtgcgcgctgctgaccgtggtgccgttcgcgctggtgatgaacccggtgctgtcgcggccgctcacgctgttcctgctggtcggcttcgcggtggcgcagatcctggtgcagctggtctatttcctgcacatggaccgcaagtccgaaggtggctggaacctggccagcttcgtgttcaccctggtgatcctgttcatcgtcgtcgcactgtcagtctggatcatctggagcatgcactaccacatgatgatcaactga

SEQ ID NO: 518034 - DNA, 702 bp, Stenotrophomonas maltophilia
gtgaagcgtcctgctgctgttgcccgttcgttgttctctccccgtttccgcctgccgctgctggcaggcctggccatcggcctgctggccggctgcagtgcgcagtcgcgcatggacttctattccaaggacatcgcctgcgaagaactcggccagcagtggtcgatgcccgacagccacggcaccgtgcgtgggccgaaggacctgcaggggcaggtgacctacctgttcttcggcttcaccagctgcccggacgtgtgcccgaccaccatggtcgagctcagccaggtcaagcacctgatgggcaaggatgccgaccagttgcaggtagtgttcgtcagtgtcgacccagcgcgtgatacgccggaggttgcgcgcacctacgtggaagccttcgaccccaaggcgatcgcactggtcggcaacgaagcgcaactggccgcgatggccagcgacttcaaggcgttctacgaaaaggaacccggcccggtgccggagacctacaccatgagccatatcgccggcggctacgtgtttgatcgccaaggccgtctgcgcctgttcgcgccctacggcatgccggtggacaagctgttctcggacgtgcagcgcctgctgctcgagcctggccatccggccgccggcaacggcccgctggccagctgccacctcaagcaaggcgacacgctcgctgcccggtag

SEQ ID NO: 518035 - DNA, 594 bp, Stenotrophomonas maltophilia
atgatgaagacgaccattctgttgagcaccctcgccctcgcggcgatgaccaccaccgcctgggcacagagctcgggccagacacctccggcgaagaccttgtcgaccgtagacacgcagcagttgaaggcggaggccactggccgttcgttcaatgtgggcggctcgcgcttccagctggcaccgtcggcaaccgtgcagcaggccagcggcggccagttccggatcaccaccggggctgatgccagcgcggcggccgtcggcacccgcagcaagcggtccacggatgcgtctaccggtgtggccgcacgtgcggatgccggtgccagcaagtttgcggccgctgtctccaacgatggcgcgccggtcgtggcgacctcgcgggtcaaggtgttcttcaccgatgcggcttcggcgcagcgtgcggccaccgccaccggcggcaccgtggtgaaggtatccaaggcctcgggccgcgcgattgtggagtatccgtcggtgaacgcggcactggatgcgaccaccaagctgctgtcgaccgccggcatcaaggcagccgagccggacgtggtgcagtgggaagaaaccaagtaa

SEQ ID NO: 518036 - DNA, 1767 bp, Stenotrophomonas maltophilia
atgaagcgacacacgcaacgctccgcgccaccgcgctccgcgcgcctggcccttgccactgccctggtgctgggcagcctggccgccaccgcccaggcccaacaggccgatccgctggccgggcgtcagtggcatctgctcaacaccggacaggccgttctgggcgataccctgccggtggctggcaacgatctgaacgtggatggcctgttccgcaatggcatccgtggccagggcgtcaccatcgccatcgtcgatgacggcctgcagatcgcacacccggacctggccgccaacgttgcggcggtcgccggcaagaacttcgccaaccagagcaacaacccttcaccgtccaatccggaccgcgacaatcacggcaccatggtcggcggcatcgccggtgcagtaggtgccaacaacctgggcgtgcgcggcgtcgcctcggcggccaccctgaagggcttcaatttcctggcctccaatgcccagggcaattcgaactccaacatcgagtactcgtggtgggatggcgccgaagtggccgacgtgggggtcttcaacaacagctggggctccagcccgggcaaccccaacctgccgctcgcctatagccagaacgacatcgccgcctatgagcaggccatgtccggcacccgtggcgggcgcggtggcatctacgtgaaggccgccggcaacaatcacaacaacggtgcacgctcggatggcaccgacatctgctcggcagacaccaagaaccgcaacacgggttgcatcccggccggtcgcgacccgcgtaacaacctgttcaacgtgatcaccgttgccgccgtgcgcgccgatggcgtgcgctcttcctactcgtccaccggctcggcgctgtgggtgtccggcttcggcggtgagaatggttggcagcggcaggtcgtgccggggcagctggcgatccgctacgatccggccatcctcaccaccgatgtcaccggctgcgcgcagggcagcaacaagaacacgagcctgcgcaacaccttggacggcgaccagtctgccatcgacagcacctgcaactacaccggcaagatgaacggcacctcggcggccacgccgatggtgtcgggcgtggcggcactgctgctggagaccaacccgaacctgtcctaccgcgatgtgaagtacatcctggccaccaccgccacccgcaccgatccgaaccgggcagcggtgacccactccgacggccgcgtgctggtgccgggctggacggtgaatgccgccggccgtgcctacagcaactggtacggtttcggtgtggtcaatgcggcacgcgcggtacaggtcgcagaggacttccagccgctgggtgcactggtggatagtggctggcgcaacacgacgcgtaccgtggccatcggcaatacctcggcggccgcggcgcgcctgaccttccagctcgccaacggtgcgcgcaacatcgagagcgtgcagctcggcttccgcgtcaaccacagcaacacccgccagctgcagttcgtgctgatctcgcccagtggcacccgcagcgtggtgcaaccggcattcaccgcgatcggctctggcctcaatggcgtccagcgcaacttcaccaactgggacctgctgtccagcaatgccttcctggatgagaacgccacgggcacctggacactggaagtcaccgacctggggcaggccgcgaacgcagcatcgcgtggcaacctcgaattcttcaagatccgcgttctggggcactga

SEQ ID NO: 518037 - DNA, 441 bp, Stenotrophomonas maltophilia
atggtcaaccctctggcccaggcccatcgcggcctcggcaccacgctgttcagcctgttgaacccgatacccttcggtttcttcgtcggcgcgctgatcttcgacgcgatctacctcaacagcgccgaggtgatgtggggcaagtccgccgcctggctgatcaccttcggcttgttgatcgccatcattccgcgcctgatcaacctgttcgcggtctggcgccgcaacggtaccggcacccgcatcgaccgcatcgacttcttcctcaacctggtcgcggtcgtgctggccatctggaacgccttcgtgcacagccgcgatgcctatgccgttgccgtgccgggcacgatcctgtcggcgctgaccgtggccctgatcgccctgggcctgatcctgctgtcactgcagccgccggtgctgcagggaggtcgtcatggctaa

SEQ ID NO: 518038 - DNA, 1311 bp, Stenotrophomonas maltophilia
atggctaagcacatcctgcctaccgtgggcgccctggcgctggccgtgatgctgtcggcctgtgccggcaaggccgaataccaccccaccgaccagtcgggtgcgaagccgcctctgccggcaccgaagaacttcctgatgccgccgatgcaggtgccgcgcggcgtgggttgggccgagggccagtcacccacggtggccgaaggcctgaagatcgaacgcatcgccgccaacctgctgcatccgcggcgtctgctgaccctgcccaatggcgatgtgctggtggtggaaggcaacggccccggtgaagaaccggtcaccacgcccaagcagtggatcgccggcaaagtgaaggcgcgctcgggcaaggccggcaaaggcggcaaccgggtcaccctgctgcgccgcacgccgggcacgaacaactggacccagcatgtctacatcgaaggcctgcattcgccgttcggcatccagctgatcggcgacacgctgtacgtggccaacaccggcaacatcatgcagtatcactacgtgcctggtgaaacccgcatgtccgacaagggccgcgagttcaccgacctgcccagcaccatcaaccaccactggaccaaggaactgctggccagccgtgatggcagcaagctgtatgtgggcgtgggttccaacagcaacatcaccgagaacggcctggccgtcgagtaccgccgtgcggtggtgctggaagtggacgtggccacccgtggcagccgcatctttgcgtcgggcatccgcaacccgaccgggctggactgggagccgagcaccggcacgctgtgggccgtggcgaacgaacgcgatgaaatcggtgcggatctggtgcccgattacctcacctcggtgaaggaagatggcttctacggctggccctacagctactacggccagcacgtggacgagcgcgtgcagccgcagcggccggacctggtggcgaaagccatcacgccggactacgccatcggctcgcacgtggcgccgctgggcctgctgttctacaccggccaggcactgccggcgcagtaccacggcggcgccttcatcggcgagcacggcagctgggatcgctcaccattgagcggctacgaagtggtctacgtaccgttcaaggacggtaagccgaccgggcggccacagaccgtggtcagcggcttcgcctcgaaggacgagaagacgctgatgggtgcgccggtggggatggccatggatgcagagggcgcgctgctggtcgccgacgacgtgggcgacgtggtgtggcgggtgtcggccaagtag

SEQ ID NO: 518039 - DNA, 663 bp, Stenotrophomonas maltophilia
atgacctaccgtgcccccgaaaccaacgacagcgcgcccctggcccagcagatcgagcagatgatcgacgagctgcccggcgaccaggtgcgcgtcggtaccctgctcagcgcgctgggcgatgagggcctgctgctgatcgtgatcctgctctcggccatcttcatcattccggtgtcgattcccgggctgagtacggtgtttggtgcctcgatcctgctgatcggcctgagccgcgtacgcaaccgcccgctgtgggtgccgcagaaactggcgcgccgcgagatcgccaccgacaaactgaaggccaacctgggccgtgcgctgaaatgggtgcaccgcatggagcgcctgtcgcggccgatgcggctggcggtgatggtgcgctcgaagaagatgatgcgcctgaacaacctgatgctggtgttcgcgaccctgctgctgatggcgcccgccggaccgattcctttcagcaacacgctgccggcgctggcgctgatgtcctttgcaatcggcttcatccagcgcgatggcgcggcggtggcggccggttacggcttcgtggtggccacggtggtgtatttcggcgtgctgctgggcggcgtcgggtttgctgccgagtcggtgttcagcgggttccgcagcagtactgcggaactgtag

SEQ ID NO: 518040 - DNA, 834 bp, Stenotrophomonas maltophilia
atggacatgggccgcaggcaatcgaccattgaactggtcgccatcgacatggatggcaccctgctggatcccacccacacgctcaccgcgcgggccaagcaggcgatcgcgcaggcgcgcgcgctgggcgtgcacatcgtgctgaccagtggccgcccggttcccggcctggcaccgttcctgcacgagctgggcatcaccggcgacgacgactactgcatcgcctgcaatggcggcctggtgcaacgcatcggcacgcgcgaaaccgtggccgagtatccgctcagcttcgacgacttcctgttctgcgagcaggtggcccgcgatctgggtgtgcacttccaggcgctggacagccggcgcatgtatacgcccaaccaggacatcagctactacaccgtggctgactcgcatctttcgcggatgccactgtcctaccgccgcgtggaagacatggacccgtccatgtcgttcatcaagctgatgatgatcgacgcgcccgacgtgctggatgccgccatcgcgcgcctgcccagcgaactgaccgagcgcttcgcggtgctgaagagcgcaccgttcttcctggaagtgttcgaccaccgcgctggcaagggcccgagcctgcagaagctggccgagcacttgggcatcgaccgcgccaacgtgatggccatcggcgaccaggagaacgacctgaccatgctgcagtacgccggtaccagcgtggcgatgggaaatgccatcgacgcggtgaaggcggtggcgcggttcgagaccaccagcaatgcagacgaaggcgtggcgcgcgccattgagcgtttcgtcctgcagtaa

SEQ ID NO: 518041 - DNA, 2319 bp, Stenotrophomonas maltophilia
atgaacaccccatccacgacgcgcctcgctctggccatcatcacggccatcaccgcacctgcgtacgccgcagaaacgcacgatgccacacatgacacccccaccaccttgaacgcgctgcaggtcatcgccacgccgcgcggcgcggccgttgcacccacccaggtggtcggccccaaccgctacatcatcaaggctgaagacctcgacgcgatggtcaccggcaacaatggtctggccatgctgaagcaggtaccgggcgccagctacaccgccaccgacgggcttggcctggatatctcggccaccagcctgttcgtgcgcggcttccgcatgaacgaaatgggcatcaccttcgaaggcgtgccactgaacgacaacggcttcctctcgctcaccggcaccagcgtggtgaacgtgggcgtgcccgatggcatcggcgcgatcacggtcagccccggtggcgcaccggtcagcgtgttctccagcagcgtcaacggcggcagcctggaataccgcctgcgcgagctgcaggacacgcccagcctgcgcgtgaagcagggcgtgggcagcaacaacacgctggtcaccaccgtatccgggcagagcggccagctcggcgagcatagcccgaaagtattggtcgacctgcagcgcgtatcggccgacaagtaccagggcgagggcacccagaacttcctgcgcggcgacctgaagctgcagcaggacgtcgcctggggcgacttcaccatgttcctgtccgacagcaaggccaaggtctggggctacaacaacatctccttcgacatgatccgcaagctgggctggaaggccgatatcttctatccggactacgcgtgggcctggtacgtagcctcgccggagaatgcggacaagtcctgcggcgcctacacctgcggtgagctgtccgaactgatcccgtacgacaccggccagatcacccgcgatcgcgtgtcctcgatcaaccatcgcttccagattaccccggccctgagtggcaacgtgcagctgtacaacgccaacagccacacccaggccacgctgaccgacccgaccgtgccgtcgccaaacggcgcaccgttctccgaacaggtgcagacgccgcgtgtgaatcggctgggtggcatggtcaacctgcagttcgagaccggcgcgcacaccttcactgctggcgtctggcaggagaagagcaaggccgcggccaagaccgagtggtaccagcagccgctgctgggcgagggcccgccgctgaaggctaccggtccgttcgatgtgtatggccccgcgttcaagaccgacaacgcctcgagctgggtgacccgctcgcgccagttctacctgcaggacgacatcgtgctgaacgacacgctgaagctgggtgtcggcttcaaggccgtggacttccgcaccagcggcggcggcctcggtgacgccaaggaccggccggtgaacggcacgctgcgcgcgaagagcaacttcctgccgcatgtctcgctgttctggagcccgaccgaatccaccgatgccttcatcgacctggccaacaccatgaacggctaccgcgtcgcccagcgcggcaacatcggctacaccgcctcggcgtggacgatcaccgaccaggaagagttcgatcgcgtggcgggcacgctgcgcccggagaagaactggaacctcaccgtgggcgcgtcgcatcgcttcgatcggctgacgatcaccggcgatgtgttctacaacgacatccgcaaccgtctgctgtcggcggccatcggcacccagttcgcgcagatcaacaccgtgcggttgatgccgaagatgcacgtgatcgccgccgacctcggcatcaccgccgacctgaccgaccacctgcagttctaccagggcgtggccgtggcccgttcgtactacgacagcgatttcgtggtgggcgacacggtgtacccgatcaagggcaacgcccagccgggctatccgcagatctcgctggtcagcgacctgtcggcgcatttcggtgactggcgcttcggtgccaccagcacctcctacctgcgccagcccttcacctacgagaacgacatccgcgtgccgaccttctggcaggtcaacacctatgccgcctaccgctttggcgtggacagcgccgtaccgggcctggagctgcggctggacgtgagcaacctgttcaaccgccacaacatcggcaccgccaccatcgccggctcgtcgttctcgggggattaccagaccctgcagcgcagcgccccccggcagctgatgttcagtacctcgatggcgttctaa

SEQ ID NO: 518042 - DNA, 387 bp, Stenotrophomonas maltophilia
atgttgctgggtcatcctgtctacatggctcagtacaacccgcgatcacagttgttcggcatccggggcccaggacggccccggcaggcgctgtccgtggcgcctgcaatcgacctgcgggccgagtaccagttctggcacgtctacgagcgtgtggtccgcccgttgcccggtggggggctgcggctggcctggctggtgtgccagaaggtgtatcgggaccggtggcagcacccggacgacagcgacgaggcggcgttgtcgcgggtgttgttcggcgggaacatgacggctgaccgggcgtcggagctggcggagctgcacgcgctggtcagccgtcgggtggcgttgctggcgaagcgtgggcgggtggattccgctgcgtga

SEQ ID NO: 518043 - DNA, 624 bp, Stenotrophomonas maltophilia
atgccaatggagagcttccaacgcaaaattccagagtggaaccgcagcgcgctggaaaccctgcgcgagccactggagtccggacacatccgcatcgcccgtgcggcgcgcagcatgcagtatcccgcgcggttccaactggtggcagcgatgaacccttgcccgtgtggctgggccggtgaccgcagcaaccgctgcctgtgcagtgacgagcgcatcaaccgctatcgcgcgcgggtatccggcccgttgctggaccgtatcgacctgcatatcagcgtggcgcgcatggacgcggtggagctgcgggagagtacgccgctgggtgagcccagtgcatcggtgcgtgagcgggtggaagccacccatgcccggcagcaggcacgtggcgcgctcaatgcacatctaccgccggctgcgctgcgtgcctgtacgaaactgagcgagggcgatcaggatcttttggagcaggcgattgagcgcctgcagctttctgcgcgggcgatgcaccggattctgcgggtggcgcgcacgattgcggatctggcgggttgcgaggtgatccagacggcgcatctggctgaagcgattggctatcggcagttggatcggggaaagccttag

SEQ ID NO: 518044 - DNA, 405 bp, Stenotrophomonas maltophilia; identical to SEQ ID NO: 517988

SEQ ID NO: 518045 - DNA, 414 bp, Stenotrophomonas maltophilia
atgaaaatcagtgaggctgccgacgccagcgggtgccacctggagacgatccgctactacgagcggatcggcctgctcccacgaccaagtcgatcagggaacggctaccgggtctatgggtctgcggacgtcgagcgcctgcgctttattgcccgcggtcgggatttgggtttcagtctagaagaggtccgcagcttgctacagctggccgacgacgaggacctatcgtgcgcggatgtggatcggctggcccgcagtcacttggccgacgtgcgcgcccgggtagcggacttgcagcgtatggccagcgagctggagcgcgtgatcgccagttgccacggcggacagcgagccgagtgcaccatcctgtcgacgctgcgtcaaccggcctcccaagatgccgcacgcaggtag

SEQ ID NO: 518046 - DNA, 618 bp, Stenotrophomonas maltophilia
atgagtgattgcggctgccaccatgaggccaagaatgcgcaggagcggcgcgtgctttggatcgctctggccctgaacgcggccatggccgtgattggtggcattgcgggctggattgcccattccaccggcctgctggccgacgcactggacatgctttccgacgccacggcctatgccatcggtttggtcgccatcggtcggaccgcgcgcttcaaggccaatgccgcctgggtcagcggcagcgtgctgctggtgctgggcgttggtgtgttggttgaagtcggccgccgggtgctgcacggcgctgagccggtcagcggatggatgattggtacggcgctgctgtcgctggtggtcaatattgcggtcctacgcatgctggcaccgctgaagtccggcgaagtacatcttcgggcgacgtggctgttcacccgggccgacgtggtggcaaacgtaggcgttatcctggcgggcctgctggtgtggtggctggccagcccgtatccagatttcgtgataggcgccctgatcggcctgtacgtgatcaaggaagccttcgagatcttgggtgacgcacgtcgggcgcgtgccgacgcgcgcaaaacccttgcatga

SEQ ID NO: 518047 - DNA, 231 bp, Stenotrophomonas maltophilia; identical to SEQ ID NO: 517987

SEQ ID NO: 518048 - DNA, 1275 bp, Stenotrophomonas maltophilia
atgtctgtgcgattggcggctttggccgcatggctgttgctgggcgcagcggtgcctgcgccagcggccgatttgatgaccttgggcgacgcgttcgcgcgcgtggcacaaacccaccccgagttgcgtctggttgacgcgcgcgcaaacgtgctcgccgccgagcgggaccaagctgttcaacgtccaccgtggacgctgggcgccgaagtggagaatgcgctgggcaccggcgcggcgcgtggcttggagggtgcggagctgaccctgagcttgggctcggttctagagcgcggtggcaagctcgacgcccgccgcaccttggcgcagagccggatcgatgcgttggctgtgcagcgagagaccggccgactggacctgctcgccgaaacggcgcgacgctacctggcggtcatcggtgctgatcggcagcgccaattggcggaactggatgtcgcccaacgccaacggactgtggccgctgcccggcagcgcctgcaggccggtgcttcgcctgaatccgttgtgctgaccgcgcaagcggcgctggcacgggcagaattggcccgcgaccgcgctggacagcagcgtatagccgcccgccagcatctggccgcactgtggggcgaacgcgcacctgactttgaggtggcgccggccgatccgaaggcactgccgacgatcgcgtcaatgcaggcgttggctgaggagctggagcgcacccccgagctggcgcaatttgctgatgcccggcggatcgcgcaggcacgcctacagctggcgcgatcggcagcctctcccgatgtggcttggcagttcggcgtgcgtcgcctgcaggagactgacgacaccgcgctggtcgccagcgtgtccatgccgctgggcagccgcagccgggcacagccagagattcgcgcgggtgaagccgagctggaggtcctggccatcgagcgcgaggccaagggcctgtcgctgtattccacgttagtcgaagcccatggccgctacacagtggcgcaggccgaggtggcgcggctgcaaggggacgtgttgcccaagctggctcgggctgagcaggccgccgagcgtgcctatcgcgccggtgccatcagctacttggaatgggcccagttgcagtctgaacgtgtcgccatggcccagcagcagctggacgtggcgctagatgcgcagagcgccctgatcgaaattcaacgactgaccggccaagcgctagtcgcgccgccggcggccgcttccactggagagaccccatga

SEQ ID NO: 518049 - DNA, 951 bp, Stenotrophomonas maltophilia
atgaatcgcttttcctggaccgcgctgggcatggccctgatgctggcggcctgcaatgcgtctgcccccgccgaagatgccgacggcggccacgccacagagggggaagagcacggcgagcacgaagaagcaccgctggaaaccaagatcgccgccaaggctgcgcaggcagcaggcatccaagttgcgccggtaggccccggcgagattgccgatgagcatgaggtacaaggcctgttgacccctattgatgggcgcattgcccaggtcaccgcccgcttccccgggccagtccggtctgttcgagtcggggtgggcgaccaggtacgcaccgggcaggcgctggcgaccgttgagagcaacttgagcctgaccacctacaccgtcacggcgccgattagtggcgtggtcatggcccgcacggccgcagtggggatggcggcggctgagggtgcgccgctgtttgaagtggccgatctttcctcgctttgggtggatctgcacatctttggcgccgatgcccagcacatcagtgccggcattccagtgacagtcacccgcctgagcgatggtgtcgcggcacaaacgacgctagagcgcatcctgccgggcaccgccacggccagccagagcaccatcgctcgcgccaccttggccaataccgatggcctgtggcggccaggttcggccgtgaaggctcgtgtcactgtcgatcgcaaagcggcagcgctggtagtcccggtcaccgcgctacagaccgcagaagaccaggatgtggtgtacgtgcagcagggtgagacctaccacacccggcccgtcaagctcgggcgtcgcgacgccgaacgcgcggaggtgctggaggggctgaaagccggtgaacaggtcgtggtggtccagagcttcctgatcaaggccgacatcgaaaagtccaccgttgaagaagagcactga

SEQ ID NO: 518050 - DNA, 3198 bp, Stenotrophomonas maltophilia
atgctcgaacgcctcattcggctgtccatccgccaccgctggctgacgctggtgctcaccgcagcgctgatcgcgctcggcgtctggagctatcgtcacctgtccatcgacgctacaccggacatcaccaacgtccaggtccagatcaatacccaggcacctgggtactcccccctggaggctgagcagcgggtaacgttccccatcgagacggccatggccgggctacccaagctggactacagccgctcgctctcccgctacgggctctcgcaggtcaccgtcgtcttcaaggacggtaccgacctgtattttgcacgccaacaggtggccgagcgcctgcaacagatcgcctcccagctgcccgaagggctggatccggagatgggccccatctccaccggcttgggcgagattttcatgtacaccgttgaggccgagcctaacgcgcgcaagcctgacggcacgccctacacggccacggacttgcgcactttgcaggactgggtaatccggccacagctgcgaaccaccccgggtgtcaccgaggtcaacaccatcggcggctttgagcggcagatccatatcacccccgacccggcccagctggtggcgttgggcttcacgctcaatgacgtggtcgcagcggtgaagcgcaacaaccagaacattggtgctggctacattgagcgcaacgggcagcagttcctagtccgagtgcccggccaactggccaatgtcgaggcgatcggcaatatcgtgctggaccggcgcgatggcgtaccgatccgggtacgggacgttgccagtgtgggcgaaggcaaggagctgcgtaccggcgcggcgacccagaatggccatgaggtcgtggtcgggaccgccttcatgctgttcggtgccaatagccgggaagtgtcccaagcggctgctgccaagctggaggctgccaacgccagtttgcccgctggtgtccacgccaaggccgtgtatgaccgcactgcgctggttgatcgcaccattggcaccgtgtccaaaaacctcgtcgagggcgcattgctggtggtggtggtgctgttcctgctactgggcaatgtgcgcgctgcgttgatcaccgcggcggtgattccgctggcgatgctgttcaccatcatcggcatggtacgaggtggcgtttcgggcaacttgatgagcttgggggccctggacttcggcctgatcgtggatggggcagtgatcatcatcgagaactgtctgcgccggttcggtgaggcccagcacgcgctgggccgccaactcgacgacgatgagcgctttgacctgaccgcctcggccacggccgaggtgatccgtcccagcctgttcggcttgggcatcatcgccgcagtttacctgccgatctttgcgctctccggggtggaaggaaagatgttccatcccatggccatcaccgtggtgctggccctcaccggagccatggtgttgtcgctgacgtttgtgccggcggccattgcgacgttcctacgcggccgcgtggccgagcatgacaaccgcctgatgcgctggtcgcgtgcccgatacacgccgctcctggattgggcgctgcgccggcgggtcgtggtggtggctggcgcggccgtgctcgtggtggggtgcggggtgctgaccacccgtctgggatcggagttcgtgccgagccttgatgagggcgacatcaccctgcagcccatgcgtattcccggcaccagcctggagcagtcggtggccatgcaggagacgctggagaagcgcttggcccagttccctgaggtggccaacatcttctcgaagattggcactgccgaggtggccaccgacccgatgcccccctcgatggccgacacgttcttgatgctcaagccccgcgagcaatggccggatccgcgcaagtccaaggctgagctggtcgaagagctagaggcggcggccaaggaaatcccgggcagcaattacgagttcacccagcccatccagatgcgtaccaacgagctgatttctggcgtccgctcggatgttgcggtgaaggtctacggcgacaacctcgaccagctgacccgtctggccagccgcgtcgagcgggtgatgcgtcaggtcccgggcgcggaagacgtcaaggccgagcaggtcaccggcctgccgctgctcaccatcacaccggatccggccgcgttggcgcggtacggtctgaacccgggcgatgttcaggagacggtggccacggccattggtggcagtgttgctggccaactgatcgaaggcgaccggcgctttgacctggtagtgcgcctgcctgaatccttgcggcaggaccctgctgtgctggcagatctccccataccgttgcccgaacgcaccagcgccgacgagtccagtcggagtgcgggcggcacgaatggcgggccgcgcaccgtgccgctgcgggaggtggcccagatccaggtcgagcgcgggcccaaccagatcaaccgcgagaatggcaaacgtcgggtggtgatcacggctaacgtacgcgagcgtgacctgggcggattcgtgggcgaactgcgcagtcgcatcggccaggacgtggagctgccggcgggctactggatcgactacggcggtacctttgagcagctgatctcagccagccagcgcctgggcgttgttgtaccggtgacgctggcgctgatctttgccctgctgttcatggccttcggctcggccaaggatgcggccatcgtgttcagcggcgtcccgctggcgttgactgggggcgtaatcgcactagccctgcgcggaatcccgctgtcgatctccgctggcgtaggtttcatcgcgctctccggcgtggccgtgctcaatggcttggtcatgatcgccttcatccggcggctgcgcgagcaaggtgatccactggacgatgcggtccgcgatggcgcgctcggccgactgcgaccggtgctgatgaccgccctggtagcctcccttggattcctgccaatggccttgaacgtaggcgccggctctgaggtgcagcggccgctggccacagtcgtcatcggcggtatcgtgtcctcgaccgcgctaacgctgctggtgctgccggtgctgtatcgctggctgcatcgcgaccgggccagccgcggcgatcgcatcatccaggagtccccaagctcatga

SEQ ID NO: 518051 - DNA, 279 bp, Stenotrophomonas maltophilia; identical to SEQ ID NO: 517986

SEQ ID NO: 518052 - DNA, 417 bp, Stenotrophomonas maltophilia
gtggtctatggactgggcaatgcctggttgaccgacgtggcaagcgcggtcttggagtggctggcaacgcagggcagcttcgtggcgaccgttggcaccggcttcgcggtagctgcgcttgcctccatcatgaacaacatgccggcaacgctggtcggtgcgcttgccatcgacggggcaaacgtccccgcagccacccgcgaactgatgatctatgccaacgttgtgggcaatgacctcggccccaagctaacttcgatcgggtcgctggcgacccttctgtggttgcacgtccttggcgggaaaggccaacggattacgtgggggcagtacatgaaggtggggctcatcctgacgccccccgtcctgttggccacgctcatcgcgctctggatctggctgccgtttgcccgataa

SEQ ID NO: 518053 - DNA, 1707 bp, Stenotrophomonas maltophilia; identical to SEQ ID NO: 517985

SEQ ID NO: 518054 - DNA, 1098 bp, Stenotrophomonas maltophilia; identical to SEQ ID NO: 517984

SEQ ID NO: 518055 - DNA, 750 bp, Stenotrophomonas maltophilia; identical to SEQ ID NO: 517983

SEQ ID NO: 518056 - DNA, 495 bp, Stenotrophomonas maltophilia; identical to SEQ ID NO: 517982

SEQ ID NO: 518057 - DNA, 399 bp, Stenotrophomonas maltophilia; identical to SEQ ID NO: 517981

SEQ ID NO: 518058 - DNA, 2064 bp, Stenotrophomonas maltophilia; identical to SEQ ID NO: 517980

SEQ ID NO: 518059 - DNA, 477 bp, Stenotrophomonas maltophilia; identical to SEQ ID NO: 517979

SEQ ID NO: 518060 - DNA, 387 bp, Stenotrophomonas maltophilia; identical to SEQ ID NO: 517978

SEQ ID NO: 518061 - DNA, 921 bp, Stenotrophomonas maltophilia; identical to SEQ ID NO: 517977

SEQ ID NO: 518062 - DNA, 348 bp, Stenotrophomonas maltophilia; identical to SEQ ID NO: 517976

SEQ ID NO: 518063 - DNA, 3162 bp, Stenotrophomonas maltophilia; identical to SEQ ID NO: 517975

SEQ ID NO: 518064 - DNA, 1473 bp, Stenotrophomonas maltophilia; identical to SEQ ID NO: 517974

SEQ ID NO: 518065 - DNA, 1320 bp, Stenotrophomonas maltophilia; identical to SEQ ID NO: 517973

SEQ ID NO: 518066 - DNA, 393 bp, Stenotrophomonas maltophilia; identical to SEQ ID NO: 517972

SEQ ID NO: 518067 - DNA, 1089 bp, Stenotrophomonas maltophilia
atgtccagcgtgctatcgcctaaccgggtgctgctttcggccgccggctccggcaagaccaccttgctggtccgcaaggccttggagcggccgctgcgccgcatcggcatcgtcacctacacgctggagaacctcgaagagatccggcgttcgttcgagttccacgccggcgctgtgcccgcgcacgtcacattgcacagttggtacggctttctgctacgcgagtgcattcggccctatcaggccgccctttgccgcgagccacggatcgaatcgatcctgttcgtcgaaggacggaccaacaaccgggcgccgcgctcgcaggtcgcccggcactatttcgccggcaatcgggtgtactcagatcgggcggccgattttgccgttcgctgcgacgagttgactcagggccaggtcatcgcacgcctggcggacatgtacgacgaagtgtacgttgatgaagtgcaggacctggctggctacgacctggacctgatcgagcggttgttgaaaagctccatcgccgtcacgttggtaggcgatacgcgccaggcgacatatgcgaccaactacgccccccgccacagccagtttcgcggaccgaacctcgcgactttgttccagctttgggaatctgacggcttgtgccagatcgatcaccgcctcacgagtttgcgctgtgtgcaggcgctttgtgatcttgccgacgcgctctacccacagatgcctcggacgcagtcaggcaatgatcaggctacgggccatgatggcatctacctcgtcgcaccggagcatgtgaccgcgtacatgcaggaatttgcccctaccgtacttcggcatgaccgacggcaagcgtgcgaaggtctgcttgcgatgaacttcggccagtccaaaggacgcacctatagtcgggtcctcatctttcctaatgcacctttgacgcagtacctgcgcaccggagatgccgcctgcatcactgcccccccaaagtactatgtggccttcacccgggcacggcaaagcgtggcgtttgtatatgccggcacctccgcgctgcgtggtcaccagcgctacacccctcaagtctag

SEQ ID NO: 518068 - DNA, 1581 bp, Stenotrophomonas maltophilia
atgccgatcgaacgcgtcgtcatcaacaacttcaagtcacttcgccacctagacttgaccttaaacgcacacatgaatttggtggtgggcgacaacgaggtaggcaaatccacactactggaagctatccacgcagtggtgacgggacagctgcatggccgaaacctgacctatgagctcacgccctatctgttccaccaacccacggtacgggaatatttcgctgcactcgacgctggcacgcacgggtctccgccgcggatttccatcgaagcttatttagggaacgatcccaggctggcctcgctacgcggcaccaacaattcgttgggcctagacagcgcgggcattcggctgctggtcgagctgaatgacgattatcgtgatgagttcaatgcctacctaaggcagcaccaaggagtggcgagcctgccggtcgagtactacacggtacgttggtattccttcgccaacaatggcgtcaccgcgcgtaccatcccgtttgattcgaccatcatcgacacccacggcatcaagacgctgtccggagccgatcgctacatcgctggcatcatcgaacaggcgctgacgccagcgcagcgcgtctcgctgtcgctgagcttccgtcgcatgcggcagagcttttccgaggaagccgatgtagccgctatcaatgcctacctcaccgagcacaccggggacatcagccaccgggcattgacggtgggcgtggacacatcgccccgctcgacatgggaaaccagcctggccccctacttggatgagcttcccttcacccaagccggaaagggtgagcaaagcgcggtgaagatgaagttggccatgcacgctgcaggcgcggcgcacgtgctactgatcgaggagccggagaaccacctttccttctccagtatgacccagctgatcgacaagattgcagcgctctcggcggcccagcaggtggtcatcgcgacccatagcagcttcgttctaaacaagcttggcgtggacaacgtgatcctgttcagcgcccaaggccagatgaaactggatcagctaccgcccgatacgcacgactatttcatgaagctgccgggccatgacacgctgcggctgatcctggccaagcaggcgatcctggtggaaggcccgtccgatgagctgatcgtgcagcgtgcctaccgcgaccaccacggcgtaccggcactggcccacggggtggacatcatttcggtcaagtcgctcgcgttcaagcgctttttgcagatcgccgagcgtctgcacattcagacaagagtgatcaccgataacgatggcgatatcgccgtggtgcaagagcgctatgccgactatcccaacgccatctactacgactcagacgaaagcgcgccatccctggaagagcagttgataaaggccaactcgctggctgtcctcaacaccgtgctgggcaagacatttgccgacgaggtggcgttgctcaagtacatgaagggtcacaaaaccgacacggccctggcggtttttaacagtcctcactcgatcaggttccctgactatgtccagcgtgctatcgcctaa

SEQ ID NO: 518069 - DNA, 1422 bp, Stenotrophomonas maltophilia; identical to SEQ ID NO: 517971

SEQ ID NO: 518070 - DNA, 2055 bp, Stenotrophomonas maltophilia; identical to SEQ ID NO: 517970

SEQ ID NO: 518071 - DNA, 2238 bp, Stenotrophomonas maltophilia; identical to SEQ ID NO: 517969

SEQ ID NO: 518072 - DNA, 915 bp, Stenotrophomonas maltophilia
atgagcctggcgctggtccacagccgtgcccgcgccggggtcgacgccccgctggtgcgggtggaagtgcacctctctggcggcctgcccgccacgcagattgtcggcctggccgagaccagcgtgcgtgaatcccgcgagcgcgtgcgtgccgccttgttgtgcgcgcgcttcgacttcccgcagcggcgcatcactttgaacctcgcgcctgccgacctgcccaaggaaggcggccgctacgacctggcgattgcgctgggcattctggcggccagcggccaggtcgatccgcagtcgctgctgcagtacgaattcctgggcgagcttggcctgaccggtgaactgcggccggtggccggcgcgctgccggcggcgattgcggcggccgaagccggacgcatcctggtggtgccgccgggcaatgccgcagaagctgctctggccgagcacgccgatgtgcgggtggcccgtaccctgctggagtgctgcgccggattgggcaatccgcgcctgctgccgcccgtggaacgcgtggacacgacgccattaccgctgccggatctggccgacgtgcgcgggcaggcgcatgcgcggcgtgcattggaggtcgccgctgcgggtgggcaccatctgttgctgatcggtagccctggctgcggcaagacgctgttggcttcgcgcctgcccagcctgctgccagacaccgaggaagccgaggcgctgcagctggcggcgattgcctcggtgagtggtgaggggctggatccgcggcgctggcggcaacggccctttcgggcaccacatcacagcgccagcgcggcggcgctggtgggtggcggcaatccgccctgccccggtgaaatctcgctggcccaccatggagtcctcttcctcgatgaacgcggtgtttag

SEQ ID NO: 518073 - DNA, 741 bp, Stenotrophomonas maltophilia; identical to SEQ ID NO: 517968

SEQ ID NO: 518074 - DNA, 480 bp, Stenotrophomonas maltophilia
atgaagatgcacggcttggccgctgcggtggtgtgcatcgcggtgatcggcgccttgtgggtggagtggcccgagcccgcgggcgatcaggtgtgggcctaccagaagctgcagccggccgattaccgcctgctgcacagtgatgcgcgcggcttcgtgaccgcgaaggcccaggagggctttgaactgcacgcgcgccatgctggggcaacgtccttcgaaatccgctgcaagggcgttctggtgctggacgtggagaacgcgccctcgcgcgtgctgatccgcatgcccgccgatgcacggtggcgggcgccggacatcgagcgtctgcgcaccagcttcgagcgctggctggatctgcatcaaagccaggggcggttgctggtggaaagcgcgggaccttcgtgggttgaggcgcggtttgggcgcttcaatgggttggtgcctgatgagcagcggtgtctgcttgggggcgagtaa

SEQ ID NO: 518075 - DNA, 363 bp, Stenotrophomonas maltophilia
atgaccacaccgcactccccgcccccgcgcccgatccaggaagcgccgtcacccgcgcccgcgcccgcgctggaccccaacagcctcatcgccatcctgcacgccatcggcgcgggcgccgcggccgacggccagccctggcccgagcggcaccatctacgcagccggcagatgcagttgtccgacgccgactgcgcgctcaccggccagcgcatcgtgcaggagatcctgctggcggccgagcgcacgcgccagaacggcgagcccgaacagtacgtgggcgaccgggtgatggaggggctggtgatggccgatctcgcgctgaccgccttcatccacgagcggatgcgacccaaggactga

SEQ ID NO: 518076 - DNA, 126 bp, Stenotrophomonas maltophilia; identical to SEQ ID NO: 510050

SEQ ID NO: 518077 - DNA, 603 bp, Stenotrophomonas maltophilia
gtgttacgccgcaatcgacttcttctgtctgcgggtctggtcccgcttccgtggttcctgttctggaccagcgttgccgccctgttcgcgccgggctacaacccgcttgcacagcacgccagcgaactgctgcaggcaccaacgcttgcaagcatctgcgccaggattgcccccatcggctgcggcgtgggcttcgtggcgtttgccatcggggtatggcgggagtccggccgccggattgccgtaggcgcgatctgttggatgatctttggcatctccatgctgaccaacggtctctggcccatgggccatccgatgcacggcttctataccatcggcatcgcaaacatcattgcaccggcgatgtcgcacatcgaactgagtgcttggtctgccaaccgaagggcgtacgccgtgaccgctgtggtgagcatcgggggcatcgtctatctctggttgaacgtggtgggagcggatccggatgggttcagggggctgacacagcgcctgttctcgtcgatcaactcgctgtggccgtttctggttgcgttgtacttggtgcgcaggggttcaagcgtgctgacggcgcagccggcgcgttga

SEQ ID NO: 518078 - DNA, 372 bp, Stenotrophomonas maltophilia
atgaggatgaggattttccgtcgccagctgatctacattcaggtgcaccaggaccattttattgcgcgcttggtcggtggagacaggaccatccgtcgccagtgtcacgcccttggcaatcgcgcgggcccgatcaaggacttttcgagtatccggcccctgctcaaggcgatcttctcggaactcctgcctgggttctctctcgtcaagccgtgggggattctgcactttgatccggttgagtacccggtcacgaaggaagaactggccgggttccagaaggctgccatgcgaagtggtgttagcttctgttttctctccacgtgggagcagcggcatgaagacaaggatctgttggagatgttcaagtag

SEQ ID NO: 518079 - DNA, 306 bp, Stenotrophomonas maltophilia; identical to SEQ ID NO: 517967

SEQ ID NO: 518080 - DNA, 351 bp, Stenotrophomonas maltophilia; identical to SEQ ID NO: 517966

SEQ ID NO: 518081 - DNA, 303 bp, Stenotrophomonas maltophilia; identical to SEQ ID NO: 517965

SEQ ID NO: 518082 - DNA, 312 bp, Stenotrophomonas maltophilia; identical to SEQ ID NO: 517964

SEQ ID NO: 518083 - DNA, 1248 bp, Stenotrophomonas maltophilia
gtgaatgcgattacccagttgcaaactcccgacgtgagcagcccggcctgcttgatggagatcgcggatacgacggagcatatggaggccgtcgtcgaggggattctgtggtcaagactgcgcaggatgaaagcgcgactgcaggaagtgcttgccgatccgcggtacgggacgacggctcgtgccatgcatcagatgtaccagtcaatcgggtccgatcgccaggctcgcgtactgctgagttccgaattctgcgagcagtatctgtgcctggagtccgcgcggaagggcaggctggaggccggagctgacgagcaggagagggcagaggaacaggcccgcgcgcttggcgcgctgcacgacataatcgctcgggagaagtcgatcgccgagctggcgcaggggcggaccggcagatatctgagagaggcgcggcagtggcagctctacagcccggttggagactgcgttgcggaaaaggatgccacgggcgtgtggacccttcggcagttgccgaagctgggtgactgtatcgcgctggacctcgagagcccgccagcgcggcaccatgagccgcgttctggggtgctgagccaaccgtgcctgccgctgaccgatgcggagcgtgagcatgtctcgcgaaagctggcagaggcgctggcggcgattgatcggtcagaacccatgtacggccttctcatccgcaacttcgtccggcggatcaccgtgcgcaagtcggcagaagtcacgtccgatgaagccggccgctacggctccgagcatgtgccgaggcagccgggttccattcggctgctgaacacgcataaccctgagcttctggttgaggcgtgcatggagagcatcatgcatgaaagcacgcacaactatctggccgcgtgggagcttgccaacgggttcttcgttgccaatgactaccagcaccgtgtcgtgtctccgtggtccggcaatcccattcccaactcctcctacatccacgcggtcttcgtctattacgtgtgtcatcgcctgctcaagcgtcatcttgagatttctccgggcctgggtgaagccgccaagcgccacgtccagcgcaggttggccgtctgcgccgccggcttcctgatcgagcaggatctgagcggtcggttgatgaccaaggacgccatcaatggcgaggtcgggcagatgatcgatcagatgcaggccgagatgaagcgtcagtatcgctacggggagtggcagcaatga

SEQ ID NO: 518084 - DNA, 846 bp, Stenotrophomonas maltophilia
atgagcagaacagtcgtcatctacgcggatcaccttgacccggtcgcgctgcgggcgctggccacgggtgtccccgccatacatattgatgagctgataccagtaatggagggtcaaccctggcctgaggttctccggctgagcccaggtgcgcatcttgagagtctgttccgcggaaccaaagtggtaaaccgggtcttctctctggaaggaacgcaggtcgaacggttcttggccgagcacggagtggacgcccgctggttccatatccgcctgctgccgcttctggcgctgggggtgagcctctgtcacgacaccggcacgcgcggcgtatcccggtgtctggccccgctgaatgtgcagtggtttgaactcgaacgcgctcttcccgaggcgaatacgcctgacttcgcctatagctttggctacgaagaaccagacctgtcccgcatcgaggaccccatgcagaagtcggtctggtcgctttttgactggcgacaggaacggcagcttgatgacgaagagcgccgcaggcatcagttccacgtgtccaggccgaagggcgttcccgtgatcgcctggttccttgggcgggactacaacggaatccactttccccgtggaagcgttgaggtcgatgatgctgtgtgcgggcagctgacgcgagcagctgcacaggccttccgtgccgaagcaggagagatgctcctgtacgtgacggacgaggcagtcaccttccacgcattctcgccctaccttcgttccgtcgccgtcgataccgctgtgcaggatgcattggacgcgtggttgcttaccggcggcgccggaggtgtgaatgctgcttga

SEQ ID NO: 518085 - DNA, 774 bp, Stenotrophomonas maltophilia
atgctgcttgagaagctgagctcgctgcgcgagtccatgggctgggtctacggaagcgaggacctgtgcgtactgttgtacagcctggtcaagcggacccgcccgcgcatcgtggtcgaactgggcaccggctttggcgtcactgcggcctggatggccggtgcattgcgggagaacggcagcggtgtcattcacacctacgataatggctcgcacttctccagtgagccaggcatcaggtttgtcgagggcctgcaggggccgcttgccgattcactgcgggagatggggcaggactatcccgctttcctgcagcacgtattccagtggaccggggtcgagaatcacgttgtcgccaattggcaggagatcggctttgccgagattgcccaggcccccgcctttgacggcggaatagatatggtcttctccgacttcaaccactcccaggacagcatccaagccttgctggcggcgtttctgccgcgcatggcggaaagcgcttcgatcttcatcgacagtgcctccacccagcggctcagctacctgaccctggaggccgttgtggacgccctgaatcagaataagatacccagggcgttcatcaaggatcgcagcgagcaggacattgacgcgctgctgcatatggtccaacgctcgcgcttccggctgatgcatctgctggaagcctgcgatagggcgcagaacagcacggcgtggatctcgattgaaccggtggacgtgattccgactgcggccaccttcctgcattag

SEQ ID NO: 518086 - DNA, 1308 bp, Stenotrophomonas maltophilia
atgttcggctattactttgcgctggcccgcaccaggcttatggaaaccaaggggatgagcgcagcgctgatcctggcgctggggttgggcatcggcgcaagcatgacaatgctgactgtcgtgcggacaatgacgtgggatccactgccggggcggagcgagcatctctatcaccccttcattgacgcgcttcccacgtcctacgacgtcaggccgggcatggacccgcgcgtggctctcacctgggtggatgcgcagaacctgcttcggcaggcccccgcctcccatcagaccgcactggcgtctgcccgtctgctggtggatgcgcagcgcagcgtgcagattccattcttcacgcaagggcagtatgtcactgcagatgcgttcgccatgtttggcattcccatggcgcagggcagggcctggacgcgtgaagatgatgctgcccacgcccgggttgtcgtgctgggccaggatctggctgctcgtctgggcagtgaaggcctggtgggagccaccgtccggcttggcggccaggcattcagggtggtcggtgtcgccggtccgtggagcccgcgcccccggttctatacggaccttcagcaggatgtcttcaaggggcgcgaagacttcttcatcccgattggtgttgcagcggaaatgcagatggcggtgtccagcagcgtcttctcatggagcagtgacaagcccctcaatcgcctgcaggacgcccgcacatcatgggtccagttctgggccgagttgcctgacgcggccagtgtcgagcagtacgagcgcttcctgggcaactacgcacgtacacagcagcaggccggaaggtttgacaggacaaccacgccgcgcatggtgtccttgagggacttcctggtcgagcatcgcatcatccccaacgaggtaaagctgcagttggcgctgtgcctgggcttcctgatcgtttgcctgctgaacatgagtgccctgatcttcgcccgcttcatccgccgttcccatgagatatcgatccgtcgggcgctgggtgcgcgccggcaggacgtcatctatcagctctgcaccgaagcactgatcatcggcggcctgggcggcgcggtagggctgatcgttgcagaggccggcctctaccttgtgcggatgcagccggaagactacgcctcgctggccaacatggatctgagcatggccgctctcaccgtgggcctggcgtgtgtctccagtgtcatcgctgcgttcttccctgcgctgcgcgctacctcaggccgtctggccatgcagatcaaggcgtcagaatga

SEQ ID NO: 518087 - DNA, 1248 bp, Stenotrophomonas maltophilia
atgagcactgcagaagtcccccttatcgtccgcgcgctcacccgcaaccgcttcatcgcgtccattctcctggtgcaggtgctggttgccacggcgtgcgtgacgaaccttgcgtttctgctgtccgagcggctgggaaccctcacctacaagacgggcctggaagaggcgaacctgggcgtcatcgagaccgaatacctggggcctgcagcagccaaccctgcagcctcgatcaggaccgacctggaggccatccgccagcaaccaggcgtcgaacaggtaatcgcagcagagtcacttccgcttgcccagcacaattggtcggccgggttcaccaacaagccgcttaaaggcaatgacatttccggcatcgtagaggccgaaccgactgtctatacggcatcgtcgcctgccgccaaggtgctgggcctgacccttgttgccggccgtgacctgtctgcgggagcattcgtgccgatggaggccagcgccgactatgccgggctctacaaggcgagcgaggccgttgtgtcgcaggcactggcggacaagctgtttccggagggcggcgccgtcggcaagttcctgtatgccgacgcgcagcatcccatccaggtggtcggcgtggtcaagacgctttcccgacctgtcctgaagaccgatgcagacaatgacatgtcactcattctgccgctgattccggacgggcctcgcgtgatgtttgccatccgtgccgcggatgggcgagtggcggacgtgattgcgtccagtgaggccgcgctgtcgcaacgcgatgcgaaccgcaccatcgcccgcagcacctcattccgcgagctgcgcgccgactacttccgccacgatcagaccatggcgatcatgttcctgagctccgggttggcgctgttggtggtaaccgcaacgggcgtgtatggactggccagcttctgggtccgcaagcggtatcggcagatcggtatccggcgcgcactgggcgcccgcaaatccgacatcctgcggtacttcctggtggagaacctgattctcaccgctaccggctctgttgtcggcaccgcactggccatcggcctgaacatggccgtggcccggtactacgaggtagccaggatcgagacgccatttctcgcgattggcgtgctgaccgtacttctgttgggccaggccgcagcctatgttccggcccgacgagcagccaaagaagcgccggtggcgatcctgcgcagcgcgtga

SEQ ID NO: 518088 - DNA, 438 bp, Stenotrophomonas maltophilia; identical to SEQ ID NO: 517963

SEQ ID NO: 518089 - DNA, 399 bp, Stenotrophomonas maltophilia; identical to SEQ ID NO: 517962

SEQ ID NO: 518090 - DNA, 747 bp, Stenotrophomonas maltophilia
atgaacaacaatgcaccaacatcgaaggtgttctaccgcccgatcgaagcctccatacgctgggccggtctgctgcggttcgagcgtgtcatcctggcctcgatttcgtcgccacggaacctgccgcaatcgctggactgcccgcgctggggcgaactgcggctgtacaccgatcgcatctacgacggcatcctcaatggggaactgccctttgggaaaaacggcatcacgacacgcgataccgcgctgatcgattcccctgatctgacggttcgtcatgtcgatttgaagcgctggatgcgccagcactaccccgagcagcgacctggcttcatgttctcccgcagcgagcgcatcgcccatcccttcatctcgctggaaaccggccaagccatgctggtcgaacggctggccctgaaatccgccctggagcagtgcaagcgtcaactacgcgaactgcaagacaagcacgacgcgctactcaagcagtccactgtcaccccagcctgcgcgcaatgctccatcagcgaccgggccgaggctacctatttgcacatcatcggcaccatgctggagctgatgctcggcaagtccccatcgggcacaccttactccagcttcaacagccaggaagcgattgctaccgcgatgatcgcgcatcacggcgaactcatgggcattaccgatcgcacgctgcaagccaagtttgcgcaagcccgccgcaagctgcgggccgccgtttcttga

SEQ ID NO: 518091 - DNA, 213 bp, Stenotrophomonas maltophilia
atgtcgcaaacacctgtactgccgcccaacgaacgccgcatcctgcgcctggaagaagtcgaagcgaagtccggcttcaagcgcgcccacctctacaacctgatgcgcgccggcaagttccccaaggcgctacgcctgggcgtgcgcgccgtcggctgggattccatcgagatcgatgagtggatcgccgatcgcgtcaacagccgggcctga

SEQ ID NO: 518092 - DNA, 1635 bp, Stenotrophomonas maltophilia
atggctgagatgacctcccagcagatggccggcaagctgctcgcggccgggttcgagcgcagcggcccgtccacctcggccttgagcgacccgatcgccgacacgcccatggtcgtgaccctggaccagttgcgtccctacgaccacgaccccaggaagaagcgcaatccggcctacgaggacatcaaggcgtccatccgcgagcgtggccttgacgcagcgccggcaatcacccggcgcccgggcgaggaccactacatcattcgcaacggcggcaacacgcgcctggcgatcctgcgcgaactgtggtcggagaccaaggaagagcggttcttccgcataccgtgcctgttccgcccgtggcccagccgcggcgaagtcgtgatgctgaccggccacctggccgagaacgaactgcgcgggggcttgacgttcatcgagcgcgccctcggcgtcgagaaggcacgcgagttctacgagcaggaaagcggcaccgcactgagccagtccgagctggcccgccgcctcgctgccgatggcttcccggtccagcagtcgcacatcagccggatgaacgacgcggtgcgctacctgctgccggcgatcccgaccgtgctctatggtgggctcggccgccaccaggtcgagcgcctgtcggtcatgcgcaaggcctgcatgctcgcgtgggagcgctacgtcaagggccgcacgctggtacaggatttcgacgacttctttcaggaggtgctgtcgcagttcgacacgcaggccgacgagttcgtcccccagcgcgtgcaggacgagctgatcggccagatgtccgaactgctcggcatcgactacgacgtactggcgcttgacctcaccgaatccgaaagccgccatcgcgctctggtcagcaacccaaccccgccatcggcgccgcccgcgctgcctgagcctggcaccgtggcacgcccgcccgccgcgctggccccatcggtcccgacgccggcggccacacctgggtcgcgcgagcgcgagggcggctcagggacggacggctcgcccgcaggaagccccgtggcggctcctggtgatctgctgcaggggcacatcgtttcgcctgcaccgacgacggagcggctgcaatccattcagcggatggtcgccgacgagctgggggatgcgctgcccgatttttcggccaacgtcttgcagtccattcccgtccaggccggcggtctctacccgatctccgacgtctggcacatcgacacgggcctggacacgcccgatcgcctgcgcatccacatcgcgcagttcgcacgcgagatcgcgggtgaggcaggccttgatcagtgcatcgaggaccgcgcggacggcgtaggcttcgcatgccgtgccagcgcgcagcccccatcaccccagggccgtggcgtgctggcattgctggcgagcctagcagggcagagcttcaccgatgccgatctggacggcgggcagcttgccgccgagctgccggcgctgctgcacggccaaggcgatgcgacacgccgcttgagcgacaccgcgctggtcaagctgttccgattgctgcgcctggcccggcgcctgctggacctggaatccggtgtcgcaggccctggggcatga

SEQ ID NO: 518093 - DNA, 558 bp, Stenotrophomonas maltophilia
atggaaaacatcaccaagcaagaccgcatcacgctcaaagatctcagagtgtacgacttcgccagcgacgaaacgctgtgcttcaccgccattgtcgtattcgacggcactcctattgccgaggcccgcaacggcgggaacggcggttcgacattcctgcgtgcgctcgatggcaagaaggcgcttctggctcaggccgaagccttcgccaagggtctgccgcctgctccgctcgacctcggccaggagggcgaagaccctcactacatcgacatgacgctcgacttcctggtcgatgaactggccgaagccatgcacggggaacgcaagttgcgagccgcgttcaagcgcgacatcggcaacagggtgctgttcatcaaggacggcaaacttctgttcatcaagggcatcaagctcaaggccattgccgaccgcaaggcgtacttcgcttcgctgcgcgctcggcagacccagcccatcatcatccttgccgagcttccgcccgagcaggcaattgacctgtggaagaagcatatcctgggcgacacgcccgactga

SEQ ID NO: 518094 - DNA, 1080 bp, Stenotrophomonas maltophilia; identical to SEQ ID NO: 365421

SEQ ID NO: 518095 - DNA, 1170 bp, Stenotrophomonas maltophilia; identical to SEQ ID NO: 365420

SEQ ID NO: 518096 - DNA, 219 bp, Stenotrophomonas maltophilia
atgacgtgcgaggcaagcgactgctgggtggtgtattcgcccaatgagtccgccatcagcgacagcgctggcttctggtccaacgagttcggctgggtgcagttcgaccaagcaacgcacttctcgctcgaagaggccttggacgcagagcttccagtctcggtcggccgggatgcacgcttcgtcacatggcaggacgcccagcgccactacggctga

SEQ ID NO: 518097 - DNA, 510 bp, Stenotrophomonas maltophilia
atgggcgggccatcgacctcgccatcgctgcagctgctgccggtgtccttgcgctgtgccaatgccttcgtgcaggagcaccaccgccaccaccggccggttcagggggcaaagttcgccctggcggtcgcgctgtccgccaccgatggcatctgcggcgtggccatcgtcggtcgcccggtcgcccgccacctggatgacggctggacgctcgaagtcacccggctctgcaccaacggcgcaccgaacgcctgcagcaagctctacagcgcggcctggaaggcggccaaggccctgggctacacgcggctgatcacctacacgttgcccgaggaaggcggtgccagcctgcgcgccgccgactggcggctggtcggcatgcgcggcggcggcgcctggagccgccccagccgtctccgcaccgacacccccgaccacctgcgcggccccaagtgcctgtgggaggcgccaggcggcgcggacaaagggaagcgcccggatgccgattga

SEQ ID NO: 518098 - DNA, 690 bp, Stenotrophomonas maltophilia
atggcagccacatcggcacctgcgagatcagtcctgcccatcgtcgtcccgggtcagctcacattgcggaccatccgcggcaagaacggaccgttcacggtcggtcgcctgaccacccccatcggcgagttcgcggtcaaggacgcggagctggagcagtaccccgaaggcaagtacgacggggagttcgtcatccgctacatcttcgcgaagtcctatccggtcgcgggtggcgcgcggtttgaagtccgcgccaacctcgatggcatgacgctcaacggcatcgaaaaactgtcccgtgacgaggcccgcagcttcgccacgcaggaaatcgatccactcgatgaagagttgggagcgcagccagcggcaacgccggccaagcccgccagaacgttcaaacccgcgaagccggcacccgtgcaggcatccgcggacccgctggtcgataccacgcccttcggcgtggatgcgccgacgcccgctgcggctgctgccaccggcagcaccgaagacggcgacgccgcactgttcggcatcctgtggccgctgggcgaatccgtccgactggattcgaccatcgatcgtcgcaccttgcgcgcgcaggtcgcccgcttgggcgaactgggctacaggcaccagtaccagacgcaggagtggagccgtcaggccgcactggaacctgcgtga

SEQ ID NO: 518099 - DNA, 324 bp, Stenotrophomonas maltophilia
atgtccaccatcgcttgcgatacgccccgttccacgctggacgaatccgtgtggcaggccgtctgcaagacggccgccgagcacgcccagcgtggttgcggcctgtcctgggagcactgggtcacgcttttcagttcggagatcgacgcgcaagtcagtcggttgcccgaaagccagcgcgttcatgccctggaaatcgctgcccaggaatgggactacgcaacacctgccgaaaggcaggaaacgcaggagtggctcgccgaagacggctgctgctcgcacggaatcaccctcggctgttgcccagccggttgcggttcctag

SEQ ID NO: 518100 - DNA, 342 bp, Stenotrophomonas maltophilia
atgagccagcactacttcgagacccatcacaagggatttcccatcaccgtcatgctcggctgggatcggccgctgcgctatttcttcatgacgatccgcaagcctgccgagctgatcgacagcgccatgaaggtcgaggacgcggatttcctgtacagcaacctgcacgaggaagacccgttcggccacggcctggactactaccgtgcggtcctgggccatttccacatcgacgtgccgagcagcatgttcaccgaggtccagaaggactacgcggggaacgtcggcaatcgcgtcgtcaagcatgaggccgatggttcgttcgccgaactgggagcctga

SEQ ID NO: 518101 - DNA, 651 bp, Stenotrophomonas maltophilia
atgcctgccatttcatccgaccagcccctgtaccgcatcgacgaatgcagcgacctcatggccgatgcctgcgtttgcggggaccagggcgacttgatctttctctcggtctgggcgcgcgacaccgccatccagcagttcatcggacggctcaccctgggccgtagcgaggacggcctggatcagttctacgtcgtcaccgaccagggcggttcgctgcctgtgttcgtcggctcggtcgagcgccttgaaaagcgcctgacccgcagctatcgccgcacgctgttcggctcgatggtcaatctctggctgttcgaccggcgctgcatccggcccgacaagagttcggccagcgccctggcgctgctgccgcgctccgcggccgatcccacgtcacgcctgtggcacctggtcaaggacacgtgcccgctgccgctgctggaccactggcaatcaccagtcctggcgctgctgcgcgagcgcgaaatgctgtgctcactgcgcatggccctcgggccgctgcaagggttccggctcgccatcgacgtgcccgcgctcaccgaagcgctgggcgacctcatccgccagggcgtgctcaccgcctatccctatccggccaggatttggacgccggaagtggaatcggtttga

SEQ ID NO: 518102 - DNA, 1110 bp, Stenotrophomonas maltophilia
atggcactcatgttccccaggctcgctcggaatttcgccaagaacgggtactacccgaccgacgaagccaccctcgaaagaaccctcagcgcgctcgcgcccagcgatgggcccatgtgcatttgtgatccctgcgctggcgaaggcgttgccatcgccgaagccgcccatgccctcgggcctgagctggccagtgcctatgccgtcgagttcgatcaggagcgggccagccacgcccggctgctggtcgatcattgcatccacggtgacctgatggacaccatgatctcgcggcaggccttcggcctcttgtggctcaacccgccctatggcgatcttgcaaaagacgccaacggcaacctgggctacgaaggcaagggccgtggtcggctggaaaagctcttctaccagcgcacgctgcccctgttgcagtacgccggaatcttggttttcatcctgccgtcctatgtgctggatcaggagatggtcggctggctgacacgccatttcgcggacctgtccgtgttccaggcggtagacaagcagttcaagcaggtcgtggtgttcgggcgtcgtgtccggcagcgcgaccaggcgggcgatgacgtgaaagcgtcacgcgtccggctgctgcagatcggcctgggcgaacaggaggcggacgagttgccgcccgaatggacgctactgccgtatgtggtccccccggcccaggccgagccggagcatttctaccggatcagcatggagccggagcagttcgccgacgaagtgcggcgcctcaaaggcctgtggcccgcgttcgagacccatctgggcgcgacccagcagaccttgcgtgctccggcacgcgccttgtcccagtggcacctggcactggccctcgcggccggcgcgatctccggtgtcgtgcagtcacccaccggccgcatcctggccgtcaagggcgacacgttcaagcagaagtcttccgccgtggaataccgcgagcgcgacgacggctctttggccgagacccgaatcctgacggacaagttcgtgccggtgattcgggcctgggacctcacacccagcccttccacgctgggacaggttctcaccatccactga

SEQ ID NO: 518103 - DNA, 318 bp, Stenotrophomonas maltophilia
atgctgtccatcttccagggccgcaagccccaggttccaccgctcttcgcactgggcacgctcaagctgagcgagagggtgcattggctggcgagcaagagcctcatcgaccctttgccctacgtgcagcgccatgtgcgcggcgactggggcgaggccagtgaggccgagtgccagatgaacgacgtcgcgctggagcaaggcgcacccatgacgtcgcgtttcaagatcacaccgaggctgttcctgctcgtcatcaccagtgacgaccagcgcaccacggtcgtgcaactgcccgaagaaggggccgtgaactga

SEQ ID NO: 518104 - DNA, 300 bp, Stenotrophomonas maltophilia
atgtccaccgttgcccaacacgcttttcccaggttcaaccccggccaggtcgtcatgacctcgggcgtcgccagcctggttcaacaaggccagctcaatccccgtccgtacctgttgcggcatctgtccgccgactggggcgacctcgacgacagcgaccggcgccagaacgacgccgcgctgaagtcgggagaggaccgcctgttctctgcctacgaggtcggcccgagcctgaaggtctgggtcatcaccgaatgggatcgcagcgtcaccacggtgctgttgcccagcgagtactga

SEQ ID NO: 518105 - DNA, 2283 bp, Stenotrophomonas maltophilia
atgaacgcacaagtcatcgacgcggccccggccgctgatacctcgtccccgatggacgacctgctcgaacaggaatcgtccgagctgtccatgagccttcaggacttcgtttccgagttcggggacgaactgctggaatccctcaaccgggcgaatccccccgtctatagcggcacgccgcgcccgcaccggcaactggtgctggccgggctgaaacgccagttgttccccgcccaggccgaggtcgtgcatgcggcctcggagctgctcgtcaaccaaggcgagcgggccgttttcgtcaacggcgagatgggcactggcaagaccacgatcggcatcgcgctggccgcggtcctgcatgccgaaggctatcgccgcacgctcgtcctgagcccgccgcacctcgtttacaagtggcgtcgggaaatcctcgaaaccgtcgcgggcgcgaaggtctgggtgctcaatggcccggacacgctgctcaaactgatcaagttgcgcgagcagcttggcgtgccttcgccggcgcaggagtttttcgttctcggtcgtgtccgcatgaggatgggctttcactggaagcccgccttcgcgcgcaagcacacccgccacggcgacgtgggggcctgcccgcactgcggggaggtcgtcaccaacctcgacggcgagccgatcagtgctcaggaactggaggcggaagagttccgccgcaagtgcaatggctgcggcggcgcgctgtggacgctgatgcgtccgcggtcactgtccggcagcgaccagtcctcggccgtgctgcgtgccttgaagcgaattcccaccatcggcgaagccaccgcgcagaagctaatgaagaccttcggggacagcttcctggcctcgatgctcggcgacaacctgcacaacttcatcaacctgatggacgcgagcggaaagctggtcttctccgaccgccaggcgcaccgcatggagcgatccatggcgaacatggagttcggcttcggtgaaggcggctatcaacccagcgaatatgtgaagcggtatctgccgcgcagcacgttcgacttgctcatcgcagacgaagcccacgagtacaaaacgggcggttcggcgcaaggccaggccatgggcgtcatcgcgtccaaggtccgcaagacggtctcgctcacgggcacgctgatgggcgggtacgccgacgatcttttccacctgctgttccgcgcgctgccgggccgcatgatcgaggacggctacatccccggccgcaacggcagcatgaacgccgccgccatggccttcatgagggatcacggcgtcttgcgggatatctactccgagtccgacggtccggcgcacaagacggccaagggcagcaaggttacggtcagaacggtcaaggcccccggcttcggccccaagggcgtgctgcggtgcattctgccgtacaccatcttcctgaagctgcgagacatcggtggcgtgctgccaccgtatgacgaggagttccgggacgtggcgatgagcgccgagcaaggcgaggcgtatcagaagctggcttccagcctgacgcaacagctcaaggaggccctgcgcaagcgggacaccaccttgctgggcgtggtcctcaacacgctgctggcgtggcccgactgctgcttcagggcagagacggtccgccatccgcgcacgcgcgaggtgctggcattcaccccggcccagttcaacgagctggaggtgatgcccaaggaacgcgaactgatcgacatctgccgccaggagaaggaagcgggtcgcaagaccttggtgtattcggtctataccggcacgcgggacaccacgagccggctgaagatgctgctggagcaggaaggttttcgggtggcggtactgcgcgcgagcgtggatgccagccagcgcgaggactggattgccgagcagatcgaccggggcatcgacgtgctcatcacaaaccccgaactcgtcaagacggggttggacctgctcgaattcccgacgatcgtgttcctgcaatcggggtggaacgtgtacacgctgcagcaggctgcacgccgctcatggcggatcggccagaagctcgccgtgaaggtgatctacctggggtacgccgcttcgtcgcagatgacgtgcctcgcgctgatggccaagaagatcctcgtgtcccaaagcacgtccggcgatgtacccgaatccgggctggatgtgctcaaccaggacggtgattccgtcgaggtcgcactggcccggcaactggtcgccgcctga

SEQ ID NO: 518106 - DNA, 870 bp, Stenotrophomonas maltophilia
atgaacgctactacccaagccacgcccgaaaccgtcaatgcgcgcctgagactggacgtgacctatctgctcaacggcgaggccgcaccggaattgctggcacggctggaacgcatgtgcgaactcgccatcggcgagggtctgctgaccggcgaaaccgccgcggaagtggacacctggtcgatcgatgtatccgaggtgccttcggcggctaaccgcgatgcgctcgaagccgagatcgccgccttcatgcaacagcgcatcgaggacggcaacctcgctgccgaggacatccccgtgcgcctggcgcgctatggcctgatggccccggaagcattcgccgacgaaatgcgcgagcgcatgggcatggacgacgacgcccccttggaccaagcctctatcccctcgaccgaacctgccgacggcagcgagatcgagatgcaagtcgcggtcgcctgcatcggtgcctccggcagccccgacgtgccggtcttcaaggtcaggatcacccgagaggaatacgacctgggtatccactacgacaaggccaaggacttggccgaagaagcccggtacgaagggccgttcatctgctacgacgctgccgaatatggccccatcctgtcggccgcccgcgaactgggccttgttccgcaggtcgtcgtggtcgatatgaccgacggccagatccactccatccgctgcgacagcggcgagatcaaggtcatctgctacgacaccagcgacaccgaagagtattcggcggcggtggcgaaccggccggtcggcgagaacggtcacttcgtgcgctgctggtcgcacacccaactggcgcaggtcgatcccggcctgaagctggctcgggattga

SEQ ID NO: 518107 - DNA, 1863 bp, Stenotrophomonas maltophilia
atgctctccttgttccagcgaaaacggtccccggccgctgccgcgccgccatcaccacccgccaccgacctcccgaaagggttgatccggccggagttggctgcatcgttgctggcaaccccgcgccggcagaagctgatggagcacatctggcagcgcacgtcgctttcgcgccagcagttcgccaccctgtatcgcgcgccactggagcgctacgccgagctggtccaggctttcccggcctccgaagcgcaccaccacgcataccctggcggcatgctcgaccatggcctggaaatcgtcgcctacagcctgaagctgcggcagtcccatctgctgcccataggcgccagccccgaagaccaggccgcgcaggccgaagcctggactgcggccgtcgcctatgccgcgttgctccatgacatcggcaaggtagccgttgatctgcacgtcgagctggccgacggcagcatctggcacccgtggcacggcccgctgcgtcagccgtaccgcttccgctacaaccccgaccgcgagtaccggctacacagcgccgcgacaggtttgctctaccggcaactgctcgatcgcgatctgctggactggctcagcggttatccgtccctgtgggcgccgctgctctacgtcctggccgggcagtacgagcacgccggggtgctgggcgaactcgtcgtgcaggctgaccgcgcctccgtcgcccaggagctgggcggcgatcccgcgcgcgccatggccgcgcccaagcactcgctccaacgcaagctggtcaacgggctgcgctacctgctcaaggaagagctgaaactgaaccagcctcaagcctccgatggctggctcaccgaggacgcgctgtggctggtgagcaagaccgtttcggacaagctgcgcgcgcacctgctgtctcagggcgtcgatggcatccctgcgaacaacaccgcggtgttcaacgtgctccaggaccacggcatgttgcagccgacgtccgatggcaaggcgatctggcgcgcgaccgtgaccagttcgaccggctggtcccactcgttcaccctgttgcggctggcacctgcgctgatttgggagcctggcgagcggccggcgccgttcgctgggacggtgaggatcgacacgacaccggccgacaaagatgccgatgctgcggtgccaaggccggcgatcgcggcaatgccaaccgccgaagagcagccgcccgctcctgggaaagacgccggcaacgccgctgccacggtttacccgcccgctgcccgagccatgcccgatgtcatggaggacatgctggcgatggtgggaatgaacgattcggaggccaccacgcaggatgcagaagtcgcctcgggcgaggtgcctgccacgcatcccgaagcacccgcaccaaccttggctgcggctctgccttcgtcacctgtgccacagcctacgctctcgaccgcacagccgtccggcgagcacttcatggcatggctgcaacagggcattgcttcgcgacggctcatcatcaacgacgcgaaggcgctcgtgcataccgtgagcgataccgcctacttggtcagccctggcgtattccagcggtatgcccaagagcatccgcaggtaggcctgctggccaagcaggagaaccagtctgattggcaatgggtgcagaagcgcttcgagcgactgcaactgcatcgcaagcaacccaatggcctgaacatctggacctgcgaagtaacggggcctagaaaatctcgccggctacacggatatttgctgcaagatgcacgacaggtatttggtgaggcgcacccaaataatccttatctgtcgatttttaaagccaattaa

SEQ ID NO: 518108 - DNA, 2310 bp, Stenotrophomonas maltophilia; identical to SEQ ID NO: 365419

SEQ ID NO: 518109 - DNA, 405 bp, Stenotrophomonas maltophilia; identical to SEQ ID NO: 365418

SEQ ID NO: 518110 - DNA, 381 bp, Stenotrophomonas maltophilia; identical to SEQ ID NO: 365417

SEQ ID NO: 518111 - DNA, 1518 bp, Stenotrophomonas maltophilia; identical to SEQ ID NO: 365416

SEQ ID NO: 518112 - DNA, 342 bp, Stenotrophomonas maltophilia; identical to SEQ ID NO: 365415

SEQ ID NO: 518113 - DNA, 294 bp, Stenotrophomonas maltophilia; identical to SEQ ID NO: 365414

SEQ ID NO: 518114 - DNA, 1212 bp, Stenotrophomonas maltophilia; identical to SEQ ID NO: 365413

SEQ ID NO: 518115 - DNA, 1428 bp, Stenotrophomonas maltophilia; identical to SEQ ID NO: 365412

SEQ ID NO: 518116 - DNA, 1329 bp, Stenotrophomonas maltophilia; identical to SEQ ID NO: 365411

SEQ ID NO: 518117 - DNA, 504 bp, Stenotrophomonas maltophilia
atgatggcatcctctccatcgcgatttctacgctgggtgttcatagcagcactaattctggttcttgacctcgcgacaaagtactgggtagtgcagagctatcgcgtgggtgaatcaacggtacttaccagcttcttcaacgttgtgcgggcacacaatccgggagcagctttctcactatttgccgaccaaagcggctggcagcgctggtttctcaccgtgttggccatggttgcatcggcattcttgctatggcagatcacgatccatagctcgaagggcctactttcgatttcattggcatccattctcggcggtgcgcttggcaatgcgatcgaccgcatggctcgcggacatgtgatcgactttctgagcattcacgcgtctggctatcactttccgacattcaatgtggctgatatcgccatcacgactggcgttattggcgtcgtcattcacgaagtattgagcaggcgaagtagggagcacaccaagacgcagtag

SEQ ID NO: 518118 - DNA, 891 bp, Stenotrophomonas maltophilia; identical to SEQ ID NO: 365410

SEQ ID NO: 518119 - DNA, 642 bp, Stenotrophomonas maltophilia
atgcacaacgtcaccagcccgcttccccgtcttaggatcgccatagcgcgaggcgtagcgtcgtcacagctttccacactgctcgcgctacaacgcgaggcagagcccgaggtcaccctgacgttttccgagattgcaggatgcgacctggcgagagggcttcgcgatggactgtacgacgcagggttatcgcttcaggggtctagcgatttatctctccagtctaagcccctgtggatcgagaccctggccgtcgccacgccgctgcaatgcttctcgttcgatcgggcagagttcacgatcgccgaactgatggactatccagtatttcgctggaaggcagagatttgtcctttactggatcgccgcctgtcttttcttcctccggtagaccagaagaacattcagcacgtgccctccttcgagatgatggcgctctgggttggagccggctatggcatcggggtaaccatgcagtcgcgcatcgagcaggctcgcggatggaagatcggcatgcggctactcgccgacggtccctatgaggtcgtgacacacctgttgcggcctcaaggggaggcaaattccgctgtggagcgatttgaacgcagggcgatacaggtcgctcgaaccaattcggcctga

SEQ ID NO: 518120 - DNA, 786 bp, Stenotrophomonas maltophilia
atgagaaacgcactgaaaccaaaatccagcaagactggtcggctcggccttcgctttgcggcgatcgcgatgggtatcgcactttccttggcgggcgggacgactgcgacagccggtggcgttcccgtctatgacggcttgaactggtatgagaagctctgggatcgtcttcagtcagctgcagaattcggcgagaacgtgacccgctggggaacgctgctgcaaggtgtcaccgatgccatcatcaaggcacagggcatcttcaagtcctttggtcttcctccgggcgcgatgcttactccggttccggataactacatggtggcggaatcctgcggctcggccggagacctgagcatcgacacgttgttttcctatttcgtgttcaatcctgcaggtgatgtgaaatcacagcagcgccagatctgtgtgaacatccgcatgatgcagaaccgcaagtacaacgattccgtgcagttcatccagcagaccattcccaaaatggatgaattgatgaagctcatcaatgcagcgcgtactgccagcagcctgcgcggcgcagtggatgccgtcaacagtgactcgatgcggacggccaatgaactggcggttcagtcgcagtcctgggaggcgcggatgaaggcatatgacgcttacatcgaggtaatggaggccaaccagaaagtcgtggctcaagccgcgctgaagggtgatccaaccgcggtccgcttggcaagcgacctggtaaagacagcatcgctgaaggccgccttgagcatcaagtaa

SEQ ID NO: 518121 - DNA, 648 bp, Stenotrophomonas maltophilia
atgatcctccggaaaatctacctttatctcgatcccgacgagttccccaaggaagtcgccatacctttcggcttcaggtcgcgatacgcgtgcaatttcctggaaaggaggcttaaaccccttcgatttcattcaactggattcaacaggattattattcaaggatcagcacttcaaaccagtataaagatcgtcaagggctcgaatgcaatcagctcaccagtaccattccagatcgatcactacgaaaaattaaacaacaacgatcgccacgaattctacctttcaatgatcgagcgtggactcaatacagtctcccttcaccaccccattccgacaccggaactaacggaagcaatcgaccttttcagaaattccggatataaaaacgaatggacgcaccaaacaaaatattatagagaagacggactccgggcatcgcttctatgcaggctcacgccggatttattctcgctcaccctcaatgtgacccagggccgcgagatcatatttgaaaacacaatacttgaaacaaaacccgatgaactcatattcgcggatcaattcaagagcctcgaacggcacaaagacagcatcatagtgagagacaaattcggaaatattttttaccagacacccaatatatag

SEQ ID NO: 518122 - DNA, 1317 bp, Stenotrophomonas maltophilia
atggatagcggcagcgaagtcagagccgtagcccacctaccaccagcgtggatcactggcatatctccgttcggattcgttgttcagacgctgagattcaatagcctttattgcagtgatggacatgctgcgttgggcatccgcccaaggtacagcgaggatttgtgtcgtcagctctgtctctccgcaaaggccagaacttcgattgcgacaagagttcctgctgcatctatcctcgcctcactgtggcagccaactgcttggcaagtattcagcggttctgcgatgcactggcgtccgtacctgtcagggtgcactgagtgcatgaaaactgggtatcactcgatgttgttccagatgccttgggtcaaccggtgtccgtggcactcgcaacccctcagatccgagtgcgagcattgctccagacccctatggcatggctttcgctccgatgcctctcccctgctttgtccatgcgggcatgacccggtttcgagccggaacaccattgacgaagaagttaagatcgaggcccttcgtgccagctggatcaagcgatacctgcgctgggccggggccagtcgagttcggcgaaccctcgtcggggtgggggatgatctggcgtccgccgaggaggcggcagtcctgttccgcggcagggcctacccctggtaccgaccgcaccacgcctcgtcggatgtgctcgtcagaacgtctaccgtacgtcatggcgaatccgtcgaagcacgttctcagaaggcagagttctcgcgccttgccccgtccatgggaccgggtcgtgacttctttcttgagcttcctcaggcgtttgaaagaccgatggcgcgggtgacggcttcagttgcggcaaagttccgcgagtcgagcttctcggcacgtgagcgagcctgcctaggcttgcctgggacctctgaaggtgggcagccattctcccgcgcctcgattgtcttgctccccgcctacagggtccgcgagcagctgttcctggacggccgtgtactaggtcggcccacacaggcggtgctaagggagatcgcccaggcaacgtccatcctctcccctgacaacccttcgatcgcagccttcgcgcgagcatacgagcgggtgctgggccgcggcttcgcgtgctccgcccttcacttgctcggccggcttgacggctctgttactgatgatgaggccgcactgatccgcccagtggtcatgatcagacatagaaggagctcgtgcattctgactctggcgtggctgggctgcaccggcaaggagcgaaacagagaccgcggccaggtgtag

SEQ ID NO: 518123 - DNA, 615 bp, Stenotrophomonas maltophilia
atgagcatcctcaacgttctgttgcgttctgaccagctcctggttgccgtggacaccctggccgaagacgccagaactggcgtgacatcggctggcgcgaaggcactccttatccctcagcacaacctggttctggcaacgcgcggatcaactcagttcttcattcgagtcttcgagctcactctccaggccagttaccgctcggattttaggctggaacaactcttcgctgagatgggggccgtgattgatcgcctgtggcccagctatgaagaagcggctgcggcggctggtcttcccatcggccagcttggctctgagatcttggtcggcggctggtcgccccaacatagccgaatgatggccaccgcttatgccaagagcagcaacgaccgaccagcgatagtccagccacttgacggcggattggcgtcccctggagagcccttggttggcagaccggatagctttgatcctgccgatgtactggcatctggcaagattcaagcggcctggctcaatgggcaagtaggacgcaaggtggcgggcggccgacttttggcgactgttctgcgcgagaaccaggcggtgattcaggatctaggtcaaatctag

SEQ ID NO: 518124 - DNA, 669 bp, Stenotrophomonas maltophilia
atggatctcatcagactgctgcgatcgcttgaagagttcctctatgaactcgtagggtggctggtgttctacccgcggaccctgtggagggtgctggtgcagccgggcgaggtagcgcactacacgcgccgagagttctccaaagatccggaacaacgattcgccgatgccatcagccctgtgctgatgttgattctgtcagtggtgctggcgcacgcattggaaatgtctacgcgcaccgcccccctcgcggtatcaggacccgtaggcaagctgctgtttgggagtgagcaggggctgctgctcacccgttcggctgccttctgcatcttcgccctgggggcggcgctaagcacgctgtggcgacagcgcctgcccatcaaccgcgacacgctgcgggaacctttttccatacaggcgttcattgcgtgtccatttgtgattctgcttgcagtttcgcaggcagctggctctgcaggtggagagattgcgcatcgcttgggtgtggggatcggagcgctggcagttgcatggtatttgtgggcgcgaacgcgcaccttcgtagcactgaacggcaccgggccactccaagcatttggcttcgtactcggctcgtttctgctgacgctggcactggtcgtcgcactgacgctcgccttggttctctag

SEQ ID NO: 518125 - DNA, 660 bp, Stenotrophomonas maltophilia
atggacatgatccctcagccgattccaatggtcccgcatccgggcagattcgcggaagccaacctcgtcgggcctgatcatccgctacgtggacaggtgcagtccttcatcgccgacacctatcgtcagcgcttcgatgccgaagtccgtgacttcttgccacagttgctggcctaccgcgatacgcagggggcactagtggcggcagtcgggcttcgacacgcagacagtggcccgctgtttgtggagcactatctggatgcgcccgtcgaggccgtgctggcgcagcacctttccagtgcacctcggcgagcgcagattgccgaagtgggccactttgccgcgtcgacggcgggcatcgcacgcgagctgatcgtgcagctggcctgggtcctgcgcgccgccgaagtggattgggtgatgttcgtagcgacccaacagctgcgcaacgcgttcgtccgtctgcatctggcaccgctcgaacttgtgcccgcgcgtgccgagcgcatgggcgacagcgcgggcgactggggccgctactatgaatcgcaaccgcgcgtgatgtgcggcgatatccgcgaaggcatcgcctttcttggcggaaaggcctgctcgatagacccaatggatacggccagttccgtgggggtggccggatga

SEQ ID NO: 518126 - DNA, 1491 bp, Stenotrophomonas maltophilia
atgagtgttgatgcacagcacgtcctgcgcctgctgcagcagcatagccagccagtgctgaccgctcaggagacgctgagtgcgtccgagctgcggtctcgcgtaatggaactgacacagtggctgcagcggacaggtatcacctgcgttgccagtcgcctggacaacggccccgactgggtggtgctcgacctggcccttcgcattgccgaagtggtgcacgtaccgttgcccaccttcttctcggatgaacaagtgcagcacgcactgcagaccagcggtgcccagctgctggtgctggcggagggcgcgccgccgccatgcgggatcacggccgcaccaatggcgttgccgacactgagtgcgcacggcttaggcctggacgctcctgctggcagtacgctgccgcttggcacggcctgcgtgacctacacctcgggcagcacagggcgcccgcgcggcgtatgcctctctgccggaacgttgatggccaccgccgcgtcattggcaggtgccgcaggtgacatcgcaccacgccggcatctgtgcctgatgccgctgtcgacgctcctggagaacgtcgcgggattgtatgcggcgttgttgtcgggcgccgagatcgcgctgccgtccctgcaggagatcggttacaccggcgcagcagggctggatatgccggtgctgctgagttgcctcaatcgttaccgccccgagagcatcatcctcgtgccccaactgcttctggccctggtcatggcggcagagcagggcgctgaactgccagcatcactgcgatacctggccgttgggggaggccgggtttctcccggtcttctgtcgcgggcacggcacctggggttgccggtgttcgaaggctacggcctgaccgagtgtgggtcggtggtgtgcctgaatcgtcctggtgcccagcgcgatggcacggtggggcggccccttccacacgtgagggtgcagatcgtggacggagaaatcgtggtgtccggtgcgcgtgcactgggttatctgggcgacgagtcgctgccggaggggccgatccacaccggtgatctgggacacatcgatgccgacggcttcgtgcatgtgactgggcggcgcaagaacgtcttcatcactgcatttggccgcaacgtgtcgcccgaatgggtggagagcgaactgctttcgcacccggccatcgcgcaggccctggtctggggggaagggcaggccgacaacctggcattgctggttccgcgcatcgcgcagcagggctccggcgcgctcgacgcggcgctgtccaccatcaacgccggcctgcccgactacgcgcgcatcgcgcgctacgtcaccgtcgcgccattcagtgcgaacgccggcctgttgaccgccaatggtcgcattcgtcgcgaggccatcctcgcccactaccaggcagagatcgacgccgcctaccggcgccctgcgttcagcaccatcggagaccctgcatga

SEQ ID NO: 518127 - DNA, 861 bp, Stenotrophomonas maltophilia
atggacctgcgtggacgtacggtcgttctgaccggagccagcggcggaatcggaaggttgctctgcggcggcctggtgggcgagggcgcgcaggtcgtggcggtggggcggggccgcgatcggctgcaggcgctcaccgacacgttgccggaagggggtgtcataccggtcgttgccgatatcggcacggcggcgggccgcggcacgttgctggcgaaaatcgatgcgctatccaggccgccttcggtgctggtcgtaggccatgcaagcgccgccttcggactgttcggcgcgcagaccgaacaggcgttggagcagctgatgcagaccaacctggttggctccatgctgctgatccgcgccttgttgcccttgttggagcggcagtcgcacgccagcgtggccgttctcggctcgacgttcggcagcctggccttcccgggttttgccgcttacagcgccagcaagttcggattgcgcggcctggtcgaaggactgggccgcgagtatgccggcagcacagtcaagttccagtacctctcaccacgcgccacccgcaccgatttcaacagcggcgccgtggatgccatgaacgctgaactgggcgtttcccacgactcggccgagaaggtcgcgacggccttgttgcaggcactgcgctctggcaatccgcgcttgcagattggctggccagagcggctgttcgctcggttgaacggcctgctgcccgagctggtggaccgtagcctccgcaaacagttacccatcgtcaggcgccacgccagcagtggcaccaccgcagcgagttcttccgcatcccctcccagcaaggacacctcccatgaagcgcacgcagggtaa

SEQ ID NO: 518128 - DNA, 663 bp, Stenotrophomonas maltophilia
atgaagcgcacgcagggtaagaccatgttctatctcattcttattgccgccgccgtattggtcggggtcgctgcggctgccgaaccatcagtgccggtggcgcagatccgtgaccgctgggcccagatcaactaccagacgcccaagccgcagcgcgaggcggcgttcatggccctgtccaaacaggccgcgcaagcccggcaagcggcccccagggatgccgctgcgctgatctgggagggcatcgtgctgtccagccttgcgggcgaaaaaggtggcatgggcgcactcagcctggttaagcaggcccgcgccgatttcgaggccgcgctgaaactggatccccgggccctggatggtgcggcgtataccagtctgggcgcgctctactaccaggttccggggtggccgctgggcttcggggatgacgatcaggcgcggcagatgctgaagaaggggctggatatcgaccccaatggtatcgatgccaactatttctacggcgatttcctgcgcgatcagaaggagtggggcccggcgcaggcggcgctgcagaaggcactggcagcaccagcccggccaggaagggatgtggccgatgccggccgccggcatgagatcgaagccaagctgcacgatgtgatgggccatcttgcaaagtga

SEQ ID NO: 518129 - DNA, 675 bp, Stenotrophomonas maltophilia
atgcgcatcctcctcgtcgaagacgaccgctccctgggtgaaggcatccggaccgcacttcgacggggcgccttcgccgtggactgggtggaagacggtacggccgcactcctggctgcgcaggatggggattttgatctggtggtgctcgatctgggtctaccacgggtagacggcatcgaagtgatccgccgccttcgggcggcggcaaacccggtgccgattctggtcctcagtgcccgtgaacgcccggccgaccgtacgctcgggctggacgttggagcagatgactacctcgggaagcccttcgataccgccgagctgctggcacgcgtccgcgcgctcgtcaggcgcagcagcggacgttcgcatcccacgctggacgccggtgacctccatcttgatccggcgacgctggaggcgcgatggaaaggacggacgctggatctgacccgccgcgagttctcgctgctgagattgttgatggagcagaacgggcggccaatggcgcgagaaacgatccagaagcacctctacggctgggatgaggacgtcgccagcaacgcggtggacgttcatgtgcatcagctgcggcgcaaggtcgaccctgcgatcgtgcgtaccgtgcgaggcatcgggtatgcgctggggcagtcgccggaggcggatgcatga

SEQ ID NO: 518130 - DNA, 1410 bp, Stenotrophomonas maltophilia
atgaggtcgatgcgacgtactctgctgctgaccctgctgagcaccttggcggttctgatggccgtggctggattcttcagctatcgcgccggcctacaggaagcgggggaaatgttcgatgcccggctggtgcagtccacgcgggtactgatgggcctggtagatgagccgctaagtgatctgactgcgtttccgggcgaccccattgtgctgcatggttggcacgggcacgctgaaggcgtgggcgacgcgcttgcgttcagcgatgggcatgcctacgagagcaagcttgccttccaggtgtgggacgcgaagcagcgcctgttgctccgctcggatagtgctcccacccggccactggcttcattggtggccgggtacgccagtcccgtgatcgacggcgaacaatggcgcaccttcacgctgcagacccgtgggggccgatggttccagtctggcgagcggtcggacatccgcgaagagttggccgaagatattgcaggaggcaccttgctgccgttgttgctggcgctgccacttatggcgctggtgatctggtggagcgtcaattacgtgacccgctcgctgcagagcgtctcggaccagatcggcaggcgtgatcccgagcgcatgtcgccactggacgcggctgacgtgccgcgcgaggcgcgaggactggtgcaggcagtgaacggtctgcttgggcgattgaacgaggcactggcgcgtgagcggcgatttgtagccgatgccgcacacgagttgcgcacaccgatcagtgcgctgaaagtgcatgcagacaatgcacgcatggcgccggatgatgcaggaagggttcgcgcacaggagatggtcagcgactcagtggcgcggctggagcgccttgcttcgcagctgctcacactcaaccgcgcagaagccgtatcccgattgacttcggtgcgcctgagcctggatggcttggtcggcatggaggtggatgcgctgcgtcctatcctttccgtaaatcgacagtacatcgaactgaagctggacagcgcggagatcaggggtgacgaggccgcgctgagcgctctggttcgcaacctgctggagaacgccgtgcgctacactcccgtcggcggtcgcctgaatgtctgcgtgatgcaggaggagggcagggcgtttctcatcgtcgccgactgcggtccgggcatcgccgaggaagagcgcgatcgcgtctttgaccgcttctaccgaacgctggggagccgggtgcagggcagcgggttggggctgtccattgtcagggaggtggccgatgcccacggcgcgggcgtgacgctgggcacctcacagaaactgggcggacttgaggtgaaagtgacctggccagcaggatcagcgtatcgagccgcgagtgacagctga

SEQ ID NO: 518131 - DNA, 1443 bp, Stenotrophomonas maltophilia
atgagggatggcgcggtacacgctgggcttggggtcctgaaattcaaaggcgcagctcgccgcgacaaggtgtcggccatactgtccctcgcaggaatctcctgcatctgcctgggcctggcctggacatcctgttacctgtacttcggtcgggccgaactatccattgtgtttgttggcttgatagccgtcggcatcctcgcgctgctacgaagcaagcgcagtgacggcacatcaattctgatcgtcgcccacggagtgctggcagctgtctgtgcgattgcggccattgatgcgcccattgcaggcgtgccacgttcggttcacctgttccttctgcccttggccgcaggtgctgctttcacattcgaagcgcgcgaacgctatggctccctggtctttccgttgctttgcctggcaatgtttgcagcgttcgcgctgggggcactcgatcgaattgcacctggcatctcaccgccagtagaggttcgccactggggcgcacgcttcaacacggcgatctccatggtgcttctggcggcgatcttcggcatctaccgactggatatcggcaagcgcctgcgcctggagcgtgagctcggacgcgcagtgcgcaacggtgagatagaggttcactaccagccacaggtgcatgtcgacgccgaagtgatcggcgttgaagcactggttcgctggcggcatccgtcggcgggcctgttatcgccagactcgttcataccgctggccgaagaaagcgcattgatcaacgagatagggctggaggtacttcgacaggcctgcgaactgctcgatggatggtccgggcacgtccatacgcgtggcatgcgggtggccgtgaacatcagtccggttcaactcttgggtgaggcattcgtcccctcggtagccaagctggtcaatcaaagcggaatcaacccagccttgctggaactggaactcaccgaatccgcactatccactgatacggcagagatgatcgaccgaatgcttgatcttgaggcactgggcgtgacctgggcactggatgatttcggcacgggctattcgtccctgtccacactgcggatcctgcctattcgcaagctgaagatcgacaggcagttcgtgcaggaggtcgccacccaggagagtgctcaacgtctgctgggcaagattgttgagatctcccaggtgatggacatgagcgcgctggcggaaggggtcgagacggcggagcaacgcgacctgttgatctcgctgggctgcgaatctttccagggctacttcttcgcgccaccgatgccgctgcccatgctgtccgcctggctggaggaacgccgcggcttgtccgtatcgcactgcaccggcgagattgaggggtcgctgaggtcgggcgctgtcacctcgggcgggagcgatacaagccgccgccgcctgcgttga

SEQ ID NO: 518132 - DNA, 1059 bp, Stenotrophomonas maltophilia
atgccattcttcactgattcggacgaggttgcggttgagggcctgggggctgcccgccggattgggtggatgcgcttcgtgggcgcctcgcttgctgcgctgcccattgcatcggtgggtctggagcgcggcatgggcaggtcggcatgcgtgtttcttctggtcaatgcgctggtctggccggccattgcacagctgctgacacggcacgccgcccggcccgctgtcgtgcaattccgttgcatggttgtcgactcgctgctgggcggggcatggatcgccttcatggctgtcagcgctgtgcccagcgcgctcttcgctgcgctgctggtggcagacaagatcgcggccggcggtacacggctggcgctgaaggccacggctgcgcttctgctcggtttccttgctgcatggcttgctatgggcacgccctggcagccggccacttcttcccgaacattcctgctcagccttccgttcctgtttgtctacgggatcggattgagtgcactgagttggcgtcttgcgcgccgggtcaggtcacagaatcggcagttgcagcgactcagccgaatggatccactggtggaactggccaatcgcggctatctcatgcaccgcgctcagcagatgatcgaagcggggcgcgctctgggccgcagggattgcctgctgatgctggacgtggatgatttcaagcgcatcaacgataccttgggccatcgcactggcgatgaagcactgcgtcgtatagccgcggtcctgcgcagcgtgtcacgccctggcgacacaccgggacgcctgggcggagatgagttcgcgcttctgctcgccgggcagacgccggctgaggccatgctgctggcagagaagatcaggagcctgctccacgctgatacgggcagtgatgccacaatgctggacctgagcgtgagcatcggcattgccgccgcgcccacgacgaccagtgctgaagagtggctcgcaagagcggaccaggcactgtatgaagccaagcgacacggcaaaaacacggcgagctgcggcacggattgctga

SEQ ID NO: 518133 - DNA, 975 bp, Stenotrophomonas maltophilia
ttgacggccctgcttgaggctgagcaccagccgggaatggctgcagtcgtcgtggagcgaggacgggtcgccgaaacaggcactgcgggactgcgcagggatgccagcgccgcgcgggtcgatcggcataccgtgttcgaaatcggctctatcaccaaagtattcactgccctgctggtgtaccggctccggcagtggggctggcttgatacggacgcgcctataggacgctacgtggatgcattaccagtggcatgggagcccattacactgtcgcgcctgctgagccatacatccggcattccgaactatctgaacgagagcaactttatcgaattgatgccgatggatcctgcgcctagagaactattggcaatggtcgggaaagcacctctcgagttcgccccaggaacacgattcgcctattcgaatacgaactacatcctgctcggccttgccattgagcgggtgacgggcatggactactggcagttcctgcaggacgaaattctggggccgctggacatgcgcgatgccggacctcgtcgcaccggcgaccaccgcagcattgcccaaggacacctctaccaggatggacattggctcgatccgcccatcaccgcaccgggctccgcctgggctgctggagggctgctcgccagcatcgacgacatggcacgtttcgcggtagcgctggaccggggcaagctgctccccgatacattgctgcgtgagatgtggcgcggcacacgccttgccgacggtactacagccagctggggcgctggctgggagttgactgaggacggcgacgtggtggggcatggcggcggaacggcaggctttacgggatacatccgacacgttccttcgctgcgacgaaccgtcgtagtgcttgtcaatcgcgccggagacatcggcccgcagggcatcgctgagcgcctggacctggggtcgcgcgcaagcaagggctga

SEQ ID NO: 518134 - DNA, 636 bp, Stenotrophomonas maltophilia
atgaacaacgtacttgtacttggagcaagtggacagatcgcccgttgggcagtccagatgctaggccagtacccggaggtcgagcagaccttgtatctgcggaacccaaagaacgtcacaggcagcgagcctgccaacgcgagagtggtcatcggcgacgttctggacaagaagggcttggcgctggcaatgcacggtaaggacattgtctacgccaacctcgccggcaacgtggacaagcagaccgaaaccatcatttcggtaatgaagtcgcagggtgtgaagcgcctgatcttcgtcaactccctggggatctacgatgaggtgcctggtgcctttggcgagtggaacagggaagagattggccagtacctgccgccgtatcgaacctcggccgacctgattgaagcctcaggcctcgactacacgatcattcgtgcggcgtggttgaccgacgaagatgaggttgactatgaaacaaccgagaaggacgaacccttcaagggcacggtcatttcacgcaagagcgttgcggatttggttgtgaagatcatcgagaaccccactctccacagcaggggcaacatcggcgcaaacaagcccgggaccgatggcgacaagccttacttcatgtaa

SEQ ID NO: 518135 - DNA, 972 bp, Stenotrophomonas maltophilia
atggcacgcatcgaacaagatcgccttcgagaggcgatgcagcagcttgccgccatctcgccggaagaccacaacatggtcaaggccttggcgggcatcattcgccccctccggagcttcctgcataaggatccttccgatcacggcatgaccgagtgggaggatctttcgatcccgtccgaggatggtacgccacttgaggcttggctgattccagccaagggcggaatgagcgataagctgatcatcttcaatcacgcctcgcccatgtgtcgctccggcttcccgggccacttcgggccgccgtggagcaacgtggatgatggcgagatcgacttcgtacttcagtacaagcacttgaccgatgctggctacaacgtactgacctacgatctgcgcaatcatggcaacagctcggctgccaacaatggcgtcagtgggcttggccagtgggaatggcgcgactgcgtgggcgtgaagcgctttgtggatgcgcaccctctgcttggaaagatgaaggtggggctcttcagtcaatgcctgggaggaatctcccagtacgtcgccatctcaaagcacccggaactgtttgagaacgttctgtgcatgtgcagtccgatggttcccactcccgagggcttggtgaaccgggccaccgagcgaatgggaatcgagcgctatcgggagcttgtcgatcttgagttcatgaagttggggggcttcccagcggctgcgatgagcccccgtccctatgccccagacgtgcagatgccggttctgatgtggcagctgaccgatgacgccgcggcgcccaacccgcgggatgcccaggagacctttgacttgatcggcagcgccgagaagcagctcatctggatcgatggtacgtcgcgtcgcttcaaggatggctacaactggtttggcaggcatccagaacttgttcttcagttcttggataagcacatgcgctga

SEQ ID NO: 518136 - DNA, 927 bp, Stenotrophomonas maltophilia
atggaaagcgtaaagatccgcaaccccgacatgtactgggatattgctgcagatatccacttcccccctggcttcgacaagtccaagcgctaccccaccatcatcagcgcgcaccccattggcagttgcaaggaacagacctccggcaacgtctacggcactgcactggcccaggaaggctttgttgtcattgccttcgacgcgagcttccagggcgccagcggcggtgaaccgcgtttcattgaggatccgacgttgcgagtggaggacttccgccacgtcgtcgactacctcgtcacgcttccctacgtcgacgacgcacgaatcggcgttcttggtatctgcggtggcggtggctattcaatcaacgccgcgatgaccgagcgcaggatcaaggccgtcggcaccatcaccggcgccaactatggccgcctgttccgcgaaggcttcagcaacttcgacccgattggtgcattggaagcgatcgccgctcagcgcaccgctgaaatgcgtggggaggcactgcgggttgatgatctgttgccgccgtccgtagaggcgggccgccaagccgggatcaaagagatcgatgtccttgaggcaacggactactaccgcactccacggggtcagaagccgcacggtctgaatcggtcgttgttctcccatcagggagcggcagtgggctgggatgccttccatctggccgaagttctgctgactcagccactcatggttgtcgtgggcgacaaggtcggtggtttcggtgcatatcgcgatggttgcgagatcatcggtcgtgccgcctccaagaagaaggagctggtcgtcgttgaaggctggtctcactacgacctctacgacaagcctgagccggtcggccaggcactggccaagctcgtcccgttctacaaagacaacctgtaa

SEQ ID NO: 518137 - DNA, 909 bp, Stenotrophomonas maltophilia
atggatccctccctgctccccgccttggcgtggttcacccacatcgccacgcatcgaagtttcaccaaggcagccaatgaggctggcgtatcgaaggcggctctgtcacaaagcctcaaaacgctagagcggcagctggacgtgaagctgttgtaccgaacgacgcgtgatatgtcgctcacggaggatggtcaacgtctctttgacagcgtcaacccggcactgggaattatcgagcgctcacttcgggagctgagcgcggcgggcggggcgccgtcaggcctgctacgcatcagcacgtctcacgtggcggccaaatacctgatacagcctcatctggctgagttgggcaggcgctatccagagctcaagctcgagctgatgatggacgatcgcctgtccaacattgttgccgaaggtgccgacgcggggatccggctgggtgagagcctggccgagcacatgatcgctgttcccatctcgcccaagatcgagctggtggttgcaggatcaccagcctatttcgagcgcaatcccattcccagaacccccacggatctggcttcgcacaactgtgtcgggttcaggagcatggccactggagcgattcacggctgggagttcaccagcccggagccggagtcccacgagttctcggtttcaccccaggggtcgttcatcaccaacgatgacgaagccatgatcgatgccgcgctgcagggcgtgggcctggttcagcacatggacatcgcgctccgccagcaccttaagtccggacggctggtcccggtgcttcaggactggtcgcggccattccctggcttctacatctatgccccctcccgagatcagatgccggccaaggtcagggcgctgatcgatctgctggtggaaatgcgatcggcatag

SEQ ID NO: 518138 - DNA, 504 bp, Stenotrophomonas maltophilia
atgaccagcagcgatacccagccctcgatcaccgtaagagacgcagcagaacggctcggcgtgaccccgaggacgctgaagtactacgaggagcgtggcctggtcgttccgcagcgcagcgacggccgctaccggatgtacagcgaggaagatctcgcgcgcatggcgcggattcttcgcctgcgttcccttggcttctcgctgcagggcatcgccgagatgctcaagcgtccagtggagacgctcgatgatggcagcacgatctacgcggacgcctcgcttcgcgagatatcccaaggcctcagtgagcagatcgcggccctggatgcgcgcatcggcgcggcacggaaggagctgaaagaggccgaagcactgcgcaccgaactaaatgacgatctggactacgtcaacgagcgactctctggccagagccaagacgcaatgcgcggcaagcggattctcgcccggagcaagagggcggcgggcgaaggtcaggagagctaa

SEQ ID NO: 518139 - DNA, 1557 bp, Stenotrophomonas maltophilia
gtggacgctgctctgtctcaggacggggattcacgagggcgcgagtccgtctcagccttgatgacctgggccctcgctctgaccgtggcgctggattacttcgaccacgccgctttcacctatttcgccagccacatcgcaggtggcgtcagtgccagctcatctgagctggtatgggcaagcagcgcatacgccatcacctccgtgctgggaatcgttcagcagcagtggtgggtggaacggctgggctaccggcgatacatcaccgcttctctgctcctctttgccgtgaccgccgcgctagcgggcatcgcggagtccgccttccaactgttgctcgcccgtgggcttcagggctatgccatgggccccatgctcagcgcttgtcgtatcgcactgcagcggggcacagagggtgcccaacgggcaaaaggactgagaaagtttctctctctgatccttctgggaagcgcacttgcaccactggtgggcggctatctggtggtacaggaaggctggagcgcattgttcatcgcaacagccgtcgctgccataccggttgccatactggcctacgtcgcgctgcctgacctgggcgtccttccccaggaggagcacggtgagagccatgccggaccttacatccttttcgccgttgccatctccgcgctgcagatctcgatgcagcaggtgcgattcgagttgtttgccagttcgccggcactggtcgccagcgcgctggcagggatagcagcactcagttggttcgcgcatcaccagtggcatcatcaaaggcccctgctgcggctgcatgccgtcaggcagcagaccttccgcaccgggttggtgatgtatgtctgcttctactacgcaaacaatgcgttgaactttctcacgtcgcgcttcctagaaggcggcttaggctatcccgtcgacaaggctggccagatcgttggcgcaaccgcactgctagcgctgcccctggtcttcatctacttccgtgtgtcgccgctgctgccacggaagaaatggctgatcctgcctggctatgttgtggcattcctagtctgcgcctggttcaccgcgattcccccgaacacaagccaagagtggctggtgccacctttgttcttccgcggcgcgctacttctgaccatggcgctacccgtcgcgtccgtgactttcagcatgttcgaggcggatgactacagccatgcctacaggctgaagaacgtcgtcaagcaactaacgctgtcattctcgacggcaacgttcatcgcgctcgaacagcatcgatcccagcttcactactcccggcttgcggagaacgtgagcatctacaacccgaacttcaacgaacatctggaccgactggcagcaagcctggttgttcatagcggtgatctggcaaaagcccggatggatgccattgcacagatctatcgcgagctgatgcgacaggtcgatttcctgagcatccaggacggctacgtgctgctggcaatcgtcattgcattctcgggagtctttgccttggcgcagagatccatccgctaa

SEQ ID NO: 518140 - DNA, 1056 bp, Stenotrophomonas maltophilia
atgcgcggaatggtattcaagggaaactgcgaagtggaagtaatgaacttcgcagatcccgtgccgggcccaggtgaggccatcatcgagatcaaggcctcggggatgtgtggcacggatcttcactactatcggcatggcatggccgaagccctggacatgctcggcatgcgcagcaggatgacgtcagacgtcatcatcggcgggcacgagccctgtggcgtcatcgcagagatcggcccaggcagcgaacgcggctcgttccgcaagggtgatcgggtcatcgtcttccactacgacggatgcagcacctgcgagcactgcaggtcgggatggactcagctctgcgaccagggcgccaagatctacggcgtgttgggtgatggcggacacgcgaactacatgaaggttccggtgacatctctggtgcacctgcccgccgatgtcagcttcaagggcggtgcggcgatcgcctgtggtaccggcaccgcatacggcgcgctgcaacgcctggatatcagcgccagagacacgctggccgtgtacgggctgggcccggtgggcctttcggtagcgcagatggcggctgccatgggggttgaagtcttcggtgtggacatcaatgcggaacgggttgcccagtcaaagcgcttcggcgtcgcacatgccatcgacgcaagtacttcagaccccatcgaagagatccacaagctcacgactggccgaggcgtgtcctgctcgatcgattgcgccggcgggcctattcctcgcgcccaggccattcgaagcacacgcacctggggccgtactgccctggtggcggtaggcggtgaactgaagatcgacgtcatgcgggacctgatcggcaagcagcggaacgttatcggctccttcacgctgtccgagattgccatggacgaatgcgcgcgcttcatcgcaagccatggcgtgaaggtcgacgacctgttcaccagcgaatggcgcctggaacaggcaaacgaggcctatgccgacttcaacaagcaagccagtggaaaaggcgtgttccttttctaa

SEQ ID NO: 518141 - DNA, 1458 bp, Stenotrophomonas maltophilia
atgaaacgcactatcgacctcaagcatcctgatcgcctttacattggtggccagtggatcgcacccgattcgaaggaaacgttcgacgttttggactgctctaccgaagacgtgattgcatcggtacccaaagcgaactctgtggacatgcagcgcgcagtcgatgcggcacgtgatgccttcgacaacggaccgtgggcgcggatgacgccgcaggagcgggccggctacctggagaagattgccgcacgcctggaggcaaggaatgatgacttcgcgcgcgtctggtccctggagaccggcatcgtcttcaaggtcgctcagcctcgcatcgggctgttcatcagcggcgcattccgccagtacgcagagatggcgtcgacgttcccatttaccgaagaacaccgctcggtgaccggcaatcttggctaccgggtctacgagccggtaggtgtcgtcgcggagatcattccgtggaatggtccggcaggcctgatggcctacaagacggcccccgcactgctggccggctgcacgttggtaatcaaatcctcgcccgaagccccttgctcggcttacatgcttgctgagatctgcgaagaggtgggtttgccgccgggcgtgatcaatgtggtcactgccgatcgtgacgtttccgaggaattggtggccaacccggctgtggataagatcaccttcactggctccaccggcgccggcaagcgcattgcagcggtcgcctcggagcgcgtcgcacgggtgacgctggagctgggtggaaagtcgcccgcgatcatcctggatgactatgacatcgaagaggctgcaaagatccttggcaactcctacttcacctacaacaccggacagatctgccacagcttgacccgcatcgtggtcccgcgagcaaagcatgatcagatggtggaggcgcttgccaagatcgcccggggaatcaagttgggtgatccgcttgctgagggcactgggtctggaccgctggctagtgcacgccagcgcgataccgtccaacgcttcgtagaccagggtgttgccgaaggcgcaactctcgccgcgggtggcaagcggccggaaggaatcgagaagggcttcttcttcgagccgaccgtgttcggcaatgtcgacaacatgtccaccatcgctcaggaagagatctttggaccggtgctctgcgttattcctgccaatgacgaggaagacgcaatgcggatcgccaatgagagccgcttcggactcaatgccgcggtgttcacaaacgatccgaagaaggccttcgaagtcgcaaggaggattcgtgcgggcaccgttggccacaatggtccgcgtaccgatttctctatcggctttggcggcttcaagcagtctggcgttggccgcgaaggcggcgttgaaggactggtcgccttcatggaatcgaagaccgtcgtaatggcttga

SEQ ID NO: 518142 - DNA, 429 bp, Stenotrophomonas maltophilia
atgttctttcaggacaacgcaaagaaatccttatgcccgccaccgcgggaactgcacatctattccaagaatgagctaatcatgactacatcatcttcatcagaaagcaccttgccttcggccgcacaggcggcatggggcgatctcgccccggcgctggtcgactataccgaccgcgttctcttcggggaactatgggagcgaccgtgcctctctcctcgagatcgcagcctgatcactgtgtcttctctggtcacgctctatcgcatcaacgagcttcccttccatctgagcaaggcgctagacaatggtgccacccgcgaggagttggtcgagctgataacccatctcgcgttctactcagggtggcctacggcctccaccgccctgggtgttgcccgtcgcgtcttcgaagaacgtggggtgtga

SEQ ID NO: 518143 - DNA, 900 bp, Stenotrophomonas maltophilia
atgcctccgaaagctaccactgccgccgatttttctgcgattctgacagttcgccagctcacgggcgagattgatacaagacagtggtttcacgctgaccacgatgattccgatgtatcgccgatcgatcagttcattgacaacgctgtaagccttaacaagatgtgggtaggcacaggcggggacgcttttttgccgcgggaactggggatgctgttgatcttgggctatgtttcagccgtcgaaggattctttcgagcgttgataagacgcatccttatgatcgacccctactcacagttgcactgcgaaacgtacacactgacatacgcagcagcgcgtcatcagcggcagagccttcttccagaggctctgctcgaggaagtagtgttctctggaaaaaaacaggtaattacaaacatccaaaagttcttgaactggggcttggctggaaacaggccgttcgaggagctcctcactcgctacaatgcggtatgtgaactgcggcactgttgtgtacatcgcttcggtaaacttggcacgaagaatgcggtcgagcttgggcttgagagccataagaagtaccttgaaaagccattgttgcttacccgtgcgaacatggaatccatcgtcgacttgctcttcgttctagttaagtctcttaacaatgaggcgtttcgttttgttctaaaccgcgcagcaacttccaagctcaaaggcgcggaggcggtggggttaggttggacttggaacaaggcaagggataagaagctttattcagcctactacgccatattcgcgagtcagcgggacgccacgccctctccgcctatggaggagatgtatgagcgttacagggcaacgttcaaaaacgttggacggcaaaaaggcgacagatag

SEQ ID NO: 518144 - DNA, 1722 bp, Stenotrophomonas maltophilia
atggcagatagaattgacggtgttgagctcgaatctgccctccagcagcgggcagactacattccaatcgaggatttgttaaacgaaacctcgcagcaaggtgatctgttcagcagagtcgctcaggagctgacaaaccgcggattgcggaccatcgtgggcccgcgtgggtgcggaaagacgcacatgatgcgtttcgcttggctgaagtgtcgtgatgacagctctatgcctttcgctgtgtacgttagtttcaatcgctacttccgacttgagcccttactttctagccacgcgagtgcgcttggacagtttcactcttgggtcctagcaaggatcattttggctgtagtcgatagcgcccaatcctggcagccagaagtgtcggtcgaacttcctccgccgttgacggagggggggcttcagagtttcgtgtccaggacagagcgcaacctgccacttgacgacgacatgaaagttactgctgacgggctttcaattgagcgcgtgcaagcattaattgcatccgctcgtgcgcaggccgggcggaagttcagtgtattgctaatggacgatgcagcactgacgcttacccctgattatcttattgagtttcttgacattgtgcggtcgctgaagtcaatagacttggcgccaaaggcatcggtgtatcctggtacaaccgaggtgagtccgaagtttcaccagggccaagactcggtggcaatacccgcatgggtttgtattgaagatcctggatatgacaacgtaatggatggcattgcccatactcgcgtcaaggggtttcagtccactcctctggacgtccgagttatgttgcgattcgctgcatttggaattccgcgggcttacttaactatgttggacgagtttcttcgcggcgatcaccgcacgacccaacagggagtaacgcgaacgattcaggagcatcttgatgcgagattggcggagttccgctccctaggaaagaaggttcccaagcttgcgtccctcgttgaggccggagaaaaagtgctcgatggaatggtccgcgaaattaagtcgttcaatgaaggggccggggggaaagggcatcgccagctcacagtcggagttgtagaaagtgaactgacgcccgttgtagagcggatgtttaatttgttggttgaagcggggctcacttacgacaattctacagttaagcatggcactccttcacgaatataccgccgatatatcccccatgcagcgaacctgctttccattagagcaatcggcggtggtgaaagcggcggcagcattcgccaaactgttgaggcgattcggttcaagtccgctaagcatccggtgagaaaaagccttcagcgcattgttcccgaggtggattttgggagcttgagcttatcgcttccgaaatgtgcttcatgccacgcccctcgaatgacggatagtcaacgcttctgtcacaactgtggacagcagctcgttgatgcgtcgaccttttcgcagtgcctggaaacacctatagcccaggttccgggactcacagtttggcagcgcgcccagatcgacgagcatttgccaaacttgaagacgttgcgagactttttggctaagcaagatccggcggccgacctgcttacagtgcgagggtttggacgccgcagaaccgcgagaattgtggatgtgcttaacggtttcgtcgacgagtatctgtcttaa

SEQ ID NO: 518145 - DNA, 1209 bp, Stenotrophomonas maltophilia
atgatgcttgggagtaggcaatcggaccacctggggcggtactacacccatgggaaggtcgcggcgttgttggtcacatcgatgaatgtagccgctcccaagaccgtcattgacctcggtgccggcgacgggacacttgtcgatgcgggtgcgaagctctggagcagggctcggtttgttaccgtggatatcgacgacaaggcagagagcagtcgccttcctgtaacgaggggaggcgcattccgccacttcacgggcgatgccttggatgttggcctagatcatcggctcggccttcattggggaaaggcctgtgttggcttgtgcaatccgccctatatcaagcctcgctggcgtcgccacttcggcgaaatcatggaggaagtaggccttagtcacgtcctgccacatgcggaggacattcctgcggatatccttttcatcgctcagaaccttcgttttctgaaggatggcgggcggcttggaatgatcattccagacgggcttatttccggcgagcgttttatgcgttttcgccagtcattgatcgaaagccattcgattgaccaagtcatcgagttgcctcggaatatatttcgtcgaaccgaagccaaggctcacatagtcattctaacgaaagcggcaacacaggtctcgcacattcccgttcggcagctttcgtcgaccggtgagttatcagatgcgatgacgatatcgccagagcgggggcttcttcgcctggattatggataccattcatcagtgaggccctcgcgcacttctcgggttgttcggttgtcaaaattaatagcatctatctcgcgcggcacgctctcatcgcgaactcgcaagaatgtcggatatccggtcttccacacaactgaccttacggccggaatgactgaagtgcctagcgaattcgcactcagtaaggaattccagaaagtggtggctggtgtgacggcgcgtgcgggtgacgttctggtggctagagtcggcagaaacctgtccgataaaatatgtcgggttgactgtggtgtgattgttgtatcggactgctttctcgtgcttcgaccgaacgcgggcgaggaagataatctatttagggttctgaatagtcctcgtggccgtgcggccatcgatgcaattgcgcacggcgtcggggctaggttcatcaccgcaaatgctttaatgacaatatgcttctga

SEQ ID NO: 518146 - DNA, 477 bp, Stenotrophomonas maltophilia
atgcaggacatcaattcgttgctcgacgcatgcaaggtcgcggccggggcaagcagcgataaccagctcgctgccgcccttggggtaggccgatcagcgatcagcaactacaggcatgcaagggcgctacccgacccggtggtgtgcgcaaccatcgcagggttgagcggaatcccgctggctcgggtgcttgggatcgtcggtgaggcgcgcgccatcagccgagaagaaaaggcggtgtggcggaagctcgcagcgaccgctatggcgttgtgcctggcagttggctttgccctgccccacaaggctcaggcagcggtcatgggctttgataagtccacggtctatacattatgcgaaatgctgtatccgtcgagtatgggcctttgtcggctccgtgtggcaatggctgggcctgtgctggggcggctcttgcctgcggcctggctcccggccaaggatgatgtcgcggcatga

SEQ ID NO: 518147 - DNA, 1527 bp, Stenotrophomonas maltophilia
atggcacaagtcatcaacaccaacaccatgtcgctgaacgcccagcgcaacctgggcaccagcggcgccaacctggccaccaccattcagcgcctgtcctcgggcatgcgcatcaacagcgccaaggacgatgccgccggcctggcgatctccgagcgcttcaccacccagatccgcggcgccaaccaggccgcccgcaacgccaacgacggcatctcgctggcacagaccgccgaaggcgcactgggtgagatcggcaacaacctgcagcgcgtccgcgagctggccgtgcagtcgcgcagcgccaccaactccgattccgaccgccaggcgctgaacgccgaagtgcagctgctgaagcaggaaatccagcgcgtcgccgaacagaccaacttcaacggcaccaatctgctggacggcaagttcaccaaccaggccttccagatcggcgccaaccaaggccagacgatcaacatctcgcagatcgccaacgccaacatcagcaagctgggtaactggacgaccgcttcccaggcagcaactgcgactggcgacgtgcccgtgggcggtgccaaggaagcggttgcaagcaccacgaccctcgctgcgaccaactttgctgatcctgccgacgctggtccgtacacctatgccgagtccactgtgactgtcaatggagttgacgtcactgtcggtgcagtcagtgaaaccgtccaaggtgatgcaaaggacgccttcatggccaatcttgcgacggcaatcaatggtaacgaatctctgaaaagcgcaggtgtctccatgaccgctgcgggtgtaatcagcaatagcggagctgccttcaagattacgggcggtcccttcacaaccgcctttgacgttaatgttgcggccactgaagccaaagctgccgatttctcgaccggtgtcacctccggtcagctccagatcagcaagaacgacggctctggtgaatatgttgacatcaccgtcggcggcgcgaagaccgctggcgatcgcagcaccgcactggtcaacgccatcaatgcaaagacccacgagacgggtgtcaccgcctcgctggtggaaggcaagctgcagctgacctcggaaaaggccgacttcgaagtgaagagcagcctgacccccgacaagctgaaggatgctaccggcctggccattggcaccgccaagttcacggcaggcaaggccgctgaaggctttgccgatctggacatctcgtcgaagggtggtgccgacaacgccatcctggcgatggacgcagccctgaactcgatcaactccgcccgcgccgacctgggtgcaatccagaaccgcttcacctcggtggttgcgaacctgaacacctcgtcggaaaacatgtcggctgcccgcagccgcatccgcgacgtggactacgcttcggaaaccgccgagctgacccgcaaccagatcctgcagcaggccggtaccgccatgctggcccaggccaaccagtccagccagaacgtgctgagcctgctgcgctga

SEQ ID NO: 518148 - DNA, 126 bp, Stenotrophomonas maltophilia
gtgctcggctcgctcaaggcggactggaaggtcaagatcaacggcaacggcaacggcaacggcaacggcaacggcaacggcatccacgcatggcgtggacctactgggtgcagctgtggcatttga

SEQ ID NO: 518149 - DNA, 678 bp, Stenotrophomonas maltophilia
gtgcatcgttgtgagaacgcttccacaacgggcgttgcgcagagtcaggaagtttccagccaacggcgcagcccctcgtgggtggggtgtgttgcggaaagcagaagccgccgctgggccggtcgggttgggtacgcgggggacgccgtgaatccgtccctggaggcttggcagccgcttgctcttgcgcgcagtcctgcacgcgcggcaaggccagggttgggcgtcctgcccaacccgcccgaggcatgcctcgggcccatgcggctgacacccccgcatacccaacccgaccgccctctgacagatttcggtggtctgccacccacggagaagaaagagaagatcacaagcgggtcgcgcgctgcgcttgctcgagagccgagcatggctatgccggtcgtcctgaccggcacccttcgggccgtcgccgtgggcgacgttggcagcggctcctgccgctgccttcggctctacacaaagcaaggaagcgacccccaggccgcttttgcttttgatcttctttttcttctccgtgggtggacgcgcacggaacctgtccgtggccgggtagatgggctgcgcaggggcgtgagccgcatggatgcggcgaccgagcttacatggacgtacttgcagcgtcccctgcgcagcccatctacccggccccacccatga

SEQ ID NO: 518150 - DNA, 879 bp, Stenotrophomonas maltophilia
atggtcgacgtatgcgaagccctagatcagcttacgaatgagtgccgtcaacatttggcagatcttccacaattgcagtcctgtctggcgagactggagcattctataggcagaatggaagatcgtgcatcgatacctcgctacacgattaagacagttcatgcgcaaacctcgttgcgagccatcgtagaaggcctgactaccgcatttgaggctatcgcggcgcgacgttactcggctgctgaggcactttgtcgcgtggtcttcgagcaaacagtgaaccttatgttcgttctccacgacaatgatgcgtcacgcgcaaagtcattgctcgctttccatcttgaggatgctcgtcggagagcgacgcaatggcatagagcggcggaacgtgcaaacaactcatctgcacaaaatgcggctcgaatgaagcttgagcatattgaacgcctcaaaacaagcactgaaactctcagttcggcgagtttaaggccctggccaaacgcgcgcgatcggttttcatcactcggtttggaactgcactactacgaactttttgcatcagcatccgattcaatccattcgctttccgaagacttcttcagcgctgtgatgattgagtgcggaccagacatacttcggaggaaacgcaggatcgccagcgacttcgagcgcggatcattctcgatttatctgggagcacagggcctacagctctttgctaatgcgttcctccatctttcatttgaactgaaagaccctgcatcccaagaacaagcgcaaacggcgttggagatggtgcaagagatagtcagcaagcatgaatcggatcatgcaggtcattggaaccagctccgctcccctcccgaagacagctag

SEQ ID NO: 518151 - DNA, 1581 bp, Stenotrophomonas maltophilia
atgaccagcaacgaacaacgcgccatcctgcgaagccagatatggaaaatcgccaacgatgtccgcggcgcagtcgatggctgggatttcaagcaatacgtcctcggcaccctgttctatcgcttcatcagtgagaacttcgccaattacatcgaggccgacgacgacagcatccagtacgccaagttgcccgacagcgtcatcacttcggacatcaaggacgacgccatcaagaccaagggctacttcatctatccaagccagctgttcgtcaatgtggccgccggtgccaacagcaacgaaagcctgaacaccgacttggcgcgcatctttgccgccgttgaaagctctgccaatggttatccatcagaacgtgatatcaaaggtctgtttgccgacttcgacaccaccagcaaccgcctcggcaacaccgtagccgacaaaaatagccgattggccgccgtactcaagcgtgtagccgaactcgatttcggagactttgaaggaaatcatatcgacctattcggcgatgcctacgagttcctcatttcaaactacgccgccaatgccggcaaatcaggcggcgagttcttcactccgcagaatgtatccaagctgatcgcgcgactggccatgcacaagcaggccaacgtcaacaagatctacgaccccgcctgcggctccggctcgctgctgctgcaagccaagaagcagtttgaagaacacatcatcgaagacgggttctacggtcaggaaatcaaccacaccacgtataacctggcgcggatgaacatgttcctgcacaacattaactacgacaagttcaacatccaactgggcgatacgctgcgcactcctcattttggcgacgagaaaccctttgatgccatcgtttccaacccgccgtactcggtgcagtggatcggcggcgacgaccccaccctcatcaacgacgaccgctttgccccggccggtgtgctgccgcccaagtccaaggccgacttcgccttcgtgctgcacgcgctgcactacctttcggccaaggggcgcgccgccatcgtctgcttccccggcatcttctaccggagcggcgcggagcagaaaatccgccaatatctggttgacaacaactttgtagaaacggtgatcgcgctagcgcctaacctgttcttcggcaccaccattgcagtaaacatcttggtgctgtccaagcacaagaccgacaccaagacgcagttcattgacgccagcggcctgttcaaaaaagaaagcaataacaacattctcacggacaacgacgacgagaagagtctcggtcatatccaacagatcatgcgggtgttcgacagtaaggcaaatgtcgagcacttcgcgcgatccgtcgaatacagagagatcgcagaggagaagggctacaacctctcggttagcagctatgtcgaagccaaagacacccgagaggtggtggacattgcccagctcaacgccgagctaaaaacctccgtggccaagatcgaccagctgcgtaaagacatcgatgccatcgtcgccaagatcgagggtgaggagcagcaggcatga

SEQ ID NO: 518152 - DNA, 1170 bp, Stenotrophomonas maltophilia
atgagcagcgtgaattttctggaaaagctgctggatggggtagaggtggagtggaaggcgctgggggacgttgcggatattggtaccggaaactcaaatcgtcaggacgaaaacgataacggaatttacccattctatgttcgttcaaaaaatatcctgaaatcagacacttttcagtttgatgaaacagcgatagttattcctggcgaaggtggcattggcgacatatttcactatgttcaaggaaaatacgctctgcatcaacgggcatataggattcggcttacatcagacatcgtgaatacaaagttcttgtatcacttcatgtcttctaattttaagaaatatatcttaatgaagagcgtcggggcaactacgacttcgattagaaagcctatgcttgaggatttccatattcccatcccctgcccagacaatccaaaaaagtcgctggaaatccaggtcgaaatcgtccgtatcctagacgctttcgccgaactgaccgccgagctaaccgccgaactgactgcccgcaaaaggcaatacaaccactatcgagatcagttgttgaaattcgaggaaggcgaggcagaatggaagtccctcgaggaggtcttcgatatacttgcaggtggtgatgcacccaaaaatgcgctatccggttcggaaacagaggagtttaatatccccatcctgtcaaacggcataggcgaaaaatcgctatatggctggactaacaaggcaaaaatcgataagccgagtttgactatatcggcaagaggaacaatcggctggacaagttacagagataggccattttttccaatagtgcgcctgctagtattgacaccgaaggtcaaactaaatttgaagtatgcctactacttcatgaagaccattgagaatgattacaagatccccgaggcgggcatacctcagcttaccaagccgatgcttaaggatataaaaatcccgctgccatgcccaggaaaccctgagaaatcgctcaccgaacaggggtgcatcgctgcggccctggataaattcgataccctcgccaactccatcaccgaaggcttaccacgcgaaatagaattgcgccagaaacaatacgagcattaccgcgatcttctgctgagtttccccaagccggaagcggtagaggcttga

SEQ ID NO: 518153 - DNA, 1143 bp, Stenotrophomonas maltophilia
atgagcaagacgctgaccgaaatcgcccagcagctgaaagacgccaacaagaaagtgcagctgatctatgccttcaacggcacaggcaagacacgcctgtcgcgtgaattcaagcaactgattgtgcccaaagccaatggcggagagggcgacgaggaagtcgatgcaccagagttatcacgcaacaaaatcctgtattacaacgctttcaccgaggacctattctattgggataacgacctggcgggtgataccaagtacaaactgaaagttcagcccaattcttataccatctggctgctcacgctactcaaaaatctgggtcaagatggaaatatcatccattatttccagcgttatgcaaacgacaagctgacgccgcatttcagcaccgatttttccgaggttaccttctccttggagcgcggtaacgaggagcattctcctcatatcaagctttccaaaggcgaagaaagtaatttcatctggagtattttctacgctctgctagatcaggcggtgacaattctcaatgtcgtcgagccgggagagcgtgagaccagcgcttttgaccagctggagtatgtgttcattgacgacccagtcagctctctcgatgaaaaccacttgattgagctggcagtcaatctggccagcctgatcaaatcaagccagtctaatctgaggttcattgtctcgacgcacagtccactgttctacaacgtgcttttcaatgaactgaatggcaagacctgctacatgctggagcgtcttgaagacggtagctttaccctcactgaaaaacagggcgactccaacaagagcttttcctaccatcttcacctgaagcaagccattgaacaggcgattgctgacaacaaggttgaacggtttcatttcaccttgctgcgcaacctctacgagaaaacagctagctttctcggccacccaaagtggtccgagctgttgcctgatgacaagcagctttatttgagcagagtcctcaatttcaccagccacagcacgctatcgaatgaagccgttgccgagccaacgcccgcagagaaggcgatggtcaaactgttgctcgaccacctgaagagcagccatcgctactggcaacaggaagaacaaaatgcttga

SEQ ID NO: 518154 - DNA, 3102 bp, Stenotrophomonas maltophilia
atgcttgagtgcagcaaggtcatcgccgaatccaacaacttcattgttctggataaatatagcaaagaatggaaggtcgcagaaagctaccagagcgaaggcgatctggagcgcgagttcgtccaggatttgcaaaaccacggttatgaatacctgtccagtccgaatgcgcccggagccttgctggcgaacgtgcgtgtgcaattgcaagcgctcaacagcgtgcagtttgccgagggggaatggcagcgctttgtcgagacctttctggacaagcccagcgatggcatcgtcgaaaaaacccgcaagattcatgacgattacatccatgacttcgtgttcgatgatggccgcatccagaacatctacctgctcgacaagaagaacattgcccgcaacaaggtgcaggtgatcaagcagttcgagcaaaccggcagccatgccaaccgctatgacgtaaccgtgctggtcaacggcctgccgctggtgcaggtggagctgaaaaagcgcggcgtggccatccgcgaggccttcaaccaggtgcaccgctacagcaaggagagcttcaacagcgagcattccctgttcaggtatttgcagctgttcatcatttccaatggcaccgacacgcgctacttcgccaacaccacgcagcgcaacaagaacagcttcgacttcaccatgaattgggcgcaggccgacaacagcccgatcaaggacttgaaggacttcaccgccacgttcttccagaagcacaccttgctcaatgtgcttctgacctactcggtgttcgatgtcggcaataccctgctggtgatgcggccctaccagattgctgcaaccgaacgcatcttgtggaagatcaagagtgcctatcaggccaaacactggaacagcaccgagggcggcggctatgtctggcacacgacgggatcgggcaagaccctgactagcttcaaggccgcgcgcctggcgacggagctggagtttatcgacaaggtattcttcgtggtggaccgcaaagatctggattaccagaccatgaaggaataccagcgcttttcgcctgacagcgtgaatggctcggacagcacggcgggcctgaagcgcaacctggacaaggacgacaacaagatcattgtcacgaccatccagaagctcaataacctgatgaagagcgaaaacgacctaccgatctacggcaagcaggtggtctttatcttcgacgagtgccaccgcagccaatttggcgaggcgcagaaaaacctgaagaagaagttcaagaggttctaccagttcggttttaccggtacgccgatcttcccgcaaaacgcgttgggcgcggacaccaccgccagcgtgttcggccgggaactgcactcctatgtcatcaccgatgccatccgtgacgaaaaggtgctcaagttcaaggtggactacaacgatgtacgtccgcagttcaaagccatcgaaagcgaacaggacgaaaagaagctcagtgcggcggaaaaccggctggccttgctgcacccagatcgcatccgcgaaatcacccagtacatcctgaacaacttccggcagaaaacccaccgcctgcaagcgggtgccaagggcttcaatgccatgtttgccgtgagcagcgtggatgcggccaagctctactaccaagccttcaagaccctgcagaaggacagcgacaagcctttgagagttgccaccatcttctcgtacgctgccaacgaagagcaggacgcggtgggcgacatcgcggacgaaggctttgaagtctcggccatggacagcagcgcgaaggagttcctgagcggggccgttgccgattacaacgcgctgttcaagaccagcttcagtgtggacagcaagggctttcagaattactaccgcgacctggccaagcgcgtcaaagagcaggatgtcgatttgctgatcgtggtcgggatgtttctgaccggcttcgatgcgcccacgctgaacaccttgttcgtggacaagaacctgcgctaccacggcctgatccaggcctattcgcgcaccaaccgcatttttgacgccaccaagaccttcggtaacgttgtcaccttccgcgatctggaacagccgaccgttgctgctatcaccctgtttggtgacaaaaacacccggaacgtggtgctggagaaaagctatgccgagtacatggaaggcttcaccgatgtcgtcacgggcgaggcgcgacgtggcttcaaggatgtggtgggtgagttggagcagcgctttcccgatccggcgaatatcgtcaaggaatccgacaaaaaggcctttgccaaactgttcggcgaatacctgcgtgtggaaaacgtgctgcaaaactacgatgagttcgccagcctgaaagccttgcaggacattgatacgagcgacccgcaggcggtggaggacttcaaggcggaacgttacctgagcgacgaagatttggccgtattgcaggcgatccacattcccgccgatcggaaaatccaggattaccgctccacctacaacgacatccgcgactggctgcgcagggagaaagcctcagcggaaaaagaaaaatccagcatcgactgggatgatgtggtgttcgaggtagatctgctcaagtcgcaggaaataaacctggactacatcctggaattgatcttcgagaagaacaaaaagaccaaggacaaggtggctctgatcgaggacgtgcgtcgggtgatccgggccagcctgggtaatcgggccaaggaaagccttgtagtggacttcatcaaccagaccgacctggatgggctgggcgacaaggccagcgtgatcgaggcattcttcagctttgcccaggccgagcagcagcgcgaggctcaggagttgatcaacgatgaggcgctgaatgcagaggcggccagacggtacatcagcagctcactgagacgtgaattcgccagcgagaacggcaccgaactcaatgccctcttgcccaagatgagcccgctcaatccggggtacctgacaaagaagcaaagcgtcttccagaagatcgctgcattcgtcgaaaagttcaaaggtgtaggtgggcaggtgtaa

SEQ ID NO: 518155 - DNA, 1035 bp, Stenotrophomonas maltophilia
atgaatggcaaaaaattgatccgcaacagcacagccgagtttctgatcttcacgggccaggccggcgaacagagcatcgaggcccgctacgaggacgaaaccctgtggctgtcgcagaagctgatggctgagttgttcggggtggatgtgcgcaccatcagcgagcatctgaagaacatctttgccagccaggaactggccgcagaagcagttatccggaaattccggataactgccagtgacggcaagagctaccagacccagttctacaacctcgacgccatcatctctgtcggctaccgggtcaactccatacgcgcaacgcagttccgccagtgggcgaccggcgtcctgcgtgagttcgccatcaagggctatgtgctggatcgccagcgcatggaaaacggcagtttcctgggcgaggactacttcgagcggctgttggcggaaatccgcgagatccgcctcagcgagcgacgcttctaccagaagatcactgacatctatgccaccagcgtggactacaacaaggacgcaccgaccaccaaggccttcttcgccaaagtacagaacaaactgcattacgccatccacggccataccgctgcagagttgatccgcaagcgggccgatagcggcaagccacatatggggctgacgtcctgggcgagcgcgcccgaaggcaagatcctgaaaaccgatgtggccgtggccaaaaactacctgaccagggacgagttggattcattgggtcgtatcgtcaacgcctatctggagctggccgaggatcgtgctcggcgcaagattcccatgagcatggaagactggtccaagcgtctggacgccttcctcgaatttgatgaacgggaagtgctgcagaatagcggcaagatttctgcaaaacttgcccagacacatgcggaaagtgaatttgagaagtacagaattgtgcaagaccgcctgtttgaaagcgatttcgacaaagcagtgaaaaaactggcggctggtgagctgaccaccagagatgacggataa

SEQ ID NO: 518156 - DNA, 1170 bp, Stenotrophomonas maltophilia
atgtcacaccaaacctcggacatcatcactccgaaagccctgttgctcgatgagcggctgacaccactggaacgcaacgcctggctgactttccgtgcgctggccggcagcgacggcaccgtggttctcagttacgacgcgctgcgcgggtatctgccgagcgcgccaggcagcaagcgggctgcccttgaaaccgtgtccagggctgtgctgtgcctgcggctgtccacgtggattgcgctggtcgaataccgccgaaacccgatgaccggcttctcgatggccagccgctacgcggtgcacaaccagccgctcgcattcgacgacgcctgcatggaggacgaggactacctgcccctgctggaacgggcgctcggccatgccagtgcgacgattcgtcaactggcacagtccattcttgatgaggccatgcgtcatcctgatcggttggaaaagctgcctgcaacgatgcgggagcggatcaggcgcttgcagcaccgtggcgatgaccatgatccgggcagtcctggtggtccgactccgcctgatgctcgcgtgcccgaattcagcagcgacattccgaaacccgtaccggcatctgcgacagcagtacgtactgtagaaaaagaagtattaaaagaagtacgtacgtaccgctcaccaaccgaagagctggtatccaggtcagatgtgccggcccgcttccggcaactgccacaggatcagcaacgggttctcaccacacgtctcaggggcttgcctccggagcaacgcctggcagtgctggccgagtgggacgtgcgctgcgaatcaggtagcgtgcacaacgccatcgcctacctctacgggttgatcaagaaggccgtggaaggcgtgttcaagctctgggcggcgcgcaaatccactccaccgcagacacccatgcaggccatcagcaacagcctgcatggctcgccgcccgccccttctccatcgtccagcaaccaagccgcaaagcctgcatcgcgtgaggtcgcgcaacggcatctggaacagatccggcgcatgctgaagacgccatcgctgcccatcgggcagatcgtcgggtgcatggctgatagcggaatgctgccaacagtcccggggaacacgcccgctgctgcaaggctgggaccacggagctcggcgtga

SEQ ID NO: 518157 - DNA, 558 bp, Stenotrophomonas maltophilia
atggctgagcagacgatcacccacatcgttgtgaagaacgagcaggctcgcgagcatgggaccttcttcgttgtggaaggctgcgagcgacacagcaacggtgacatccgctattgggcccagctgacctgcaacaccgccttcggcatcgtgggtacgttcttcgggtccatggggtcgccggccgcgcaattcctcacccactgcaacaaggactacatcatcggccggctgtggggccttcagtcggaggtgtacgacggcggcgtggcgaagaagaacctgaccaagtgggtactgcagcaacgcaggcgcatcgagattaccaacgaggaagcgcgcgagctgctgatggacatcgacctcgccgacttcgagaccgagttcggcttccagtcgctggtctacggccaccgccacttctatcaggcgttctccgagggcggcggcagcgactacaaagtgcccaacccgcaggccgagggcttttgggagcatctgtggccgggttttctggccgagctggcacagcgcgcagaggcggctgcccatggctga

SEQ ID NO: 518158 - DNA, 963 bp, Stenotrophomonas maltophilia
gtgagcttgattcccgccatctatcgcagcactgacgccggcgcgccgcagctcagcgggcaatcgggttcgttagtcacgctattggatgcgttgctagttgatggatatggcagcaaggctgccttgggctggacccgtgaacggtccggcttgaacgttcgcgcctatcgcaacagccccgttagtggaagcggctaccgattgcgggtggacgatgcgccagcgcagttctcttggctacgtggctacgagagcatggtcgatattgatacaggagcggggctggtacctaccgtagcgcagcgtgcaaatggctgcctgtggattaagtcgtccgtggccagcggcggttcccgcccgtggtttgcgattggcaatgagcgctgcttctacctgttcatccagcatcaggggggaggtgcaaataacgacgttgcctattttgcgggcgacataatcagctacgttccgggtgatcgccacgccttcgccgttactcagaacaacctcactggctacagtagcggttttggggccagccaaacctttcaagcaattgcccaaaattggaatgctacgccaagtgtcatcagtgcttccgtctatgttgcgaggaactggcaggggcttgaaggcgctgtcctgttagggcccacgccatctgcggtggtcggcatcgcgggtccctatggcgggagcatcagcaacaacaattacgatgtcccggctccggtgaatggaggagtcatttctgttccaggggttctactggaggggaagcacctgcttcgtggtgagtatccgggtgcgcgggcgccgatctccacgctgctgtacggggaccaatcagaaatggatggttggctcatctgcaagcgtttccgggtcacggccaccgccgattccggcacgcagtatgtaggcgaggtactgtttgaactcggtaaggagtgggtctga

SEQ ID NO: 518159 - DNA, 717 bp, Stenotrophomonas maltophilia
atggggtgttgtggcgacaaaaaaaagaggttaaattccgctcaacgacaagaggatattgacttgagcgccagcggaaccgaaaacattgccgaattgttgtcgtcccagcttgatcgtggattgcttcttgacttgcagcgtttggtcttgcgagctttggagcgggctcaggaggcaagtgctgattttgcaatcggtcatcggccaaccgccgagggctttctgaggcacttgattctgaacgaggcgatggagaaggggctggctgaggcggacgttccgcgaacccctttgaagggcaactcaatcatggttggccaggttggaatcgtgacgctcggtcgtgtccatatgggcagcgggaaatggaacaacgccaggcgcagtaaaggaaaagttaaactttgccgtaacaatgacgtcgtgcgacggctggttgaaccggatctgttttccgatgtccaggttgatgacgttcaccaagtcgcggtcttcttggtaaccgaaactggccggggcgaggctagtgcgcagatctatctggctgtcccggatgagactatggatttgaggaattgcgtctttaaagaagaggtctcgttgttcctgcagagatacgctaagcccactgatgttgtggataaggttggtccgaagctaaaaagtgggatcaaaaagaagcgcgatggcgatgaagatgagccaatgagatga

SEQ ID NO: 518160 - DNA, 714 bp, Stenotrophomonas maltophilia
atgctgcgcctgttgctgtgtctggtgctgtcagctgtaccgcgcctcagctacggcctggagctgtccagcaccgaagtgcggttgtcggctgcacgcgccgacggtgaactgtggttgcgcaacaccgacgccaccggctggagcggccaggcccggctgtaccgctgggagcaacaggagcagagcgaagtgctgttgcccgccgacgacgtggccgtgagcccggcccggctggagatcgctgcaggtcagcggcagaggctccgcctggtcagcctggccccggccccggccggcgtgcagcgggcctaccggctggtgatcagcccggcgccggacctgccacctgcgctggccatccgctactcattgccggtgttcctggacccacccaccccggtgacagcggccctgcaggtgcaggtgcgctcccctcccggcctgctcccgcagctgtggctgcataatggcggctccggccgtgcccagctggtggacctggtgtttgttgattcccgcggccaccgccagcacctgatcgacgggctggccggctacgtgctgccggggcgcgcccgcctgtggacgcttccatggcgagccgatgcctacgcgggcgggggattcagggcccgcctgaaccataccggcgaggccgcgctggaggccgctcccccggcaattgcagcgagcgctcccagcgggctataa

SEQ ID NO: 518161 - DNA, 240 bp, Stenotrophomonas maltophilia
atgcacctgcgtttctttctcgccctcgccttcgccggcacggcacccggcgtggggtccgcacaacctgccgcccggccggcgcaggacagcctgaccatcaccctgcgggtcaccgatgcacgtgcgcagcccctgcaacgcagcgacgcccccacaccggtggcaccacaagtgcaggcgctgacgcccgcaccacccgcggaggcggcggctaccctggtgacggtgacctattga

SEQ ID NO: 518162 - DNA, 1020 bp, Stenotrophomonas maltophilia
atgatccgtctactgggtgcgctgctggcgctgtggctgggcatgcaggccctgcccgcgcaggccgcgaccagctgttcgctgagcagccccaccctggccttcggcacggtttccaacggcctggtcgataccaccacctccttcaccatcacctgcaccaccggagctgtcgccctgctggccaatgtacgcgtcaccttctgcgtgggcctgccggcgggaacgggcggcaccaccatcacgccatcgcgcacgttcgccaacagcttcggcgaccgcctcaactaccagatctacagcgacgccaaccgaaccaccgtgatcggcagcagcgttgccagcagtccggcctgggccatgtaccagatgcagtacccggtgccggcgctgggtggatcggggtcgggcacggtcatcctctatggccgctatcccgccagccaggtgctgtcggccggcaccttcaccagcaccctggcggcgacattccagtacgcctacaacgaacccctgctgggtacgccgccctacccggccaactgcaccgtggctgcccccaccgtcaccggcaactcgggcctgatcaccgcgacgatgtcggtgatcgccaacgccacggtcaatccagcctgcggcacctatgtaaccgcgccgatggattttggcagcagcaccggcacggtcctggcaaacatcgaccgcatggcggtattcagcctgacctgcgtcaaccgcagcccgttccagatcggcctgaacaatggcagcaatgccgatggcagcggcaaccggcgcatgcgcgtgggcactaccggcgcgaccgtgccctatgagctataccagaacgcggcccgcacactgcgctggggcaacgtgctcaacaccagcacggtggccgggacaggcaatgggtccgcccagaatctcaccatctacggccgggtcgcgccaacgcctgcgacctccacaccgccgggcgtctataccgatacggtcacggtcaccattacctactga

SEQ ID NO: 518163 - DNA, 2373 bp, Stenotrophomonas maltophilia
gtgctggcctgctgcaccggactggcatctgtttccgtgcatggcgccggccgcgggctgccggctggcgccgacatctccgctgaagtctcgctgccggcccccacgccattgaccgcgccgcaggcgctgtacctggacaccagcctcaaccacgccccgcgcggcctgctgctgttccacgagcaggccgggcgactgcaggcgcccgctgccacgctgcgccagctcggctttccggtgcagggcgatgcaccggtttatctggatcagatcgcgcagctggtggtgcattacgacgccagccttcaggttctcgacctgcaggtgccgctgcagcagctgcagctgccggtggcacagctgggcaggggcagcgagaccgctccggaggcgcaggtatcgccgggcatggctctcaattacgacgtctatgcaagccacagcgacgggctgggcaacgtcagcctcaacagcgacctgcgcctgttcgggttcggcaacggcaccctgcgcaacaccacactgatgcgcagctaccagttgcccggcgagggctggcagcaggaatcggttcggctggataccagctggcgcctggacctgccagagcaggcactgaccctgaccgtaggcgatttctacagcggctttctggaatggtcacggccggcgcgcatggccggcatccagatcggtcgaaactacgggctgcagccgtaccgtgtccttaccccgacgccggccttcctcggcgaggcggtggtcccctccaatgtcgagctgtacatcgacggcctgcgccaatacagcgggcaggtgccggtcggtccgttccagctggcagcgcagccaggcatcaacggcacgggcacggcgcaggtggtggtcaccgatgcgttcggccgcatgcagacgctggatttttccttctacggcacccagcagctgctggccgccggcctgtccgactggtcggcgggcatcggccggcttcggcgcgactatggcatccactccttccgctacgacgccgacacggttgccagcgccaccctgcgacggggcgtcaacaaccgcttcactgcagaggcccatgccgaaggcggaggcggcatcgtcaacgcagggcttggcggcgcctggctgctggggcgggccggtgtgctcagcgccaactggagcgaaagccgcgacggccagcgcaatggccgccagtacggcatggggtacaactggaacaaccgccgcttcaacgtcaatctggccagccgccgtaccagcggcgactaccgcgatctgggcagcctgcaggacaacgtaccgccccgggtgagcgagcaggcctccttcggcgttgacctggagcagctgggctcgttcagcatcagctatctgcgcctggaccagccgcaaccattgctggacgcaccgcagccggcgccgccgcaggcgctgcccttcagccgcagccgctacctgagcctgttctggtcgcgcgcgttcggccgctggaatgcctatctgtcagccacccaggacatcgaccagcggcgcaaccgcagcgtctatctatcgctgggcacccggcttggcggggatcgccaggccagcctgtcggcccaacgcaatggcgagcgccactacgccagtgccgagatcatgcgcccggtgcccggcgatggcagccgcggcggccccggctggcgcctgcaggcacgagatgatggcggcggcctggccgagattggcgcattgggcgctcatggccgctattcggccggcgtttcccgaaacagcggccagaccttcgcttacggcaatgccagcggcagcctgatatggatggccggcagcgtgttcgccgcgcgcgaggtacccgatgccttcgcggtggtgtccaccggccgccccggcgttccggtgctgctggagaaccgtccggtcggcgtcaccgatgacaagggcctgctgctggtcacccccctgctgtcgtggcagcgcaaccgcttgaccatcgacacccttggcctgcccgccgaactgcgcgccgaacaggtggagacacttgctaccccgcgccagagcgccggcatgcgggtggagttcccgctgcggcaatcgcatggtgcattgctgacgctgacagacgccgatggcaaaccactgccgctgggtgcacgggtgcagggtaagggcatcgcaccaaccgttatcgggcacgacggccaggcctggctggagttcagcaccgaggcagcgactctgttgatcgacagcgagctcggccgctgccgtgcgcaggtgcagcggccggcagcgggcacgcgccggttgccggcggtgcgctgtatcgccgagccacggccatga

SEQ ID NO: 518164 - DNA, 735 bp, Stenotrophomonas maltophilia
atgccaatgccccgcggacgccgcttgcaacagctggcgttgatggtgctcgcgttgccgcctgccttctgcatggcggccagcctgcaggtatcccccacccagttcgaactgcgcgccgaccagaacgccgaggcgctgtggatcagcaacagcggcaccgagccggtgcaggtgcaggtgcgtatctaccgatggcagcaggccgacgggcgtgaccagttggaagccagtgacgccctgctgcccagcccgcccatgcagtcactggcggccggccagcggcagctggtccgcctggtccgcgtcgatgccagcgcccccgccgtccagcaggcattccgggtcatcgtcgatgagatccctgcctatgaccccacccgccaggggatgcagttcgtactgcgctattccattcccgtgttcgtacagccagagggcaagccccccgcaccccggctgcaggcgcggctgatccaggacggtgccggcccggcaatgctggaagtgcacaacagcggcgatggacaggcgcaggtcgccgacctggccgtcctgctgggccaacgcagcacgccgttgctgcctggcctggtcggctatgtgctgcccgggcagaccatgcgctgggcgctgcagcaggcccctgcacaactggcaggcggcatcttcagtgcgaggatcaatggtgggtcgcagcttacgcccctgcccacgacgccgccggctcgctga

SEQ ID NO: 518165 - DNA, 528 bp, Stenotrophomonas maltophilia
atgcgatccacagttcgtctccccttggccctggtcctggccctgctggttgccggccccgtcgccgctgccgacaccgtcactttcaacgtgctgctgaccatcaacaaggcctgcaccatcaccgcggctgcggcgaccaacgtcaacttcggcaatgcggattcaagctccgtcaccccactgaatgcgcaaggcacggtaactgcccagtgcagcgtgaccaccccctacacgatcgcgctcaatgccggcctcaacccaggcaccgccggcgatgtgaccacccgccgcatgcgcaacaccgactccggggtgaccgccaacaacttcgtcggctaccagctctcccaggattcgggccacaacaccgtgtggggggccagcaccggcaccaacaccgtggccggcaccggcaccggcgccaaccaggtctaccaggtgtatggccaggtggccaaccccagcgtcaacaacgctgccccaggttcctaccaggacaccatcaccgccaccatcacctattga

SEQ ID NO: 518166 - DNA, 342 bp, Stenotrophomonas maltophilia
atggccagcgccggtttgggcgaacgccagccggtcgccatcaatctaagcttggatccggcttggtttgtctatgcctttcagcgcgatggtgtgacctactaccaggtcaatgatccttcgggccaagtggttttgatcatcgccaacatcgattccactttctggacactgccggccggaaattcgtctgtccgtgtctcgctaccttcgcagcggctggcgatgccggcgacggcgcgtaggcatctggtgttccaagcgtcggacttctcgttggctgtccacggtgaagggaagggagcaatctggtccgtcgagacgtcccccagcgaaaagtga

SEQ ID NO: 518167 - DNA, 1596 bp, Stenotrophomonas maltophilia
ttgagttggttgaaaagtggatttgaactgagcttccgtatacgacctgtcggcctcgctcttgctgcgctgtatgccttcgcctgctggggagcccgtcacttctccgttgatcagttcttcctgccggctggcattcgcgtggccgcactgctgttgtgtccgcccaggctctggccgtatctcattcttggtgaatacgcctatttcgcgccgctgcgttatccaatgatcgaagagtacgggataagctgggtcatcctcggatcggcgtgtctgatacctgcggtggcgctgatcgtccacctccaccgcaaggcaatggcatcgaccagtgaaagctggctgctttccgttgcagcatccgcagcactggtcgccagcgctctcaagctgggactgtcccacgtgctttggccggtcccgccaagcatgcccttctacacgaatgcagcgctatttgtgctgggtgactacatcgccatcctgacagtggcaccacttgcattgctgtggctccgccgtcgtggcggctacgactggtctacctggcggctgcgccctaccatcacggcgctcagcgctctatgtgctctcagcattctcatcgccacggccggtgcgcgtgatgatgcggcacgagccatattgcagctgttgatgaccttgcccgtaattgcgctgacatgcattcatggatggcgaggtgctgctgtgggcgtaccgctgatgaacataattctcagcgtaaccatgcccagtaccggactaccgggctcgttcgaccagacaaccttcttcacgcaacagatcatcgcgatcacgggtaccaccctcttggctctgggctcacgcatcactcatcactatcatcagcgtgcgcccacaacggttcagctacaggagccgcagacagtggttttctctcgctcggcccacctggccagtgagatggatctgcgcgagcgggcactgggcctgcgcagggtagccgacgatattgaagcagcccttgatgaaaccctgaagctgctcaggacacatggccaggaaggcccggcaatcgatcttctgcgaacattttcctcacgctcgcgcaagttccgcgagctgaccagcatggtctacccgactgagctggagcacgctgggctctacgttgctcttcaggcaggcgggctgagcgaggcctgggaagagacccaccgagtggtccgccccgtacttcagggtgatccctgccagctgagcatgggtttacagcttgccgcttatcgcgtccttgccgagtccatgtctctgttgctcaaggaagaacggggccagatccagctccgtgcacgttgcggacacgtgggtcaacacaagggaatattgatcacagcttcgctgctcgatcgcacgagcacgttgtcgtcgagaactgtcgatctggcaattgagcgtctctcagcacgtacacaggcctactctggcacagtcagctgcctggataaccggatccggatggtgatgcgtgatacccactacgaaatgcaaggggacagcgcgccgccgcgagtggatgctccgattgacatgccggtcaggtactga

SEQ ID NO: 518168 - DNA, 315 bp, Stenotrophomonas maltophilia
atgcccttcgacccgacaatctaccgcgaatggttgaacgccttcctggcctgggctgcaccccatggcatcgccacgcgctgtccccccaccgccaacacggctggcaggcttgacatcggcaccgcgcaggtcatcgcccgcatcacctactggagttccggcgaatgcgatgccgagattctcgatgttgaatccgagcagcggatctaccaatgcagttggaccaacctgcagcccgaacatttcgacaccgcgttcgcgcaatggctcgccatcgtgcacggccccacggcgcaatcgctcccgccgtga

SEQ ID NO: 518169 - DNA, 537 bp, Stenotrophomonas maltophilia
atgaacaaagccacgtcccgactctgtcccgcctgcgagcaggcaccgctggtggcatccacacgcgaacggcacttcactccgcgcggcaatcctgtggtcgtcgaactgctggcgatggagtgccccgcatgcggcgcgacggcaaccagcgccgcacagcagatcgagaacctgagacgacttgccgcacggcgcgcccactacggcgggctgctgctgggcgaggatgtgttggcgttccggcgccgctacggcttgacccagcgcgcagcggccacgctgtttggaaaaggcgcgatcgcgttttcccgctacgagaacgagacgacctatcccgacgatgccacaaccatgctgctgtcgttggctatggagaagcccgaggtcgtgcgctggcttgccgagcgcaccggcacggcggtcccgctgctggacaggctgcaggacgttgcaaccaagcctccccggcgtgtgtcgcgggcccatcgggtcgcacccggcacgccaagtggtccagtccgcgcagtgcgttga

SEQ ID NO: 518170 - DNA, 1266 bp, Stenotrophomonas maltophilia
atgaccaatatgactaaagcaaagctgtccgatcgaattctgctctatgcgtggattccgctgtcgattggaccgatgatatggggaatcgggaacatcggggggctgcagctccaccacgttgcggtactcctcgtctacggctatgcctttattctgtcgtgcatgcgtggaacgatcttgatggtcaacaggtatctcctgttcctcctcgcttacattctcatccttgggctggcactcaacgcggagtcgctggacttctggctgaagtacgcgtcgtatattggcgtcataatagtcgcgaatcacttggtaaaggtgatgccattcgaggttttcatcgggcaggtgaccgtcgccatgaaaatgattctggcgatctgccttgtcctggcccccgttgctcccgtcgttgcgttccatgtcattgatggtcagaactcgctcaatggcatgtacgcacagaagaacaccctcggtcgtctgatttacttcctgttgttcttcgtcggcttacaggcagtcatgcagtcgcgtcggctgacaattcgcgatatggcgtggatggcgctctgtgcgttcagcctattcttgtcaaactcgcgtaccgctcaggcgatgggtttgctgcttgcattcctgccgttcgcctttcagtggaggtttattcgcctgtcgcttgtacctgtcctgatttcagtcgttggcttgattgtgctgggctttgccagcggccagatctcgttcggtgaagtgggcagcaatcatgactacatccaggttctgggtatcgagattccattgacagggcgcgcaacgatctggcagggcgctctggatggcgtcaacaaagaagggcgctggctttttggatttggattggacggattctatgggagcgattacagatcctatgtttccaacattggtctaggtgttttcgttccggaagactcccacaatggctacgtcgacctgctgctgaacctcggcttggtcggcgtagtcattttcttcgtgattggcgtcaaactctatgtcaacgcctctagattcccggttagtggggaaaagatcgcgatcttttccttcttgattctttacttgggttcgaacctaacggagtcgtacttcgtgaagacgtcgaacatcacttcattcatgtttatggtaatgttcatgtattcctattcttatcgaaggttccagtgcccccctcccgaaaaaccggctcagcgtagggggggctcaaaggagctctga

SEQ ID NO: 518171 - DNA, 138 bp, Stenotrophomonas maltophilia
atgagcgaaatagtcgaagaagagatcaggcgctggacggcctggcgcaagtcggcgctggtccttgagatcatccaaggcaagaggacggtggtagctgccagcaggcagattgacctgatcccggccgcgatctag

SEQ ID NO: 518172 - DNA, 312 bp, Stenotrophomonas maltophilia
atggagaacgcgctgcgggccacgccttacgatgtgcgcgagcagtgcgatcggcagttgaaggatctgcaggaagcgtatggagaggcgatgctggagatccgcgcccgagaaagctggcttcgctgctgggaaaggacgagagctgatgctctcggccatcagggcctgaaggacgcaggcttcgcggtgccgatgaccaagctgtatcaatggttcgtcgtggcccgccgcacgacgtgctgcaagccgacccgatcaccagcgaaggtaaagccggagctggccgagccgatcgaggggatgatctag

SEQ ID NO: 518173 - DNA, 312 bp, Stenotrophomonas maltophilia
gtgagtgagccgttcctgctccgctcggacaacggcctggtattcgccagccgcgactacactcgactggtacgcagctacggcctgaagtacgaattcatcaccccgcactgcccacaggagaacggaatggtggaatgtgtgatcaggacgctgaaagggcaatgcgtgcacaagcatcgctttgagaaccaaacccatgcactgcgggtgatcgctgactggattgccttctacagccagtggtgcccacatcaggcacggaagttgatggccccggatgcggcctatgccgctgcattaaccgcatga

SEQ ID NO: 518174 - DNA, 750 bp, Stenotrophomonas maltophilia
gtgatccaggtcagagcattgaacgacgaggggatcgaacgattccgggcatggctagctgcaccagaaggcgaggctccatccggtcttctcactgatgctgcactctgcagagatgtcgtaggtgaatggttgatcgatcccgaactgcgcttcgggaacagctacgagcttggtgcgtatcttgctgggcaagtgtttgggccggatgtggacagattggcaatcaaaggcgatcgtggcttgtgggcatggatatccttggcgctgctcccaaacctgctcaagcgcgggcgtggcaacgatggaaaaccatttgaccttcctcattatctggatgtcgagccgcgactggcctaccgtctgatcgtgaggacggcctgggaacttgtgcatctccacgggacaagggctcgggtagcgctatgcaatccacgcactgcttggggagaccttgctgagcagatagccggtcggcaggagatctacgcccatcctggattctgggaggtggcagagactatgtacttgaagtcagacggaacaccaaaggctggtgttgcaaccatcagaaagaaggaacatcgaaaggacccaaagagcagggtcggattgggcgcggcgaggcgactggtaagcagcttcggtcagttcgaacgaacctacctgcttcgcgaaatgagtgctgaggagatcttggcgatccttcccgcggagtacgcaggatggagcaccccttctggtgtttga

SEQ ID NO: 518175 - DNA, 267 bp, Stenotrophomonas maltophilia
atggagcgcgatcagaacatcgccatcgaaacgctggctctgttcatccgctactacctcaccgtcagcacgccggttcccgaagcgcaccaagacgcggcccgcgcgcagggcaaggcgcgattcgagcagttcaccgagcagcttggccgccacctgatgcgcgggcgcagcctggcgcgtgacgtggtggaggaactgcaccccgacccgatgcggatggaggacgcagcggcagccgctcaagcacgggagcgtgcgtcatga

SEQ ID NO: 518176 - DNA, 249 bp, Stenotrophomonas maltophilia
atgaacaacagtcagcagtacgaccgtattccagcgtccatggtaaatggcaccccttgcctaggtgctgacgtgctgcccatccaagtaagatcgcacatcccgaagttcgcgcaagcctccgcgacaaataaaatccagcacggtgttaccagcaaacatgggcgccatgttaggtcgccttatccagccatccgcctgaacggggtcaggcagaaggatatgaagagctttgtaaatgccgagtag

SEQ ID NO: 518177 - DNA, 309 bp, Stenotrophomonas maltophilia
atggccgccgacggcctgcagggctggccccagcgcaagcgtcgcgggcggtgcgcaactccggccatgacagcgccgggcgtggtcaaactgcttgaacgcgattttctcgcgctggagccggaaaccaagtgggtgacagatattaccgagatcaagacccgacagggcaagctgcatctgtacgaccagcgcatcgtgggctggtcaatacacgatcgacaggatcgccagatggtgacccgggctgtgcagatggcggtgtggcagcgtcaaggaagcgatgaggtaatcctgcattcggattga

SEQ ID NO: 518178 - DNA, 282 bp, Stenotrophomonas maltophilia
atgccgatccaatcatttgcctgcaaacgtacgcaggcactgtttgatggtcatcgcgtgcagagatggcgccacattgaagctgccgcgctgcgaaagctggccatgctcaatgtggcagctgatctgcgggatctgcgtctgccgccagcgaacagactggaatcgctgcatggggaccggcgcggccagtacatcatccgcatcaatgaccggttccggctgtgctttgtctggtctcgggaaggtcctgccgaggtcgaaattgtcgattaccactga

SEQ ID NO: 518179 - DNA, 297 bp, Stenotrophomonas maltophilia
gtgcgaaccgccccctaccccgctcccggcgagatcctgttgcatgaattcctggagcctctgggcatcacccaataccggctggccaaggcaattggcgtctcacaacgccgtatcggcgagattgtctccggtgatcgcgcagtcactgcggacaccgggctgcgcctgtcccgctacttcggcgtttccgacaagttctggatcggcctgcaggccgacttcgatgccgcgatgaccaaggaaaagctggccgacgtacttgcccggatcgaaccctacaacgcggctgcctga

SEQ ID NO: 518180 - DNA, 537 bp, Stenotrophomonas maltophilia
atgcagcgtctgtggtggggaaaccttgcgatcctgctgcctgcactgtgtgcggcggccgcacccgaccagttgccgatggctgacgatgtgcaggccgatcgtctggtcgaactgacccacagctggggcgcaccattgccacgcgcggcacgtctggaagaccttcgcgccatgctgccggcgacagcggccgtcatcgaaacaccttatgcgttgccgggcatcacgctgccgccggtggccctgtccccaccgcttcggatcaccggcggcatagtcctgctgcaggccgatcgccagcacgtgcactccgtgcgcctggatgtcggaggcgtctgtgtgacgcgtcggcagatcgtccagcgccaggccgcgccagcgcatgttcttcctccttcaggccacgccccggagcaggcattgacgttgagctacccggccccggaccgatgggtgagctacctctttcccggattgcatcacacgtgcgtcgcggaggtgatcctcaagccggcagacgcatcgccgccatga

SEQ ID NO: 518181 - DNA, 1179 bp, Stenotrophomonas maltophilia
atggatcaatccgacatcaatctgctggtagcctttgttgactcagaagacgctgcgcttgccgaggagcgtcaaggcgatatttacccggcttatcactaccaactcggcgtactggcaccgaaagcaggtcgtcacctgtctggggaaatgttgcagcgcttctacttccactggctgcgtgttggagactggaaggtcgccggactccctgagagagactttcccacccttgttacagcctatctggaactcacaaagctcccggtgggctacgacacgcgccaacccagccgcagcctcgagcacctgttctgctttggcttcaatgaacatggcgagctgccgagtggcacggttgcaaatgcagccgatctgaaatggcgcacccgcctggtggagcattgcaggaaataccagtcgtactacgcccaacgtgaaaaagtggaaaaatttctgccctatcgcagcttggcaccacaggtccacgaagccattcagcgcgttcaacacgatgccgaacagctcgacagcatcctgtactggggcatgattctggtcacgctgctggatactcgaacccgcctcggcgcgctgaaaattcagcttgatcgcgatcacgcagagagcgcagcccgtgaacgatctctctcgcttctccactacacagcgatggcagcccagccgcatggtcccgaagacccggcgttcaacaccctctgcgaacagctgtcgacaatgcacaacgagcgcgtcatggcaggcgccgccatccagctggtcaagcgccagggatggacggtggagaacatccgtgactggaacgcgcgcatcacgctgtatcaggatggcgagtacagcacccagaacggccatccacgtgtcagcctgactctcagcagctggcctgataccccttggtcaatcaatctgagcgtcggcaatgactcctacgtcgcctaccgggacgaacccaccagcaatgatttccaattgccgccaatcatcggcgccacgcttgatcatttccctgaatgggtcaagcagataaacgcacgactaggaatcaatctggttccaggcacgggctcagctgcatctgcctacaagaatcgtacgttggctagacaactcgacgcatggatgcgcgggaaacagcagcaggattccgtcgtatag

SEQ ID NO: 518182 - DNA, 696 bp, Stenotrophomonas maltophilia
atgcagccccgcgtcatcctgaccgatatcgaaggcaccaccagcagcatctcgttcgtcaagaacgtgctgttcccctatgcccgcaaggcgctgcccgcgttcgtcgccgagcacggccagcagccggaagtccgccgttggctggatgcggtggccaccgagatcggcggcgcctgccaggacagcctggtagccgagacgctgcagggctggatcgaccaggaccgcaagcacaccgcactgaaggcgctgcagggcctgatctgggacgaaggctaccgccgcggcgactacaccgcgcatttctacccggaggtggcgccggtactgaacggctggcacgcctccggcctgccgctgtacgtgtactcctccggctcggtgccggcgcagaagctgttcttcggcttcagcgacgcaggtgacctcagcccgctggtgtcgggctggttcgataccgagatcggcggcaagcgcgaggccgacagctaccgccgcatcgtgcaggccattggcgtgccggccggcgagatcctgttcctgtcggatgtggtggaagaactggatgctgcccgcgaagccggcctgcagacccgcctgattgatcgcctggacgactacccgctgccgcgcaccggccaggccgccaacggccacgagcgggtcgagaatttccagcagatccagctgtaa

SEQ ID NO: 518183 - DNA, 246 bp, Stenotrophomonas maltophilia
atgccaaccaaggttggcatctaccagaagcggagacggataggtgcggaccgttggtccgcacacatctcttctttacagctggatctgctggaaattctcgacccgctcgtggccgttggcggcctggccggtgcgcggcagcgggtagtcatccaggcgatcaatcaggcgggtctgcaggccggcttcgcgggcagcatccagctcttctccgccgctttggtaggtgtcaaccttggttga

SEQ ID NO: 518184 - DNA, 474 bp, Stenotrophomonas maltophilia
atgtcacagaggattatcatgaacaccgcactcgacccggcagcacgcgcaggcacaggcccatcccggcagaagggcttttccctcattgagctcatggtggtggtggcgatcatcgggattctggggatgattgccctgccgcagtaccagcggttcgcagccaaggcaaagttggcaggcgccctcgcagaagttgccggtggaaaagttggcgttgaatcactcctcgccgagggcagcgaggtcaccacgtcggcatcgattggcctgcccgagtcgagctcccgctgtacctggatcagggtgacaagcgatgccacggatggagctacgagcatcaactgcgagctcaagagcgacgctgcaatcggcagtggcagcctgaccctggatcgcgactcgcagggcgcctggctctgcaggagcgacatctcggaccagagcctgcttccccagggctgccagggctga

SEQ ID NO: 518185 - DNA, 213 bp, Stenotrophomonas maltophilia
atgaccaagctccttgagccgcgctatcgccaagtgtttgtcgacctcagaatccccagttgcctcgaaccaaccgacgagcctcccgtcgactatcagttttcgtggccccggtttaccaatttccatttgattctccctagtcgctttcagcgtgagacattctgggcgtccggagggcggtcatcgcacaggctcattgaagagtcatga

SEQ ID NO: 518186 - DNA, 129 bp, Stenotrophomonas maltophilia
atgagcttggctatcaatgattcagtgaatttttcggctgacagggggggcttggatttgtgggtgtggagcgaagaaagtgagcgggtatccatggcgctggatggcgacgcggaggtgtgggcatga

SEQ ID NO: 518187 - DNA, 372 bp, Stenotrophomonas maltophilia
atggatgtgacgttcgagatcgagggcgtcccctgtcgattctttgccgacgatccgtcaagcccaaagaagcctggcttctacaagcgcaacgaatccgatcagcttttccctggtcagagcgacgcgccagtgatgttccgcttcattgtggccaagccacaagtcgcggaggaggaacctgacgttcacttcgtcggatttgactccaatcaggttgaggttttccgctggaagtactcgaccagcacccccgtcattgtcagcgtagacgattctcggcccgagtctgtcgatctttccgcagcagaggcgcgatcgcgcctggaagccgagtccaagaaggacgacgctgaagggaagaatcagtaa

SEQ ID NO: 518188 - DNA, 1137 bp, Stenotrophomonas maltophilia
atgcaatctcgaatcttgggtgccaatgtccggcttgcgcgcctattcaacgggtttagccaggaggacgttgcgacgcgaatcggcaagacccgacagtatgttcataagatcgagacggagcagctgacgccgccggacgaagtggttgactacatctcggaaatgctcagtgtgcgaccctcattctttattcgtcaggcaagtgctgaggtcggtgaagatctttttcatttccgcaagaggttcactgccaaggccgcgattaagcaagtcgcgctcgccaaaggtgaaatgtttcgtaggatcgtggcgacactggaatccaaagtacttctcccacagttgaacattccgcagattgaagccggttcagtggtggatatcgagcaggcagccgaggcttgtcgccgacattgggggcttggtctggggccaattcaaaacatgatccgggttgtagagaacgccggggttttggtgaccaggttcaaaggcgttgctcgagaggttgatgcctgttccattggtacggctaggccagtgattgtggtcaacgatgcagaggcgtcctcgtgtcgaggacgttttgatgtggcgcacgagctgggacaccttgtgatgcactgtggcttggtcaccggcgatcggaagactgagggcgaggctaatcggtttgccggcgcgttcctgctgccgaggtcgacgtttgtcagggaatttccaccattgcgtggcagacatttgaactggcagggattggtggagatgaagctgcggtggaaagtcagcaagtcggcaattctctatcgcgcgaagcaattgggtgttatcactgaggatcaatataagaccggtgtgataaggctgagccgaggcggtgaggctcgcggtgaacgggaagatgccttgatagcgaacgaggtgcctgagctttttgcgcacgctgtgcgcctgagttttcgcgagtcgttgctgtcgtatgaaagtttctgcggcatgtttggcgtgggtccggaagtcgtcgatgagttcatacctgaggaggaatccagtcaggcgcagacgaacgacgtcgcaaggctgcccaacaacgttgtgtctctcaacgttaggcgcttggccaaaggtctttaa

SEQ ID NO: 518189 - DNA, 495 bp, Stenotrophomonas maltophilia
atggttgagaccgtgctcggaatgacggatctgcaaatcaagttggccactgcagctggccagctcggtctagcgctgatggtgttctacgtcgcctggcgacaatggaggacggcgagaaacaagctgaaactggaccttttcgaccggcggttcgctgcctacgaagaactgcgcgaagctgcaaacgcattccgtgctggtgtcgaaatgaagcaagctgacgcaatcttggcgcttgctccgacgtttcggtacctgttcggcaagaaggtcagcaagggagtcgtcaagctggcaacgcgcgcaatgcacatggcgagagtggccgataggatgcctattcccgatttcgccagctcgagcgtagacgagaccgctttggacgcatggaagaagaatcaggctgagctgtacgaactgatgaagggctttgacgccctacatagtgcggtcatcgtgggcaccagcgatcacctcactcttgagcactag

SEQ ID NO: 518190 - DNA, 345 bp, Stenotrophomonas maltophilia
atggcgccacagcaggcccaggatattcctctgacgcaagtgaagttatgggccgctcgcacatcggaaaccttgtgggagcaggagtacgcacgcctggtgctacacgccgccaccggctccgtcttccatcgctggggcgttgaggcgtggcgaagccttcgcgaagttctcatctcctacgacgaagtgctggacgccgcagaaaattcggaacaggccatcaatggaccacgaggcgattacatcaagataattgccggggatggagacgagagggaagcgaggatcaactcagctcgcaagtcactgatggcggaactcgctaaacgacctaatcgttaa

SEQ ID NO: 518191 - DNA, 132 bp, Stenotrophomonas maltophilia
atggagttccacaagacgtatgttggatcgatgagggatccggtggcggtggagggggcggaggcggaggtggccaaggagaagtgggcggaggtgacggtggcggagctgatggcggcggggtatgggtga

SEQ ID NO: 518192 - DNA, 264 bp, Stenotrophomonas maltophilia
gtgacggtgccgggctaccccgatgtgcggctaaacctcatcaagaaagaggtgcgggaatacactcttggctgtagtgacgaaccgattcttcgccaacgggcgatgcaggtggtcgtgatcaagaggccattggcggccattaaggatgccaaggatacgtatacgttgaagctgatggcgacgggcgaaagccagaagttctggcgcaccaacgcaactagctccttgcagatgtcagaaatctcggagtgcggaaaatga

SEQ ID NO: 518193 - DNA, 879 bp, Stenotrophomonas maltophilia
atgaacaaaaagatcattggcgcggcctctctggttgtagttgcttcgattattggtggagttgtatatcggtcaggtcaagccgatacgcgcttggcgggcgacgatgcgccagcgcgcgaggctacccattcaggtacgcaaccggacgtgatggcgctggaaagcacacggtcccttccaggcaaggtcagggagcgtggtccgcttgatggagttgagcggtttggtcagttgcttgataggctcaagtcaagcagcatcgctccggcccagcgcgcgcagtatcttctgacagcagctcaggtctgtgagggcgcgagggagggacggctgggcaagcgcacggacgaggccagtagaacgtatgctcagtacaccaagacgttttgttcggatttctccggcagctcgaatgagtttgcattggagctattgaagtatccggatagcgacgtcgtaatagctcgcgagttggcaagcagcgtgcctcttgaacgggatacgaccattgctgcccaagacatcgttctcaagtcgcagaatccagacgctgtctataacgctgcggccgctttggcatcaggaacttgggcgttcggggttgaggttgctcaaaacccgcaggagcgttcaatgctgcgtgaggcgcagtggctagcctcccagaggctggcttgtgatctgtcaggcggttgcggtgctggaggcatgacctcgatgattgagtgcgcctcgtatggaatctgcacgcctggaatgacggtctctgaagtgtttgcacgcacccaacccgaggccaggcttgatctcgctgatcggctgtatgcgagattgcttgaggtgaggtcggagctcgtcgctaagtccgcaggctag

SEQ ID NO: 518194 - DNA, 987 bp, Stenotrophomonas maltophilia
gtgaccgaacacggcgtgaagaagcgctatgtccgcacgatcacgccaccgccggtcctcgatctagaggacaactatgaggcgactatcgcgctgctaaagaacatccggattgccaccaagacgctcaatgcaaaattcatgatcgacttgaaggcgctcaaagaggtgtctccagcagctgcactactcatggtggcggagtgtgatcgatggagagagaagacgcgccacaagtggctgagggcggttgatgctgccaactgggtccctagcgtgcggcgccggctcaaggaaatgggcttctttgatgtcctgaagacccgaaacgttccggccgacagctacgtccaaggcgaagatcgctacgtcccgttcctcaccggaaaccggaacgtcgggccgccagctaaggccctcagacagagcattgaacaacttggtcccgctatcgtcgacagcgccgcgctgtacgacggcctagtggaggccatgacgaacgtgacccagcacgcctatagggcacccgacggctctgacactcagcggtggtggatttcagcttctgtgaacgttctgcagaataggatgaccgttctagtggtcgaccatggagtcggcatcgcgcgaacgatggctcgagacaccaaatgggaacttgtacgccgcaagttgggtcctatcctgctcaaggatgactcaaagctcttggaggcagccttctcgcttgattccggcaatcggtcacagactggcgaagaacaccgtgggaagggactcagagagaatattaaggggtacgtcgcgacccatgagtcccgcggccaccttcacgtgattgccaatcgaggccggtatcgtttccagcgggacagccgtgccggcactgaaaacgaagtctccaggcaactggcgacagagttcaacggaacatttattgagtgggtaattgaagattatggtcaccaaccaaaacaagacaattga

SEQ ID NO: 518195 - DNA, 513 bp, Stenotrophomonas maltophilia
atgaccgccaaccacttttccgacatccgcgatgcaatcgtcatgctgggcaaggagttcgagttcgcctcaggtatccgcgcactcgctgcggatcacatcatccgtgagaagggcatcgacgatcccgacgagctgttcgacgcctgcgaggagctcatcggcagcaccaacctgttcgagtcctacgacgacgcgctgaatacccgacccacagacttcgtgctgggacaaggctgcccgttcctttccctgaacgcctacatcgaactcgccgatgtgtacggtgccgactggatcagcttggcgctcaccgagtacgcagcccaccacgggagcatcaagctgcgcaaactcgcgccccgcaacgctgaggagatgatcgacagcgcccgggagcgattcggcgacgcagtgctgctcaaggtgggaagggacatcggcgagagctggcagggcttgtcctcccgcttgaacggtgccctctcgctacgcggtagcgcgaccacctga

SEQ ID NO: 518196 - DNA, 309 bp, Stenotrophomonas maltophilia
atgagtgagaacctgagcgtcgccgaggctctgcgcaaggccgagcagatcgacgtcatgctcggcgctatccaaggcaccgcgccagacgcgatcgaggctatgggcgggcgcgacgcgctggcccgcaagtcggagatgacgtgtatcggccccgttccgcgcctggacgcagacgagtgggagcgcatgtcgctggagtacgaggggcggcgcgagcacggcagcgtcaaccggggagacaagccgcagtcgccccggccgacacccacacactcacttgtgccactgatctttcatgtgatctga

SEQ ID NO: 518197 - DNA, 2031 bp, Stenotrophomonas maltophilia
gtggccgcacatgaaaacgcccacggcgtgcgagaccgtgggcgcaggggggtaaccgaccgggagagtgagctgtccaggactcacgggatcaatgatgtcgcggggtctgccgtcgcaacgccatcatttgaggctgctgccgactaccgcgacgcccggctcgacctgatccccctgcgccgtcgcgacaaggtgcctgcggacaagcgctggcaggagcgaagctacgaccacgcggaggtgctggagcgcgcgaggcgcgacggcctgaacctgggcgtgcgcctccccgccgacttggttgtggtggacgtggacccgcgcaacttcccggcggggcgcgacagcttggccgagctggccgcggccttcggcctgccgctcgcgtcggcgccgcacgtccttaccggcaacctggaccaccccggccaccacttctacttccgcaagcccgcaggcgtcgtgctggtagacagcgtggacggcttcgagggcgtcgagttcaagtcgctcggccgccaagtcgtcgcggctggctcggtgcacccgacaggcggcctttaccgctgggcgcccgactcgcccacgctgcacaagattccggacctgcccgcgcgactggtcgaggcggcgcgcaggccggacaggagccacgcgtctggcgcaggcgagatcaccgccgaacagctcgccgcgtcgctggaacacctcgaaccgaccaactaccgggaccacgggcgctggctggaattgatgatggcctgccaccacgccaccgatggcgatggcgaggcgcggcaggagttcatcgaatggtccacgtccgacccggcttacgcggaccacgagtggatagtcggtcgccgctgggactcgctgcacgcccaccgcgacggcgcggtgaccatcgcgaccctgcgccgccacctcaaagaggccggaaccgacatcgcaccgccggacgcggccgacgacttcgacgtgtgggacgaggtcgatcccgccgacgagcgcagccgctggaacttcctgtcgctggacgacgtcgaggcgctgccgtcgcctaagtggctggtgcccggcgtgctgaccgagggcagcctcgcagccatctacggagcgccggagtctggcaagtcgttcctcgccgtggacatgtcgatggccgtggcaagcggtatcgactggcacggacgccaagtcgagcgcggtggcgttttgtacatcgccgcagagggggcgcccggcctgggcaagcgcttccgcgcctggaagatggacaggtgcgcccaagggcgaaggttcgacctacacctgatgcgcgacgacctgaacctcgctgcggagaaggacggcggcgcacgcgcgttcgcccaggcagtggccgacgagcttggcccgctccgcttggtcgtcatcgacaccctcaaccagaccgcagccggcgccgacgagaactcggcgaaggacatgggccgctacatcgcgagcatgaagctgctgcgcaacgccaccggcgccgcggtggtcgtggtgcaccactcgggcaaggacttgggcaagggcatgcgcggcagctcggcactgctgggcgcgatggacaccacggtggaggtggagcgcgccagcgatggccgatcgatcaaggtcgcggtgaagaaacagaaggacgccgagcgcgagtccccgatgcgcttcaacatggagaaggtgtgcgactccctggtgctgcgccccaccgtgatggaggctgcaccaggtgactttggcgccgcgatggaccccatcctagagctggcgcgccaagaggcgaacgagcgcggcggcagcatccggctgaaggagatggctgcgatcgtctgcgagcgggacggcgtctcggacaagacggcgaggcgcaagatcgagcaggccgtgcccgacggacgcagcaacgccagggcgtccatcgacgggttcatggtgtggctcgaaccgatcgatccccgcaacccgaagctcggaatctgggtcaggactgaggggtga

SEQ ID NO: 518198 - DNA, 792 bp, Stenotrophomonas maltophilia
atgtctatcggcgctttgcccgtcgttgaccaggaattggagcaagtgcgcttggctcttgcatccaagcctgatctgcttggaactatcggtcgcgcaattcgaaaatcttttgacgaggtcattgacggaccccgcactggccgatatcgaattgaacagctggaaaagaccgagaagacgtactttggcacgaaagttgaaatcgtccttcgcgccgagctcggtcttgctcgtggacgtgtgctcgacaacctcattgcagggcacgaagtggacaccaagttcactgttggcaatacctggatgattcccaaggaggcagtgggagagctttgtttggttgtcttcggggacgacaatgctggagcatgcggcattggcttgctgcgcatgcatccggcggtgcttaccaatggcgcaaatcaggatgggaaaaagagcgtttcagcctatggtaagacgcagatcacttggcttgcgcagggtgccatgccaaagaacttcatgctgcatctgccagatcatgcgcgagaagcaatcatgggggcttctagcgggaaacaagctattgccgccctgtttcgcaacgttagagggcagatcattccgcgatcagtcattgaacaagttgctcagcagcgagaccctctcaagcgcgcacgcgaggctaaggctatattggcagtggagggcatccaggtgctttgttcggcgtacatggaagaccgggctgagttcattaggcatggattttccgcattcagtgatgatgactggctgagcatttag

SEQ ID NO: 518199 - DNA, 957 bp, Stenotrophomonas maltophilia
atgataggtccaacctcactagagatttgcagcggcgctggcggtcaagcgctaggcttagagatggccggtttcggtcacgaagcactggtagaaatcgaaccccccgcgtgtgctacgctccgattcaatcggcctagctggaatgtattcgaaagcgatcttcgaactttcagggctagcaattacaaggggattgatctccttgcaggtggtgtgccatgcccgccgttttcgaaggcaggcaaacagttgggtgcggacgatgaacgcgacctgtttccggaagccatacgtttggtagatgagtgccgcccccgggccgtgatgcttgagaacgtccgcggcctcttagacgcggtctttgacgactatcgcaataaggtagaaggtcaattgaagaagctaggctacgtccctagctggcgtctcctgaatgcatccgatttcggggtttcgcaattacgtccgcgcgttgtattcgttggcattcgaaaagagttcgcagcgaatttttcttggccaacaccagcacctcaggaggcaagcacagtcggcgagcttctacacgacttgatggctgcacgtgggtggcgcggggccgatgcatggcgcctaagagcaaacgccatcgcccccacccttgttggtgggtccaagaaacatggcgggcctgatcttgggccgacgagagcaaagaaggcttgggcgagcttgggcgtagacgggatggggatttgggacgacgctcccgagcgagatttcgtcggaatgccccgcttgaccacccgcatggctgcgagagttcaagggtttccggatgactggcaattcagcggccgtaaaaccgctgcctaccgtcagatcggtaacgccttcccccccccggtagcgaaagcggtcgcggctcaaatctacacagcggttaccaaacgtcaatcatttgccgtagcgtag

SEQ ID NO: 518200 - DNA, 459 bp, Stenotrophomonas maltophilia
atgaagcggataggggttcttctagtcgttttggtaggcctgacttggcttgggtcgaatttggccccgcgcagcgagcccaaagttgtcgctgcgcctaaggcagtgtccacgccgtcgcccaagcaagccgagcccgcggcgacgaaatccaagcaggacgtcgccatgacggctgctgagaagaaggcgcagcaggtgaagtggtttggcgcagaaaccatcgtggcggccgagcgtgcagtgaggcgcgaactgaaggatccggatgccgcgcgtttccagggtgtgcgcgctagctacacggacgagttcggagtggtcgcctgcggcagagtcaacgctaggaacgaacttggcggctactcgggcttccggcggttcgtatttggggatgggcgcgtgatcctcgagcaaagggacagcgtcggcgccgcttggtcaaaggcttgcctgtaa

SEQ ID NO: 518201 - DNA, 189 bp, Stenotrophomonas maltophilia
atggccatgcagaacaagtgcgttgacgtcactacgtttcgtgcgcctgttgcccgcaaggagcggaccgagaagctggcaacgtccgccgaggctatcgcccaggcgctgtaccgcaaaccgtctcagaatttcagcacgcagagcgctctagccgcctttgctggtgttcgctcgcgacggagctga

SEQ ID NO: 518202 - DNA, 444 bp, Stenotrophomonas maltophilia
atgtcgcgggctttgcacgcccagcttatcgatagtggcgtccagcccgaagcgtttgctcgggaattcgctctgtggaaggctggttggcccaagaacgaatattctcacgagctgttcggcaaggatggcgcttacgtggcgccatctgtcgatggtgagaaatatcgcttgcggcatgtgcatattgttccgttcaatgacccgcaggcgcgcaagcgttggtttggtgcgctccgccgttttggccgtaagaccagtgaccgtcatttggtttatgtagctgatgacaagggtaatttcgggttgatctatattctcgaagaacccgacgcacaccgaatcgcattgatgaaaggtgcgcacgagcgagagatcatgaaagggttcgcgcttgttgccgaaaacttcctgtgggacggctctctcgatgaggattcgtaa

SEQ ID NO: 518203 - DNA, 1290 bp, Stenotrophomonas maltophilia
atgacggctgaggtcgcagttctcaattgcacgggtgttgctctggcggccgacagtgccgtaaccgttggttcccagaagatatacaactctgcagttaagttgtttgctctttccaaggtggcgccagtcgcgatcatggtttatggcaacgctgccttgtcgggggtgccatgggaaatcattatcaaggagtaccgtcggcgcatcggtgcggtgcagctgtcaactctggaggattatgtttcggggttcgtggagtttatccagggtagcccggtgctgtttaacgaccagggggatcagctttggctctacgagcgaactgacgagattcttggggaagttcagaaggcatgccttacccagcttcaggagcgtcttactgaagtggacggggtagggcttgacgaagatgaggttgtggctatcttcaagcaggtctcggcagagtgcttgtccaatattaaaggttggccagcgctcgatgtgccgaaggatgtgatagcgcgcgttaggccgtggataaggcagattgttagcggaatcggtaaggagcgttttggcgatctctttggtccgctctccaggaccctcaatcagatcgctctacaagcatttgggcgaatgcttttccctgggccatcatctggaattgtcattgctgggtacggcgaggatgagatttacccatccattaagactcttgagtttgatggtgccgtacggggatttgcccgctttaaggttactgagagcaggacaaagaagatcacccccggcggcaatacggcctccatcattgcgtacgcacaagaagatatggtggcaacgttcatggagggcatgaaccctgccgtgggccaattcattgacaccagtttgacgcaaattttctctgccctccctgatgctctgctgtcaggtatgggcgttgacgacgcaggcctccgtgaagcactcagcggcatctgtacgaatattaagaacggatttatcgagagcgccggtcgtcaccgcttcgccgagcatgtgtcgccaatattggacatggtgacggcactgcccaaggacgagctcgccggaatggcggagtctttagtgaacttgacagcattcaagcgtcgagtgacgggaactcttgagaccgtcggtggtccaattgatgtgtgcgtcatctctaaaggagatggcctcgtctgggtaaagcggaaacactatttccctgctgagcttaatgtgatgttccatcagaattatatgcgtgatgtccaaggtggctcgccatga

SEQ ID NO: 518204 - DNA, 231 bp, Stenotrophomonas maltophilia
atgaatcgaagaaaaaaggtgaatgtggtgaagggcgatatggagagatttcacacgctggctgaggtcagtaagcacttcagtttgcctgaagtcgaggtggatgtttccatcaattccaagtcggactatccgcgaattcgggatgcgctacagacgttgattgttgccgcaatagagaagggtaaaccagctgtcaattcgcaaaagaggcgtgcgaaggctggctaa

SEQ ID NO: 518205 - DNA, 480 bp, Stenotrophomonas maltophilia
atgaccgatacgacgcatccagtcttacaaagactgcttgagcatatgccgaaggcattcgacgtgacgcttgtaacccttaagggccaactgctagttgaagaacagctggacgactacatcgaccgaaagttgctcaacgcagccgcgcttcatggtgtgcaagtgccgttcaatctaaaagttaagctagcccaagccctgtccggaccaagttggcctaccgaagtgtggacggcgaccctaaccctaaacaagattcgaaactcactcgcacatcggctcgacaactccaatctcactgggctagtagaagaatttctccgactatgcaagaaggcgggatacgaacccatcccctctgagccccgatcaattgatcaggactactctcaggcactcgtctatcgcataggcctctttgcacccagcgccagcgaagcgttgatgaaccgcaaaggcctatccgcaaggcgatag

SEQ ID NO: 518206 - DNA, 240 bp, Stenotrophomonas maltophilia
atggaacacgagaacaggatcagcgcacgcccaggcacctacctgggctatagctaccaggctatcgctgagcgcagcaatggaaccatctgttatcgcggccacatcgaaggtgcaaggcgccatggtgcgtgcagcagcaaaattgccactttggaagagggcctggatcgggcggagagcatgcttcaggggtacatccgtctgttgccgaaaagggcggtgcaaaccgtcgagtag

SEQ ID NO: 518207 - DNA, 5463 bp, Stenotrophomonas maltophilia
atgaatcacatctatcgtcgtatctggagtcatgcaaagcaatgctgggtagttggtagtgagctgagcgcatcgtgcggcaagcggtcgtcaaccaagctcagggcgcttgctttgctggttgtcgcgtcgacggcgttcgctgcatcggcgagtgagaacgcggagcctgtgtctgagagcgagcggagggtcgagtgggaagccgcgcgctatctggctcattctccgatggtgtcttcgctctttgcagcgcaaccgcgtgcgatccacacccagctggcattgctcaacgatgcctactacaaggacgccacgctcaacggcgacatgcagatgattcttggatccagatccagcatcagcggttggggctcagtagtctacgggacagcgtcctcattgtcaggaaaaggcagtgttctggtagggaatgaagcagtcgcaaaaggggatagaaatgtagcggttggctacaaggcagaggcaaagagcggctactcgacggtgctgggtgcgagttcggttgcgtcgggcgtcggcaccactgctatcggtcacgatgctcgcgcctacgctcagaactccatagcagtaggtagtggcgcccgcacagttgaaagcacggcgggtgtgtcccgcatcgcgatcggagggaatgcatttgcgggaaccgctggctactcgggagcaatcgccttgggcggaaactcgcgtgcagagttcagcggcgttgcgctcggtcatcatgcgaaggcactggctgatggatcggccgccatcggcgccaactctgaagcgaccgaggcgaactcggtctccgttggcaacgcgtcgaccaagcgacgaatcgtcaacgtggctgatgcgcgcttgagtgcgacaagcacggatgccgttaccggcaagcagctgtttgcaacccaaacccttgcgcaatcggtcaacaatcgggtggatgcgacagcactggcgcttggcaagggggcattggcagagtcgaataccacctatggcgcaagcacggcagtcggcaacaacgccaaaggctacaacggagcgagcgttgcgctcggcgatgacgcgcgcgccggcgtcgatgtggcaggaaacaaggtcaatggcaggacgggaggagtctcggtcgggtccggaacccgtagtgcgcacggcgccgttgccatgggtcacaaggcagttgcgggtggcaatttctccgttgcgatcggctccgatgccgtcgccaatgaggagttgagtaccgccttcggaaaaaccagtgtcgcaggtgcccagcagacgacggccttggggagagggacacaggcaacggcgaagttcgcaaccgcagtgggcaatcttgcgagggcaacgggcatcaattcgctggcacttggaaacagtgcacatgcagggcacgaaaacgcagttgcgctgggggctggttcggtcaccgcctcggccaattccgtgtccgtgggcaacgcgaagtccacgcggaagatccagtacgtcgccgatggtgtggtgggtgccggcagcaccgatgccatcactggcaaccagttgttccagaccaatacccggctcacggccgtggagaagaccgcaggcgatgtgacgggggagctggctgcggtgaagacgatcgcgcaggccgccacgaaccgcatcgatgcgacgaccttggctttgggtaggggggcaaccgcagagaatggcagctacggcatcagcaccgcactcggcaacaacgcaaaagcgtacaacggccgcagcgtggcactgggcgacgacgcgcgcgctggtgtggatgcggacggcaacaaggtggccaaccagaacgcaggcgtctcggtcggcgccggaacccgtagcgccaacggcgcggttgcaaccggcttccgtgcaaacgcaagcggcaacttctctattgccgtaggcggtgacgccaaggccgaggcagagcacgctacggcgattggttatctgagcaaggccagtgccagccaggccaccgcactggggcgtggcagtgaggcgacggcaaagttcgccagtgcgctgggcaatctggccaaggcttcgaacaccagctccgtggcgctgggtgaccgcgctcaggcctcgcatgagaacgccgttgccttgggtgcaggtgcagtgaccgcttcggccaattcggtatcggtcggcagcgccagcaggaagcggaagatccagtacatcgcagatggtgtagtgggggccggcagcacggatgccatcaccggcaaccagcttcatgccaccaaccaggccgtgaccaaggcccagacagcagctgacggagcgacgaccaccgccaatgccgcaaaggtggaatcgggcaaggcgctggccgaaacggcggcgctgggtggcctcgtcaaccaggccgctgccaatgagagtgttcgcctgggacagaagaacagtggcacgcagctggatgtgcgcaacagcgccaatgcgaaccgcaggatcctgggcgtcgccgatggggatatcagcgcgaccagcaacgaggccgtgaccggcaagcagctctatgaaaccaacgcgaacgtgactgcggcacagacgacagccagcgcagcgaaggtcagcgcggacacggcactggctgatactggagtgctgaagggccttgtcggtcagaccgctgtcaacggcaacgttcgtgttggcgagaagaacagcggcaccgtgctggatgtgcgcaacagcgcgaacgcgaatcggacgctgatcggcgtggccgatggtgcggtcagcgccagcagtgatgaggccatcaacggcaggcagctcaatgccaccaacgacaaggtgacgacggtggaggacattgccaggactgcgggcaaggaagctgccgtggcgaagacggatgcagccaatgcactggccgagacagcggcgctgggtgggttggtggcgcaggtatccgcgactggcaatgtgcgcttgggtgagaagaatagcggtacgacgttggatgttcgcaacagcgccaatgccgaacggaagatcagtggtgttgcagatgggctggtgagtggcgacagtgctgaggcaatttcgggccgccagcttcatgagaccaatagtcgtgtatcgaatctagagagctctggccagttcctgagcattggaacagcacccatcatcgagcgcgctgaagcaggcttggctggtgtggccctgggcaatgctgctaaggctggcgctgatggcggaaccgcggtgggcactcgtgcagtagcaatgggaagaaattccgttgccgtcgggcgcgggtctaccgtcttcgaagggtccgacaatggcttcgcactgggtgccggggccgaagttggatcgattggtggagctgcaaatgggagcgtggcgcttggggctggtgcaaaggttgccaatggcgctgatagctcgctggcattgggtcagggcgctgaagctcgcgaaggcggtgttgcatcttttggtaatgcgattctccaacggcgtttggtgaacatcgcccgaggcactgccgaccacaacgccaccaccgtcgcccagctcagggattccctcgccaccctcggcggcggcgcaggcatggatgccagcggcaacatcatcgccccgacctacacggtgcagggaggaacgcagagcaccgtcgaggatgcgctgacggcactcgatggcggggtcgtcaccgcaggccgtcgcacggacaaggtggaaggccagcttagctcgatcttccaggattcaccttcggcccgcgctgacggcttgagccagatcgcgctgaatggcgtgagcggcatggtgctgaccaatcttgccgatggccgagtggccccaggaagccgtgatgccgtaaccggcaaccagctctacgccgcagagcagaagatctcgcagaatcggaatgatctggaggcgatgcgcaaggagcgggagatggggcagcaggcaatgcgagagatggatgcaaacggcccgatcgacttcggtggtgcgcgcttgactggtgtggctgaagcgaagctatcggctgacagttccgacgttgtacgcggcagtcagctctatgggaccaatagccgcatttcggaacttgagggcgacgctcagttcatgagtatcggctcagcccccttcagtgagcgtgctgcagccggtgtggcaggcgttgcggtcggaaattcagcaaagactggactagaaggaggaaccgcggtgggcacgtttgcggaggcgatgggaaagaactccaccgcaattggtagagcggcggctgtctctgtggattccgataatggattcgcaatgggagtcggtgcacaggtcggtggaggcgcgggcggcgcgaatgaaggtatcgcgattggtgctgccgcaagagttggaagcggggctcacggctcgctagcacttggaaatggctctctagcagatgaagaaggagttgtgtcatttgggggcgtcggtatgaagcgccgcctcgtgaacatcgccaacggcaccgccaaccacaacgccgccaccgtcggccagctgcgcggtgcgctctccgtgctcggcggcgaggtggatgccaacggcaacatcgtcggcccgcgcttcaacgtccagggccaggcgcagtccaccttgaatggcgcacttgaagcactggatggcgcggtcgtcaccaacacctcgcgtgtggacaaggtcgaaacccagctccgttccgtcttccaggacactccctcggtccgcgctgacggtgtcaaccagctcaccctcgccggcgccaacggcatggtcatctccaacgtggccaacggcctgatcgcggccggcagccgcgatgcggtcaacggtggccagctgcattcgatgcagcagcagctcaacgggcgcatggatgggctggagcagcgcatcgacgatgccccggcaccgcgtgctctggcgtcgtccttggtgccgaagccgcagactgaggaaactcctgtggtgccggaaggcaaggattcccagcaggtcgcttcggtaggcgaaggcgacaagcccacgccacagccgaaggccaacaaggacgactcgccgaagccacaggtcgacaccgccgagctggagaagttgctggcccgcgccaacgagtacaccgatggtgcgatcagcaacttcgagcgccgcctggacaagatggacaagcgcttcaaccgcatggcggcgatgagcagcgcgcagacggcgatggcgatgaacaccgccggcctggccacctacaaccgccttggtgcgggcgtgggctacagcgagggtgagtcggcgatggcggtgggttaccagcgcgtgctcaacgagaagggctcggccaccttcagcctcaatggtgcgttcaccaatagcggtgagcgcagcatgggcgtgggtgtgggcatcggctggtaa

SEQ ID NO: 518208 - DNA, 2703 bp, Stenotrophomonas maltophilia
atgacgcagagcctgaatgacgaatcgaggaaacacatcgagcaggttgccagtgaaacgttggcgcgactcgaaagcatcgccaaaacggccaagagcaagctgcgcgatgaacgatcccttgggttcgaggcactggcaagcatcaacaccatgacgtccagttcaaccatccaaaggctggatcaaatcagtcacgcgaaccgcgagagctatcagttgctggctaaggagcctgctatcgcgcgcgtggtggttattgatgaagatggcgaacagaaaacctactacatctgccgcactacgccggtgtcgggttttccaaacttggccagctaccgggctcctgttgggcgactggcctcattgtcaattggcgcagagttcacgctgcccaatggagccgtcgttgaagtgcgcgagcgcgcccagatccatcccaatgcacttgccgatggttgggactcgcgcaacaccgtggttgaagcagaggatttcgggccgatcaccatcgagtccctgcgtacggtgctgacggaagttgttggagcagaagttactgaagaccttctcggccaattgctggccgaggaagccgtcaaggccaacattatcgacggagttcgccgtagcgtcatcaccaagatggggctgcgggatcaacccattctcgatcagtatcaggacgaaattttccgtcttcctctcgacaagcgcctgctgattcttgggccgcctggcactggcaaaacaacgaccctgatccgccgcctcggccaaaaactcgacaccgctttcttggaagaaggtgaacaacgtctggttgacgcagtcgcctccgcccagggcacaactcacaccaaaagctggttgatgttcacgccgaccgaattgctcaagcagtacctcaaggaggcttttgcgcgtgaaggcgttcccgcctctgatctgtgcatcagaacgtggcaggactatcgacacgggctggcccgaaatgcgttcggcgtactcagaacggcatccggtggcggcacctttgtcctgaaagacggaatgtccaacttgagcgaagccgcactggagcggcccattcactggtttgacgatttcgatgcatggcagcgcaaagcctatgtgcaggagctgcatgatgcagccactctgcttcacgatgccaagatcccagaggtactgaatctcggggcacgtctgcaagatattttgtccaaggcggccgatggcgcactggttctcttgtttggcttgctggccgcagaagttaccaacgtgcaggcactcgccggcagcctgaaggaaggctctgacgccaagatcaaggccgcactcaacctgcaacttaaccgcaatcgagcctttctggatgagttggcccgagtgatcgacagtctgcaggacgcgcaaacaacggatgtggacgaccaggacgacccggataccgacgaggaagaagacgctgcggcaccccgcacggtccgtgcagccgcgctcagtgcatacatgcaagcggtgcgtgcccaagcccgggcgaccgcatccaagcgcacggtcagcaaagtgtctcgcaatggcaagatcctagagtggttgggggatcgtggcctgacggaggtagatcgtgcagatgtcggcgcaagtcttctggtgcagtccagcgcgcgccgcttcttcaacccggtcaagcgctaccttgacggtatcccgaagcgctaccgcgcattcagacgcgaacgcctgccggccaatacttggtatcgccacgaagcttttgaagcgcatgaaattcacccgctagaattggacatcgtattgctggccatcttgcgcaccggaggcgatctgatcagtaggcccgacgtcctgcgctccatcgacagccccgcttggtcatcgctccagccgtttctggggcattaccgcaaccagattctggtggatgaagcaaccgacttctcgcccatccagcttgcgagtatggcggcgctagcggatccacgattgcgctcattctttgcctgcggggacttcaaccagcgcctgaccacttggggcgcacgctccgctgatgacttgaggtgggtgttcgtcgatctcgacatcaaggaaatcaccgtttcctaccggcagagcaagcagttgaacgatctagcccgcgcaatgatccgggcagtcggtggcactgggcaagacgtcagcttgcccgcgcacgtggacagtgtgggtgtcgcgccagccttgctagaacatgccgccagcacagaggccactgtggcgtggctggcggatcgcatacgcgagatcgagtgcttcgtcggccagttgccatccactgccatttttgtgaacgccgaggaggaagtcgtctctgtggccgaggcactcaacaacgcattgagcgagcacaacatccaagtgatcgcctgccgcgaggggcagactgtcgggcaagaaggcaacgtgcgcgtgttttgtgtgcagcacatcaaaggtctggaattcgaagcggtgttctttgtcggcattgaccagcttgccacgctgcaaccggcgctgttcgacaaatacctatacgtcggcaccacccgtgcggccacctacttcggcgtgacttgccaaggtaccttgccatccgtcgttgagagcctgcgcgcgcacttctgcctggactggcagctggatggctga

SEQ ID NO: 518209 - DNA, 2001 bp, Stenotrophomonas maltophilia
atgaaaaaactgaaaatgcactcacccaacctggccgaagacaacatcacccacatccgcgagatgtttccgggttgcgtgaccgaagccaaaggggaaaatggcagcgtgaaattggcggtggatttcgaccagctcaggcaggaactgtccgctatcctcgtcgaaggcccgcaggaacgctaccacctgaactggccgggcaagcgtgaggcgctgctgacggccaatgcgccgattgccaagacgctgcgcccagtgcgcagcgaaagcgtggacttcgatactacgaagaacctgttcatcgaaggcgacaacctggatgcgttgaagctattgcaggaggcgtatctgggcagggtcaagctgatttatctcgacccgccatacaaccgcaagaagggcaacaatcttgtctatcgggacgacttcgtcggcaacacatacgagtacctgacccagagtaatcagtctgacgagcagggcaacaggcttgttgccaataccgaggctaatggtcgattccattccgattggctaggaatgatgtatcagcgccttcgcgtagcgcgcaacctcctgactcccgccggtgtcattgcgatttccattgacgacgccgaaacggccaatgttctgcatctatgctacgaggtatttggcgagtcgaatttcctcggcaccttgatttggaagaacgccaccgacaacaacccgagcaatattgcggtcgagcacgagagcatccacgtctttgcacgaagcaaaggcgatcttgaaggtgtgtggaagagttcagtctccgacgttaaagaagtcctcatcaaaattgggaatgaactggtcgccaagcatcccgatgatgccgatcagctacaggctgcttacactgcatggtttcgtgagaacaaggaccaactcggtccgttggctgattacaagttcatcgacaagaatggggtatatgcgggtagtcgcagcgttcacaaccccggaaaggaaggttatcggtatgacgtgattcatccgactacccagaagccctgtaagcaaccgcttatgggataccgcttcccagaagaaaccatgaagcgcctgcttgatgcgaagaaggttttgtttggtgaagatgaaagtaagctcatcgaattgaaggcgtatgcttatgagttcgaggacaagctgtccagcgtgttcgatctggacggaaggtctggcgcatacgacctaaggactctcttccctgaagggaagaaggtgttttcaaaccccaagcccatcgttttgatggagcggctcatctcctttatgaccgggccgaaagacatctgcctcgacctgtttgctgggtcttcgacaatggcacacgcgacgatggagatcagccgccgcgacggcagcaatcgccgcttcatcagcgtgcagtaccccgaggagatcgggcaggagagcaaggatgcgaaagaagcgcttcagttctgcacgcaagtcggcttgaagccactcatctctgagatttcaaaggagcgaatccgccgggcaggcgtggcgttgcgcaacaagagcggcgctcaagattggaatcgggacgtgggcttccgcgtcctcaagatcgacacctcgaacatggctgacgtctactacgcacctgatgcgctggaaaaagccaaccttgacctgttcgtggagaacatcaagcccgaccgcacagcggaagacctgctgtttcaggtgatgctggactggggtgttgacctcgccctgcccattgagaagagagccatccagagcaaggacgcgttcttcgtggacggcaacctgctggctgcctgcttcgacgcgcatggcggcatcgacgagaccttcgtcaaggaactagccaaccacaagccgctgcgtgtggtgttccgcgacgccgggttcaaggacaacgccgtcaagatcaacgtggagcaaatcttcaagctcttgtcgccatccaccgaagtgaagtgcatttga

SEQ ID NO: 518210 - DNA, 3084 bp, Stenotrophomonas maltophilia
atgaagctgaagttcaaaacgcaggcctaccagactgttgccgtgcaggctgtagtggattgcttcaaggggcaggtgccgcagcacggcggcattcgctatcgtcttgaccccggctcccgcaaggcggtaaccaccagcccacagggtgcgctggtgctggagtccgcgccagatgcagcggcagaacagggggcggctttccgtaattccgaccttactttgctggagacaaccctgctggacaacatccacgcggtgcagcgggcgcagaacctcccgctgtcggatgcgctggtcaaaaccaaggtcgccaaggtcaatctcgacatcgagatggaaactggcacgggcaagacctactgctacatcaagaccatcttcgagttgaacaagctgtatggctggagcaagttcatcatcgtggtgcccagcatcgccatccgtgaaggtgtggccaagtcgctggacatcaccgccgagcacttcctggagacgtaccagaagaaggcgcgcttcttcatctacaactccaagcaactgcaccacctggagagcttctcgtcggacgcgggcatcaacgtgatggtgatcaacgtgcaggctttcgcctcgcgcggggcggagaaccgccgcatctacgacgtgttggacgatttccagtcgcgccggcccattgacgtaatcagtgcaaaccgcccggtcatgattctggatgagccgcagaagatggaaggtgcggctactctgaaatcgctcgaagaattcaaggcgttagcggtgctgcgctactcggccacccacaagaccacccacaacaaaattcaccggctggatgcactggatgcctacaaccagaagctggtgaagaaaatcgccgtgcgcggtatcgcggtgaaggggctggcaggtacggcaggctatctgtacctgcaatccattgagatttcgagcaagaaaccgcccgaggcacgcgtcgagttcgagcagaagttgacgggcggcagtatcaagcgtgtggtgagaaagctctgcaagggagatgatctgttcgatatgtcgggcggactggaacagtaccgaaattacttcgtcagtgatatcaacgccaacaccgataccctgagctttaccaacggtgtggagctgacggtcggcgacgccaccggcgatgtgactgaagcggcattgcgtcgcatccagattcgggaagctatcaaggcgcacttcgacaaggagcaggcgctgttccaacagggtgtgaaggtgctgaccctgttcttcatcgacgaggtggccaagtaccgcgactacacgcaggcggacgaaaaaggcgaatacgcccgcatctttgaagaggagtacatgcagtacttgaacgaggtggtcgatctggacgataccgcctacgtcaagtacctgaagggcattgctgcgggcaggacccacagcggctacttttccgttgacaagaaaaccaagcggctggctgacccgacggttgctgcgcgcggcgagaacgcagggctttcagatgacgtggatgcctatgatctgatcttgaaggacaaggaacgcttgctgtcgctcgccgagccggtgcgcttcattttctcgcactcggccctgcgcgaaggttgggacaacccgaacgtgtttgttatctgcgcactcaagcacagcgacaacaccatctcccgccgccaggaggtggggcgtggcttgcggctgtctgtgaaccagacaggcgaccggatggatcacccagctaccgttcacgacgtgaacgtgctgactgtggtcgccagtgagagctacaaggactacgttgctgcgctgcagaaggacatcagcgattcgctttctgaacgtccgcgcgtggcaaatgaggagtacttcaccggcaaggtgctgaaaacagcgaccggcgacgtgccggttacgccgcaaatggcgaggcagatttaccgctatctggtcaagaacgactacacggacgattcagatcggatcacgggtgcgtatcacgatgccaagaaggccggagccctggccgatctgccagacgaactgaagtcgcacgccgcgcaggtgtaccagcttatcgacagtgtgttcagcgccagtcaattgcccagcatcggcgatgaccgcaaacccaagaagaacccgctcaacaccaacttcgacaagcaggagttcaagacactgtggaaccgcatcaaccgcaaggcggcctatagtgtcgatttcgactcggacgagctggtgcagaaggcgatcaaggagctggatgcggccctgcacgtgaccccgctgcaatacacaatccaagcgggcgaacagatcaacgaggtgaccggcgaggcgctaaagcgtggagatagtttcaaggtttccgacatcaggaccgaatacaacaagcagtcgattccttcagcgatcaagtacgacctgatcggcaagctggccgaaggtactcaattgactcgccgcacggtggcggaaattctcatgggtattgacgtcgcggtttttgcacagttcagaaccaacccagaaagcttcatcagcgagtccacgcggctaatcaacgagcagaaggccacggtcatcatcgaacacttggcctacgatcccatcgaggacaagttcgaccttgacatttttaccgctggacaaaccaaacaggacttcagcatggccggggaaaagctccagcggcacatctacgattatgttgcgacggattcgaaggtggagcgggagttcgtgagagaactggacacagcaaatgaagtggtggtctatgccaagttgccgcgcggcttcctgatccccacgcccgtgggcgaatacaacccggactgggcaatcagcttcaaggaaggcgctgtcaagcacatctattttgtggcagagaccaagggctccatgtcctcgttggacctgcgtgagatcgaaaagaccaagatcaagtgcgcccgcaagttcttcgatgagatgaaccgttgctacgccccggaaaatgtcaagtacgacgtcgtggacagtttcggcaagcttatggaggtggtgaagtag

SEQ ID NO: 518211 - DNA, 738 bp, Stenotrophomonas maltophilia
atgcttgtggcttccggcgtagtcaccataggtgcagcggcgtacgtaaagaaggctgccgagaagatggcggaaaaggacttcaaggacatcggtctttcagatgtggtgcgaaagtctctagacgcgttcaagaagctcattgatgtgcttaagcacaccaagggaaatcgtgagtgggcaagcgaccttcactggggcggagcgggggttgtcggaattaggaatgaatccggcgagatcatctatatcccgattgagtacctaaagtggtacatggaaataccgtcgaccatgctgaagcgaatttcatcaacggttcgggaggggcgctcattggaaattggcgttaggagtggtgatggcgacaactttgaagcgaccacgatcacagttgaagagaagtcatttttcggccaccagccggcagcgaatgacgatggagagttgctgtttccagagctggaacacggcgatgaggtgcgcctggaagggaagcttacgcgaggaaatgaaaacgcgaattcattgggcctcgagtatcacgggcatgtgttgaattgtgtccccggtgttgggaacatcaagaaatacaagccggcgctttttcttcattgcgttgtcgaggggacagtgtcacgcctgtacaagcaatctcacgtcgcagagcgacggccgactatcatcgtctctgacatcacgccgcttgagtcagacgaccaacttactcttctgtag

SEQ ID NO: 518212 - DNA, 240 bp, Stenotrophomonas maltophilia
ttgtatccattgactgaccagtgcatcgaagtgtctggtttgcttgacgtaaggattcagcctgcggatgtatacgtccgcaatgtcttgatgagtgacaccgcgggcctcagcaacatccttaacggctctgattcgaacccggcgaacatcgctagagctattgcatggagctgctttgtgagccacaagaatggcgtgcaagacgtcaactgcatcgtcaatgcgtttgctcattga

SEQ ID NO: 518213 - DNA, 348 bp, Stenotrophomonas maltophilia
atggcttcctcataccctcctgttccagccaagccacgtgaaattcttaaggactatccggaacatatcgaaaagctgctgagggccctcaattcggtaaaggacagaagtatccagtccatcccgccctatgaagccgtagtctggctactggaggaccacctcagtggctttatctccgaagcgcgagctgaacaggcaaccgcagaagcgtcgggcgaccccgaagccattgcccaggctcaaggaaaggagaggctcatgtccttcgccaggtccggcgggattggtatgctcaggctcggcgaactcagagagtacttcgaccttcattcaagaggcatctaa

SEQ ID NO: 518214 - DNA, 894 bp, Stenotrophomonas maltophilia
atgcgttccagatcgttgagttttccgcttcgttttctagtgatgatcttggttgcgagcgttttccctccaggaacggttgctgcccaaactgttacctatatccacaccgatgcccttggctcggtggtcgcggagactgacgctaacggtaaagtcatcaagcgctatgactacgaaccctatggcgccgtggtgggtgggcaagtcaccgatgggccgggctacaccggacacgtcagcgattccgcgactggcctgagctacatgcaacagcggtatatggatccgcagctgggtgtgttcctgtccgtggacccggtgacggcgtatgaccagccggttgggcagttcaaccggtatcggtatgcgaacgggaatccgtacaagttcacggatcctgatgggcggaatgccttacttgctgcgccgctggtggttgtaccgatcgttattggcctgacctactatgcaaccacgacagccgagcagcgaacggatatcggcaacaagctggacggggcagtaaaaggcctacttcagaagtccgaggaatcgccgagactacctgcactgcaaggtgatgggtcaattgccagagacaaacagtctccgaaaattgaatcgagcgccggagaaaagaaggaaaccggcacgatctatgtcgattccaaggggaacgcgattccgacaccgccgggtggcaaaattgaaggatcacccgatggtcgatttgttcaggcgaaagggcctgacggccagccaactggggttcgaatagatggcggacacaagccatcaactcatcctgatcctcgcgcccagcaaccgcatggtcacgttcccggtgtaaccaatgccgacggaaccccatggcttccgatcaaacaatga

SEQ ID NO: 518215 - DNA, 4674 bp, Stenotrophomonas maltophilia
atgcggatcgataccatggaagttacgatcaactcatgctggcgcgcagccgcaacgattgcgctcgcggcagggatcatatgcaccgcacaggcgcagcaggctgttcagcagccctatcaagagtatgacaagaagctccgctcggctgagcaggtcggtccactgacatcagaactcttcggtgactcggtcaatgtgtacgaccagagcggatacttcaagcaaaccgatatcgacttggcaggcaataatgcattaccggtccgactcgagcgccggttgaatgtgaggcccattcccgaatacggtttgccgccgttgatctatgggggtgccggtgactggagcatcgatgttcccttcatctccggcgtatttgattcccagtatgggtggacctatcgaggttcccggaaagatccacgctgcagcaccaacttcattccctacacgcaacctccattccggattgaagacatctggtctggctataccgtcaacctacccggggagagcgcgcgatcgctaatgggtgagccacctgctggcctcaagccgacaagccgtcagggcgagaactggagctggaccaccagcgcaatggacaccgtcagttgcacgccgatgattaccggcctggagggcgagggcttcattctgcagaccacatcgggcatcaagtacacctttaatgttggcacccagcgcgttgtgggtctgatgggatccatcggcgccagcgctgcccaggcgcgtgtagagatctatctgttggcaagtcgaatcgaggatcgcttcggcaatagtgtcagcatcagttataacgggaacggatatccgaccaacatcacgtccagcgatgggcgctcgatctcgttgaactatgtaggaaatcgcctgcagagtgcctcggcaaatggccgcacctggacatacggatatgcaggcaactcgctgcagcgggttacccagccggacggtgcctggtgggagatcaaccatctctccgacatgcgtatcgcctatgagaactggccggaagacccctcccagggatgtggaagtccacctctcagggacaagatctatacacttcagatgaagcatccatctggcgcgataggcacattctccttccggaacgggcgaggctatcgggcgggagttcctgcgagttactgcatcgaagaggcgcgcgatggccagatgattcagtatctcgcggttgccaattactttgagaacttcggtctggtggaaaaaaccattgagggcccaggcattgctcccatgcgctggacgtatacggacaagggggattatcaggattactgggcggggaacgatccctattgcagcacctgcacccagtccaaggcggtgagaatcacgcagcctgacggaagctggattgaagagatctacggaattgtcttccggttcaatgatgggaagcttctcggtcggcgtgtcggcaacgcagcaggagcggtgctcgagaccgaagacctgacgtatgtttcagatgcgcagatgccttcgatgcccttcccggatcgctatggctggacgtggggaggtaacgacggcagctcggcactgctcaggccgctgcaacggcgtcaggtcacgcgcgatggtgtgacgatgacctggcaggccaactcctttgacagctatggccgcccggcaagtgtgacccgcagcagctcgcaaggtgccagtcgtaccgataccactggttactataacgataccaatgcgtggctcctcggccaggtttccagccagaccaacaacaacactggtctgatcgaactacagacctcctacaacgccaaggcgatgccgactgagcagcggcgcttcggcaagctgctgcagacgttgagctaccatgcagacggtaacgtcgccagctttgccgatggtcgcggcaacagcacgacactcaacaactggaagaggggcatcccgcagtcgataggttttgcggatggttcatcgatgtcggccagcgtggacgacaatggctggatccgctcggtgaccaatgagctgggttaccagacaagctttgactatgacgcgatgggccggcagacccgcaaggcattcgctctaggcgacacggtggcctggaacccgacgacgcagattttcgaacgcgtggatgccgtggaatatgggttgggtgctggccactggcggttgacgaccaatactggaaatcggaacaaagtgacctggttcgacgcgatgtggcggccggcgttgacccgtgagcaggatgcgagcaatccggcagcgacccagcgctaccagcgatttacctacgatcatgccggccgtgcgacgttccaatcgtacccggactcggccagcaacccgagcgcgggacagtggtcagagttcgacgcactgggccgtgccacctccagttcgtccgacagtgagttgggtctgctgacgacagtcaccagctatcttcccggcatgcgggtgaggacaactgacccccgtggacaatcgactacgaccctgcaccgggtgtatgacacgccggcctacgatatgccggttgccatcgaacatccgggcggcgcgttcacggacattggccgtgatgtgttcggcaagatcacctcaatcaagcggcgcgacgccagtggcggtaccgccctcacccgatcctatgtgtacaacccgcagcaggagctgtgcaaaagcatcgaaccggaaaccggagccatggtcatgggctacgatgcttccggaaatcttgcttggtcggcggcggggcttacgcagggagcggtcgataactgcgacacttctgcagcacaggcatcagggcgccgggtggatcggacgtacgatgccaggaaccgcctgaagcaattggtttttgctgatgccagcggcgatcaggcgtggcagtacaacagctcagggctgcccacccaggtgaccaccagcaatccgtctggcaaggcagtcaccaacacctatgcctacagcaagcggggtctgatcatcggggagacgatgcagcagccaggcggcgtcagctggtccatgggatatggatacgacgccaatggagcacttgccagtctgcagtatcccagtggcctgcagctcgcgctggctcccaacgcattgggtcagcccactcgcatcggatcctatgccatgggcgtcggctattacccgaacggtgcgctgcgtacattcacctatggcaatggcatcgcgcacagcatgacccagaacggccgtggcctgccggcgagggcggtagatgttggcgtccttgatagcaacattgtctacgacaggaacggcaacgtagccagcattaccgacgcgattgctccggccaagtcaaagcagatgcagtacgacgcgctggatcgcctgacacaggcaacctcagcatcctttggcggcgacacgatctaccgctatacctacgacgtgctggacaacctgcgcagtgccaagctgggcggcgtgaagcagcacaattactggtatgacgcccgtaatcggatgaccaacgtgagccgcgatgatggcagtgcgatcatcggcctggactacgacgtccagggaaatctggccaagaagaatggtgaggcattccggtttgacctgggcaatcgtctgcgcgatgcggccggtcgggagacctatgcctacgatgcgcatggtcgccgagtcggtagctatagcagtcaagagggcgacattctctccttctacggaaatgacggcgtgctgcgcaggcaggacaacaagcgcacgatgaaagagattgagtacatcagcttggggactcacttgattgcccaggttgagaagagcaccggtcttgccgtgcctcgcctctccggaccaacgaccgtggaaaccggcagctacaccctgtcgtggggtgctgttgtgcaggcctcacgctatgagcttcgtatgacggccaatggcgggctgagttggagcaccctgtatgccgggagtgccctgtcccatgcacttacgggtgtgccaaagggcgtaaggcagtatcaggtccgatcctgtgatgcgagccgatgcagcgcgtggagtttgtccatgttcgttcggcaccttcccattccagtccctggtgctgcgccggtgctgtcgggacctgcagagtcattcggcaactatcagttgagctggagtgcggtagctgatgccacgtcgtatcgcttggaagagcaggttcagggagaaagttgggggctgatcaacaacgatgcagcgacttctcattcgttcggtgcgcgtccaaagaatcaatatcagtatcgtgtcagtggctgcagtgagggcgggtgtgggccgtggagtaatactgtttctcacgaagttcgtgttcctccgcccccgaacccgcaaaatgtgaagaggcgtaggattaggctggattgggattggggagtagagatttcgtggtccgcctcttccggtgctacgtactacgaggtgcgcgccggaaagatctataatgttggatcgagccttagtaaggactggaacgaaaggacggaagggattttcttgggggattactctgtaagggcctgtaacagctcgacctgttcagagtgggtgatagccacaatggagaatcgctga

SEQ ID NO: 518216 - DNA, 375 bp, Stenotrophomonas maltophilia
atgacacagccacagcacgaagacgaggccgcgcagcgcgcgcatcgctggctgttctgcgataccacgccgtgggtaacgctggggtacagcggctggatgttcggcacggcgccggagccgctgcggcaggcggcacgacgacgctacgacctgctgttcctgtgcgcgccgaatattccgttcgaccaggatggtacgcgcgtgggcgaagccttccggtcgcagcagcatgcgtggtacctggcgcagctgcaggcagagggtgtcgagtacgtgctgctggaaggcgatctggagacgcgcatcgtacgcgtgcagggcgagctggcgaagcgggcggacaaccggttcagtgtcaccccgccactgtag

SEQ ID NO: 518217 - DNA, 570 bp, Stenotrophomonas maltophilia
atgcctgccctgcattacatggacgacatgagcacccatcaccttccagacttccgctaccatccggacccggttgcgacgggcaacgtggggccctccactacggcctgcagggtctgccagcaggcgcgtggatatgtgtacctgcgcgatgccctgcatgatgggcacagtgatttttcggaacagatctgcccttggtgcattgccgatggccgtgcagcatcggcgctggatgtcgcatttgcctgcagtctggacatcgacgaaagcgtgtccgaaaccgcattggaggagctgtccctgcgcacgcctggctacgtcagttttcagggggagaaatggctggcgcattgcaacgatatctgccgcttcctgggcgacgccacgatggaacaggtgagtcaggccactgcagcgaccatcgcggcctggtgcgcggccaatgacgccgacgaatcactttggtcggagctggtcggcgactacgcacctggtggagatatcggcttctacacgttcgagtgcctgcactgtggcctgattcagttccatgttgacgcggcctga

SEQ ID NO: 518218 - DNA, 273 bp, Stenotrophomonas maltophilia
atgcccgcctcccccgccctgctgccggtcccgttgcgattgctggatgatcgctatgggccgggcaatgtcgatgaagccgaagacacgctgatcgcgatcgtgcaggcggtgatgggcaagcaggcaagctgcgcgttccatttcgacacgcagcacgccaacccgtggttccaccagctgctgctggaaccccgggtcgccggaaagccggccacccaggagcagctgcaagcgatggccgtacggctggtggccctcggtttgcactga

SEQ ID NO: 518219 - DNA, 1275 bp, Stenotrophomonas maltophilia
atggcgacgcagctggaacatctgcacggccgcggcctggttggccaggtaggcgcccggttccggacgcagcacggggaccggatcgacgggattgaccggatcaatgggatcgatgggatcgaccgggtccacaggatcgaccggatccaccggaccagtgccctggcattccggcaacgccggattgatatcgcacgggttgccggtataggccgaggtcaggtaccagttaccgttggcggtgccgggcatgcccttgcgcaggaaatactcgtacatgccgccgatggcgcggccctgcatggcaaaggttgcggtggaggtgccatcgacctgcaccagcggaatgccgttgacggtctgcgcaccggcgccgttgatgttgttgaccacgatccgggtgctgccgctggcatcgccggtgacgtgcaccttggaggttggcgcatcatcgccggccatcaccgtattgaagtgcagcgtgccgccctggccgacatagttgccgttgacggtcagctggcggaactcacccggcccgagcaggatgtcgctgcccgcgccgagggtgaggttgccgacgttgctgtcaccggacagcatccagcggccgccctggtcgacgatgacgtcggccgggccgaggatgcggccggtgaggtcgaggccgttgagcaggctgatctttgcggtggcggtatcggcgatggtgatatcgccgttgagcgtggaggtgcgggcggtgaagtcgagcagggcgttgtcgcgcgcttcgatcattacgccattgccgcccgtaagcgtggcgccgttctgagcggtgatgcggacggtctcgtcaccgctgccgcgggtgacgaggatcgcgctgccggcggttccggtgaccgaggatccatcgattgtcagtccccactcgctgaagttctccgcaaatcttgtatcgccgttgtagttgacggagatgccgttggtatcccctttgacggacgtcccggcgttgagattgaccgtggcgccggtgacgagaattcggctgttgaacagggtggcttcgctatcgaggcgaccaccagccgatgcggcgaaagagatgcctcctgttccggcgacggtgcttcgaatcaatgtcacatgagagcgcggaagcgcagaagcacccacactcgtggacagcgtgatacggccgtcaatattcgagtcctggatgacggcgttgctgttgaccaggctgtttatgcctccgccggtgaccgtagcgttctggagtga

SEQ ID NO: 518220 - DNA, 1095 bp, Stenotrophomonas maltophilia
atggcacggaccagggtcggcatcatcttcgggggcaagtcctccgagcacgaagtttcgctgcagtcggcgaagaacatcctcgatgcgcttgatcgcgagcgcttcgagccggtgctggtcggtatcgacaagcagggccagtggcatctgagccagccggataccttcctgatcaatgccgatgatccgtcgcgcatcgcgctgcatcggtccggtacgtcgctggcggtgcgcccgggtgtggaacaggcacagctgcagccctccgatgcggccagcgcgctgggccagatcgatgtggtgctgccgatcgtgcacgggccgctgggcgaggacggtgcgctgcaggggctgctgcgcatggcgaacctgcccttcgtcggttcgccggtgctgggctcggcggtggcgatggacaaggacgtgaccaagcgcctgttgcgcgacgctggcctgcaggtggcgccgtggctgtgcatccgacgtcaccaggccgctgacgtcgatgtcgatgcggtgatcgcgcagctcggcctgccgttgttcgtgaagccggccaaccagggttcgtcggtgggtgtgagcaaggtcaaggatgcggcgggcttcgccgaggcgctggcattggcgctgcgctacgaccacaaggtgctggtggaatcggcggtggtcggccgtgagatcgagtgcgcggtgctgggcaacgaacagccgcaggccagcctgtgcggcgaggtggtggtgcacgacgagttctacgcctacgacaccaagtacatcaacgaggatggcgccgaggtggtcgtgccggcggatatcgatgctgcaacccaggcgcgtatccagcagatcgcgctgctggcctaccaggcgctggagtgtgcgggcatggcgcgcgtggacgtgttcctcaccgcagacggtgacatcgtcatcaacgaggtcaacaccctgccgggcttcacccgcatcagcatgtacccgaagctgtggggcgccagcggtgtggactacaccacgctgatcacgcgcctgatcgaactggcgctggagcgccatgcagccgatcgcggattgcatagcgccgtgtag

SEQ ID NO: 518221 - DNA, 213 bp, Stenotrophomonas maltophilia
atggctgaggactggccacgtcctggcgaccaggcgcggtattctcagcgcttggctggcttggtggtatcagggcgaagcaaggccctgctgtcgcagcagggcaagatacttcccgccttcatcgtcagcgtcgaacccgctgtcgcgatcgcctcggattttgaccgcgtgagccgaaagcgcctgtcaaccaagatctacaccccctga

SEQ ID NO: 518222 - DNA, 723 bp, Stenotrophomonas maltophilia
atgaaaatccgagcaacgatgtggacgaccgcggtgttggctggggcggtggcgttgccggtgtcggcagcggtcacgctgcagggcacacgtatcgtgcatgacgcggcgcagggccgcgatgtaacggtgaagacgacgaacgcaggcaaccaggtggccatggtgcaggtctggattgacgatggtgacagccgtgcgcgtcctgagaacgtgcgcacgccattccgcctgacgccggccgaccctcgcctgatgcagccgcaccagggacaggcctaccggatcacttacgctccacgtccctcggaggcccggcttccgagcgatcgcgagtcggtgttctacttcaatcttctggacattccgcccagacctgccgatggcgccggcaggaacctgctgcagttcgccgtgcgcacgcgggtgaagctgttccaccgcccggtcggcctgcccggcaagccgcgtgatgcggccgggcaactgcaatggcgtgcgcagaccggtgccctgatggtgagcaatcccagcgcctaccacgtgaccgtgagcacgctgactctgcctgacggccgcaaggtggacgcggacatgatcgcgccgggcgccgagttgcggctgccgctacctggcggcgcagcggtgcctgcgtcggtaaaattccaatggctggacgattacggcacgccccgtgatgccgaggccgtcgtcgctcgttga

SEQ ID NO: 518223 - DNA, 2415 bp, Stenotrophomonas maltophilia
atgacgattgccggccgcgcaagtgcgggtggcgatgcaccacctcagttcagtgagggcttcctgatcggcggccaggccatcgacctacagcgctatgcgcagggcaatctgatcgagcccggcgtgtacccgctggaggtggtgatcaatggccacttccacgagaagcgcgacatcgctttcatagaggcacctgccgcgcggggtgcaacgccgtgcctgcccgctggcctggtgcgccagttgccgctgaaggcgatgtacctggctgaactggctccggacgatgaaagctgcgtcgtgcttcccgcactggtggaaggtgcaacggtcgatttcgatgacagcaaccttcagcttctggtgaacgtgccgcaggctgcacaggcgcgcaatgcacgcgggtatgtggcaccggcgcagcgcgatcatggcgtcacggcggccttcttcgattacaacatcaaccacagccgcaaccaggcccaacaggccacctacttggggttgaacaccggcgtcaacctgggcgcgtggcggctgcgccatcgtgcatccttcagccagggaagccgcagctcgcatcgcgatgtgatcagcagcagcctgcagcgcgacgtgccagcctggaatgcgcaactgctgctcggccagggcaccacgggtggcgaactgttcgaggcgctgtcgttcacgggcgtacgggtggccagcgatgaacgcatgctgcccgactcgctgcgcggcttcgcgccggtcgttgagggcatcgccgaaaccaacgccgtggtgacccttcgccagaacggccatgtcatccatgaagtgagcgttgcaccgggtccgttctcgatcgaggatctgtacccgaccagcttcggtggtgacctggaggtcaccgtgactgaagccgacggccgccagcaacggttcacggtcaatttttctgcggtgccgcaggccctgcgccccggtgcaagccgtttcagtgccactgcaggtgaactgcgggatgcgcgcggtacgcgtgaagccgtgcgcttcgccgaggccacctatgcccgtggcgtcagcaatcatttcacggcgctgggcggagtgcagattgccgagggcttccagtccgtgctgtccggcggtgccatcaacacacctgtcggcgcgctgggtgctgacatcacgcattcgcgtgcgcgcctggccaagggaggacaggtggccggcaacagcgtccgcctgaactaccagcgctacatcacggcaacggacacgcatgttggcctggccgcactccgctacagcacgcatggctatcttgccctggatgattacgcgcaggcataccacgacgattgggggttcagccgccgcgcgcggcaacggtttcagatcaatctctcgcaacgtctcggtgggcgaagcacgctctcgctcaatggtgggcaggtgcgctattgggacagcgcacagcggcagaacgacctgcaactgcgattccagaccagcatgggccgtgccaatctgagcctgtctgcgctgcgcctgcaggtgggcgatggccgccaggacacccgctatgcggccaccctcagcattcccttgggcgcaatgcccaaggcaccgcgcgtgagttcccagctgacccattcgacacggggtgaacaagggcaattgggcctgaacggcgcgctgggtgccgagcaacagctgagctacagcctgtctgccagcgccgccagtgatcggactggcagtgccaacgcccatgcgtcctatcgcggtgggcatggcacgatcaccgctggctacagccggtcgggtgaccacagagccttcaacgccagcgccgcaggcagcgtggtggtgcaccgcgatggcatcaatcttggtgggccggtgggtgatggcttcgcactggttcaggcctacggcgcagagggcgcccgtgtcggctacggcaatgaggtgcgcatcggacgcaatggctacgcgctgctgccgcacactagcccctaccgctggaaccaggtcgagctggatccagccgggctgccgatggatgtggacctgctgctgacctcgcaacgcgttgcgccgaccgccggcagcgtcgtgcgtgtggcattcaatgcgacgcgcgaacgtacgttgttgatcgatgccaccgatgccttgggccagccgctgccgtttgcggcgcgcatcgaagatgacgccggacgcagctggggagcggtgggtcagggcggcgtgatccagctgcgcggcgcgcccgaacagggccagctgattgtcgatccggatggcccgcatcggtgccgactggagtacaccacgccggatgcccccgatgcctacggcctttcgtggagccaagcggtgtgcatgccgctgccactgcccagcccttga

SEQ ID NO: 518224 - DNA, 2280 bp, Stenotrophomonas maltophilia
atggtcggtgttaatgagcatgtggagataaacaggaattctgcagggccgaccggtccaggccaggaggtcgctgaagcgttggggctggcgcattgcctgaactgggcctgggggcggctctgcccctggcttccgccttccgccgtccaggtcccccgggcagggcaatcgcgggcccatttcgtacttgttgcatggctcgacacagtttccgcatcagatagttcaggaatcccgcacttgaactgcccgcccgctcagatgcagcagccatcggtcgtgaaatgggcatggacctcaatcatgcacagacttctttcaacagcagccatcatcgctgtcctcatgcctacggcatgcgcccagccgcccccggggcccacgctggatgctccgacgcccgggcctgttcttaccccgcctgccctcaccgcggcagccgatgcccagccgcgggacatgctgcttcacgtagggggtgacagctatatgggcaaggcctacatcgtgtccgcatcgacgcaggaggtcagcacggcgtttcgcgcgcgaagctatttttccagcttatttagccagagagatgacgctcaacccatcctgggggacatggagcgggcgtggatgaaggtctacgggcacttccacccagagaagagtgcaatcgcgtccgcacagaaccttgctgctattgatgtggcggcatcggtaggggttatcgcccccgaagagaaatcgcgctggcgtacttacgtggaacagctgtctccatccgatcttgaccccaccggtgccgcgttcactgatctgactgtggatcggcggacattctccagttcttatgttgacacctcgcgacgcaggtcgggcgataagcacgttgttctgatcgacctgacgggcctgacaggcgctccttcgcagacgctgctctggtatgcagaacggcgccaggagcaacgccgtgtcaaatggaaagccttcgcatccattccgggggtcgccggcgtgccccacctgcattgggagaccgagatgatcacagagaacagcgccagccaggaattctcagaccaagtgcaggcgctggcatctacgctcccagcggcccctggagcatcattggatgtcatctcaaatctgttcaacccaagcgatgagacgtcggttcagcgcatcgtccctcgtctgcccgtggctggcgcgacgatgatgcttcgatggctcccgatccaggggattcaacccggcagcgactctggccagattcgttcgctgcccaaggatcagttccatgtgacgtcaggcgtcgacgattcatacggttacatcgttgcgaagaagaatgagcgcatcgcggcctggcagatgggcgatggccagcgggtcatcgagacgaaggtcgaccggaaggggcggttatggaccctgaccgcactggagccaagcctgacgcaacagattctcacgacctgccctgtacggatcagcgggtcgacccggaacgaccattgcatgcagagcaccatggatccgcgatggcaactcgatcgcgatggcaactcctatctttactcggagtctcatatggcgacggaggagcgcttccccgaacgaatcatggatacaggatctggagaaaccatcgagatgaaggagctttggaaagacagaagcaacttgagacggcgtgtctttggctacatgcaatcctgctcctcaggtccggcaccggatctgggtgacggactgttctggttcacgagttgcggtctggttggtgttgcacctgcgtcaggcgatgtggtcaacagctttccactgaggtcggcaggcactgaacgcttggtgtttgggagcgctgcgggcgactgggtcgccgaagaggttcgtgatccaccagagcagagggacgttcttcgcattcgtcgtctttccaccggggaagcggcatttgaggtggaacgaaaaaccggtactcaggcactggcacgcacggctcacggcaggctgctcgcgatgacggttacaggcgcttcgccgggccgttacgtcgatgtctggcgcatggattccggcaggcacgtctcacgtctcggcgttcctgagggaatcgcattgaaatcccttgcattcaatcgagccgggacggagctgtgggttcatgcgcatcgactcgccggcgaggacgccggcgtacttatctggccggtgccggaatcgctgcaggaccctgctgacggaaactggagccctgatgaggccgtattggaatag

SEQ ID NO: 518225 - DNA, 321 bp, Stenotrophomonas maltophilia
atgctggcgaggcacttggggggcgacctctttgaggggaaaagcaacccgtcattctgggtcatgctgattgcggcgtttgcgctggcttggcttgtctcaggggcggtcgttaagcatggcgaaactctgaccgctgggcacgacggcaagtggaagaccatccttgcgatctacctgattccgggcgtgggaatgggatggacgcttctctggaagctgtacatgccattcgcgctcgtacacatcgccatcatctgctttctctgcctgtcgtatggacggtatgttgaatggaggctggacaagccgcgaccctag

SEQ ID NO: 518226 - DNA, 441 bp, Stenotrophomonas maltophilia
atgcaggtgtggtctctgagagatcgcgcggtcattgcaaggagcgccgccgtgcagatgacaatgatcgaccttgattccgccgatcatgggctttctgatgctcagagcgcatgcagggttggcggctccattcttgctgacatcgtgtggaggcccgaagacgcatttttgctttccgaagccgcgttgcgcgcacaaggagttgtggcgctcggcgttacacagatgaaagacgttttcgcgcggggcaccgtcttctttgagaagggtaaagttgacaccctcgttgctcagggattcgcgcggtcgatgattgatatcggcaacgagcttcagcccgattgcgacattttcattgagcagttgttggagacgctcgccaaccttcggcaggaggccttgaagatggatcaacggcgtcgtgctgtacttggctag

SEQ ID NO: 518227 - DNA, 225 bp, Stenotrophomonas maltophilia
atgaccgagcccctacttgccttcgccctgctgggggcaattgcggccgtctccatcggtgccgcccgcatcgtgtcgtggttgctggaccggcgtgaccatgccgccacccagcgcgccaaggaagcggccatcgtctcccaggcacgcgccgaactggccgcgtcgggctggacggctcaggacgaagattcctaccagcgccagagggggcgtgcggcatga

SEQ ID NO: 518228 - DNA, 177 bp, Stenotrophomonas maltophilia
atgagcagattcccttcgttcgccgagatggcggagttcgatatgggcgtcactgcgtgcgctgtgcttatcgcgctcgttctcggcggggcaatcgtctccatcgtgattgagcaggcatggctggcgctgcgtcgcctatggaagcttgcgaggaggttcgccaatggccgttga

SEQ ID NO: 518229 - DNA, 390 bp, Stenotrophomonas maltophilia
ttgatccgcaaggggctgcaggcgtcggctttttccccactggtggaacttgcacagaatctgatgcgccagcgccgacacctgcaggtgatggcggcgatcccggtggtggcgacggtggcggtaccgatcctgggggcggcgatggtggtggcgacaacggcggcggtgatggggatggcggtggaaacaaccccggcggcggggatggcggtagtggcgggggagacggagacggagacggagacggcgacggggatggtgatggtgatggtgatgatgatggtggtggtcccggcccggggccaggtcccggcgaaggcgacggagatggacccggcgaggtcggtagcgatggcggccccctgtacgagcgggacaagaatctga

SEQ ID NO: 518230 - DNA, 3333 bp, Stenotrophomonas maltophilia
ttggctgccctgcgcacccagcgtgcgcaggctcagggtggaaaggccacggatgtccagctccggcttgacgacgccgggcgccttcaccaggccgctgtcgtacagcaggcggttgtcgccccatacctggaactgcaggccgccggcgttgcggcaggcgtcgtcgatgccgaggtcggcacgcagcaggtgccagccgccctgcaggcgcaggtcgatgcggctgttggcgccgacccccaggccacggcggaactgcaggccgttcatgcgcatgccggcgtcgccacggaaggactggtcggtacgcagctggctggccagcgcggccggcaccggcagctcggagagatagcgctgccgggccggtcgctccggttcctggtgttcgaggatgtggaaggtggacagcgcgatcgggccgacgtcacggggctgcagcgcatcgaacgcgcgggcgctgccctgggcggcggtgaccatcgggtcggtgctgctggcgccgtcgccttcggggttctgcacgctcagcacgcggaagcgcagcaggcggccggcgtgggccgggaagtcgatgcgctgcacgccttccttcagttgcaggcggccacgcgcgatcggctcgccccactccccgttgctgtcgcccaggtacacctcgtaatcgcgcacctggccgtgcttccagttcttgtcgttgcgcggcgcgatgtcgatgccatcgatcatcctgcgctcgccgaagccgatcacccactcgtgcgcaccggtgcgcacggcctggttgcgcacgctgcggaaccaggtgttgggatcgtcatcgaaggcgttctccagcgcatggccgggctcttcggccgggcggttgaccaccagcaggctgtctgcgggcagttcgcggcccagcaccggcgcggccgggtaggcatcatcggcggctgcggcagcgaccgcgaagtccagctgcagctgcagtggctggcggatgtcctgggcagccgtgcgcacatgcagcgtgccgcggcgctcctgcgcgtcgaagtaccagccttcagccgcaccgttgaacgccgccgcatcggccagcgccggcaacgcacggccaccggcctgcactgcacgcggcgcctgccggttgagtacgcgcaggccgtagcggcgctgcgccagctggccgttgtactggccctgcaccgcgtcgatctgcacctgcaccgggccactgccgtgcgccggcgcctgcacgcggatctgctgcgtgctcgactcgccctgctggtagcggcgcgtgttgccatcgtcttcgtacaacgtgtactgcgagtcgccctgcgggtacaggtcgaaggtcacttcatcgagcggtttttcgccatcgaacagcatcgacggatacatcggcaggatcgcaccggcacgcacgaacaccggcagcgtggccaggttcacctggcggtcgagctggcggccatcggcaccggcctgcacgcggcggccatcccagtagtcgatccaccccccggccggcaggtggatgtcgcggcgccagccacggctggccgcctggctgcggtacaccggcgccaccagcaggtcgcggccgagcaggaactggtacttgtaggtctcatcctgtgcatgcgggtcgcgcgggtagtcccacatcagcccccgcaccggcggtgcaccggtctgcgcggcctcgtgcaccagcccgtacatgtacggggtcaggcgcatcttcaacttcaggtaatcgcggttgatgctgcggtacggctcgtcgtaccaccacgggtgcttgcgtgcgttcgacgaccagccgctcatgcccatcagcaccggcgtgaacgccttccactgcaggtcgcgggtgaaggtctcggcgctgccgccgaagatcgcgtcgacatcgccactggcgtaggccatgccggacaggcccgaaccgaccagggtcggcacgtgccagcggatgtagtcccagctgctgctctggtcgccggtccaggccacggcatagcgctggatgccggcccagcccatcaccgtccacaggaacgggcgcgaatcggaattgtcgaggatgccgttgaacgcctggcggttggcgtccatcgcgaactggtagcccttgccggtccaggccacgtccagcttctgcacgcggctgccggccttgccgacttcccaggcgatcttgtcgacgccgttctcggtccacaggccggtgcggaagccgtacttggccaagccctgcacggtttccggcagcttcttgtaaccgcagccgtagccatcgttgggcaggatccagccaccgggcatgtcgtgggcacggtactgcttggccaccgagtcgatcacatccggcgtggtgccggtcgggccgtcactccagccttcgggcacggtgccgggcttcttggcattgtcaccgtcgttgtagcaatcggcatcgccgtaggacagcgcccagcgcgcgaccatgttcgggcggccggtcagctgggtgtagcgctcgatcagcttgggcaggtcggcgccgacgaagtagtacgcgtcgaaacggtcttcgcggtgcagcagcgtggcctggtcgggctggcgcaggtcgtagctgccatcgctccaggtattgcgcagcatgccccagccacggctgctcagcagcatcggtgcaggactgggacggtcgccctcttcccagccgccggaataggacacttccagctcgcggcccttgaactggtaacggccgttctgctggccgccaccgaagtagccctcatcggcctgcgaggacagcacctgcacgctctgcgtggcatccaggtccagcggttgcagttcctgccacagcgcggtgggctggccgttgtccagccgttccaggcgcaggcgcagcggctgccgctgtacatgcagtaccagtgcatcggtgcgcacgcggatttcccgtgcgtcttcttccagctgcgccttcacgttcgccctgggctgcggcagcacgatcggtgcggccttgtcgccggcaccggtcagcgtgccgttgcggccggcctgcacgcggatgatgtcggtggccggcagttcgatgcggatgcgcgcgcctttgtcggtctgcaggtcccagccctgcacgccgtcgctgctggcgctggcggcaaccgaacgcaggttgccgaccggctcggcctgggccggcatggacgccagcatcaatgccggcaacagggccagcatcagcggcgagcgacgaacgcagttttccacgcggactcccaacccgttcaccgggcgtttcgaaagcgattgggccgactctag

SEQ ID NO: 518231 - DNA, 603 bp, Stenotrophomonas maltophilia
atgctgggcgacaccctggccgccgtcgtcggcgagctcgagggcgatgccacacccggtgccagtattggcagggtgctcgaggcgcttgcagagaggcttgagcgtacgacctgccgtgtacagattcccgtcaatgacagctcatgttcatccggcttgacctgcaacggacccgatgtagacagcctcttcccgtactacaccgccttgcggcaggcgagcacaccggcggagcatgatcggcacggtcgtcgcctcctggacgcctacgcgacgttgctcagggatgcaccggatgtcgccctcacgcgaccaagcgaggatgaagcggcagatgacttgttacatgtgctctttccgttcgagacctgggacaaaaagctgaacatcccgcgccatcaggtgcacttcccgtttgttcctgtgtgcaacctcgttgtcgctcgcgctgcgcgctgcccgggagtcgaccagctgcgcaaagaaattggtcgggcaggcgatgagagtgaacagcgcttgttgtgcatcaaggagttctcgacgcggcagctggcggaggaaggtgaatgcccggaagcgaccaccaccagcccctga

SEQ ID NO: 518232 - DNA, 291 bp, Stenotrophomonas maltophilia
atgccccccacggtcatcgcttgcagcggcgtgtgggtagtcgtactgatgcaacgggtgaacgaggggatctggatcgccagtctcgaccggcaccggcatggtcccggcgggccgttccgctggtgtaccagctacgagcaggggcgggccggcgccgagatgtgggtgaccaggcacgagacccgcctgcgcgaggatgtggccaagatcgaggcctatcgagaggcggtgcgggcgaacaggttgaagaagctgcacatcaagccacccttcggctggcaggcatga

SEQ ID NO: 518233 - DNA, 1050 bp, Stenotrophomonas maltophilia
atgagcaatttagacgagatcaggagagaatacgaaggccttgcaaacctgcaggccgaggccgatggcaacgccaaacggcggcgtggatttgatttcgagcgcctactgaacaagctctttgtatatgaggaacttgaaccacgcactagctaccggtcacctggcgagcagattgacggctccatctaccttgacggtcgggtttatcttatcgaagcaaaatggcacgcggatccgttgccggcatcgacactctaccagttcaaaggtaaggtggatggaaaactcgccggtacgattggcattttcatttctatgtctggctatgcgggagacgccgtcgatgcgcttactcttggtaaggtgcttaacatcgttctttttgataagcgcgacatggatgccgcaatcatccgtcgcggcggcttcaagaaggctttgaaactaaagctgcgcaaagctgcggaagagggcgcgatgtacttcccggtagagggcgaaatcgttacagcggatagaaccgaaagcattgaaattgatttgctgcgtttcgatcaagcgtctggcagtgtagtcgccactcggccagtcgagccggcaatggccgatctcctcatcgtatgcgagggggactccgaccgcgttgtaatcgccacgctcgctgagcgcatcctcgctgccgcaggctctaatcgctcgatcaagattctgaccgccctgggcaagatggccattccccgcgtcgccaatgccatgtggaacacattccactcggaatctaaggtcctcatcgtgactgacggcgacaatgatcctgtcggaacggcgacgatgctcgacaatggcttggattttggtgaatgggtcgtagcaatcccgaatccttcgatcgagacttggctcgatctcgaccttgagacgatatggcgcctcggaagacctcggatcgaagtctctcggcgcgccgctgaaaagatcgatatagaggcactacgccgacgtgatgatgaattcgagaaattctatactgccatcctatatgcctga

SEQ ID NO: 518234 - DNA, 2187 bp, Stenotrophomonas maltophilia
gtggacggcgtcgcgaaagatgtgcaatggacgcatggcaaggtggctccccccgagttgtcttcttttgcagtcttcgacacgcgctgcgcacgcgcctacctcgatagtgaagacgatttttcttacgtaccctacgggctcgatgtatttgaggcgctggcgaaagtgtgcaagcagttgaaggccctggtcgaagcggagcagatgcagtccactgtcgacctttccgcgtttgcgccattgcagggcgacacggcggtcggaaagctgatctccgcactttccgataagacagctccagcccagatcctcgcgctggctaccttgactgcagaagaagaggggcaacatgcggagctgggaaagagtctgcaagagagcaatccgaaggaaaaagccagccagttgcgcctgcaggctcggcgggttgcagccatcgcgacaagcgcgaccaacaagggtgcgctggttggcccttccgccgtcgacaagctgcgcagcttggcggacagctatcgcacagcgcaggccgcagccgcgcttgctgccaaggagttcaaggaaagcgaagacctgctgccgggcaccggtggagaggtttggcgagagttgttcgatgccgctcgcaagtttgccgtcgagtcacatccggacaaggcgttcccgaacctgggcaccggggcgccttgtccgctatgccaacagcctttggctgacggcgctgctcgctttgtgcgttttgatgcgtttatccagcaagaagccgagaagaattcacaggcgcgacgcgccgcactctatgcagcgtataagccttttctggatcaaaacctgacgttgaatctcgacgatgtgacctacggagagattgaagcattggacccgcagttggcggtagacgccaaggcattcgagccaatgctggtagctcgccagcaggccatcaaggcggccgtgctgtcacacgagtgggagagtgttgcccaagccttggtgagccccgcatcgcggcttcaagcgctggcggacaaactgaacgctgaggcaggggcgctggagaaggcttccgacgagaagatgcgtgctgcgctacagaagcagttcacagaactggaatcgagggtcctgctgcaaaaggttaaagattcggttgtcacggccattggcaagctccgccatcgggcgaagctcgcgcagtgcctatctgacgtcaagactaatgctatctcactaaaggcatcggagatggccgagaaggttgtgtccaaggaattggcagaggcgctgaatcgcgaattcaaggcattgggggttggtacgttgagcgtctcactccagagccgcgccgacagaggcaaggctttgcacaagctgaagctagaactgccccaaagtcgcagccccgttgacatcctgagcgagggcgaacagcgcgccgtggctatcggttccttcttggctgaagttggattgagtggcggcaagggcggaattgtgttcgatgacccggtgtcttcgcttgatcaccgcagacgagagcgtgtggccaggcgcttggtcgccgaagccgcgcaccgccaagtcgttgtattcactcacgacgtctacttcctatgcctacttgcggaagaggcaaaatctatcggcgtagcgatttccacccaaagcctgatgcgacgcgccgaggggtttggagtcgcagatcctgagctgccgtttgaaggaatgaatgcaagcaagcggatcggcgcgctaaaagcacagcagcaagtgatcgccaaactacacaggaaaggcgaggaccaggagcatcgcaaccaaaccgtcgacgcctacttcagactccgcatggcgtgggaacgcgcggttgaagaagtgctgctgcatcaggtcatccttcgcttccgcaagggtgtagaaacgcaacggctcgctgctgttgtagttgatgatgaggattatgcccaggtgaatgctggcatgacgaagtgctcgaactacgcacatgacaaggcattgatggggggagtcgcagtccccgatcctgatgagctgctcaccgacattacggcactggagacatggcgggctcaggtggagaagcgcgggacggagacggccaagaagcgcaaggcaggtccaatcgtttctacggcggctgcagcgaccacaccattcgggtga

SEQ ID NO: 518235 - DNA, 318 bp, Stenotrophomonas maltophilia
atgaagatgagaagcggcgaattttgcatttctatgtacagggacttctacgatgttcccaggctgatgctggtggctgatagagattcctatcgatggatttttgaatgtctgttcgatgaagaagccgacgagtattcagacttctatagcgtctacccggtggggccggaagtgtccgatgaggaggcagtatcgcagcatctgaaggatggagcgaaccaccaccaggcaatagttccagtttcagcaatgcgttttgacgaatccaatagacgtagcttcttcctcgatctcccaagcgagcttggtccatga

SEQ ID NO: 518236 - DNA, 951 bp, Stenotrophomonas maltophilia
atgaacacgcgaaagacaaggcagatcttcacgtggctggctgctatcgctatggctgtggcgacgtttgtcggggcggcaacagcgcaaaccgtcacctacatccacaccgatgccttgggctcgccggtagccgaaaccgatgcctccggcaacgtgatcaatcgattttcgtatgagccttatggggcggttatcggccagcccgtcatggatgggcccggatacacgggccatgtaagcgacgcatcgacggggctgagctacatgcagcagcgctacatggatccgcaactgggggcatttttaagcgttgatcctgtcacggcctatcgtagcggggacatgcggcatttcaatgcgtacgcatacgcatacaacaacccgtacacgttcaatgatccagacggaaggtgcggcgcttgcgatcgacagagtgaccagttcgcaaaggatgctgctgctgggaatacagaggtctactcgccctttgtcaagcctgcttcaataattgccagtgcggcacttcctgtggggccagccgtcaggggcctgcttggtgttatccgtgcaatggcgtctccaagcaagggacaggactcggcaggcagcagtagtgcaccacggggagacccgcacgcacctggtgatgtacccaatgccggggtcatcgttcgaggtggtgccggagaaatgccggcgccaggaagcgtattctccggctcgcaagggcgctcgattgaagaagcagctgccggcgtgcctcatggcacgatacggtccacaacggccggagagattcgagcagggggaggaaaggtcgacgttgcacctgagccgaccaagtctggtcagatcaattatcagcacgttaacgttagggaaggcgcgggtgggagttttggttctcctcagtccaacccagtcccaaagctggagcgcgtgaaatga

SEQ ID NO: 518237 - DNA, 573 bp, Stenotrophomonas maltophilia
atgtcttcttcccgctctgccactgcccaacgcccgggcagcatcgcccacaagttgatgctgggcaccgccgtgatcgcgctgctgtgcttcggcctgaccgccttcctgatctaccggcaggccagcgccagtctgatcagcgcctcgcgccagaccatgaccagcgaggccaacgccgaggcgcgccaggtggcggctgatctgggcaccgctttcgccagcaatgacgccatggtcgaggccgtgctggcccagcgtgcccgtggtgacatccccgaccgcgccagcctggcggcggtgctcggcgaacagctgcgtgctcatcctcaatggctgggcaagagcaccatgtgggaggccgatgcctttgacggcaaggatgcggagttcgtcaataccgaagcacacgatgccaccggccgctacatgagctattgggcctggcaagacggcaaaccgcagcaatcggtgatgaccgactacaccgagactgccagcggttccggtgactggtacatggtgccccagccgcgacaagttgcccaaggtcagcgaaccctatgcgtatga

SEQ ID NO: 518238 - DNA, 222 bp, Stenotrophomonas maltophilia
atgaaggtgtccgcgtcctgcgcgggcgcagcgctcaggtcatcggtggccacgcaggcgcgcgcgctgatcctgcagccgccgtcatccctgcccgggacgtggacgctggcctggcatcgcggcgcgatggccagcggctccggctgggcgatgaccgtctccggcgtgctggccctgctcgcggcactcgggctgctccggcagcgcagacgcgcctga

SEQ ID NO: 518239 - DNA, 1521 bp, Stenotrophomonas maltophilia
atgttctaccagaagtgtgcggtgatcacggaccctccgtttccggaacccgtggagatacgtggtaccgatagcaatcgaggtgatttggaagaggcagatgttgtcatcacgaatgttcagcagcttcagggacaggacaatcggtggcttacttcactgccagatgacttctttgacctaatcctgtttgatgaggggcaccatagcgttgcggcgacgtgggaggcggttaaggccaaatttcctcaggcacgtatcgtcaacttcagtgccactccgcttcgtgctgatgggcaggtgatgggcgggaaggtcctgtattcctaccctatctttaaagcgatcgaagcagggtatgtgaagcgcctaaaggcgcttcagcttaacccaaagacgctcaagtacgttcggcgagaagacggccaagagatagaggttgaactttccgaggtgattaggctgggtgaggacgatgccggctttcgacggagcatcgtcacatctgaggagacgctcaacacggtcgtagacgcatccttgcgcgaacttgatcgccttcgaggcgcttccggagatccgcgtttgaagatcattgcgtccgcactcaactacgagcactgtctccaggtcgttcaggcctatgcggcaaggaatcgcaaggcggcctttgtccactctagggaggacaatgctgcgaacgagcgcgttatgaagcgcctagacgctcatgagcttgatgtcattgttcaggtgcgaaagttgggtgaggggttcgatcatccgcatctggcggtggcagcagttttgagtattttctcgaatctatcgcccttcgttcagtttgtcggacgaatcatgcgagttatcaagcagaatgctcctggtgacgttataaataatgggacggtggtgttccatgctggggccaatatcgcgcggcaatggaaggactttcgagactttagtcaggctgatcagagttactttgatcagcttttgccgctagagggattgggtgaagaggatggtgcttcccgtgagtacgagccatttgctccgcctgagctgccagatgtaatagggcagtcggaagtccatttggaagagatcagtcttctcaccaatgagactgctgccgccatcgcgctcctgaaggagcaagggatcatccaaggagacttcgatcctggtacgcaaacattgaagccgataccggtgacgaaagtcgcggctaggcaggctgcgcgtcaagctctgaacagccgtgtccaactggaggcaggacggttgcttgcaaaaaccaaactcagtgcagaggggcgtcagcttgatcggaagttcctaggaaagtcgaactatcagattgtcgctggcgagctgcactctcgagcaaatgctctggtaggaaaaggcgccggagagcgaagcgagctgactcaagctgaattgaatactattgaggcaggcttcgctgatattgttgaaggcgttgagcaggaggtgatccgtggcggctaa

SEQ ID NO: 518240 - DNA, 1284 bp, Stenotrophomonas maltophilia
atggatcccgagttcgtcaaaatggcgggtggggttggcaatgcggagaaatgggcaagcctcatggatcattacgccgacatagcatgggaggaagcggaaactgggtataacacctactatttcaacagcgatgaatttgagcgcccacttctgcatcatatgactgcatccacgctaatggaagcaggaatttcacttccaagacccttccctgcagatatagatttccccaagaccaatgaaaacctaagcgaagaggagcgggagactcagggtgacttgcgaagaaacaatgcgtacgcccgcctgattgatgacctttactcgtccctcaatgatgtatacggattctatgccgcttatatatccgaactaattgatgacgaaaatatggggctgatggaaaccccggcagagaatattgagccatgcctgatttccctggccctagccaaacttgaagtaccccttgaactatctactgacttcgcgacctttcagagaaagatcaacggccagtacgagaaatggcttacaatcgcaagacagcgcgcattccaaacgggtcatccgctcaaggctgaagtcctcaatcttgtttatgactcgcacgacagcttgggacaccaagcggaggcagagagtttcgggttcaacgactcaactcttcatcccgacatttacatgaatgaactcttggtggggatgcgcgttgtccatcaagttcttccagcaattctcaagcggcttggaataatgagtgactttaaattggacgaatctaaacttgggttagggcgctcattgaaaagtgagccaaatctggttcgcgaaaggaaagatctgtcggaattcaaatccgacggcgtctacgatgtcttcatatctcacgcctcggaagacaaagagccatttgtcaagtcactggccactgccctgacggatagaggtcttaaagtatggtacgacgagtttacacttcagatcggagacagtctccgcaggatgatcgaccgaggcatcgcaagtagcagaattggcttagtcgtgctctccccagcctttgtgaagaaggattggaccaatcatgagctcgacggcatattggccagaagtctcgaggggcaacaacgccttcttcctatatggcatggaataagcaagcaggaagttctcgactacagtccctctatcgccgacaaagtagccaggagtacaactagccatactgccgacgaaattgcggctgagatttccgcactgctactggattcaatgtag

SEQ ID NO: 518241 - DNA, 519 bp, Stenotrophomonas maltophilia
atgtcccatacatcgatgcagtggctgcgcgcatccgccacaaccgtggccctcgctctggcgctgggcacaccgcttggcgcgcacgccgctgccgaggatcccttcttcaccgccctcgatcgctacggcgccgatgacttcagcgcatgcgcgcggctgctcggcgagctgttgcagcgtggtggccgcttccccgacggcggcgagctgctgctggtggaatgcacggccgctgccggcgaccgcagccaggcaatggactacgtgaaccaactgctgccccgcgggcgcctgtcattcgatgatctgctgcacaaggatcggccgggcctgaacgccctgcgcgccgatccggcgtggccggacatgcagcggcgcgtggaagccgccgagcagcaaccctcgcgcaactggacgccccgttgcgcaaagagctgctggagcgcgccgcacgtgaccaggccgcccagcatgtggccatcgacgcggggggtggcaatgcgttcaagggcgtag

SEQ ID NO: 518242 - DNA, 471 bp, Stenotrophomonas maltophilia
atgaaccgaatcaccatcgcggttgctgccttcgtcctgtggtcaggcgcaacgttcggtgctggctgggcgtggcgtggcgaccgggccgatgccagcgacgccaccctgcgcgccgccggcgcatcggcagtcgccgaccaggtgaaccagacccgtgccaccgagcagagcaaggctctgcagctggccgacattggagctaagcatgaagaagaccgcactgcggccgcgaccgtccccgctgctgttgtggctgacctgcgcgctgggcgtctccagttgcgcgacgacctcgccacctgccacaccgctcgcctgtccgaagctgccgccggcgccgccgaacgtgatgcgcgagccgaattacgtccagaggttgtcggagctgctgttcagatcgtcaccgacgccgacgaccagctccgagcatgccaagcagtgatccgggtggatcgcgatcagcactga

SEQ ID NO: 518243 - DNA, 228 bp, Stenotrophomonas maltophilia
atgagcatccgcaaggagatcaacaaagcattcacggatgccgaggctcgccggcgcgaggtcatgtacaccggcagcatcgctaaacgaattgggcagccgaccaaggtagtgctcaaggagatgagggagctggagttggacagagcggtggttcgtgttcccagctactgcgccgtcaacaacctggcatggatgcgtgtgaccgatttcggtggtgcagcgtga

SEQ ID NO: 518244 - DNA, 294 bp, Stenotrophomonas maltophilia
atgacggtcactcgcgatgccgagccttcggcgcagcgcgcgcttgctcattcggccgtcgacttctgcacgcagctgcgcgagagcttcaccctggatacggggttccggcccgaaaacgtccggacgcagctggtggcgagacacaccagtggcctgctcgatggctatgcatctctccgcaggcactcggcggcggtcgtaccagccggaaaccgacggcggcttgatgccaagaagctgggcaagagcctgctggctacctgccgactcaactgctctatcgagggctga

SEQ ID NO: 518245 - DNA, 495 bp, Stenotrophomonas maltophilia
atgtccagtccggctgacttcagcatggtgggtgcacgcttcagtcgaatcttcatcgacgagcaggcatttgtaggagcccagggcacctcgttcaacatggagattagtgttcaggctgctcgtgtctccgagcacaagtttgacgatcgcagcgttatcgagatgggtgtccaggctcgagcagttggtgttgacgacgacgggaaccctgctcaactggatgaggtcttcatcatggaatgtgtggccggatttgttggtagctcgccggatctcgatggcgaccttgatcgctttgcgcaatcatcaccgttctttggtcgagcaatctactggatgctgagagaacgtatgcaatcggtggtttctgtgacgttactgcggcacgctaacgaccttccatgggatttggacgagtcagtcgcaaagaagctgaggggtgatgactcgaagccaaagaaggtcgcaaggaagaagaaagccccgcactag

SEQ ID NO: 518246 - DNA, 465 bp, Stenotrophomonas maltophilia
atgaatgagcatatcgagtaccaaggttataaggccaagatcagctactcccaggaggatgacgttcttgttgggagagtgatcgacgtcgatgctttgatcatgttctcaggctcttcaattgccgagcttaaggcggaattgaaggtcgcaattgacagctacttggccgaatgtgcggagttggggctgcagccggagaagccttacaagggctctttcaatgtgcgggttggatgcgaaactcaccgcaaggcggccaacaaagccaaagtgtggggtgtttcccttaacgaatttgtgcgccttgccattgagcaggcagttgatcgtcacgttcagttcgaaggggcagttatggtcgcacgtgcacctattgttcacagcatggagcagctgtacatgcctgtcagtggcgcgtcgacccgccgcgttactcccgacgcttacggaaggagccattga

SEQ ID NO: 518247 - DNA, 183 bp, Stenotrophomonas maltophilia
atgaccgaccacgacttcttcgccgccatggccgtcggcatcccgcccatcaagcccccggtgccaccggcaccggtctggatcggcgtggacctggcccacggccccgaaatgcacacagaggtcggcagagccgccgacggcacgttctacgtcatcaccgagggacagaaccatggataa

SEQ ID NO: 518248 - DNA, 258 bp, Stenotrophomonas maltophilia
atgcgccacctggccctgcccatctactgcgccgtcgtcgtgttcctgctgctcgccctcctggcgcgcgtcatctacgccgacgccggctcgttcctgccgcccgtgctgttcggcatcggctacttcgcctggcgcggcatcaaggatgcccgacagtcatggccggagttcaaggccgatcggcagcgcgacgcagaccggagccgccgcgaggcgcagcgcaatcgccatccaatcaccgacaccgactactga

SEQ ID NO: 518249 - DNA, 450 bp, Stenotrophomonas maltophilia
atgaccatatccgcaaccatcaatttccagcggatggcgacctcagtcggactttgccggcagaccttcgatgtgcttcggcggcagaccttcgatgtgcttgcgcgcggcgctctcacctacgtcaagagcgtcatccaaggtcgcaagcttatcgctgtgtccaaaccccaccctcttgttgtcgacaagaaaacgatagttgatgccaccactaatgatgacttgcgcgatgacccggtatctatagcccaagtgggcgccatcacgccttttcataacgattccagtctgcaccttaacaacctccagattgagtccgacgactttactttagatgccggatggatcaagcccatgccgattgggatttctcatctaacagtggccccggcgtccggtgcgagctgccagagggccgcaacgcaagttcgtgcgggggtagcgtga

SEQ ID NO: 518250 - DNA, 873 bp, Stenotrophomonas maltophilia
atgcgcggggattctgcgccgagccgcgaccagggggaaggcgttaccggcacccttagcgcgcgcactcaaggcggcggcggactcggaaccgacttcgagtgccagggcggcttagtcgccgggacgttgagcgccaatccgaaggccgctggcagcgctacccagcaggacgcacacgccggcctgttgatcccggcagtcgcgcacaccctgcgcgccgagggattcgacgcgagcgaggatggcaccgggcgaggcacgccgctggttcccgtggccttcgacaccacccaggtgaccagcaaagccaacgtttccaatccgaaacccggtgacccgtgccatccgctgtgcgtcggcgcgcatgccccggcaatcgcgttcgattgcaaggcggcgggcgacacatctttctcggtcggcgacgtaccaggaacgctgcgggcacagcacggtggaggccatgccgctgtggcatacgcaatccaggcaggcgcaaccaggatcaaccctaccagcggaccggacggtattggcgtgcaagccgatcacgcgtacacgatcgaggcgcgtgcggaggtccaggccgttggatacatgcccaataaggtccgccgcctcaccccccgtgagtgcgagcgcctgcagggcgcgccggatgattggacgttggtgccgaacgctcagggtaagccgatggccgacggaccacgctatcggatgctgggcaacagcttcgccgtcccggtcatccagtggatcggcgagcagatccaacacgcccacacgcggtcgatggaaatccagcgcctgcgcgacgccgcacaacaggccggggagcagctgcgcgctgcgctggccacgaactga

SEQ ID NO: 518251 - DNA, 816 bp, Stenotrophomonas maltophilia
atgcggtgcaggccctttttcgtagtgcaccctattctcaccctatctgcacccttccagctgcatcggtctacgtcatcaaaggagttttctggtcgcatgaacaaggaagtctacgaaggcagaatccgccgaagcagttttctgcagcttgtcagcgacgccgctgagtttcattgcttctctgttgcggaggcgcgtgcgctgcctggttgccgcttcgcaagacagtcgattctgctttcagcgctggcgatagaggctgcagcgaactgcgtggttgctgagatcgggctgaagaaatcgaagcaaaaggaaataagtggcctcccgacgatgccgaagttcaagcaggctctagcattgcgtgggaagttattcgatttggatcgggacgaggtgaagcgcgcatccgcactcatccagatgaggaatgaccttgcacaccccaaggtgtttaagagctccatcaccatggagatcaagcgagaaggtgagaggcggttcctctccaccgagcttgaactcaaagatccagggctgcttggaattcgacataagccaatgggatggacgagtgattcatcgcttgtcgccctgcaggccatgaatctgttcttcgtctacttgtttgacaccgttcttaggcgaagcgataaggatcttgccttgatgtttggcaattacatcgacactgacaaaggtcacgtcttctttgatatcgctgaactgccagatttcgaaaccgctcaatcgaacggggtcgacctgtcagctttccgcagattcgaaacagttgtggacggtgagctctaa

SEQ ID NO: 518252 - DNA, 225 bp, Stenotrophomonas maltophilia
atgtcccgcatgtaccccgcggcgatccggcacgtagggctcgttcaaaccgcggccgcgaccacggcagcgcaactgatccacccggaaaggccttcgcccggcatggcgtcgagcgaaggccgtgtggctttgaatcaatgcaaaggcaccttcagcaccgaaggcgcgctggccggcgagctgaaggtcaccgccccccccagctggctgatccccgcatag

SEQ ID NO: 518253 - DNA, 777 bp, Stenotrophomonas maltophilia
atgcaggatccggacggggcggcggcattccgccagcgccgaacacgagcacgcacaggagcaggcccagccatgccagatgccacgaccctcctgtgggcggatagcgccgtcggtcgctggccaggcaccatgccgttcctgcgcccagcacccatccatcacaggcgcgcacttccagcaccatcgagcgtccgcgggagaatgccgcagcgtgctcccattccgctggaagctgcacacggcggtcattgccgagcaaccacacccgcgaagtctgggcagtgcgctggtaagcgcgcaggcgtccgcgaacctgcagtacgcgctgagccgtcgcggggctgttgcggcgagggagtgccagccaggccgccagcccggcgatggcgagcaacggcatggccagcagccctggggcgccagcggcggcccatgacgccagtgcggcaatcaccagcggggaagggcgcaggccgggtccccgtcgcatcgaaacttcttcgggtgtctccaggcgctcgccacagacgcggctggtggttgcatccggccaatgcgcgcaacggtgccagtgccctgtgttcgtccgcgcccagcgtacgcagcgtgctgctccggcgcagcgaagccatgcctgcgtggacacgtgatgtccattcggcaacggccgcgatgaccatcaggggcacgattgccaaaccaaccagtactgctgcgcgcgacatcagcaggcgaccggctgccgtggcgggattgtggagggagctgtcatga

SEQ ID NO: 518254 - DNA, 864 bp, Stenotrophomonas maltophilia
atgagcgcagaagccctcttcctttcagagcgaaagaagtttcacgcctcgcttctcgagagcacgctcactatcgacaaaaatggaatccactctaacgccgacaaagatagtcgcgtaagcagagaaattgccagacatattgccacccagttgcgcgtcgaggtaatgagcgagagagcacccgcgcagacttctggcgcaaactttgagggggcgtgtgccagctttgttcgaaacacatttggtaagcttgaccatatcaggccaggtgattggctcgtccaacaagttggcgggagaaacagacgacttatcgcgtgcttcgagcagtacgctcatctagtcgcactcgaccgagcagcaaagggaaatcgcgaactcgctgctgccctaggcaatgactacaccattagcccagatataatagtttctcgcacgttaatcgatgaccaatctataaattcgaggagccttatcgtcgactcctctacggcgctgcacgcctccctaaggaatgcaaacggaggccttccactgttgcatgcgagcatctcttgcaaatggacgctgcgtagcgatagagcccagaatgcgcgctccgaggcactcaatcttataaggaaccgcaagggaagactccctcacgcagtagtcgtaacggcagaacccactcccagccgtattgcgtcgatcgcgcttggaactggtgacattgactgcacttatcattttgcgctaaacgagctcaagcgagcaattgaagagcttgatttttctgacgccaaagagatgctcgacatcctgatagaaggcaagcgacttaaggacatttctgacctgccgctggatctagcagtgtaa

SEQ ID NO: 518255 - DNA, 1125 bp, Stenotrophomonas maltophilia
atgtcattgcttaactccatacttcaagagtcagttctgcatggtgccaaaattgaaatcgatcatggtggggccgttgtttctgtcgccggctattccaagaggctaagctttgattgcccgtatcccaatgaagatttactgagattccattgttgggccgtgaggccgccgtcttccgcggaatctggaatcttggaggtgcggaatagcggtgccgactcaatcacactaggctacatttttcctgttaatacatttagccctgattcgccgtatggggcgaatagtttgagtggacgatttaagaaaatattctccagcgtggctggaattgccttgtgtcgcgatggaattgcgaatgtcggcgtggagcttagatatgaagaaatttcggaggaaattccgcttcgtgaaattttctctgatgatttgtctatcgtggtcctgggcgttgaaaatatggagcgtgcgggttgctcgatcggcgcagctcgattacttctccaagagtacggatactttgtagttgatcatggggcgtcccacacgctaaagcggccccgcccagcgctgcccggggttgcagcaaaagttggcagcgtgcctgaaggtctaatggatagttgcaaagtcattgagaagctaatatcccttgcgtcgcgtcaggtatcgtctgtttctgcgcttttgatatattatcaagttattgagataatgtcagaaaagctcttgctgtcgaagctaagggagattgcggctgcgccacagcaaagcgggtacgctttcaaaaagaagctaagcaagatcggctctgagcagacgagggtttcttcgctctgtcacatggcaagccggaacggtgacgcggaatccttttcaagattgaaggatctaggcaaggagtttattgagctttgcgggcttcgcgccgggaagtcgcctggaaaggttctttatggtgttcggaatatagtcgttcacagccaggcctcaatggacgaccgtgctcatgatcttctttccgacgtgattacggagctgcatgctgtggtttgtagtatggttcgtaattttgacggagcatacgtcgttccagaggatggtttggatgacgaagattga

SEQ ID NO: 518256 - DNA, 1053 bp, Stenotrophomonas maltophilia
atgcctccgatcattctcgcgctcagccaagacaaaggggcggttgtttcaagtgaaatcgaccggataaagaatggagtaattgacactgctgcgaaggatgcgattactcaggcgattcgcgacagctttgcttcacacgatgtcctgatcctcgacgggcttcagcggacttacacgcttcgcgagtgtattgcggcagtgagcgctgcaggttcgccggagcatgtgggctttctcgctagatcaattcgccttgaagtatacgttggcctgaacaagacaggcatcttatacaggatgcttactcttaataccggccagacgcctatgagtttcaggcatcagatcgaaatgctatatcgagatcatctcgatgctgcgcagttgccaaatggaatcgttgttcttcgagaggcggaagaaaagagggcgcgtggcgcggcgaagtataagttctctgaggtggtggatatgttctacgccttctcaactggccgggcggagtccattgataggcaaactttggtaaatcaacttggagagctcgacttcctggaaggatacgacggggtaaacagtgaccttcagactctcttggtaacctacaataagtttgtcaggcatatcgaggcactgagcgatgattgggtgtttgatattgagcgtttaagggcggatattccggatgctgcggtagaacgaccattcggctccaacgtggcgtctattttcgagcgcgtccaagcgatgaccgcatttggcgcggaagctaagaggttattcaagcagggaagaattcagagtttttccgaccttgaggctgagattgggaattgcggattccaggaaaatccgcatgatgctcttaatcttctcgttctgatgctggacgacattgcgaagaaatctaccaagattggacctgcgcagcgagacttcttccgatttgctttcagatcccttcttaacgacgattcggacgcttacctggacctttatgcttgttggagcgcgggtcagaccaagtttgagagtcttaatgatgagtga

SEQ ID NO: 518257 - DNA, 267 bp, Stenotrophomonas maltophilia
atgcgcgcggcccagcagggcgtgcaggtggccgcgcacaacgtggccaacctggcgacccccgatgcccggcgcctgcaggtacagcgcagtgccgccgagcagggcggggtggcgacggcggtgaccaccaccgaccccgatccgggcgcaccgctgggcgatctgctggcggccaaggccgaagtagtggccttcgccgccaatgccacgctgatccgccgccaggaccagatgctgggggcgctgctggatcgcgaggcctga

SEQ ID NO: 518258 - DNA, 219 bp, Stenotrophomonas maltophilia
atgctcggctgcttttcgctggcaaacgacgacgcccgagcatgggctcgggcgctgcagaatatgtgtgatccaggggagccccgggccatgcccggcggcgccacctcagccttccagaatgaaagcagccgcgaccttgcggccttcgccggccaggatgttgaaggtgcgtgcggccgctggattgttcatcacttccaggccgatgccgcgtga

SEQ ID NO: 518259 - DNA, 510 bp, Stenotrophomonas maltophilia
atgtcgcaactctccttttcctcgttcgatgccgcgctgatggtgcgcgattcaaagggtcgctaccagccggcgacggctgatcagattctggaggccgcgcgccaggccatcgagcaaaagatgcagcgtggtgcatcgttcacttcgccggcggcggtgaaggaatacctgtgcgccaagctggccggcttcgagcatgaggtgttcgctgtgctgttcctcgacacgcagcatcgcttgatcgaatatgccgagatgttccaaggaaccattgactcggccgaagtgcatccgcgcgaggtggtcaaggcggctctgcggctcaacgcggcggcggccatcatttcgcacaaccatccaagcgggaaccccgagccgagcggtgccgacaaggtgttgacccggcagctcagggaggcgcttgcgctggtggacgtgcgcgtgctcgaccacatcatcgtcgcgggcagcaacaccacatccttcgccgaacgtggcctgatctga

SEQ ID NO: 518260 - DNA, 519 bp, Stenotrophomonas maltophilia
atgaccctccagctccgacatgaaaccccggccgacattgccgccatcgaggcggtcacggttgccgccttcgccgatgcgccgcacaccagccacaccgagcgcttcatcgtgcgggccttgcgcgctgcccacgagctgacgctttccatcgtggccgaagaacatggcgaggtcgtcggccacgtcgcggtgtcgccgatgacgatcaccgacagtcacgggcgaaagggcgaaggctggtacggcctggggccgatctctgtcctgccactgagacaggggaacggcatcggctcacgcctgatggaacaggcgctgtccgaactgcgggccatgcgggccgcaggctgcatgctgctgggagatcccgcgtactacgcgcgctttggcttccaggcccacgcgggcctgcaactgccgggcgtgccgcccggctatttcatggcgctggccctgcaggggccagtgcccgaaggcatcgtgcagtacagcgatgccttcaacgccgccgcctga

SEQ ID NO: 518261 - DNA, 351 bp, Stenotrophomonas maltophilia
atgccccagcccctcaccaccgccacggaacgcgcgcaactgctcgccaacggcgaggcccttgcggcaggaaggggtatcgacctaatgcctgtggtgcgcctgttcacgccggatgcgcatctgacttggctgctggccgcgctcgatcctgccgatggcgacaccgcctggggcctcatcgacctgagcatcgggatgccggcgcaaggcaccgtcaagctgtccgaccttgcatccatcgtcgggccgctcaagcagcccatactgcgcgacctctatttccggcccacgcgcacgctgtcggagtacacccgcctagctgaacgggacggggccattccagactga

SEQ ID NO: 518262 - DNA, 774 bp, Stenotrophomonas maltophilia
atggtcgatcgcagcgccgagccttggtatccaaccgccgcgtacctgtacgtgctgcatctggacggccttgagcttgcctgggaatacctgcgcaggcaccccgactatcggcttgactggctgcgccgccgtcgccggccacaggcggcacaggacgcggcgcatcgctggggcttgcgcctgctggaagacgcggcgctggatgcgcgcgacgcgcatcctgcttggctacccggccatgcggccgtggtgcagctctaccccgatgccgacccgccgccccatgcggcggacttcgcgttctggcacatccctgggcacaaacaactgctgcacgacggcaaagggctggcgctgatcgcgcgcagcccaggccgatgctcgcgcttcgcgctggcgcccggcctggaagacggcatggccgtggcctatgcctaccgcggcggcgctatggcgcccacgcgcgggcatgcgcccagttcagacttggccgatgccaagcctcggccgtcgccagccgcaatgctggaactgcacaccttgcaggcgctcgacgcgaccctggcgggcgcgtccttgcgcgaggtggccgaagggctgttcggtgccgacaccgtggacgctcactggtacagcgacggcgggctgcgcgccaagactcgccgcctggtacggcgaggcgacgagctgatgcgtggcggttatcgccgcctagcagaactaccgccgcttgagaagggccgtcttgccgccgacgcaagacggccctga

SEQ ID NO: 518263 - DNA, 588 bp, Stenotrophomonas maltophilia
atgaccaccgtttccactactggcacggcgccgcgtcctcgctcgcgcctgcgcgctcgcatcgtgctcgcgggcctcgccgcctgcggcctcgctgcgctggcctgggcgtccttcgtgcatccactgccgcgcctgatctacaacccgtccgacagcgtggccgtcggctggtatcgcgtcgatccgctgcgccatcggcccggctcgctgccacgtccgttgtccgtggacagcatcgtcctgacgacgctgccgccagacgccgccgcgctggccgcgcagcgcggctatctgccggcgcgcgtgccactgctcaagcgcgtgggcgcgatcgcgccgcagcacgtttgcgttttcgacgcgctggtgtggatcgacggcgtgccggcggccgccgttcggcctgccgaccggctgggccgtccgctgccgtcctggccgcagtgccggcagcttcggcctggcgaactgttcctgctcagttcgaccaatccggcgtcgttcgacagccggtatttcgggccggtcagcacgtccgccgtgatcggcgtcgcgcgtccgatctggctggaggctcgcccatga

SEQ ID NO: 518264 - DNA, 189 bp, Stenotrophomonas maltophilia
atgcaacagaacatctctggctttgaccgcatcgcccgactagtcattgggcttggcctgatcggcgccaccctgctgggcagcatcgggtcatggggctggatagggatcattccactcgccaccggtgccgtaggcttttgcccgctctacaggctatgcggttgcaagcggtgcgcggtcaaatag

SEQ ID NO: 518265 - DNA, 1272 bp, Stenotrophomonas maltophilia
atgcaagacgaaaagactctccgagactcagacttatccttgtcgatcacccggcgccgagtaatccaggcggccaccgtagggatgctgggtatggcgttgcaatctcgcatggcttttgctgcttctcctctcacgacgaaggcccgcattgttatcgttggaagcggtgctggcgggctggccgttgcttctcatctcgccgcaggcctggcgggtgcggaaatcatcgtgatcgacgcacgcgaggaacactactatcagccgggccttccgttggtcggggctgggttgaagccgatcgactacgtgctttcgcagacggccgcctacattcctgagaacgtcaggctggtgcccgccagcgtcactgagttcgatgcggatgggaaggcggtggtgacgaacaagggtgatcgggtaccttatgacttccttgtggttgccacaggcttgagtcaagactacgcctcgattgaaggcgtggacgatgcgttgatcgggaaggtgggaatcggcagcgtttaccgtggtccggccgccgcgcaggacacttggaaactggtgtctgccttctcggagaagggtgggcatgctgtgttcgttcgcccggctagcgacatcaaatgtccgacagcgccgatgaagtacacgttcctcgtggaagaccacctgcgtcgcgcgggagtccgcagcaaggcgcaaattacctacaactcggctccggacagcgtgatcggggtccccgccttggctggccagatcaacgagcttttcaaggggcgcgacattgctgtcaacaacaatcgcatgcttaagtcggtcgatcctggccgacgcatagccgttttcagcacgaaagatggatccgaagaagtcccctacgatttccttcacgtcgtgcctccgatgcgggcgccggacgcgattcgcaaaagcgccttgtcgtggcagagcggtaaatgggcggcaggcggctggctggaggtcagccaagataccttgcgccatgcccgatacccaaatgtcttcggattgggcgatgtcgtgggtgcgccggtgcccaagaccgcatttgctgcgggactgcaatccgttgttgtcgcagatcagatcatcgccgagattgcgggccgtagctccgccagcgtcttcgccttgccggcatcgtcgggcgggcctgcgactcccgaggatcttggcaagaactgggcaaaggaaatcgaggcattcaagccggcctacctgcgaatgctgagtggctcggcctaa

SEQ ID NO: 518266 - DNA, 279 bp, Stenotrophomonas maltophilia
atgggtttgggcgcgcacgaattgctggaggcatctttggccgcctgcatcaacatggccgttcgcatgcacgccgatcagaacggcatccccttggacggcgtgacaacgagggttggtttgacctcgcccgatgcccacacgtccagatttgagtattcgatcgcagtcaccggcaaccttacatcggagcagcgtgccgagttggaagccgtggcggaacgctgccctgttcgccagaccctctcgaaaaagctggtgttcgagcaggctccttga

SEQ ID NO: 518267 - DNA, 315 bp, Stenotrophomonas maltophilia
atgaatgaacagccggacgatggtttcatcgaaccccagcaactccgcgaactgattgcacagggcaagaaggttttcatcgttgacgtgcgttcagccgaggaatttgcaggcggccatgtcgagggagcgatcaacattccggccggtcagcttgacgaccacgcgcacaacatccccaaggatgcgcaggtggtcacggtctgcaatcttggcggcccacgttcctgcaacgctgccgcgcagctcaaggacatgggctatgtcaacgccgctcctttgcggggtggcgtagtctgctgggatgccgactga

SEQ ID NO: 518268 - DNA, 738 bp, Stenotrophomonas maltophilia
atgatccttcgacagtttctgcatcaggagccggtcggcatctcctatctgatcggctgcggtggccgtggcattgcagccgtggtcgatcccgtaggggatatgggaacctacttgcaggccgccgaggcaggcggaatgggcatcgcctacgtgatcgacacccatgtccatgccgatcacgtgtcgatcggccccatgctcgcccgcagcacgggagccgagtatgtactattcgccggcgccgacgtggcgcaccccttcaagggcgtacaggatggcgacgagctgcccttgggcaatgtcgccgtgcgagtgctgcacacccccggccatacgcctgaacacatctgtctgctggtgacggatcgcacgcggacggacgagccgtggttcgtgctgaccggacacacgctgatggtcggcgacctgggccgcaccgagctggccaccagcgcggaagatggcgcccgcaacctctaccgcagcgcccgccgcctggccgaactgcccgaccatgtggaagttatgcctggcgcctatgccggctcagtgtgcggccgcgccctgagtggcaagccgtggtcaactatcggcttcgagaagcgccacaacaaggcgctgcgcatctcagacgaggccgagttcatcgcccacatgacggctgagacgccgcccccaccgccggaagcggcattgctgcgcgaaatgaatgctggtcggcaggaaatcgcatga

SEQ ID NO: 518269 - DNA, 1254 bp, Stenotrophomonas maltophilia
atgacggccgctgcgcacgccagtggcgccatccggcttggcctcaaggaaaactggcgccagttcgcactcctcgtgctgatcaatgcctttgtgggtggcatggtcggcatcgagcgaaccgtcgtgccgctgatcggctccgaggagtttcacatcgagtccacgacgctcatcacgtcgttcatcatcagcttcggggtggtcaaggcgtttgccaacctcatatccggccaactcgccgatacctggggacgtaagcgcgtgctggtgatcggctggctgcttgggctgcccgtccccttcatgcttgtcgccgctcccaactgggaatgggtgattgccgcgaacgtccttttgggcctgagccaaggcttcgcctggtcgatgaccgtcatcatgaaggtcgatctcgtcggccccaagggccgggggctggcagtcggcctcaacgagttcgccggctacttcgccgtgggtttgaccgcttttctcacaggctatctcgccagccgctacggcctgcgacccgtgccgatctatcttggcgtcttctacgccatcgtcggcaccattctgtccattctggtagtccacgacacccgtgaccatgttcgactggaagccggcagcgtggcgaaggagccttcgccattgacgttccgcgaggtgttcatgctgacctcgttcaagaaccgcaatctgttctcagcgtcgcaggccggactgatcaacaacctcaacgacggcatgagctggggaatcttcccgctgttcttcactacgttgggcctgggcgttgagcgtatcggcattctgaaagcgatctatcccgtggtgtggggtgtcggccagatcgctactgggccgctgagcgaccgctgggggcgcaagggcctgatcgtcgcaggcatgtgggttcaggccgccggcctgttcttgacgggactcaccggccgcttcgagtggtggctgctcgccagcgttctgctcggcctcggcacggcgatggtgtatccaagcctgattgccgccgtgtccgatgcttcgcatccgagctggcgtgcccgttcgttgagcgtctatcggttctggcgtgacctgggctatgccatcggcgcgctgtcggccggcctcatcgcagaccgttttggcttcggtgcggcaatcttgacgatcggtgtcgtcaccttcttgtcaggcgtaatagtcgccattgccatgcgcgaaaaccgagaaggcacgcccaagtaa

SEQ ID NO: 518270 - DNA, 849 bp, Stenotrophomonas maltophilia
atgaccgcacgggattccagcgaaccagagcattacggggaatctggcctcttgaccgatgcttacgcccgctggcggtcaaggccgctgggccgcatcaccgatgacctccagcaacggctgctgctggaggtcatcggcggcgtggagggtctggatgtgctcgatgcggggtgcggggacggcgctctggcgacggcactggctacgcgcggcgcccaggtcacgggcctcgatgccgaccctcagatgcttgcggctgctcaagcacgcgcggcaaaggaagcagcgtcactgcgcctcgtactgggacaggtcgaggaactgccatttcctgatgcttctttcgactgcgtgactgccaccgccgttctctgcttcgtgtcggaggcgcaaagggccgtcagcgaaatggcgcgtgtgcttcggccagatgggcaactcgtcatcggggaactcgggcgctggaacgcctgggccgctcgccggcgcatccaggcatggctggggaacccgatgtgggccgtcgcgcactttcgcaccgctacagaccttcggagcttgatgcacgccggaggattgaccgtagggcagacacgcggcgcgaccttttatccacctttcgatgtggccgcctcggtctttgctgaaatcgacccgtggttgggtacccgcacgacatgcggcgcggccttcatcgtgctgtccgccgacaagcagggcaccatatcgcccagtttgcgaagcagcggaaggcgccaagccgcgcagccaaatcaggccgcggtttcgacctccaggcccgccgctttccattcggggaacccgtcttccaagcgccgcacctga

SEQ ID NO: 518271 - DNA, 669 bp, Stenotrophomonas maltophilia
gtggcacaggtggggccgaagcaggccgtctattccaatcttgcagagatcgctcaagggatcggccatccgcatcggcttgaacttcttgagtatcttgcgcagggacaactcagcgtcgaagaactgaccgatctgagcgggctgacctttgccaatacgtcgcgtcatctacagattctccgacgtgcgcggctggtggataccgagcggcagggcaaatatgtcctgtatagccttgcaggtcacacggagatcaccacgctgctcaaggcgcttggctgcgttggtgaacgcaaccgtgccgaagtgcagcagatcatgcgggactatttctctgcccgcgatgcgctcgctcccgtgtcgagagaggatttgatcgcccagctacaagaaggctcggtgacattaatcgacgttcgaccggagcacgaattcgctattgggcatttgcccggcgcgctcaacattccgctggcggatttgaagaaacgcctgtccaagtttcccaagaagcaggaaatcgttgcctactgccgagggccgtattgtgtgctgtctttcgaggcggtcgcgctgctccgggcgaagggctttcaggtgcggcgcttggaagacgggttccccgaatggaaagcggcgggcctggaggtcgaaaccgcggcctga

SEQ ID NO: 518272 - DNA, 465 bp, Stenotrophomonas maltophilia
atgaaagccattcaagacaactaccctgcgaagttcgcacactgctatggatgcgggccggccaacccgcatggtcacaagctcaagagctatttggtgggggatgaggtggtcgcacgctttaccccggccgcgatgtacagcggcggttatccggggaacgtctatggcggcatgatcgcttcgctgctggactgccacggcacggcatcggccgccgccttcgcctaccgctcgctgggccggaacatgggtgacgggcttacatccatccgcttcgttaccgcctccttgaagatcgacttcaagcgaccaacaccgatcggcaccgaactggtgatggtcggcacgctgcgttcgctagaaggcagaaaggccgcgatcacgctgacactcagcgcggacggcaacacctgtgccttgggcgagatgcttgccgtccagattcccgacgatcacggttga

SEQ ID NO: 518273 - DNA, 1176 bp, Stenotrophomonas maltophilia
atgcaagaacagaaatcaggtttgtccaccttgtgcgttcatggcggcgagtcgatggatgcgcaaggcggcatccatacgccgctctacaaccattccacgttcggctttccgtccaccaaggcgctgctggatgtggtcgaaggtcgcgccgagggcaacctctacacgcgctacggcctgaacccgaccatcaaggcggctgaaaagaaattggcgttgctggaaggtagcgaagccgcgctggtgttcagctcgggcatggccgccgaggcggccgtgtttctaacctactgcaagagtggcgatcacatcgtctgcatcggcgacgtgtacggcggcaccttcgagctgctgcaaagccagttgcccagcctcaacatccagacaaccttcttgctcggcagcgaaatcgagcgtctggcggaggtcatcaccgcccgcacacgcatcgtcttcttcgagacgccgaccaatccgaacatggaagtgattgacatagccgccgccgtcaaggtcgccaaggcgcgcggggcgctgaccgtggtggacaacacgttcgcctctccggtcaaccagtcgccgttgcagcttggcgccgatctggtagtccacagcaccacgaagtacctgggcgggcacagcgacttgaccggcggcgtcgtgatcggcgcgcagtcgctgatcgccccgatctggccgtggcgcaagaatctcggccagatgatggcccccgaggtcgccttcctgctggcgcgcagcctgcgtaccctcacggtgcgcgtgcgccagcagaacgccaatgcgcaggccgtggccgagttcctgagcacgcacccaaagatcaagcaggtgaactatccgggtcttacgagctttgccggtcacgacgtggcgcgcaaacagatgcacggcttcggcggcatgatcagtttcgtcttcgatggcgatgcaactgcgacggcatcggtggtggatcgtctcaagctgttcaccattgctgccagcctgggtggcgtggaaagcctggtcacgcagcccatcaccacgacccatcacggcatgacgccggaagaacgacagcggcgcggcatcgccgatggcatggttcggctgtcctgcggattggaagatgctgacgatctgatcgcggatctgaaacaggcgctcggttag

SEQ ID NO: 518274 - DNA, 738 bp, Stenotrophomonas maltophilia
atgcttgcagtgtccacgctaaggttatatcattcaatcgtttacgtgaatgatctatcaatggacaggtgcatgtcaagctcaaaccccaagcgggtgatctacgaaaacctggccgagatcgcaaaggcgatgggccacgaacaccgcctcgaactcctcgaacgcatggcccaggggccgcaaagcgtggagcaattggcgacgagttgcgggttgactgtggcgaacacgtcccgccacctccagttgcttcgacgcgcacggcttgtcagcaacatgcgccagggcaagcaggttttctacgcgctggccgattgcgcggaagtcattccgctgctcaatgcaatggggcgcatggccgaacgcaacgtactggaaatgcaaggtgtcatgagcgactacctctgcgatcgggatgcgctggaagccgtctcacgggaggagctgatggcacgcctgaaagacggcatggtgacgctgctcgacgttcgctcgcccggcgaattcgccctcggccacattcccggtgcgctgaacatgccggtggacgagctggagcgccgacttgcgcagcttcccaaggatcaggaaattgttgcctattgccgaggaacctactgcgtcctgtccaacgaggccgtggccgcactacgcgccaaggggtatcacatccggcgcttggaggacggctttcccgaatggaaggctgccggtctggccgtcgcaaccgtctga

SEQ ID NO: 518275 - DNA, 351 bp, Stenotrophomonas maltophilia
atgaagaccctcatcatcatcaacgatcccccctacggcaccgaacgcatgtacaacgccccgcggctggctggcgggctgatcaaggccgagaatcaccagaccaccgtgttcctgatgggtgattccgtatcgggcgccaaggccggccagaagaccccggacggctactacaacgtcgagcgcatgttgcgccgtatcgtcaacggcaagggggaagtcctgctgtgcggcacctgcctggatgcacgcgccatcaccgaggacgaactgctagccggtacccggcgcagcacaatggacgaactgacggctgcgacggcggctgccgacaaggtactggtgttctga

SEQ ID NO: 518276 - DNA, 1140 bp, Stenotrophomonas maltophilia
atggcgcgggtctatctcgattacaacgccagcacgcccatcgacccggcagtctcggccgccatgcggccgctgctggaagacgccttcggcaatccgtctagcggtcattgggcgagcctgcccgcgaaagcggcgctggagcgcgcacgcgggcaggttgcgttgctgcttggcgcgtcacccgacgagatcgtgttcaccagcggtggcagcgaggcaaacaacctcgccatccaaggttccttcttcgcactgcgcgaccggggcgaacacatcattacgcaggcgaccgagcatccggcggtgttgaagccgctggctttccttgagcggctgggcgcgagcgtgacctacctgccggtggacggcaccggccgcgtcgatcctgatgcggtgcaccgcgccatcacaccgcgcacgattttggtgagcatcatgcacgccaacaacgagacgggcacggtgcagcccgtcgaggccattggtgccattgcgcgcgagcatggcatccgctttcacaccgacgccgcccaatccgtagggaagatcgccacccgggtcaatgacctgggcgtcgatctgttgagcatcgccggtcacaagctgtatgcgcccaagggcatcggcgcgctctatgcacgtcagagcacggcgttggagccgttgattcacggagcgggtcacgaaaaagggcggcgtgccgggacagaaagcgcgctgatggcggtcgggcttggcgaagcctgcgcgctcgcggccgacctcgggccgatgaagcgcatccgcgaactgcgtgatcggttctggcaaggtttgcaatctctgtacggcgatggcgtggtgatcaacggccatgccgagcatcgactgccgaacacacttaacgtctccttcgtcggacaggtcggcgccgaagtgctgggccggctggatggcgtggcggcgtccaccggctcggcgtgtcatgccggccgtgtagagctgtcgccggtactcgccgcgatggccgtcagcgatcacgtcggcatgggtgcagtgcgcttcagcctggggcgcggcaccacgcaggaagaaattgacaacgtgctggagcaattgcgctcgacagcgcaatttccgtcacacaacaagaattga

SEQ ID NO: 518277 - DNA, 1203 bp, Stenotrophomonas maltophilia
atgttgaagaacaccatgcaccgtcaggtgctcatacttgccagtgctcaggccctgttccagatcgtttcggtcggcgtcatgaccgtgggcggcttggcgggcgcggcaatcgcggattcgccgcgctgggccaccttgcccattgccacgatgttcctgggaacggccgcgatgatgttcccggcctcgatgtggatggcccgcgtcggccgccgggtcgggttcctgtgcggcacgctgctgggaatcgccggcggcctcactgccgcctggggtatatcgaacggatcgttggccctgctcgcgctcggcacgttcctgatcggcaactaccaggctttcgcgcagttctatcgcttcgccgccagtgaggtcgccgatgatgctttccggcctcgggccatttcgttcgtcatggccggcggcgtcgtcgccgcgctggccggccccatgctggcccgcctgggcgggccgctgctacagccggagtacctggggtcgttcctcatcatggcggtggtttcattgattgccgccggtgtcttgctcggcttccacatccccgcgcaggcaacgggttcgaccgaggccgtcggcaaggggcgcccttggcaagagatcgttctacagccggcctatctcgtcgctctgttcggcgcggccaccggctacggcatcatgattctggcgatgaccgccacgccgattgcgatggtgcatcaccaccacgcgctcggcacggccgcgaccgtcatccagctccatgtgctgggtatgttcctgccgtccttcgtcacaggttctctgatcgcccgctttggcgtcctgcgcatcatgttcacgggcgtggtgctgtttgtcggccatatcctgatgaccctgaccggcaccggcttcaactcgttcgccgccgcgctggttctattgggtgttggctggaacttcatgtacatcggcggcaccacgctgctgaccagtacctacgcgccggccgagaaggcgcgggcgcaggccatcaatgacatgacgatcttcgccatcggtctggcgtgctcgttcagcgcgggaggcttgctggaggccctgggctggcagcgcatgaatctggccatgctgccgtggctggtgctggcggcactgtctctcggctggctcggactcaagcagcaggcgcgactacagcaggagaaggctggatga

SEQ ID NO: 518278 - DNA, 591 bp, Stenotrophomonas maltophilia
atgacggaatttcttgaacgaaatgaaatgaggaaagcagcaccaatgagtgcgttggcagatgatgcgccgtcggtaagcccgcgcgaacggttgctcgatcggctcgcaagcctgggaatccggcccgaggtagtgccctatccggcgcattccacggtcgaggaaggcaaggcgctgcgcggcgacatggcaggaacattcaccaagaacttgttgctcaaggataagaagggcaagctctttttgctgtccatccacgaggacagagtgatcgacctcaaatcgctttcgtcgctgatcggcggcaaggggcatctgagcttcgtccccgccgagcgcatgcaggaactgctgggcgtcgttcccggcgccctgacgccaatgggcctcatcaatgacagggacgcgctgatcaccgcggttatcgacgcatcgctgatgacctctgcgcaactcaacttccacccgctggtgaatacggaaagtatgggcatttccccagcagggctggtgagtttcgtcagatcgtgtgggcgtgagcttttgatcgtcgatttcgatgcaggagaaggcaagacgtccgaataa

SEQ ID NO: 518279 - DNA, 279 bp, Stenotrophomonas maltophilia
atgaaaaagatcatcccattcttgctcgcggcagtcttatcagcctgcggccaatccgaggcacctcaaaagaccaccgattcggaggcagccattccgacggtagaagaactcgtggcaaaccccgaacggctcaaagagctgcgccagcaatgcaagaccgaccgctccaagctgggcgacgtgttgtgcaaccgggtgaccgaagccacgcgcaagcggttctatggcgatggcgaaaccccttacacacccccgaaggagccgcccaagttctga

SEQ ID NO: 518280 - DNA, 504 bp, Stenotrophomonas maltophilia
atgcgttcttcccatggcttccgcaccgccccaattccctctggctgggtccagaccggtgagcgctgggcactctggtacaacggccgggaaacggcgaacgtcacgctcgatgccggtcccggcgttcggctgtggatggaaggccagaagatgtggcacaccaaggaagcgcgcgccgccaacgtccgacaggcgaagcgctacgccgagcgctggtgcgcggccaggctctatcccgatctgccccttcgcgaggctgtcgcccgtctgaccgacacgacgccgatccagccgccgccgccactgcctggcctgccgccgactcgcgagcagcagcaacaggcccgtcgtcttgccgaggccggagcgaaggagatcgagcggatcaaggaagcgctggagccgcgccgaccgccgaaggagaccaagccaagggcgagggatcccatgaaggcctgggtcagggcgggtaaagagcagctgtcccgagctcgaatctga

SEQ ID NO: 518281 - DNA, 918 bp, Stenotrophomonas maltophilia
gtgagagcatttgagcgggcttcagtaaaaagcgagatcgcggaggtcaataggcttctgcaatctgttggtcaggacgatgtcttttcgagggtgggactagagtaccgattgcgggagctctatgagaggctcgaagatgacccaggtagtcacttccaatctcgactgacctttaagggtgcgccggttgtcggcagctacggcatttcagtgtcgttcggcgccaaggcaatgtcggcattctctgatgctgtatcggcagtgggagcatcgcttcgcggaatcttggctgatcatggtccactgcctgatcgtccggacttcgaaatgctgatcacgggcactgccgtcggttccttcggattcgagttggagggtcgtaaccgcgagctagttgaggggggcactgtgcaagaagcggtagatcgtgcacagctcttgctcgaggcttcgtcccttgaagcagacgacgcactggcggaggctgctgttgaccttgatcgtcgtgcgatcgccaaggtgcgtgcattcgccgaagtgctcatgcaaagcggggcactctgcacgcttgcaacgacacaaaggacgttcagctttagcaaccttcaacaggttgctcgaagtgttgagcggttggaggacgacaacatagttgagcaggaagatgctgtcgaaggtgtgcttattggggtcttgccagtcacgcgcacattcgaggtccgactgcctggcggcgaggtcattcgtgggaaggtggatcgttccgtgggggaacttgataccctgcacgagaatggtcaccggcgctgcagagtccgtgtgcgcacgactcaggtgggagggggtaggccgaagtacctgttcatcgggcgaccggagttcattgacgagatggggctcttgggtgatgagtaa

SEQ ID NO: 518282 - DNA, 378 bp, Stenotrophomonas maltophilia
ttgggtttcgtagatgggttccaatgggtgaacggcagcttctgcacgaacgtggaaaccctcgaagggcgcccgccaggtgatattgacgtggtcacattcctccatgcaccggcgaatatggatcgcgctgcggtggtggcgaataacccgcagttcttctttagccctttggcgaaggcgcagtttcactgcgatgcatatgtggtggactttggaggcaaaccggaggcggtggccaatcaagcggcctactggtctagcgtatggggtcatacgcgagttgggacctggaaaggcttcctgcagatcccgctaaatccagatttcgatgagcgcgccgtaaacctgctaaacggcaacgaggtggccgcgtga

SEQ ID NO: 518283 - DNA, 651 bp, Stenotrophomonas maltophilia
atggccatagtcacggctggccaatggacgtgccctatgagcatcctcaacgtactgatcagccgtgaccagcttgtcgttgcagtggatacgctcgcggaggatacgctgacaggcgcttactctgctggtgcaaaggtgctcctgataccgcagcacaacgtgctgctggccaccagaggcggagcgcagttcttcttgaagatctacgagctggctctgcaggcgagcttccgggccgacttctctattgagcagctttcgaccgagatggggccggtaatggaccaactttggttgaactatgagaaggcggccgcagaggctgacctgcctatcgaacagctggggaccgagattgtcttgggcggttggtcgcctagaaacggcaggatgatggccacggtctacgccaagagcgacagtcggcaggctacggcagtgcagccgatcggtggccagttcgcgtcaccaggtgatccactcaagggcgtggcgccgagcatgctgcaggccgacctgatggctgccggacggctccagacgagctacctcaatgagcagatgggccggcaagtcgccggagggcgtctgctgatcgggttcttgcagcagggccaggctgtggtgaaggacctgggaccgatctag

SEQ ID NO: 518284 - DNA, 480 bp, Stenotrophomonas maltophilia
atggaactactgaatcgagactaccagcgacagctactgttctcgctggcagagcattatccccaaccagttgaagctgggacgctggctcagagcgcgttcgggccagtcaatgtcaacattgcctacctgcatgagcatgggctggttcgcggggaatggataggcagcttggaccgtggcgacacgcttatgcaggcgactatcactgcgcgcggaatggactttcttgccgatgatggggggttaggcgcaatcttgggcgtcgtcaccatcagacttgacgatgagactctgaaggcaattattgagcagagagttcgtggttccgaactttctgaggacgagaaaaatcgtttcgtggatcagttgcggaagctgccgggtgagacaacgaagcatctagttctcaagctggtggacgcaggtttggacaactggcagagggcccttccagtgcttcagggattgctgagctaa

SEQ ID NO: 518285 - DNA, 1065 bp, Stenotrophomonas maltophilia
atgagtgcggcaaaggccatcgcaagcgcaagcgaagggccggatctgctcgctggctatatgacgctggcgtcatacgcctatggtccgaagcgtgagcacacagctgcgggcgcgaaagcgattcgcctgacaactggatgctctgacttccggtcaaagaaggttctgaagcgtcttctttcattcggggcggaccacgagttgcctcaaggtctgataagcgcgaccggacgtaagaaggccaacgctgacgaatacaggatcgagcattggggggatgaatttgcctatctaccatccctgctcaccgatcggcatcctgatttcgggtcgcaccttgcccgtctcctgctgatggatgagccagagtcggtcaccagagatgccttgatcgtgctcctgcacgtgtatgcgtccactgattactctgagtggttcggttgcccgcctgacaccatgccctacagagattgggaactgtccgggactgccggccaggactttgagcttggatatcaaggggacgtaggggcgcttcagctgtggctcgtctccgaaaaagatgaggacgcttggcgagttccgcgccaagtagttgcgagtctcttcggatctgactctgaggagaacattgtccgcttctggagggcttgggactgcctgatccaagcggggtcgctcgtcaccgtggtgtcggtgcaatccggggggagggcctacccgctatgggtgtactccaggggctatcggcaatccctagtggagcatcatggaattgttgcggatctagggagggaggcgcagctcgctgcctgtgcaagcgggctggatccagacaacctggtgatccgatacgcggtagacgacttggggggatccggctcggggctcttctactgtttcggcaagtcgccgaaagtccgaacgatcgtggccccccgcctgcatgcgccgacacccctcaatctcgatggattgaaggaggcagctgcggtgactaggaacatctcccgggaaatcagggcggcccgccgcgccgaccgcgaagcctacgctgggtaa

SEQ ID NO: 518286 - DNA, 543 bp, Stenotrophomonas maltophilia
atgggcaattccgattggctagccgtccaggccgagcacgagaagaacaggcggctctatggcgggaagtcgccgcgtgggtcggtttggcgtgcgctactagctgcactcgcttggtccattggctctgttgttgcgctatctgtggctctcggcctggccggcttccttctggctcggtatggctctgatgagtacgtgctggtgtgcgaagggacaatctccgcagagggtagggatcgagcgcccgcgaccatgtacgccgagatgcgcgagtttgggcagatcatccggctatggagcaaggatgcgggaacagtgaggatggagatccccaatgacttttacgacgctggccagcttcgctctaccggcagtcttacgtccatttacactttcacgggtctctctggccacttctcggacctgagcggcgccgtagccatgcgtatgggaaaaggccgagagttccaagggaagtgcgtgcgccgtggtcagccgaccagccgaccagttagccagataggccggttcgctcgctaa

SEQ ID NO: 518287 - DNA, 192 bp, Stenotrophomonas maltophilia
atgcgcaatggctggaccccagagcggcgccagcggcaggcgcaggcaatccagaactggcgaccgtgggagcgggcgaccggcccgcgaagcgtcgaaggaaaggccaaggcggctaggaacgcctggaaggggggcgaacgcccgctgctgcgcaatctggccgcaatcctcagagaggtgagttgctga

SEQ ID NO: 518288 - DNA, 2703 bp, Stenotrophomonas maltophilia
atggcccgtttcgatggaatcccggtagattcgccggttaagagcaaaccacgattctctggtgagctggtggaacctgcgggctccactgcagctttggcgtccaccggtcagcgcagccgagtcgcaccggatggatggcggtacggccctagtcgcgaccttgcctatggcgctaggtcggtgctgcagggggctggcggcttgctcggcgctgtcggtggcgatgctttcaataactacgtggccaatcccatcgcgcgcgctgtgggaatgcaggagtctcgcgcctaccgtgaggaagcctccgctctggctgaccggcttggcctgccgaaagctcagacttctggcgaccgcgtgctgggcgacgtgggcgaggcgctgaccggaaccggattgacgcttggcattggcggcggcatcaacgccctagctaaccttgggcgtcgcgcagcggccccggtcacgaaccagctggccagcttcctatctgctcagccgaccctgcaggccgtgtctgctgctactggctcaggagcctcttctgttgcgcgagaggcgggagcttctcaaggcaatcagctgttggccggtctggcaggcggtttggcgccgggggcaggaagtgggcttgccagtctcgctacagcaggccgtgtaagtgccgccggaaccgtgccgacgcttgccgccggcgccactcggcgggctgtccggggaaacgatcccagcgcgatgcaggctgcgatagatgactttgctgccgctggggttaccccgagcgtaggccaagcgtcgggtagccgtaccgccaaggcgatggaaacctatcttggcaatagccctggtggtgcgggtcgactggctgcgcttgcagagcagcaggccaacgcagctcgcggcgcaaccgaccgcctgtcgaacagtcttgccaatggcggcgcggaccttactcctacacaggtcgggtccaacgtccagcaggggatttatggacccggggggtactacgagcggaccaagtcggtatctgatcgtctctatgacgaggtcgggcgccagatcgcccctgctgccaggttcgaagtctcgaaaactaaagaggcgctcaaaagagtcaatggaagcatcgagggggcacccaacgtagggcggtacttccagaatgccaagctgcagggaattgagagcgcactcgtcaaggacactgacgggatccaaggagccctgtccaggccgggggttgctgctcaagctgatgagcttcgtgccaatttgaccgaacaggcggccatccgtaaggcagagattgcccaaggcacgaatcaacagcggcaggacatggtctccgagattggtcgtcgtcggcaggagctgcaagctgacgctcagcgtcttcgcgaacgaatcaccgatgcagtagaaggcaggcgggccgagctgtacagacaggctgatgaactgcagctccagcttcgtgcggagcagcaagctgctgcggctgagaaccgccgacgagcgatgttccctgagacgcgtaactcgcttgtgcgtgtcctgagtgacgacgaaattgccagccgagtcccgactcgcaggagcatcgactccagcctgccgactagtgccgaaatcgaggctcagatcccaagtgcccgggatattgattctcagctgatgcctctccgcgaggtggagcgccgtctcccgcaggaggctacatacgcatcttcgagctttggcgatgacttcattgagcagcaggtgaacgcttatctgcaatctcaggctgatggaaagctgccttatgaagcgctctccaagcttcggaccatggtcggacgggaaatcgataccaattcgttggtggatcccgtgccccgtagcaagtggaaggagatttacggggcgctcacccaggacatggaggccgccgcgaccactcctgcggcaaagaaggcctgggcacgcgccaacaactactaccgcttgaggcaggcccgtttggagagcatccggcgaacgatcgacaaggcgggtggtccagaggccgcctatcaggcgatgttctcgggggtgaacaatggtgctactccgctcaagcgagttatggacgcactttctccgagtgtgagaggtgacgtcgccgcggccttcctgcagaagatgggcagggcaaccaaggggcagcaggacgcgagccgggacgccttctctatgagctccttcctgaccaactgggctgacgtaagtccggaggcgcggagggtgctgtttagcaatgccaggttcggtactgactacgtgcagaacgtggacaagctggctcgaatggcgggagccatcagatcgggcagcggtgttttcggtaacccgtccggtacagccaggcagacagctctcgggctcactttaggcggtacgacgctgatggcggctcaaagcctgatgcaagggcagccgaagcaggcagctattgtcaccgcgtcgacgttggggttggccggcgccaacaaccttctggccagaatgatgaccaaccccaaggcggtgcgctggctggcgcggaatacagagcgagataccagcgacgtcatgggacagcttaacgcgctgatccagatcgggcgggaagaggacgacgacggcatcgtcgagctgggccagcgcttgaaggcagacgcagctgtgcagcgttag

SEQ ID NO: 518289 - DNA, 912 bp, Stenotrophomonas maltophilia
atggcccgtcccaaacccgccagccgaattcccgactggttcaatcttgatgcatacgaccgcttgtctggtttggacgccaatggctggctcacggtagtcagtggacttcgccagctgcttgatgaaattccagagttctatcgaattgacgatgaagacgccggggttagtctgggggagcttgaggcgaccttcataagcttccaagaggacgagggcatgggatgggccgattggaagaagcaggactatgccgtcgacaaggatgcctttaactttggcagcgtacagtcattgagcaactggacagttgcgcatatgggtgcaacgctcgaacacatcaggaatggccctgaattgttggccggcattaggacggcggttgagcttgaatcgaagagggaattcaaagaatcgaggaaagcacttaaggcaatggaatctctagatgaatttgccaacacgcctttcttcgtttcgttgcgagattcaagggaagcttcaggttctggtgtcgggctgcccaggcgtagaacgctctctgtcaacatgcgagctcctgacgaaatactccgaaaggacttcgaccggtggcttcaggcgatgcgcgctcttcaagggcatcaggctgcgaagaagtcatttacggacactgatttcaaaaggtgggtgcgcaacgcgtacgtcccgctgctcgtgctgaacaagtggaaggaactcaccggtgcgaggatcacctacggggacctttgtgaagcggcattcccaccaatgagacgagtggaagtagatgacgtccgcaagactttcctgccaaacgccaaggcctgggcgtcgctggagacaattgatgctcttgctgcgcaggcagcccgggaagacgaaaagtcggaagattttagcgactga

SEQ ID NO: 518290 - DNA, 381 bp, Stenotrophomonas maltophilia
atgggtcagcaaaatgccatctggagctcgcggggggggcttgctgaggcctatggggctgtgttcgaaatgtctgatgaccagcttcgagtcttggatcgatttgagggggcggggtttggataccgtagggagcagtgggaaattctcgtacacggtaggccactgagtgtcgttgtgtatttagccagtgaatcgcatcttgctctggacttggagccttacgattggtacaaaagaatcgttctagctggcgctcgctggcatggctttcctgaagattacattcgtgagatatcgctggtggcgagcaaggtagatatggaacggggtcgtggttatgaaatggaggctatgctgagggagattgaaggtggctag

SEQ ID NO: 518291 - DNA, 663 bp, Stenotrophomonas maltophilia
atgacgcggcgcggtggggcaccatggccggtgctgctgctgacggtggccctggccagcggctgccagcccccttcggccccggcccccgccgacggcggaaacgccggcctcacgccatcgcagccgcaggcgccttcgccgccgctggtggcagcggcgcgcgcacaggtcggcgtcaccacccgctacgaccctgcctatcaggtgctggcctatcccggcggcgacgttccggttgatcgcggcgtgtgcaccgacgtggtggtgcgtgccctgcgcagccagggcctggacctgcaggcgcgcgtgcatgaagacatgcgcggcaatttcagtgcctatcccgggatctggggcctgtcacggccggaccgcaacatcgatcatcgccgtgtgccgaacctgatgcgctggttcgaacggcagggctggcagcaaccgatcacggccgccgccaccgactatgcggccggcgacatcgtcgcctggaacctcaacggcaacggcctgctgcacgtgggcatcgtctccgaccggcggctggccaatggcacgccgctggtgctgcacaacatcgcgcgcggcacgcgcgaagagaacctgttgttccagcacgccatcatcgggcattaccggatgccgcagcgacagcccaggtag

SEQ ID NO: 518292 - DNA, 768 bp, Stenotrophomonas maltophilia
atgaataatgtatttcctctagctcgtgatcctgtatccgtttcgccgccgcctgataaggcgctgtggcaagaggaaattgcagaggcgaaaagtggccttagggcgaaggtcagcaccaaagctgccgccttttacttaggtgttcactacacgaccctaagggcctgggtgagggcaggggaaggtcctgagcctgttaaaaacccttcgcgtcctggcaccacggctgtaaatcagcacatgggttttaccctgcagtcccttgatcgcttcttgaagtctcgtgaggggtcggttgtgacgcgaggtaaaaggagcgaagtcgaatcagtcttgcgtgatgttgatcgtattcaggcaaagattgaattaaaaatggcggaggatgctctttccaaggcaagggaaaaggcaagaaggctcggcgtcctctcgttcaacggtcttgatggaatttccgatatccacccttggctcattatcgatgggcgggtagcaggtcatctttgggcgctgccagaagagcaggtgattcagaatgatcttgaagacacagttgaagtttccttgattgatgctcttgctctcccctggaagagcgatgagcataaggagccctatgctgaggtggcacaaagtgagttgaattcacttatcgccgctattgagaaggggagggaggttcaaagggccatggatgaggagcgggttttggattttaatacacccaaatccattggcattaaaaggcctgacaggatttaa

SEQ ID NO: 518293 - DNA, 177 bp, Stenotrophomonas maltophilia
atggaactagaaagaacgcttgcccggctcattgagatgatgttcaaaagtaattttcacagttgccttggagcaggcttgcgcaagcgcagtttcattgatgtttccaaaggtgcctacttcaacatcatcaactctgatcgaacgtttgttctttgggccgcctttgacaagtag

SEQ ID NO: 518294 - DNA, 294 bp, Stenotrophomonas maltophilia
atggctggctatgtggttccgccgtctgccacatggaaggtggatcttgatgctggtcagattgaagatcttgaaaacggcccacgctggactgtaaaaaatctcaaggtgacagagggtttcattgaggggaaaacagagtttgggagtgacttcctgctgagccgcgttacaggccagttgtcctacgtcaagtattctggaacggagagcttcgtccaagagggcatcgacgtgcccacttatgccgtatgggtctatcaatgcagtgcaactggcaagcgagttgtgtag

SEQ ID NO: 518295 - DNA, 174 bp, Stenotrophomonas maltophilia
atggcatttgaattattcttaattatcggcggggcagcccttatcctagtggcaaaccttgcgcggctacatcagcgccactctgataagaaatacgctgagaatagagaagatttcattcttgacgcgcaagtctttgccgcaaagtcaaagaacatcattggcaaaaattga

SEQ ID NO: 518296 - DNA, 231 bp, Stenotrophomonas maltophilia
atgcgtgtaaattcaatttcaaactcatttgatcactccagcctgcttgcggcttttcagaaatccgaaaaaggttcgtctaaatcatttgatccgtcactctgtcttgcgacaaaggcaaagcgtcgagcccgcctggagcgtcaggcgatgcggcaagcaaagcacgatgagatgcaagcacgtgctgaagcaagggcacgcaagcagctggatcgctgggggttttaa

SEQ ID NO: 518297 - DNA, 2169 bp, Stenotrophomonas maltophilia
atgagatttaattcacttaaaattgcggttgctctggcaatcacgttatcaagccatgccgtaagcgcgtctgtcgttgttgtaggcgacgacgcaaagggagcgtgtgagggctcaattgccattggagacaaggctgaaagcaaatgcgtaaatttatctcccgatcccttatacccatatccctccataattccaggaatagcaattgggcgctcagccatcgccgccggggacggaatatcaattggaaatgaatccatcgcttcaagcacaggaattaacattggcaacagaaataacaatggcggaagcacgaccattggaaatgatgttagaacaaccggcaagaattctgaagttgcaataggctttcaggctcagacaggcgatggccaaagtgtatccattaacggaaaaacctcactaggaccaagcgtagcaattaacggaaattccaccggatatggcggaaccgtcatgaacggcttcaattctggaaactttggcgtttcaatagcaggttatacagccggaacagcaccagtagctgtgggatacggggcacaagtaggagacgtaacaccctttgggacaacaggaacaaattatggcggagcatttggttcatatgcccgtgtaaggggcggcgacacaatgagcacggctcttggagcttttgcagacacggaaggccgaataaacgttatctcagtcggaaatagtcagccgcgccctgccagtaacggcgcaccgagcgcaccagttacctacagacagatcattaatgttgccgctggaacacaagaccatgacgcagtaaacctaaaacaattgaacgacgctcttgctggcatcccaactacaccaggctccggcaatccctatttcgcagcgaagggtgatccatctaaaaatgatccagcgttagctacaggcgagaattcagtagcaggtggcccatcggcacgtgccgcaggtaatcagtcctcagcctacggttcaaacgcgaatgccaatggtgagggatctactgccgcaggtaatcaggcaaacgcttacgctgatcaatcgactgcaattggagcattctcttccgcgacagcaaaatgcacagcagttggctatggtgctgagtgctctgaagatggaactgtgtcttttggccggtcaggtgatgataagcgcctaaaaaatgtggcgagcggagttgaagacaacgatgcggctaataccggacaggttagagcagtagacacgcgtgtccgtcaaactcaaaccgtagtgtcaaggcaagccgtgtggttcggcggcggggcttcatatgatccaacaactggagtttggaccaacccaacctttgcaatgcctagcggtcctagcttcaataatgtcaatgatgctcttgtctacttagacaatcgcatcggcaatggaacctctcctggaactggccctcaaggcccaacaggcgcagatggcagaagcgcctatgaagttgctgtaggcaatggttacagcgggactgaacaggattggctcgcctctctcaaaggtgctgacggcaaagacggtgtcggtggtggtagcggaagcaaaaccgtcgcagggaagaacatcgaagtcagcgagaaccaggacggaactcaaacagttgctgtcgctgacaacgtagttctcactgaaaacggcagcgtcaaagttggcgcaacaaccgtggatgctaaaggcgtctccattgaaggcggcccatcaattacaagagatggcatcaatgctggcaaccagcgcgtcacgagcgtgtctgcaggccgcatagagaaaggttcaacggatgcggtcaacggtggccagatctatgacatgcagaccgttcttaatgatcgttgggacgaaaccaacaggcgtattgatcgccaagaccgccgaatagacgcaatgggagctcaagtagcggccatgtcgatgatggctgcagcgaacgttccagctgccgtaggcgaagtccaggcttcagcaggtatcggctttagcggcagcgaaggggcattagcaatcggctggagatcccgtattactgaacgcacaagtgtttcgggtggtttctcgtatagcgcaagaggaaaagcaatgggtggcgtcggggtgtcaatcaacctaggacgctaa

SEQ ID NO: 518298 - DNA, 1353 bp, Stenotrophomonas maltophilia
atgtcaaagataaattctgatcttctcttggaacatgaatggccgtgcgccgtccacccccccggccagccccagctcgccttcccggggacgctgcggtactcaccaaccggcggcctaacattagagtacgcatgtcctttcaaccccgagtatgacaaggaggttgggcgtctttatggcgccaccgcatccggcgacgcttttacacttgtcggcaaattcagcacagaaagagctggatttaaggctcgctcttcctcggcctaccagacgggaaagcactcgttcaagtacgcgatcttcggccatcacgttgatgccgaatgcaagttctccagctttgaattcgacatttgcggactaaaggacttccttacggactctgactactcggcactggcgacattcggcagccgtgacctgttcgacattgacacccctgctggcaagattcgcggcgtacaaagcatgaatacgacccttctttctcggcgcctttcagaccaaatccattgctttgaaaaagacatagcagccatgtcgaagctgcaggaagcttatgactccataaggctggagcatccagacttcactccaatggttaaagccaaatcggagtaccgaatcattctagaaagagaggatggcgcggacgttgaagaggcatatccgacatgccatgctatcgctgatcttttctcggtccttttttttgggcccgcgccactgcggacgttaacggctcaagtgatcgatcaggctggcaagacgcactcctgggaagtgttcccttcaaaggttagcgaagcaggttctatcaagcgggctaccgagccaaagagccacttccatatccctgtgaattcttgggacatcgacctaggccaaactattaaaaattggcttccagttgaaactgatttccgcacactcatctgcacccttcagggcgcaacgacgcttacgtcctatagcgagattctctctaggatcgtgctctgtgccgcgcagctggaaggcatttcaaagaaggcagggagaaacaaggacgctgaaaaataccagtatgcgatcgattcgtatgcaagtccgcctttaatcgaccggctatgcaatttactccatcgcggccagactgaactaggcaaatcaatcggagatctaagaaacgacatagcgcacataggccgcaagagcaaaatagctcacatgcttagcacccgagaaaaatacgccgtgtgcattgcgctagaagcgactatcatcggctacgtgctgactactgtgggcgtcgatagacaagcagtcgaaaaacaccagagaactctgctgcgtttcgtcgaaggatag

SEQ ID NO: 518299 - DNA, 999 bp, Stenotrophomonas maltophilia
atgagtctcgttccaactatttatcgaagcaccgatccaggcgctccgctgctttcaggtgtgccgggcgcactgatcgcgctgctcgatgccgtcttggttgatggctatggcgtcggcgcgggcagaaaggatggtctggggtggacgaaggggttcggtggcgtgaacatgcgggcctaccagaactcgcaagtgtccggcaccggttactttctgagggtcgatgacactgccgcaagatcggcatttctgcgtggctactcgtccatgagcgacttgaacacgggtgaggacgcgacaccctcgccatcgctcaaggcgattgggtcaatgtgggagaagtccaacgtagcgagcggcgcattgcgccattggatagttatcggtacggagcggttcttctacctattcgttgacacaggcggaaactacggaacccaagggtacgcaggaacgcatggtcactacgctggtgacattacatcgatgaagcccggtgaccgacatcattttgttgtttcctacaagggcggcgacagcgagggaagcagtaacgtcgggtatggattcaaggcccggccgtggtctgatttcggaaatgcggattctcagacgtcggcctttattggacgctcgatgtctggacttccaggttcgattcggtcctttgtttctgctgcagccgctactgtaaacaccacgttggggaaccagtccaactacccaacctatccgtacattggaaatggcggtctgctctattcgaccgtggatatcctggaacaagtaatgcagccgcgtggcttcttgcctggcatctacgcacctatccaccgacggcctttcccagagctgacccttgtatccgacgtggatgggctgcctgtcggtactcagcttctggcgaagtgcgtcaccgctgacagtttcacgcccggcttcagtgaaacttacacgggccagattctcatcgacatcacgaacgcgtggggatga

SEQ ID NO: 518300 - DNA, 300 bp, Stenotrophomonas maltophilia
atggcaagacgtaccgagtcggccgaagagctgagggagcggatcctggccgccatgcgggccgacattggcatcagtgagcgaatggcgctgccgttcgttgagtcggtgatgcagtgcttcgccggcgagcagccgtacttccctgccgcagttcggatctatcccctggctgagattcgtcgttctttagaggctgggattcccgtgaaacaggtcatgcgggactttgacgtgtcgagatcaaagctgcacgagttgttccctggcgggctcccgagaaaggaaaaaaaggtgtag

SEQ ID NO: 518301 - DNA, 246 bp, Stenotrophomonas maltophilia
atgccagagatcatcacgttccctcagcgcatgcgctttcaggccatccgatccttcgacgtttgcaccggagcaggcggggttgttgcgatcctgtgggcgccgctgcactcccagcgcaagaacggcaatcatcgccaggaggaccaccatcaccccgctcttgcggatctgctgccgggtccggaacaggcggtagcgctggtggccgcgcacccagccatagcgagctatggagaggactag

SEQ ID NO: 518302 - DNA, 339 bp, Stenotrophomonas maltophilia
atgagcctgccccctcccttgcttgagctgccgaaccccacccgtcgcaagttgacgaccccgaggaaccggttcttctggtggtattcgggaagcctgctcttcctcggacctttcggattcgtcgtcgggccgttcatggcccgacgcgcaagccggaaggcggccctgcggtatccggtcgaggcgcgcgttgcccaagccagggataccgggttcgcttggtggcagtggtgggtgatgacgctactgactctgatgggcgggtttggggcctttgcactgctgagtgggctgccgatgttcctgctcgtgttgtatgcgcagttgactcagtag

SEQ ID NO: 518303 - DNA, 315 bp, Stenotrophomonas maltophilia
atgaaagcaacgaagcttgccctctccggcttggcgaccgcttttgcactagctgcctgcggcggtccgccctccaacgccgacgcccagaaggcggtggtcgcgctgctggagcaaagcggggccggccagatcgctgatgtctcggagttccagctcaacgggtgcgttgaagcaaaagaggtagccggataccgctgcgacacgagcggcaaggttgccatcgacattggcggacggcgggtgtcggttcccatcggcaagaacctgcgctacgtgaaagaggacggggcttggagggcctacgccaaatga

SEQ ID NO: 518304 - DNA, 756 bp, Stenotrophomonas maltophilia
atggccgccgccctggcgaccgcgctgttgctgagcggtcagagcgcatcggcccaggaagccagccggtccaccccgcaggcggaaaagcctggcttcttccgccaactcgggaccagcctgaagaacgctggccaggagatgattggggtgaagtccaccggactccccgggaagcaagcctccggcagccagcagatctacacgccggtcagcggcgcaggaaagctccccggcctcttcaaagcggataaccaccaactggcccagcaaggccgactggactggccccgagttgccctgacctacaccgagtggggcacgtccctgccgtgctggaccgtggaagcgaggatctggaacagcgccaccgcgtccacgaccgagaccttccgcgcctgcgcagatgcccctttgacgatgacggacgatctcggtgacacggcagagttcaacacggccgccctctggaagggtcgcgacgccctgatgggcattcgggtgcccgccggcaagccgaacactggtgcaaataggtctatcggccccaacccgcccagccagccgtttgtcgtcaacgtcagtcgccccggtgtgtctgaccgggccgtcgacgtggcccttcgggccgcttgggtttccgggttcatccagaccgtcgaccttcatccgggggccagcggcttactgacgccgttcaaagattccagggtctggatcgcggggttcaagccggaaggcagccgagacccgtaa

SEQ ID NO: 518305 - DNA, 1059 bp, Stenotrophomonas maltophilia
atgagcccccaaccctcccgcctttccttcctggaccggtatctcaccgtctggatctttgcagccatggccttgggtgttggcctgggagccgcgttcgaagagcttcccagcgcgctgaacaagctttcggtggggtcgaccaacatccccattgcggtgggcctgatcttgatgatgtatccaccgttggcgaaggttaaatacgaagagctgccgaaggtgtttgctgacaagcgggtgctgatgctctcgctacttcagaactgggtcgtgggtcctttcctcatgttcggtctggcggcgctgttcttacgcgactatcccgaatacatgacaggcctcatcctcattggcttggcgcgctgcatcgctatggtgctggtctggaatcagctcgcacgcggagacagtcagtatgtggcaggactggtcgccttcaactccatcttccagattgtcctcttcagcgcctatgcctggtttttcctgacttggttgccgccgatctttgggcttcaaggcagcgtcatcgatgtgagcttctggaccatcgcagaggccgtgctgatttatttaggcattccgttctttgcaggatttctcacaagtcgttggctaaaggcgaggaagggcttggattggtatgagaccaggttcttgcctgcgatcagccccatcacgctgggcgcgctcctgttcacgatcgcggccatgttcagcttgaaggggggagacgtcctgcgcattccaatggatgcggttcgcatcgccattccgctgactctctatttcctcatccagttcgcgttgagcttctggatggggaggttcattgccaaggactacccacgaacaacggccattgcgtttaccgcagcgggaaacaacttcgaactagccattgcggttgctatcgcagcatttggactcgcttccccggtagcgtttgccgcagtgatcgggccacttgtcgaggtcccagtgctggttctgcttgttcatgtcgctatccgatggggcagacgactgtttcctactgacgtgcggctgtcttaa

SEQ ID NO: 518306 - DNA, 315 bp, Stenotrophomonas maltophilia
atggaacataaaaacgcaaccgttgctctggctgcccttgggcatgccacccgcctctccatcttccgactgctggtccaggctggcgggaccgggaagcttgccggcgacattgcccaggcattggatttgcctggagccaccctttccttccacctgaaggaacttacggcggcgggcctcatcaacggcgaacagcgtgggcgcacgatctgctaccgagcagagttcgaaaccatgacggccctagtggcctacctaactgagaactgctgcgctgacgacctgtcgtgcgagcgcccaggcggctgctga

SEQ ID NO: 518307 - DNA, 741 bp, Stenotrophomonas maltophilia
gtgagccagattcccaacatccttcccgatgcgctagacatcccttcctcggtgaagctgggcgattctggtgctgcgccgcatcgccctcgaatcctgattctttatgggtcactgcgaccgcagtctttcagccgcaagctggcgttagaggcccagcgattgctggaagagctaggtgcagagacacgcttgttcgacccgcacgagcttccgatgttggactcggtcccggccacacatgcgaaggttcacgagttgcgtcaggcctcgctgtggtccgagggccacgtatggatcagcccagagcgtcatggcacgctcactgcggtgttcaaaaaccagatcgactggctaccccttgaggaggggagcgtccgaccaacccaaggacgaaccttggcggtcatgcaggtctgcggcggctcgcagtcattcaacgtggtcaacgcattgcgtgtgctggggcgctggatgcgcatggtcaccatccccaatcaatcctcggtcgcgaaggcttggcaggagttcgatgaaagcgggcgcatgaagccctcggcctactatgaccgggtggtggacgtgatggaggagcttgtgaaattcacgctgctggtgaggggccggagcgactacttggtagaccgctacagcgagcggaagggcgcattggaggctgaagcgcttaccgtggcagcgggagtgcttgaggtcgcggtggcgcgggaggaagtggcatga

SEQ ID NO: 518308 - DNA, 417 bp, Stenotrophomonas maltophilia
atgaacgccgtcatctatcacaaccccaaatgcgggacttcgcgaaacacgttggctctcatccgccacttaggcatcgatccggaggtcattgattacctgagcctaccgccgacgcgcgaacgtctcttggagctgatcaccgcagcgggattgaccgtccgagaagccattaggcagaaggggacgccctacgaggagctagggctgggtgaccttgccctcgacgatacggcgctgcttgatgcgatgctggagcatcccatcctcatcaatcgaccgttcgtgcagacagatctgggcactcgactgtgtcgtccttcagaggttgtcctacaaatccttccggccatgaaaaaacctttcgtgaaggaggatggggaggtaatcaacgggccgctgtctcaaagacagtag

SEQ ID NO: 518309 - DNA, 366 bp, Stenotrophomonas maltophilia
gtggcggatattgaaaagcaaaagctaaaactggcgaagctgatggaagccactgctaaggagcaagccaagttgctcgttgcagagaagcaacagaaggtgcggctggcgcgtcaggcagcaagggagaaggctaaagagcgtgccgcactgttccgctcggcggacgcccatcgaaaagttgttctcggcggactgaccatcgcagcgaacgcggacgcctgggacccagcagaaatcgtcggggccttgctgctcgtgagcgagaagatgggcgcgcatgcgacactgcgtcagcaacttcgtgagcgtggcatcaagcaccttgaagctcgtgcggccgcacgagaggcggcccgatcatga

SEQ ID NO: 518310 - DNA, 687 bp, Stenotrophomonas maltophilia
atgatctacgcgctccgccacgccctcggccgccagcatggtgttgacggacgtggcccagtgttcccgctctctgtcggccagggtgggttgcttggcccgcttgcaggcaatagggtccagcgccacggctttctttcccagactgccatccgggttaacactgcaagaactgagcaaaatgtgcgcgtgatgattgcgctcatctccgcctttgctcggttcgtggatggccacgtctgcggccacgccgtagcgctcggccaaatggcgggcaaagcgatgcgccagttcttgccgcttttcggcggaaagttcggcgggaagggcaacctccacctctcggcacgtgatggcgtctccgcgcttgtggtgggcctcgacccgattccagaactccgcccggtcggctgtctgttcgccaggaaggcagagcgccgaaaatgcgacgccttggcggcgcgtgtagtcgtggacggtcccggtcaaagcgtcttcaatccgaacccctgcacgataggcagcgccagcggtggacgaatgtcctccctgacgagagtaagccttagcagtgaggtgataaatcgccaaaccagtctccgaacgcagcccattggtgggcgagcagtggggctggcgtgcgtagcgcgccggggtgtcgggggcgaagcccctgaccgcacgtaa

SEQ ID NO: 518311 - DNA, 681 bp, Stenotrophomonas maltophilia
atgtcctggccggccgctggcgcgggtagtcatcagggcaagggggcggcggccattgagcgcgcgtcacgcatcaatacacccaacagacaggcggaactcatggccggagagcaagtagcgaagagtttggacgagatgatcgaacagatgttcagggtggcgcgccgagcgcttcagtccaccaacgccacgcccttggaacgctttgccgcgcgcacgctactacaacggcgtgacgacttggcgcagaagcgccaggcacatgtggaggccaaacaggcaagggaggacgctaggctggcgcggcgacgtgcagaggcagacgccaacgtgacaccacaatccacggacatccgctctaaggcccttcgtgccttgggaatgccgacctcccgtgacagcgtggcgcaggcggcgcaggagcaaaagcagctcgctaggctgcaagagcagcaggctcgcaaggtccgagaccagaccaaggatgccgagaaccaggccggattggccttggagctggcccaagcggactttttgaagcacttcccccagcagttccctcccgtcaagcccaccctcgacctttcgccatcatccgtgctcgaaccggtgcccgagtccccggctccatcccgccagacgggcacccgtttgataaagcggcgaggtctggcctga

SEQ ID NO: 518312 - DNA, 177 bp, Stenotrophomonas maltophilia
atggacagtgccacccgccgagccgccgccaaagcggcagacaaacttctgaacgccgctggttacgacacgcggggcaagcgcctgcgcaagaagatgaagaagaaacgcaaagcggcccacgtcgcctgtcaggggaaaaaggccggagaaatgcgtggcggcttagcgcgctga

SEQ ID NO: 518313 - DNA, 231 bp, Stenotrophomonas maltophilia
atggaagaatcacccaagtcccttaaagctgcgtcgctgaacgatattgagaacgctattgcgcaggcactcgctcagttcaccgctttctcgcctcatgttgaaatccgggcgttcgaagtcgtcaaagaaactggcatagatgtattgacgcgagaccactatcgatttgagctcaaggtctttgtcccgaaacgcgactcttcaaagggggtgctcgatttcgattga

SEQ ID NO: 518314 - DNA, 504 bp, Stenotrophomonas maltophilia
atggccttcgcgatggcgaagttccaactcaaattcggcctgaccgcgaagaccttcctcgcgatcttcaccgcctgcctgctggtgctggcagtgaacggtattgccagccgcgtggccttccagaccggcttcctggactacctcaacgaccagggcgacctgcgcatgcagcggctgatgccacacctgcagcgcgagtaccgcgagcacggtggctgggagcatctgcacggtgatggcgaccgctgggcgcggctgctgcgcccggacctggcccatgggcacgaaggaccggtgccgtcgctgtccgaccagaccggcgtgccgtcgcgcctgggcctgttcgacgcgcagcaccgtttcgtggccggcaaccccgacgccaccagcgatgacgagccgcatgcggtgcaggtggacgggcagaccgtcggttggctgggcatggtgccgttccagaccgtcatcgccaccaacgacctgaacttctacaacacctag

SEQ ID NO: 518315 - DNA, 138 bp, Stenotrophomonas maltophilia; identical to SEQ ID NO: 227476

SEQ ID NO: 518316 - DNA, 174 bp, Stenotrophomonas maltophilia
atgaaccaggctgccaccatcagcgccgccgttcctgcggacgtgaaagccgaagctgccgccgtcgcggcagcgcacggcatgagcctggccggcctggtgcgcgagctggtggcccgcgtggccgcccgcgaagctgaaacgctggcctggctcgatgaggcccgccgatga

SEQ ID NO: 518317 - DNA, 207 bp, Stenotrophomonas maltophilia; identical to SEQ ID NO: 204717

SEQ ID NO: 518318 - DNA, 339 bp, Stenotrophomonas maltophilia; identical to SEQ ID NO: 204716

SEQ ID NO: 518319 - DNA, 936 bp, Stenotrophomonas maltophilia
atgagccgcgctaaagcctggcggcgtgccgcccttgcaacctacatcgccgccggcgctgcattgaccctggcgggctacaccgtggcgaccacagccgcgaacgccaacaccctgcgcgacacgcgggagcgcatcgaggacttccagcgcgagcaaaccgccattgccgagaactcgataagcgcggccagtgtgcggcgcggcaccctgccccccgacacccggccgcctgtcgcgccggactggcccgccctggccgagcgcgccatgccatccgtggtggccctggcgggcatcgacaagccctatggcaccggccagaacaatcacgcctggcgtattcctggcgttcaacagaacgcggctacggccgccctcacccgcattcgcgcttggcatcgggattggccgaaagaggatgccaagcggcggcagcgcatcatctgcggcggcgtggccgtcgaaggaaacaaggtgctgaccgtggcccattgtgtcgaaggccaggaagcattgcgcgtgcgcaccgctgccggcgagtggcgcgaggcccgcgtgatcggcgcggacatttcccgcgacgtggcgctgatcgagatcgagggcgaccccctgcccccgattccggttgctggcgtcatgccccgccaggggcaggacgtgatggcgatcggttcgccaggcggctacggcttcgccgtgggcgtgggcatcgtggcgtggtatggccgcgatgccgcgatgctttcccccgatgatttcatgctggtgacggcttcaatcatcggcggcaactcgggcggcgttgtcgtgaacaccaggggcgaagccgtttcactggtgagctatggctatggcatctacacgcagaccgtgccgatagaccgcgcccaggcagttgcggccgcgatcgagcgccgcgtcgtgcggtaa

SEQ ID NO: 518320 - DNA, 219 bp, Stenotrophomonas maltophilia; identical to SEQ ID NO: 204714

SEQ ID NO: 518321 - DNA, 390 bp, Stenotrophomonas maltophilia; identical to SEQ ID NO: 204713

SEQ ID NO: 518322 - DNA, 3351 bp, Stenotrophomonas maltophilia
atggcgatctaccacttgaacacgcacacgataggacgggcggccgggcatagcgccgtggccgctgccgcctatcgttccgcgtcgtcgctggtagatgagcgcaccggagaagtgttcgatttcacccgcaaaggcggcgtgttgtcgtccgagatagtcacgcccgcaggcgtgccggttcccgagcgtgccgccttgtggaatgccgccgagaccgccgagaagcgaaaagatgcgcgagtggcccgagagtggcgggcggccctgccgcatgagctgaacgaagccgaccgtaaagagctggcaacgcgcatggggcaggctatcgcagaccgctacggcgtggccgtggatgtgtgcattcacgcaccagacaaggagggcgacgaccggaattttcacgttcatatgctggcgaccacgcgcaccattcaggccgatggaacgctaggcgcgaaggccgtcattgagctggcgaacaaagacaggcagaaagcgggcattcctggcacaagccagggcgacatcatcgagattcgccagcagtgggccgagctaacaaacgaggcgctagagcgggccggaatcagcgcccgcgtagatcatcgcagctatgcagatcagggcgtagaactcacaccaaccaagcacatcggcagcgatgccgtggcgatggacaggcgcggcctggaggccgaccgcatcgacattcacaacgccgaccggcaggagcaggcgcggcagattgtcgagcggccggagatcatcctagacaagctcacggccacgcaagcggtattcacgcgccgcgatattgccgcagagctgaaccgctacattgacgatgccgaccagttccagggcttgcttgccaggctggaaaaatcgccgcttctggtcgagatggaaccggccaacgggcgcgacccggcgaagttctctacccgcgaaatgatcgacaccgagcgcggcatggtggacagtgccgagcgcctggcgagaaccggcaggcatggcgtttccggccccatcacgaacgcggcgattgacggcgcaggcaccctatcggcagagcagcaaaacgccgtccggcacgttctcaagccgggcagcctggccgtggtcatcggcgacgccggcacaggcaaatcgttctcgatgaaggttgcacgcgaggcatggcaagcgcagggcttcaacgtgcgcggcgcggccctggcgggcaaggcggccgacgaattgcaggcgggtagcggcatcgacagccgcacgctggcatcccttgaatttgcctggaagaacggaaaagacaaactcacttcccgcgatgttctggtgatcgacgaagcgggcatgatcggcagccgccagcttggccgcgtgctgaaagccgccgagcaggccggggcaaaagtcgtcctgctgggcgacgacaagcagcttgccgccatagaggcgggcgcggctttccggggcgtggtgcagcatgtcggcgcggcagaaatcaccgaggttcgacgccagaaagaggcatgggcgcgtgccgccggccaggagcttgcgcgcggttccgttgccgatggcttggcggcctatgccgagcgcggccacgtcaaaatccacgacagccgggacgccgcccgcgacagcctggcggccgcttatgtcggcgaccagggcaagggtagccagatcatccttgcgcacagcaataaggacgtgcaggcgctcaatgaagccgtgcgcgaggcccgcaaggaacgcggagagctgcgcggcacggcccgctttatgaccgagcgtggcggccgggaatttgccccaggcgaccgcatcgtgttcctgaaaaacgaccgcgaccttggcgttaagaacggcactcttggcaccgtcgagcgtgccgaagatggaagcctggccgtgcgcctggacagcggcgaagcccgccggttccaggccgcgcaatatgccgccgtcgatcatggttatgccgtcacgattcacaaagcccagggcgttaccgtcgatagggcttacctgctggcgacccctggcatggataggagccttgcctatgtcggcatgacccggcaccgcgaggcggcgaccctgtttgcaggagccgacgacttcacagaccgccgcgccggccgcctggtcgatcatggcgcagcgccctacgagaacaagccggagaaccgggccagctactttgccactctggaaaacgacaacggcgaacggcacaccatttggggcgtcgatcttgaacgcgccattgcggccagcggcgcgaagcgaggcgaccgtatcggcctggaacatggcggctctgaaaccgtgcgcctgccagacggcaccacggccgagcgcaacacctggcacgttcgcggcgcggccgagctggccgccggcaagctggcccaggtgctaggccgcgagcgtccgaaggaaagcactttggactttgccgaccggcgcggctttgacggtgaaagcgtggtgcgccgctggctggaacgtgggcgggcgaaggtggccgagctggccgggaagatgcgcgacggcctgcgccgcaacctggaacgccacggccgccccgacctcatgcccgcgaccgacattgctggcacgccaaccgtgcagcggccgcagcagaacgagcgcacgccagaggacgagaagaagcgccgggcggccgagatcgcggcgaagttccggcagcaggtcagcgaggaacgcggcgagcaggcagcgccgcagcagcggccccaggccgagcgcccggcacccgacccgctggccggattccgcgccggtgtcgagcgtgccgaggcggcaggcggcggcctggccctggacgtggcgaaggcacagcttgccgtcgcccaggagttccacgcggccgggaaagacccccggcaccattcggcggccatcatgcaggaaggccagcagcgggcctttgcgggcctggcgcagccgtcccaggccaaggccgagccggagcgcctggcggccgtccaggtcagcgaacaagaccgcaagcgggcagagatgaatgcacgccaagaagtcagccggttcaagacgctggcagcaggccgccgcaacggcattgccggttacaccgaccgcagcccgtcgaagtggcaggcattgccgggcgagctgcgcgagcgcatcgagcggttcaatgccatgccgaaagagcgtcaggccgtcgagctggacaagatgcagcgcgagcttgccgacaggtatgcacgcaatccgcaggaaatcacgcgcagccgacagcagcagcgtgaacaggagcgcggccgcgatggcgggtgcgggtattga

SEQ ID NO: 518323 - DNA, 252 bp, Stenotrophomonas maltophilia; identical to SEQ ID NO: 204711

SEQ ID NO: 518324 - DNA, 222 bp, Stenotrophomonas maltophilia; identical to SEQ ID NO: 204710

SEQ ID NO: 518325 - DNA, 2526 bp, Stenotrophomonas maltophilia; identical to SEQ ID NO: 204709

SEQ ID NO: 518326 - DNA, 393 bp, Stenotrophomonas maltophilia
atggcgttcatcatcgcggcggttctcggtgtcatcgccctggcgtggttcctgcggcggctgttccctgccctgtttgcggcggtgttcgtcctgttcgcgccggtatggctggtcggcggtgcgctgctcgatctgctgcgccggccgctggccttcctgcggccggtcggcctcgccctggcccgcctggtcggcttcgtcctggtgctgccgctgctgcccttcatcttcgcctggtcgttcttcgcggaactgtggcgacagttctggccaaaggccagcccggccccggccggggtcaagccgcccacgccgatgcaggccgccacaaggcgcacggcggacgtgatcgacctggcggcattccgccagcggcaggaaaaagaataa

SEQ ID NO: 518327 - DNA, 891 bp, Stenotrophomonas maltophilia; identical to SEQ ID NO: 204707

SEQ ID NO: 518328 - DNA, 1014 bp, Stenotrophomonas maltophilia; identical to SEQ ID NO: 204727

SEQ ID NO: 518329 - DNA, 222 bp, Stenotrophomonas maltophilia; identical to SEQ ID NO: 204726

SEQ ID NO: 518330 - DNA, 633 bp, Stenotrophomonas maltophilia
atgaaagtcattgccgtgctgaaccagaagggcgggagtggaaaaaccaccatcgccacccaccttgcccgcgccttgcaactggacggcgccgacgtgctgctagtcgattccgacccccagggcagcgcccgcgattggtcagccgtgcgggaagatcagccgctaaccgttgtcggcatcgaccggccgaccattgaccgggacgtgaagaacgtagcccgcaaggtggattttgtcgtgatcgacggcgcaccccaagcggccgacctggccgtgtcggccatcaaggcggccgacttcgtgctgattccggtgcagccatcgccttacgacatttgggccacggccgacctggtggagctggtcaagcagcgcatcgaggtcacggacggaaaactacaggccgcctttgttgtatcgcgtgccatcaagggcacccgcattggcggagaagttgccgaggcgttggccggctacgagctgcccattctggatgcccgcatcacgcagcgcgtgagctatcccggcacggccgccgccggcacgaccgttcttgaatccgagccggacggcgatgcagcggccgaggttcgcgccctggccgccgaaatcaagcaaaaactcatttga

SEQ ID NO: 518331 - DNA, 852 bp, Stenotrophomonas maltophilia; identical to SEQ ID NO: 204725

SEQ ID NO: 518332 - DNA, 567 bp, Stenotrophomonas maltophilia; identical to SEQ ID NO: 329820

SEQ ID NO: 518333 - DNA, 252 bp, Stenotrophomonas maltophilia; identical to SEQ ID NO: 149248

SEQ ID NO: 518334 - DNA, 396 bp, Stenotrophomonas maltophilia; identical to SEQ ID NO: 149247

SEQ ID NO: 518335 - DNA, 537 bp, Stenotrophomonas maltophilia; identical to SEQ ID NO: 149246

SEQ ID NO: 518336 - DNA, 663 bp, Stenotrophomonas maltophilia; identical to SEQ ID NO: 518291

SEQ ID NO: 518337 - DNA, 798 bp, Stenotrophomonas maltophilia; identical to SEQ ID NO: 352009

SEQ ID NO: 518338 - DNA, 534 bp, Stenotrophomonas maltophilia; identical to SEQ ID NO: 25686

SEQ ID NO: 518339 - DNA, 651 bp, Stenotrophomonas maltophilia
gtgtgccacaacggttgcgcctatgagggttccgtctatgcgggctctccagtgggccttctattccaaccaacaggtggcacgtgcacgacgaacgatcatcctgctcccaccacgcctgatccgggcgagggcggtggtgacggcggtggcaccggtccgggcgacggtggtggcgatggtggcgggacggatccgggtggcggcgacggtggcggcggtaccggccccggcggtggtgatggcgggggcggcacagggcctggtgatggcgatggtggcggtaccgatccgggtggcggcaccggacctggccccggaccgggcacgggagagggcggcgacggcggcggggcagggcccacgacggggcggttgtacaagaagtcgggcaagaccgtcgccaaggttcttgctgagttcaaggccggcattgagggcgccccgatcctgtccaaggtcaagggcttctttggtacctgcacgggtggcggatcgtgcccgacggcgacctgggacggcggccagtatgccggcaagttcgacctggccagcctgtgcagcgggccgctgttgcagctgttccagtacgccggtttcgtcttcctggccggcatgggtgttgtcgccttgaggtgggcattgctatga

SEQ ID NO: 518340 - DNA, 750 bp, Stenotrophomonas maltophilia
atgactctctcccgcccgcgttgcgccctgtttctcgccttgatcggcgttgccggcgctgcaagtgctgctgcgaccaccaaggtttcgttgatgactgcatccgagcaggcatcgctgattgagacgcggcactcgactggcaagggtgtggcggtttcgtcgttcaccaccgaatacttcggcaacggcgagatcggcatggcctgggaggacaagcgcgtgctgctgctgtgcaagaaggcggcgtacctcaatctgcccggcatgaagcccgaggccagcacgctgtcgatcgagcagcggcagatggtggcctacgaggcgatgatggctggcttcggcggcatcgccgcgctgggtgcggtcaccggcgagtcggtcgaggttgccgatgacggcagcgagttgcgtcgccccggcgaatcgacgtgggcctacggcgtggagcgctacgaggtggccacccaacgcatgccggacggcgccctgcgcgtgcgcgtgctcaagcaggcgacggtcaacaacgcaaagccgtcctcgccggacgataccttcagcaccgaagaagaccaggccgcgcgcctggccgaactggcgcccaacgacagctggaccgaagtggtgatccatggcggtccgcgcaagccgcgcaccgacccggcaatgtccctgaagggctgggtatcgaccgtcgagcagcaggcggcgaccgtgggtgatgcccgccgtctgcacgactgcaagtaa

SEQ ID NO: 518341 - DNA, 468 bp, Stenotrophomonas maltophilia
atgaatgtgatacgcagggatcacccctccaaggacgttacgacacgcggccacgcgcaactcaccggcaagggcgttttctggggaaatttcagatttggggttgaatttgacgaaaggcgaccaaccattgtcgaactgtctggcctgcaattcccacaagtcctactgtcaagcattgcgatcacgatagcggacagcgacgtcatccttaagcgccgtctcgcggtggtcgctgccgatttctacatcgtggatagagacctcaactccttctggagggcgctctcgacacagcagcgcctgcgcatgcggaggtcgcagcgcgagtggattgtcgagaaggtgagaacctgcagcgatgttgatggaaaaggttacgagtccctgacagtcgttgagaaaattgacgttctcaattgccatcgcagaatgacagaggaacggctgacactcctttacaactag

SEQ ID NO: 518342 - DNA, 753 bp, Stenotrophomonas maltophilia
atggctgccaaccttcggcagaaggacttgctcgtcgtcggcttctggtcggactgggaatacctcaatgtcgtgatcggcgaagcgctgatcgacgtgcagccgctgtccgtgaccgtcatcgacctctcgcccactaacgccctagagcagaaggccccgcaactctgggagatcgcgcacgcacaaaacgtgacattcgaacatgtgcaagagtcaggagcttcggcacttgacgagcttcgtcgagccttctcatcgaactaccttcgtcaggtgctcgacgccggacgagccaccttcgagcaagctaccggagctgactgtgaccctgcttggctagacgtcggaaatttcgacagcgaggccctttatagtctgaggcgggatgcagaaggcgtctcggcggcggagcctcccaagctcctgcgtccagcaaatccagaagccctcggcttcttccacttgctgctccgtcaggctggcgcggttcaaagcgccaatggttatgatctaaacggccggagcatccgagtcctgaacggggcgcaatctatcctcgggacgctacgagggaagttcgtcgaaccgcctgccgcgatgcagtccgacattgtcgtcgcggtaggcgcgaccaacttgggcgtgccggacaatgtcgtgcgcagcggacgcaccggtgacgtcattcgtccggaccccgcgggcgaatggtacgaccttcctggggcaatagctgcgttgggcatctga

SEQ ID NO: 518343 - DNA, 531 bp, Stenotrophomonas maltophilia
atggacatcttcacccaagccgaaatcctccttcgcgatgcacagtatgaaacctggacgtggacgggctcggccggcccggtgatctgtttcgagaacgtggcgttgatgggattcgtccacgtcttcgatagtgcagatgctcttctcggcgcctggaaggagaaccagcaggtcgcgcttgcgcggcatgccacttcgttacgcggtgcgggagcgaaagcatggaacgtgtattcgatctttttgaccccggatcaagatgcgcgccgagggcgcgagatcgaacgcatcgaagaggatttctctttgacccggaaaatcgcgagggcctccatcaccacgcctgaagacgttgagaaggcactgctaccgctgttgtcgatacgctccaagccactgctcggcgcgtcaaacttcgaaacgagactgcgcaccaggctgaaggacatctctccggacgccgttaccgcttttctaagcgagaccgcgccggctgagatcgctcgcatcttgggagcgacatcatga

SEQ ID NO: 518344 - DNA, 2049 bp, Stenotrophomonas maltophilia
atgaggctcgatttcatcgaagtatgcggctttcgtggcttcagggatctcgtccggatcaatttcggacggggcttcaccgtcatcaccggtcgcaacggcgtgggcaagagcacgctgtgcgatgcggtcgagtttgcgatcacaggctccatcgacaagtacaccttcgagaaggcggcgaaggagagcctcagcgactacctttggtggcgcggtgaaggcgttcccaacgcccactacgtgacagcctctttcgtcgatgacagcggaaagccattcgccatcacacggacgcgggagcgcggatccgatcgctcaccgcaggaaatccaagccgcgctttgccgcggacctgcgccagacgacgcacttcggcaactcacacggacgtcgatcatccgcgacgaatggatcgctgcgctcagcctggatctcacggagacggagcggttcgatctcgtgcgctcggcactcggtgcactggaaggctcggaagccggtagcagagccaaggaggtcgtcactgccgctgaagctgcgcgctctaaagaggaggctgcttatgaggccgctcgttcgcgactggctgacaggctgacgcagcagtctgaaacccacgccgcgctcagccgatcaggcgacatgtccagcgcgcttcaggtgatcgctgccgcggtaccggatgcacccaccgaactgacggcgcgactggctactggtcgaaacgcattggcaaccggacgagccagactcggtcggatgggcgaagcgcttcaacttggtagagaagtcgcggcggtgcaggcgatctacaacgctccggaggcggtggcgaaccgcgaggccgcatcggtagcgcatgaagtggcgcagcgcgagcatgacgatgcacagcaagtcgtctcggaagctgaacagcgtctcctgcgggaagaagagatggacgcgatggcggcgtcgctgagcctcctcgtcgaacacggcgagcgcgttgggctgcattacgatcattgcccgctatgcggagcccatcggacatcagacgagttcgctgccggcctggctgcggcgcgacgacggattacgtcactggcgtcgggcgttcaggtcgctcgcgatgctcttgcttccgcgaaggagaaggagcggcaactcagcctcacgttacagatagccaccgccgccgttcaagctcatgagggcgagctgcggcgtctacgggaccaggaagatgcgcacgtggagttctacaatcagtgggggctcgattaccgcttcatccaagatcctgacgggctggagcaggccatttctcaggaacgggactggctgatcgacctcgagcgtgccctactcgtgttagaggcctcgcaagcggtctcgcgaatgtcgtcgatcgaaagcaacatcttggcgctgcgagctgaaatcgagaagctggcgcaggcagtcagccagtcgcaagatgccctcacagcggcccgtgagatcgaacgctctatcagacgcgtgagtgcggaaatcatcgacgagcgccttgctcagatcagtcctctgctcaacgagctctatcagcgtctgcgaccgcacgccgactggcgcacaatcgactacagcatccgcggtgacgtccgacgtttcctaagcctcaaggtaggcgacgggctgaatccgcaattcgtctttagcagcggtcagcgtcgcgcggccggtctcgccttccttctttcggtccatcttgcgcgggcgtggacgccgctcaggtcccttctactcgatgatcctgttcagcacatcgatgatttcagggcccttcacctggtcgaagtgctcgccgctctgcgcttggatgggcgccagataatctgcgccgtcgaagaccccgcgcttgccgatctgctgtgccggcgcttagtgagcacttcgacggagggaggccggcgtctagacatcgaccttggaccgctcggcgccacaagtgtggtcgccgaccaggaaatcaatccgatgccggccagtgttttacgtggtattgctaccgcatga

SEQ ID NO: 518345 - DNA, 2319 bp, Stenotrophomonas maltophilia
atgacggctgagagcgcgcaaatcgagcttccggtgccacgcgcacgccgagcgcatggaccctggagcgatctggcgctccacaccatcggctggcgcgcgtttcaggatctttgttcgcaagtgtgcgaggtcgtactcggccgacccgtagagatcttccgtgaagcacaggacggcggccaggacgcggtcttcctcatcccctcgggaatggacgccccccccatcggcacggttcagtgcaaacatacgtccgatgccatgagggccctgaagctcagcgatctcaccgccgagcttgagaatatccaggaactggttaaagccggtcaggcggacacctacgccttcatgacgaacatgagcgtagatgcgcctatcgcggcggcgatgcgcgccaggcttcggtcgctcggcgtgcgcaggccgcacattcttggtcgccagtatattgtccgggtcatcagaaccagtgcccggctgcgggccctcgtcccacaggtctacggtttgggagacctcacatcgatcgttgatgagcgcctgagcgagcagagtcgggcgctccttgacagttggatcccaaagctccgcacctatgtgcccacaaaagcgcatcgggacgccgtcaacgccatttccagccacggcgtcgtgctgttgctgggcaatccatcaagcggcaaatcagccatcggtgcgatcgtgtcgacgattgcttcggaaaatccggactgcaccgttctcgccttgaccagtccacgcgatttcgaggcgggatggaatccgaacgatccggggcgcttcttctggatcgatgacgcattcggctcgaatgtgctgcgcgacgactttgtgcaggactgggcgtcggccttttcgaagctgagggccgcgatcaaacacggtaaccgcttcctcctgacctcccgcaaacatatctatgaagcggcgcgacgtcggctcggacagcgcaaccttgcccagtttgctgatggcagcgccgtagtcgatgtgggcgagctgacctttcaggagaaggcgcagattctctataatcatgtaaatttcggccagcagagccagagctggcgttcgagcgtcaagccacacctaacagcagtcgccgccgttcgcgactttcttcctgggattgccgaacgccttggtgacccgaacttcacgaagggactctcacctcgcgaaagctctctcgttcgcttcatggaagaaccgacggagcatttaattgacacggtcaacgctctagatgatcagcttcaagcagcgctcatattggtttatgtccatcaagctggcttcgaccccagcgaccacgatgtgtccgctgcccaggcggtcgcggagctgacggcgtacagcctcacaaagatccaagattgtttcgctgagctgaaaggctcgttcctgaaggtctccggatcaaaatggaccttcgctcatccgacgatatccgacgcactgacggagatcctgcgtcagaagccgcatatgatggcggcgctcatacgtggcgcgacgatcgacaccattctcagcagcttcacgtgtgaaggctcgcccctcattcgagacgcgcttgtcatcccgactacgctggatgacgctctggtcgtccggcttggccgcacccccgatgaatggcaccgcaattggatgcttttccacttcctgtcctatcgagcaagcggacccgtgttcgccaaggttatccagcaatttccaaatctacttcgacgatcctgctggcgaaccgacatcgtcggcaacgatccccagatcgcggcccacgcccgagcccatcacctcggcgtcttgccggacgatctgcgctcggaggcagccgacactcttgaatccgctatacttacgaagctagatgcttccgtctttgacgaaccagagatgctggcgctcataccgccgctgaaactggtcggcatagggttggcactgcgaaccactctgttgccttcgctggaagagcggatcgacgagatcgtcgccgaggctgagttggacgaggagcctgacagccacttcaagaagcttcttggtgtactcgatcgcattgaggcgatcggtgtcgacgcggacgccatggttctgatcgacgacgcgcgcgatcaggtgaagcggtcggtcaaggaactggaggggcgcaagcgcgagtgggaggaaggctcagaagaagaagcggattggacgcacatcgtgacgcagaaggaggaggaagctccagctcccactccggtcaccacgaagcgctcggtgttcgacgatgtcgacaaatag

SEQ ID NO: 518346 - DNA, 4050 bp, Stenotrophomonas maltophilia
atgtcgacaaatagtcacgaagacgctcagcgactgagctccagccggtcgggcctacccttgaccaatgacgcggacgaaaagcgtgcgctacgaggcgccgccgccgctcaagcgggtttcgactatcagctcgatgtctcaatactcgcggcactgcaacttctcctcatttctaaggcggctacgcgcctggtactcgagccagcgagcgaggaggatcttgaggcggatctcgagacccacgtgccaggacgcctgcaacccagtgcaaccttcgcgggcgggtacaagcttgtcgtccaagtcaaaatggacaacggtgagccctggtcggtcgaggatttcgaagccctgctcaagcatggctctgaggaaaaaggtgggcgccgaaaagcccttcatcatctcgacgagccgaacacacgctatctgctcgtcaccaatgccgacgtgaaaggcgtcgcccgcggactgctggtcgaaggcttcgaagacgtctcggacaaggcaagcttcccctcgcgcctgcatgccacattgaaggcgtcgcccgaaggtcgagtcgctatctggggcaagctcaccgagaggcagctcgcgtccgacatccgatcgctaatgtcggacctgttgcatgttccgaaggttgagcagcagaagctcctcgaaaaattgcgtctcgaagctaggcggcgtacccgaggtactgcgcccggtctatggacgggcgacgaccttctcgcaacggtgcgagcacatggcgggttcctcgcgagctctgccagcctggaacatttcgtgcccccggcgaactttgacgagatgcgcaaagtcctgagcgagaagaacgcagttgtcatccgagggccctcgggcacagggaagacgcaggcggcgctcaagctctgcgatatcgcgcgacggggtgatggtgcgctggagatcgtcactgttggcgcggacgatgcaccgaccagcgtgcgtaagatcgtcaacaacggacctacacttttctatgtggatgatccatggggccaattcagcctccgtggtggcagcgaagcttggaccgagcagttgccacgtcttcttgccaaggctacgccggatcatcagttcgtcatcacgtcccgcagcgacatgatgcatagcgccaaggtcggcgacagcctgaacgcatggtcggtcgagctggatgcgggccagtaccgggaaggtcaacttcgcgacattcatgacaaccgcatggaccagctgccggccgcgctgcaggccaaggcatatgcctttcgcaatgaggtgctcgacaggcttggcactccacttgagatcgaactgtactttgcgcatatgcaagccggccccgatgtcggagaagaaggccatgccttctttcgccggctactcgagttggcgcagcgcgacgccgtggaaggtgttgtattcagagcgctatcgtcgatcgacacatgcggcaattcagccatcgtttgggcgctgctgacggcacgcggccagctcgaccgaagtcgaatcccccctcttcgacgcgcactacgcgagcttgatcacgcactcggggacggtctagatcgtcttatagaccgtatggtcgcatctcgccatctgcgtcagccggcccgcaccattgcctttgctcaccccagcgtccgacagggttttgaagccttcgtcaaggacaactggggccgaagcgagtctgcaatcgagactctgatcgctgcgcttgttcagctgccgccgccgcacctcggttggggcttggaaaccgccgctcgagtatttgaagtgacgcactcgttcgctcgccgaggcgacgttgatcagcccttcgagattgcccccagcagccgggaggcgatcgatgcctggctggacgaaagcctcatggatcccgcttccaagttcgcgcccttgttggaactggcgtcggaagtaggcagcgatgcgtccataccgagccgagtggctcgatggttgttgaaaggcacgcaacggggaggttccttcttcgtccgtaactggcaaccgccggtcttcgacgatgcctggtacgacaccgtgtcagcgagcccgttcgcgggcaaagtcgcagagcgatttatccgtgagcagcttggctttgaccgagggaactacggatcaggattcgccaagcggctcgatcgcttcgcgcccaacctcactccggcctaccacgaagccgcacgccagatggtcggcaacggcttcgagctcaatgccgacgccgtcgcggccggcgccgtgcgcgacctagaaggatttgagagtgtcgttcaggctgcgctggatgacctcgcgggcatccaccgtcagcatgttcagagcggccaggaggagtggcgcgcgatcgaggatggcgaacgggatcatgcagttgaagaggccgtgcaatcgagccatgaaggcgacggatacacatccggcgtcttcatcgatgcttatgtccgccaacttcgcgcagagggtcgctggctggtccttgccaatcatccgcgcgtcgctgagttggtccgggcctggtcgcaagcgctattgaagtcccccagcccagtggatgaagacgagctccgggctatcgtcgcagcaagcagagatgtcgatgatgagcaagatgtttgggcggcagtgcgggagcattggtgtgcagcactggagcctgcgcttttcgcgcgcatcacatctgttccctctgcggtggatctgcgtgacgagcttgcgcttacggcattgaaagccgcgccaaatgcgctgattacagcattccaggcaaactgcgagcaggttggtcggcaagtcgcactgctcgcctccatgcagagatctcgccagcggcttgggaagaacagtcacgctaagctaaggcccgtcgttgacacgcttccagatgaactcaaggaaattttcaacgccttctccagaaagaggcggaaagctcgggcagtcaatggttcagcgctcgcgctcctagcaagctgtgcatcgcaactcgatgcggaggcacttgatctggtggtgccggtcatcgtcgaaagcagaggcgacgcctcaccggcgatcgcccagtggctgacaatcgccagccgccaggagcatgccgtgagtgcgacgaaggcggcgatcgcagttggtaattccaccctcgttcaagcagcactacggcatcagcgcgccgatgcccgccgcacggcgctacttcatgtagcaccgacataccctgatccgttgccaccgacaatcctctcaatggcatctgatcccagtagccgagttcgccgagctttagccgatctactcgcagaacggccgcacccggatcacctaaaggcgctgttgactctagtacatgacacttggtcgagcgctgaagcatattgcgacgagcccgcaagctttgatatcgcaagggctgccgtcattgccctggccgatagcgatctcttatccgatgcaatcggtgattcgcttgtcgatcttgccaataccacggacgaccgaacgcttagccagtacgccctgatcgtcgcagcgaattgctgcagtgccggagttcagcaaagaatctggaatctcgttaagataccggaagcgcgctggattcggctcgacgcccttgatgccctagcaggcgcggatttcatagacccgaacattgtcgcgtgcctgactcccgcgttcttgctatgttcgccagccatcgttgcggcatcggcggcgcatactgtcggcgctcatgctccggcgagaaatgccctgaaactctttgagagcgtcgccagctcgaacaggcgacgcgctctgctgctcgtcggagccaacgcaatggccaggcgtgaccgcatcactgctgatcggatccttgatttgctggagccgggtcaccctggacgtcaattattgaaggggaccgaacctcttcctgcctccatcctggacgatcttggcgatgttcggatgcgagaagccgtgcgaaagcgactatatgatcgtattgaagtctcttga

SEQ ID NO: 518347 - DNA, 249 bp, Stenotrophomonas maltophilia
atgtcaaaccctgaacatctgttgaccttcgagatgaacaaggaaggcgatgaactgaccgtgcacatgaatcagcagggcctggctctcctgcagttggtgcttgcgcgactccagaacggttcgtcgccgatgcctcggcatacccacctaatgacggacgactggggaggggatgagttgtccagtcaaccgcaatccacggatagcacgctttttaacaaagtagacttgcggctttggagttag

SEQ ID NO: 518348 - DNA, 3861 bp, Stenotrophomonas maltophilia
atgggtagcacgtaccagttcgaaagatcatacggcaagatcgtcaacaaaagactggatggtgcgacgcttgagcaggatgcagacgacagacgctttacatttagaagccgcgaaggagtcattgcatactttgatttcgttacgaacatgacctgcgggtacatcagcgcaggaggggttacatctgcctcgatggcgtcctgtgtgcagctgcgctatctggaaatgcccaacggcgagtctttgtcttatcgctacaccactcgcccaagcgcgaactaccaggaattcccggtggcgcttgtgtctgaagttgtcaatagcaggggctatggcattcgcttctcctatgaagatcttcacgaccctcaagttgtaacgtcggcgtctgccttcaggtcaagctgtgttgagcacgacacggtcctttgcgcaacgggtgaccttgcaaccgtaagctacatctatgatcgttggagtctaaatggattgcccccctatagcgggcgacttcgaaaagtcgttgatgccaatggttctgtaatcagttatgggtatggcatcaacagcaggaacgtcgctaccgagcggcgcgccggcgccagcaccgacgcattcaccaacgtatttgacaacttcggcaaggttctttcccaagcggacggggcaggaaaggttacccgattcgagtacagcgagaggataaataagaacgcgttcgatacaaaggttacagatcccgtcggcaacgtcacgcgctacttcttcatgcgcgagaatccgtacccggtagccatcgaagatggcaatggggcgcgcaccgagtacacctatgactacaggggctatcgactcacctcgatcaagaaccctgagggtgacagcatcgagaacaagcttgatgatcgtggcaacatcctcgagcgtcggcgtaaggcaaagccatcctcgggcctcccagacattgtcgaaacagcactttaccctgcatgcagctcaagcaatttccgattctgcaataggcctgtatctgccaagaactcgcgcggaggagtgcaggtgacgcgtcacgacgcggaacacggcggcgcggcaattcgatttgacgccatccgggtagatggaaggcgcgcagcgaccaggacaaggtatgcgtcattctcgccggcggaaggctcgtccgcgccatcattggcgggtgctgcagacattccgcagcgagatgtgattcttcccgtcggccaagacgcatgcctagcgaggagccccccgggacagttcgaattcatctgtgccgacgataagctgattcgggtggactacaactacatgccttcgacggcgggctcccgaagcagccacgagttgaaggaggtagtacgcgatccgagtggtgccgcggagacgacgcggtactactatgatcgtgtgggaaacatcactgccgtggaaggggcacgcgccgggggcctgacggtacaggtgcctgatcgcatgcgccgtattgtgtcgtcaacgggtccctcagtcggagaagtctcgcagcgcactcagtcgacttacgattcagaagggcgcaagactgcgagctcgtacagcttccaaggcggctggttgagtgagacgacagaatacgacgcgcgggggctgcaggtacaaagcactggaattgatgcggcatccacgcgatttgactacgacgatgcgggtcgaaacatcggaacacgaaagcgagtagatggcatcgaacgaaggtccaggatgacgttggatggcgtcggccgagtgctttccgtcaacaatggcgtgggcacaccactggagcagaagaccctggagctccagtactcgcccaatggccagccgatccttcatgtcgatgcggaaggaaactacacggcactatgctatgacgggtttgaccgactgaaggagcgtcgataccttggaaagcactacgcctctgcacgatcctgtaccgtcgaggtggagggcttccctcgggagacctacgcgtacaacgaaaagggcgacctctccagcatcaccctgcgcgatggcaagaagatcggctacacattcgatgctgatggtaggttgctgagaaaggatgttccggaatctgatcgaagtgttacgtacacctacgacctgcaggggaggcggctttccgctgaattgcccggtgcaaacagcgcgctctcgatctactggacatatgacaagctcgggcgcctgagcagcagcacagggccatttggtcgctctgtcggctacagctacggcccgggccagagctggtccgaactgcgctggcccgatggctcgggggtgcgctacaacttcgatcagcttggccgggtcagcggcatcgatgaagctactggtgccagtttggccagtttcacctacgacgagatctcacgccgtaccggctccacatttaaggggaacggaacgcggacggagtacgaatacagggccgaccagcgaatctccctcctcatgcatgatctcatgggtgaagatcaggatatcggctttggctatgcgttcaatgaggatggacagctcagaagccgggccgtgacacagccacggttcgcgatggcgccgatcgaaaggggtaaggttgagtggtatgccggttggctgaatcagtacggttcatggaaggacgagagcgccagctggcacaacatggagcacgatgctgccggaaatctacaagcagatggtagcgcagatcccagccgttcatttacctacgatgcggagggaaggcttgtggcagccggtgactcgcgcctcgactacgacgcaattggtcgtctcgcgcgtgttacgaggggaggggtgtcgcggcaattcctgtacagcgactgggagttgattggggagttcgacgagtccaatggcacaatgttgcagaagatcgtgtttgggccaaagggtgacgagcccatcgtgctttatgaaggcggacggcgctcatggctatatgccgacgagcgcggttccatcgtcgcccgcgcgggtgaagatggtcgacttcaagcgactgcaagatacgatccttggggacagcaggtcggagaggggatagggcgactggggtacacggggcagctgtggctccctgagatcggcctacttcatcttcgctcacgaatgtacgcgccggcactgggacggttcattcaacccgaccaggtcggcaccgctggcgggatgaatctctacgcctatgccaacaacgatcccatcaatctgttcgatccacttgggttcagcggacagccctcgcttacaacgttccctggcatggtggtcaagccaccgccaaccttgccggcacagaacgggggactcgatttcggaggaatcaacaacagcctcattgacaaagtccagttcgcgctggacatcggcggactggttcccgtgtatggggagcctctggatctggtcaatgcgggcatctacctgggccgtggccagtacacgaatgcagtcttgtctgcgatcgcagtggtgccggtcattggaagtggcgcgacggtcgtaaagtttggcaaaaagtcactgggcaaccccttcaagggaaagacacccgcgcagatcgacgcgatgttcagggctaaggggttcagtgcacgtggcccagaccccgtgggagggaaaggcgggtatgtcaacccatctactgggcgctcatatcacatcgaccccgaagtgcaggttttcagggcaggaacggaaatgccacatgtggatgtcaaccgagcgaagggctatgacggtatgcttgagaagaagaaatacccgctaggagacgaacttcatgtcaaaccctga

SEQ ID NO: 518349 - DNA, 996 bp, Stenotrophomonas maltophilia
atggatgagaagacgctcaaggcgactgtggctcgcatcgcaattgttttgggcgcgctggcgggctctactgaatccgctcaagcgcaggtaatggaagagtttttctatgacgcccttggaaggctcgtcagtgtcgtccctgcagatggacgccaatacaaatttgagtacgacagagctggaaactggacagctacaggccccgcgacagggacttcaccaaagcccgatacgccgacaccagtagacccaactccaaagctgtttgaacgaaccattacggtccctgcatctagcggtcaactaaacacgcttcgacgccttgcagagtatgcgggctacagcggaaggcagccggcgcgaatcgtcttcgaggtcgttcctggtgtgagtatccttgggattcgtggcaatgctgcgattgattccggaacatggcccactgacaagtatgcaacctcgataacactgaaggtcgccggcgtcgtgcaagggcacggtggtactgggggggcaagcggcaccgacgggcagccaggcggcgacgcggtgattgctcgcctaccgatgcgcgtggaggtgcttgcgggcggcgcgctgatgggcggcggcggcggcggcggcggcggggcaccatccccgcgcctgagcgtcatcatcggcccccgtccgggtggaggtggaggtggagggtatccagatggccttgggggagcaggatcaacggtgcagccagggccacagcccggccttcctggaagtatgggtggtgaaggcggtctaggcttgcccaatctgacggggcagggcgggaaaggcggcgccgcaggcaggcgaggtgagcctggacgcccgagctaccacggggacgttccggccagcgaggccccaaagccaggagaaggcggtgaggctggacgggctattcgcaccaacggccattatgtcgagctcgtcgatctaggcggggcaatcgtcggactcaaggaatga

SEQ ID NO: 518350 - DNA, 276 bp, Stenotrophomonas maltophilia
atgacgaccgaaatcaaggaaatccttgatcgcctccaaggctgcgaggtaggacttgagatgcatcgcggctatctcaaggcgatgcagtacgcgttgcggagttgcgtactcacccaccctgcccccagcgacctctccgaaacgtggtggcagctgctccctcaaattgcggccaaacacaagggcgacagcagcgatctcttcgccgcagccttccagcaatccctgactgttctcactgagcagatttgcccagaatccaatcaactttaa

SEQ ID NO: 518351 - DNA, 567 bp, Stenotrophomonas maltophilia
atggagatgattgcgtcgcatgcaggcaacacgcggggcgccatctattggcacttcaagtcgaaggagcacatcctgagcgtgttgacggagctggagctggccccgtggcacggcaggctgcgctgggacgcggtgaggaaatcggatgagcctctgaagctacttcgctatgagctcttgaagtcccttcgagagttctcgcagaacgtccgacttcgggatatgttcgaggtgctgcttcatgcaggcccgtcggccagtctcgatggtgtgcgtctgcttgcgcagcgaggagcgttggtcgaacttcatacgttggagcgggtattgcaacgagcggatgagctggggcagctgcttcagcgtaccaacgtcaccgttgcggcacgcagtctctacaccggcatctctggtgttctatacggcgccatcctggatccggaggagttcagtattgaacgcgacggagaacttgtgctggacgcgtttctactgctccacgcgccgatgcatgcgctgtaccgcccggaggagatgggcacggagccgcgctgcgagaggtag

SEQ ID NO: 518352 - DNA, 1431 bp, Stenotrophomonas maltophilia
atggctgcgccgtcgcaagaaccaccccgtgaacggagagactgccccgtgaagtacatgaccctccgccatcgattcatggccatcaccatcaccgccgtgttgggggccatcgggtctcctgcagcgctcgcacaggccagccagcccgcgtgggtgcactgggaggatccggagctggagcggctgctgtcactcgcatccagaagctctccgacgctggcgcaggcggctgcacgcttggaagaagcgcgtgccgccacagccggtgcgcaggccaatcgctggcccgagctgacggccaacggcggcgtgcagcgcacgcagcggccggagtcgagtgccctggtgagcagcacgggatctccgcgctacttcacccagatcaatctggatgcaacgctgcggtggcagatcgatctgtttggccgaaagcgcgccgccctggcaggtagcgctgcccgccaggaagcggaacgcctggagttcattcgcacgcgagcccggttggcggccgaaatcgcgcggcagtacatgatgctgcgcgcgggtgaccagcagcagcgggtcgaagaagaactggcgatcgtcctgaacgagattgccggcatcgacgaggcgcttgagcaggcaggactgcagtcggttgctgaaacagcgcccctgaaggtggagattgccaatcgccaggccagcctggaggagggcctccacaaccgcgcattggccatggccaggctagctaccctcaccgggatcagtcctccgctgctcgacgacatcgcctcccgctaccgtccggcgccgcagtgcgccagccccgagccgattggcattccgatcagcgttgtcgccagccgcccggaagtcatggctgcggagtcactgctgcgagccagccaggcagatcgtttcattgccgaacgcgcaaactggcccacgctgaccctgtccggaacggggggctgggcgagagagggcagtggtggcggcctgatcgcggggagcaacctggccagccagctgctcggctccctgggcctgcaactgctcgacttcggccgggcccgtgcagagaaggatgccgcacaggcacgtcttgaccgtgccggcgccacctatgcagaggcgattcttctagcagcagaggacgtcgacgctgctattgcagatgtctcgcgtgcctcgaagtcccgcgagcagcagagggtagcagcgagcatcgccgatcacgccatgcggatcgctgacgcgaggctcgaatccggcctgataaatcggcgcgaagatctggcgatcaggcggagcacgctggaggagcgcctgaggctgatcgctaccgttcagcagaaatgcgaggcggacatccgcctctcgctggcaaccacatcaggtggaccgcctgccacaaaccggatcagcagtcgctga

SEQ ID NO: 518353 - DNA, 3051 bp, Stenotrophomonas maltophilia
gtgaagatcggcatttccgaatgggcagtcaagcatcccacgcccgtcatcctgctcttcgtgctgctgaccctgatgggcatcggtggctatgccggccttccgttggccggatcgccgaaggtcgaacttcccatcgtcgaagtgcgcgtcgatcaacctggcgccaccccggccgagcttgagggaaacgtcgcccgccgtatcgaagatggactcagcgatattgcctcgctcagtcatctcaacacggtcatcagcgaaggctccgtcgtcattacggcagagtttgcctttgatgcgaacctggatcgcgcaacgcaggacgtgcgcgagtcggtctcgcgcgtccgtcctcagttgccgggcaatgtctccgagcctgtgatcaagcgcgtcgatgtctccggcggcgtgcagctgagctacgccgtgcgttcggacaccctgtcccaggtggcgctgagccgctacatcgacgaggaggtgcgcccggcactgctcgccgtgccgggcgtccaggaagtcacccgccgcggcggtgcccgtcgcgagttccgtgtcgagctggagcccgaaaggctggcggccagcggcctcagcctggccgaggtccatcggcagctcattgccagtgaagccaacctgccgggcggcagtgtccgcaacgaggtcggcgaccggtcgatccgcatcaccagcgcaagtgcctcggccattgcgctgggcgaaaagctgatcagccttccggctggtggaagcgtccgcctggacgaggtcgcccacattctggacgccggcaacgcaagcgagggctacgcaatgctggacggccgtccggtcaccgtcatcgaactgcgcaagaagcgcggcgccagcgaaaccagcatggccgatgccgtggccaagacactggccgacatgcagcgttccccgcacctggccaccttcgagctgttcaatgacggtgtgcagacgacgcgcgagagcttccatagcgcacgcagcaccctgctggaaggtgccgcactgaccgttctcgtcgtgctgctgttcctgcgcagctggcgcgccaccctagtcgcggcgctcgccatcccgttctcgctgctgcctacatttgccgcgatgtacgcgctgggcttctcgctcaacgtcatcaccctactggccctgatcctggtcatcggcatcctggtcgatgacgcgatcgtcgaggtcgagaacatcgagcggcgcatcgagcaaggggatagcccgcgccaggccgcactgcttggcgccgacgcgataggactggcagtgatcgcgatcaccgccaccatcgtggccgtgttccttccggtcagcttgattccaggcatgatcggccagttcttcagggagtttggcctgaccgccagcatcgcggtgatcgcctcgttgatcgtggcgcgactgctgaccccgctgctctgcgccgtgctgctgaagccgcgtccgcatgcgcaggccggcaccacggaatccgcgcttacccgtcattacgatcgattactgacctggacgctacgccatcgcaagaccagcgtgctggcagccgtgctggtgatggtcgccactgtcgggttgctgtcgatgattccgtccggcttcatccccacgccgcagcccaacgcctaccaggtgcgttaccagctctcgccgggcatcacctacgagcgcgcggtgcatcgcgccgaagccatccgccgggcggtggatgacatcccggaggtcaagcacgtgctcctgtccgatggcggaagcgccttcaccggcacggccctgcttgtactgaagccacgcggcgaacgatcgcggccgaacgcggcgatcgagcagtccatccgcgagcggttggaggggctgaaggacattcgcccggagctgctgctgggggagggcaacaaggaaatgtcgctgtcgttccgcagccgggataccgctgccctcgatgcattcgtgacccagctggggcgtgaggccaaatcgatccttggcctgcgcgatgtcagcaccaccattccgttgccgcgcccgggctacgacctgaagatcaatcagcaggatgccgcccgactgggcgtccttccgcaggatcttgcgtccatgctcaataccgccagctacggtggcctggatacgttgctgccacgcgtgccggttggcaatgaacaggttcccgtccgcatccgggtggccggtggtacgcgcatcagtgcagaacagatcctggatcttccggtgcagaccaagtccgggaagaccatcccgctgcgtgcgttggccactcttgtccccaccgaaacgccggcgagcgtgcgccgccttgaccgcgagcgggtcgttgagctcaccgccaacctgaacgggctgacgctcagccaggcggtcgagcaggtccgccagctgaagacgtacgcgcagatgcccgccggagtgcgctacaccgagtacggcgacaccaagtacatgaccgaaatgttcacgcagttcggtgtggccatcctgctggggctggtagccgtctacgccgtgctggtgttgctcttcagtgactggctgcagccgatcaccatcatgacagcacttccgctctcccttggcggtgcggcgctcgcgctgctactcaccggccattcgctgaccatttccacggtgattggcctgctgatgctgttcgcaatcgtcggcaaaaactcgatcctgctggtggactacatcgttgaagaccgcgagaagggacaggaccgcgagcaggccgtgcgtagtgcgggccgtgaacgtatccgccccatcctgatgacgaccgtcgccatggttggcggcatgttgccggcagcctttggcttcggcggcgacgacggcttccgtgcacccatggcgatcgcggtggtcggcggtctgctggcctccacgctgctcagcctgctgttcgtcccggtggcctacaccctgatggatgacctggagaaccgatggctgcgccgtcgcaagaaccaccccgtgaacggagagactgccccgtga

SEQ ID NO: 518354 - DNA, 1128 bp, Stenotrophomonas maltophilia
atgcgctttacgacccgcccccctcaatggccgcgccaactggcgacgggcctgctcgtcatcggccttgctgcctgctcgcctgacgcaccccagaaaacgcagaagcccactgcgctcaccgcgagcgtcagcttcgtccatcgtcatgagctgacgccggaagtccgcatcgtcggacaactggtgccgcgggagatggtgcgtgtccagccgcaggttgatggattgatcgtgcagaaggttctggtcgaggccgggcagcatgtgcgtgcgggccagcccctgctggcgcttgacgtgaccaccaccaagctgcagcaacagcaagccgccgcagaacgccagcgggcgtgggcggatgtggagcgcatgcgccgcgagctggaaaagatgcgagcggttgccgacattggaggcatctcgcgcaacaccattgaaagcaacacgcttcagctgaaggcggccgaggcgaccgcccatgccgccgacgctgcggaagcgttggcgagcacccgactgcagcaggcggccttccgcgctccctttgatgcgctggtgcttcagcgaaatgtagaggtgggcgaccggaccggcgccagcgaaacaccgtacttcgttcttgccaaggacggtggcgtggagttcgaagcgttcgccagcctccgccagctggaccagatcaagcccggcatggccgcacgtatcctggttgacggccaggtgccggccgcaggtcaggtcaagagtgctgcagtcgccgttgatggccagacccgcagtggccgcgtacgtgtcactgccgacgcctctgcgctcggcgcaagtggcgcgcccgcatcgatcctgatcaccttgcccagccgccaggcggtagccgtgccggtggatgcgctgcgctttgacccgactccctgggtgtggaaggtcgatgagcgcaacgtcgtgcgccgccaggacgtggagcttggcgttgccaacggcgaccactacgaggttatccgtgggctgaaggaaggggatcgtgtcgtcggcgattccggtgcgctgcttgtcgaaggtgaccagatcaccgctgtcgatccgcgcagcccggttgccgctccgtccgcgaggaagcccaagtga

SEQ ID NO: 518355 - DNA, 597 bp, Stenotrophomonas maltophilia
atggctcgaatccgtaacgacaaactccacgaagagcgccgcgctcagatcctggaggccgccgccagcgtcttccgcgaaaagggctttcatgcggcgcgtacggaagatatctgcacccaggccgagatgagtgctggtgcagtgttccgttacttcaaggacaagcgcgagatgatcgatgccatcgtctctcgggaaatctccagctacgcaaacgatgccaaggcgctcgtgagccgggaagggctcgagtggctggcccgggcgagctccgaggaactgaaggagcgctggaaggagtctgacaacggtctcggcctggatgcatggatggagctggttcgcgatcctgaccgtcaccgggagatcctggacctggatgtagagacgcgaaaggacctggcccttactctggaatcgggcattagagagggatgggtccgacccgggatcgaccccgaaggcacggcgtcactgattgtcacggtgacaaacgggttgtggcttgagcagtcgttgaaaaagaccgcggatgtggagcagtcagccaaagccgtccgcgacttcctcaggagccacgtgctgaaaacatga

SEQ ID NO: 518356 - DNA, 297 bp, Stenotrophomonas maltophilia
atgcgcatcgccactgctgaagccggctgtacccgacagacccgccaatccggctcttccctcaagaagaaggtcggcctggtgcttctggcgctggtagccgcctattggatctcctttcccttcgtcgcattgctcgacatcccctacaaggccctgatcatcagcagcctcgtggtgctcggtgaagcgctgttcctgatcgcggtcgccttgctcggaaaagagtactgggggcgaatcaagagtggaacccgcgctctgctggctcgtgtagggataggacggggccgctaa

SEQ ID NO: 518357 - DNA, 396 bp, Stenotrophomonas maltophilia
atgactaacgaacaaacgacagtcaacttcgagaagctcctggcgctactgacctcagtagaccgttcgctgagccacctatccgctgttgcgaggctgtcgcatatctacggggagagcaccgtcaagggtttggtcgagcagtacgggaagctgaagttcgacgattccgctgcattcaaagtgctcaccgagaccggcaagaagctaactgaagacgggctcacgtacgagcagcgtgtcgagaagatgggcaaagaagaggccggccgccttggcgccccgcaacgcgaggcccttgaagctcggaagaagacgttggccgagttggataagttcaagaaagaatacccactgatcgtcgccatcgtcgatggaacccgctgcgagggatag

SEQ ID NO: 518358 - DNA, 735 bp, Stenotrophomonas maltophilia
atgagcggacgggtagagtcgagtgtcagtcgactatcgcgcgcagcgcgggattttctcgatccgaagagcagtcgactaacagtcgactctaccgccgggcgtttcacgtgccgggagtcgaccaaccggttcgacggaatccgcttggtagagtcgaccgttggtcgactatcgcgcgcagcgcgggattttctcgatctggacgaagggcagtcgactaacagtcgactctacccggcgggtcgtttcacgtgccgggagtcgaccaaccggttcgacggaatccgcttggtagagtcgaccgttggtcgactatcgcgcgcagcgcgggattttctcgatctggacgaagggcagtcgactaacagtcgactctacccggcgggtcgtttcacgtgccgggagtcgaccaaccggttcgacggaatccgcttggtagagtcgaccgttggtcgactatcgcgcgcagcgcgggattttctcgatctggacgaagggcagtcgactaacagtcgactctacccggcgggtcgtttcacgtgcgggaagatctcaggccagctcgggttcctgcgccagcaggcgatggaagcgttgcagaacgtaaggatcgatcaggccaccagattgctcgtcgatgatgcgcagagccgtctcgtgttccatcgcggcacggtagggacgcacgctggtcatcgcgtcataggcatccgcaacggtgacgatgcgtga

SEQ ID NO: 518359 - DNA, 126 bp, Stenotrophomonas maltophilia
atgcgcgaattctatcagagcgaccctgagcgcccggccagcctgtggcgcacgggttccctgcgcaggagcgtgtcgaccaaggtcgacacccaccggtgcaccgcgcgctcaggattctggtag

SEQ ID NO: 518360 - DNA, 315 bp, Stenotrophomonas maltophilia
atgacccaagaacatatcagccacccggaagggttgccgaactgcgccaccggccaccgcgcgcgccacatccacgacaagcgctgtgcatccgccggtggcggccacctggtcgagtgcgcttgcaggtcgaccagcaagcatgccgaacccgacaaggccatcgcagcctggcgaagactgaatcgcccggcgcgcagcgcgcgccccacttcggtcgaaatgccgatcgacaacgttctgcagttccagcttgggctggcctaccgtcctgcgaaggctcgcgccatgggaggctatcatggccgtggctga

SEQ ID NO: 518361 - DNA, 876 bp, Stenotrophomonas maltophilia
atgtcatcaaagactaaggttctaatcctctcagcggcaattgctttgattggaacaggcatctggcggtttgccgccacctcccccacgtcgcgacaggacaatgacagcatcagaacgcccacgactggcgtgcccaagatcacgatagacgcgaattcggtccccgcgccccatacaaccacaacgaccagtctgtcgtcgtcggccaacagatcagttcgcgtgcgacatctatctggcagagcctatgtcgttgaggacttcgggcgtgtgccgagtggcaccgtcgacaaggtagttgcggaactttcgccattggcgatggccggcgatgcgacggcctcctatgggatctttctaaagctcaatgaatgcgcaaacatcaacaggcgcgcatccaggggagccgccttgcaagcctcgccagatgtcgcagctgcctgcaacgacctttcggcggaaaatgaagtcagctcgagcaaatggctatcgcttgctgcagagcaggggaacatcggagcgagactgctctatgccgcagactccgaatcagctctgggcggacctgctgagctgcttcgcaacccggaccgcgcaaaggaatacaagcagacagccgtaagctatctgcaagaaatggcatctcaaggtagcgccgacgcgctacttcagctggggaatgcctaccacgctggtgtgctgatcgatgaggaccaagttacaagcagagcgtactttgaagcagtacgcctcatggacccctcgatagtgccggctcgtcaagttagtaccttggacaaatcgctaagtggagaacagctctccttagccctaagaaagggaaatcaaatctatgactcttgctgtcgatag

SEQ ID NO: 518362 - DNA, 612 bp, Stenotrophomonas maltophilia
atgatctatctggtcgatgcgaacgtcgtgatgcaagcggcgaacacctacttccgacactcgtgggtgcctgaattttggtcttggctccaccaccacggaagccttggaaacatcaagatgccattggaaattttccaagagatcaaggacggctccaacaattccgagaaagacgagctttttgcttgggcgagtgaaaagaagaacaaagatgcgattctccttgcggactccgttacttccccgctcattagaacggtgatggagaatgggtactcactgacattgaacgaagtccaactccagatgattggacaagatccattcttggtggctcatgccctaaaggatccaggcaaccgctgcgtggtaacccatgaggttagccgacccaaagcagcagctcacaatagaaagcttcctgacgcatgcgcctcagttggagtggcttgctgcactccattccagatgatgcagagcttgggcttcaagacagcgtggaatactccgccagtcgctccgaagactctcccgctgccaccaaaaccttttgctacggcgcccaacccgctgcctcctctgcccccccttcccgataagtctccctga

SEQ ID NO: 518363 - DNA, 1200 bp, Stenotrophomonas maltophilia
atgccgtcggtgaatcctgaaattttgagatgggcacgcgaaacggcggggatgacgccggatgttgccgcgtcgaagctggcccttaacgacacaaagcgggcaaccaagcttgatcgcctgatcgctcttgaaacgggcgaggacgagccctccgatgcgatgctcctgaggatggccaaagcctaccgcaggccgctgctgtctttttatctctctgctccacctgaacctgaccggtcttccctcgatttccgcacacttcccgagcggagttctgcagatgagccggtggttgcaactttgttgcgtgatgtaaaagcgcggcaggcacttgttcgcgcattgcttgaagaggaagatcagccgccggtgggattcgtagggtcttcgaagggcaagacgtctgttgagtctgttctagctagcgtggtcaagtggagcggcattagccgcgacgaattcaggcgcgccaggaacacggatgaagccttctcttacttgcgcgagaaattcgaggcgattggtatctacgtcgtgctgctaagtaatcttggcactcaccacacggatatcgatgttagggcattccgaggaatagccctttctgaccccttcgctccgtttgtcgtaattaacagccaggacgccaagagcgcgtggagcttcactctgctgcatgaggtttgccatctttggtttggcgagtccggcatcagcactttaagcacagagcttgcttctgagagattttgcaatgaggtggctagcactttcctgctttctgcagaggaaatagcctccctaccgctgccagcgagcaatgctcctaacgatttagctgatgctatgtctgcctttgcggcggcgcgcaacatcagcacaacgctcgtcgcatttcgcgcatttcaagccggcaggatctccgaggaatcttggaccagcgttgcggaattcatgcgcgccgaatggcgccgtcaaaagcagaatgagaaggacgctcgcaaagatcgagcaaaagatggcggaccgaacttttatgttgttcgacgccataggcttggcaaggcactggtagaaaccgcttaccggggggtgatggaggggagcctcagcccatcgaaagcggcaaaaatcttgggcgttgcgcctcgtagtgtgtacccgctcttgaacacggcaaatggaagggccgcctga

SEQ ID NO: 518364 - DNA, 402 bp, Stenotrophomonas maltophilia
atgaaatcaacaatcaggcgcagccaacgggactattcgctggccttcaagctgtcggtggtcgaccaggtagagcgcggggaattgacctacaaacaggcccaggagcgttatgggatccaaggccggagcacggtcctttcctggcttcgtcggcacggtcggcaagactggtcagctggtgcatcattccctcccatgagcaccgtccccaaagccgtcgcggccaagccgcttacgccggaacaacagatcaaggccttgcaggtccagttgcgagaggcgaacgagaaggcgcagctcttcgaggcgatcttggacgtcctcaaagaggattacggggtacgcatcgtaaaaaagccttccggcaagtcctcacgcaagggcgcctcaaaggcgtaa

SEQ ID NO: 518365 - DNA, 555 bp, Stenotrophomonas maltophilia
gtgagcgattgccgcgcgcgccagccgcggttgggtacgcgcaagctgcaccatctgattgaaccgaagctacaagcggcggggcgggtagcggatatcacctacctgcccactgacggaaatatcgtttacctgagcctggttacagacgtctggtcacgcaagatcgtgggctggagcgtgaatgagacgctgcagacggaacacactgcgcaagcactggaaatggccctgaaatggcgaaaaacgaggcagcgcctgatccatcattcggatcggggcatccagtactgctcggacaactaccagaccatccacaccaagcatggcctgacctgctccatgaccgacggctacgactgttatcagaacgcgcttgcggagcggatcaacgggatactcaaaggagaatttttgcttcgtcgcccacgggacctgggacaggcccggcagatggtggctgaggcagtggagatctacaacgcggagcgaccccatctgccccttaaaatgcagacgcccgatgcggtgcatcgggcgtctttggccgcctga

SEQ ID NO: 518366 - DNA, 474 bp, Stenotrophomonas maltophilia
atgcttccctcgatcggctacaaaggcttccgcactgcccctgttccttccggttgggtgcagatgggcaatcgctgggcgctgtggtggaatgcgcgcgaggtggccagcgtcaccccggcacgagagggcggctaccgcctgcatctggacgccttgaagatgtggcaaaccaagagtgccccggtcgccagtatccgacagggtaagcgcttcgctgagcgctggtgcgccgccaggttgtttccaggtctgccgcttcgggaagcggtcgtccgcctgaccgacaacacgccgatccagccggcaccgccgctgccgggcgtaccgcctgcgcgcgaacagcagctccaggctcgacgcctggacgaggccagcgctaacgagatggtgcggcttaggcgtgggctagagccactcgggccgcttgctgaaaccattcatcggggcaagagcagacggggagtcgcttaa

SEQ ID NO: 518367 - DNA, 1206 bp, Stenotrophomonas maltophilia
gtgtcgattcaactcgggcgtatagttgaggttattagggaagggcgcgacccggcggttcgtggtgactcactatacgcatctgtcagcgcttcgcctcggatcaaggaattgctcgcagatattcacgaggcgaacgctgtgcgcgtttttgctggtgatgttgagcaattcgaggatttttctgatctggaagattttgctgactatcgggtatccatcgcaaaagttcaaggtgcaaatttccatatcgcgcaggatttttcgagttttttgaactaccaggaggggcggtttcttgttgatcctccagcggcctggtacctgatagattcaaattacttgagcggagaggatccggactcggaggaggttaaaggttatcttcgtcttccgcagttgctcgagcttctggaagatgtttcagatttctcttcggttaagggtgtcactaagttttacgtgttcttggcagatgagcggttcgatttgccaatcgtttgcgagcctggcttgctcaagaatgttccatctttcgaagctatggaagcggtacgggaggatgtttttgtcaagccgaggcagcccgcaaagcgggaactgctgaaaagatcaatagttcgccatgttcgatctctagccgaagacgctcgattccgctcattgctgcgatcatttttgtctgtcgtcgcttcctatgaggctgcgcgggacaacttcttttcggagtttgagtttgaaaagctgaatgagaagtttgaacggaagagggaggaatacatgctaaaaatcgattcggtctgcagtgatcttctcactaaggttttggcccttcctgtcgctcaagctatcgtggttagtcagtacaaggatggtgcagtgctcgccaacttggcgcttgtgttcggttcagctatcgtgtcactgctcggagtggcctttatctcgaatcagattcatgcaattcgagagatacgaaagagcgctatgcgggagagagatgaagtcgcggagaggtacccagacctctataaaagaattgatggttcctacaagcaggtcatcgcccgtttatcgctttacgctcggctcctgccggccatggtggctctgctgcttttagtgagtttcctgttctccgtatcgggatatgatcaagctgccccatgctcaggctgtgtagccaagacgctgctcgggcagtag

SEQ ID NO: 518368 - DNA, 306 bp, Stenotrophomonas maltophilia
atgacctactgggcacggaacgccgcgctcttcttcatcggcatcgtagatgtccagcccgagctcgatgccgcgctgccccagggcaagcagcgcgcggggcgaaagcgagaaaccatcgttgccgctgcccatgaaaaggccgcagaacagatcaggccggaagcgtgccagagactgccgtacggcgagatcgccggtgagctgatcgaggatttcgaagatctgcgcttccagatcttcaggctcacgaggctccgcatcaagtcgccagcttccagtcctggtgatacgcacggtgcctga

SEQ ID NO: 518369 - DNA, 519 bp, Stenotrophomonas maltophilia
atgagtagcgcgaaccgggttttctatttgataccaaagcgccgcggctatggagaggatgtggatttgtttctgcctcgcgatctggtcgctcaagaaagcggggagatattgccctcgctcggcttcggtgtcttcgcatttctgcgtagcgagcgccatcgcggcaaaccacggcatctgtcgtttccggcggtgttcgggtttggtgaagattcgctggtggtcgagctgaaactccagtctgactatctaaaagcgggtacaggaagtggtagccgattctcgttcgtccaagacgaggaaactcggggattcgatatcgatgcgtcatttgtcgctcgtaaatttccaccgaattttcggctcgccggcacggcggcgagcctcgccggctacaacctctgggcgttgatcccggaaagccgggaatacctcgaagcgctttggatagaacgggaattctatttgactggacatggggccatggacgacggccgcgattccttgagcggctag

SEQ ID NO: 518370 - DNA, 456 bp, Stenotrophomonas maltophilia
atgttgaagaagaaatatgaggttgacggtacgtggtaccacggcggggcattgtcatctattcaacagattgcggcgaataagatcgatacgaagctcggcgggggggaactgggacaaggcttctacataggtaattacggacatgaggccagtgcgtgggcgcggcacgtcgcaaaagatcagaagccgtccgtagtcgagctgaaggtgagcagctttggggcctcaggcctgacgaagcgagagctgagctggttgctcgctaaggaatgctcgatcaagattgcgaaggcggataggcggcgaacgcacgtttttggagttgatgtcgtggccgcgccgatcgttggaaagaactttaaggatacgccgacccagttgaaatgggagggcgcgaaatccgcctcgtttctgaattcgctacaggtcagtaaaaggataaccaaactttga

SEQ ID NO: 518371 - DNA, 243 bp, Stenotrophomonas maltophilia
atggctaaaggcggaagcggcattcagaataatgcggatgtactggagtccttgcgaattgaatacgaccagaaggtcgaggccgaaagtagtgggcaggatgagatcaacgtcttaagtcaggctgatctggtcaggatgctatcggcatcatcagatagtgcggtatccggcacggtcctgcttaccttggggactctgataatggctttgtccgaactgtatcccgccttggcggcatag

SEQ ID NO: 518372 - DNA, 306 bp, Stenotrophomonas maltophilia
atggaacgctcgatattcactattgatcgcgcactgtattcagacgacctcgcggctcgggccgcgcaccgctataccggcgagtttggtgtggagatgcgcagccaaggcgccaacctcaccgttagcttttggtctctggacggctccgacctgccagaggacctctggacccggttttcccgagacttgctggacgaacgcctgcgagcgacggtccgagctgagacgagcggactgcagcaagaactgcttcgcgcggcgctaaatcaagcacagccggtggccgccgatgtcgaggtttag

SEQ ID NO: 518373 - DNA, 372 bp, Stenotrophomonas maltophilia
atgccgatccacgttctttttgtagaagatgaagaagatctccgcgcagtggttgccgacgccctcagtgcccagggtttcgatgtcaccaccgccagcacgggagttgaggcaattgcacaccttcgcggcgagggaaagttcaccatcattgtgacggactacaacatgccaggctctgcgaccggcttggacgtggcggttgaagcggctttgtcccaaccgctggcgaaggtagtgatttcgtcagggcttcagcgttctcagctgccggtgcttcctgaaaacgtccattttcttcccaagccctaccgatttcgccagctcaccacggccattcatgagcaagtggattgccggcgggcgacctag

SEQ ID NO: 518374 - DNA, 615 bp, Stenotrophomonas maltophilia
atgagcatcctcaacgttttgctcaccgctgagcaattggtcgtgacggtggatacctgggcggaggacgccctaagcggccaagcttcggaaggggcgaaggtgctgctcattcctcaacaccagatcttgctggcaacccggggttcagcccagttcttcctgcggatgtatcaactctgcctggaagccagttttcgagccgacttcaccattgaacagctgacggcggagttggggcgtgttattgaccagctgtggccgaactatgccaaagccgtggctgaagcgggcttgccggcagaatactgctccacggagctggtgttgggagggtggtcgccccaaaacggtcgcatggtggcaaccgcctatgccaaacacgacgtggccgcgcctgcggtggtccagccgatcacggggcagctctcgtcgcccggtgagcccttgcaggcctggccgccctcgatggccaccccggccctgtttgaggcgggccggctgcaggccaattggctcaacgagcgcattgggcgaaaggtggcagggggaaggttgctgctgggtttccttcagcgaggtcagtcggtgatcaaagacctcggagcgctctag

SEQ ID NO: 518375 - DNA, 696 bp, Stenotrophomonas maltophilia
atggtgggcgtggaggctttggcgcgatggcgtaccctggccggcgttgacgtgccgccggataccttcgttcccatggccgagcagcaggggctcggaacggcgctggcgaagctggtgatcgtgaagagcctggaagagatggggcctcgtctacgccggggggacggcttctacgccagcatcaatctgtccgctcaggacattctggacagcgagctgagacattttctgagcgagcaaaccgaagctttcggtgtttcgccagccgacgtagtgttggagtttacggagcgctcaacggcatcacagcaggagcttgccgatgcgctggggcaactggaccaagcaggttttcgcgtgtatctggatgactttgggacggggtattccaactttgcctacctggcagacttgcccttggcagggctgaagatggaccgtcgttttaccagggccatgggcaccctttcaccggccagctacgccgtcgaagccatttgtgcgatggccaaggcgttgaggctgcctcttgttgccgaaggggttgagaccgaactgcaggccttggcgatgcaccggctcgttcccgaggcggttggccaaggctggttgctaggaaaaccatgcaaggccgactcgctacccgacgacatgcttgggctcaccagcaacggcagtccagcgcccgcctga

SEQ ID NO: 518376 - DNA, 534 bp, Stenotrophomonas maltophilia
atgctggaggagcgcagagaggagtgtgctggttgggagcgggaagctacccgggagcaggcctcgcagcagatctacctctcggcacttgaaaatgccctggccggagacggaatggcggccgcctgctttgtcgtggccccttgggcggtgccggacgaaaactcgccggcctttcagcgcctttccgaaatttactctacaaacgcccccgccctcgtggagagcggcgtcgagcttggcagctggccgatggttcgcgccgccgcatccgcgctcaactctgaggcaggcatgacttcgcgcctctctctgggagcgcagaaagcctatgaaatctcaaggcttatgcagttggggagcgaagacgcagcaatgtcgcaaacgtttggctacgatgctgcccgctacggcgctcagatctccgatccagccattctgaagcggctggatgaggacgctggacgcaagttccagtcgcagttccacggaacttactcggaatctacctcgttcaccaagttgtgcgactag

SEQ ID NO: 518377 - DNA, 744 bp, Stenotrophomonas maltophilia
atgagaattcttactgatcaagagttggacgaggtgttcggtggtgattcaagcgtggggcttacgctggatcgggtcaccgtgcatggtccaaccttcagcacgtttaatatgggtggttatttcagctatggcccgggctactctgagagcagcggtgggcaatcaggcggatcatcaggttctggatacggcgttgttcaccatgccgttgacccctcgacgcttccgcgtgcagacaagatggagtgcaaggtcgccgcagtggcggagccgggtcatgcagacactgcgaatgttcgcgtggtaatcgtcaatgcgcacgcaaacaagcagatcggacaggaaacctatgagttcagaagcgacagccctgaggttcctgatggttaccaacggatcagaggcgccatgtacgtagatcccaactcctaccaacccgacggctcatacacccgtggcaacgcaatgctgttcgttgacgcgttcaaagcgacacccgatgggacgcggtcccatcggtactacaacgacgcaggtgaacttcaagaacaggggcggccgctgggttcattgaccgcggaggagaacgcgatctttgtcgcggctcatgagtatcagcacgcttaccaggcgcggtatccgcaactatttgtcgggcttgacaaggaggccgacgcggagacctatggtctgaaagcccttgaccgataccgggcgggtaccaaaggcaactgcgactaa

SEQ ID NO: 518378 - DNA, 2409 bp, Stenotrophomonas maltophilia
atggagggaatggctggcgcgaggcgtgcttatgccgccttgcgtgtcattgaggaagcttgtggcatggcgatggacgtggcgccgggatttgacggagccgagcgtgtccacgcagcagcaggctttattgcgcgcgcgttcccctgcacatggataagcgcttggcgcaacagatcgcgttcgatcgatgaaatttggagcgtcgcaatccaaagtgcctcgcagggcgcatcgttcgatggattcctgtcgaccttctgtggatcggccgtgggcagaggtatgcgccacgcggatgcaagaagagcgccgctcatcttcgtggcagcagtactttattggcggctcaaccaaagcggccgacagaacctagaccccaccagtcaactgtacatcctagaagtgatcgccgacgcgtctggcgttgaagctcaggacgccttcctgaagcacgattgtgtcgatcaagctctcggagagcgcttgggggatcgctaccagtgcctagatatggagtcgaaggtgcgctgtcacgctgctgtcgatgccgtggccgagcgctcaagggttagccgcatttctattgttttcgatgaagaaatgcggccccgctccagctcggaacttgaggggctggtaaggacaggggttgtacctgggcgagcctgtggtgatcaaaaccaacaggccagagaaggttgggtgtgtgtcggagccttcgcgctttcctttctgacagtcctcgtcattgcagcttcgctccctgtggcgaaagattcggtgctgtgggtcatccttgcgttccctttgattctggagacttgctattggctggctgaacaacttcaggcttggcgcatcgggccctactcagctgtccggtacgactactcactttccggtgtggaggatcccgtgtgggttgcagttccggtgcttctgcatggcgaggaacagttgatccagcttgagcgaaccctgttgtggaacgtcagaagtgtaaatgacgacggagtccgcttcgtcttgctaactgacttggccgattcgccggaggagccgtctggagaggaagacgcggcaacggtcgagcggattgccgctatggttgagcgggtgaacgaggctgcaggagcgcggtaccggcgccccgtctacttcgcccaccgtcgccgcatgttcgtttcgagcgagggggcctggatgggggaggggcgaaagctaggcaagattcacctcctgcatcgggcgatcatcgatggggaagaacctttcagttctacttctccgagtttctatgaggatgtttctcgctgccgatatctctttgtttgcgatgaagacacgcagataggtcgggactgcattcaaaggcttgcgggggtcctcgcccatccttggaatgaaatttcccaggaaacgcgtgaaatgggcggggggcacggaatggcggtgccttctggtcatatagctgatgcatccgtgacgccgtggcggtttcctcaggtctgtgtcggggatgctgccaatccgcataagccagcgcctcgttggagggatcccaagaacgatacgaccgggcagtgcctctacacgggaaaagggctctacgatccccgcacctatcgtctgctgtgcgatgagcaagtggccagtgaggctttgagtcacgacactattgaatccttcatgctccgtccgacctatgtcgacgatgcagcaattttcgagtcattcccgcggtcgcccgcttctttggcgcgcagagatgaaagatgggcccgaggcgacatgctcaatctgctgcgctttccccgcctggcaaaatcagatcgggtgcatcgcaagcttcttgcatcgataacggtctgccagcagacgctcggttggcttggtggttttcttggattcccgctgatactcgtgagcttgtggcgaccagacccgacaagtcagctgagtctgctcgccatacttctttttcccggcgcagtccgcttggtttggcgcgcggtggctaactcccccaatgtcggcatgagtcatacgcttcggttgttggtaatgggtggcatgtttctgttactcgcaacggcaattcgcgtatgcagagccccgcgaacattcttggtaaccggcgcagcttgggggcgcgcgatcatggcttgggtgacaaatagagggggacttctatggtcaccagctagcaaggtttccaacggaagtaagctcggcttttcgtgggccgaggtcgctactttcgcggtctccattgcaagcatgcttctgttgccagcctcgtcgctcacctgggtcgctcttgtagtcttttgtggatggctggtgctgccagccgaacgtctcctgctgatcaagaaagatgattttcacaaacgctccgtctga

SEQ ID NO: 518379 - DNA, 1284 bp, Stenotrophomonas maltophilia
atgcgattcttgagagcagaagcggcgcgggatgatcgcgcaacattggcttggatcaatccagacgcggccgagatactcgctgaggccggcctgacgatgcgatcagactcttctgttgattcgttcgttatgagtcgctttgcacggcggctttgtccgtctggcgaggatgaggttctggtcgatctctacggcagttccgggacgacacgtttcggagggagtggtagagcaggtgtcgtgaacgggatgcaagtaaaaggcatcggtcctaccgaactcgtcgccgaaagcgctgactggcatcactcccatggcgggatgttcttggaagaagcgctgcgggaggccatcttctctgagttggctcatcgtgagtttccactgggggccgtgcgtaccgtcgctgtgatcgaaaccggcgatggcattgtcgaccgccacggtgtgcgtcacaggggagcactgttggtccggccctttgtcgcgcgggcatgccacttggagcgcgctctgggcttccggcaaggcaaccagcgctatcaaagcacggctcatctaagggacattggccgcgtcttagattggatgaaggaacttgaattcggatctcaggattgcgttgactccttcgccaggaaggcgggtgtgcaaatcgcgcatgcgcacgttgcgcggtggtttcatggtgggtggtactcatcggtgatgggtatggatgggcgtcttgtggactttgggtcatcccgtaagctctccaactggaagcgccggtcctatgaaacctatgggccatgctttggggatgaactcgatttcgctcaaacaaccatcggttcgcttggtgctcacattcggcattacgcgggccgatacgtcgaggtgaaagcgtcggttcaggcgcttatgcatagctacagggctcaggttctagatgagctggagcgtgcgctggcagacggatcagttgaatcccaagccgcccattctgccgtagagttcttctacaggtccttccagtgttcgcattcggaggatttcaaggacaggtggcggtgcttggttgagcgccttaggggtatgcacggggtagtcaccccagccggtttcaatcagggccggtcgggcttaggcaatgcgcgctatcgtcgcgagctggttcaagaggcgcttttcaaagtgctagaccagtccagccaacaaggggatgcgtcccttacacaactggaagtggatggttggatagggtacgggggaaggggcaatgctgttcagagataa

SEQ ID NO: 518380 - DNA, 846 bp, Stenotrophomonas maltophilia
atgctgttcagagataattttctcgccgcacgacgcctggtcggtctgggtagcgttatcgtccagccacaacgagccgcgttgctggcctcgttcgttatgctctcgctgattgtcgtagccgtttgcgctgccgcgagtgtgaaatacacccgatatgacagattcaccggatacgcttcggaatccgttcagcgtgccgtggtgtcgtcccctttttcgcagggggccagggtggacgaggtctatgtcagtttgggggacgtggtcgtgcctgggcagccgattgcgcttctttctggttcgggtagggcgcttggtgagcggcccgagtcgttcaattcgtttgtttacccgcttcaagaccctgcgggcaagcagggggagacctttgtcctgtccagcacacttcgtggtgctgtggatcgtctgcaggtgcggcccggcgcggtggcctcgtttgcgcaaccgatcgcggtggtcaggggcagttcagagggaataaggcttcaggccctcgttccctcgcattccatcaccgaagtggctgttggcagcgaagtctatctgaaattcgatgctgtccaagcgagtgacatggaagcgatcaaaacacgtgtgcgcagcatttccagagcgcccttgggcccggccgaacttgccgcaacctttggagcggcgacctctccagagcctatgtttctggtggacctcgattcgggcgtgctgtctgaacatccagtgcgaaagctcattcggcctggagttggtttccgaatgacagtgccagccgagcgaaaatccttgctgcgatggctgactggctacaaggacgaaaaggcatga

SEQ ID NO: 518381 - DNA, 2154 bp, Stenotrophomonas maltophilia
atgagccagaagtatgtttttggttggtcgaagagtattaggacggttcttcaggcagaggcttccgaatgcggcccggcctgcctggcgatgctcctggagttctatggacatgcaacgagcttgagagagcttcgcgagacaatgcgtagttcgtctcgcggaacagcgctgaaatctctgctcgaagcggctgatcagttcggactccaagctcgtgcgatcaggatggaatgcgatgaagcaaaatcgcttcgactgccggctatcattcatctggatggcgaccacttcgtggttctggagcgcgtatcgcgttcaggctgggtgattcatgaccctgccagggggaaacgaagaatgggaagccgggagattgatgagcgattcactgggattgccatcgagattcttgcatccgaccgcgtcgtaccgaaggtaagggctaacgagggaacgcttgcgctggtgcggagactagggcgcctcaaggggttcaagacaagcttcatcgcggtcttgacgttctcggccgttctggagataaccgccctgttcgggcctttgtttttgcaaatggtagttgacaccgttttggttagcgaagatgtgaatcttctgctgatcgtatgtggatgctacctgttcctttctgtttttcagacagtttcaactgcgtttcgcagctgggcgatctcggtccttggctcttcgttgagcgttggctggatcaccaacactttccgtcggttgataaaacagccggatcgttacttcgaggggcgcagcacgggtgacctcagttctcgcttcggtggtttgagctaccttcagtccgctgtgtccaccgaggccattgctgcatcattggatggcgcgttggcaatatttactctcctggtgttgttcatttatagcaaacagatggcactggtggtgtgtgccggttgcgctatctacctcgggatcaagctgctgtctttcagggtgttagcagacgcgaacgtggatgcgattactcaagaggcgcgaaaggagacaatgttcattgagtccatcgctgcccaaggaacactgcggctgaacaaccgccagtccatgcaggccgcacggtttgtggatcgggtgtcgaactatcagcgcagcgctctaagattggcttcggtgcagctcgtcttttcatcggccagcacacttacaacctccggtatacggatagccacgatcttcctcggcgccaagctcatcatgaacggaggtctcaccgcaggcatgctaatcgcatttctcgcttactgcgatcagtttacgggtcgatctgcacggctgatcgattacgccgtcaactggcgaattctcaaggttcacgctgatcgcgttagggaaattgtggactctccgcaggagacgaacgttctgcgcacccgtctccccgtccctgctgatacgacaatttgtttggagcatgtaggattcgcttacagtccgaccgacgatcccatacttaagtacgtggattttgcagtgcgccctggtgactgtgtggccctaaccgggcagtcgggttcgggtaagagtacggtcgtcaaattgcttgctggaacggtgagcccgactcagggcagccttctcttaggggggctgaagtacgagcaactgggaaaggcccgagttcgggagatcgtgtcgtttgttgttcaggatgacgagcttctgcaaggcagtgttgaggagaatgtatccttctttgacccctctctggacacagagttggttcgtgattgttgcgagatcgcatgtgtgcatgaagacatcataaagatgcctatgcagtatcagacccagcttggaagtggcagggtgtccatctccggcgggcagcgtcagcgaatcatgatagcaagggcgctctaccgcaggcccaaggtgctggtgttggatgagtcgacaagccatctggatattcaaacggaggcgcgactgcttaccaacttacgcgctcttggcctgaccatcatccttgtggcgcatcgcttggaaacgatcaatttcgccgatcgcatcctctatctgaaggatggcgtgctgccgggacgcagcactccggtaaaagttgatgaagagatctccttgcctgagcctatagagggctag

SEQ ID NO: 518382 - DNA, 246 bp, Stenotrophomonas maltophilia
atgaccaccctgggcgcggtgttggccgcagtgctggatgcagcggtcttggctgctgtcctgggcttggctggcatctcctgggtcaacgcccggcacgccagcggggaccttcgtgagcgttaccgttggcgggcccaaatcttggccggtttggcatcgacctgggtgctcaccttggcggggctgtccacgggagccgaccaccttacgtgcaaattgccgttcgcatgccacgggagctga

SEQ ID NO: 518383 - DNA, 1113 bp, Stenotrophomonas maltophilia
atgccgatttccgcttactcgatgaccctcaagggcgaatacgacgtcgtgcagttgcttgcacggcttaataacagtagctccgctaacggcgaccccactcaaatatcgcaagcgaacagggacttcatcgctggagacgttgtctgccctggctgcggccttggaagcccgattgtcgtcgcctctggtcgctccaagtccaatccaaaacacattacgagccaacctcatttccgctttcccgagcatctagagctctgcgagttcgaggccgatgggactacttcatccttggatgaccatcttgttacgtttagctcgaccaaatcagcgctgacgagaatggttggagacagggtttccaaggggatcgaactgggtatttttagccaggagaccatgcgcaacatgcgccagtggtttcttgaagtcagacggaagcactcctataggtgcgacatagaccaagccttcctcgccgagatgtttaggctacctcatgactaccaatcacccttacccaagttcacgcctgcgatggccaggcttccggacttcgatccaaacgagttcggaaaccagaaatttatagatgaaaacgcggacatctatgaggtccttagtcgtgatcgccatgccgtctatttcatgcgccagaaccaaaacatcatcaccacccgcgttaagcgaaatgcgggcgcactgatttttgacccatcctcaacccaactggaatacagacaagtcagacaactggcgcatttcatcgttggacaggagcggtccgtcaagtggccttccaggttcctttccgatgagcgcaagcctctatacagcctagtctctgccttctctgccctgcttctcttcagcaacaatggcgacatggacagagcgattgaggcttacgtcagcattcggaccagcggggaccctatcgatcgaatgggcggcaacatcattggcctcaacccattttttgaccacggggtgttgtcggccattgccatggcgcatgaacttagaaaagttcgaccgaatggcctggtcgtaagcagccgtatcgagcaaataaaaaatgaaatacgttcgcttgtattccctcgatag

SEQ ID NO: 518384 - DNA, 741 bp, Stenotrophomonas maltophilia
atggcaacgaactcgcgcatcgaatggaccgaagcaacgtggaatccggttgtcggatgcacgaagatatcgcctggatgcaagcactgctatgccgaggtcatggcccgacgcctacaagctatgggcactcctggctacgaacatggattcaagaggattgctctgcgcagtgagaagctgagtgaaccacttattagagctaagccaacgatttatttcgtcaactcaatgagtgaccttttccatccgaaggttcccgccaattttgtagaatccgtctttgcgacgatgctagccgcagattggcatacctatcagattctcaccaagcgagctgaccgtatggccgatttcttacagggcaaacaagtcgccgatcacatctggattggaacatcagttgaaaatagaaagcacggccttccacgcatcaatcacctgaaacgaattgacgcaaaaactcgattcctttctgcggaaccattactggaagacttgggcaccttagatttggatgggatttcttgggtcatcgtgggtggggagtctggccatggagccaggccgatgaggcctgactgggcaagatcacttcagaagcagtgctgcgcagccggagtgagcttcttcttcaagcagtggggagcccatggcgaagatggcgttcgtcgctcaaagaaggctaatggtaggcagctggacggaagaagctggagcgagatgcctacatctctttag

SEQ ID NO: 518385 - DNA, 681 bp, Stenotrophomonas maltophilia
atggaagtcataaagcgtattgtgtccgcaattaaatctgaacctgctaaggctgtagccatgataggttccgacgcagctgtggaagccctggttgacaaggatggtccacttgccatcgtgccctttggaacttcggctgtggcaataatgaagctgtttggcacttatcgagatcaccgcctgctcgagaagataaatgatttcctggatgagatctcgggcctaacgtggtcggaacgttcccgcgtcgttgatgagcttgctggcgatgcgtctaaggaggagaaggtcggacgcctgatcatggatactatcgacaagtgcgacgaggatgaaaagcctcggctaattggaaagctctttgttgcggtgggccgcggagagctcgaagcgagcgatttccttcggctttctagggtcattaacaggtccgaagttgatgatttgcgctctctggccacttccgatggcctgtctggtgtggatgaagagcggaagtacgctctacaggcggtcggccttgcccgttgggaaacccagactcctgagtccaacacaaatgcgtatgagagtacgtacgacctcgcaagaattctgttggatagccctcctgaaattaaatggtcgattacgagtgacgcgagaatgatcgtgaaacactgcttctccgagcactga

SEQ ID NO: 518386 - DNA, 843 bp, Stenotrophomonas maltophilia
atgcaagtgttccccgacggaaacactccgcggctgggctcggaatccatttcggccgatgaagcgaaggcctcactcgagcgagacgccagcccgattgcgaggatggcaactgagacactcgaggcgaaattcgagccagatccgagtctggatggcagcacggatcatcttcttgacggactgatcgaggcagcaggtgactcagacggcgccatggttctgcgaaggatgcgcgacagaatcaaggggccaacgcccgaagaagagccggagcctccgcttgcattcagcaggatgcccggattcgtgtggaacgcagatgcagtttcggattgggcaaccgattgcctgatcatcgaaggtgatgtcagcgtagatggcacactgcacctcaacgatttggacgaactccggtgtgtggtggtacttgggagtgtcaccacgcagaacttcgtctgtggcgggtgggtctttatccgtgacaatttgacgtgcacgcatgcatacgcatcgtcactcaacgatggaggactttttgtcggcggcaacatgaaggtcgccaccttccttgagaccggtcagtatgtacatgtggctggagacttcgaggcgacccatctggcgatggtgcagaacgagattgaggtgaggggagaggtgagctgccctgacttcgtgcagcggtccgaccgtgatcgattgccgttctgggtggatcctgggctgatcgaacaacatgacgcggagactgaggacgggcggccctatcgatactggtatccgagcggctatgacgatcggatcctcgcgggcggtagtcctgtgagagcccacggctga

SEQ ID NO: 518387 - DNA, 213 bp, Stenotrophomonas maltophilia
atgaccgggttgcgtagcgcgtgtggcagcggtgggatcggcatcgggaccggcatcgggaccggcatcgggaccggcatccggaccggcatcgggaccggcatcgggaccggcatcgggaccggcatcgggaccggcatcgggaccggcatcgggaccggcatcgggaccggcatcgggaccggcatcgggaccggtagagtcgactgttag

SEQ ID NO: 518388 - DNA, 177 bp, Stenotrophomonas maltophilia
atgttccagacccattggcacctgtggctgcagcagaccttcgatgccggctgggtgctgtcgcagatgcagttcgtcagcctgctcggctacgaaacggcctataccgcgctgatactgctttgcgcgtttggcgggcgactccgcgccgggttgtgcgtgatgctggctgcctag

SEQ ID NO: 518389 - DNA, 1146 bp, Stenotrophomonas maltophilia
atggatcgtgagcgctcggcccttcatcgtatagggccgattccggttcagatcagcccgatgaccagcgccgccctctgcctttcactcgctttgcagctcccggttgcttcagaaccgcttgtcgtagatcccgactccctgctcgcccttcaccaggcgctccagtccttcggcgagtttcaacagccctactccgcacctgtagatgtgaccgatcctgatgcaggtgtgaccgatgcaactgtcgagatctccgccgggtgtgtgcaggatggtccacaggtcatcatcctggacgccgatgttgacgactcatccgagcgctatcttgtactgagcgagccatggcaaagccttccggcgggaacgttgctaatcgtctgcggagacgatgctgttgtcatttcaacccaggacttgagcgaggagcttgcgcgagtcgagatcatgctgacatttctcgacctgctgcctggagattcggaagccagggaccacttggacagttgctcggcagtctcggattccgacgcttccggccccatcgtgaagagccttctggatcaactctgcgccagcactccaggatcgcctgtcactgacaccacgctgacactctggaagggcagatttccggacgcattgctggcactgtggcagcgcgacggtctcgcgcgctatcacgatgatcgactgacgatggtcgatcctgctcagtacgataccgtcctcgacgccttgctggcaggcagcacgctacggggcaaggatgactttcacgtatacgcgatctcaccattcggccagatgctgatctgtggcgaacgtactggcgtcgaactcacatttgaaccatatgaaggttatctatgcgcgtctgcactgatgacctccccaacaagcaacaccataagaaaccaacgactgcacgacttcctgctgacattggatgatctcgaactggatgtcctgaccgaggacgaggagccaatgttctggcgagcccgtgagatgctggggccgctggacgatggggagatttacacatcgacggagccggtgtcagagcacggctggcggccaggcagtttggtaaaacgcaagacgctggatgtgctcgccgagcttgcgcagtgtcactga

SEQ ID NO: 518390 - DNA, 2883 bp, Stenotrophomonas maltophilia
atgcagaactccatggatcagcagtggacacgttggaagagtgcgggccgaaccggggtagccatggcgatgttgttgcccgttctgacgaacactgcaatggcccagagcacatccggaaacttcgtgtgggaagagttccctgatcggatagcgaaggcggagaaggtttccgcactgggtcctgatctgtttggcgacaaggtcaggttggccaacggcgagcttggattcgagattaccgatatcgacctcccaggcaataacgcgctggaggtcaagctcacccgtacctacgacgtggtaagccggaaaacctacttcccggaagcgatgctggcggactggcagatcaaagttccccacatcagcggcagctatgctccagactgggggactggagccgatgccggcgcaccagggcgctgttcgtcgagctggttgcctgctgaatcagcgcatttcagcacgcgggagttctggggcggtctctctgttgatattcccgggggtggtggggagctgttgcgtaccgctgccggcgtgacccagccgcaggatggttcggcttacccctggacaacgtcggggcagatatttttctcctgcctgccggtcatccagaatgcgggtggagaagggttcctggcgatcacgccagacggaacacgttactggttcgattggtttgcacagacctccgagccaacgctcaagaagtatcagtatttccattacgatgggtcgttgcccaaaccagagccttggcgattcctgcagcgccgcaagaacattctgcttgcgaccagggtgcaggacagattcgggaacaccgtccagtacacctatgcaaatgcgtggaacgaggcgcccaggctgaccgcaatcaccgccagcgacggtcgccagctcacgctctcctatcagggcagcaacgtcagcagtgtcagcgacggtacgcgccagtggcagtatcagtacaacagcttgccatcgcgccgaggcctttccgccgtccttctccccgatgggagccggtgggcaatcaacttcgaagacttcacccgagcggcgctgcgatatgccgaggtgatgtcgcccgagcccggtgagatgttccggatctgcttcgagaacgaggttcccacgtcctatccttccgggaccattgcaggaacgatggtgcacccctccggtgctaccgggcggttcaccgttacatcgcttgagcatggccgtagccacgtacctctcaactgtcgtggcatcgactatacgcccggcttcggcaacaaccccaatgacgacgtcaatacctatgcgatctccggcttcagtttcacgctggccgagaagaccatcagcggcccggggctccctgtactgcgttggacgtatgactacacccccaacatcagcatctaccgatgcccggggcagccggccgggaacctggtatgcccgtatgggagtgctgctacctgtgccgcgcccccgtgtaccagtgatgattgtgcgcaatccagtatcacgaccgtgagcgggccgggtggggagtgggtccgctatcgacatggcaatacctaccgttacaacgaaggcaagctgctttcggtggaagtaggtaccggtccatccgacattgcgcgtaccaccacctaccgttacgacctgctttccaccggccagaactatcccgcgcgatatggaaccagcgtgcagttctcgggcgaggggtgggccggcgaatatcatcgcccacagctggagacgcacatctcccagcagggggccgttttttcgactgttctgggcgatctggactacttcgcgcgtccgcacgggatcacgaagtcgagcacgcttggctttgcccggaccgaaggccatggctaccgtgacaacctctcaaggtgggtcctgggccagcgggaaagcatcacctgtctcgcaccggccacttgcgcgggtcaggcaatgtcccatgtggtatttgatggcaacactgacctgccaatccagttcagggagtttggagcgcttcgtcagacactgacctatcaccccaatggcagcgtcgccactgtcgccgatggccgcaacggtcagggcgtggatacccgcatgacgctggttgactggaaacgaggcattccccagtccgtccattacggtgacggcaccatggaactggcaacggtgaatgatcagggctggatcgcgcagtatgccgacgccaatggctacgcgcgaaactacgcctacgacgccctgggacgcttgaagcaaaccgacctgccgcagggcgacacggtggcatggaattcgacgtccaccgtgttcgaggcaatctcctatccggaatacggattgcccgcagggcactggcggtccaccacccaaacggggaatcatcgtcgacaggtcttccacgatgccttgtggcggcccgttgtaacgattgaagaggatatcgccaattcccaggcgacccagcagtgggtggcgacgcgctatgacgagatggggcgtacgtcgttcacttcctatccgcggaacctccatcaggaaggcagtgcggactatgccgataccagcctgcaaggtgttcataccagctacgatctgctggggcgaccgctggcagtccagcaggactcggagctcggagtgttgagtacctacaacgagtatctgtccggcttccagacccgggtgacctcgcccaagggccagaagacactcctccgctacatggcgttggagcagcccgtcgccgatctgccggtctatgttgaagagccaggcggtgtgatcaccaccatcgagcgggatatctacggtaagcctgtggagatttcgcgcagcggaggtgctcagtga

SEQ ID NO: 518391 - DNA, 522 bp, Stenotrophomonas maltophilia
atgccaagtactttctatccagatgcaacgtcagaagccgagatgcagaacgcggtcatggtcagccttgctcgcctgcaaggcggtgggccatcacctgcagagtatgagtacgtattccggcgcaacggcgagcgcgtcggggtcgccggggtgagcggagggttggattggcgtatcagagaagaggagcattgggaggacatttattcactcgacttcacacatccgcagtcattgagatgcttgctcgaagaggagtcagccctaggcagcaccgaggacgatttttcctttctgcgcaggatcgttcatgctcttctgtcggccgcaggctccggcgtccggtcacggcaccatgtgcgctatgtcgccttgaccacgcaggatgccttggctggcgccggcatgccggcgaatgcgcatcacgtactggattccctggaaggctatctgctgctcgcagttctgcagattccgccaggggatcaagtgaccagcagcacgacaagcacgacctga

SEQ ID NO: 518392 - DNA, 870 bp, Stenotrophomonas maltophilia
atgcatattcacggaaacaacatccttcaaaaagagcgagataaccgcaagtacgggtctcctaagcatcgcgtgcttctggctgaaattcgtcggcgttatgaggtatggaaagctgcgaatgcggagataaaggggcctattaatgtttccgcgccagcggacgcccaagctctagcggacagagtgggtctactaaacgattacaaggattttattgaggaagcgaggttcgtaggggcattcgactcgaggtcaaatcttcaatcctcggtcctcgaggagttcatgtactatttgttctccgatcttgtgaaatccatttctggggatgcgctggttgggaagtctcactcattcaaagatgttttcttccgggctcctagtttttccgcaatgcttcaatctcctcattctttcattgaaaagaaggaccatgactttgccattggagtttcagttcgtgctgatctgaaaactaagggggctgcacgcggtgagatcgaacagtgggatcttcccgccgttgcgattgagtgcaagacatacttggacaagaccatgctccaggatgtgtctaccgcggcggaggagctcaagaggcggaatccaaatgcgatttatatcgttgtggctgagtggctaaagctgactgagtcagttaatataaagaaattgaaagttgatcaaatttacatactaagaaaacagaagaatactgatagggagctccgtcttctgccagggtatgttaagaaccctattcatctggacgtggtggagcatcttttttccacggtcaaaggacacttgacagttccgtgggacggtactgtggcggcaggtctcgcacggggtattcttctctaa

SEQ ID NO: 518393 - DNA, 1182 bp, Stenotrophomonas maltophilia
atgaagaaaactattgttgatctgtttgctggagcgggtgggtttagctgtgggtttgagatggctggtgctgaaacagttctggcgatcgaatcggatcggtgggcctgcgatacatttgagtacaatcacccgtctgcgaaagtgctgtgctcggatgtgacgaagatcgagtgtggagagtttatttctaatctcggggggcggcgcgttgatattgttattggagggcctccttgccaaggattctccattgcaaacagaaagggcggagatccaaaagatccccgaaattctctgtttatggactatgttaggttggcatcgtctgtaaatccttccatcatggtgatggaaaatgtcccaaatctggttaaggctaagacggcatccggtgagttagtaattgatgtgatacgcaggaccatggaggattttggttatcatttttactcggcaatccttgctgctaccgatttcggggtccctcaaattcgtcggcgactcttttgtattgcgtcaaaagaagagctgaagaatccatttcctaaggctagtcaccatgtttctggtgaagaaggtctgttcgaaacggcagaaactctccgctgtccaacgctttgggaggccatttccgatttgccggagctatccgctgcagaagggggggaggtaatgccatattcaatgcctgcccaaaatgtatatcagaaatggataaggggcgcggcggagagcatctataaccacaaagccatggctcatggcaaaagaatggttgagcgctttgcctctatgaagtggggtgactcggtgaatgatgttccccatcatctgaaaccacggcgccggaactctagcgagattcgtgaaagggcgtatgaccagaacaatagaagaatgtccccggatgtcccttgtcataccattccggcttccttctatgcaaactttgtgcacccctatcagaatagaaattttactgcgcgtgaaggcgctcgtattcagagttttccggactcatttaagttttttgggaagccaacagtggtaagtcataagctgctagggcgagaggatcgggcggatgagcaattcctttgtcagtacaatcaagtagggaatgcagtccctccgttgatggctaaggctgttgctgaaaatttgatctcacaactttga

SEQ ID NO: 518394 - DNA, 297 bp, Stenotrophomonas maltophilia
atgcgcggcccgggtctccacacccgtagcccgcgcctcctccgaagatacgccgactcggatctgcatcacgccgttgctctccgagttggactgtggcgcaacaagcgaagcctggaaagcggacaatccaacccgatcatgctgggcagcatggctcacctcgtgaccgccccccagagcaggagactggatctccccggaggatttgacgcgaagtccagaggtgacatcaatactgccgcttcgtcgccgggcggtgacaacctgtcgccggacggcttcatgcggcattga

SEQ ID NO: 518395 - DNA, 645 bp, Stenotrophomonas maltophilia
atgaccgtgccaccccagctgtggccgaccagcaccaccttgccaggcgcagcggcaatcgcacgacgggtggcggcgacgtcgtcggccaacgaggtgagcggattctgtacggccaccgccggcagcttccagtcatgcagggtactgatgaccttgctccagctggagccatcggcgaaggcgccgtgcaccaggatgacggtgggcggtgcagcggtatcgacctggctagcgaaggcggggacggctgcggcggcaagggcgagagcagcggcaagcaacgaggtacggatcatgggtggcactccggtgttgggaatggccatttccgcctgccggtgtatcaccgctgtttctccgctgcgcggagttgtaccggactgtagggcgcaggcgggtttctacagtgggatacattcgcgcgccggtcctggctgggcgctttcgggtgaatatcgctccccgcacgcgggcgcgcaacgccccgatgtgcgtcaacgcatcgtctttgtatctgactgtacgaaaccccggccgcgaccacagtcgctgacaaaaccccgggcaacggcacacgttgccgatacctgcgccgcctggaatggcctccatcgaccactggcccgcaggacaccaccatga

SEQ ID NO: 518396 - DNA, 360 bp, Stenotrophomonas maltophilia
atggatctccttttggtcagctattgggatcgcaatgacaaggccaaatcctatcttcgtaggttgcctgtcggcgggcacaagcacctctttgctgtgaatagccgcaacgaaggcttcttcttggtctggagcgctccagatcagccctccatcctgacgcggactgtgttcaaagagattgtgcaagaagcaaaggcggtcggtttggcggggcgttatcacgtctacgccgctttggcgccctacacgggcagcgacatcgagttctatcagatcccggacaaagttctggagcacattggctttaacgcccgcgcggacgcttacaacaacgatggtggcatggatgcagattga

SEQ ID NO: 518397 - DNA, 135 bp, Stenotrophomonas maltophilia
gtgatcaagcggcagttcggctacaccaaggtgcgctatctcggcttgatcaagaacacggcacaggtgctcaccctgttcgcgctgtccaacctgtggatggtgcgccggaagctgttggcggcacaggggtaa

SEQ ID NO: 518398 - DNA, 405 bp, Stenotrophomonas maltophilia
atgagcagcgtcaacgatctacttgacaaggtccgggaagccggaaacttcccgtcggacaatgctttagctcagcggctggggctgacccgcgcagtggtcagcacatggcgttctggccgaaatccgatcccggatgagcgaattgcgcagctttgcgccctcgggaagctggatggaccgttgtggattgcactgatccacgcagaacgtgcgcagtcggcaaccgagcgggccttgtggcgtctcatgctggacagaatgagcgcggcggctgcggtcgtcgcgctggtagcgctgtcgatgccaggtctcgcaaacgcaaaaaccgcccaaattcaggcggttagcgctgccgacaacggcggtatgtatattatgttgcgtgcctgccggcacgtgtag

SEQ ID NO: 518399 - DNA, 1230 bp, Stenotrophomonas maltophilia; identical to SEQ ID NO: 509197

SEQ ID NO: 518400 - DNA, 447 bp, Stenotrophomonas maltophilia; identical to SEQ ID NO: 508235

SEQ ID NO: 518401 - DNA, 3162 bp, Stenotrophomonas maltophilia
gtgcgccgcttcaatctttccgagtgggcgctggccaaccgcccgctggtgctgttcgcgatgctggccttcgcgctgatcggcgcgtggtcgtacaagcacctgggccagtccgaggatccaccattcaccttcaaggcgatggtggtgcgcacgctgtggccgggcgccaccgccgaacaggtctcgcggcaggtgaccgagccgatcgagaaggcgctgatgaacaccggcgagtacgagttcatccgctcctattcgcgccccggcgaatcgcaggtcatcttcatggcccgcgacagcctgcgttccaggcagatcccggacctttggtaccaggtgcgcaagcgcgtgggcgacatccgtgcgacgctgccgcgcgagatcgtcggtccgttcttcaacgatgagttcggcgacacctacggcaacatctatgcgttgaccggcaagggcttcgactacgcggtgatgcgcgactacgccgaccgcatccagctggaactgcagcgcgtgcccgatgtcggcaagatcgacctggtcggcctgcaggacgagaaggtgtggatcgagctgtccaacacccgcctggccacgctgggtgtgtcgatgcagcaggtacagcaggcgctggccgaccagaatgcggtcaccggcaccagcttcttcgagaccgccaccgaccgcgtgcagctgcgcgtgaccggccagttcaacgacatcgaagcgatccgccagttcccgatccgcgccggtgaccgcaccgtgcacctgggcgacatcgccgaggtcaagcgtggcttcgccgatccggcgtcgccgaagatgcgcttcatgggtgaagaggccatcggcctggcagtggcgatgaaggatggcggtgacatcctcaagctcggcgccaatctcgatgccgagttcgagcgcctgcagaagaccctgccggcgggcatgcagctgcgcaaggtgtccgaccagccgcagtcggtggaagagtcggtcggcgagttcgtgcaggtgctgaccgaagcggtggtgatcgtgctgctggtcagtttcttctcgctgggcctgcgcaccggcctggtggtgggcgtgaccattccactggtgctggcgatgaccttcttcgtcatgcactacttcgacattggcctgcacaagatttcgctgggtgcactggtgctggcgctgggcctgctggtggacgatgcgatcatcgcggtggagatgatggccaccaagatggagcagggttacgaccgcctgcgcgcggccagtttcgcctgggagtcgaccgcgttcccgatgctgaccggcacgctgatcacggcggccggcttcctgcccatcgctacggcggcctcgagcaccggtgagtacacgcgttcgctgttccaggtggtgaccatcgcgctggtggtgtcgtggatcgcggcggtgctgttcatcccgtacctgggcgacaagatgctgccggacctgttcaatccgcagccgccgaagccgggcagcctgtccgcgcgctggcatgccaagcgccagcagtgggccgaccgctatccggcgctggccaacctgatcgcgccgccgcagcacgggcacgaccacgatccgtaccagcgcccgttctaccgcagcttccgtcgcttcctcgatggctgcctgcgccaccgctggtgggtgattgccgcgaccattgccctgttcgtgttctcgctgatgatgttccgcttcgtgccgcagcagttcttcccggattcgacccggccggaactgatggtggacatcgagctggccgagggcgcatcgctgcgctcgacccaggcccaggccgagaagctggagaagctgctgtccagccgcgagggcatcgccaactacgtgtcctacgtgggcaccggttcgccgcgcttctacctgccgctggaccagcagctgccggccaccaacttcgcccagttcgtggtactggccaaggacatcaaggcgcgcgaaagcacacgtgactggctgctgcacgaggtgattccgaagttcccggacgtgcagatgcgcgtgacccgcctggagaacggcccgccggtcggctatccggtgcagatgcgcatttccggcgagcacatcgagaaggtgcaggcgatcgcgcgccaggtcgaagccaaggtgcgcgagaacccgcacgtgatgaacgtcaacctggactggagcgagccgagcaaggtggtgcggctggtgatcgaccaggagcgtgcgcgggcgctgggcgtgagcagtgcccaggtcagccagttcctgtccagttcgctggccgggcagtcggtgagcgtgtaccgcgaaggcaaccgccagatcgagatgctgctgcgtggcccggccgatgagcgcaaccagctggagctgctgtccagcctgtcgatgccgaccgccaacggcggcagcatcacgctgtcgcaggtggcgacgatggagtacggcttcgaggacggcatcatctggcaccgcaaccgcctgccgacggtgaccgtgcgtgccgacatcagcgatggcatgcagccgctggacgtggtgcatcagatcctgccgacgctggatggcatccgtgccgagctgccgaacggttacctgctggaaaccggcggtaccgtggaggattcggcacgtggccagaactcgatcaaggccggcatgccgctgttcctggtggtggtggccacgctgctgatgctgcagctgcgcagcttctcgcgtgcggcgatggtgctggtgaccgcgccgctgggcatcatcggcgcgacgttgttcctgctgctgttccgcgcgccgttcggcttcgtggcattgctgggcacgatcgcgctggccggcatgatcatgcgcaactcggtgatcctgatcgaccagatccagcaggacatcgatgccgggcatgaccgctggcattcgatcatcgatgcgacggtgcgccgcttccgcccgatcgtactgaccgcgctggcggccgtgctggcgatgattccgctgtcgcgcagcgcgttctatggctcgatggcgatctcgatcatgggcggcctgatcgtgggcacggtgctgaccctggtgttcctgccggcgttgtacgcggcatggttccgggtgaagccggacgaatccggggcgtaa

SEQ ID NO: 518402 - DNA, 237 bp, Stenotrophomonas maltophilia
atgcgtcacctggccctgcccttcttctgcgtcatctgcctcggcgtcgccttcggcgaagcgctcgccaacggcatcacctcgcgcttcggtgtggccttcatgggcgccacgctcctttggggcgtcattacctgcatcgaactccgcgcagcctggccgccgttcgctgcggaaatgcagcgccgccgcgccgagcggcagcccgcgccgcttcccgccgacgacacccactga

SEQ ID NO: 518403 - DNA, 906 bp, Stenotrophomonas maltophilia
atgttctttcgcaacctgaccatgttccgcttccccgtctcaaccgacttctccgagatcgcgacgttgctgccgcatgccgttctcaagccggttggggcccttgaaatgaactcgcggggcttcgtatcgcctttcggccgcgaggagacggaacagctgttccacggcatcggcgactggctgtggctcaccattggcgctcaggacaagatcatgccggcatccgtggtcgccgatcgggtcgaagagaagctcgctgccatcgcaagcggcgaaggccgcaggccaggtggccgagagcgcaagcgcttgaaggacgacctcctgcatgagctgctgccgaccgccatggtgaagtccagccggcatgatgtgtttctggacacggcccgcggcgtcgcgttcgtggacaccagcagccgtaaggccggcgagtacgtcatgtccgacattcgcggcctgctcggcagcttcccggcactgccgctgaacgccgaagtcgcaccgcgttcgatcctaaccggctggatcgccggcgagccgctgccgaccggtttgagcctgggcgaagagtgcgagatgaaggatccggtggaaggtggcgccgtggttaagtgccagcaccaggaactgtgctgcgacgagatcgacaagcacctggacgccggtaagcaggtaaccaagctggcactgatcttcgaagactcggtttccttcgtcctgggcgatgacatggtcgttcgcaagctccgctttctcgatggcgctctcgacaagctggagggcgccgacgaggacggccgacgtgctgagttcgatgcgcgattcgcacttcagatcggcgagttgggtcgcgttttcgacgcggtggccgccgccttccgtatcagctccgcagactga

SEQ ID NO: 518404 - DNA, 846 bp, Stenotrophomonas maltophilia
atgaccatcgaaagcgaaaagaacgcacctacagcgcgcgccaccctggcggacgtgcagcccggtgggagggtgaggctgggggatcagaccgagcgggcgcggtttgaggagtgggcacaggtgggcttggagcgtgacaccacaggtgaatacacgtcccgcattacgcaaatggcgtggactgcatggcaagccgccttctccgcccagccctcccagtccagcagcatcgacctggaagcaatgctcgctgcctgcgttccagggggtgatatggccgatccgcaggtgatcgctgacaacatccgccactggttcgccgcccagcccttcccgggtggtcaggaggatgacagcgatctgttggcagagctacgtgacgttgaggactacttcgaagacgtagacccaaacccgatccatcttgcaaccgttcgagctgcaatcgaagccctcgccgcccgccagccggtgggggagccggtggttatcagcaagggtgcgcgcgagtgcctgcaggaaatcatcgacaactgctggcgcgatgaagatcaggccgttgcgagcgagataggccggctgatgcagggcccgctgtacaccgcgccgcccgccctgcccgcgcaggccgtggacctggggccgggccttgatgctgccgcgagcctgatccagaagaaggccgacgactacgcagatgaatttggctacgacgatatgggcgccctgagcttcggtcgtggccatcacgcggaggtcaagtcggcccaccacttcttcatgctggaactggtggacgagctgcgcgccctgatcgacagccaggcggtgcgcaatggctga

SEQ ID NO: 518405 - DNA, 303 bp, Stenotrophomonas maltophilia
atgaagacgattaccaacaacaccgtttgcctgtgcccgtactaccacggcccggtgtggtcggccttcggcctcacccgctccgcctacctggtcgtgccccgccgcaccctgcagtccatgccgatggaatggcagcagcgcttcgtggcgctgatggatgaagcgcacgccctcctgccggccgacgcattcccctcctacaccgtgcagcgccaggaccgcggcaggttcaccaccgacccgctccgtgactaccgccacaccggccccatcgctcccaaggaatccaccaatggctga

SEQ ID NO: 518406 - DNA, 195 bp, Stenotrophomonas maltophilia
atgaccggcttcaaccaggccaagcacaccgcgcgcgtgttgctctcggaatgccgcgcacgccggaacgggcacggcttctggttcgccttccgcgcagcacagcgcgcgcgcatgcgcgcctctggatctgcaccactgccagcagcgccggccacgccggcccgccccgttcaacaggatctgttcgcatga

SEQ ID NO: 518407 - DNA, 588 bp, Stenotrophomonas maltophilia
atgaccgcagcaagctaccccacgagcccggcagccaccgttgacgcgagccaggcatcctcgcctgtcgccgcggtcatcgccatcatgcgcaggctcggcgccgccggcgcgcccgtgtcggccgaccaggtccgcgagtggggcgacaccctgctgcagcagctgtactcgcagccggccgttcgctgggagtaccggcaccagggcgactctggcccgggctgctggatcactgccacccctgagcacgtctaccacgcccacaagcgtggctggatcgtccgcgctctgtgggaagcgccgcgcgtgcagaagccggagcgtggccactacttcaaggccggcacctgcacgaagtgcggcgacccccaggactgggccggccctgattgcgtgccgctggtcaacgcggatccgcgcgccacgctccccttcgacccccgatggctgcttgagccgctgcggtggctgcgcgacgcccgccccggcggcctcaaccgctacgaccgcgaacaccgcgccagacaggccgctttcctgatcgaaaagttggaagcccaatatccggagtgcaagaaaccatga

SEQ ID NO: 518408 - DNA, 291 bp, Stenotrophomonas maltophilia
atgacccagaagcagatcagccatcccgaaggcctgccgaactgtgccgccggccaccgcgcgcgccacatccacgacgagcgccgccccagcgcgggtggcggccacttggtcgaatgcgcatgccgagcgaccagcaagagcgagaaccccgacactgccctggccgagtggcgccgcatcaaccgccccgcgcgcagcgcgcgcaaggctgggccggcactgccggacaacgtgctgcaattgccgctcctggcaacaccgcgggaggtgcgcagtgtcggcggctga

SEQ ID NO: 518409 - DNA, 978 bp, Stenotrophomonas maltophilia
atgagcgccaaagaagctgacccgatcatcgaaggcctgtgggaacgccttcattctgatatcgatctctcgcagcagtttccagatgtcacgcccaagctggcccattacacgaacctttacactgccgaagcaatcttcaagggcgacgaattctggttatcccatccattcctcatgaatgatcgagaggagttgcgatggggaattgtgaacggaactgatcggttcgtcgaaagcaaagcaatatcagcggctgtggcttcggaggatcaccacagaatcgtcattgaagccttgcaagacgcaagggacctcgacggcacgaagcactcgtatgacacttacatcgcctgtttcagcaagcatgatccaggtgatagggacggtctcctttcgatgtggcgtgcttacggcgctgacggtgggggtgtagctctagttttcgattcgtccaagcttacagaggacgcaggttcaccgctcataattgctccagtggagtaccggtcaaccgaggagcgcttcgagtggatggattgggcgatcgagcacacggcgcatgccatcaaagcgctcggtccatcagccgatccctctgaccttgtaagagctgttcaccagtactacgcccgtctacgtagggccgccctgttctccaaacacaaagctttcagcgaggagaaagagtggcgaattgtctacgatccgactgctgatgagtcaggcggcaagtacaaggagcagatgggctacgcgatcacacccaagggaattcagccaaagcttaagctaaggctgggtgcaagggcagtcggcaagccactgcacttggaagatattgttgaagcgataatcttggggcctactggaggttcgcttattgccgagcacgcaatgaggcgtctgtgcgtcgccgctggcaagccgaagcttgccagcaaggtagtcagttcaagcaccccctacaggccctag

SEQ ID NO: 518410 - DNA, 441 bp, Stenotrophomonas maltophilia
atgctggtcgaatgcaaggtgagccgttcggacttcctggctgaccggaagaagcgctttcgcgccaaccctgagcgaggcctcggcctgtaccgctacttcatggcaccgaaaggcctcatcaaggtggacgaattgcccgcgcgctggggcttgctggaggtgagcggcagcagggtatcggtggcggccggcaagcggccgaagacgtgggccggggagaacgatccttgggcgtttaccgagcggtacgcccagggcgagacgcagatgctgctgtcggccatgcagcggatcaaggtccgggtaggcgccggcgactttcacgacatgctgcacgagcgcctgatgcgtccggtggagcggcaaggcgatgcagacagggcgaaggcactggagggttggacaaaagctgtcgccgcggcggtggcccatgactga

SEQ ID NO: 518411 - DNA, 387 bp, Stenotrophomonas maltophilia
atgactgaccgcgcgctggagctggtgcttccctggccgagcaaggatctgtcgccgaattcccgcgtgaaccgttggcggaaggctgaggcaacggccagtgcccgccggacggcttcactgattgcgtacgccgcgggctggaagggcatgcagctgcccgccggccgtttgtatctctggatcgattgctaccaggcgccgggcaagaaactgccggacgacgacaacatggtcggccgctgcaagccctatcgagacggcatcgcgcagatcttggggatagacgacggacgctttctgtcccggcctttcgtccacgacgaacgccggccgggtggccaggttgtgatccgcatcacgggtgggcccgatccgggcaggtag

SEQ ID NO: 518412 - DNA, 192 bp, Stenotrophomonas maltophilia
atggacctgacccgctatgacgacaaggcgctggagctgctgagcggcatccagcaggagatagccgaaatgcgatggacccgggcgtggacggcaccgggccaacgcggcaaggccgagcaggcgctgcgccgatcacgcgcgctgcgccgcgaaatcaaccgacgagatcgattaagggggaagggatga

SEQ ID NO: 518413 - DNA, 711 bp, Stenotrophomonas maltophilia
atgaaagacgcacgcgagttgctgtccagccgcacaggcgcgaagacggtcaattttgaatccagcggcgctggtggcaagcccaccctgaccagccaggacgttgctgctgctttggcatatgtgccagctgggctcgggcgggagttgcttgaggctctgtggtggcccgaaagcggcacaaggcggcgtgacgcgctgcgccaagccgtgatcgggttggttgcacccgagttcaccaggcagatgcaccacctagccacggtgcggactgagttcggcatcgccaaagcgtgcatggggtggggtggcaaccacgtgacggacacgcagcgtcgcgaactgctgaggaccgaacaggcgctggatgaggcgcgcgctgcggcttggccgaacaacaccatggagcagcttggggtgctggcaggcgcggtcattgcggagatggccagctgtggctgctgcaagacctgccaaggcacgcgggttcaggctgcgccgacggggagcggagtcattgaatgcgaggcgtgcggcggcatggggctggagcagctcagcggccgcaagcgtggggcagcgatcggtgccgacgacgctgcgtatcggcggttctggcgtccggtgtacgaatggatgctgcagcgcatgcgcagtgcggagcatgttgctgccgagcagttctcccgggcgctgaatcgcgcggcgtag

SEQ ID NO: 518414 - DNA, 489 bp, Stenotrophomonas maltophilia
atggccacgatcaccgcgaaagaggcaggtggaaccaacgtcctcgccttcctggacatgctggcgtggtccgagggcaccgataacggcaagcaggcgaccaagaatcgtgggtatgacgtgatcgtcggcggacagctgttcgggagctacgccgatcacccgcgagtgctggtggacctgcccaagctcaagatccagtctacggccgcaggccgctatcagctgctgcgcaggtactacgatgcgtaccggaagacgttgggcctgaatgacttctccccgctgacccaggacaagatcgcgctccagcagatccgagagcgccgcgcgctgcccctgatccaagccggcaagattacggaggccatcaaagcggtcagtaacatctgggcgagcctgcccgacgctggctatggtcagcacgaacacaagcttgccgacctgttggccgtttatcgaaaggccggcgggacggtggcgccgtga

SEQ ID NO: 518415 - DNA, 288 bp, Stenotrophomonas maltophilia
atgcgcgtcatcgttgtcttgaccgcagtgctgctggccgcgtgccaggcggcgcctaccaagccgaatccaccgccggcgacggtaatagctgttccggtggcaacgtacgttcccatcgatccccagttgcgtaagcggtgcaagtgggtgcgggacgccgctccatcggccgtgttcgacgtgagcaatggccggaagcgctgcctcttgcagtacgaagcgcagctggacgccatcgatcagatcgaaggcaatccggtgccaggtggaagtgatggccgataa

SEQ ID NO: 518416 - DNA, 213 bp, Stenotrophomonas maltophilia
atggccgataaccgtctggatcgcctgttggcgttggtcgagaggcagcacgccatcatcgaggaacagggcaagcagattggccaacagtccgaaagcatcgcgctgctgacacagtcagtggccatgctgctgggcgaggaatttggcacaccggtctctgatgatgcagagccagagcggcgtgcggatctggacgggaatacctactga

SEQ ID NO: 518417 - DNA, 426 bp, Stenotrophomonas maltophilia
atgggcaatccccgcaaaccaacatcgctgaaggtggtggcggggactgatcgtccggaccgcgacgcaccgctggcagtggatcttccgctggtttctgatgtgccgctggcaccggactggctaccgaacgcccacgccataaaagagtgggatcggctcgcgccaatccttcatgccaacaaactgctcaccgaagccggcctttcggcgcttggtcagttgtgcgcgctgcatgggaacaccgtgcagatgtacgccgccggccttgcgcccgtcgcttccatggtgtcgcagctgcgcggccttatgaatgacttcggcctgacgccagttgcccagggcaaggtccggccagctggagattctgcgaagcaaggcaatgccttcgcgaacaacggccagaagcggaagggtcgtgcgtga

SEQ ID NO: 518418 - DNA, 1695 bp, Stenotrophomonas maltophilia
gtgcgtgactatgtcggcatcgccaaggcctacgcagagaaggcgatagccgacaagaaaggaaagcgattcggaaagctgatccgccaagcggcaaagcgattcctggctgacctcaagcgggcaagcaggaagcgaccgccattcctgtttgacgagtggcatgcatgcgacccgtgcgacttcatcgagaagttgcctcacgttgagggtaagtgggaacgccctgagatcgagctgcacgaatcccatatatttttcgtggttcagctctttggcttccgcaaccatgacggaagcaggcggttcacatctgcgcttttcgctgtggccagaaagaacgcaaagtccacgctggccgctgcgatcctgctttactgccaatgctgcgaagaagaggaaggcgcgcagatcatctccgcggcgaccaccggcagccaggccagaatcatcttcaacgtcgccaagcgcatgacggagaagacgcccgatctgcaggaggcattcgggttggcctgctgggccaatgcgatcagtcgggtggagacgggagcgaccttcaagcccatcaacgccaaggcaagcacgcaagacggcctcaacccatcccatgttgggctggacgagatccatgcgcacaagtcagccgacctcctgaacgtcctcacatcggctgccggcgcacgcagcagccctctctggctatacaccactacggaggggtacaccaacccaggcccctggggcgagctgcggcagttcgccaagcaagtactggcgggaatcctgggagatagttccgaccactttctggtggtcttttacgctgtcgatgaggaggacgacgaatttgacgagggcgcctggcagaaggccaaccctctgatggacgcaaatccgcacctgataaaggcgatccgcaaggaggccgttgaggcgcggcagatgccgtccaagcttgctgaattcaagatcaagcggctcaacaggccggcttcttcggccactggctgggtggacctgaccaagtggcagcggtgcggcgggcatgtggatctggcttggctcgaaggtcacccgtgttggggggcgctcgaccttgcgagtaccactgacctgacgtcttggcgcctggtatggaaggtggatggcgtgtacttcacctggggccgaaggttcgtgccagaggacgccgtgcgcgtgcgcacggagcgaggcgtggtgccctatgccggttgggtagccgccggcctgatcgaagtgacgcctggcgaagtcaccgactacgaggtggttgaggcgcggatgcgcgaggacattgagcgcttcaagccaacggcggtcgcatacgacagatggaatgcccaagagatcagccagcgactgctggcggacggcattccattggtggagttcaaccagaccacgaaaaactatcaccctgcgatgcaggaactggagcggctctatatcaagagagccattcagcacggaaatgatcctgtattgaattggtgcgcatccaacctcttggccgtaaaggacgggaatctgaatcagaagcccgacaagaagcgttcgccagacaagatcgatgacatggtttcgctgctcatggcgattggcctctccattacccctgaagaagacgagggcgacctcgacggcttcttctcaaatccaatcgtggtgtga

SEQ ID NO: 518419 - DNA, 1305 bp, Stenotrophomonas maltophilia
atgacgaaggacgcaaagcagaaaggtcccggaaagatcaagtcatcggtcctgcgctggctgggtgtgcccatcggtctcaccgatgaggccttctggtcggcttggtcgggcggtgggtccagcgctggcaagaccgtgaatcagcggacggtgctccacctgtctgcagccatggcatgtgtgcgcctgcttgcgcaggtcattgcaacactgccagtcgggttctttgaacggaagcccgatggcacccgggtggctgccaacagccatccgctctacgagatcctgcacaaccagccaaacgctgacatgaccgccgtgcagttctgggaggtggtcatggtcagcctactgctctggggcaattcctacgcggagaagacggtcagcgcaggccgcctggtcaacttggagttcctgcagcctcagcgaatgtcggtgaggcgacttcagacgggtgagctcgagtaccggtatgcggggacggacggacggcagcgagtgatcccggaagaacggatgtggcacatccgtgggttcagtactgacggatcgatggggatctcttctattcaggccggcgcccatgtgttcggtgcggccatggcagcggacgaggcgtcgtctaaggtgtttgccaacgggatgagcgtgggcggcgtgctgaccacagaccagatcctgagcgacaagaacagggcaaccttccgcgagaacatgcaggccgagttcgcgggtgcgatgaatgccgggaaaaccatgctccttgaggcgggcatgaagtaccagcaggttcccatgaacccggaggatgcacagttgctggcaacccgggcgttcaacgtggaagaaatctgcaggtggttcggcgtcccccccttcatggtggggcacgcggagaagtccaccagctggggtacgggcatcgagcaacagatgatcgggttcctgacattctcgctggcgccgtggttgcggcggatcgagcagtcgatccggaaggatctgatgccggccactgagcgcgccaggtatttcgccgagttcgcagtggaaggcctcctgcgcgccgacagtgcagcccgcgcggccttctatagcacgatggtccagaacgggatctactcccgggatgattgccgggagcgggagaacttgccgcgcaagggcggcaaagccgctgagctgaccgtgcaatccaatcttctgcccatcgacatgctgggctcaaacacaggtgaccaacaggcccgttcggcgctgatggcctggctgcaatctgacgatgggaaggcaacatga

SEQ ID NO: 518420 - DNA, 687 bp, Stenotrophomonas maltophilia
atgaatcgaaaaaatgcaaccctgaagatcagggattttgacctctcagtgaaggccgtcagtgatgacggccttttctctggctacggctcggtgttcggcacggtcgattcctaccgcgaggtggttgcgcctggagcattcagcgaaagcctggccgagatcaaggccaagggcaggccggttccggtgctgtggcagcaccgcagcggtgagcccatcggcgtttacaccagcctggtggaggacgcgcatggcctcaaggttgagggccagctcatcatcgacggtgtggcccgtgccaaagaggcccacgcgctcatgaaggctggcgcggtatctggcttgtccatcggctactacgtccgcgaggacagctgggatgaaaaggagcgagtgcgcacgctcaaaaaggtcgagctggttgagatcagcttggtcacatttcccgcaaacgacgacgcccgcatcgatgcaatcaagtcgaaattggcgcatgggtcgctgccgaccatgcccgaatttgagcagatcctgcgcgaggcaggtttctcaaaaagccagtccgcggtaatcgccaaccgcggattgaagcacctgctggaccggagcgagtccgggagcaaggcgactgacgacaccacggctgtccccgctctggggcggctcaacctcccgactttctga

SEQ ID NO: 518421 - DNA, 1248 bp, Stenotrophomonas maltophilia
atgtcccgttacaccgcactggccagctcgattggccgcgaaatgaagaacgcccagcagctggacgacacgctggagctcaagggcctcatcagccagctgaacgagcgcgacaacgaaatcaagctgttcgccgagaaggccagcaacgagatcaaggagcacggcaaggtcctggacgacaccaagggcgcgctggagctgctctccaaggggggcatcgagatcaatgcccgcctgctggaagtggaacagaagctggcgcgccgcttctcggccaacgatcccgttgacctcaagagcatcggcgagcagttcaccgagcacgagggcttcaacgacctggttgccaaggggcgtggcatcgcccgcatgaacctgaaggcggtgacctcgatcaccagcgcaaccactggcaccggtggcgttggcgcggccattcagccgacgcgggtccccggcatcatcgccggcccggatcgtcccttcacgatccgcgacctcatcatgccgggccgcacgggctccaacgcaatcgagttcgtgcaggaatctggcttccagaacatggcggccccggtggcggaaactgcccagaagccgcagtccgacctgtcgttcgagctgaagaccaccacggtcaagaccctggcccactggttcctggcctccaagcaggttctggccgacgtgccgctgctgcagagctacattaacggccgtgccatctacggcctgaagtacgtggaagaagcccagctgctggcaggcgacggcaccgggcagaacctgctcggcctgatcccgcaggcaacggcgttcagcgacaccctgcgcaaggctggcgacaccaagatcgacaccctgcgtcgtgcgatcttgcaggtccgcgtcgccgagtatcgcgccagcggcatcgcgctgaacccggtggactgggccgatatcgagctgcagaaggatgagcagggccgctacatctgggtgaacgtggtggaaggtggccagccgcgcatgtggaagcttccggtggtggattccaccgcggtgccggagggcgaattcctggtcggtgcgttcgatatcgctgcccaggtgttcgaccgcgaggatgctgccgtcgaagtctccaccgaggatggcgacaacttccgcaagaacatggtgaccatccgcgccgaagagcgcgtggggctggccgtgtaccggccggagtcgttcgtgcacgggtcgttcgaagccccgtaa

SEQ ID NO: 518422 - DNA, 399 bp, Stenotrophomonas maltophilia
atggaattcatcgcattgaagggtttcaatgaccccgaagctgagggcggataccagaagcgcgggaagccctggaccggcccggatgcgcgcgcaaaggaactgcggctgctgggcttgattggtccgaccgagggcgaaggtaaggccgctccaacgccgtcgaacaagatggcgccctcgaccgccaacaaggtggcggcggccacgccggggccgggtgtagcgctggtgcgtcagaaggccgagaaggtcatcgccgccgtggcccacgtgacggatcgtgcaacgctggaagacgcgcgtgccgccgagatcgccaagggcgagaaggcacgtgaggctgtcctggcggcaatcgacgccgcgctggcggccatgccctcgtcgcaggtgtaa

SEQ ID NO: 518423 - DNA, 288 bp, Stenotrophomonas maltophilia
atgctcatcgaactggctgaggcgaagcaaagcctgccggtgatccacgacgctgacgacgcgctcattactgggcacattgaggcggcgcaggactacatcgagcagtacatcggccggtcggtgccctggctggatggatcggatccgcctgcgttggctcctgtcccccctgcgatcaggcaggcggcccacctgctcgtcggggactactacttcaagaaggacgaaagcgacctggctgtccgccggttgctaaatccgtaccgcgtttcttggggggtgtga

SEQ ID NO: 518424 - DNA, 312 bp, Stenotrophomonas maltophilia
atgcaccgggtcaccctgcaggtggaagagcgggtgcgcctgcccctcggcggcgatggaacgtcgtgggtaaactggaaaaccgatattccggctgaagtagttccactgtccggacgagagttcaccgccgcaaccgccgagcatggccaggtcagcgctcgtatggaggtgcccttcctgcccggcgtggtcaacacaatgcggctgcttttcgacggacagatctacgcgatccgggcggtgctgcctgatcctacggcgcgccggcatctgaccctcatggttgatgcagggctctccgatggctga

SEQ ID NO: 518425 - DNA, 504 bp, Stenotrophomonas maltophilia
atggctgagcagatcgagatccatggtctggaagggctcctggcatctttgaaggcgctgcctgtcgaactgcagggcaagccgctgcaagccgccatgcgccgcggtggcaacgtgatccgcgatgcggcgcgcggtcgcgtgcggcgagccagtggctttctggcgaaacagatcgttgttcgccgggccaacgcaaggaaccggagcaaggcgggcgtcggtgccgggggcgaatatttcaccgttggcgtgaagaccggcaagcgggcgaaatacgcgaacaccaaacgcaatcggcgccagcgccgagtcggcaaggcatacgtgcaggccgggtgggcctactactggcgatacctggagttcggcacgaagaaaatggctgcaaagccgtttctcacgccggcagcggaagcaaagggagcggaggctgctcagttgattatcgatcagacccgggaagccatcgacaaggtgatgcgggcaagggggtggcgctga

SEQ ID NO: 518426 - DNA, 360 bp, Stenotrophomonas maltophilia
atgattcctctgattcagccgttgctgcagggcgatgccgaagtgcgccgggttctcggcgatccgatccgcgtctatccaaatacagccccccagaacacggcgctgccctacgccacctggacgaccgctggaggcgcgccggtaggtgttctttctgaacgtccgcccgcggatggctggcgcgtgcgcctcactgtgtggggcaaggacaccgggcaggccaacgaggcagccatggcgatccgtgatgccgttgaggaagtgggcagcatcgagtcctacaacccgccgccggacgacgacgacacaggtgcattcgggatctccttcgacgtgcggctgctgcaccttcgctga

SEQ ID NO: 518427 - DNA, 474 bp, Stenotrophomonas maltophilia
atgggaaaggtaatcaagtccaagcacacccagatctttattgccatcggcgcggcggaggtcatcaaggtgacccgcgttcgctcgctcggcttccccgatggccaggcgtcggagatcgatgtatctgacttcgacgatgattgggaccagttcgttgccggtcgcaaggccactggcagcacgaccgtcgaggtcatctatgattcggtcgattccgaggcgctggaagagctgcaccgcaccaacgcggtcgtgaacttcctggtcaccgcgccggcgagcgagacggcgggtgttgccaagccggctgccgtcgacggcgtcatcaccccgcccaccaccgtgctgtgcaagcagttcaacggcttcgtccagaacttcgccgtcaccgtagccgacaacgacgtgtggaaggcaacgatgaccatccgtggctcgggcgccgtcgaaacccaccgtccggccccctaa

SEQ ID NO: 518428 - DNA, 375 bp, Stenotrophomonas maltophilia
atgagcaagaccaacgaaaccaccgaagcccagccgcttgagccggtgagcatcctccaggcgttcaccaacgccggcatgttcgctgcgaaggatgtgcagccggataccatcgagcttccggatggcagcaaggcgcagttctacgtgcgcgcgctgccggataccgagttccgcaacctgtacgcctccggggaccgcgccaagctgatcgcggccacgatctgcgacgaagacgggaaacgcgtcctcaccgaaaagcaggccggcgacctcaaaccgaaggtggcggccagcctgcagtccatcgcgctcaagcacgctggtttcggcagcgatgccgatgcgctgcaggaagaggcgggaaacggctaa

SEQ ID NO: 518429 - DNA, 216 bp, Stenotrophomonas maltophilia
atgtcgcgcagagagttcctgtggtggtgggagttcaacaagcgaaaccctatcgatcccgtcagcatccaccagaggcccgccgcgctcgtcgcctacatgaccgctgtgcacagccagggtggcaccaagcacagcatgcagcagttcctggagacccttgtccctcgatctgacgacgacgaggcgcaggactggtttgaatctttgagataa

SEQ ID NO: 518430 - DNA, 1968 bp, Stenotrophomonas maltophilia
atggccgataccttcgggcgctttgctgcgctccccattggccccttgctcgctgcgcgcgacggggggctgaccctcgccaccaccgatgcagctgacctcaaccgcatggcgcgatccgacgtttcgcagtcggcgggtacggttggggtcgaattcgccctgtggggagaagatgacctggtggcggtcgttgggctggtcaacgagggcgcaagcctcgcaggctatcccggcgctgacaacaacgggctgggatggaacctggctaccggctgggtcatgcgcaacggcgcacccctaaccactggcctgcctgcggtggccaagggcgacatggtcggggtggaggtcgtcattggcgacaccagccgggttcggctctacctcaacgggaccatggtgctgcagcgggacgtggtcctgcccgggccgctgttcttcgccgcctcgctggcggctacggaggcaggcggcctgtgcatggccgtcaatggggggcagtgggctgcccgcagcgctgcagcggccgccgggtggccggccgaggtggttgccgcgggtcatgcacgaatcgccgacgtggactggctgagcgcgccaggggatacaccggccaacgcgagatacgaggggctgctggccgagggcgtgtccctggtgtcggagatcagtttctgggcctggggtggtgattcgatcacccagaccgccgcggccacgtgcatggtgcacgacgccgcaggccagctcgatgctctggcgctggctggcgcatccggactggcggtgtcgctgcgttcggtggatgcaggcgacatgctggccgactcggcgcccctgttccggttctcgctggacagcatcgagatcaacgacgacggcaccaagacgctgaattttcgggatgcacacgactacctggatggcacgatcaaccgcggtgtgttcctccccaacatcgagaccctggcgtggaagccgcagccagtggtgatcggggccgtggccagcgtgccggccgccggcgccaactcggacgcgaccgcgatgttcgtggccgatggggcgctgttcgtagacctggtcatggaccgcggcgaccccatggagccgggcaccttcaccctgtcgcccgacggtcagcagctcatcatgaagtcgcccccggtgaccccggtggtggctgacgtgtcgagcgtgggggctggccagcagcccgcgacgctgcaggtcgccgtgcaggacgtgatgaaccggctggccaagtcggcgtggtcggcatccgactgtgccgccatcgacgtggccagcggctatgccggcatcggctactacgcgggcaacgccatcaccgggcgggacgcgctcaacgcgatcctgcccagctacggggcggccgcctaccaggatcctgacggcgtcctgcgcttcgcacgggtggttgcgccggaggactacaccagccagctggcgttcgtcctcgatggcgacgagctggcggaggacctgctgtgcgtgcccgacgaggccccgaacctgacccggcgcatggcctaccgccccaatgcccaggcgctggctgatgcggacctggtgacggacgtggtggacgtgccgcagtggcgccgcgacgagctgacagcgctttaccgtgcgcaggtctacggggccggcccgctgcacccgagctatcgccgcgccgatgctgcggacccggtcattgccctgttctggaacaaggaggatgcgcagcaggagatcgaccgggtggtgggcatctaccgccagcagcgcttcttctaccagctgaccgtgcgtggcgaccagtcgctggcgcctatgccggggcaggtggggcacattacctacagccgttacggccttgccgccggcaagcaggtgctggtgcggcgcgtggagagaaacccggccacgggggacgtggtgctgacggtatgggggtag

SEQ ID NO: 518431 - DNA, 744 bp, Stenotrophomonas maltophilia
atgcccgctgtggcatcggtggcgctgtccggcgccacgtggctcaccgacgaccagggcgcggccctgttcgacgggaaacccggccgggccaccagggtgcagcgaactggtgccttggccgtcaccaccaccctggcgcaggccatcattcctggcatcgtggcggtcctcggccttaacgtgcccgccggcgtggccgtgcgcgccgccggcgcggccggcaccaccgtgcagctgcccgacggcagcgtgtgcgcctggctgtttccgcagggcgcggcgcaggtggccgccgtctcggtggagatcgacaccacggtgacgaacgtgcagatcggggagattgccatcttccgcgcggtggaagtggggatctctgacggctgggccgttggcctggtggacgcgagcgtgcacaccaggacgaagggcgggcagatgaacaccgtggccggcgcgctgtaccgacgcctcaccgctacgctgagcggccgcccgaccgaggtggtgcgcaagggcgggctgtccggcacggactgggaacgagtcgcggctgcgctcggcggcggccggcgcgggtgcatggtgccgcagtacagggacatggccacgaaggcgttcgacccgatgttggcggcacgtgccgcgatctacggctacgccacgcagctgcccacggcggagaacatcagccggcagtacttcaccggatacctggagttcgaggaagttccggcctga

SEQ ID NO: 518432 - DNA, 3723 bp, Stenotrophomonas maltophilia
atgtccctctacaccctcaccgtcgacctgctgatgaagacgggttccttcgtgaaggacgccggtaaggcagagcgccagttttcgcagtccatggaccgcatgcaagctgtggcgcggagtgcggggacggccatcggcctggcgatatcgtctggcctgaccgctaccacgtcagcggccgttgcatggtctcgccaggtcgccgaccttagcgtccagtacgaccgcatggcgagcctgtcgggcagcacgtccgaggcgttccagcggatggcggccggcgcaaatgtcgtggggatcagccatgagaagttggccgatattctgaaggacgtgcaggacaagatcggcgactatgtccagaccggcggcggtgcgatggccgacttcttcgacaacatcgcgcggcgcaccggtgttaccgctgagcagatgcgaaagctgtccggtcccgatgcattggggatgtacttcaacagcctggaaagggcaaacctttcgcagtcggagctgaccttctacatggaggccatcgccagcgactcgtccatgctgattccgctgctgcggaacaacagcgctggattccggcagtggggcgacgctgccgaagcggcgggcgcgatcattgatagcaagaccacgaaggcaacgaatcggctgcgtgagatcacgcaggaagccgacctggccatgatggggctgaaggttagcgtggcggaggagctgctgccgacgctgaacaacctgactgaattcatggcttcgcagcaaacgcgaaatgccttcgccaccgctacaaagtgggtggccgagctgacagctcagatggcggagggcgcggttcagatcgtgaacctgatcggccgttacgtcgagctgcagcgtcttgaaggcgcttcacctggtgcgctgagtgatgccagcgaggacgcactgaacgagcagatgggtgacttgttcgcgcggcgcaagcttctgctctcggtggaggcaccctccccggagcgggacaaggaagccgaaaggcttctggcggagcggctgcgaatccagcgcgagctgacccgccggtatggcccgcaggtgactctgatcgacaacggccagatgctgccggactcagtgctgaaatcgaatggggtgggctacaagccgaccggtaacatcgacaaaagcgcccgtgacaaggccgacgccgatgcgaagcgccgggcggaggaaatggcgcgctacaagcgccaggccgacgaagctgcaggcgccatggagggtccgcttgccgaggccatggccaagcacctcggcaatatggccgagtacaacgaactgctggcgaaagggaacatcgcacaggccgacgcgaacgtgctgatggggcagagcgctcttgagtacgccaaggtcgccgccgaagtcgagaaggccatgggcggcccagagcagctactggccaccttcggtgcagagctggaaatgctcggcaagaccgggcgtgcgcgtgaactctaccgtcgccagctggtgaacgagaaggacatgcgcgaggagctgcggaaggcagcggaggctgcaggcggccaggaggcccttgcgctggccaagggtgccagcagctactccgagtacgagcgcgcgatgctggatgctgccgcggcagccgccgagctttccatccagatcgaggaagccgcggcgaacgccgaggccctggccaacgtgatcgtttccggcctggccgacggagttgatgccttcgccgattttgctgccgacggcatgcgggacttcaagggcctgtgggaggatctgaagaacgtggccaagcgtgggctgcgggacatgattgccgagatcctgaagcagaagatcgtgatccccatccagacgcagatcatgaacgggatcaacgggcaaggtggaggcctgagcctgcagagcatcatgggcctgttcggtggcaacggcgcggcagctggtgggcagagcatcggcaacgttgcgggcctgctctcgcagggccaggggctgttcagcgcagcaagtggcgccgcgagcagcggtgtcagcgccggtagcttgatgggcttcgggaacaacgtcgccgcgttcgctggcggcggtgcatcggcggcaggcggcacggctgctgctggcgccggcgccgcgtcctctgcagctgccgcggtcccaatcatcggctggatcgtggccggcatgatgaagaacgccgagctgttcgaccagggctggaacattgccaacggcgaaagctgggcgggcaagattgccacggccggcgcggtggggcttgcggacaagggattccgcggcctcgggttcaacgacaaggtggcctcgatcctgtcggggtccagcatccacgccaagctgttcggccgtagcacgcccaaggtgaccgggcagggcatcaccggcgactatgggttcggcgggttcagcgggcagtcctacgccgacatcaaggccaagggtggtctgttccgcagcgacaagaagtggacccagtacgcggcgctcgatccaggcattgaccgcacgttcgacatggcggcgcgacaggtgcgcggcgcggccacggacctggccaagcagctcggtgtggacctgtcgggacagctggccggcgtcaaggtctcgctgggcaagttgcagctttcggcggactcggccgaggccaaggcgcagctggaggcctacctggccgacatgaccgaccggttgttcaccgaagcggtgaacgctgccgggtttggcggccagctggatggctacttcgagtcctcggacgtgttcgctgccctgagcgcgtccatcgaactggccgtgggcaatgcggaccagctcggccgcgcgctgaacgggctggagatcgagaaggtcaacaaggccgttgactacttccaggatctcgccagcgtggccggcacggacctggcgacgcagatccagaaggtgaccgggctgctgggcaactacgccacgctgatggcggacgtgtcgacgcagctgctgaccggcgacctgtccagctaccagcagcaggcactcagcatcgagcggacctaccgccagcaggtgaagtcggccaatgactacgccaaggcgctgggcctgtccggcgcacgcgcggaggatctggccaagatcgaagccctgcgcgccatgaacatgggcaagctccaggcgcagatcgataaggacaagaaggccatgcagtacggcctgtcgatcagcgatctatcgcccctgacggaccaggagaagctgagcgaggcgatgaaggagctggagcgcgccgtgtccggcggcgacaccagcgcggcgcaggcggccgcgcaggccgccctgggctttggtcggaacctctacgccagcggcaaggactacaacggcctctacgcccaggtcaccggcctgatcgacggcatgaaggtgggcgacctcgatatggaggacggcaccagcatgtgggcactggccgatgccatcgaggcgctgccggacaacttcagccgggcggtgttcgatttggttgtgaacgacaagggccaggccgagaccaccgcggcagtgcaggagagcaacgctctgctgaccgatgtgcgcagcctgctgcaggacctgctttccaccaccactaagggcgtgaccagctccagcgccgctgcgctgcgcacgtccctcaacgcgagatag

SEQ ID NO: 518433 - DNA, 2559 bp, Stenotrophomonas maltophilia
atgcagcgcaagctgaccctgatcgagatcggcgccggcccgctgccggtggtcacccctgtggtgccgcggcagtcgtcgtggttcccagtggtgtacgtttcccccgacaccccgccagtggacggcgtggtgccggtgccagtggccgatggcgtgctgatcgagtgggccgccgtcgatcaggagggggtgatctacatcatcgagcgtggcccgagcgaaaacgggccgtggaccgagatccaccgcaccaccgaaacgcgctacttctacagtgacggcagcggccagcagtggtggttcaagatcaccgccagcgtgcggggcaaggccggggagggcactgtggtgggcgtcaccccgggccaggtgcccagctatgaggaaatggaggaactgaataacgccatcgggcaggagatcctcgaccgattggccggcgacctgaaggccaccaatgacgccatcggtgccgcccgcgcgtacaccgacggccaggtggcggtcctcaacgggatactgcaggacattgtcggggcggacgagtggacccctgataagacctacccggtcggcgacttcgtgcagcggggtggaaccctctaccgggcactgctggagaacacaggtgtggtgccgggcaccgacacggcgacttggcaggagatcggcaactacacttcggtgggcgatgctctggcggcggccatcagcatgtccacccagaacgccagcgatatcctcgccgagtccacccgtgtggatgctgtcgtggcgcgcatgcctgctggtacgggggccgtggccagcgccgccagcgtgtcagacctggagcaggcgaccgccgacgccttctcggccgtggggcagcgggtgggtgccgtggaggcaacagtgccggccgacggcggtagggctgccagcacggcgcaggtgaactcggtggaccaggcccgcgcggacggtgatgacgcactagccctgcgcatcaacgaaacaaagggtgcgttggagggcaaggcaagcgccgacgccctgaacctgctgcagacgcacgtgcaggaaacggacgggcgggtgcaggcaaatgcccaggacatcgccagcgtgcgttctgagctaggcggtggtagcaacctcgttcccaacgccgcttttgaagtgtcgcttgctggctggtcagtggcggctaaccagtgggacgcatcggcccagactgttcggaatcttgcgggagacacatggcgccctcctggcataaacaatttgggtatgacgtaccccaatgtcacaccatctggctcatacgtgtggcaatcagacctgatcccggtgactgaaggcgttctctacattccttccgtgtacaccgccgcccaccgctgtactgctttcggtcgggtcgttttcactgatgcgagcggaaaggagattggcaacggcggcgagctgtcgcgcaacgcgggccagttcttgggtggtcagaatctcaacgggtggctcagggggactcgtcctccaattgccgcgcccagcggtgcgcgtttcgcgcggtttcagttctgggcgaccgcagcgacaggagaagctccctacgcttggttcttgcgccccatgctggagcaagcgcgtagcgggcagaccatcccatcgccttgggtggactcggcgaccgggctggacgcgaagtacgcggctgccacgcagtctctggaaacccgggccgtacagctggagaacggccagacgcagctgatggcgcagtacacgttcgccctggacgtaaacggccatgccatcggcatgaaagccctgaacaacggggccgtgggccgcattgactttgtggccgacgcgctgagcatcgtggatcccggaaacacgggtagcacgacatttgagggcgggcgttggatcacccgttcgggtggctacatgatggctcatggaaagccgttcggagcgacgggtgatctgatgatgtggtgcggcattggatcggcggtgaacgacgccagcaaggccaacggtttgttctggatcgacaacaagggcaacgcgtacttcggcggcagcctgtcggccggcgtgctgcgcaatgcggtgcagaccagcaccacccagaccgttggcacggaactgctcaacgggccgttccgcaccaatggtggcaaccgcacggtcacgctcagctttgcgcgaactcaccggcgccagcggtcgcagcaggggtcgaccggcttcgtggccggcgcgggcgccaacaccgcccaggtgcagctgttccggcagatcggcagcggcggctgggtgctgtggcagacgctgaatgtcaccggctcggtcagcatcagcaacgagacggatggcccggacattgcttattccggatggggtggctctttcacggtcaatgacagcagctcggcgcaggaaacggtcagctacttggcgcgcatcgtggcgttcggcgagcagtcggttacccaccaagctggcaacttcgattcccagaccatcacccagaacctttccatcatttccgtggagcagtag

SEQ ID NO: 518434 - DNA, 366 bp, Stenotrophomonas maltophilia
atgagccttgtcctttccgagagcggcgccaacgcggtggagttattcgccacacgcatcgacgtgcagtgggacttccgtaccaacacagggccggtgctattccactttgaacgagtggactgggatcgggagacgaagatgctcaacacccgcgccttcgagcgcactgtgcgcgatgacattgcgggactgatcggtggcgagtacacgatcaccgatccagtgaccggggacacgctggtggagcctggctggaagctgatggcgatgataaaggctgccacggagcgggtgtgggacgctgccaccgcgctgtcgcccatcgtggtgccggatgagctgccggtggacgaggaaggctag

SEQ ID NO: 518435 - DNA, 348 bp, Stenotrophomonas maltophilia
atgtggcaggtgagggaggcccgggtagtcagcgtgcggcagggcaagcgcttcgccgagcgctggtgtgcggccaggctctatccgaacctcccgctgcgcgaggccgtggcccgcctgaccgacagcaggccgcacgcgccggcaccgccgctgcctggcctgcccccgacacgcgagcagctgcagcaggcccagcgccttgacgaggcggctgcggcggcgtcggcccgggtgatggcggcgctcgagccgattcggccgccggcggagaccaagcccagggcgaaggatccgtggaaggggcggttggtgccgggacgatggaaacccgggcctaccgtgtaa

SEQ ID NO: 518436 - DNA, 1029 bp, Stenotrophomonas maltophilia
atgggaaggaaaccgaagaagccgggggctatcccccggttccgcccgcggaaacagaaatccggcgtggtgcactactactacgaccacggcggcaagccgcgcaaggaaactgcgctgggcagtgattacggcttggccatccagaagtgggccgagctcgagcgcgcggcgacgatcccgaccgatgcgaagttgacgttccggcaggccgccgagcgctaccgcatcgaggtgattccgaccaaggccgagggcacgcgcaaggcgaaccttcgcgagctggatacgctgctgaagttcttcgacgacccaccgggaccgctcgatgcgatccggccgacgcacgtgttcaattacctgcagtggcgccgtgatgcgccggtgagcgcgaaccgcgagaaatcgctgctgtcgcacctctggaactggtgccgtaagaagggctacaccgacctgccgaacccatgcgcgggcgtgaaccgcaaccgtgaggacggccgcgacgtgtacgtggaggatgacgtgttgcagcgcgtgtacgacgccgccgaccaggtgctgaaagacgcgatggacctggcctacctgaccggccagcggccagcagacgtgcgcgagctggaccgccgcaacatcaaggacggagtgctggtgttgcgccagggcaagacgaagatgcagatgcgcatcgccattaccggcgagctgaaggtgttgatcgaccgcctgctgtcgaggaagcggccagacgacgcgccgatcagcacgcgcctgctgctgggcgaggactggctgccgatcggcaaggacgcgctgcgctaccgctttgatcgggcgcgcgagcgtgctggcatcccgaaggaccaattccagttcagggatctgcgagccaaggccggcaccgacaaggccgattcggctggcgatattcggaaggcacagcagcagctcggccaccagtcggtgaccacgacagagatctatgtgcggaagcgccgcggtgcgctgaccagcccgacgaagtga

SEQ ID NO: 518437 - DNA, 216 bp, Stenotrophomonas maltophilia
atggccgacagcccctacctgtcccgtgacgatatcaaggcgctctgccgcaccccgcggcgcaagggccaggccgagtttctgcgcaacaacgggatccggcactatctggacgcccacgggtggccagtggtgctgtggtccgcaatcgagggcaagccggagccgaaggcgccgccggcgaccgactggaaaccgaacaaggcagcagcgtaa

SEQ ID NO: 518438 - DNA, 867 bp, Stenotrophomonas maltophilia
atgttcaaccctcagacctcgccggataccggcaatgtcacttcttcgccggcatcgccggttggtcccttgcagctcgacttgctgggtggcccgacgaccgcgagctctggaccggcagcgccccgtgccagccgttctctgtcgcgggtaaaggaaaagcccaggatgacgatcggcacctgtggccccacttccttcgcctcatccgtgcccgacggcccgctgtcgtcatgggagaacaggttgcggcggcggttggcaagaactggctcgacggagtgtctgctgacctggaagcagaggactacgcctgccgggcggtcgttgtcccagcttgtgccgtcgacgcgccccaccgacgagaccgcctgtggtttgtggcgcacaccgaacgcgcacgtggtcgatgcgaaatcgaacgtggtgaagctggaaggtcggaagccatccgatccgcaagttgggctggcggaccaggtagcagcattgtggccgacgccgaccgcctcgctcgcggacaaaggcgtgcgatcaacggagggcgcgatcagggaggcagcgcggaaccatgggccggacctggctgcggtgtcgcaggcagcagtcgcgctgtacccaacgccacgagcgtcggccaacgagaaccggacgaccaaaatcccgccctcgcagctggacggtcggcacggcctgtacctgtcgagcgtggccattgggatggagccagctggctcatcggccacgacggaaaattccggcgcgttgaatccagcattcgtctgctggctcatggggttccggcccgagtgggacgcctgcgcgcctacggcaacgccatcgtcccgcaagtcgccgcggaagtga

SEQ ID NO: 518439 - DNA, 261 bp, Stenotrophomonas maltophilia
atgaccaccgacaacaagacccttagtgttgatgtgctgaatgaaatggagcgcgcatcggagcgactatttgatgcaggacttcacggcgatctgagccttgatgtggcccgcgccgcagtcgccgagctgatcgaggttgcccgccagttcgacagctatgcatccgctgactttggcgacacctcaatcctcgataacgaagagctgtgggaccgactgagcgccgccctcgcccgcgtcaaaggagaatcagcatga

SEQ ID NO: 518440 - DNA, 738 bp, Stenotrophomonas maltophilia
atgaccgctcacgctcccgaactgaagaagctgctcgcagcagcagatcacttcacgcctaagaactctttcatcgccggaggtgcgctcaccagcgtattcactggacagcccatcaatgacgtagatatctacttcaagagcaagcaatcattcatcgacgcggtccgtgatgcatacgacagcggactttggtgcgttgccgcgactgatcgcgcggttaccttcgcaagaggcgaagacatcgtgcagctgatgctgttcgactttttcaacactgcggaagcggtcttcgatgctttcgatttcacagtttgcatggctgcctacgacgtggatgccgaagcattcatctttcacccggacttcttcaagcacaacagccagcgccatctgagcttccatagcggcacgcgtttcccgttcggcaccctcctgcgcacgatcaagtatcgcgagcgtggctacaaattgggccgtggcgacctcctgaggatcgccttgcgttgtcaccaggtgtcgctgaattcgtgggaagaccttgcagctgccattggcggccagtacggcgagcgggtgcagcttgagaccgataagcccttctcgatcgatgcagcgatcgaattgcttgcaagcgccgaattcacggttccggcaactgcagatgaaatgcccggtagtgcaaccgagctgctggtgcagatcggcgtcctccctggcgcggcaatcgccgcctga

SEQ ID NO: 518441 - DNA, 336 bp, Stenotrophomonas maltophilia
atgagtagtaggcacaccccggggccttgggtcgtaaccccgcatccacaaacgcacgtggacgtgtttggcgtcggcgtgatcatggacgacaaggaaatgcagtacgcgctttcccacaccttctgctaccagaacgcggaagccaacgcccgcctgatcgccgccgcgccggagttgctggaggcgctggagcgaatcgccctgccgcacgactgcggatgcgttccctgcactggacagtgccgcagccacattgcactggaaatcgcagtggaagaaatgcagggactggctcgcgccgccatcgccaaggccacgggcggtgcgcaatga

SEQ ID NO: 518442 - DNA, 327 bp, Stenotrophomonas maltophilia
atgagcggctacgagatcaaggtgtcgatcacgccgctttgcccgagctgcggcaaggagagccaatcgagcggctttgtggccgagagccgcacaccaaagggcgtgtttgatcgcgacaacccacacaaacgcacggaccagcgtgtgttcatcacgccctgcgccgactgcttcgtcttccgaggcgacgtcgtcaagctgatcgaggcggctcaggcagcacgcgcgtcgatgcagcacatgcgcgggccggaatccatcatccacgaacgcactgcagagctcgatgccgccctcgcccacgtcaaaggcggtgccgcatga

SEQ ID NO: 518443 - DNA, 246 bp, Stenotrophomonas maltophilia
atgtcaggcggcggcgcgccggcggcgcccaaccttcggagcggtttccccgaagacgtcaggacgaagctcgtggcgggttacccccgtgtcggcctcaatcacgagagccaagcgaggaggaactgggcgaacgcccttgacccattgatggactgcctgaggggtcacctgcaggtggcgcgctacggcggcctgaggcatcgcgtatcggtcgatggctgtctggattgcgctcatgagtaa

SEQ ID NO: 518444 - DNA, 486 bp, Stenotrophomonas maltophilia
atgaagaaggacggatggcgcgactggctcattgccagaaccccctcagagaagtcccaaagcccgatggaagcgctgtatgcagcggccttccacttgctgcgcgagagattgaatgtgccgagggcgccgaccgtgatcctggaggagcaggcgcatgtcggtccctaccgcgtcgatttcctattcagatgcaaagcgcaagacgggtctgtcaaacggctcgtggtggagattgacgggcatgacttccatgaccggaccaaagagcaggcatcgaaggaccggtcacgcgataggtggatgacggaacgtggctacgtggtcattcgattcaccggtagcgatgtctggaacgacccgttctcctgcgctgagcagacgtccgatcacattcaccagttcgttcatggcttgtcccgaagggaggcgagggtagccgccgccatggcaagcatgaacgccctcttcgagaaagaggactga

SEQ ID NO: 518445 - DNA, 876 bp, Stenotrophomonas maltophilia
gtgaactatttcgaacaccacatcggggactacgcggcggcgaccgcccacctgacgctggtggaggacgccgtctacagccgcttgctccgcaggtactaccgccaggagggggcgctgccggcggacgtgaagcaggttgcccgattggctggcgcccgttcaccggaggaagtggctgcggtgcaggcgattctcggcgagttcttcaccttgaccgacgacggctggcacaacaagcgtgcagacgaggaaatcgagcgctatcaggccaagcaggacaaggcccgagccagcgccgtagctcgttggaacaggaacgcaatgccatcggatagcgaacgcaatgcggacgcaatgcggacgcatagcgaaggcaatgctctccagacaccagacaccagtaaccaagcagagaagcagaagcaaaagcgtgtgcagcctccggccgcacccagccgcttcgaggagttctgggtcgcttacccgaacaagaagggcaagcaagaggccgagaagacctggcgccgacggaagctggacgaccgctgcgacgagctgatcgctcacgtccgcctgatgcaggcggaggacgacggatggatccgtggctacgtgccaatggggtcgacctacctcaatcaagcgcgctggcaggacgttccgcgtgagccggcgagagcagggcccgcgagcaaccagccgacgcagcccagcaagaccctcaccgcaattcaaaccctgcaagggatgaaatcacatgcaaacctggatccacgacgagattctggacgggctgagcaggctgctctgcttgggcctggatcggacgccggcatcggacctgatcgctgggacggccgccatgtgggctga

SEQ ID NO: 518446 - DNA, 384 bp, Stenotrophomonas maltophilia
atgtgggctgaggcgctgaccaacgaccgcgtctgggagcaggagccggacgcgccgcgcttccgccgcgccttcgtcaagctgagtcagacccggcgccagtggccagcgcccgctgacttcctcgaagcgctccctcctcgcgatcagctggtgctgacgaagcagccaattcctgccgaccccgactcgcctgcgatgaaaaagcgattcgaacagatcggcaagatgctggccacgccgccacggaagaaggccgacagcggccacgggcatgtgcatccccgcgctgacggccagcgtgcccgctgtggcggtcccggcatctgcgaccagtgcagccgtgagcaggctctggccaatgcccaggtggtgcgcgcatga

SEQ ID NO: 518447 - DNA, 201 bp, Stenotrophomonas maltophilia
atgagccgtatgaacctctccgacgccgatgtgttccgtctgtactgcgagggctgcaacgcccatgagatcgctgcggcgatgcagatccctgaaccggctgccgtggtgctgatcgcacgcagccggttgctgcatgcagctgctcaggaagaccgccgcccagggcaaatgcacctctccgaaagggaggccgcgtga

SEQ ID NO: 518448 - DNA, 249 bp, Stenotrophomonas maltophilia
atgggcctcggctattgggacccgctggcgggcgtagtaacagctcgcgtgatgcgcgcagagatggatgctgccgcgcgagttgctgaagaacggatgcgctaccgcgaggcgctctatcgcacggcagcgaagccccgctctcgtaagaccaaaaagtgccccggctgcgggtcgcacacgttcgcaatgactcgtggtggccgcgtctgcagctactgccgaacccctgaaggagacgacgcatga

SEQ ID NO: 518449 - DNA, 414 bp, Stenotrophomonas maltophilia
atgaacgccatcgagaagcgggcgagggaactcgtcatggccgaaattccggatcttgcaaaagagtgttttggctaccaagggatgacggtggtgaatctgcacgtggtcatgcgcatcctgcgcgccgccctcacgccgcccgagggctacgtgctggtgccggtggagccgacgcctggcctcctgatgagcatggcgattcgtagcgatcatgcgctcggctgtcctggctactacgaccaggagatgttcacggcaggcggccatgttggccatcagaggatcttggaagtcgccatctccgaagctcgaaagcagcacgaggaggtggtcggcacggggttctacacccccgaaaaggaggccgcctacgtcgccatgctcgccgttcgcccggaggtgaagccgtga

SEQ ID NO: 518450 - DNA, 609 bp, Stenotrophomonas maltophilia
atgccgccagctgacttgctgtcggtggacttcgaacgcccatgggcgcggttcgtcccgtccgaggcggtatgggcgtgggtatgcgagcagatcctgtccgaggatggcgcgctgaccaacccagaccactaccacctgcaggacgctgacatcggggtgctgtgggcggagaccacgttcaccaagcaggggcgggcggtcatcggtcaggccgagcaggtcatgttcatggccggcggatggaagcggggccggatggagcggcagatggtcgactggttcggccgggtgccgtcgttcgtcatcaccttggcagccgactactgcagccagtgcagcgacgccgagttctgcgccctgatcgaacacgagctgtaccacatcgcccaggccaaggattcgttcggggcgcccaagttcggcaaggacggcctgccagcgctggagatgcgcggccacgacgttgaggagttcgtgggcgttgtccgccggtatggcccgagcgcccaagtacagcagatggtgaaagccgccagcaccgctccggaagtggctgtggctgacgtggctcacgcctgtgggacgtgcctccagcgcgcctcctga

SEQ ID NO: 518451 - DNA, 474 bp, Stenotrophomonas maltophilia
atggcagcgctgagttccgacatcaaagccttcatcgtccagtccctggcctgcttcgatacgccttcgcaggtggtcgaggccgtcaaggcccaatacggcgtggagatcagccggcagcaggccgagacccacgaccccacgaagttcgccgggcgtgatcttggcgccaagtgggtgaccctgttccacgagtcgcgggcgcggtttaaggaggagacggtcaacatccctatcgccaaccgggcattccggttgcgagccttggaccgcatggccgccaaggccgagagcatgaagaacatggccctggcagcccagctgctggagcaggcagcgaaggagacgggcggcgcgtacacgaatcggcgcgagatcgagcattcgggcggcgttgacctgcgcaaggcaacagagatgacagaggccgaactgctggctatcgcgtctggcaagggcgccaccggtggctga

SEQ ID NO: 518452 - DNA, 1641 bp, Stenotrophomonas maltophilia
gtggctgacggccgcgccaagctgagtccagcttccgctgcggctgagctgctgcgccgccgccggtctcgcgagtccctgaaggccttcgcgctgtcgatcccgatccccggcgcaccggtggacgacgaccccagcagctgggtgtgcggcgatgccgagcgccttccgctggcccagcaccacgagctgctgctggacaaggtggaggagtgcctgcgcaagcccatgggccggctcatggtgttcatgccgcctggctctgccaagtccacctatgccggcgtcgtcgcaccgccgtgggccatgggtaagtggcccggcttcaaggtgatcagcaccagctatgcggccaagccggcctaccgatcgtccaagcgctgccgcgccatttgcgccagccccgagtacgcgtcgatctgggagcggccgaccatgctgcgtgatggcagcgccgcggtggacgagtgggagctgaccaacgactcgggcctgctggctgccggcatcctgggcggcgtgacctcggctcgtgctgatgccctgatcatcgatgacccggtggccggtcgcgccgaggccgacagcccgaccatccaggccagcacacgggcggcctacgacgacgacctgctgacccgcctgaagccgggcgcgtccatcatcctgatccagacccgctggcacccggaggacctggccggctcgatcctgccggaagactgggacggcgagtccgggccgatccagtgccgcgacggccaggtgtgggaggtgctgtgcatccccgcgcaggctgaccgcgccgacgacccgctgggccgcaagatcggcgaatacctgtggccggagtggttctcggccgaacactgggcgcagtacaaggccaaggcccgcacctgggccagcctgtaccaggggcggcccaaggcggaatcgggcaaccagttcaacatgagcgacttcgatgacctctggtatgacccggaggaactgccgacgcggctgaagaagtacggcgccagcgactttgcggtcaccgaacgggacctagagaagaagtccgagccggactacaccgagcatggcgtcgtcggcctggacgatggcagctcacgccctgacggcctcagcgtgctgtggatcgttgactggtgggcgcagcaggtcgagctcgacaagagcgtcgcggcacagctgtcgctgatcaagcaacacaagcccctgtggtggttcggcgaggtcggcggccaagagaacgcggtcaagccggtgaggcgcctcctgcagaaggaggacaacatgttcgccaactacgagtacttgccccacatcggcgacaaggtggccaaggtccaggcgttccgggccttggtgcaggagggcagggtgcgcttcccgcgcggcaatgcgctggtgaagcggcttgtggacatgctggtcaacttcccgcgcgcccggttcgacgatggcgtggacgtgtgtggcctgctgggccgcggcatcgccgacatggtgccagcctctaagccggccgtggccaagcgcaaggcgcccaagccgttcaccgatccctggtatgcagcaagggagcgcgccgaccgaggcgacgaagaagagcgggagcgctactaccgttga

SEQ ID NO: 518453 - DNA, 963 bp, Stenotrophomonas maltophilia
atgaacaatgtcctacacgcgcacaacggcgtggccggttggtacaagatcgaggcgttccgcgtggatgctaagggaatggaggtgcctggaagccgtcgcattgccgccgactggtttccgaacctcatcaccaatgcgggccttgaccttcttggcacaaccggcctcacctacgtcactacgtattgccgggttggctcgggcaacacggctccggcgaacactgatacggcgctcgtatcccaggtggcggccagcaacacggtgcatggaacggccgtgaccggcgtaaaccgctctggcgcgttctactcgttccggaggagcaccattcgtttcaccgccggcactgcagccggaacattggcggaagtcggcgtatccgccaccgtttcaggttctctgttcagccgagcgctcattcttgacggtggcggtagccccaccacgatcacggtgcttgctgatgaagtgctggacgtcacgtatgagctgcgggtctatccgaccctcacagacgccacaggtacggtgacgattgccggagtgacctacaactggacggcacggccacttatccctgcttcttacgatgataaatggactaccgggatcggaactgagatcagtcctcgtgtctccttaggcaacgagttcgacggtccatctgtcgctgccacgcttccggcgcagacatcggcaatttctggccctgtagcggccgggatcatcacacgtctcgtttactcggccggcagctaccagcgctccttcaggttcgatttggacctgaatgatggcaatgttgctggaggaatcggtgcgttcttcgcatcgtcagaatcagccgctcaaatgttcggcgcatgggcgtggggcctgtcgcccaagctcccgaaaaccagcgcctacaaggccacgttcaccgttcgcatgacttgggggcgctacaccccatga

SEQ ID NO: 518454 - DNA, 225 bp, Stenotrophomonas maltophilia
atgaccgaccagaccgaagaccgattcaagggaactggccagtttcacccggacaagacctgggcgaagctcgatcgcgaggccaaggaccgagcattcgacgccaagcatcctccgaagtggtggcattcccttgctttcccgtggggtgtggtactgctactgattgccggcgttgcggccgtcttggccaccgtcggcggcctgtggggcatcctgcgatag

SEQ ID NO: 518455 - DNA, 489 bp, Stenotrophomonas maltophilia
atgagctactcgcttgatgcgtttgaatatcgggatttcagcgagctggagcctggtacggtcttcgcagacgaacgggggcgttggtacatggccgcccggctgttagggcgcaacgagaccatggccctgcgcttggacagcggcgagcatgacaatgggattggcgatctcatcgcaaacgtcagtgagcgtgtttttgccgtggcaaagccttatggcacttcgatctacgtcgatgacctctttgatcttaggagatcaaccagcggccccttcccaggctgcataatgcttgcctcacccttggccatcttcgggtttggccatgagcgacgcatgatcggcctaaacggctgcgaaatcgacgaggggtctgttcatcgtgagcgtgcccggtatctgaagtggtcggtttggctggtcgatgctgaccgcaagaaggtcggcgattcaccactggttagcgtcgacgcgagccagcagtga

SEQ ID NO: 518456 - DNA, 726 bp, Stenotrophomonas maltophilia
atgaaaatcacactagggaccggccgaatacactctggtgaaagagacatggtaatcacccctgcgggttacgccggggggagttatgcatgcatcatggtgcatggagttgaggctacaggaggcgcgtgggactggatgacagccagccggtataggtggccgattgtcagtaacatggttgaccgttgcgggttgtattcgatcagtgccgatcttggcggaagtgcaacgtgggggaactcgaccctcctggctaggctggatgaagcattcgcgtacacgcaaacgttcccccaagttaagaaggggaaggttcttctagtgggccagtcgatgggcggcctggcgatgctcaattgggcaaaagcgaaccccagcaaggttgcaggtatggttggcgtgatccctgttaccaacatgaactcagcaatggcggctggatttagctctcagattaatgcggcgtatggcggtgcatacagcgacgcgacgtatggtgccaactacaacccatatgtctttgcctcctcactttccggcatccccgggcagctgtgggttggcgacacagacacaatcgccaagctttcagacgccaacgtggttgccagcgcagctccttcaatccaggtcagggcattgactggagcgcatgcagagtcaactctaggcctaatcgacctcggggcgatggccgattttttgaacagccataggtcctga

SEQ ID NO: 518457 - DNA, 261 bp, Stenotrophomonas maltophilia
atgaacaccgcacgtgcggcatgggccgctgagtaccgcgaggcgcgcaagctggcgcgcttcatcgagaccttccacgacaagttgagcgcacttccgatcgggcagcgcaccttcccgcagtgcaggggcttcgatttctctcgactgtccggcgacaacctctgctggatcggcgagggcctgttcgcccccgatgccaggtgccatcgctcgcggctcgcgtgcctccgtcgccagagtccgaggctgccggcatga

SEQ ID NO: 518458 - DNA, 168 bp, Stenotrophomonas maltophilia
atgattgatttgctgatgaccttcgtgctgctggcggccattgcgaccgtctcctacgggctggcgctgattccgcgccgcctgtctgtcgcactggctgcgactcgtccgaacccagccgctgaggctgcggtgatcgcccaggcactggccgaggtgcgccgatga

SEQ ID NO: 518459 - DNA, 162 bp, Stenotrophomonas maltophilia
atgattccggccccgcctaccttcatcacggtgccggtgatccacatggctggtgatccgctcgacctgttcctgcgaatcaacgcgatcgcattcggcgtgttcgttttctccgcctgccttgtgatctggattgctgatgatcgcgagggcgggcgatga

SEQ ID NO: 518460 - DNA, 1575 bp, Stenotrophomonas maltophilia
atggtatgcggtgatgcggtggttcgtccgcatgttcgccagggaagtcgttcggcgcatcttgcgcagcattcttgggtcggggtggaagtgatggcgacgctccttcgcctttttctagtactggcaactctggccggtggcgcgtactactgtgcgccggtcagtgcgcagcagatcgattgtttcaatacgcagatcccgaagggtgttacctgctctgatcagggtgaagccaagcaggccgtagaagctcttcttaaagcccatttggtggatcgcgccatcatctgctactggccggagagcgggaagagcatatccggctacgtcacatatacagggccgtcgccgacctgcaacggtagtgcagcatatgaagcacagcgatactggacagacagctgtgcagcgcgaaactcggccaaactggccgatgccaaactctggactagccctccgtcaacctgcattgctgggtgcaaagtgcagggtgacgcgttctccagtgagagtggcggcgtgaagttctatgggatgcgggaccgaagctacacgggagacagttgctcgccccaggactttgacagtaacgcgcccctgacacagggtgaaagcgaccggcagcgcgaggatggcaataaggaaaagccgcaagagtgcaccgcgctcggcaacggtcaaactgcgtgccagaagccgaatggtgaccactgtgcgacgtcttcgacgggtaagaccttttgttggcagcccaatgagactggcgacaagaaggatggtccggacgcgcagaccaagagtgagaagggcaagtctgttgatccgccgccgagcgttgaccccacgaaggagtatcagcggaaagaaggacaccagcagaccgcgtgcatcaacaatacgtgtacgacgtacaacgtgaccaatttcaccgagacaggaaagggcaacgctaagaactcttccggcgacaacagtcccgatggcagcggcaacacgagtggaaacggtgcaccggggaagggtagtggcggcgggcagaacgagagtgaaggagattcggcgacggatagtggcaattgccaggcgccccctatgtgcactggcgatacgctgaagtgccttcatctacgttacacgtggaagaaccagtgcaacacgttaaaggatcagattgttggtggggacgattgtggcgcagtgccggtctgcattggtgatggctgcaaggcacaggaatacgcaagcctactgcaacagtggcgcggccgctgcgcggcagaggatgatcgggcgaagcttgcaaaggatgctgcggctggtgcctccgacgcagcgggtgataacgaggcttcggcggttgctgatttgtggaagaagggtccgggtcaggacgggcaagggcttgatcgtggcaagttgacgctgggaggcggtgagcttttccccgccattgacattatgggtaccgcttgggcaccgccagcgcagttgtacacggtgctggacatgatccggcagatggtgagcgcggctggtgttcttgcggctatgtatatcctcttcaagaagtga

SEQ ID NO: 518461 - DNA, 693 bp, Stenotrophomonas maltophilia
atgttgaagcctctccatgccctgccgccgcgtgcgcacgccctggcactgttcgttctgctggcatcatcggcaagcgcggccagttcaccgccatcgccggaagaggcgtacacgctgcaggcccgcgtctacctgcagggtgatgcgtcagcgaaggcatcgcttgaggcattgggccccggctgggtgcccagcgaacgcatcgattggcagcccgtcattgatgatgtgcctgcgtggctgggaaggcaggcctttccggcgccctcccctgccatcgggcgcgcgtttgcccaagcactgcgcacacggttggccctgattcgctgcgaagccacaaatttcctgcccctgggttcaccggaaatcggcatgttcgcgctggcgtgcacccacccggacgtatcacccctgcgcgaggcttacctagcgcttcgcaacacgaaacaacccgacgtccaagcgcagagcgatgagctattcagccgctgggccaccctactgcgcgatgccccggatggcacgcactgcataccggtaacgggctggtatctgggaaatcacgaagccgccgacgccgcgcgcggtcaacaactttcgcggaccgtgctgatgaagctcatgccactggacacgtgggacgccggcgaggacgaggcagattccgcagaattgtgcgaggtcaactga

SEQ ID NO: 518462 - DNA, 207 bp, Stenotrophomonas maltophilia
atgttgccgcgcctgctgttcttcctgctgtggattgcttcgaccgcctctgcgcagacacccgtgccaacaccggagcagagcttcgacctgttcgcgcggttcatgctggaaggtgacaccgatgctgaagcacagatcgccgccaaggcagtggacgacgcggttgacaccaaggccgcttcggtccgattccgcgagccatga

SEQ ID NO: 518463 - DNA, 1392 bp, Stenotrophomonas maltophilia
ttgaattcgctgaagcactactgcgaagtggcatttgcgcgctgggacaggaactacctgctctacgccgcactgatcctgctgggaatgtacagtctaggtcagctaacggcaccttttgttgcgcatgatgaatacgattggcttttgaagggtttcgaccagggttttgaaactccgctgagcaaggctggttcggaagggcgttgggggaactttatctggtcgcaggtgagtcaccacctcaacacttactcggcatttggaatctacctggtgctgttttcggccatgtgcctggtgatgacacgtgttgtgtcagctcgggcgggcatctttgccgcactgctgttcttcattgctccgatgactgccgatacggccaagtggcccgtcacccaagtcactggtgtagcggtgacgctgctgggctgcatcgctatgctgcgggcgcgcgaggacgggcggcgccgattggtcatggcggtttcggtggtcgccggctttctcttctatccatcattcggacctttgttcctgttgatgtatgccgcggcctgtacaggtacgcgcaggagcattctgatgggcgcagttgtatatgcgctggctttcgtttgcgcggttctgctggttttctgcttgaactacattttccacggcaacttcggcatcaggcccgctgcctggcgtgacgcgactccactgctgcacggaggggcgctgtcggtgaatgtgagccgctatgtacagtatttcacgctgcttagggagatctggccggcgctactggcaggcggcatcggtatggcgctctgcctgttgtgccgcatccatgttcgccagtgcatggccgctctcttttacggagtgatcctgctgggcattgatgcttccctatcgatcctttccggcgtagggatcccgcttcgctcaacgctctggttgtggttgcttctgtgtcttcctgtggtgtttcttgtccatgaaaggcgcaccaatgtctatggtctgttgctggcgataccattggtcatggtcggcatgtccagctggaacgccatatacgcgaacacgcgcaccgtgtatccagcgatgaatgcgttgggcaacaccttggcacgggtgcaggccgccaatgcagggaagtacgacgacgtcatcatgtttggagacgtccgttcgaatgcttccatgaggtggctgcatggaaacagggcgttgcgtaactatctattcaaggaatttggtatctacaccactccatgccagccagccctctgtggtcgggtcgaggcggagctctcgggccgtaaccagattccagaatggctcatcatcgacaggcatctggtatgggtgcttgcaccgcagcgtgacaatggatactga

SEQ ID NO: 518464 - DNA, 975 bp, Stenotrophomonas maltophilia
atggccatcaacacagcgactgacgacccggcgggccagatcgatctctccatcgtcgtcccggcctatcgcagcgagaagaccctggccgcgctcgttgcggctatcgacgccgccatcggtgggcgctattcgctggagttgatcctggtcaacgacagaagcccggacgactcctggaaggtggcaagcgaattggcaagcacccatagctgggtgcgggcggtgaacctgcgcaagaatgtgggccagcacatggcgatcttcgccggactgcgtgaatgccggggccgagtgatcgttaccatggatgatgacctgcagcacgccccgtctgacattccgactttggtcgaggcacttgatgccgaacatgacgtctgctacggcaccttcaagggccgcaagcacgcggcatggaagatcctcgggagccgcttcaatgaccgcgttgcgacctggctgctgcagaagcctaagggcctgtatctttctccgttcaaggcaatgaagcgcggggtgcgcaacgaagtcatccagttccgggggccagccatttatctggatggcttgatcctgtcggcaacctcacggatcaccacgcgaatggtcgggcaccacgctcgtgaagacggtacttccggttatagcttgaagaagtcgatctcgctgtggctgaagatggcgaccagtttttcagtagccccactgcgaatggcatccctcaccggcatggcgatgtccgcagcgggcttcctgtccgcagccttcatcgtggtgcataagttattagatcccggtgttgccgttggctggtcatcgcttatcgtcgccattctgatcatgggcggcgtgcaattattggcattgggtgccatcggcgagtacgtgggccgcatcctcctcaacttcaccacccccactcagtactcagtggcggaacgggtcaatccgggcacggatccagccccatga

SEQ ID NO: 518465 - DNA, 405 bp, Stenotrophomonas maltophilia
atgaacatgcttcaagccaaagaactggccggcaagctgatcaggtttggagcagtgggcggaaccagtaccgtgttgtttgctgtgctgacctggctcctggtggacaagaccggtatgcatccggtgctcgcaacggtggtcgcgtacctgctcctgctagcgccaaattttgcggcccacaagtactttacctttggctccaaaggcgaagtcgccagtgagtcgcgaaagttcctggttgtccacggtctgaacatcggcctgtcagcgggaggcatggccgccatttcccacgcccaactggattaccgctggggcatcctcttctctgcggttgcggttccggtaatagtgttcatcgtgatgaacttctgggtattccgggttccgccgaagcactga

SEQ ID NO: 518466 - DNA, 1017 bp, Stenotrophomonas maltophilia
atgaaggtgctggttaccggcggtgccggctttgtgggttcccataccgtggtagagctggtcgctgcgggccatgatgtgcacgtggtggagaatttctgcaacagcgaacgctggattgtggagcgtatcgagcgcatcacaggcaaggcgcttgccttgaatgagctggacatccgtgatcgtgatgcattgctggaggtcttgcgggatttcatgcccgacgcagtgattcacttcgcggcgctgaagtcggtatctgaaagcaccgagctgccggctcgctactacgatgtaaacgtgggaggcaccgcaacgctgcttgatgtgatgcagcaggtgggttgcaggcatattgtcttcagctcttctgccacggtgtacggccaacccgagacctgcccggtgccagaaggcgcagcagtggagcccggcaatccctatggacggaccaagctgatcggtgagtggctgatccgagactgcgtggcaacgccgggatcaacgctgggcgctgcgattctgcgctacttcaatcccgtgggcgcacacccgagcggcctgattggcgagctgccgcgcggcgtgcccaacaatctcgctccgtacatcacccagaccgcagccggacaacgcgactacatccgtgtcttcggcgacgactacgatacgccggatggcaccggcgtgcgtgattacattcacgtggtggacctggccaaggctcatgttgcggcgctgtacgcattggcagagggatcggaccgtgagttgaccctgaatcttggcaccgggcgcggatactccgttctcgaactgatcgatacgttctctgcggtggtggggcgcccgatcccctatcagcggcaggggcgccgtgcaggtgacatcggtgagtgctgggcagacccttcgttggccaacaaggtattgaactggcgggctgagaagtcgcttgcagacatctgcgccgatgcgtggcgttggcagcaggccattcccactgccaaaacctga

SEQ ID NO: 518467 - DNA, 1449 bp, Stenotrophomonas maltophilia
atgcttgagcgctggacgcataatcgttgggtgcgtaaccgatacacgcgccgcttggcaaactgcgcccgccgcgcctacagattgctgttcggaccggatccggttgctccgcaagccgccgcccccgcgcaggacggcgtacctcccatgccgctgtggcttcaggaagagacgctcaagcttgccgcgatggagccggaattgctgccgcccggaaccgatctgaatcgctacgccttctacacggtgccgatggatgttcggccgggcgatctgtattcagcgctgtccgaccagatcggtgggcaggccttcactcatgccctgctcgtgccgtggctaaagactggtggggccgatcgaggcattctctaccacgcgcgggcaatcgcagaggccgatccggcggcgcgcatcctggtgctggccaccgaagactcgccttcaccgtgggcatcgcgcctgccaagccaagcgacgttggtggaattcggccggcttgccgcgacgctggagttcaatctgcaggttgcggtgatggtgcgcgtactcgttcaattgcgtgcgccggtcattcacatcattaattcacgcgtgggctgggaggtggtcctgcgacatggtctggcacttaaccagcattcgcgccttctcgcatcgatttattgcgatgactatgatgaacgcatgaatccagtcggctatgctcgcgactatctgcgttactgctacccctaccttgccacggtcatctgcgacaactcacgttatccgcagatatggtcacgtgaacttggcgtgcctgcgtcgctgttcacggtgattccattcccttatgacggcctcattcccgcgcttcccatcacgccgatatccgcgcctgacgccgggagggttctgtgggcgggccgtctggacaggcagaagcggccggatctgctggcggcgatcgcggcggcgatgccctccgtgcatttcgatgtatatggtgccccggtgatgtccggggtggccgcccaaggcttggacttgttgaggtccctgcaaaacgtgaccctgcacggcgagttcaagcgcctcgaagaagtcgttacttcgcagcacttcgcctacctgcataccaccgcgtgggagggcacccctaccattctgttcgacgtcgcggcggcccggttgccgatctgcgcgccggcggtgggcggtattgtcgatttccttcccgaatcagatctggtcccagatccggaggacattgccggcttcgtccgggagctggaagcactgcgcgactctgcgcaagcgcggcaacagcgagtggagcgccagcgcgagtcgttggaccgtcagcgccaatggccggcgttcagtgctcgcctgcggcagctcgacgattatgtcggccttgagcgcgtgattcagccagcgactgaggtaagcaaagcatga

SEQ ID NO: 518468 - DNA, 756 bp, Stenotrophomonas maltophilia
atgagcctgccggtactaagtgccatcgtgaccttccacgctgagggtatcttggcgcatacgtcgctgcggtcctatgcactttcgcgaaaaatcgcccgcggggaaggcatcgaagtccagttggtgctcgtacttgatcgtgccgacgagcaaacgcgcgcgtttgtattgaaccatcccgaccttgatggctccgagacagtggtcgaaacccaggtcggcgacctcgcacttgcccgcaatgccggcgttgccgcttgccggggcaagtacatctgtaccttggacggcgatgatctgatttcaaccggttacttcctcaagcatctaaaggaagcagagcaactggaggggcgattcatcctgcacccggaaatggtgctgagcttcggtatgtacagcgcctacaactggcaggtcgatcaggccggcggttactacgacgaacgtgcactgctggcagtgaatccatggatcagtgcgtcgttctcgacgcgtgagctctacgagaccattccctacgtggcgtgttatccaaaacaaactggattcggctacgaggactggtactggaactccgaaaccattgcgcgtggagtgatgcatcgtctggcttgggggaccgcttacttttatcgacgcaagtggtacggctcactcaatgaggccagtcacgcaatgaggacggtcattccccgcacctccctgttcacactgggccgtcgctcggacgaggggcagggacatgcttga

SEQ ID NO: 518469 - DNA, 702 bp, Stenotrophomonas maltophilia
gtgattatcggaaggggactggtcgccacagcgttcgctccggattggcaggatgacccggaaacggtgattgttgctgcaggcgtatcaaactcaagtgagaccgaatccgcagcgttcgcacgcgagaaacgactgctggacgagataaaaggcatgccgtcgatccagcggatcgtctattttggcagctgcgccgttggtaatccggctgagcgacagacgccctaccttcagcacaaggcacgcatggaggcgagcgtgctcgccgatccgcgcgggcgtgtttttcgcttgccgcaggtcgtgggcgagggcggcaacccgcacacccttaccaacttcctacgtgcccggattgaatccggcgagccgttcgatgtgtgggcacgggccgagcgcaatctgatcgacatccgggatgttgcaacgctgggtacgcacgtactgcgtcatcctgatgactacccgcggatgatgcctcttgccgacgttcgttcaaccaacatgctcgagatcgtccgcacgatggagtcggtgcttgagcgccagggcaattaccgggtgcttgaacagggggtggccttccccatcgacacgtgcgactgcgagcgtgcggcagctgcctgcggcgtgccgctgggtgagggatacctgctgcggctcctgggccggtattacgtagcggcaagcagagcgtga

SEQ ID NO: 518470 - DNA, 1443 bp, Stenotrophomonas maltophilia
atgatcgcccgcttcttacgcctggcaagaaaactcagtctgcgcgaactggtgcgtaatccgcgcagcgagctcggccgcgtgctggactggatggggcgacggcttcagcgtgctgcgcggacagccgcgcagggcgctgatccggcactcccgctctggttgcgtgaagaaatgcaggcacaggctatgctcgagcctgacttgcttggtggccacggcacgccggatcgcttcgcctactacagggtgccttttctggtgaggccgggcgaggtgtaccgccgcgtggtcgaagccgttggcctcgccccttgtagtcatgtgatgatcgtgccctggctggtacgcggtggggcggaccgcggcgccctgctgcatctgcgtgcgtgggtagaggcagtgtctgctgaacgtgttgtgctgttgctgactgagccggcgcaatccacttggctggacagggtgccggcaggcgtacgcatcgcccggtttggtgagattgccgcggagctcgcgtcagaagataaggtcaggctgttgacccgccttctgatccagatgcagccagcggtcgttcacaacatcaactcgcctgttggatggcaggcgattgaaggcttcgggctggccttgcgccagcattctcgtctgttcgcgtcattgttctgcgacgaccatgatcccaacggcgtgcctgtgggacacgccaggcgctacctgcggagctgccacgcacatctgacacgcgtcttctgcgacaacaccgtctatcccggaatctgggcgcgggacctcggcgttgatcgccatctcttcgaggtggtgaagttcccctacgagcactacatcgatgagaagcgcagaccgttcgtgccgtcaggggcgggacgagtgctatgggccggccgctttgatggccagaagcgaccggacatcctgcttgcggttgcacgtcggctgcccaatgtggcattcgacgttcatggcgtcatggatgtcgggagccctcatccggcagtagcgcaactccgcagcctgcccaacgtgacattccggccggccttctcgaactttgaggacattgtgtccgacgcccatgtggcgctgctgtttaccaccgcatgggagggtctgccaaccctgcttctggatgcgtcggctgcgggtgttccgatcgtggcaccagcggtcggcggcattccagacttgatcgatcccgattggctggtgcaggaccctgagaacgtggatgccttcacagagcggctgcgccaactgttggccgaccccgagttgcgcgaagcgcgcaggcgcaaccagtaccacgctctgaagggaagagactggcaggcgttcaccgccgctgtgaaggccgttgaatactatctgagtggacccgatgggattgttcccaaccaacagcaaggaaacgcaacgtga

SEQ ID NO: 518471 - DNA, 732 bp, Stenotrophomonas maltophilia
atgaacactgacctcaccgcgatcgtgacgttccaccgcgaaggcctgctggctcacgcgacgctgaggagctatctgcttgcgcgtaatcgtgcccgtgaacggggcattgacgtgcagatgctgctcatcctcgacaacgcagatcacgagactgccgaagtagtccgcaaccatcccgaccttgccggcgatgagcttatcctggatgcatcggcaggtgattgcgggttggcccgcaacattggtgttagccactcgtcgggcacctatgtctgcacactcgatggtgacgacctgatcagccgcgattacttccagcggcatgtcgagtacgcgcgtaacgtgccagactccacgatcctgcacgccgagctggtcgtcagtttcggtggcaccgagcattacagccaccagctcaatccggtcaccatgccgttctccaacgacttgttgatggtggtcaatccgtggatcagtgcgatctttgcgcgacgcgaggtgcttcagcagattccgtatgtggcctgtttcccgcgcctgaccggatatggattcgaggactggcattgggcctgtcagactctcgcggctgggctcgaacaccgcgtggtgcctgaaactgcctatttctatcgagtcaaatcatccggttcgatgaaccagaattccgcagcgctgcgcgcggtcgtaccgccgacccgcttgttcgggtcttggggtaaagcatga

SEQ ID NO: 518472 - DNA, 2283 bp, Stenotrophomonas maltophilia
atgattctgtgtgaagtagtgatgaccgcccctgattcgaacgctgagtcgcccaaactatccttgttgcaggctgacgaggttgccggctactgcctccaggcactgggtccgacccaagtcttgctcgtgggggcggcgttggcgcctctactcggtcctctccgagcggcgggctgtgatgtagtcgtgcatgaagaaattcctgccgacatcgctgccaccgggacggtcatcgcttgggcggagtcgtgttcacaatgccgatcgttgtttgagcttggtgccaatgttctggttctggtcgcagcggcgacaccaggggacgaggctcatgcaatcagtgagcaggcagctgctgcgaactggcagcagcatcccgccacgttcgtgttgccggccagccgggatggaatccgtatccagttgcttgcgcgtgccggtgtctctgtgcctgacccgcagggcatgttgcgtgcggggtatcacggcctggcagccgcgctcgtgcggccaggcgacgcggtggtggcggctgacgctgcagatttcggtctgtggaggattctgcagcagcagacccgctgtcgctctctgcaggttttgagcaacgcgccggcccctgcggttctagaggccggaatcatctggcaggctcctgatgcttggcggacggatgagccttcggcggatgtgctggtcacccggataggccacgatggcacgaactgggtgcgggaactggaggttgcgaccgccgcgctggtgcgtagcggtcgactggttgtcgctgtaccgctgacagacgggcgtaatgttgacgagcgcgatctgctgctcacgcttgaatcgctgggattggtggttgatcgggcttggtggcagagcctgtcacgtccggtcggtgcaggtcagttcatcgaagcctcacgtgacggcgccggacgtctacagatagaccctgacgctgaggcgcaggccgatgcactggtgctcatggcggtgaaaaccggtggcgatggcgttccccgcaatccggaacttcacgtccccaacatcatcgcgttccagcgcgactacctcgatgcgagcgtggtcaggctgattgtcgcaatgggtttgaggctggaatcggctccgttgcgacgccatctggccgagcaaatccttgccacgtcaccgatcgactctgctgaccacggcgccgccctgtgcgtcctgttgtacgacccggcagcgccggaggaggagcgccgcgtcgcgttgcttgaagcggctcagcgttacgttgagctgacggccaccaatccgaccgtcctacgctggcaggtttcgttgacttatgccattgcagccctgcaccacgcggagggtaatctggggcgggctgcggatctttacgcccaggtgctcgcattcgatgtacttgccttcagcccgttgttgggtacaaaaaccaccgcagccgccgtgcgcctcggctggattctgttcgggcgtggtgacctcccggctgcgcgccaagcctggctgcagggactcagtgaggctagacggctggcttcgcatgccgactggaccgaggtagtaggcgacatcgaatttcccgaaaccttcggcatgcccgagtttgccgctgtcatggatgaggccggacgccttgcctctgcactcagggtaacggcggaagtgccgcttcggcctggtctggcctggcagtggggcaaccagtccgttcacgccatgctgtcgcggacacttggcgaacagcaacgtcttctcgcctggcaggaacaactccaggacgccaaggactggttggacgggcagtatcatcacttgaacgcggagcttgaccgcagctcagcgagccttcaaacgttgcaggcggaaaatgcggcattggcaagggacaacgcgggttccgcagcggcgtttcgtctagcacatcagcatgcggagacagacaaggcaggtctgcgcgtccgcctggagcatcaacgggcgcagtacgcgcgccttgcggacgaacacgctcacctcgcagaagagcacgctcgccttgcaggcgaacatgcgcgcttgcttgatgcagcgcaggaactcacctcggccacttctggcatcatggaccgggttccgcagccgcgtttgcctggtgaatcgatcgcggaagaactgttccggctttccgacgcgttgaatcggattccatggaaatcggctgtccggtctgcgctgcacgtccttgtcgtgttgctgggaggcagaaagcaggcatga

SEQ ID NO: 518473 - DNA, 249 bp, Stenotrophomonas maltophilia
atgaagcaaatcaccggtccagacggcaagcagtacgaaaccagcgacgttgaggtactcgaatcgacggaacgttggtccgagtacaagctgtcggatggctccaccgtcagggtgaagcaagtgctcacccaaatctctcgaatcgaaggggagcgtgatccgacgggcaatcctgtatacatgattgcggcgcaaccggtggtatctgtgtcagtctcagatgagtctctgaagaagagggaatga

SEQ ID NO: 518474 - DNA, 621 bp, Stenotrophomonas maltophilia
atgagctggttgaaagccttcagcacgtgctggccgcctggcgaaggtggttgcgtggtgtggtgggatgcatgggcggcgataggcaccgtgcttgcggttgccgtagcgctgggcctcgcggtgatcgagcatggccgtcgacgcagggaggcagaagggcgatctcagtggattgcagtcgctttgcatctccccattgatcactgggccaaacaagtggctcggctgcagaagctcgttgtcgccgagaagtacgccgagatgatggatattgttgagccggaggagggcgcgcgttctgttctgattgcacctgcggaggtcacagagttgcggagagaaatccatgaattgggcgacatcggcggcgcgatcgcgcaagcgtcgttcttgctgaacgaactgcgagggaaatggctctggattgaggaagggattcgtggagattacgagggtgaagaacgcgcccgagcgcttggtctgctcaagcgcaacgccagttctgccagccagctgcttaaggaggcgagcacacttattgacggcaggttgcggcaaactcgttggattaaggttcgagcctacattttcttcagacgaggcaggcgtgttaggtga

SEQ ID NO: 518475 - DNA, 2043 bp, Stenotrophomonas maltophilia
atggctgacggctcccgctccttcaacttcccgccgccacaggtctcccgcctgcgccccggcgagatcgtcgtggatctgttcgccggcggtggcggcgcatcggaagggcttaagcaggccatcggcatcgatcccgccctggcctacaaccacgatgagctggccatcggcatgcacgccgccaaccaccccctgacccagcaccaccgcgaggatatctggcacgcagacccacgcgtggacgtggccggccggcccatcggctggttccatgcctcgccggactgcacgcacttcagccaggctaagggcggccagccgcgcagccgcaagacccgcgcattgtcgtgggtggtgctgaagtgggttggccagctgctgcgtgctgatcggctgcacgggaccaacaccgcgccgcgcatcatctccatggagaacgtgtggcagatcctgacctgggggccgctggtggcaaagcgctgctccatgaccggccgggtgatcaccctagacctggtccaggccgtgcatccggagtcgggaaagccgatgttccggcgtggcaagccggtcatggtcaaccgagtcgccgacaagggcgagcgggtgcccgtcgagcgccaggctcttgtcccccacaagcgctacagcggccgcacttggctgcagttcgtcgcagcactgagggcgctgggctacgcggtggagtggcgcaagctggtggccagcgattacggcgccggcaccagccgcgaacgcctgttcctgctcggccgccgcgatggccagcccatcgtgtggcccgagcccacccatggcacagccccgggacagaagccgcgcgtgactgctgctgactgcctggacttctcgattccctgcccgtccatctttacccgggaccggccgctggcagacgccaccatgcgccgcatcgccaagggcgtcatgcggcacgtcatcaactcggccgatcccttcatcgtccctgcaacgcaccagggcggcgatcgcgtgcatagcgtgcgcgaccccatgcgcaccatcactgccgccaatcgcggcgagctgatgctggtggcgccggagctggcgccgttcctcaccgagcatgccaacgcaagccgtcagcggacgatggcagcggacgagccacttcctaccgtctgcgctggggtgaagggtgggcacttctcggtggtatccccgacacttgtccagaccggctatggcgagcgcgagggccaggcccctcgtgcactggatctgatgcagccgctgggcacgattgtcgcgggcggtgtgaagcacgctgtggtcgcgccgcacctggtgaagttccgagccgacagcatcggcacacctgcgacagagcccgttccgaccatcacctccggcgctggcgctttgcgccctgccggtgccgcgcatgcgctcggcgtggcgacaaccttcctcgaacaggccaatggcggtttctatcagggtgccggcaacgctgcgcgagatccggtcagcacaatcaccgccagcggtagtcagcagcggctggtcaccgcccacctgatgaccaacaccagcgcgcactgcggcgccagcggcgccgaccttgtgcccaccatcaccagcgcggggaatcaggctctggttgaatgcaccttgagccccgagcaggaagctggcgccctgcgcgtcgccgccttcctggtgaagtactacggcagcggcatcgctgtggatctgcgcgattccctggacacggtcactaccaaggaccgtctggcgctggtcacggtccacatcaaaggcacgccctacgtcatcgtggatatcggcctgcgcatgctcaagccgcacgagctgtaccgcgcgcagggtttcccaaccgggtacatcatcgatcgcacggcaaacggaacgccgctcaccaccagcgccgccgtccgcatggtgggcaacagtgtaagcccgccgccgctgcgtgcccttgccgaggccaacctggatcggctgccggccgacatggcggtggccgcgtga

SEQ ID NO: 518476 - DNA, 249 bp, Stenotrophomonas maltophilia
atgaacgaggtaacagccaaggcccatcacctgtggtgcttcaactgcgacgagaacagtcctggcgctgcaagcacggacgactgcgaggacctcgcagggcgcgagggctgggtgcttgggatcgatatcgacggcggcggtggagcgcagtacgcgtgcgccgactgtgccgaacttctggatgaagcacatccggtccgaagcctgcgggcaacgcggcgagaaatcagcgggggcgcagtatga

SEQ ID NO: 518477 - DNA, 246 bp, Stenotrophomonas maltophilia
atgccagagatcattacgttccctcagcgcatgcgctttcaggccatccgatcctttgacgtgcacacgggggtgggcggcgttgttgcggtcctgtgggcgcccctgtgctccgagtacaagaagggtaatcatcaccaggagcgccagaaccaccccgctcttgcggatctgctgccagactcggaaaagacggtaccgtcggtgtccgcgcacccagccgtggcgagctatggagaagactag

SEQ ID NO: 518478 - DNA, 777 bp, Stenotrophomonas maltophilia
atgacttctcaccatcctgacacctgtgccgttattttcgatccggtgagcagccggcttattgaagttcgaaataccgtgctaatcaatcaaattacccgggatgccgagatgatcgccgcgtcgtttgatgccctgcatcacgacaacatgcgggcaattagcaagcagttcgcccactgtttcggactgctcacctcggggatgatcagagcttcgcaagagaaagatgatctgagagttgcgtgtgccgagcttctatcgaacgctctgaactccatcgccgctgcggcgtacctcctgcggggcggcttcgtcttacaaccgggcccagtcatccgctcatcgatagagtctttggcggttgtgcttcatctgatccagttccaagacgacttgaagtcgcatagagagcatgcgttcgagtccacgcgagcgattgccagcgccaagaaggtgtttcctccattcggaagaatgtacggcctgctaagcaatgagttcactcacgttggaaggttgcacaaacagttcactgcgatccgtgcgtacgaaaaaggctacgagcctttggatctaaacatgcagttcataactagcgcagtgtggatgtgctacgtgacatgtgagctggcgttcttggatacggttgcaacaccacgctattgggaagaagttccggcgccctctgacgagcaggtcgcctatgcgtacaacccgggcgccgccgaaaaagcctggatggaaacgtttctggggctggtgggggcgccctag

SEQ ID NO: 518479 - DNA, 246 bp, Stenotrophomonas maltophilia
gtgtcacgccgcagccgactgcttctctgcgcgggtctggtcccgcttccgtggttcctgttctggaccagcgttgccgccgtgttcgcgccgggctacaacgcgctcgcacagcacgccagcgagctgctgcaggcgccgacgctcgcaagcatctgcgccaggatcgccgccatcggctctggcgtaggcttcgtggcgttctccatcgggtatggagggagtccggccgccggattgcagtag

SEQ ID NO: 518480 - DNA, 771 bp, Stenotrophomonas maltophilia
atgcgttacagcaggagtccaggcaggcgggacgcccaagtccatctgccgaggtggtggcgctacctgcgatgggtacggatgcagccaaacgctcaggaatggcgtgcattggcggtcaggcgatgcgtaggctgccaaacgggtgggaacaggtatcctcgcgttctggcggctggttgcgctgccgggagcagtgatccggggtgtaggggcagcgcccctacggaaacgcctcatccgcgctggcgaggcctcggccccgatcctggtaggactgccgctggtggctcggcgtcagggccagccatcaccaccgccgaccgctgtttgcgccggctcaccacgtccagcagattgacgacagtggcaggacgatcccacgcgactgcagcacgtttgttcccacgtattgagcaatgggaatctggcgccgagcgtgcagcttccatcatccggcgccattcctgcgcttggcaggcggtgagtgacagccaggccagatcttcgggaagcagctcgcggccttcgggtgtgatcaggcgatcaccgaggaaagaaaaaccggcccaagggccggtcaagtcgatacggtggtgcgggtcaaactcaatcatgccgcgatctcatccttggccggggactgaggacgcaggcaagagccgagccagaggcccagccattgccacgcggagccaacaaaggcccagatccggcggatctgcaatttcgcataatgtatattatgttcaggccagcaagccgttgtga

SEQ ID NO: 518481 - DNA, 1212 bp, Stenotrophomonas maltophilia
atgacgtttctcgaggttttctataacaagcttgtgaagcatggcttgagtgtgagcctcacagcggattcaattgtgttggtgcgagagggaaagcacgacctcaccattaaagctgacccgaccttcgaggcggactactcccgaatgcagggcgcccggagtcgatctttcaagcctgagactaggattcttcaggtcaacaactcaattgaggtgcagcttgtaccgctcgcactctcgcagggccctcgctcccgtgatccaatcaacctagcctccgcaaatggggacgaggttgtaatcgggccgtcgactaacgccttcgccatgagtctgctagaggcggatgctattccggcgcagcatatcgagaggatgctgaatcgaattggcagtactcagcttaggaatatttctgttagcgaattggtaccaaggacatactcgggttgtttcaagcggaaaggaaaggccatccctccaaacttggaggaaacggcaattgggtcaatcaggtcttcgctattcgcccttgcaatgcagatggacgaatgcttggaaatatggcagccccggaagtactggagcttcaatgaccgatcgtctggtgaggggggcttgcagattccgaaagcttcctacgacaccaacgtggtgagcttttataaggttgcgaagtcgtcaccctatcccagtcaatcctttctggcgttctacaactgtcttgagtattacttcctcagggttgcagaaaccaaactgcatgcacgtctagcggtcgttctgaacgatccatccttcaaaacgacgacgacaacgcttgacaaggtcgtgtcgatcgtcaagggcgatgagcgaaggagtgacgaaactgagctactgagaaacgtgcttgacagatacgtcgaagagcgcgagatgatctcactcattgagagggttgagcgggagtggggcgagaacgtttatacgaagaagagacgcgtcttcggggaagagctggttgtatcgaaacaacccggccacgtaatcggaaacgtggcgaaagcgctgaagcacattcgaaacgccatcgttcattcaacggatcgctactcccgcgaggagtgtcacgtgccgctgtcggcttcagaggacattgtggctcagtatgtgcctctgatcatgtttagtgcggaaagagtgatttttggcacttcctcaccgtaa

SEQ ID NO: 518482 - DNA, 1029 bp, Stenotrophomonas maltophilia
atgcggagagctttactcgttatatttgccttgattgggatgtcgtccgctttcagttccaatgccgaagagcttgcgactcggtgtaccggggattacccctacgaggacaggccttgtgaccaaggacaggcctatctggaggtccgccgcacccacttggcgtggttgaaggtaaggtcggacctctatccgatgcatgttcgtttgactgacggtattgtgggtcagtacgagtggatatgcgggaccaacattccttggatacctgagaccggatgtggagaggcgtactttcgacctcagggactatgcgcaaaccggccatcgttaagccttccaagtacgcaatccgggcaaaagacctgcgaacagggctgtgagtacactgcttctggcaacgggcagtcaacgccaacgggcgccgtgtgcctgcccccggattgtccgagcagcgacggctcgggatgcggaaaggcggttgcagagctgcaaggcgccgcaatgccttcgaccgacccgcgtcgcctgttccatctacagcagacatgcattgccaagggctcgtgtgagatccggtgccagatggacaattgtcagtggatggaccgcgtgatcccggcgttcgtagatccctaccttgagaagagaggactttggccgcttgtggaggcatcctgcagtgcggtcaacagccttctggatgggttcaacggcggaaagtgggtggccaaccaagagtgtttcgctagtatgggttggtatcacgtgcaggtcgatctccgaggtgctctggaggcgttcggctgcggatctcagcgggactggaacatggttggccagcgcatcgttccatgcttaatggagacgcagccaagtaatccccgtgcctatcatcaggtgggcggcatttttgtccatcttgcacgtgagcgagtcaggcagaaatgcttgagttcacgccagaaggatgggcttcctgtagatatcaatcaagacatggaaggcaaggtatgcagggccgaatga

SEQ ID NO: 518483 - DNA, 915 bp, Stenotrophomonas maltophilia
atggaaccctttgactggtcgaaagccccattcgcttcaacccactggcggggacaggttatcccacacgccttgcccatcctgatccggtgggcccaagagggagagccccacacctacagcgatttggcccaagagctgcatgaccagttcggccacgccataaagcccaggaaggatctctacggaaccgttgccggcggtgtagcacaagcgatcgagtggttaagtggccagtgggaaacgccgatcccgccgctccatgtcatcgtggtgaacaaacaaacttggcaccctggcgatggtgcgatcaccatctcccctgcttactttgatggcaagaagtggagcactgaagaggaaaagcgggcgcaccttcgtcaagccatggaggacgtttttacctaccccggttggaacaaagtagcggaagcgctcggtgcgaagacgctcaccccacgatcgggtgccaagccagccgatgccaacggccagtcgattccattgcccaaggttcagcaagggggaggtccagagagtcctgagcatcgagcgctcaagcgttgggtgagagagcatccgcaggaactaatcgactacggtctgtttgagacgggtgcaaacgagaagctagtgagcagcggtgaccgcttggacgttctttttgacaatggcagccagcgcttggcggtggaggtaaagacgagcaagtgctcggaatccgagttgatgcgaggtgtctatcagtgcgtcaaatacagggcgattctacgagcggagcaattagcgctgcgacatgcgcccaccggcgatgcggtcctcatatgtaccagagcacctggtaaggagacgaaggcgctcatcaagctattgaatgtcaagttccatcgagtgccaatggatgcggagtcctga

SEQ ID NO: 518484 - DNA, 951 bp, Stenotrophomonas maltophilia
atgcctgctgtagtcatcgccgtcatcagcagcccggccccgcatcctccccagaatccttccgtgccctggtgcaacggcgcgttatccgtggacaatggtggctctcattaccgccagggattgcacgtgctcctgtatgacctcatcaagctccatgagtgctcgtttgaccccaagctgaccaaggtccatttggcgcgctacaacgacgtagaccatcccatggatgtctacaggcgtggaggcttcgaggaatggcagcggtggcaaaacggcaacaacttcagccgtccgatggtgttgagccttatccaaggcgattccgccacccgatggatgttcgcagggctctttcgtcaagtcggcttcacggtccacgacgacaagcccaagggcggctattactacaacctggagcgcgtcccgtctaccgaaccctttgaagggcgccttttctgctccagtgcctacaagaagcgtccgtcttatctgaccggcgaatacctcatcggggatttgatggtcacagagttgctgcgcgagcggatcagcatcggcccatttccaggctacaagggtgtagacattagcaagcaggatctgaatctattggttaagcgaggcacggagtcctggaaaaccgctctatcagcggtcaaaggcatctacctcatcacggacacgaagaccggtaagctgtatgtcggcaaggccgacggcgagcaaggcatttggggacgatgggagtgctatgccaacacgggtcacggccacaatgcggcgctggtccaagagcttgggatcgaggccaccgaccggcaggatgaccttcacttctcattgcttgagatcatggatatacagtctggccctggcgaaatcgacaggcgcgaatcgcactggaaaacggtactaatgactcggagctacggctacaaccgcaactag

SEQ ID NO: 518485 - DNA, 1155 bp, Stenotrophomonas maltophilia
atggcaagaaagatcatcgacctcgattccgttcaaccgaacggaaagcggggtgaaacacagcgcccggcgtttaccaagatcaacgagaatttcgccgaggtctacgacgcgttgaacgaggtcgcgaagatcccggaaaccgtggcgaatgccatcaccgaccgcgttcccggcaggaatctgctcatcaatggcgccctgcagttctggcaacgtcggaatgcaggtcgcgttggcgtgggcgccggttccctgggcgcacaggccttcgttgccgatcgattcgcccatgctgcactaagctgcacccaagatgttcagcgtgtcgtctacgatggagcgcaacgcggctatccggatgacactcgttccatcgtggtctgcacggtaagtggcgcgactccaggaagcagtgcctggctgggacagaagatcgagggtgtccgcagtatcagcggagacctgactgtctcggtatgggccaacagtgatgtcgccggccgcaagatcggagtgcgtgtgatccagaactttggtaccggcggatcacctgcgtcggaagtagccaccgaagcaggagtatttgttcttgctgaaggcgcgtcccgccattccatcactgtcatgcttcccagcacgcgcggaaagaccttgggcactgcgggtaacgatcacatctatgtagtcttcgacttgtgcggtggtggctacggaggtgcgctgtctggccagaatggtgccttcggcctcacccagttccaggtcgaaccggggcgcgcagcaacgcactttgattggcggctgccgggtgtggaactggcgctgtgccagcggtattacgagaagagctacaacctcgacatcccacccaacacggcgcacaacgaagggcgcgaggcgttctcgatcaactcaccgggaatggcgcattaccagagtgtgcgattccagacgacaaagcgtgcccatccctacgtgatgatcatctcggccgataccacccagcagaacgggcacatcgccgaggatgacgtgtcccgcgtgccctgccttgtcaactatgcatcaccctcctgctacgaagtgagctggaccaacaatccaggccgttggggcggctggtggcattggtgggccgaagccgagctgtga

SEQ ID NO: 518486 - DNA, 615 bp, Stenotrophomonas maltophilia
atgactgaccgtcttcgtacgatccgcctgtacggcaagctgggcgcgcgctttggacgcaggttccggctggcggtgaacagcccggccgaggcggtgcatgcactgtgcacgatgctaccgggattccagcagtacctgatgggcgcaaaggccaagggcatggagtttgccgtgttcaatggccggcagaacctgtcgcgggatcagctgcacgacccgccgggacaggatgacatccgcatcgcaccggtgatggtgggcagtaagcggggcggtgtgttgcagaccgtcattggggtggtcctgatcgttgttggcaatgtcattaccggcctgtcatatggctgggccgcacccgttggaggtgcgttggtcaacattggttggggcatggtgttcggcggcgtcgcccagatgcttacgccacaaccaaagggcatgggcgcgaaagacacacccgaaaacgcaccaagctacagcatgaacggcaccgtcaacacgcaggcgcaaggcaaccccgtgccggtcgcctatggtggccatgacagcaagggcatgttcatcggctcggccgtgatcagcggcggcatcctggcggaggaccagttttga

SEQ ID NO: 518487 - DNA, 462 bp, Stenotrophomonas maltophilia
atgcgtatctgcctgctgcttctcgccctgtccggaccgctgctggccgccgatggcccgccatcggcgccggcggccactgcgctgccggaggtaccgctgcccccttcgctggatcgcgtactgcgcgactacgagcaggcgtggcgcacgggcgacaccaaggcgctggccgggttgttcgccgaggatgggtttgtgctgcagagcaaccagccgccggtgcgcggccgcagtgcgatcgaggccgcatatgccggacagggcggcagtccgttgcggctgcgtgcgttggcgtacgcggtggacgggaatgcgggctacatcattggtgcctaccgctacggcaacaacgtgggggacaccggcaaattcacgctgacgctgaagcgcgtgggcgatgggccgtggttgatcttctcggacatggacaacaccagcgcgccgccacgggcgcggtga

SEQ ID NO: 518488 - DNA, 357 bp, Stenotrophomonas maltophilia
atgaacgcatcggagttcccccatcagcacgccccggccaatgccgatgaggggcacgacatcccgcccgatcccaatagcctgacggccctgctgcatcgcatcgggttgggcgcggctgccgacggccagccctggcccgagcgccatcagctgcccggccgctgcctggcattggccgatgccgatggggcactggccgggctgcgtatcgtgcaggagatcctgctggcggccgaacgcgcccgtcagaatggtggcccggaagagtacgtgggcgatcgcgtgatggaaggtctgaagctggcggcgctggcgttgaccagccacgccatctattgcctgcacccggaatga

SEQ ID NO: 518489 - DNA, 1014 bp, Stenotrophomonas maltophilia
atgatgaagtatgtgaattccctcgccgtgctactggttatgagtgccctgtgtgcatcacatgccgcggccgcgccgatatgtgagcagccatttgagggtagactttacagtgcaggcaaggtgcaccgcattccggtgcatatgcccattggtgcgcccctgaccgaatggacgacgtccgggcaagtgaacataggctctacatgtgacaccaggtatgacaagcccggaaccgtcatcacgccagggcttgaggcactggatgtctacgaagatgcgtcaggggtgtattccgttttccccaccggtgtcgaagggatgggcatgatcctgagggtgaaggatctttattcccgtgcggactacgtgcctgtgcataacaagaagacgagaatttcggagtatggggatggcaacaattatagttctcattatttgaatgcccattatcgctatatcaaaacgggcccaatggtggttggcagtcagaagaccgctaacgttagcttgctgagtgcgttgatggatggagggtcgcgtaattcaacggcagtgaaacttggtgagaatacaatgaatgtattcgacaacccgcagtgcaatgtcacgacacgacgcgtgaatattggctccgtgcagttgtctgaattcgaaaactccagggcgtccgaatcgcgtaatttctccattgaattgggctgtactggagtgcctggtcaagtcaactacgagttcacgacaaaggatgtcaggacgcttgatccgaagttgggcctgattgaactggataatcccactgacgacgggacggccaagggcattggactgcagcttctgcacgacaatggaacgccgatcgaaatggacacctcctatgtgttctcgtcacacgttacgccgggaccggtcagcaaggatttcaaagtgcgctactacaagacaacgcctgacgcggtggttactgcaggtcgtggtgatgcagcggcgaaggtgctgctgctgtacccgtga

SEQ ID NO: 518490 - DNA, 759 bp, Stenotrophomonas maltophilia
atgcgaaccgtcaacaaaaccaaatcgaatacccagcaggccgcactgcggctgctgggggccttggtgctggtgctggcgctggcgctgagcaccggcaccgccttcgcccaggtagcgatggaaggcacccgcgtagtgtttcctgccgcgcagaaggaagtcgccgtacgcatcaagaacaatggcgatgagccggtgctggtgcaggcctgggtggccgatggcgatgccaagcagcgccctgaggattccaaagcgccgttcatcctggcgccaccgctgctacgcttggacccgggcaaggaccagcagctgcgcattcgccagctggccgagactgcgcccaccgatgccgtcgagcatctgtattcgctggatatcctcaccgtgccggcacgcggcaaaaccaccgatgtgaaccggctggatctgtccgtacgcagtcgctacaagctgctgtaccggcccaagggcctgggcctgccggtggacccgcctgcacagttgagtttccagctgcaggatggcgagccgcgtgtgctggcggtacgcaatgcctcgcccttcaacgtcaacctgggcgacatctcggtgctgcatgccggcggtgaagcggcgctggacaacccggccattccaccgcagggcgagcgattgctgcgcttgccggaggaagtgaaaggcccggtacgcgcggtgaaattcagttggattgatgacgatggtgcgcttcatcctgttgagcgcgcggtttga

SEQ ID NO: 518491 - DNA, 1086 bp, Stenotrophomonas maltophilia
atgaacctatatgaaccgacatggcgccgcgtccccggcaggcgagccccgtggctgctcaagggcctgctcgcgattgccgcacttgccccgggcgtggcagccgcatgtggtacggcaccggcgccggtgatggtgcctcaagccacaactgacggaaagatagtggtcgcggccagaagttccgccacaaccggcgcgctctccaagtggatccggcactaccctgtcgtccgctacttcgactgtgcaggtagcccacgacccctctttatcgtcaaggggctcgagacgaatatcatggggacgcaccacgagtatggtcaaacgtactcgatctataggaccagtgtggagggagtggggatcatttttggtgtgagcttgccggactacgcaagcgcgggcgcatccccggtctggcgcgccgttctgggtggcgtagagaatgaggctgttcctgagcgtagtggttgggagtccacgcatggattttccctgttcgcccgcctggtccgcactggaaagatcagtgcgcgcggcgaggtgagggtcgatccagtagaggcagggaccgcaagaacaacctggaacggcacggcctacccacatggagcgccgttcggaacccagggatttacggtgaacttccgcgacaaccggatttgcgaggtgagaacgcgcacggtgggccttccaattacggagctttccgagtttccggcgagccgaggaccggcaagccgaacacatcccttcaatatcgacttccactgcgaggggggcgtcggtgaagtcaggtacgagttcacccctgtaggcgaaagcccgaaagaagacctcaacaatggcatctgggggctcgataatcccgacgacgatggcacagctaagggagtcgggatgcagctgctggacgcgagcgggtctccgataccgttcacatcggagcgtgttctggggacgcccagtggggaagggccttggtccaggcccttcgccgtgcgctactaccgcctcggcgctgagacacccactcccggtcgcgccaacgcatccgtgcagatgctgctgctctatccctag

SEQ ID NO: 518492 - DNA, 2607 bp, Stenotrophomonas maltophilia
atgaaccgacaaacttcgcacaatgctcctacccgcttgccactggttgcggcagtcgtggccgcgctgctgccaatgtcggtttgggcggcaccgaaggtggaattcaacgccgacatgctgttcggcagcgccggcagcgcgctggacctcagccgcttcgagcgtggcgacttgctgcctggaacctacaacgccgacatctacgtcaacgatgccttggtcgggcgccgcgacgtggtggcgcgtgtgagtgaggatgacagcatccagttgtgcctggatccagaactgtttgagctgctgggcctgaacgcagcgcgcttggacgccctgcgggaatccggcgatgaggccgggcgcgacctgttgccgctgccgacagagacgacctgtgcgccgctgtcggcctatgtgcccggggcctcggccgagttcgatgtgggcgagcaggcgttgcaggtcagcattccgcagttgtacctggcccgcaatccgcgtggctgggtagacccggccctgtgggaaagcggcattaccgctgccacgctggcctacagcatcaaccacagccgccagcgccaccagggccaagaagccagcagcaccagcatgaccttggatgccggcctgaacctgggcgagtggcgcctgcgccacagtggctacctgtaccacgccgacggcgtgggcaccgcctactcggccgggcgcagctatctgcagcgcaatctgccgggctggggggcgcagctgacgctgggcgaatcctccacccagggcgatatgctgcagtcggtcagctaccgcggcgtcaacatcagctccgatccgcgcatgctgccggacggtgtgcgcgagtacgcgccggtggtacgtggggtggcccagaccaacgccaaggtcaccatccgccagcgcggctacgtcattcatgagaccactgtggcaccgggaccgttcgagatcgacgatctgaacagcaccggctccagtggcgatatcgaagtggaagtcaccgaggccgacggccgggtggagcgcttcaccattccgttcaccgccatgccgcagttgctgcgcccaggccagcagcgcttcagcgtgaccgctggccagctgcgtgacgccggccatggcagccagcccaatttcgtggaggcgacgctgcgccgtggcctcagcaaccagttcaccggctacgccggcgctaccgcagccgaaggctacagcagtgtggtgctgggtgcggcctggaacacgccgatcggcgcgttctccggcgatgtcaccttcagcgatgcacggctgccgggcgatgacttttttgccagcgaacgccgccgcggtcagtcgtaccgggtggcgttcaacaaggcgctgttctccaacagcaccaatatcacccttgcggcctatcgctactccaccagcgacttcttgtcgctgcaggacgctgtgcgattgcgcgccgaggatgcacacagtggttacgatccgcacagccgccagcgcagccgcctggacctcaccatcaaccagcgtctgggcgatggcaagggcaccctgaacttcaccggcagtaccaccgattactggtcggaaaatcgtcggcgtaccacgttctcagccggctacggcaaccgcctggggcgcggcagttactccatcagtgcgcgccgtacgctggactcgtcgctgttctcgtcgggcccggtcaaggccaccaacagcgtgtaccttagcttcagcatgccgctggggacgccgcgcttggcgccgcgtctggataccagttacgaccgcgacagcactgggcgccacagcgagcgcctgggcctgtacggtgcgctgggagatcaggcgttgggaagctacaacgtatcggtggcgcgcaatgatggcggcacgagttatggcgtgggcgccgattaccagctgccgcgcgtgcacctgtccggctcctatgaccgaaccggtgccagcagccagctgtcgctgggcgccagcggcgccatggtgctgcacggtggcggccttaccctgggccagggcatcggcgaaaccatgggcctggtgcatattcccggcgccaagggtgccgtgatcggcaccatgaccgatgtgcgtaccgactcgcggggctacgcgatcgtgccgtacctcagcccgttccgtcgcaatgagctgaacgtggaccccagcaacctgccgctggatgtggagctgtctgccggttcggtctcggccattcccaatgccggcgcggtggtgaagatggtgctgccgaccacttcgggacgcagtgcgctgatcgaggcgttgctggccgatggcacgccgctgccgttcggtaccgatgtcatgaccgccgctggcgaagtggtgggcgtggtcgggcagggcagccgcctgtgggtgcgcggcatcgacgaacagggcgagctgttcgtgcgctacggcgtggccgagcacgagcagtgccgcattgcctacgacctggcgggcctggaatccggcgtgctgctgcggcacggctgtgcgattgacgaaggccgctccgaagaaaccaatgccaacattgcggccaacgttggcgccgaatga

SEQ ID NO: 518493 - DNA, 762 bp, Stenotrophomonas maltophilia
atgattgcaatccccaccctcgcgtggcgctgtgcgctgatcatccctgcgctgctggttgctgcatcagcacacgcgcaggtcaggatcgagactacgcgtgtcatttttccgcacgatcagaaggaagtcagcgttcgtctcaccaacattggtcaggcaccctctatcgtccagagctgggtcagcccctatggcatcgactcaacaccagatgcgtccgacgtgccctttatggtgctgcccccggtagttcgcgtggatgccggcaagacccaggcgctgcgtctgcggctgatggacaaggcgctgcccgctgatcgcgaaagcgtcttcactctcaatgtcctcgatgttccgggtcgtgcttccgggcaggaaagcaccggagcagtgctgaacattgcggcccgaaatcgcatcaaggtgttctaccgaccacaggccgtggagaaattcggttactcccgggcagtagatcagcttcggtgggcagtggtcccccagagttctggctgggcgctgcaggctgtcaacgacagccctttgaatgtcaccgtggtgcgggcgggcgtgaaggtggatggaaaggacatctctgcagagaacgtcacgatgctgccgccgaaagcaacgctgcattttccgttgttggggggcgtgcatgccgccaaggcagccgaagtccgcttcaagtacatcaatgatcacggcgccacgctggagcgcaccgttgagctgaccgagcgccagacgctgtag

SEQ ID NO: 518494 - DNA, 549 bp, Stenotrophomonas maltophilia
atgaacaagatttcgttcgctgtggcggccgccctggccatgagcgctgccggttcggccagtgcagctgatggcaccatcaatttcacggggcgcattgtcgcggcaacctgcaccatcgactacggcaccaccggctcgaccatcaatctgagccacatcagttcttccgcactggccgacagtgcggatgcaggtagccgcccggtcaacatcaccctgaaggccggtggttccggctcgagcgccacgtgctcgaaggacaatgcgaatctgctgatcagttccggcaccaagacaaccaccgatggcctgctcgccaatacgcatgctgatgcggccaccatcgccgtgggcctggtgcgtaccgatgacggcagcaacgcgctgatcaaccttgccgatccgaaggactcgctggtggcaacgaagacggctggggagttcaagtatgccttcaccgcgaagtatcacaccacgcacggcgccggcaccttcaaggaaggcgattacaccggccagctgatgttcgacatcgacaactactga

SEQ ID NO: 518495 - DNA, 687 bp, Stenotrophomonas maltophilia
atgcacttgatccgcaccaccgctgtggcgctggcctgcctggccgtgcccgcccttgcatctgcgcaggtaaccgacgaaggccattacgccgccgtacgcctgatcagcgccgagcacagcgcccgcaacatggacgacagcacccgcccgggcatcggccagttcgtggctgggcgcgattcgcgcaggctcacgaccggcgctgttggcgtcggttacacctggggcaacggctggcgcagcgaaggcgagtacaccccgcgtcgcactgaccgtttcaccagcggttccagcaccttcgccaccagtttcaatcatcaccacatccagtcgcagcggctgatgctcaacgcctaccgcgatgtggcgttgaatgacgcctggtcggtgtacggcaccgcgggcatcggcctggccaagctgcagtcgtacggttggcagggtaatgaaagccgccagtacgccaagcagagcaccacccagctggcatggtcgctgggtgccggcatcagcatgcgtgccggtgagcgcgcccatgtggacctgggctaccgctatgccgatctgggccagaccgaaagcggctggaacaccttcggcaatgtccgtggcctgcaggacgaaaagatgcgcgcccgcctggtgtccagcgaagtgtcgctgggcctgcgctacgcgttctaa

SEQ ID NO: 518496 - DNA, 927 bp, Stenotrophomonas maltophilia
atgatcaacgccccaaccctgctggccgccgccgtggtggcctgctgcgcgccgctggccgtatcggccgccgaggccaccctgtcgcctgccagcaacggtggcagcggccatatgccgtccggctaccaccagctcaacttccacatcggcaatggtgactgggccggtgacctgcgcctgccggccagaccgtccgcaggcgaccgtgtgaccgtcttgtccgatgccatctggagtgcgcgcctggacctggctggcacggccttcgccaccgctggcggtgcaccgttcctgcagggcacgctgctggacatgcgctggaacgctggcaccggccaatgggatgtgcaggatggcggcagtgcccgtgcactgaccgcgccgaacctgcccagcgaccgcatcgccaactcctaccacctgctgacccagtactcgatggccgacggcagccatacgggtgaactgcgcctgccgtactgggcgccggacaatgcgctgttgaccgtggtcaaccgcgcgacctggaagacacggatcaatctggatccgtattccgtgcgcggtgagtggcagaactgcacaaccggccagaactgcacctacacctatgtggccagcaagcggcgctgggtggaagtggtggagggcaatgccgtgaatgccgccgacgcactgccgttcccgaagagcgtgctgtcgcaggtcacgctcaatcccgcacatgatgtgggcaggaccatgaccctgccggccaagggcgtgcagggcgatgtgtacgtgttcctcgacaagcacggcattggcggccacagcatcggcaccacgcacaccacgctggagcagcccgtgcacctgcgccccggccaggaactgcgcatgcgcttcaacgcgatgtatggcgcctgggatctgctgccttaa

SEQ ID NO: 518497 - DNA, 195 bp, Stenotrophomonas maltophilia
atgcccccctcgctcgacacgcgcatcgcccggctgatgtgcggcttttcgcagctgacgccacacggccagcggcgcttcatggacgtgctgaatctgtatctgtatgcctcgccggtgcaacgccggcagctgcggcgcgactggcaggacctgccgctgccgtgtgaaagctgcgtgaaaaaatcggattag

SEQ ID NO: 518498 - DNA, 684 bp, Stenotrophomonas maltophilia
atgaacatccgtatcgtcatcgccgacgaccaccccgtcatcctcgcgggtatacgcgaggcacttggcacagagccgggcatcgaggtggtcgcgggtgccgaggattctacggtattggtagacgtattgagcaggtttcccgtcgatgtggcggtgaccgatttctccatgcccggtggccagtatggcgacggcgtggccctgctcggcttcctgcgccgacgcttcccgcaggtgccgttggtggtgctgactgccgtgggcggcgtacaggtgctggccagcatcgaaagtgcaggggcgggtgccattgtcgccaaggccgacccgacggccgagctggtgcaggccatatgtgccgccgcgcaggggcagggctaccgttccaccgagatccgccggcaactggaacgcatcgcgccagccggccaggttgccctgaccaagcgcgaggccgaagtgctgcggctgtttgccgaagggctcagccagaccgagatcgcccggcaactgcaacgcagccgccagaccatcagcacgcagaagagttcggccatgcgcaagctggggcttgagcgctcggccgacatcttcgaatacgcggtgacccatggcgtggtgtcggcatcgcaggcgatgcgcgcacgtgagccacgtcggaagaatgacgatggagcatga

SEQ ID NO: 518499 - DNA, 657 bp, Stenotrophomonas maltophilia
atgacccagctcgacatccgcgttgccgttgccgacgatcacccggtgatccgactgggcgtgcagagcgtgctggacgaggcgccggccatccactgcattggcgcggtagccgattcgaccggcctggtcgaactgcttcgccgcgagccgtgccacgtgctggtgaccgattacgcgatgcccggtggcgcatacggtgatgggctggagctgctggcgttcctgcgcactgaatttccgaagctgcgcattgtggtgatgaccggcatggaccagccgggcctgctcaaccggctggagaccagcgccgtttccgccgtcgtgagcaagggcgatgatctgcagcacgtactggcggcagtgatggcggcctatgccaaccggcgctacctgtcgcccagcgtagcggcgttggtccagcaccgggagcagcgacggacggtggtgctgtcggcccgcgaacaggaagtggtggcgctgttcgtttccggtctgaccgtggcggaaatcgcgcagcggctggaccggcgcaagcagacggtcagcacccagaagatcaatgcgatgcgcaagctgggcatcgactccgatgccgagctgcatctgctggcggccgagctgggcctgaaaggcccagccagctgcgagcggtaa

SEQ ID NO: 518500 - DNA, 3387 bp, Stenotrophomonas maltophilia
atggcaggtaccgacgcagcgcagggatcgggcagtaccgtcgctgccgcgcgcctgggcgatctgcgtcggctgcgcaagcgcctgctgctgggcggcggcgccctgatcaccgtgctggtgctgttggctgcgatcgtcagttccatcgccgacgtggaagagttccatgcgcgcgagcgccagtccttcctcgaggcgcgcgccgcagttgactacttcctgtaccagcgtgaccgcgcgtacgccacctccatcaatggtaccgatgtggcgtggcgcgaccagcaaccggtgctgcagctggcgggctctgcgtggctggaacggttccaggcgcagggccaggaggtggtggtgcgcgccgagggccgcaccgccgtaccgtggttggtcctgggcgccgctgacaacccgttgccggaggcagagctgaaggcctacctgggcatgatcgagatctactcggcctataccgccgattcgatcaccgcgcaggatgtacccgggccggttgcgatgtacgcctacgaaccgcaggggcgactgctggccgtgtccaacgtgcgtgacgaggcgcagctgctgcataccctgggcgtggccacacggcagcaggcgtttgcgcggctgctgcgcgaggagccggaagtacgcaagctgctgccccggccagggccggtgcgtgccgcctcccgtgaggggcgcctgtggtcgcgctatggcgtcaatccgctcaacggacagccgtcgctggtgggcgtcgtgaccatggccgaaggcaccacgccgtacttccggcgcgtggtgttcgaagcgatcgagaatgtgcgcacccgcctggctgcgcgcgagcagggccgctatctggtggtggcgggtgaccgcgacgtggtgctcagcagcggtgggctgacaccgcaggaacaggcgctgctgctgcgcagcccggcaccgaagcaggacagccggccaagccgccactacctggatggccatttcgtgctcagttgccggctgcccggtgtggactggacgctcagccacatctatgggtggtcggatgtctgggccgagcagggtacgtacctgctggtgcgctggctgactgcatttctgatcatcggcctgttgtggtggctactggtgcgcatcgatcggcgcgtgttcacgccggcgctggccgatgcctcgcgggtctacgaaagcgaggccctcagccgggtgatcatcggcaccgccccgatcgggctggcactgctggcgcgtgacagcgggcgaccgctgctgcagaacgacacggcgcgccagctcgtggctgatgacgcggccgaagacgatgccggcgtggcgcccctgtacgcacggctggtcgagctcggccgcggcgcgcctgccaacgaggcccttgagctgcagtggtcgcccgagcagcaccaggatgatcgccagttgcaggtcagcatggcccaggccatctatcacgatcaggccgtctgggtctgtgcgttgcgtgacgtcaccgcgcaggtggaactggaagagaatctgcggcgcgcacgcgaggattcggaggctgcacgccaggcggcggaagcggcgacccgggcgaagtcggcgttcgtagccacgatgagtcacgagatccgcacgccgctcaacggcgtgttgggccatctggaactgctggcacgctcgccgctgcagccggaccagcgtggccggctggaccgtatccgtttctcggccgatgcgctgatgcgtatcatcagcgacgtgctggacttctccaagatcgaagccggacaactggacgtcgagcccgcgccgttcgcagtacggccgctgatcgaaagcgtggcgctgttgtacgcgcccgatgcgctgggcaagggcgttcggctgtactttgccgtcgaagccccgcccgcaatggaatgcattggcgatgcccaccgcatccgccagatcctcaccaacctggtcagcaatgcggtgaagttcaccgaatccgggcgcatcatcatccgcgcaacggtgcaggaagcagggacccgcggtgccacgttgcgggtgcaggtgatcgattcgggtatcggcatgagtaccgagcaggcggcgcagctgttccagccgttccagcaggccgatgccagcgtatcgcgtcgctatggcggcagcgggcttgggctggcgctgtgccagcagctggcccaggcgatgggcggcgacgtcaccgtggaaagcacccagggcgtgggcagcagcttcagtctggtgctgccggtacgtaccacgcccgacggatccacgccttcgcggccgctgcaggggcgccaggtcaccctgctgtcggcagtaccggaatggcgcagcgagttcgagcgcctgctgcgcgggtggggtgccgatgtgctgtcgctggatcgtccgcaggccgacgcgcggggcgatgtgctgctgatcgtgggcgaacaccagccgtggacggaagacgaagtgcagccaatggccgtatcgcacgcgcgcagcgtgctggcccatgcccaggggccgatgacgcccaccgcgcacgacggcatcatcgaggtgacctgctacgccagcgatgcactgctgacggcgatcggcacgcaggacgctcctgcagaggcgccgcgccccctgtccgcaccgccgaccgcgcaggtgcaggggcgcgtgctgctggtggaggacaatgccgtcaaccgcgagttgatccagcagcagctggaagaactgggtttcgacgtggatgccgctgaggacgggcaggccgcgctggcactgtggcaggatggcctgtaccgcgcggtgctgaccgacatcaacatgccggtgatggacggctatgcgttggcgcgcgagctgcgccgccgtggccagacgcttccgatcctggcgatcaccgccaccgccctggccagtgagcgcgagcgttgcctggcggcgggcatcgacgatctgctgctgaaaccgttgaacctggagcggctggctgccggactgggcaaggcgcgtgtcagtcaggccgagcctgcgccggtcgcgcctgtgcctgctgcggcgccgcgcaaggtctccgctgcgatccgccgcatcttcgtcgacaccggcgacaaggatctgcaggcggtcgccgcagcgcgtgccaatggcaatgacgcgcagctgctggagcggatacatgcgttcaagggtgccctgcagatgctgggcgaaagcgcgttggccgagcaatgcggcgccatcgagctggcgctgcgcgaggggcagccggtgggcggtgacgcactggatgcgctgcagcacgccctgcaggcacggctggacgactaccggcgggacctggatgacgcgccgtga

SEQ ID NO: 518501 - DNA, 2685 bp, Stenotrophomonas maltophilia
atgccgtccgccgccccgtccattgcagaatccctgcgtcgcctgcgtccccgtgcgcaggcggcggtcgctgccgacgagctgctcgcgctgaagcgctacccgcggcgcctgatgctggcctgtggggcggtgctcagcctgttgtcgatcagcattctggtgacgctgatcgtggtgcaggtgaacgcatacgaggcgcgccggatcgccgagttccggcgcgcccacaatgcgttgcagatccagctggcccgccaagatgccagctacgcacggctggccaacatggccgagtacgcctgggaaaagaacatccagctgggccagcagtcgccggacgccatgcgtcaggcctatctggacggtggccagcgcctgatgatcgtggccgacgagaaaagccgcccacagatggcgctggggctggagaccgcaacgtggcgggcgcaggaactgcagcgctacctgcagttgagtgcagcagtgtcactgatccaacgccttacccacactgccgatgacggagagccggccagtgcgtcttacttcttcgatcccagcggccagtacctgtcgctggacaagggcctgaccgagcgcagcttgaaagaagcgctggctgcccgttcgcgcagcgacgtgttcgagcatctgcgtgcaccggcgcgcctgcttgcaccggcgtccagccacgatcaggttcctctgctggaaagtgtggagcgcagcgaagcgccccgacgcagctttggccgtcaccccatctcgggagaggcatcgctggtctcggtgttccaggccaacgctgcgggggcgccgatcgcgaccttcgtcgcctatgaaccgatctcgcgcctgcaggccttgctccgtcgcaacagtcaaggccacctcgtactcctcgaccgcgacggcatgcagatcctggtgtccagcgaagccgatgatcctgtgacagggaggccggccggcgtcgaatggatcttgttgggcgacgcaacacgggcgcgcttccacaagggccgcttcaccctggcattgggcgttgcaggcacaccctggacactggtggaaacctacacctgggccgacatcctgcgcggcatcgcgccgatgctggttaccggtggtgcgtccctgctgggcgcgctggcgctgctgtgggtgctgctgctgtggctgcaccggcgcatgtacacacccgcgctgcgccaggtgaaggccatctatgcccgtgaccggcggctgcggctgttgatcgaacacgtacccgtcggggtcgcgctgctcgacgccgggagcggcgatcttcaggactggaaccggcccctgcagtccatggaccgcagtaccggcggacgcctgctggcgcagctgcgcgaggcggctgtcgaagccgatctgtcggcaggtccgatcaccctgcgcggcgaccatgcacccgcacacggcggcgcgcagcggctgttctaccgcacgcggatcctgagtggaggcagcgactggcccggcggcatcctgctgatggtggaagacatcagcgaggacgtacgcgctttgcaggccgagcgcgcggccactgcatcggcggtggcgggcagccatgccaaatcgaatttcgtggcgacaatgagccatgagatccgcacgccgttgcacggcatcatcggccacctggagttgctggcgcgtgccccgctggcgcccgaacccgccgaacgcgtggcgcggctgcgtcaatctgcagactcgttgatggacatcatcaccgacgcactggacctgtcgcgcatcgagtccgggcagtggaccgtggcgccggaacggttctcgcccgccgcgttgctggagcgggtggcgctgctgtacgcgccgctggcacgcgccaagggcctgcagctggactgcgtgatcgatgcggaggtggcccccgtcgtcattgcgccgatggccgccgccgaacgcgtgctgcgcaacctggccagcaacgcactgaagttcaccgcgtccgggcgcgtgcagctgcggctggcgtgcgagcgcggggcagggcaggcacggctgcggttcgaagtgaccgattcgggcatcggcctgagcgccgccgaatgtgagcgcctgttcgagcccttcgtacaggccgatgccagcatcccctcgcgcttcggcggctccggcctgggcctggcgctgtgccgacagctgtgccagcagatgggcgggcgcatctgggtggaaagcacaccgggcgtgggcagccggttcatgttcgaggtgccgctgctgacctccctcgcaacgccggcagcggcgcccttggccgggcagcgtatcggcctgctggcggcgccgggcccttggcgcggcgagctgaagcgtcgcctgcgtgggtggggtgcgcaggtcaccgcgtcgatggcaggtgctcaggttccgtggatggagctgccgccagacgcgcccgtcgtggtgttcgagcccacgcccgccgagctgctgtggctgcagcagtcgggccatcggtgggtgcgtgtctgccgggacgggccgcttcgcccgcagccccatggtggggacggatgggtggtgtcgtgccataccagtgaggggctgtgccgggcgctactggcgcttacgacaccttccgtgccggaagcgccaagaagtggcgtaatcggataa

SEQ ID NO: 518502 - DNA, 426 bp, Stenotrophomonas maltophilia
gtgagcattgaatccatcctgtactcggcccaggccaccgccaccggtggccgcgaaggccgtgctgtttcctccgacaaggtgctggacatcaccctgtccaccccgcgcgagctgggcggtggcggtggtccgggcaccaacccggaacagttgtttgccgctggctattcggcctgcttccttggcgctctcaagcatgtggccgcgcaggacggtgtcgcgctgcctgatgacgccgccgtgagcggtcgcgtgggtatcggcccggtgccgaccggctttgccatcgatgtggccctgaccatctcgctgcccggcctcgcggctgctaccgccgatgaactggtgcgcagggcgcacgtggtctgcccgtattcgcacgccacccggaacaacatcaatgttgcattgatcgtggcgtga

SEQ ID NO: 518503 - DNA, 981 bp, Stenotrophomonas maltophilia
atgtcaacacgaaagactatatacctcgactccaacatctatttggcaatcgccaaaaaagaacttggacatctaagaatagaaaataagctaaaaattctaaaacagaagtccatcatcttcccgcacgctccacctcacgcggaagaagcaatcgcgagaatggagctcgacgccaactctgcagcgaacttcgtccgcttggtccgcagattcaacaagggctttggctattttccagggttcatgaatgccgaggatactgaggccgaactaaggcgcgtaagtgacgcagggcattcagatccgcgcctcagatcctatgcacgaattctcagcgaaaatctcgaccttcaccgtcagaataaaatatccaacgatcggcttgctacacgccttgaggaagatgactttattcactgcatggctcgatgtgccgagagacccgaacttacagacttcgccattgatagtgaggttcggcacatggggcggcgaagtgaagggtcaattcgatcaaataatgacgacctagaagcccccaaccttgcggctgaaaattttgaggatctgcgtcggagatacggcctgaagccgaagatgctcgcaaatatcccaccaacggaaatattcaacgacatcaatttccaccgcttcgcggcagatcgacttaaggaagataatttcaatattcaccaactaccctcacccgaccaactgatggaataccatcaatcgagagcattcgttatttgcaagctgctgaacataatggagaaggcgggatatcgccaagagaccaaagacagccgacccaacttaacacgacgaatgcacgatgttagccatgcaatatatgcaagcgccgcccagtatttcgtcacagatgatcgaagactcgccgccaagacaactgctgcctatcacctacttggcttaaagacaaaggttctagggaaggaagagttcctgcaatattaa

SEQ ID NO: 518504 - DNA, 1854 bp, Stenotrophomonas maltophilia
atgagcggacaggcaaagattaagacgctcagtcttttctctggagcgggagggcttgacatcggcttttcccaggctggttacgaagttgtgggctgcgtggaaatagagcctgtttactgtcaaaccttgcaggccaattctggaaaaggaaagctcctccgacatgcggaggtaaactgcgtcgacatcagagagttcgatccagcaccatatgtgggtatgggtatcgagtgcgtaattggtggacctccttgccaaaccttttctgcagctgggcgtcgctcaggcggagttcttggcactatcgatgcacgtggccgacttttcgagtcctactgcagaattttgaaagcaattcgtcccaaggttttcgtattcgagaacgtctacgggcttcctggagcgaatggcggacagccatggcgtgagatatgtaaggcgttctcaggcctggggtactcattgagggctgaggtcgttgattcggctgactatggagtcgcccagcacagagaacggctaatcattgttggatatttggccggggtgcccgattttgagttccctgagccaactcatgggccggactcgtcatctggtctgccgcttgtctcagtgtatgatgcgatatcagatctgcaggatgacgcggagccttaccatgaatttgatgggctgtacggacatctgttgtctctcgttcctgaggggctgaactattccttctttacaagggagatggggtatccgaaaccatacttcgcttggcgttcaaagttccacgactttctctacaaggttgaccagtgcgcgcctgcgcgcacgattaaggcgcagccgggtaaattcacaggcccatttcattggaaaaatcggcatttcagtgttcaagagctgaagcgccttcaatcatttcctgatgactatgagattgtcggtaagtatgggaaggcagtagagcagatcgggaactctgtgcctccgcgtctcgcctatgtgattgcacagtccgttcgtgaacagttgttgagaaggagggcggatctcactttttgtgttcgtcctgccggattcgaatcaactttcaagaagagacagcgagaaaggacaaatcactacaaagacgttgccaaggctgaggtcgcaaagcggttttcgaacgttgtgagcatcgaaactgcttcggttaatcgctccgaggagtattttgttcggtaccgaggaaatttcacaaaacatttctcttcttcgatggaggaaggggatttgggtgatgtttcctacgcggtgaaagagcgaagagaaggggcaaatgttcacattgacgtcggtcttgcatccgtgagagcgaagagcgttaaggagatctcgattgagatctccggtctttctaagtatctgatagacgttgatgtattggaatgcaaggctagaatctcgactttggatgatctctttagggtgtggagtatcatcgaggccgtgttgatcaaaggtagccagttctataccctgatcgatatctatgggcactacgcaaacaggggggataccgtccgtgttattacctccattaagtcgcgcagcaagtccgcgcttatgcgggcgatcgagtattttggacagtcgtctagtgccggcatatttatgactcaggagggtgttgcacaggagctgaagatagataagagtgaagtgccagatctcgtcgctgaactccgttctcttcgttgggatgttaggacgccgaaaacgcacccaacgattcggcagaaggcaattctctgtacctatccattcccgttgctttctggaaaggctcagcttgagcgtaaagtagatctcggttga

SEQ ID NO: 518505 - DNA, 966 bp, Stenotrophomonas maltophilia
atgtcacctcgccgcatagccaagttcaatcaggtagtcgccgaattgggcggcctcgtagtcgcgtctaatccattgtctggatggcccggatttctcgaaattttgggcacaagaagaagttacagagttgcattacacgtttcagctgtgtcgccgcatgctcgccatgaccatgaatatcgatttcaaaaccctgccgatgcaccggcagtttcgacgttaaacgggaatggtcaccctgtactcctcggcactcacatatcggacgacagcgtggtgttcgttgcaattgacggcaccacgcgtatcgggcgggaagcgcggttctcaatcttgttcgacaggcgtattctggaggaggcccgtgcgactggctggtcagtgtacgaatctcgcaagggagagcgcgtatacgcattcccgcccaatctcttccccgcctttatggagcagctaagagatggagagttcttgccggcccaggaaattgcacagatcgctgctgcatctggtgcagttgatgcgggaagtcctgatgcggcagctcgcgccacaagggcagtagaggttttagtcaggaggtcaggcgccggtcgagctatccgacgcgcatatggccatgcctgttgcatgtgccaactagcatcagacctagccgtgggagcccacatctatcctgttgaggcacccggttcaacggaccatgtctggaacggactggcactttgccccaatcaccacgcagcattcgatcgtcatcttatttgggtagatcctaattccaggcagatacgattgcaccccagccttcatgcgtcctcggcatggaatcgaggtgctatgcactttgttggctcaactggaatccagcttactccgccaatttcggcacaacactccccgaaaccggagatgttcttgcgtcgctaccagtacttttctggaaagtattcgtggatttga

SEQ ID NO: 518506 - DNA, 1218 bp, Stenotrophomonas maltophilia
atggcattgaagaagtccgtcaagtcgacgaagcgcgctgcagtgcagcctgctgcgaagccagtcaaaggaaaggctccatcctcgccccgagttggcgagctcgtcgcgggcaatgacatccagtttctaccagtcgacaagcttctcctcgatcctgaaaacccgcgtcttcctgagagcttgcagggagagtcgcagctaaagatgctgcgatacattgcgaagtccgaggctgttgaggacttgatggccgccatcggtcgcaacgggtttttcccgggcgagcctttggtcgtctatcgccatcctggagagaagggataccgcgtaattgagggaaatcgccgtttggcctcagtacggctgctcaatgagccgactctgtacaagtctagggcgatactagacatagcgaacgaaactgacgagaagaacaagccaaaggaattgccggtcattgtcgttggcaaacgaggcgatgcccttccttatctcggttctcgtcatatcgtcggcgttaaatcatgggagccattgccgaaggctcgatatatgcttcagctctttaatagcacggataagaagcgaaagcccggcgagcggtatagggacgtcgctaggcagattggcagtggccgccggtctgactacgtgaggaaaaatcttaacgcgctcgcggttttcaatgaaatcaagtcgaaagagttctatggtgatgaggatgtcgaggagactagtttcagctttggtgtcctatacacagcgttggactggaagtcgatagcggcgcatgtgggcatagtcaaatacgatgcggaaaccgacaaggcactagaggaatatcatccgattgtaaatcaaaaagtccttgataagagtggggtcgaagatatatatgattggtgctttagtcgggacgaagagggtgtcactgtcctcggtgagtccagaaatctaagtagattggcctccgtgctacggtcgcccgcggcaacgaaagtgctgcgagatacgagaaatctggactttgcttacgagcgatccggcggtgtgagcgaagaagcaatcgatgcgcttgtgagggcgtttggtgatttgaggtacgtaaattctgtgctggcacataccaagcgcgacgcgacattcttggactacgcagaaaaagtctacttgcaagctaagcaaatggcgaaaaactgtggcgtaaaggaatag

SEQ ID NO: 518507 - DNA, 990 bp, Stenotrophomonas maltophilia
atgctcgaggctcgctacgtggacgactgcttcgaccacctcgagtatcgtgcccgcaccttttctgctgcgtataggtttgacgtctcgggagatgttatttcaaaacaagaatgcacagaaactgatgcgcagtttgtgtaccgttttcttttggcctgcagtcgtccggatcacgggaagcaactgtcacttcacttcactgagttgtgtaaagtcgccttgcagcgactgctagggcatcgtgctcaagtgtggaacgtggatgcagggtcggctgaccgaaaggctctgggcggggagacgcgagacgtcgcgagtgctcttgctgtgcatcttggagcccagattcatcaagagaatattgatgatcttccgctcgtcgggggcgatggcggctctgacttggtagctacgttcggcttcgacgacaaggctcatggcgctctgtgcatcttgggtcagtgcgccgcgtcaagggtgactgactattggcgggataagatctatcagccaatgagatttcgctcactctaccactggtcgtcgaccgaaccgaagctcgctgtattcgttcccgtcgtgtacagaaaaggtaatggcgcttggttgaacaatacgaacgtcgtagagttaatgtttgatcgcatcagaatcatgaaggccttggatctggatgcaaccccattggacgctcagtttcgtagcattctctcggatgctctagatgccgttgcagctggtaaggtgctgaaagggtttgctgcaggaaaaaagagggcagcctccaagccaggcgcccaagacaccaagcgaacggtaacggcaaaaaagacagcaactaagcgtgtcggaaagaaggtcgcaacaaaacgtgttcttggcagtgcgcctgtgattgggaataggaagcgcggggctaagttggcagcaacgaaggctgtgccaaagaaggttatcaaaaagggtccgggtagaccgcgcacctga

SEQ ID NO: 518508 - DNA, 948 bp, Stenotrophomonas maltophilia
atgccaacagttgtatcgctcttcagtggctgcgggggctccgatacgggcctcgtcgacgccggcttcgaagtgctcatggccaacgatattttgcagtatgcgcgagacgtctacacggccaaccacccggaaactgactttcagctcaagagcgttgctgaaatcaaatccttccctaaagccgatcttctggtcggctgctacccatgccaaggatttagtcaagctggagcccgagacccttctcgaagcatcaactatctttaccgcgagttcgatagagcgcttcgtcaaatcaaaccaaaagcattcgttgtagagaatgttgctggaatgcgccgctcagactccatccatctctttgacaaccaacttaggcgcttccgcctagcgggttataaggtttccgcacagatcctctccgccccggatttcggggtctgccaggaacgcaagcgacttttttttgtcggcatccgctcagatatcggcgtccgctacgagtttccgaaagctagtcacgatccagccggcgaatcttcaactcttccatcaacgccgctgcttagagatgtgattggacatctccccgaatggccggaaggagagttcgatacgcagcccttccactggtactacctttcgcgcaatcgaaagcgaggctggcacgaactgagtaagaccatcgtagccaacagccgacacgtgccactccacccgatgagtcctgacctcgtaaggatcggcacggatcattggcagttttcttccgaggctccagccaggagactatccttccgtgaaggagcctgcatccaaggcttttcgagagacatgatcttcccggaaacgtttggccttcaactcaagtaccgggtagttgggaacgctgtacctccgccgctattccacgctgttgcttctgcaataccagacatttggtag

SEQ ID NO: 518509 - DNA, 279 bp, Stenotrophomonas maltophilia
atggccaacgtgggtctgcgggtaaggagcgagagcgggtacgtggagaccacggtcaccacggggctggccaagatcatcgggtcgtacacgttcccgctttgcaacccggtcaactccaacaacaagtggatcgcgccgcccgcgaggcaaacggggctcatcgccaatgacttctcaggcggtgagcccttctactacttcacctgcgagggccaacgatcggtgtacggcatactggtcccttcggtgaccatctcggggaccagcatcaactga

SEQ ID NO: 518510 - DNA, 201 bp, Stenotrophomonas maltophilia
atgctcatgaatgctcaacctgtactgctgcgccccgaaacgctgaccctccgcgatcgcccggtccgtgtcgttccgccggaagaggtcatcgacagcgaagccctgctcaagggtcgtcgtgaaatcctgatccagcacggcgaccgcttctatcgcctgcggcacaccagcaacgacaagctgatcctgaccaagtaa

SEQ ID NO: 518511 - DNA, 972 bp, Stenotrophomonas maltophilia
atgcaataccgtcgcctgggctctaccggcctgccgatttccgccctgtccttcggcgcctgggtgaccttcggtgaccagatcccgcgcgacgaggcccgcaacctggtggcggccgcctgggaccacggcgtcaacttcttcgacaacgccgagggctatgccaacggccgcgccgaacaggtgatgggcgatgtgatcgccgacctgcgcctgccgcgcgacggcatctgcgtctccagcaaggtgttcttcggcagcgccaaggacccacggccgacccagcgcggcctgtcgcgcaagcatgtgaccgatgcctgccacgccgcgctcaagcgcctgcgggtggagtacctggacctctactactgccaccggccggatccggacgcgccgatcgccgagaccgtgcacgccatggacaccttggtgcggcagggcaagatcctctactggggcacctcggagtggtcggcggcgcagatccagcaggcgctggacatcgccgaagcgcacaacctgcagggcccgtcgatggaacagccgcagtacaacctgctgcaccgcgagcgggtcgaggtcgagtacgcgccgctgtatgccggtgccggactgggcaccaccatcttctcgccgctggcctcgggcctgctgaccggcaagtacgaccagggcatcccggccgatgcgcggctgggccgcgagggcatggaatggctgcaggcgctggtgctgggtgacgacaccgaggcccgcctggcccaggtgcgccgcttcagtgcggtcgcgcgcgcactggggcaggcgccggccacgctggccatcgcctggtgcctgcgcaacccgaacgtctccagcgtgatcctcggcgccagccgggtcagccagctgctgcagaacctgcaggcactggacgtgctggagcaggtcgacgcggccggctgggccgacgtcgaagccgccttcgcctga

SEQ ID NO: 518512 - DNA, 1299 bp, Stenotrophomonas maltophilia
atggtcgaaggtttgggcaggatcggcttcggcctgttcgggttggcggtgctgatcggcatcacctggttgttttccaacaacaagcgtgcagttgactggaagctggttgccaccggtatcaccctgcagatcgcctttgcggcgctggtgatcctggtgccgggcgggcgcgacgtgttcgatgcgctgggcaagggcttcgtcaagatcctcagcttcgtcaacgagggctcgggcttcatcttcggctcgttgatggacaccaagaactacggcttcatcttcgccttccaggtgctgccgaccatcatcttcttctcggcgctgatgggggtgatgtaccacctcaacgtcatgcaggcgatcgtgcgcgtgatggcctggtctatcaccaaggtgatgcgcgtgtccggcgcggaaaccaccagcgtctgcgccagcgtcttcatcggccagaccgaggcgccgctgaccgtgcgcccgtacatcgccaggatgacccagtccgagctgctgaccatgatgatcggcggcatggcgcacatcgccggcggcgtgctggcggcctacgtgggcatgctcggcggtggcgacccggcgcagcaggccttctacgccaagcacctgctggcagcgagcatcatggccgcaccggccaccctggtcgtggccaagctgctgattccggaaaccggcaccccgctgacccgcggcacggtgaagatggaagtcgaaaagacctccagcaacatcatcgatgcggccgctgccggtgccggcgacggcctgaagctggcgctgaacatcggcgcgatgctgctggccttcatcgccctgatcgcgctgctgaacgccccgctgacctggttcggcgaggtgaccggcctggccgctgccatcggcaagccgaccaacctgtcgaccatcttcggctacgtgctggccccgatcgcctgggtgatcggcacgccgtgggccgacgccaccaccgtcggctcgctgatcggccagaaggtcgtgatcaacgagttcgtcgcctacaccgagctgtcgcagatcgtgaacggccagatccccggcgtgagcctgtccgccgaaggtcgcctgattgccacctatgcactgtgcggctttgccaacttcagctcgatcgcgatccagatcggcggcatcggcggcctggccccggaacgtcgccacgacctggccaagttcggcctgcgcgcggtgctgggcggtaccattgccaccttcatgacggcgaccatcgccggcgtgctcacgcacttcagttga

SEQ ID NO: 518513 - DNA, 966 bp, Stenotrophomonas maltophilia
atgagcagcagtgtcgttgtcgtcggttccttcaatgtcgatcacgtgtggcggtgcgagtcgctgccggcaccgggtgcgaccattgccggccgctacagcaccggccccgggggcaagggcttcaaccaggccgtggcggcctgccgcgccggtgcccagacgcacttcgtgtgcgccttgggcgatgacgccggtggcgccactgcgcgtgaactggctgcgcatgatggcttcgcgctgatcgccgaggccagcagcgagccgaccggcaccgccggcatctacgtggatgcgcgtggccgcaacacgatcgtgatcggaccgggcgccaacgccgcgctgggcaccgatttcctgcaacagcagcaggccctgctgaccggtgccaaggtggtgctggtgcagctggaatcgccggtgcagaccatcgaagcggcgctggccacggcccgcgaggccggtgtcaccaccgtgctcaacaccgcgccggccgatgcgccctcgaccatcggcctgctcaagctggccgatgtgatcaccccgaacgagaccgagttcgccgccctgctcggccgccatgtcggtgagcgcgtggatgccaacgacgtcgccgcgctggatggcgccagcctgcacgcgctgtgccgcaagctggtcggcaacggtaccgtggtggtgacgctgggttcggtgggcgtgttcgtctcgcacgccgacgagaacctgcgcggcgacacccagccgtactaccgcgtcggtgccgaacaggtgcaggccatcgacaccaccggtgccggtgatgccttcaacggtgcgctggctgcgtcgctggcacaggtggccgatgcaccgttcgcccgccacgtacgcttcgccaaccagttcgccggtcgttcgaccgagaaggaaggcgccgctgcagcgatgccgcgcttcaccccggccgattccgaagccaagtag

SEQ ID NO: 518514 - DNA, 432 bp, Stenotrophomonas maltophilia
atggacggattcccctggttgctggtcgcggccgccggcagtgccatcgcggccctgctgcacatcggctgcatcgccttcggcgccgcgtggtacaggtacttcggcgccggcccgcgcgtggtccggctggcacacgccgggcactggtggccgccgctgatgaccgccggcattacggccatgctggtggcctggacgctgtacgcactggccgccgcgggctggcattcgccgctgccggccagccgctgggttctgcccgccatcggtgccttgctgctgctgcgcgccacgatgggcttcggcctggcactgttccgccccggctacaacggcgtgcgcttctgggtggtcagctcgctggcctgcctgggcctgggcctggccttcgccctggacacccaccaggcctggcagcgcctgggttag

SEQ ID NO: 518515 - DNA, 1074 bp, Stenotrophomonas maltophilia
atgaggtcggtgccgatcggcctgaaccggaccgcgcccggcacggtcgggccgccgcttgcgccctacaatgggcgcatgcagatcggcccgtacaccatcgcccccaacgtcgtgctggcgcccatggccggcatcaccgacaagcccttccgcctgctgtgcaaacggctgggcgcggggctggccgcctcggaaatgaccatcagcgacccgcgcttctggaccacgcgcaagtcgatccaccgcatggaccatgacggcgagccggcgccgatcagcgtgcagatcgccggtaccgagccgcagcagctggccgacgcggcccgctacaacgtggaccatggcgcgcagatcatcgacatcaacatgggctgcccggccaagaaggtgtgcaatgcgtgggcgggctcggcgctgatgcgcgacgagcagctggtggcgcgcatcctcgaagccgtggtcaacgcagtggacgtgccggtcacgctgaagatccgcaccggttgggactgcgaccatcgcaatggcccgctgatcgcgcgcatcgccgaggccagcggcatcgccgcgctggccgtgcatggccgcacccgcgaccagcattacaccggccaggccgagtacgccaccatcggcgagatcaaggccgcgctgcgcattccggtgatcgccaacggcgatatcgattcgccgcagaaggcggcctacgtgctgcagcagaccggggtggatgccgtgatgatcggccgctccgcgcagggccggccatggatcttccgcgaagtcgcgcactacctggccaccggcgaggaactgccaccgccgtcgttggcggaagtgcgcgacatcctgctcggccacctgcatgccctgcacgcgttctacggcgagccgcagggcgtgcgcatcgcacgcaagcacctgggctggtatgccaaggaccggccggagaatgccgccttccgcgcagtggtcaaccgcgccgaagacccgcagagccagatcgcgctgaccaccgaatacttcgaccgcctgatcgccggggaaccggcgttgtcatctgctgcctga

SEQ ID NO: 518516 - DNA, 828 bp, Stenotrophomonas maltophilia
atgacaccgccgatttcctccccgacttacctgcacggattttccggcaccgaacagcagcgcctgatgacccaggcccggctgctggaatcgagcatcttcggccagatcgactacggcggcgcgcggcgcctgctggaagtcggcagtggcgtcggtgcacagaccgagatcctgctgcgccgcttccccgagctgcacgtgaccggcgtggacctgagcgaaacgcagctggccaccgcgcgcgagaacctggcgcgcacgccgtggtgcagcgaccgctacaccctgcagcaggccgacgccggcgagctgccgttcgaggcacgcagcttcgacgcggcgttcctgtgctgggtgctggaacacgtgccttcaccagcgcgggtgctgagcgaagtgcgccgcgtgctggcaccgggttcgccggtctacatcaccgaggtgatgaatgcctcgttcctgctcgacccgtactcgccgcacatctggcgctactggatggccttcaacgacttccagtacgaccacggcggcgacccgttcgtcggcgccaagctgggcaacctgctgctggcaggtggcttccgcgacgtgcacaccgagatcaagaccatccacctggacaaccgcgaaccggcgcgtcgcaagacgatgatcgcgttctgggaacaactgctgctgtcggcggccgaccagctgctgcaggccggctcggtggacgaggaaaccgtggaaggcatgcgccgcgagttccgcctggtgcagaacgaccccaatgcggtgttcttctattcgttcgtgcagggccgcgccacggtgtattga

SEQ ID NO: 518517 - DNA, 1047 bp, Stenotrophomonas maltophilia
atggattcattgacccagatcgtgctcggcggcgccgtcgctgctgccatcgccccgcccggccaccgccgcgcggccctgctggccggtgccgcgcttggcaccctgccggacctcgacgccctgtggctcggcttcaccgccgccgacccggtggcgaacatgatcgagcaccgcagcttcagccattcactgctggtgctgccctgggtggccgcattgatctggtggttgttcaagcgcttcggcaacggtcgggtcgcacagtcaccggtgcgctggttctgggcgatccagctggcgctggtcacccatcccgtgctcgatgcgttcaccgtgtatggcacgcagctgtggtggccgttgcggccacacccgactatgggttccagtgtcttcatcattgatctcggctacacggtatggctgctgctgggctgcgtgctggcctggtttggccgcgcccggccgtgggtgggtaaggtgctgggcgtggcgctgctgatcagcagtggctacctgggctggggcctgatcgccaaggcgcaggtcgaccgtgccgcacagcagagcctggccgcgatgggcctgggcgatgcgccgcgcttctcggtgccgatgccgttcaacaccctgctgtggcgggtggtggcgatgacgcccaatggctatgtggtgggtgatcgctcgctggtggccgaccacgggccgatgcggttcgaaggccatgcgtccaacgtgcaggccttgcgcgaagcgggagacatcccggcggtgcagcagctgcagtggttcaaccgtggcttcatgcgtgcacgggtggtggacggccggctggtgctgagtgacctgcgcatgggcctggagccggactacaccttcaacttcgtcgtggccgagcaggccgacgggcagtggcgggcgatcgttcccgagcaggtgcggatcgattaccgcagcccggccgcgcgcgccgacgccggtcgccggctggccgcgatgtggcagcggatctggcatgcacccgcagccggcgccgttgagtag

SEQ ID NO: 518518 - DNA, 801 bp, Stenotrophomonas maltophilia
atgagcacgctggcgaacctgtcgccgcaccggcgcgcagtgttcgtctccgacgtgcacctgggttcacgtcattgccatgccaccgagctggcacggttcctgtcgcagctgcgctgcgaacggctgtacctggtcggcgacatcatcgacctgtggtggatggcgcatcgccgcgccaactggcggcagtcgcacagcgacgtcatccaggccctgcacgcgctgcgccgtgccggtaccgagatcatctacattcccggaaaccatgacgcatcgctgcgtcacgtctgcggggtgatgctgccggccatgcaggtacgccgccgcgccatccacgtgaccgccgatggccgccggttgctggtcgcgcacggcgacgagtacgacggcgtgacccacttcggcggcctgcaggaaaagttcggcgactggctgtactaccgcatcctgaccggcaaccaggtcttgaatgcagtgcggcggcggctgggcatgcgctactggtcgctgtcggagttcctgaagaagcgcagcggcgccgccgaacgctacatcgagcgcttcgtgcaggccgggctggacgacgtgcgccgacgcggcctggacggcatcgtctgcggccacatccaccgcgctgcgttgattgaacgcgatggcctggtctatgccaacgacggcgattgggtggagagcctgaccgcactggccgaagaccatgatggcgcgctgcgcctgctggaccacaacggccagaccctggcggaactgccaggcgcgcgcttgtcgcaggcagcatga

SEQ ID NO: 518519 - DNA, 1716 bp, Stenotrophomonas maltophilia
atgcaggaactcgaacagcgcctccagcaacgtttccccgactggttccacggccgtcgcggccaactggcgcggccgttgctgcgcagcgtcggccgctggtcgcggctggaccagatcgaagccttcctgcagcgcagtgcgggattgcgcggcttcggcttcgtcgccgccggcctggaattcatcggtggccagtaccaggtggatccggccgcgctggccaggattccggccaccggccgcctgctgatcgtcgccaaccacccttccggagccctggatgcgctggcgctgctggacgcggtcggccgtatacgccgcgacgtgcggatcgtggccaatgacctgctgggggcgatcgcaccgctgcaggatctgctgctgccggtgcgcatcctcggcggcaaggcgcagcgcggcagcctgcatgcggtggagcaggcgttggccgccgagcagtgcgtgatcgtgttcccggccggcgaggtctcgcgcctgtcgctgcgcggcatccgcgatggccgctggcagcgcgggttcgtccgctttgcccgcgccgccggggcaccggtgctgccggtacgggtggaggcgcgcaactcggcgctgttctacggcgcctcgaccctgttcaagccggccggtaccgcgctgctggcacgtgagatgttcacccgtcgtggccgcccgctgcggctgagcatcggcgagccgatgcagctgggcaagggcggtgacccgggcgcgcagctgctggccgtgcgccgtgcgctgtacgcgctgggccgcaacggcgcggccgaccctgccgctgcgttcaccggccccgagccgttggcggcgccggtgccgccttcgcgggtcgccgccggcattgccgcagcgacccagctgggccagaccgccgatggcaagcagatcctgctggccacctgcaccgccgattccccgctgctgctggagctgggccgcctgcgcgagctgaccttccgccaggtcggcgagggcaccgggcgcagccgcgacctggacgactacgacccacggtacgagcacatcgtgatctgggacgcggccgcgcagcgcatcgccggtgcctaccggatcatgcgcggcgcgcaggccctggcccggcacggcctgtccgggctctacagcgcgtccctgttccgctattccgacgatgcgatcacccacatcgccgagggcctggaactgggccgcagcttcgtggtgcccgactactggggcagccgcagcctggattacctgtggcagggcatcggcgcctacctgcagtgccggcccggcatccgctacctgttcggcgccgtgtcgatcagcgcggcgctgccgcgcgaggcacgcgagcagctggtggcgtactaccagcgctactacagcggtagcgccggcctggccgaatcgaaccgtccgttccagtacttcgccgcgccgcccagtttcggcgagctggatgcaggcgcagccttcgatgtgctcaaggccaacctggccgcgctcggcaccggcgtgccgacgctgtaccggcagtacaccgatctgtgcgaaccgggcggcgcacgtttccttgcgttcggcgtcgacccggacttcagcgattcgatcgacggcctgatcgaagtggacctgtgcgcgatccggccaaacaagcgcaaacgctatctgcgcgacgcggggacgccggcatga

SEQ ID NO: 518520 - DNA, 1212 bp, Stenotrophomonas maltophilia
atgtccagctatctcttcacctccgagtcggtctccgaaggccatccggacaaggttgccgaccagatctccgatgcggtgctggacgcgatcctgacccaggaccagcgcgcccgcgtggcctgcgagaccatggtcaagaccggcgttgccatcgtggccggtgaaatcaccaccagcgcctggatcgacctggaagcgctgacccgcaaggtcatcacggacatcggctatgacagctccgacgtcggcttcgacggcgccacctgcggcgtgctgaacctgatcggcaagcagtcgccgcacatcgcccagggcgtggaccgcaagaagccggaagaaatgggcgcgggcgaccagggcctgatgttcggctatgccaccaacgagaccgacagctacatgccggccgcgatccacctgtcgcaccgcctggtcgagcagcaggccaagatccgcaagaagaagaactcgccgctgtcgtggctgcgcccggacgccaagagccaggtcaccctgcgctatgagaacggcgtggtctcggccatcgacgccgtggtcctgtcgacccagcacgccccgggcatcaagcagaaggacctcatcgaggccgtccgcgaagagatcatcaagccggtgctgccggccaagtggctgcacaagggcaccaagttccacatcaacccgaccggcaagttcgagatcggcggcccggtgggcgactgcggcctgaccggccgcaagatcatcgtcgacacctacggcggctgggcccgtcacggtggtggcgcgttctccggcaaggacccgtccaaggtcgaccgttcggcggcctacgcggcccgctacgtcgccaagaacgtggtcgccgccggcctggccgaccgttgcgaagtgcaggtctcctacgccatcggcgtggccgagccgacctcgatctcggtcaccaccttcggcaccggcaagatcagcgacgacaagatcgagaagctgatccgcaagcacttcgacctgcgcccgtacggcatcatcaagatgctggacctgatccacccgatgtaccagcagaccgcggcctatggccacttcggccgcaagccgaaggagttcagctacctcaacggcgaaggcgagaccgtcaacgccacggccttctcctgggagaagaccgaccgcgccgccgccctgcgcgccgatgcgaagctgaagtaa

SEQ ID NO: 518521 - DNA, 507 bp, Stenotrophomonas maltophilia
atgtcgaccgaactgaaaacccaccagctgtccatgaccgtgctgatgtcgccggagatggccaatttctccggtaaggtccacggcggcgccatcctgcgcctgctcgaccaggtcgcctacgcctgcgccagccgttacgccggcagctacgtggtcaccctgtcggtggaccaggtgatgttccgccagcccatcgcggtgggcgagctggtcaccttcctcgcctcggtgaattacaccggcacgtcgtcgatggagatcggcatcaaggtggtggccgaggacatcctcaagcgcagcgtgcgccacgccaacagctgcttcttcaccatggtggcggtggatgaggaaggccggccgacgcccgtcccgcccttgcagccggcaacgtccgacgaaaaacgccgccaggccgcagcgcagatccgccgccagctgcgccaggaaatggaacagcgccacctggaactgctggcatcgaatccgccgtcgccggaagaatga

SEQ ID NO: 518522 - DNA, 2712 bp, Stenotrophomonas maltophilia
atgaacgagtaccgcagcagcatcgagtttgcttctcccgatcttccgcttcgcgatgacgtgcgccggctcggcgcactggtcggcgacctgctggtcgaacaggtatcggccgcgttcctcgatgatgtcgaggacgtgcgcacccgcgccatcgcccgccgcgagaaccaggcgccgctgtcggagctggccgaagggctggccgggcgcacgccgcagcaggccgagaccatggtgcgggcgttcagcacctacttccaggtggtcaacatcgccgagcgcgtgcatcgcatccgccgccgccgtgattaccagcgcgcgggcaccaccgcgccgcagcccgatggcctgcaggatgcgctgcagcacctgaaggcgcagggcgtgacgctggacgaactggcgcagtggctgccgcgcatcgacatcgagccggtgttcaccgcgcacccgaccgaagccgtgcgccgcgcgctgctggaaaaagagcagctgatggtggccagcctggtcgacaacctcgacggccagcgcacgccgggggaagccgccgccgatgccgcgcgcttccgcatggcgctgaccgcttcctggcagaccaccgactcctcgccagtgcggcccacggtcgatgacgagcgcgagcacgtcggcttctacctggtgcaagtgctgtatcgcgtgattccggtgctgtacgaatcactgcagcaggcgctgcgcgatacctacggcgaagaactgccgctgccgcgcctgctgcgcttcggtacctgggtgggcggcgacatggacggcaacccgaacgtggacgcgcacaccatccgcaatacgctggatgcgcagcggcaggcagtgctcgggcgctaccagaaggaactgctgcagctggccagcctgctcagccagtccaccgagcgggtgggcgtgagcgaggcgctgcaggcgcgcgtggcgcactaccagcagatgctgccgcaggtgcagtcgcggccgcgccatgcggacatgccgtaccgcctgctcaacgaccgcatgcgcgcacgcctgcaggccacgctggaggatggcgaaggcgcctatgccggccccgacgaactgatcgacgacgtacagctgatcctggacagcctacgcgcgaaccgcggtgaacatgccggtggcttcgctgtgcaacgcctgctgtggcgggtgaagaccttcggcttccatctggcacggctggacgtacgccaggaatcgagcgtgcatgcgcgcgcgctggccgcagtgctgggcggcgacgcagcgtgggagggtctggatgccttgggccgcgcgcgcctgctggccccgcatgccagcggtgaggccccgttgccgaagggcgacgacgaaggcaaccggcgcctggacgcggtgttcgccgcactggccgatgcgcgtgcgcgccacggtggtgatgcgctgggcagctacatcatctcgatggcacacgaccgcagcgacgtgctggcggtgttggcgctggcgcgccgtggcgggctggtggaaggcaatggatcagtcccgctggacatcgcgccgctgttcgagacggtggacgacctcaagcgcggcacggcgaccctgcgtgacctgctggccgatccggtgtaccgcgctcacctgcgtgcgcgcgaggacgtgcagatggtgatgctcggctattcggacagcagcaaggacggtggcatcgccgcctcgcgctggggcctgcaacgtgcgcaggtggaactgctggaggtggcagccgaggcgggcatccgcctgaccttcttccatggccgtggcggctcgatcagccgcggtggcggcaagaccacgcatgcggtcgatgcgtcgccgcgcggcagcatcgatggccgcctgcgggtgaccgagcagggcgaggtgatccaccgcaagtacggcatccgtgcgctggcgctgcggtcgctggaacaggccaccggtgcggtgctgcgcgccagcctgcgcccgcgtgccgccgaaccccgcgaggacgactggcggccggtgatggacgcggtcgcctctgccagcagcgaggtgtatcgcgccttcgttggacaggccggtttcatggattacttccgtaccgccacgccgatcgacgtgatcgagcggatgacgctgggctcgcggccgtcgcgccggctcggccaggatgccgcgctgggcaacctgcgcgcgattccgtgggtgttcgcctggagccaggcgcgtgccgtcattcccggctggtacggcgtgggcagcggcctgcaggcggcggtcgatgccggccacgaacagaccctgcgcgacatggcgcgagactggccgtttttccgcaccttcctggacgacatcgcgatggtgctgtccaagggcgatatcaccatcgccgagcagttctcgcggttgtcgggcgacctgcacggccggttcttcccgcaggtgcagcgcgaactggaactcacccggcactggctgctggcgttgatgggccagcagacgctgctggaccacgatgcgcgtctggcattgtcgatccgcctgcgcaatccctacgtcgacccgatcagcgtgctgcaggtcgacctgctgcagcgctggcgggccagcgggcgcgaggatgacgatctgctgcgcgcgctggtggcgtgcgtgaacggcgtttcgcaaggcgtgcagaacaccggttga

SEQ ID NO: 518523 - DNA, 2517 bp, Stenotrophomonas maltophilia
atgagcatgcacgcgcgccgtacgcggcgctggaccggcctggtcctgtcgatgggactgctggcagtggccccgctggcctcggcggtggcgccgcagcctgctgcggcacaggcccagggcgtgaccggctatgaattgccgtcggccgcgctgcaggcagtggtcgatgcgccgcgcgcgccgtcgctgttcctgtcgccgcgccgcgacgtggccgcgatgatgcagatgccgtcgctgccgtcgatccaggtggtggcgcaaccggagttgaagctggccggcctgcgcatcaacccgcgcacgttctccgacagccgcttcagcttcggcgagaagctgtggctgatgaacgtggccgatggcagggaacggccgatcagcggcctgccggccacgctgtcgatcgccagcctgatgtggtcgccggaccagaagtggctcgctttcaaccaggtcgacgccaccagcggcgccaacgaactgtggctggtggacgtggccgccggcagcgcccgccgcctggttgcgggcctgaacaccgtcatcggcagtggctaccagtggttgccggacagtcgggggctggtggtgttcacccgcccagcgaacctggggcccgccccggccgccgacggcatcccgaccggcccggccgtgcagcagacccgccaggacggcggcgtcgtgtcgatccggacctaccaggacctgctgaagaacgaagccgatgcgcgccagttcgactactacgccaccacccagccggtggaagtcagcctggacgggcgcacccgcgcgatcggtgcggccggcatcttcatgggcttctcggtgtcgcccgatggccgcttcgtgctgcgccagccggtgcagcgcccgtattcctacgtggtgccggtgagcagcttcccgcgccgcatcgaagtgatcgaccgcgccagcggcacgctggtgcacaccgtggcggtgcggccgctggtggaaggcctgccgaccggcaacgatgccgaagtgaccggcgtgcgcgacatcagctggcggggggatgccgatgccaccctggtctgggccgaagcgcaggatggtggcgacccgaacagggacgccaaggtgcgcgacgcggtgctgatgcaggccgcgccgttcgacaagccgccggtgacgctggcccagctgggcagccgcctggccggcatcagctggggccgcggtgacctggccgtgctgaccgaatcgtggtggaagacccgcaggaccaagacctggctgatcgccccggacactgccagcgccgaaccgcgcctgctgtgggatcgcgatgcgcaggaccgctacgccgatccgggccggccgctgctggccagcgacgagcgcggccgttcgctgctgcagaccagccccgatggcggcagcctgtacctggccggtgctggcgcgtcgccggaaggcgaccgtccgttcgtggatcgcttcgacctcgccacgggcaaggcgacgcgcctgttccactcgcaggcgccgagctattcgctgccggtggcattgctggacaaccagggcagttcgctgctgctgagccgtgagagcccggacgagccggccaatttcttcgtgcagtcgctggccgatgccagcgccgcgccgcgcgcactgacccactttgcccatccgctgccgcagctgaagggcgtgcagaaggagcagatccgctacaagcgcaaggatggcgtcgacctgaccgcgaccctgctgctgccgccgggctacgacccgaagcgcgatggcccgcgcccgctgctgatgtgggcctacccgggtgagttcaagagcgcggccgcggccagccaggtcaccgattcgccgtaccgcttcaatgcgatcagttactggggcccgcaggcgttcctggccaagggctacgtggtgctggccagcccgtcgatgccgatcatcggcgagggcgacaaggagccgaacgatacctatatcgaacagctggtcgccaacgcgcaggccgcggtggatgaggtggtgcgccgtggcgtgaccgatcgcgatcacatcgccattggcggccactcctacggcgcgttcatgacggccaacctgctggcacacacccgcctgttcaaggccggcatcgcacgcagcggcgcctacaaccgcacgctcacgccgttcggcttccaggccgaggaacgcaactactggcaggcacaggacgtctaccagaagatggcgccgttcaactacgccgacaggatcaaggatccgatcctgttcatccacggcgtggacgacaacaactccggcacgttcccgatccagagcgagcgcatgttcgccgcggtgaagggcctgggtggcaccgcgcggctggtgatgctgcccaacgaatcgcatgcctaccgcgcacgcgaatcgatcatgaccatgctggccgagagcgagcgctggctggagcagaccatcggcccggccgcgcagggcacggcgaagaagaagcgctga

SEQ ID NO: 518524 - DNA, 1446 bp, Stenotrophomonas maltophilia
atgaacgctgttgccaagaccttctccaccgaaggtgattacaagatccgcgacatcacgctggccgactggggccgcaaggaactggacatcgccgagcacgagatgccgggcctgatgtcgatccgccgcaagtaccaggccgagctgccgctgaagggcgtgcgcgtgaccggctcgctgcacatgaccatccagaccgcggtgctgatcgagaccctgaaggacatcggcgccgacgtgcgctgggcctcgtgcaacatcttctcgacccaggaccacgcggccgccgccattgccgccaccggcaccccggtgttcgcctggaagggcgagaccctggaagagtactgggactgcaccctggacgcgctgaccttcaccctggccgacggcaccctgaccggcccggagctggtggtggacgacggtggtgacgtgaccctgctgatccacaagggctacgagctggaaaacggcagcgactgggtcaacaccgcctcgtcctcgcacgaagaacaggtcatcaagaacctgctcaagcgcgtggccaaggagcgcccgggttactggggccgcgtggtcaaggactggaagggcgtctccgaagagaccaccaccggcgtgcaccgcctgtaccagctggcacaggccggcaccctgctgatcccggcgatcaacgtcaacgactcggtcaccaagagcaagttcgacaacctgtacggctgccgcgagtcgctggccgatggcctgaagcgcgcgatggacgtgatgctggccggcaaggtggccgtggtctgcggctacggcgacgtcggcaagggctgcgccgcctcgctgcgtgcctacggcgcgcgcgtgatcgtcaccgagatcgacccgatctgcgccctgcaggcggcgatggaaggctacgaagtcaacaccatcgaatcgaccctgggccgtgccgacctgtacgtcaccaccaccggcaaccgcgacatcatccgcatcgagcacctgagcgcgatgaaggaccaggccatcgtctgcaacatcggccacttcgacaacgagatccaggtcgacgcactggtgtcctacccgggcatcaagcacgtcaacatcaagccgcaggtggacaagtacatcttcccgaacggcaatgcgatcttcctgctggccgaaggccgcctggtgaacctgggctgcgccaccggccacccgagcttcgtgatgtccaacagcttcgccaaccagaccctggcacagatcgacctgtgggcgaacaaggacagctacgagaagaaggtctacctgctgccgaagaagctggacgaggaagtggcccgcctgcacctggaaaagatcggcgtgaagctgaccaccctgacccaggaccaggccgactacatcggcgtgccggtggaaggcccgttcaagccggaccactaccgctactga

SEQ ID NO: 518525 - DNA, 474 bp, Stenotrophomonas maltophilia
atgaccccggccatcaacctgctcaagcgcgagaagatcgcccacaccgtgcgcagctacgtgcacgacgcccacgccgaatcgtatggcggcgaagccgtcgacaagctcggcctcgacccggcccaggtgttcaagactctgctggccagtaccgaggcccacgaactgctggtggcgatcgtgccggtggccggccagctcgacctgaaggcgctggccgaagcggccggctgcaagaagtgcgagatggccgccgccgacgccgcacagcgcgcgaccggctacctggtcggcggcatcagcccactggggcagaagaagcgcctgcgcacgttcctggatgccagcgcgcaggcgttgcccacgctgcacgtcagcgccggccgccgaggcctggaagtggaactggcgccggccgacctgctgcgcctgaccgctggccacttcgccgccatcggcaaggcacgctga

SEQ ID NO: 518526 - DNA, 486 bp, Stenotrophomonas maltophilia
atgcgctggccctggactgcccgcccgataccgcggctggacgatgcgcaggccgatgtgctgctgcaggacctgctgtcgcgcgacgccgagcgcatcaccgacgccgcccgcgtcgtcgcacgactgttcagtgcaccgtcgctggacgcattggccgcgcatgtggacctgatcgaacgcagctgccagggcatcgctttcggcggcatgctgatcagcaaccaggcgcatctggaggcggccctgaaacggctgcgttactggcaggcgcacgcaggctgcctgtgcgcgctcaatcccggctacccgttcttcgatccgcgccgcctgatcgaacaaggacagatgcagctgctcgcgttgcaggcggccgaggaggggtggggcgattgccacatcgttgcctgcacgcactgcggccagcattggcaggccatcgaccgcgagtaccactacccgtggtgggagtggaaagctgcctga

SEQ ID NO: 518527 - DNA, 558 bp, Stenotrophomonas maltophilia
atgtccatcgtcctcaccgatttcgcccgtccccgcctgttcccgcgcgtaccgcgtggcaacacgatccaggactgcactgccgaacagttcgaggcgcacctcaacgcgcacgcgccgctgaaggtgctggacggctatgcaccgttctgcaaactgttcgtctacgagaactggaccagcacgcgctgcctgaccgtgccgatcaccgaggccaaccgccatctgctgcgcagtggttacgaggcacgcaatcgcgacgaactgccggtactggtgcgctggttcgagggcgtggagtcgccgcgtgcgaactacctggtggtgatcctgtacagcgccgggcagctggccaaggaaggctcgccgatcgaggccgagtggggcatcgtcggttgcatctataccgccgaaccggaagaggtgccgatggcgccgatcacgatgatgcgcaatgcgctgggcgtggaagagggcggttccggcgtaccactggaccgcgaggcctaccggcgcgccgttacgttctgggagaacaacgccaactggcggccctga

SEQ ID NO: 518528 - DNA, 732 bp, Stenotrophomonas maltophilia
atgagtggcctgctgcgcgtgttgatcgtggatgatgcgcggctggcgcggcaggaactgcgtacgctgttgtcggcgctgccgtgggttcagtgcgtcggcgaggccgacgacgtgcccgccgcacgcgaggcgatcgccacgctggcgccggacctggtgctgctggacgtgcagatgccttccggcagcggcttcgacgtgctggagggcctggaggcagtgccggcggtggtcttcgtcaccgcctatgacagctacgcggtgcgcgcgttccaggccaacgcgctggactatctggtgaagccggtggaggcaccgcgcctgttggaagcactggagcgcgcgcgcgagcgcaacgtaggggcgagcggggcgccggcactgcgcagcacgctggctgcgcaggaccaggtgttcgtgcgcgagggcgaacgctgctggttcgtcgcggtctcggagatccgcaggctggtggtggacggcaactacacgcggctgtggttccgcgaccagaacgcgttgctgacccgcagcctgagcgcgctggaggctcgcttgccgcaggagctgttcttccgtgccaaccgcaacacgctggtcaatctgcgccgtatccgcggcatagcgcccagcatcggcgatggctacgacctgacgctggaggatggcagcgaggtggaggtgtcgcggcggcaggcgcgggagctgcgcgagcggatggcgctgtag

SEQ ID NO: 518529 - DNA, 1047 bp, Stenotrophomonas maltophilia
atgccggcttcctcctcgacggtacgcttctggctgctcaatgcattggtatgggcgctttatggcgccgcgggacttggcttgcggcatgcctacctcgccgacgccggaagtgcgggtgcattgatcacggtcggcctggcgttgaccctgttcgcgtgcagcggcggcatccgcgccctggccctgcgcgccggctggtggtcgctcgggaccgccgggttgctgctgcgactggcgctgtcggtgggcgcaggcgctgcgttggcacagttgctggtgaacatcgcgttgcacgcagcgctggcctggggatgggtggacatcggtcgccaggtggccgactttagccccaaggcgctgctgctctactggtacaccacggcggtgatgctggcactgtggaccgcgctctgggcaagcctgcacagccttcgccgcgtacgcggcgccgaactggcacgcctgcgcgccgaagccgaacgcagcgcgctggaacgtgacgcattgcgtgcgcggcttaatccgcacttcatgttcaatgcgctgaacaacctgcgcgcgctgatcctggaagatcccgagcgtgcgcgcgacatggtcacgcggctgtcgcgcacgctgcgccaggcgctggcgcacaaccgcagcgagcaggtgacgttggccgaggaactggcggtggtcgacgattacctggccatcgaggcggtccatttcgaacagcgcctgcaggtgcggcagcagatcgatgccgatgccacgcaggcgcagctgccggcgatggcgttgcagttgctggtggagaacgcgatcaagcacggtatcgccagccgccccggcggcggcgaggtacagatccgcgccacgctggacaatgacgtgctgcggttgcaggtggagaacccacgtgcaaccggcagcgaacccacccatggccatggcgtcggcctggcctacctgcatgcgcagttgggcacgcgtggccgattcgtgctgcagccggtcggcgaccgcatgcaggccctgctggagattccacaatga

SEQ ID NO: 518530 - DNA, 927 bp, Stenotrophomonas maltophilia
atgaagatcttgctggcactctggtacgcgatgaacgccctggcccgactggcgatgatcggcatggcgatggccgtgctgggccccggttccgcacatgccgccaccggcgcgagcgctggcaaggtgcaggtcgaggtggtcggcaagggccgcccgctgctgatgatccccggtctcaacagcagcgccgaggtctggcgcgggacctgccgggccctcaaggatgtgcagtgccacctggtacagctgccggggtttgccggcgccgcgccggcagacccgcggccggcggatttccttccggccatgcgcgaccagctgctggcctatgtgcatgaccagaagctggaccatccggcggtgatcggccacagcctggggggcctgttgggcctgcagatggcgcaggccgagccgaagacgctcagtgcgctgatggtggtcgatgccttgccgttcctgcccgcggcacgcgaccaccaggccacggcggccagcgtgcggcccatggccgaccggctgcgcggcggcatgctcgccgccgacgccgcgcaatggcaggcgcagctgaaggccggcctgccgggcctgacccgcgatacgcagcgccaggccgaactggggcgctggggcgaagccagtgatcgccagaccacggccgatgccatgcatgcggtcatgaccaccgaccttcgcgacagcattgcgtcgatcaccgcaccgacactggtgctcggcagctgggccggctaccagccgatgggcggcaccgaggaaagcacccgtgccgtcttccaggcccagtacgcgaagctgcagggcgtgcagatcgcgatgagcgcgcagggcttccacttcctgatgtgggatgatccgcgctggctgcacgggcaggtgcaggccttcctcgaccgccacccctga

SEQ ID NO: 518531 - DNA, 828 bp, Stenotrophomonas maltophilia
atgactgccatcagcttcgagttctatccgcccaagaccgacgaacagcgcagccagctggaccgcgccgcggccaggctgaaggactacagccccgagtacgtgtcctgtaccttcggtgccggtggctcgaccctcagctacacctccgagaccgtgcgccacctcaaccagcaccacggcttcgaggcggcaccgcatctgtcctgcgtcggcggcacccgccaggaaatccgcgaactgctcaagctgtaccgcgccatcggctgccatcgcctggtcgcgctgcgtggcgacctgccctccggcatgggcttccccggcgacatgcgctatgccgccgagctgatcgagttcatccgcgccgagcacggcgatgcctttcgcatcgaggtcggcgcctacccggagacccacccacaggcctccgatgcactggccgacctgaagcacttcaaggccaagatcgatgccggcgccgacgcggcgatcacccagtatttctacaacccggatgcgtatttccatttcgtcgatgccgtgcgccggctcggcgtgcaggtgccgatcacgcccggcatcatgccgatcgccaacttcagccagctgcgccgcttttccgaacagtgcggtgcggaaattccgcgctggatcagccgcaagatgcaggcctatggcgatgacgccgaatcggtgcgcgcgttcggtaccgaagtggtggccaggctgtgccaacgcctggtcgagggcggcgcgccgggcctgcacttctacaccttgaacctggccaagccgaccacgtcggtgttgaagctgctgcacggctga

SEQ ID NO: 518532 - DNA, 585 bp, Stenotrophomonas maltophilia
atgaaccggctttccttcctgctgttgctgctgtcgttgtgctcggcatcgagcgttgtccatgcgcagtccacgcgcttgaaccgctgcaccgatgcgcagggccagagcgtgtataccgaccggccctgcgacagcgtcggcgcccgatcacgattgccaccgcccgcgcccgccggcaacaccccgccgcgcgacgccctgggtgcgcgctgcccgcggcggctgagcgaactggtggaggcgctgcgtaccggcatcgtcagcaacgatgtgaaccggctgtcctcactgtacctgtggggcgcggtttccgacgcgggcgcacagcgcatcctcggccagttggaatcgttggcgcggcggccgctggtggacgtggtgccggtgtatccgtcacaggggctggtggcctcgcaggaggacggtcagagcgctgcggcgcaggaatccgaccccgagccgccgccggcgcgccatccgatcggcctgcgcctggaacagacgctgcccggcagcgtgtcgcgcgcttcgaccgtgctggggttgcggcggcaatacgggtgtttctggatcacgttgtga

SEQ ID NO: 518533 - DNA, 954 bp, Stenotrophomonas maltophilia
atggtttcccccacccgatcgatccacgttgtcgctgccgtcatcaccgacgcccgtggccgcgtgctgctcaaccgccgtaccgagaaccgcgacatggccggcctgtgggaattccccggcggcaagcgcgaatccggcgagacctccgaacaggcgctggtgcgtgaactgcgcgaggagctgggcatcgaggccgatgtcgggccgtggctgatggacgtgccgcagcgctaccccgacaagcacctgaccctggaggtgcgccatgtgcgcagctggaagggcaccccgcgcggccgcgagggccaggcgatcacctgggtggcgcaggacaagctgggccgctactcgatgccgccggccgacctgccggtggtggccgccttgcgccaaccggaccgctacctgatcaccccggcaccggccgatgatgccagcggcgtgcagcactggcatgactgcctgcagcgcgcggtcgcggcgggccagcagcgcatccagctgcgcctgccgccggaacacccgcaacggcaggcgatgatcgaacaggccgtgcgtgcgcatcgtcgcggcgtgcagttcctgctcaaccgcgatatcgcgctggcgcgctcactgggcgtgggggtgcacctgggcagcgagcagctgcgggacctgcaggaacggcccttgccggaggggcagctggtcgccgcgtcctgccatgacctggaccagctgcaggcggcgcagcggctgggctgcgacttcgcagtgctcggcccggtgcaggccacggccagccaccccggggcagcgccgctgggctgggaggccttcgccgcactgcgtgcgcaggtgtcgctgccgatctacgccctgggcggcatggccgcgggacacatcaccgaagcccgccgccatggtgggcaggggatcgccgccatccgcgggctgtggccaacgtaa

SEQ ID NO: 518534 - DNA, 2733 bp, Stenotrophomonas maltophilia
atgatcaacagcctgcttacccgcgtatttggcagtcgtaacgaacgacagctgcgccagctcaaccgcatcgtcgccaagatcaatgcgctggagccggagatcgagaagctgtccgacgagcagcttcaggccaagacgccggagttcaagcagcgcatcgctggcggtgaagccctggacaaggtgctgccggaagcgttcgcggtctgccgcgaagccggccgccgcgtgctgggcatgcgccattacgacgtgcagctgatcggcggcatggtgcttcacctgggcaagatcgcagaaatgcgcaccggtgaaggcaagaccctggtggcgaccctgccggtgtacctcaatgcactggaaggcaagggcgtgcacgtggtcaccgtgaacgactacctggcccgtcgcgacgccgcgcagatgggcaagctgtacaactggctgggcctgagcgtgggcgtggtgtacccgggcatgccgcacagcgacaagcgcgaagcctacgcggccgacatcacctacggcaccaacaacgaattcggtttcgactacctgcgcgacaacatggcgctgtccaaggccgatcgctaccagcgcggcctgcactacgccatcgtcgacgaagtcgactccatcctgatcgacgaggcgcgtaccccgctgatcatctccggcccggccgatgattccccggagctgtacatccgcgtcaaccgcgtcgtgccgcacttggtcaagcaggaagcggaagacggcgagggcgatttctgggtcgacgagaagggcaagcaggtgcacctgtccgaagcgggcatggagcacgccgagcagctgctggtggaagccggcatcctcgacggcgagaccgaaggcctgtacgcggcgcagaacctgaccgtggtccaccacctcaacgccgccctgcgcgcgcacgcgatctaccagcgtgacgtggactacatcgtgcgcgacggcgaagtggtcatcgtcgatgagttcaccggtcgtaccctggccggccgccgctggtccgacggcctgcaccaggcggtggaagcgaaggaaggcgtgccggtgcagcgcgagaaccagacgctggcgagcatcaccttccagaacctgttccgcatgtacaagaagctgtccggcatgaccggtacggccgacactgaagcattcgagttccagagcatctatggcctggaagtggtggtgatcccgaccaaccgtccgaccatccgcaaggacagcccggaccaggtgttcctcaaccgcaagggcaagttcaatgcggtgctggccgacatcgaagagtgcgccaagcgcggccagccggtgctggtgggtaccacctcgatcgaaacctcggaaatgctgtccgagcacctgagcaaggcgggcgtgaagcacgaggtgctcaatgccaagcagcacgaccgcgaagcgaccatcgtcgccaacgccggccgtccgggcgcagtgaccatcgccaccaacatggccggccgcggtaccgacatcgtgctgggcggttcgctggaagccgagatccacgccctgggcgaggacgcgaccgacgagcagaaggcggcggtcaaggccgaatggcagaagcgccacgaggcagtgaaggcggccggcggcctgcacatcgtcggtaccgagcgccacgaatcgcgtcgtatcgacaaccagctgcgcggccgttcgggccgccagggtgacccgggttcgtcccgcttctacctgtcgctggaagacaacctgatgcgcatcttcgcttccgactgggtgcagaaggccatgcgcatgatgggcatgaaggaagacgatgtcatcgaggaccgcctggtcagccgccagatcgaaaaggcgcagcgcaaggtcgaggcccacaacttcgacatccgcaagaacctgctggacttcgacgacgtcaacaacgaccagcgcaaggtgatctacgcccagcgcgacgagctgctggacgccgagtcggtgaaggccaacgtcgacggcatccgcgacgacgtgatcttcgacaccgtggcgcgcttcgtgccgccgaactcgatcgacgagcagtgggacctgcgtggcctggaagcgaccctggagtcggacttcggcctgcagatgtcgctgaccgacctggtcaaggcgcacgaggaactggacgccgaggccatcgccgccaaggtccaggagcgcgtcaaccaacacttcgccgagaaggaagccggcctgggcgaagagaccatgcgcgcgctggagaagcacgtgatgctgaccgtgctggaccagagctggaaggagcacctggcacgcatggattacctgcgccagggcatctacctgcgaggttacgcgcagaagcagccgaagcaggaatacaagaaggaagccttcgagctgttctcggacatgctggagaacgtcaagcgcgaagtggtgaccctgctggcccgcgtgcgcatccgcagcgacgaggaagtgcaggcgctggaagcggccgagcgccagcaggcgcaggcccgcctgagccagtcgcagttccagcaccaggatgcgggcggttacagcgccgacgaggaagccgcgcaggtggaagccgcccagcagggcgtggccacgctgcagcgcgacgagccgaagatcggccgcaatgatccgtgcccgtgcggcagtggcaagaagtacaagcactgccacggccagctgagctga

SEQ ID NO: 518535 - DNA, 957 bp, Stenotrophomonas maltophilia
atggcattcaaaaagatcgtaatcaaaacgcgtgaaggacaggccaaggcgtcgccgatcacgcgtttgcggttctatttcgaggaccgcccccgcgccctgctgggcagcgtgctcggggtaggctgcattatcggccttgccggcggcattggcgccagtgcgctgaatgattcgcgcctgcaggccaaggtcgcgcgccaggatgcggagctggccaaggtcaagcgcgatgcgcagacccaggtcaacgcgctggccgcccgcctcggcgagctgcaggcgcaggccacccgcctgaacgcccttggcgaacggctgacccagatgggcaagctggaagatggcgagttcgacttcaacgagacccccggcctcggtgatggcgacgccggcggcccgaccagcgacatcccggtcaaggacgtcaacgccgacttacaggtgctggagcagcgcttcgctgcttcaggccgccagttgtcggtgatggaatcgctgatgttcgaccaccagctgcagcagaacgccgtgccctcgcgcatgccgatccgcaacagctacgtgacctccggtttcggcacccgcgccgacccgttcggccgcggcgccgccacccacaagggcatggacttccacgccaaggtcggtgatccggtgatggccgtggccgagggcgtggtcagcttcgccggtgtgaagggcggctacggcaatgtcgtcgatgtcgaccacggtaacggctacgtcacccgctacgcgcacaattcgcgcctggtggtgaaggccggtgacctggtccgtgccggccaggaagtggccaaggccggttccaccggccgttcgaccggtgctcacgtgcacttcgaggtgtgggagaacggcaacgtggtcaaccctcgcaaattcctcggcgacggcggcaacacgccggtcggccgcatcagccgcggctga

SEQ ID NO: 518536 - DNA, 450 bp, Stenotrophomonas maltophilia; identical to SEQ ID NO: 508034

SEQ ID NO: 518537 - DNA, 912 bp, Stenotrophomonas maltophilia
atgatccagcaacgcaccctcaagaacacgatccgcgccaccggcgttggcctgcacagtggtgacaaggtctacatgaccctgcgcccggcaccggtcaaccatggcatcgtgttccgccgcgtggacctggacccggtggtggaggtgccggccaaggccgaactggtcaccgaagtgaccctgtgcaccggcctgacctgcaacgacgccaagatccagaccgtcgaacacctgatgtcggcgctggccggcctgggtgtggacaacatcatcgtcgaactgtcctcggccgagctgccgatcatggacggttcggccggcccgttcgtgttcctgctgcagtcggcaggcatcgtcgaacaggatgcgcccaagcgcttcatccgcgtgctcaagaccgtggaagtgaccgagggcgacaaggtggcccgcttcaccccgtacgagggctacaagctgggcttcaccatccagttcgaccacccgatgatcccggccaagcagtcgcgccaggaaatcgagttctcgacgctggcctacaccaaggaaatctcccgggcgcgcaccttcggtttcatgcgcgacctggaatacatgcgcgagcgcaacctgggcctgggcggttcgatggacaacgccatcgtgctggacgagttccgcgtgctcaacgaagacggcctgcgctatgcggacgaattcgtgcgccacaagattcttgacgcaatcggcgacctctacctggccggtggccaggtgctgggcgcctatgagggcttcaagtccggccatgcgctcaacaacaagctggtgcgggccctgatggccgacgccagcgcctgggagtgggtcaccttcgactcgccggccaccccggatccggttgaatacgccaccccggcctacgcctga

SEQ ID NO: 518538 - DNA, 1242 bp, Stenotrophomonas maltophilia
atggcgcattttgaactgatcgaaaagatggcacccaatgcggtgatcaaggtggttggcgtgggcggcggcggcggcaacgccgtggcgcacatggtcaactcggcggtggatggcgtggaattcatcaccgccaacaccgactcgcaggccatcaagaattgcggtgccaagctgcagctgcagctgggtaccaacgtgaccaagggcctgggcgcaggcgcgaacccggaagtcggccgccaggccgcgctggaagaccgtgagcgcatcatggacgcgctgcagggcgcggacatggtgttcatcaccgccggcatgggtggcggcaccggcaccggcgctgcgccggtggtggcacagctggccaaggaaatgggcatcctgaccgtggccgtggtcaccaagccgttcccgttcgaaggccgtcgccgcatgcaggtggcgctgaagggcatcgaggaactgagccagcactgcgactcgctgatcaccatcccgaacgagaagctgatcaccgtgctgggtcgcaacgcgaccatgatccaggccttccgtgccgccaacgacgtgctgcagggcgccgtgcagggcatcgccgacctgatcgtgcgtccgggcctgatcaacgtcgacttcgccgacgtgcgcaccgtcatgtccgaaatgggcctggcgatgatgggtaccggcaccgcccgtggcgatgaccgtgcccaggccgctgccgaagccgcgatccagaacccgctgctggacgatgtgaacctggccggtgccaacggcatcctggtcaacatcaccgccggcgccgacttcaccatggccgagttcgacgagatcggccgcaccatcgatggcttcgcttcggaagacgccaccgtggtggtcggcaccgtgctcgatccggacatgcaggacgaagtgcgcgtgaccgtggtcgccaccggcctgaaccgcgtttcggccagcaagacccagcgtccgggcgagcgcgcaccgatcaagctggtccgcaatgccacgaccggccagccggagttcggcgacttcgacaacggcggcgacgccgtgtccaaggccgtcggcggcatgggcatgggcatgggcctgcgtcgtgccagcagcgacaccgcggcggcgtccgcaccgtcggccccggccgcatcggccccggcggcggcggaactgccgaacgattacctggacatcccggccttcctgcgccgccaggcggactaa

SEQ ID NO: 518539 - DNA, 1236 bp, Stenotrophomonas maltophilia
atgaatcgcaagggtgacaaatcgctgatcgttggcctggacatcggcacctccaaggtggtggcgctggtgggcgagtattcgccgggcaacccgatcgaagtgatcggcatcggctcgcacgaatcgcgcgggctgaagcgtggcgtggtggtggacatcgaatcgaccgtgcagtcgatccagcgtgcggtggaagaagccgagctgatggccggctgcgagatccgttcggtgtacgcctcgatctccggcaaccacgtgcagtgcaagaactcgccgggcatcgtgccgatccgcgacggcgaagtgacctggggcgacctggatcgcgtgctcgatgcggccaaggcggtggcgatcccggccgaccagaagatcctgcacgcgatcccgcgcgagtacgtgctggacgattcgcaggaaggcatccgcaatccggtgggcatgaccggcgtacgcctggaggtgcatgcgcacctggtggtgtgcgcgcagtcggccgcggccaacatcagcaagtgcgtgcagcgctgcggcctgcaggtggatgacctggtgctgtcctcgctggcctccagcgtggcggtgctgaccgctgacgagcgcgagctgggcgtggtgctggtcgacatgggcgccggcaccaccgacatcgccgtgttcgtgcagggcgcgatctgccacacggcctcgctgccgatcgccggcgaccacgtgaccaacgacatcgcgcacatgctgcgcacgccgaccccggaagccgagcagatcaaggtgcgctatgcctgcgccctggcccagctggccaccgccgaggagagcatccaggtgccgtcggtgggtgatcgtccgccgcgccgcatgccgcgccactcgctggcgcaggccgtgcagggccgttacgaggagatcttcgagatggtgcaggccgaactgcgccgctccggcttcgaggaactggtgcgcgccggcatggtgctgaccggaggcgcgtcgaagatggaaggcgtggtcgaactggccgaggaaatgctgcagatgccggtgcgcgtgggcatcccgcagcacgtcaccggcctgggcgaagtggtcggcaacccggtgcacgccaccggcgtgggcctgctgctgatgggcagccagatcgagcacccgcggcggccgtcgctgccgaccgggcgcgctggaagcatgttcaagaaactcaagacctggttccgcggcgagttctga

SEQ ID NO: 518540 - DNA, 750 bp, Stenotrophomonas maltophilia
atgaacgcgctgctgcgcatcttcgtctggctattggcgctgtcggtggttgcactgccggtggtggccgtggtcaatggctgggtcggcgccgagcgctggccgctggcgaagctgcgcgtgcatggcgagttcaagcgggtaccggccgagcagctgcagcaggtgctgctgccgtatgcgcgcgccgggttcttcgcggtcaagctgcaggatgcgcaggacgccctggaaaagctgccctgggtggagagtgcccaggtacgcaagcagtggccggacgtgctggaagtgaccctggtcgagcacaagccgttcgcgcgctggggcaccgaccgcctggtgtccgagcagggcaagctgttccccacgccgaagaagctgtccgacctggcgttgcccgaactggatggcccggacagccagaccggagaagtgatgaagctgtacagcgacgcacgtgcattgttcgcaccggccggcgtcgatgtgcgccgggtgacgatggatgcgcgcggcagctggtcgctggtgctgagcaacggcaccgaagtggtggtcggccgtgacgacgcgcgctcgcgcatgcagcgcttcgtcaaggtgctgccgcagctcaaccgtcaggacgcgccgatcgagcgcgccgatctccgctacaccaatggtttcacgctgagctggggtaccccggccacgccggcgaaaacgccggcgaccccggccagaagcacgcaggaaaggacatga

SEQ ID NO: 518541 - DNA, 963 bp, Stenotrophomonas maltophilia
gtgagtacgctgaccttcccgccgctgcgcgtgaccgacccggccgtgttcggccgcgtcgccgtgctgctcggcggcagctccagtgaacgcgaggtgtcgctggattcgggccgcaacgtgctcgaagctctgcagtcgcgcggcgtcgatgcgtttgccgtggatggcatcccggcgctggccagcgcgctggccgccggtggcatcgaccgcgtcttcaacatcctgcacggccacaacggtggcggtgaggacggcatcgtgcagggcctgatggacgccttcggcgtgccgtataccggctcggacgtgctgggctcggcgctgagcatggacaagatccgcaccaagcaggtgtggctgtcgctgggcctgccgaccccgcagtaccgcaaggtcgacgcctcgaacgtgcatgcgctggccgccgagctgggcctgccggtggtggtgaagccggccaacgaaggctccagcgtgggcatcagccgggtcaccgacgaggcgggcctggatgaggccgtggccctggccgcgcgctacgacggccagctgctgatggaacagatggtggtcggcgacgaactgaccgtggccattctgggcgacgtcgcgctgccgtcgatccgcatcgtgcccaagggccagtggtacgactacaacgccaagtacatcgccgaggacacccagtacctgtgcccgggcctggaaggcgatgccgaggacgagatccgccgcatcgcgctggccgcgttccgcgccgccggctgccgtggctggggccgcgtggacgtgatgcgcgaccgtgccagcggccgtttcttcctgctggaagtgaacaccgcgccgggcatgaccagccattcgctggtgcccaaggcggcgcgccaggccggcatcggtttcgaggaactggtgtggcgcgtgctggaacagaccctggaggccgcgcacgcatga

SEQ ID NO: 518542 - DNA, 1437 bp, Stenotrophomonas maltophilia
atgatccgtcgcctgcacgacaccaacgacctggtgcgcgcgttcccgcgcgtgcacttcgtcggcatcggtggcaccggcatgagtggcatcgccgaagtgatgctgacgctgggctacgaagtgtccggctcggacaacgctgacaacgtggcgacccgccgcctggccagcctgggtgcgcgcatcatgcgcggccactcggcagccaacgtgctgggcaccgactgcgtggtggtctccagcgccatccgcgaggacaacccggagctgatggaagcgcgcagccagcgcattccgatcatgccgcgcgcggcgatgctggccgagctgatgcgcttccgccgcggcatcgccgtggccggtacccatggcaagaccaccaccaccagcctgaccgctgcggtgctgagcgaaggtggcctggacccgacgttcgtgatcggtggccagctgctggccgccggtgccaatgccaagctgggtggcgggcagtggctggtggccgaggccgacgaaagcgatggcagcttcctgcgcctgaacccgctgatgtcgatcatcaccaacattgatgcggatcatctggagaactacggcaacgatttcgcccgcgtgcaggcggcgttcgccgagttcctgcagcgcctgccgttctacggcctggcggtgctgtgcatcgatgatccggaagtggcggcattggctgccaagaccccgcgccacgtgatgagctacggcatgagcccgcaggccgacgtgcgcgccgagaacgtggtgcaggagggctcgcgcatgcgcttcacgctgcgcttgccgcagggcaccagccaggaagtggtgctggcgctgccgggcaggcacaacgtgctcaacgcgctggccgccgcggcggtgggctggcagctcggcgttgccccggacgcgatcgcgcgcgcgctggaaggcttcgccggtgtcggccgccgcttcaacgacctgggcgaagtgaccaccgccagcggtgccaaggtgcgcatcatcgacgactatggccatcacccgagcgagctggaggcggtattcgccgccgcccgcgggggctggaccgacaagcgcctggtggtggccttccagccgcaccgctacagccgtacccgcgaccagttcgacaagttcgccgcggtgctgtccagcgtcgacgcgctggtgctgagcgaggtctatccggccggtgaggaacccattgccggtgccgactcgcatgcgttggcccgcgccatccgcgcacgcggccgcagcgagccggtggtggtgggcaaggccgccgagctggccagcgtgctgccggatgtactgcaggacggtgacctgctgctgatgatgggggccggcgacatcggtgccgtggctacccacatcgcagtggaaggcttcaagggggagggccaggcgtga

SEQ ID NO: 518543 - DNA, 1089 bp, Stenotrophomonas maltophilia
atgagcgcggccaccgatagcgggcgtccggtgatgatcctcgccggtggcaccggcggccacatcttccccggcctggccgtggcccgcgtgctgcgcgggcgtggcgtgccggtgacctggatgggggccgaaggcgcgatggaaacgcgcctggtgccgcagcacgacattgccatcgatacgctggccatcaccggcctgcgcggcaagggcaagctggccctgctggcggcaccgtggcggctgatgcgtgcactgcgcgcggccgggctgatcatccgcaagcgccagccgcgcgcggtggtcgcctttggtggctttgcctccggtcccggcggcatggccacgcgcctgcatggcctgccgctgatcgtgcatgagcagaaccgtgcgccgggcctgaccaaccgcatcctgtcgcgttatgcgcgccgcctgctgaccggtttcccgggcacctttgcccagcgcgaggaattcgtcggcaacccggtgcgtgcggaaatcgccgccattgcgccgccggagcagcgcttcgccgaccgtcacggcccgctgcgcgtgctggtggtcgggggcagtcagggcgcgcgtgcactcaacaccggcgtgccgcaggcgatcgccgcgctgggcgctgacgtgccggtgcaggtgcgccaccagagcggcgagaagatgcatgccgaagcggtcgaggcgtatgccaaggccggcgtgcaggctgagatcaccccgttcatcgccgacatggccgaggccttcgcctgggctgacctggtcgtctgccgcgccggcgcgtccaccctggccgagctgtgcgcggtcggtgtcggcagcgtgctggtgccattccccgctgccgtcgacgatcaccagacccgcaacgcggagtacctggtcgagcgcggcgcggcggtgttgctgaagcaggacggaacgctggccgacggcatcgccgcactgctgcgcgatctgtccgaaaatcccgcccgccgcatgcagatggcgcaagccgcgcgtgccctggccaaggtcgatgccgccgagcgcatcgccgatatcattctcgaggaagctgtatga

SEQ ID NO: 518544 - DNA, 1326 bp, Stenotrophomonas maltophilia
atgaacgacctgtcccgccaggcaacacgccttgaagccatcgaaggcagctacgacaagtggctgctgggcgcgatcatcgcgctcaccggtgtcggcgtggtgatggtggcctccagctcgatcgcgctgatgagcagcccgttctattacctcaaccgccacctgatcttcctggcggtgggtatcgtgctggcggtcatcgccgcccgcaccgagctgaagtcgatcgagcagtacaaccagatgctgctgctgggctgcttcgtgctgctgctggcggtgtttgcgccgggcctgggcagcacggtcaatggcgcacgccgctggatcaacctgggcatttccaagttccagacggtcgaggcggtgaaggtgctctacatcgtctggttgtccagctacctggtgcgcttccgcgacgaggtcaatgcgacctggccggcgatgctcaagccgctgggcgtggccggcgcgctggtggtgctgctgctgctgcagccggacttcggttcctcgaccctgctgctggcgatcaccgccggcatgctggtgctgggcggggtcaacatgccgcgcatgtcgatgccggtgatcatcggcctggtcggcatgagcgcgctggcgatcatcgagccgtaccgcatgcgccgcatcacctccttcctggacccgtgggctgaccagcagggcgacgggtaccagctgtccaacgcgctgatggcggtgggccgtggcgaatggaccggcgtcggcctgggcaattccgtgcagaagctgtactacctgccggaagcgcacaccgacttcatcttctcggtcaccgccgaggaattcggcttcctgggcacctgcgtgatcgtggcgctgtatgcgctgctggtcggccgcaccttctggctgggcatgcgctgcgtggaaatgaagcgccacttctccggctacatcgccttcggcatcggcctgtggatcagcatgcagaccttcgtctcgatcggcgtgaacctgggcatcctgccgaccaagggcctgaccctgccgctgatctcctccggcggttcgtcggtgctgatgacctgcgtggcgatgggcctgctgctgcgcgtgtcgtatgaactcaagcgcgccgagcgccgccaggccgtgcgaatcggtggcgccgaagacgccgcggccgagccagtggacgcgccggccgcaccgatggccaccggcgtgccgctgagcgccgccccggtcgcccccgcgcctgctgcagcgaacgccgcgcgcggcaccagccgcctgcagtcgcgcatcgaaccgaccttcgggaggctgtcatga

SEQ ID NO: 518545 - DNA, 1086 bp, Stenotrophomonas maltophilia
atgttgtatgaactggctcgatggttgcagcagttggagagcctgttcgggctgttcaactaccagacgttccgcgccatccttgccgcgctgacggccctgttcctgtcgctgtggctcggcccggcgatgatccgcaagcttgcccagttcaagggcggccagccgatccgcaaggacggtccgcagacccatttctccaaggccggcacgccgaccatgggcggttcgctgatcctgctcaccgtcaccctgtcggtactgatgtgggccgacctgcgcaaccgctacgtgtggctggtgctggcggtgatgctgtgctttggcgccatcggctggtatgacgactggatcaagatcgtccgccgtgacccgaacggcctgaagtcgcgctggaagtacctgctgcagtcgatcttcggcctggctgcgggcctgttcctgttctatacggccgacgtgccggcggcgctgacgttctacatcccgatgttcaagtcggtcgcgctgccgctggccggcatcggcttcgtggccatcgcctacttctggatcgtcggtttctccaacgcggtgaacctgaccgacggcctggacggcctggcgatcatgcccaccgtgctggtggcctgcgcgctgggcgtgttcgcctacgcctcgggcaacgtggtgttcgccaactacctgcagatcccgcagattccgggcgcaggcgagctggtcatcatctgcgcggcgatcgccggcgcgggcctgggcttcctgtggttcaacacctatccggccatggtgttcatgggcgacatcggtgcactggcgctgggtgcggtgctgggcacgatcgcggtgatcacccgccaggagctggtgctggtgatcatgggcggcgtgttcgtcatcgagacgctgtcggtgatgatccaggtcgcatcgttcaagctgaccggcaagcgcgtgttccgcatggcgccgatccaccaccatttcgaactgaagggctggccggagccgcgcgtgatcgtgcgcttctggatcatctccgtcgtgctcgtgctgatcggcctggccacgttgaaggtgcgctga

SEQ ID NO: 518546 - DNA, 1395 bp, Stenotrophomonas maltophilia
atgaagcgcaccctgctttcgctgatcgcacactgggccggcggcgagatccacggcgacgacgtggccatcgatgcggtcagcaatgacacccgcaacctggggcccggcagcctgtatgtcgcgctgcgcggtgagcgtttcgacggccatgacttcgcggccgacgcgcaggcacgcggtgccagtgcgctgctggtcgagcgcctgctgccgatcgaactgccgcaggtgctggtggccgacagcgaactggcactggccaggatcgccaccggcatgcagcgtgaccgtggcaccgaggtgttcgcgatcaccggcagcaacggcaagaccagcgtgaagagcctgctgctgtcgatcctgcagcaggtggcccagcacgcgcacaaggtggtctacgccaatccgggcaaccgcaacaacgagatcggcctgccgctggcggtgatcgatgcaccggaagatgccgactatgccgtctacgagatgggtgccggcaagccgggcgacatcgcctacctgaccgacatcgcccgcccgcgctacgcgctggtcaacaacatcgccccggcgcacctggagcggatgggcagcctgctcggcgtggcggtgaccaagggcgcgatctatgccgcgctgcccgccgatggcgtggcggtgatcaatgccgacgatgcgtacggccgctggttcgaacagcattttgtcggcaccccggcgcgctgccgcgtgctgcgctttggcctggagcattcggcagacgtgaccgcgcgcgatatccgcgccggtgcgcagggcagccagttcaccctggtcgcgccggccggcgaagcccgcgtggtgctgggcctgccgggccgccacaacgtcagcaatgcactggccgccgccagcctggcgctggccgccggcatcgacctggcacgcatcgcggcaggcctggccgaggcccagccggtgccgggccgccagatcgcccatcagctgcgcaatggcgcggtgctggtggacgacagctacaacgccaaccctggttcgctggcagcggccatcgatgccctggccgccgcgccggaagagggttggctggtgctgggcgacatgcgcgagctgggcccggatgccgaagcgctgcatgcgcaggcgggtctccgcgcacgcgccgccgggctcaagcgcctgtatgcgctgggtccgctcagcgccgccgccgctgccgccttcggcgacggtggccgtcatttcgccacccatgacgcgctgtcgcaggcgctgaaggacgagctgcacgccggcgtgcgctgcctggtcaaggggtcccgtggcagcgccatggacacgattgtcaaagcgctgctggcgcaaggagaggaatccccgcatgttgtatga

SEQ ID NO: 518547 - DNA, 1509 bp, Stenotrophomonas maltophilia
atgagtccttcgatgttgctttcgcagttgcttccggacgtggccctggcgggtcatgatcccgttctgaccggcctggtgctggacagccgtgccgtgcgccccggtaacgccttcgtcgccatcgccggtttcggcgcgcatggcctgggctttgtcgagcaggcgcgcgctgccggtgccagtgccatcctgttcgaaccgccggcaccggccgatctgccggcaccggccgatgcgatcgccgtgccgggcctgcgcgcgcgcatgggcgcgatggccgaccagttccatggcgcaccgtcacgggcaatggcgatggtcggcgtgaccggcaccaacggcaagacctccaccgtgcagctgctggcccaggcctggcacctgctcggaacgcccagtggcagtatcggcacgctgggcgccggactttatggtgccgtcgagccgaccggcttcaccacgccgctggtgctgcagatgcatgcgttgctggcccagctgcgcgacgccggtgcgcgcgcggtggcgatggaagtcagctcgcatgcgctcgaccagggccgcgtggacgccgtgcactacgacgtggcggtgttcaccaacctcacccgcgaccatctggattaccacggcgacatggccagctacggcgcggccaaggcgcggctgttccatcgcccgggcctgaaggcggcggtgatcaatctggacgatgccttcggccgccagctgttcgcgggcctgccggccagcgtgcagccgatcgggctgagctcccgtggtgccgaggacgccagcgtgcgcgccgaggcgctgcagcttgacggtcgtggcatcgccttcgaactggtcatcgacggccagcgcgctgcggtgcagtcgccgctgctgggccgcttcaacgtggacaacctgctggccgtggccggtaccctgcacgcgcaggggcagccgctgccgcgtatcgccgaagtgctgtcggcgctgcagccgatccgtggccgcatgaaccgcctcggcggcgagaacggcctgccgaccgtggtggtcgactacgcacataccccggacgcgctggagcaggcgctggacagcctgcagggccacctgcacggcgcgctgttctgcgtgttcggctgcggtggcgagcgcgataccggcaagcgcccgcagatggcggcgatcgccgagcgcctggccaaccaggtcatcgtcaccgacgacaacccgcgtggcgaagacggcgacgtgatcgtggccgacatcctggccggcttccagaacgccgatgccgtgaccgtgcagcgcagccgcgcgcgcgcgatcggcctggcggtgaagcgcgccggtgccggcgacatcatcctgatcgccggcaagggccacgagccgtaccaggaagtgaatggcgtgcgccatgactttgacgacaccgaagtggccgcggccgcactggcggccaaggccggtgttctagaggcacaggccggggagggcgcggcatga

SEQ ID NO: 518548 - DNA, 1845 bp, Stenotrophomonas maltophilia
atgagcaagaccggccgcaaccgcccgcgcaacgtcttcaacctgcgccagcgcctgcgctgggtcgcgctggcgctcggcctgtgctcggtgtcgctggtcggccgcgcggcctacgtgcagatcatcaacagcgacttctaccagcgccagggcgaggcccgctacctgcgcgagctgccgatcaagacctcgcgcggcatgatcaccgaccgcaacggcgagccgctggcggtgtccaccccggtcgcctcgatctgggtcaacccgcaggacctgctgcgttcgcccgagcgcatcccggagctggcccaggcggtcggcatgtcggtggatgagctgagcagccgcctgtcgcagaagtcggacaaggaattcatgtacctgcgccgccggatcaatccggacgaggcagagaaggtggtcgcgctgaagatcccgggcgtggcggcgcagcgcgagtttcgccgcttctacccgcagggtgaggcgatggcgcacgtgctgggcttcaccaatatcgacgaccgcggccaggaaggcctggaactggcgttcgacgaatggctgcgcggcaagcccggtgcgaagcgggtgatccgcaaccgcaagggcgagaccgtcgaaagcgatctgctgcgcgccgccgagccgggcaaggacctgaccctcagcatcgaccgtcgcatccagtacctggccttcaaggaactgcgcaacgcgctcgtggccaacaaggcggccggcggttcgatggtgatcatggacgtgaccaccggcgagatcctggccatggtcaacctgccgacctacaacccgaactcgctgaccggcgcgatccccgatacgcgccgcaaccgcgcggtgaccgacctggtcgagccgggttcgacgatgaagccgttgaccatcgccaccgcgctgcaggccggggcggtgaccaaggacaccatcatcgataccaacccgggctatatgaccctgggccgcttcaccatccgcgacgtgccgcgcaacaacggtgtgctcaacgtgaccggcgtgatcacccgcagttcgaacgtgggtgcggcaaaggttgcggcgaagatgccggaccagaccttctacgacggcgtgcgccgcttcggctatggctcggcgccgcacagtggtttcccgggggaatcggccggcgtggtgatgcgcccggcccgctggtcgggcaccaccaagaccaccatgtcctacggctacggcctgtcggtgacgccgctgcagatcgctacggcgtattcggcgctggccaacggcggcaggttgatcgcgccgaccttcgtcaagggccagcgcaacgagggccagcagatcatcgacgagaacgtcgcccggcaggtggtggcgatgatggaaacggtggtcacccagggcggtgccaagcaggcggccgtgctgggctaccgcgtggccggcaagaccggtaccgcgcgcaaggccggccccggcggttacgagcgcgggcattacaacgcgctgttcgccggcgtggtgcccgccaccaacccgcgctttgccaccgtcatcgtcatcaacgacccgcaggccggcaagttctacggcggcctggtctcggcgccggtctaccacaacgtgatggaaggcaccctgcgcctgatggacgtgccgctggacgacctgcagtcgtggctggccgcacagcagtccggcaaggtcggccattcggcttcgatcctgcctgcgccgccggccgagaccgcgctgccggtcgatgccgccgctgaattcgacgctgcgctgccgagtgcgcaagcccagacgccgcccgctacgggaggcacgcaatga

SEQ ID NO: 518549 - DNA, 264 bp, Stenotrophomonas maltophilia; identical to SEQ ID NO: 508047

SEQ ID NO: 518550 - DNA, 969 bp, Stenotrophomonas maltophilia
atgcgcccagaagcgcaggccggtcaccttccggtgtcgcagtcgccggcggtgcacctgccggtcctgtacacccaggtccttgaaggcctgagggtgatcgaaaacggacgttatctggatggcacgttcggtcgtggcggtcatgcacgtggcgtgctcacccagctcggtcccgaggggcgcctgctggtcatggacaaggatccggaagccatcgccgttgccgagcgcgatttcgcgccggacccgcgcgtgtccatcttccgtggcagcttcgcccagctgctgcagtgggatgcgacggccgaaggcctggacggcgtgctgttcgacctgggtgtgtcgtcgccgcagctggacgtggccgaacgtggcttcagcttcggcaaggacggcccgctggacatgcgcatggacccggacagcggtgaaagcgccgcgcagtggatcaaccgcgtggaagagcgcgagatcgctgatgtgctgtggacctacggcgaagagcggcagagccggcgcatcgcccgcgccatcgtggcccgccgcgagaagcagccgttctcccgcaccgccgaactggccgagctgatcgcctcggtgatgccgcgtgggaaagacaagatccacccggccacgcgcagcttccaggccatccgcatccacatcaaccgcgagctggccgatctggaagccgggctcgatgcggcggtggaacggctcaagcccggtggccgcctggcggtgatcagcttccactcgctggaagaccgcatcgtcaagcagtacatgaaccgcctggccaaggcgccgccggccaaccgccggctgcccgaggcggtcgcgttcgtgccgacgctggacctgatcggcggtgccatcaaggccaccgacgacgagctggccgccaacccgcgtgcccgcagcgccgtgctgcgcgtggcacagaagcgggaggccgatgcatga

SEQ ID NO: 518551 - DNA, 447 bp, Stenotrophomonas maltophilia
gtgttccagggcgagacggccatcacagttgacgacaaggggcgcatggcggttcccaccgcttaccgcgacctcgtcgcgcgcgccagcaacaaccgtctcgtgctgacctacaacccgttcgaagccggctgcctgtggctgtacgcagagtcggaatgggagcgggtccgcgacgatgtgatgtccaagcccaacacccagcgcgtcgtgcgcctgttgcagcagaagctggtcggctcggccgcccatctggaactggacggcaacggtcgcatcagcatccccgccagccaccgcggtgcggtgggcattgagaagaaggcggtattgctcggcatgggcgacaagttcgaattgtggagcgagcaggcgcatcgggccctgatccagcagacgttgtctgacgaggatctgggtgatgggttgctcgacctgaagttgtga

SEQ ID NO: 518552 - DNA, 753 bp, Stenotrophomonas maltophilia
atgcaccacccgcgctggcggctggtgatggccggcaaccgtgatgagttccacgcccgtccgacggcggcgctggccccctggcaggatgagacgtcggtcatcggcggtcgcgacctgcgctccggcggaggctgggccggggttggcgcctcgggccggatggcggtggtcaccaacgtccgcgacccgctggccgcccagaccgggccgtcgcgcggggcactggtggccgacttcctgcgcggccgcgagccggcggccgtgcatatcgaccgcctggcgaccgtggctggcgcctacgccccgttcaatctcctgctggccgatagcgacagcctggagtatctgggcaaccatcccgccgaacggcagaccctcggtccgggcgtacacggcatgtccaacggcgcgctggacgccccctggccgaagacccggcggctgatggcggcccttgaagcctggctgcaggaagacggggtcagatccctttcgcagcgcgaaagggatctgacctcgctctgggccgccctggccgacgaacaccgccccgccgacagcgacctgcccgacaccggcatcggcctggagcgcgagcgctggctgagcccggccttcattcgcggcgacgactacggcacccgcgccagcaccgtgctgctgatcgatggcgacggccacggcgagatccacgagcgccgcttcggcccgcagggtgtccccagcggacagagccacgtcattttctga

SEQ ID NO: 518553 - DNA, 141 bp, Stenotrophomonas maltophilia
atggccggccagcggccggcactaccgataaagaagaacgccggcttgcgccggcgtttcccgtttccagcagaaatggccgcagtgctgttcgtgcactgcgaggccggccaggacgcgcgcgagctgctggcgcgctga

SEQ ID NO: 518554 - DNA, 648 bp, Stenotrophomonas maltophilia
atgttcagggcgccgaccgcgcggccctggccatcgaccacgatcaggccattgattttctgggtttccatctgccgggcggcctccacggccagctggtcggcgccgatggtgcgggggttgcgggtcatcacatcggcgatcttcgcggtccgcacgtccagcgcgctgtccagcgcccggcgcaggtcaccgtcggtgaacaggccgatcagcacaccgtcggcatcgaccacggcggtcatgcccagccgtttgcggctcatttcgaccagcgcctcgctgaggctggcgtcggcgcccacgctgggcaggtcgtcgccggtgtgcatgacgtcggtgatgtgcagcagcaggcggcggccgaggctgccggccgggtgcgagcgggcgaagtcgtcggcggtgaagccgcgtgcatcgagcagggccacggccagcgcatcgcccatcgccagcgaggcggtggtgctggaggtcggcgccagcgccagcgggcaggcctcggccggcacgctcacgtccaggtggatgtcggcggcggtggccaggctggactgcgggcggccggtcatggaaatcagcaggttgccctggcgcttgagcaccggcagcagcatcagcagctcgtccgattcacccgagtag

SEQ ID NO: 518555 - DNA, 300 bp, Stenotrophomonas maltophilia
gtggccggcttcaccggggtgcacgtagaacgccggcgtgccggtggaggccagggtggcggcgatcttgcgggcgatgtgcccggacttgcccatgccggtggcaaccacccggccgcgactggccaggatcgcctggcaggcctgctggaaggcctcgccgaggcgggtggcgaccgcatcaagggcctgctgttcgatctcgaagacgcggcggccactggcgaccaggctggccggatcgacggaacgggggggcaggagggactcggccatgcggacgccacgcagcggaagtag

SEQ ID NO: 518556 - DNA, 828 bp, Stenotrophomonas maltophilia
atgttctatcacgtcatcgttgaaacaaatgagaaggttggcaagcaaggcgtaaatagagagtattttgaacttgacaaggcagacctaagggatgtcttggagcgcgtcgtctatccctaccttagcaagcaaggatttcaattcgacgggtattttcttcagcacagcgaggttcgccgtatcgccataaagcagacggagaagagctctcgagtgctctcgcagtacgaaaacgacaatatgcctgctggcataatcatgtttgtttcgccaagcagtgttatttcgtatgaaacacatgcgaaggacatcaccgcccaagtcttcgatgaggcgaaaactactatttcgcctgaagatctacccaagccttccgctatccgcgacccatccaaagtcttcattgtccatggccgtgatgacttggcaaaaacagatgttgcccgtttcgttgagaggctcggctttgaggccataattcttcacgagcaagctaattccgggcagacaatcattgaaaagattgaagcacatacgaacgtaggtttcgctgttgttctttacaccccctgtgatatcggtggctttgcaaacgagcatcagcggtcgcgcgcacggcaaaacgtagtatttgagcacgggtatctgatcggcaagcttggccgccacaacgtgtctgctctcgtgaaaggcgatgttgagattcccaacgacataagcggcgttgtttacgtgccgctggaccaccacggtgcttggcgcgttgctcttgctaaagagctccgtacggctggctattccgtggatatgaatcgtgttgtgtag

SEQ ID NO: 518557 - DNA, 1080 bp, Stenotrophomonas maltophilia
atgcgcatgaacaccgcggtcgtcgggctgctgctgatggcatcagcgctctccgcccacgcagatggcgcctggactgccggcgagcgccatggcaccacgacggtggccagtgcctccgtgcgcgatgcacagcaccgcgacaccctgcgctacacggtgtggtatccggcgccggccgacagcagcgaagtcgcgctggccatcggtccgcctggggcgcccctgttcgatgtcggtcgttcggcgttggatgcgccgctcgcgggcgctcgcctgccggtattgctgctgtcgcacggcaacggcggcagtgcacgcatgatgggctggttgggcacggcgctggcgcgggacggttatctggtgatcgcggtcgatcatcccggcaacaacggtgccgacgaaatgaccttgcccggcagcatgctgagctggctgcgcgcggatgacctgcgcgctgcgctggccgccgtgcaggccgatccgatgctgggtccgcacgtcgatcctgcacggctgggcgtggtcggcttctcggccggtggctacaccgcgctgctggccgccggtgcacggcccaacctgcagcggctgctggccttctgccgcgcgcatccggatgacggcgtctgccggccacaacaggagaccgccacgcacacgatggaggcgcgtgttgccgctgcgagctcacccgcgctttccccctggatctcccacgccaacgactcgcgcgcgatccctggcgtgcgcgcggcattcctgctggcgcccgcgatcgtgcaggcgttcgcgcccgagcagctgtcctcgctgaggcagccagtatcgatcatgctgggcgaggctgatacggttgcgccaccgcggagcaatggcgaggctgcacaggcactgattccgcacgcaacgctgcaacgcctgccggacgtgggtcactacgacttcctggcagcctgtaccgctgccggcgtgcagaggctgcccgagctatgcaacacgtcgatccccagggcagaaacccaccgggaagcggtggatgcagcaatgcggttcttcgcagacgcattgcgctag

SEQ ID NO: 518558 - DNA, 513 bp, Stenotrophomonas maltophilia
atgcttcgttaccgttctgccgcagtgctgatactcgccagtggcgtggtgctggttgcctgcacgccagcgccgcaggcaccgcggacagcggccgaggccgcgcctgccccagccgcgccggcgaccaccgccgccgagcccacgcctgtggctgcacgcagtgaatgcccctacccggagttcgatgtcttcctgaagcacttcggcaacgagatcacgctgcaggaaaaggccaccgccgacccactgctggacagctacatcgatgccgaggccgagccggaaccgcgcaaggtggaaagccggctggcgctgaccgacgtcgagtggccggtgatgccagatcccgctgccttggccgggcaggggcgcgagttgcaggtcagcacgctggccgatggacagcgccaggtgcagatccgcaggccggacagcagcgaccagcagacctacaccttcgcgcaggcgccgtgctggatgctggtcaagcgcgaggatgagtcgatctga

SEQ ID NO: 518559 - DNA, 1857 bp, Stenotrophomonas maltophilia
ttggccaggacaaagatcaccgaaggcgatattcgcgaccatatcgctgccaatctcgacctggtcgagcagggcttgaccttggtcgataccgaattccatttgccaaaccgacagggcgcttcgggctttctcgacatcttcgggcgcgatgcggtgggtaaactggtgatcatcgagattaaacggaccgacgcggcggcacgagaggcgatccaggagctgtataagtacgagtcgcttctgcgtgaaaaattcctgatcaaggccaccgatgttcgcttgattctcttgtcggtggagtggcacgagctagcgattccgtatgccgaatttgcggccgcagcaccgtttgaagtgaccgccggagccatcgtccttgatgggaagggcgttccggttgcgatcaatcccatcgttccgccgacgctttcggttgagcgcaagattggagtgcgacattttctttggggattcccggatgaggcggcggccgccaacgcggtcggtttgattgcgcagcgggtgcggcgcttcggtctcgatgacttcgtgctcatccagagccgtgcgaccaagccgatcctgaggggacgccattttctctatttcgcacagcgcgaattacgcctcgaggaatacatgaaactcatcgaggtcaatttctcgggctgccaactcgatgaatttcgtgagaccatctccgatctctccgagctcgaagaccaggttgcagaggcgtcggatgcgctttggcatttcgatggaggtgcgccctgccgggacctcggcgctgatacagccgagattgcccaccccgagaagggcaatgtctggtttgagagcggcgcgcaggaagacatcatcgttcatcgcttcggtcgcttcgacgacccatggcttgaggaccagacgatcatcgatgaaatccggggtgaaggcggcgaatccgactgtcgcctgcgtttctcggtgcgcacgaattctccaccgcagatgatggcgttgcgcaagagagtcgagaatgtattcttctacaatgatgcctggctcggcatcgtcatgcagctgatcagatatgccgagcgcaagggtgggtctgcgcggatcgatctcatcgtctatagcccggatgacattctgcgcgctatcgccgcatctgcatgtggtttccccggttatgtcccggccttcagtctcgaggttgaatgcaatggcacggtcgagcgcttctttggctaccccgaatgggatggctcgccgccggacttcgacaggattttcgtcgagcatttctcgggcgacagctccggttacttccttgcttgccacttcggcgcaaaccggtcgttgaacggcgacatcatggccgatctaggcttgagctacggggtcttccgcgagggcgcgcccagtcccgaacgagttcgcgtccaaggagcatcgattgttccagtcaagggcgcgatccgtccgatgaatcagatggccttggagcaccatgaggaggtaggaaagctcgtcgagatcttcatgaccaccgatcagggtttcgccaagacgatacgaaccttcctcaatagcgaacacagtatggccgaacggcagctggcggagatgatcgagaacgaagtctcacctgcggtcgatatgtattggagcggcgatatcaccgtttgcgatctctgccatcagccgttctcgccgatgcgctacatgatcgatgccatccttcagggcggcgtcggggcaaatgtctgtgcgttgtgctttctgcaagtcggacgaggaatgggtaccggtcgcggccaggtgtatgaggccagccgtaaaggctggcgccacgtcgccgggtga

SEQ ID NO: 518560 - DNA, 324 bp, Stenotrophomonas maltophilia
atgaaggatacgtacgatctgtatggtgctggaggcttggacctctattcggcgaggtgcacggcggaggctgcgcttggcgtgatttttgaagtgagggacagcgcctaccagggaggggtgtactaccgatatgtggggcgtgattcagagaatatggttctgaagatcaacgttgacccgtttgatggggagcccgcggaggttgcattcccgcagtaccccgtcctgctgtatgtgaattcgacacgaaggtcatctgaccttgaggaggccattgggcgttgcggggtgtttgaattgctccggcgtgagcgcttgtag

SEQ ID NO: 518561 - DNA, 570 bp, Stenotrophomonas maltophilia
atgaacttcgctcgcgtgcccatgctgttggcgctcaccgttgcctctacacccgcgctggccgacgactgccggttcgacgatcgcgccgagctgctcgcgatgtcgccggaggcgtttgaccatggcccaggacaaggctgggacgcgctggccgagcgtgcaggctgccagctggaaatcgcccagttgttcgctgcctatcgcaagcagccgaaagcggctgggcatagcgggctggcgtggcatgaggcaacgatacgcgccgatgcgggacagcgcgatcctgccattgccctgatgcgcttgacctacacgccccacggtgccgatcccgagggatggaatcactacgtcgatgccaccatcgccttcctcgatgatgatctgccggcactgaaacgggcacgtgcgcggctggcaaaactcccgctgcccgcaggcagcgcacgtgagctgggcgatgctcggcgatcggcatggccaccgcgactgcagatcgtggattcactgatccgctgcatgtaccaaccctacgcgttggcctcccgatcctgcccggaagcctag

SEQ ID NO: 518562 - DNA, 990 bp, Stenotrophomonas maltophilia
atgtcccacccgctgtaccgcccgcgccgcatgcgccacgacgagttctcacgccgcctgatgcgcgagaacacgctgaccaccgacgacctgatctacccggtgttcgtgcacgaacaggccggccgcaccgcggtgccgtcgatgccgggcgtggagcggctgtcgatcgaagagctgctgaaggtggccgaagaggcactggaactgggcattccggtgatcgacctgttcccggtgatcgacccgtcgctgaagtcgctggacgcgtcggcggcgtggtccggagacggcctggcgcagcgggcgatccgtgcactgaagtcgcgcttcccggagctgggggtgatgaccgacgtggcgctggacccgtacaccacccatggccaggacggcatcatcgatgacaagggctatgtgctgaacgacatcaccgtcgacgcgctggtcaagcagtcggtgtcgcatgccgaggccggcgcggacatcgtctcgccgtcggacatgatggacggccgcattggcgccatccgtcgtgcgctggatgccgacaaccacatcaacgtgcgcatcatggcctactcggccaagtacgcctcggcgttctatggcccgttccgtgacgcggtgggcagtgccgccagcctcggcaaggccgacaagaagacctaccagatggacccggccaacggcgacgaggccctgcgcgagatcgcgctggacctggaagagggtgccgacatggtgatggtcaagccgggcatgccctacctggacctggtgcgccgggtgaaggaaaccttcggcgtgccgaccttcgcctatcaggtgagtggcgagtacgcgatgatgaaggccgccttcgccaacggctggctggacgagcgcgcctgcgtgctggagtcgctgctcggcttcaagcgggctggcgccgatggcgtgctgacctatttcgcgccgcaggtggcgcgatggctgcgcgagcgctga

SEQ ID NO: 518563 - DNA, 798 bp, Stenotrophomonas maltophilia
atggcagatcagacattcaccgcgttgatcgatcccaccctggcggacgccggcggtgatcctgcggtgctgtcgtcgcaactgcgcgcaactggacgacgccgcacagcacgccaccggcatgtgcgcggccagctgctgggtgtccaccacggcatgctgcgcatcgaagccggggatctgcagtggctgcttccggccgggcacgtcgcatggataccaccctcgctgccccacgcactggtggaggcagaggatttcgatggctggagcctgtacttcagcgctgcggcctgcatggaactgccagcgacaccacgcattttccagcccagtacgctgctgcaggccgcgacggctcgtgcactgcagtggccccatcgggtgctggatgctgcgcaggagcgcctggccggcgtgattgccgatgagatcagcgccagcacgccgctgccgcttgccctgccgcaaccgcgcgaccgacgcctgcgccgtatcgccgccgccctggcgcgcgccccgcacgacaaccgcagcatcgacgactgggccgccagcaatggcttgtccagccgcagccttgcgcgtcactggctggccgagacccacctgacactgggccaatggcggcaacgactgcgcgtgctgctggcgctgccacgcctgctggcgggtgagccggtgatcggtgttgcgctgtcgatgggctacgacacgtccagtgcgttcatcgccgtgttcaagcgcgagatgggggtgacgcctgcgcgctacggaaaaggggacggaggggattaa

SEQ ID NO: 518564 - DNA, 711 bp, Stenotrophomonas maltophilia
atgcctcgacaagcgcgcctgatgctggcaggccagccttatcatgtaacccagcgcggtgtgaacaagggggccatcttcgttgacgacatcgaccgtcagctcttccttcgtctgtcgcacggcgccttcatgaagcatcgcgtcgcgctgcacgcgtacgtactgatggacaatcacatccatctgttggcgacaccctccacccaccggggcttggcagacgccatgcgcatgcagggaaacaattacgtgcaggcattcaaccagcgccatgaacgcagcggccccctctggcaagggcgttttcattcatcgatggtcgacagcgatgcctaccttctcagcgtatcccgctacattgaacgcaatcccgttcgcgccggaattgtcgtttccgccgaagaccatccatggtccagcgtgcacgggaacctgcagcgccgcgatgatccattgctgacaccgcatcctgcattccagtcactggcgccaacccaacaccgcagggcaacgctgtatgcggagttcctcaacgacgcaaatgcctctgcagacgtgccagtgatccgcgcccacagcgcaagacagcggcctctgggaaacaccgcattcctgcggatggtggaagaaacgctggggcgttccgtggaactgcgcaggccggggcggcctcgaaagaaggggacaggagaggcagaaacgacttaa

SEQ ID NO: 518565 - DNA, 216 bp, Stenotrophomonas maltophilia
gtgaacctaccaaccgaaccccgcgatggggaagagcacgcgctggcagaggcattgcgtgagcaggcgcagcaggaagaagcgccggatgtgagcgaggcgctgcagaagcgcattgccgctgaatcgcgcgacagtggtgtgtggtacgtggtggtgcaggtgttgctggttggggcgttggtggcggcaggcgtctggtatttctggcactga

SEQ ID NO: 518566 - DNA, 738 bp, Stenotrophomonas maltophilia
atgggcttttccactgtccagatacccatgatcaccaaggatgacctgttaagggagttcggcgagctaggcgaagcccatggctgttactttggcaaatacgtagttgcgacgttcacgattcactgctgcctgcgaaacaccaacgggcacgatctggcgatcacctccaaggacatcgctgatccggaattcgccgcgaacgttctgttgaacgcgccgcatcatctctcacacgatgggccaacgatctttgaaattccgtccagcgcctatggtttcacccacgcgttagcggttcccgccacgtatcacgggctactgaaccgcaacgccaatcgaaccagcctgttcctgtgcctgccgatcttccgctgcgagttcagcggcaatgagtcggtggaggagttcaagtggtccacacatcacatcgttgacgtcaacaactggcataggaccaggcagccgaagattagcgtgtacttcgacaatccccgcactggcggcggaacggacggggacggcgcaatcgttagcctggagacgttagtagccgaaatcgacaacctcaacggcgtgggcaacggcttcatcgagatcaccaacttccgcggcgaggtgatcgaggtgctgtcgccagcggaaggccactatgcgttgatccgcaaccgcaaggatgaagaagcgatgggtcgcgcgcggctggtggcagccgtggagacgttcaccaccagctga

SEQ ID NO: 518567 - DNA, 1077 bp, Stenotrophomonas maltophilia
atgacaggtgccgttggcttgcgacgcgtaccccgtgcgttcgtcgaaagctatcccgtccgcttgcctccggaagcagagcagaagcgcatcgcgcagaagctagatatcctcgtggcgcgggtcaatgctctcaaggcacatatagatcgcacccagaaattgattgaacgaattcgagaatcaacccttagctttgcgtcttctggaatgctatctgaggactggagatcattgaatcctggtgcgaaattccagctccacagtaccaagctcagtgcgcgaactcgacgcggcgttccaagccatgtagcaatgcccgacacaatcagttccttcaacgtaccaaatggatggatatgggcgtcagcggctgagctccttagggccggtgcttttatagatatcaaggatggaaaccacggtgcaaaccatccaaaatccaaggagctgggcaccgacggacttccttttgtcactgcggcaaacgtactaacgactggaagaatagactacgaagctgctccaaaaatttcaggaactcctctaagtcgaattcgagttggattcgctgaaccgggagacgtcgtatttacacacaaaggcacggtagggagagtcgcaattaacgacagaccctgcgtacttacgcctcaaacgacatattacaggttggatagcagccgagtttcaagcaagtatttgcgaattttcctccaatcacccctgttcactgctcagaccgccgtggtgaagtctcagacgacacgcgatttcgtacctatcaccgctcagtacccactctttcatcttttaccgcccctaccagagcaattggagatcgtacgccgagtcgaacagctcttcgcaatcgctgaacagctggaagccaaggttgctacggcgaaaaaacgcatcaacaccctgacacagagcatcctcgccaaagccttccagggcgaactggtgccccaggatccgaacgacgaaccggccagcgtattgctggagcgcatccgcgcccagcgcgctgcggcgcccaaacccaagcgtggccgcaaggccgcagccaactga

SEQ ID NO: 518568 - DNA, 1248 bp, Stenotrophomonas maltophilia
gtgaaccgggcactggacgcgctcgggctcgacaccggcgccgacgaacgggcgatcaagcgcgcctacgcgcagagactgcgcgcggcgcgcccggacgaagacccgatggcattccaggcgctgcatgaggcttaccaggaggccctgcagtgggtccgcaaccgcgcgcaatggcaggaggaagacggtgcagaggcgctgtcggccccacctgcagacaacagcccagccggcccactggcgccgtacgacagccattcgccgatggaccacatgccggtgctgcatcacccgtgcacgttcgactcccacgtaccggacgaggtgggggagccgtcattgaacctgccctggtttgcacgcctgctgatccacaccgcggccgacgccgacccggccgacttcgagcactggctggcccatcgcccggaactgtggtcactggccgacaggccacgcatcggtgacgtggtgctgcagcagctgctgcaccagggcgggcccctgtgcgagtccaacttcgatctgctcagccggtacttcggctgggacgagatccggagcgataccgatccttgccggatccatgcacggcgcaacctgctgcatcgccactggcagctgcagccgcgcaaccacacggccctcaccgcagccctggatcgaccgcaggaccgggtgtccgcaaccgaggcccatgcccgcgtggaacgcttgacccgatcgtggcactggctgcaatcgctgctgtcggccagcgttcccgggcgtgctggcaccatgcggcaaacgatgcagcgtctgggggtgcatggcgtccgtgacacgctggcgccactggacggggatcaggtcgccttctggatggcgatatcccaacccgggcgcttcaatctgatgaagatgcaggtggcaatagtccgctgcctgctgggcgctctcgtcgtactggccgtcctggcggcgctggcattgctggatgatgccgcccgacccatcgcgatcagcacgtccagcatgaagcacgtggcagtccttgcctcggtggtcatcgtgtctggcgtcctcatgctgacgcccttcattggaacgcccccatcgcggacggcgtccgcgccagcgtccgccgggccatcatcgccgctcgatggacaaggcatgcagacgcatggaccccgcccgcgcaggccagtgccctcattcgccgtcgtgagccggatcgaccctggcacagacggcgattga

SEQ ID NO: 518569 - DNA, 246 bp, Stenotrophomonas maltophilia
atgtccgtcttcgaattcagcgcgcgatggaaagaagagctggtctgcacaggcccgcatggctcgttcgtgcttgagctggcaatgggcaggttgacggcctacctgccttccgaagaggtattccgaagcaacgccccctcgtgggcggccgatctctggcctcagctcagagacgagcttgaactgtggtgcgtgatccatcaggcagcgttggtcgtggatcccacggcccgggtctactga

SEQ ID NO: 518570 - DNA, 579 bp, Stenotrophomonas maltophilia
gtgctgcaggcgctcaagaacgaactcgcacggttcggcgccgacaacgacgcgcttgaaaccgaacgcggccgccgcatgctcaacatcacgccggagaccggtgaattcctctccgtgctggtgcgcttcggcactgcgcgcagggtactggaggtcggcacctccaatggatactcgacgctgtggctggccgaagccgccgctgccatcgatggccacgtgaccacgctggagtttgccgaagacaaggcggcgatggcacatgcgaacttcgcacgcagcggtctggccgagcacatcacgctggtgcacggcgatgccgggcagtggttggcacaggccgccgatgccagcatcgatctgctgttcctcgattcggaccgcggccagtacgccggctggtggccgcagctgcgccgcgtgctgtgtgcgggtggcctgctggtggtggacaacgccacctcgcacgcggaagagatggaaccgctgcgggcgctgctggaggctgacgcgaacttcagcacaagcctggtgccggtgggcaacggcgagctgctggccgtacgcaacgcctga

SEQ ID NO: 518571 - DNA, 2535 bp, Stenotrophomonas maltophilia
atgaatggcgacaatggaacgtcggcgccgcacaaccagcaactgcgcgccctgctgttcaccgacctgtgtgactcgctgctgctggtcgaacgcatcggcgatgtcgctgccgccgaactgttccaggaacacgaccggctggtgctggcgctgcagcagcgctggaacggccagctgatcgatcgctccgacgggttgttcatgctgttcgagcgcccgatcgacgcgcttggcttcgcattggattaccagcgtgggcttcggccgctggggcagagacacgagatccatctgcaggcgcgggccggtctgcatgtgggcgatgtgctcacctgggagaacagcgccgaggcagtgcgggcgggcgccaaggcgatcgaggtcgaagggctggccaagccgacggcggcgcgcctgatgcagctggcgcagccggggcagatcctgctgtcggcggtggccgaatcgatcgtgcgtcgctccagcgcagcgttgggagccactgccgaaggcctgcagtggcgatcgttcgggcgctggcgcttcaagggtgtcagccagcctgccgaggtctttggcgtgcaggcggcggacatgccgacgccgggacggctgcggcacacggccaaggcccggcgcgatctgccgttgtggcgccgtccgctggcgatggcggcgcaggccgcggtactgctggccgccgtgctcggggtctggctgctgacccggccgcagccggccatcgccttcgccgaacgcgactgggtggtgctgggcgggctgcgcaacctgaccggcaatccgttgctggacgatgcactggaccaggcattccggatcagcctcgagcagtcccgctacgtcaacgtggtcagcgacgatcgcgtcggccgcaccctggaaatgatgcgcaagccgctggatggtggcgtccgcgagcgtgccgatgccgccgccgtggcagtgcgcaccggcgcacgcctgttgttcgtgccatcggcgacccacatcggcggccgcacccgattcagtgtggaagtggtcgaaccgtcgaccctgcgtaccctggccgtggtatcggccgatgccaaggccggtgcggtgctggccgcggtggacgatgtttcccgccagctgcgcgatcgcctcggcgaagaggcgacgctgatccagcgcgacagccaggcgctgccggaggtgaccacgggcagcatggacgcattgcgcgcgtttgcgctgggccagaagcgctacagccgcggagacttcaccggtgcgatggcgttctacgagcaggcgctgcaggtcgatgctgattttgcgctggcctggctgggccagagccgttgccgctttgccacgatgaactaccacgaagccgcgcgcctgctggaggaggcgcgccgtcgctcggcacacctgacgccacgcgagcgcctgtacgtgcagaactggatgctgcagatccgcgatccggatcgcgccaccgacggttgggcgcgcatggccgagctgtatccggattacatgcccgcaagctacaacgccggcctgaacctgttccacgaaaaccgttttgccgaggctctggtgctttccgggcgggttgcgcagagcagggtcgacctcccggagatcgcgcaggaccagtacggccgtgcgttgctggcgagcgagcgctatgccgaggctgacatcgcgttcagccgtgctgccagcaatggctgggagggggcactgatgcgccaggcatcagtggccgccgcgcgcggtcagttcggaaaggccaatgcactgctggcgcgcattgctccggacaatttccacgccggcaatttcgcgacgacgattgcgctggaccagggcgatatcgagggcgcgatcaggcgtgccgagcaggggcgggtgcacgccgggcagcgccagggcatggatcgatacaacttcgatatgcccctcgccgttgcctacatgacggctggcaggagatccaacgcgctcgctgtcgcgcgggcggcagccactgcgccgttcgccgggctgagcggcgaaccggccgttgagacggtggatcgcctggtggcggcccacgcggcagccctgctggcattgcggttgggtgacgcggcaccggccagagcggtgcaggcaaggatgaagctgctgcaggaacgtcccgacagcagcgtgctgcggcaatatatcgcattgctggctgcgcggctgatgcagcatgaaggtcagccccggccagcgttggacctgctggtgccgctgttgaagacgcagccccgcctgcaggtgcggttggcggtgcgcgagctggcactggaagccggcctggtcgatgtcgcccagcagcagacccgctggttgcgtgatcgccccgggctggcgtacgccgaagcgcagtgcagtttctgcctgcaggcactcaacgttgtggacgtgcggaagcttacggcggtgccggctggcgctgccggcaccgacccggtggtggctcagcgcagcgtgcgcggcgcgccgtag

SEQ ID NO: 518572 - DNA, 954 bp, Stenotrophomonas maltophilia
atggacagccttgccgcaacgcccccgcacgcctgcagcggacatcctgccgccccgacccacgccagacggcgctgcctgcccgtatgggcgatggggctgctctgcctggccggatgggcccacgcactgccttcacctggtccggcatgtgcattggccaccgcgcccagtgaagccctcatcgatgttccgttcgaggttgtcgacgggcgcatctacctgcaggtacaggtcaatgacgcaggtacgttccgcttcgccgtcgataccggtgcgagcggcgtggcgcgcgccgacacccgcctggtgcgcgcgctgcacctgccaatgggcggcaccgcctcccattccgatggcgtgcgcaccgccgatgccgccacggtccgcttcgattcgcttgccctcgggggcgtgcgccgccagggcgtggtggcgatcacccgcgactacaacgcccgacagtccgaggccgccgccttcgatgggatcctggcgcgcgacttcttcgacgatggcctgctggtgctcgacttcccacgcaagcggctgcgctttcgtcgcgaccatcgattgctgccggagcagccgggcacgctggcctacactcgagcgttccgcattccggtgcagatcggcacgctaacgaccgaagcacagttggataccggcgcgaacgtggcgctggtgctgcccgctgcacttttcgagcgggtgtccagcggcgcggttgtcgcgggcgacccgcttaccctcagccacggccggatccagagcggccgggcacggctggacgtgccgctggtggccggtggcctggcgctgcgcaatctcgaggtgcgcgtctctgatcactacccggagccggtgatcggcgcgcatgcactgcaggaaacgacggtgctgatcgacgcgcgcagcaaacgcgtggcgctctgtccacagcagcgttga

SEQ ID NO: 518573 - DNA, 1407 bp, Stenotrophomonas maltophilia
atgaccacccgtcgcgcgttcatcgcaggctgtggagccgccgttgccgccagtgcctgtacgcggcgcggcgcgggcatcgccaacgacatcagccagctggaacccaccgaagtcgccggggtgcgggccattgccgaaacggcggacctgcaggcggggctgcagcagcaccgcggcgctgtctgcgtggccggtggccgcttcagcatgggcggccagaccagcgcgaccgccgccctgcagctggatctgacgcccagcaaccgcctgctgtggctggacatcgcccgcaaggctgtgcgcgtgcaggccggcatgcgctggcgcacgctgcaggaatggctggacccgcacaacctgtcggtgaaggtgatgcagagcttcagcaacttcaccgtcggcggctcggtctcggtgaactgccatggccgctacgtcggcagcggcagcatcgcctcgaccctccgcgcgctgcaggtggtgctgcgctccggcgaggtgatcgagacctcgcgcaccctgcatccggagctgttcgctgcggtcatcggtggctacggcctgatgggcgtggtcagcgaagtcgaactggacctggccgacaacgaccgcatggcgcggcacatggaacgggtggcgctggccgactacccacactggttccgcgagaacgtggcgtcacgcagggatgcgttgatgcacaacgccgacctcatgccaccccgtttcgacgccccggtgaccgtgacctggcgacgcagcacggcaccactgaccgacacccggcgactgataccggtgggcgcggactatgcccacgagcagaacatgatctgggccgtcaccgagctgcccggcgggccacagctgcgccagagctcggtggtgaagcagcagatggccgaaccgcgggtgatccatcgcaatctggaagcaagcctggatgtggcggcattggagccccgcacccgtgcgatgtcgacctacctgctgcaggagtacttcattcccgtgcgcagcttccaggccttcgccacgcgcatggcggcgatcctgcagcaccaccgcgtggacgccttgaacgtgtcgatccgccatgcaccggccgacgcaacctcgttgatgacgtgggcgggcgaagaggtgttctgcttcgtgctgtaccacaagcagcgccggcacccctggggcgacacgctgtccacgcgctggacccgtgccctgatcgacgctgcgttggactgtggcggccgctattaccttccctaccggccgcacgccacgcgtgagcagttccagcgcgcatacccacagtgggaggcgttcgttgaaaccaagcgccggtacgacccgcagacgcagctggtcaaccatctctggcagcggtacatggcggcagcatga

SEQ ID NO: 518574 - DNA, 381 bp, Stenotrophomonas maltophilia
atgaccgacaacgccacggcaactacccccctcgacccgaaagcccttctgctcgactacatcaagaccaacgatcccacggccgccggcctcaccgatccgaacaccgtccccctcgactatcccattcagcgtggcgagcaggtcatcagcgccgtgacgctgcgcaagcccaatgccggcgagctgcgcgggatcaagctggtggatctgctgcagatggacgtgaccgctgtggccacgctgttgccgcgtatcaccgagccgaccctgaccgccgctgatgtgaacaagctggacccggctgacctggtcgccatcggcacccacacggcaagttttttcgtgccgaaggcgcagcgggaatccctcaacgggtag

SEQ ID NO: 518575 - DNA, 1260 bp, Stenotrophomonas maltophilia
atgcgattgaagttcaccacccgtggccgcgctgccctggtcaatgccgcgcataccggcaccaaggccgtcaccgtgacccagatcggcgtgacggatcgagccttcacgccggaccctgcaggtggcgacctggtactgccaggcgagcgcaaacgcctgaccaccttcggcggcaaggccgttgccgatgacgtggttcacctgaccgtgcgcgatgaatcgaacgattcctaccccttgcgcggaatcgccctctatctggaagacggcaccctgctggccttgtacgggggctcggaggtgatcctcgaaaagtcctcgcaggccatgatgctgctggccctcgactggatcctggccgacatggacgccaaccagatccagttcggcaacaccgattttctcaaccctcccgcaaccaccgaaacgcagggcgtggtcgagctgaccaccgacgaagaggccatcgccggtagcgaccgccagcgtgccgtgcactctgccgccctgcatgcagcgatgaacgctcgcctcggcgcaggcgctcccacgacactgaccaagaccatcctcgcgcgcgacaatgccaacgacgtgcgcaaggatctcgggctgaaggctgccgcactcaaggatgagggggccggaagtggccttgatgctgacaccgttgacggcaagcacgcggccgactttgcggccaagcagcacacgcataccctcgctgatatcaccgacctggtcgtcacccgactgctgccggccggcatggtggcccacttccccacggcggcggcgcccgagggttggttgcgctgtaacggtgccgacgtgagccgcacaacctatgccgccctgttcgcggtaatcggaaccacgttcggcagcggcagcggctcgacgttccgccttcctgatctgcgcggcgagttcatccgaggctgggatgacgcgcggggtgtcgactctggacggctgttgggaagcacccaggcatgggccaacggcgagcacgtccacggcatggagctttggacaaccaccatcacaccgggcaaatctgatatccctgccggcaatccgctgctggcccccgcacctgcgctgggcgatggcggcatcatccgcacgaagggtcagacaagtggcacgagcaacaatgcagcgagagcttcaaccaccgaagggcccatggccaacgcagccagcgaagcccgtccccgaaacgtcgcgctgttggcgtgcatcaagttctga
